United States Patent Application Publication US 2024/0401047 A1 - sequence listing, part 2

SEQ ID NO: 3451 - RNA, 76 nt, synthetic construct; identical to SEQ ID NO: 625
  source 1..76: mol_type = other RNA
  modified_base 1: mod_base = OTHER; note = 2'-Omethylguanosine phosphorothiorate
  modified_base 2: mod_base = OTHER; note = 2'-Omethylguanosine phosphorothiorate
  modified_base 3: mod_base = OTHER; note = 2'-Omethylcytosine
  modified_base 4: mod_base = OTHER; note = 2'-Omethyluridine
  modified_base 5: mod_base = OTHER; note = 2'-Omethylcytosine
  modified_base 6: mod_base = OTHER; note = 2'-Omethylcytosine
  modified_base 10: mod_base = OTHER; note = 2'-Omethylguanosine
  modified_base 11: mod_base = OTHER; note = 2'-Omethylcytosine
  modified_base 12: mod_base = OTHER; note = 2'-Omethylguanosine
  modified_base 13: mod_base = OTHER; note = 2'-Omethylcytosine
  modified_base 14: mod_base = OTHER; note = 2'-Omethyladenosine
  modified_base 15: mod_base = OTHER; note = 2'-Omethyladenosine
  modified_base 16: mod_base = OTHER; note = 2'-Omethyluridine
  modified_base 17: mod_base = OTHER; note = 2'-Omethylguanosine
  modified_base 18: mod_base = OTHER; note = 2'-Omethylguanosine
  modified_base 20: mod_base = OTHER; note = 2'-Omethyluridine
  modified_base 22: mod_base = OTHER; note = 2'-Omethylguanosine
  modified_base 23: mod_base = OTHER; note = 2'-Omethylcytosine
  modified_base 24: mod_base = OTHER; note = 2'-Omethylguanosine
  modified_base 25: mod_base = OTHER; note = 2'-Omethylcytosine
  modified_base 33: mod_base = OTHER; note = 2'-fluorouridine
  modified_base 35: mod_base = OTHER; note = Cytosine phosphorothiorate
  modified_base 37: mod_base = OTHER; note = Adenosine phosphorothiorate
  modified_base 38: mod_base = OTHER; note = Adenosine phosphorothiorate
  modified_base 49: mod_base = OTHER; note = 2'-Omethylcytosine
  modified_base 50: mod_base = OTHER; note = 2'-Omethylcytosine
  modified_base 52: mod_base = OTHER; note = 2'-Omethylguanosine
  modified_base 54: mod_base = OTHER; note = 2'-Omethyluridine
  modified_base 55: mod_base = OTHER; note = Uridine phosphorothiorate
  modified_base 56: mod_base = OTHER; note = 2'-Omethylcytosine
  modified_base 57: mod_base = OTHER; note = 2'-fluoroguanosine
  modified_base 59: mod_base = OTHER; note = 2'-Omethylguanosine
  modified_base 61: mod_base = OTHER; note = 2'-Omethylcytosine
  modified_base 65: mod_base = OTHER; note = 2'-Omethylguanosine
  modified_base 75: mod_base = OTHER; note = Cytosine phosphorothiorate
  modified_base 76: mod_base = OTHER; note = 2'-Omethyladenosine

SEQ ID NO: 3452 - RNA, 85 nt, synthetic construct; identical to SEQ ID NO: 3297
  source 1..85: mol_type = other RNA
  modified_base 1: mod_base = OTHER; note = 2'-Omethylguanosine
  modified_base 10: mod_base = OTHER; note = 2'-Omethylguanosine
  modified_base 11: mod_base = OTHER; note = 2'-Omethylcytosine
  modified_base 12: mod_base = OTHER; note = 2'-Omethylcytosine
  modified_base 13: mod_base = OTHER; note = 2'-Omethylguanosine
  modified_base 14: mod_base = OTHER; note = 2'-Omethyladenosine
  modified_base 15: mod_base = OTHER; note = 2'-Omethylguanosine
  modified_base 16: mod_base = OTHER; note = 2'-Omethyluridine
  modified_base 17: mod_base = OTHER; note = 2'-Omethylguanosine
  modified_base 18: mod_base = OTHER; note = 2'-Omethylguanosine
  modified_base 19: mod_base = OTHER; note = Uridine phosphorothiorate
  modified_base 20: mod_base = OTHER; note = 2'-Omethyluridine
  modified_base 21: mod_base = OTHER; note = Adenosine phosphorothiorate
  modified_base 25: mod_base = OTHER; note = 2'-Omethylcytosine
  modified_base 33: mod_base = OTHER; note = 2'-fluorouridine
  modified_base 34: mod_base = OTHER; note = 2'-Omethyluridine
  modified_base 35: mod_base = OTHER; note = Cytosine phosphorothiorate
  modified_base 37: mod_base = OTHER; note = Adenosine phosphorothiorate
  modified_base 38: mod_base = OTHER; note = Adenosine phosphorothiorate
  modified_base 41: mod_base = OTHER; note = 2'-fluorocytosine
  modified_base 42: mod_base = OTHER; note = 2'-Omethyladenosine
  modified_base 43: mod_base = OTHER; note = 2'-Omethyladenosine
  modified_base 44: mod_base = OTHER; note = 2'-fluorouridine
  modified_base 58: mod_base = OTHER; note = 2'-Omethylguanosine
  modified_base 59: mod_base = OTHER; note = 2'-Omethylcytosine
  modified_base 61: mod_base = OTHER; note = 2'-Omethylguanosine
  modified_base 63: mod_base = OTHER; note = Uridine phosphorothiorate
  modified_base 64: mod_base = OTHER; note = Uridine phosphorothiorate
  modified_base 70: mod_base = OTHER; note = 2'-Omethylcytosine
  modified_base 74: mod_base = OTHER; note = 2'-Omethylcytosine
  modified_base 82: mod_base = OTHER; note = 2'-Omethylguanosine

SEQ ID NO: 3453 - RNA, 73 nt, synthetic construct; identical to SEQ ID NO: 935
  source 1..73: mol_type = other RNA
  modified_base 1: mod_base = OTHER; note = 2'-Omethylguanosine phosphorothiorate
  modified_base 2: mod_base = OTHER; note = 2'-Omethylguanosine
  modified_base 3: mod_base = OTHER; note = 2'-Omethylcytosine
  modified_base 4: mod_base = OTHER; note = 2'-Omethyluridine
  modified_base 5: mod_base = OTHER; note = 2'-Omethylcytosine
  modified_base 6: mod_base = OTHER; note = 2'-Omethylcytosine
  modified_base 49: mod_base = OTHER; note = 2'-Omethylcytosine
  modified_base 50: mod_base = OTHER; note = 2'-Omethylcytosine
  modified_base 51: mod_base = OTHER; note = 2'-Omethylguanosine
  modified_base 52: mod_base = OTHER; note = 2'-Omethylguanosine
  modified_base 53: mod_base = OTHER; note = 2'-Omethylguanosine
  modified_base 61: mod_base = OTHER; note = 2'-Omethylcytosine
  modified_base 62: mod_base = OTHER; note = 2'-Omethylcytosine
  modified_base 63: mod_base = OTHER; note = 2'-fluorocytosine
  modified_base 64: mod_base = OTHER; note = 2'-Omethylguanosine
  modified_base 65: mod_base = OTHER; note = 2'-Omethylguanosine
  modified_base 66: mod_base = OTHER; note = 2'-Omethylcytosine
  modified_base 67: mod_base = OTHER; note = 2'-Omethylguanosine
  modified_base 68: mod_base = OTHER; note = 2'-Omethylguanosine
  modified_base 69: mod_base = OTHER; note = 2'-Omethyladenosine
  modified_base 72: mod_base = OTHER; note = 2'-Omethylcytosine

SEQ ID NO: 3454 - RNA, 76 nt, synthetic construct; identical to SEQ ID NO: 625
  source 1..76: mol_type = other RNA
  modified_base 1: mod_base = OTHER; note = 2'-Omethylguanosine phosphorothiorate
  modified_base 2: mod_base = OTHER; note = 2'-Omethylguanosine
  modified_base 17: mod_base = OTHER; note = 2'-Omethylguanosine
  modified_base 33: mod_base = OTHER; note = 2'-fluorouridine
  modified_base 35: mod_base = OTHER; note = Cytosine phosphorothiorate
  modified_base 37: mod_base = OTHER; note = Adenosine phosphorothiorate
  modified_base 38: mod_base = OTHER; note = Adenosine phosphorothiorate
  modified_base 52: mod_base = OTHER; note = 2'-fluoroguanosine
  modified_base 54: mod_base = OTHER; note = 2'-Omethyluridine
  modified_base 62: mod_base = OTHER; note = 2'-Omethylcytosine
  modified_base 73: mod_base = OTHER; note = 2'-Omethylguanosine
  modified_base 75: mod_base = OTHER; note = 2'-fluorocytosine phosphorothiorate

SEQ ID NO: 3455 - RNA, 76 nt, synthetic construct; identical to SEQ ID NO: 625
  source 1..76: mol_type = other RNA
  modified_base 4: mod_base = OTHER; note = Uridine phosphorothiorate
  modified_base 5: mod_base = OTHER; note = 2'-fluorocytosine
  modified_base 7: mod_base = OTHER; note = Guanosine phosphorothiorate
  modified_base 10: mod_base = OTHER; note = 2'-Omethylguanosine
  modified_base 12: mod_base = OTHER; note = Guanosine phosphorothiorate
  modified_base 13: mod_base = OTHER; note = 2'-Omethylcytosine phosphorothiorate
  modified_base 15: mod_base = OTHER; note = 2'-Omethyladenosine
  modified_base 16: mod_base = OTHER; note = 2'-fluorouridine
  modified_base 18: mod_base = OTHER; note = Guanosine phosphorothiorate
  modified_base 20: mod_base = OTHER; note = 2'-fluorouridine
  modified_base 22: mod_base = OTHER; note = 2'-fluoroguanosine
  modified_base 25: mod_base = OTHER; note = Cytosine phosphorothiorate
  modified_base 31: mod_base = OTHER; note = 2'-Omethyladenosine
  modified_base 34: mod_base = OTHER; note = Uridine phosphorothiorate
  modified_base 37: mod_base = OTHER; note = Adenosine phosphorothiorate
  modified_base 38: mod_base = OTHER; note = 2'-Omethyladenosine
  modified_base 41: mod_base = OTHER; note = 2'-fluorocytosine
  modified_base 42: mod_base = OTHER; note = 2'-fluoroadenosine
  modified_base 45: mod_base = OTHER; note = 2'-Omethylguanosine
  modified_base 48: mod_base = OTHER; note = 2'-fluorouridine
  modified_base 50: mod_base = OTHER; note = 2'-fluorocytosine
  modified_base 57: mod_base = OTHER; note = 2'-Omethylguanosine
  modified_base 58: mod_base = OTHER; note = Adenosine phosphorothiorate
  modified_base 59: mod_base = OTHER; note = Guanosine phosphorothiorate
  modified_base 62: mod_base = OTHER; note = 2'-Omethylcytosine
  modified_base 63: mod_base = OTHER; note = Cytosine phosphorothiorate
  modified_base 66: mod_base = OTHER; note = 2'-Omethylcytosine phosphorothiorate
  modified_base 67: mod_base = OTHER; note = 2'-fluoroguanosine
  modified_base 69: mod_base = OTHER; note = Adenosine phosphorothiorate
  modified_base 70: mod_base = OTHER; note = 2'-Omethylguanosine
  modified_base 71: mod_base = OTHER; note = 2'-fluorouridine
  modified_base 72: mod_base = OTHER; note = 2'-fluorocytosine phosphorothiorate
  modified_base 73: mod_base = OTHER; note = 2'-Omethylguanosine
  modified_base 74: mod_base = OTHER; note = 2'-fluorocytosine
  modified_base 75: mod_base = OTHER; note = Cytosine phosphorothiorate
  modified_base 76: mod_base = OTHER; note = 2'-fluoroadenosine

SEQ ID NO: 3456 - RNA, 85 nt, synthetic construct; identical to SEQ ID NO: 3297
  source 1..85: mol_type = other RNA
  modified_base 1: mod_base = OTHER; note = Guanosine phosphorothiorate
  modified_base 2: mod_base = OTHER; note = Cytosine phosphorothiorate
  modified_base 3: mod_base = OTHER; note = Uridine phosphorothiorate
  modified_base 59: mod_base = OTHER; note = Cytosine phosphorothiorate
  modified_base 60: mod_base = OTHER; note = Adenosine phosphorothiorate
  modified_base 72: mod_base = OTHER; note = Uridine phosphorothiorate
  modified_base 73: mod_base = OTHER; note = Guanosine phosphorothiorate
  modified_base 74: mod_base = OTHER; note = Cytosine phosphorothiorate
  modified_base 75: mod_base = OTHER; note = Uridine phosphorothiorate
  modified_base 76: mod_base = OTHER; note = Cytosine phosphorothiorate
  modified_base 78: mod_base = OTHER; note = Cytosine phosphorothiorate
  modified_base 79: mod_base = OTHER; note = Adenosine phosphorothiorate
  modified_base 83: mod_base = OTHER; note = Cytosine phosphorothiorate
  modified_base 84: mod_base = OTHER; note = Cytosine phosphorothiorate

SEQ ID NO: 3457 - RNA, 75 nt, synthetic construct; identical to SEQ ID NO: 3336
  source 1..75: mol_type = other RNA
  modified_base 5: mod_base = OTHER; note = 2'-fluoroguanosine phosphorothiorate
  modified_base 21: mod_base = OTHER; note = 2'-fluoroguanosine
  modified_base 24: mod_base = OTHER; note = 2'-fluorocytosine
  modified_base 25: mod_base = OTHER; note = 2'-fluoroadenosine
  modified_base 39: mod_base = OTHER; note = 2'-Omethylcytosine
  modified_base 47: mod_base = OTHER; note = Cytosine phosphorothiorate
  modified_base 74: mod_base = OTHER; note = 2'-Omethylcytosine phosphorothiorate

SEQ ID NO: 3458 - RNA, 76 nt, synthetic construct; identical to SEQ ID NO: 625
  source 1..76: mol_type = other RNA
  modified_base 1: mod_base = OTHER; note = 2'-Omethylguanosine phosphorothiorate
  modified_base 2: mod_base = OTHER; note = 2'-Omethylguanosine
  modified_base 13: mod_base = OTHER; note = 2'-Omethylcytosine
  modified_base 17: mod_base = OTHER; note = 2'-Omethylguanosine
  modified_base 33: mod_base = OTHER; note = 2'-fluorouridine
  modified_base 35: mod_base = OTHER; note = Cytosine phosphorothiorate
  modified_base 37: mod_base = OTHER; note = Adenosine phosphorothiorate
  modified_base 52: mod_base = OTHER; note = 2'-Omethylguanosine
  modified_base 57: mod_base = OTHER; note = 2'-Omethylguanosine
  modified_base 62: mod_base = OTHER; note = 2'-Omethylcytosine
  modified_base 73: mod_base = OTHER; note = 2'-Omethylguanosine
  modified_base 75: mod_base = OTHER; note = 2'-fluorocytosine phosphorothiorate
  modified_base 76: mod_base = OTHER; note = 2'-Omethyladenosine

SEQ ID NO: 3459 - RNA, 75 nt, synthetic construct; identical to SEQ ID NO: 3299
  source 1..75: mol_type = other RNA
  modified_base 1: mod_base = OTHER; note = Cytosine phosphorothiorate
  modified_base 2: mod_base = OTHER; note = 2'-fluorocytosine phosphorothiorate
  modified_base 3: mod_base = OTHER; note = 2'-Omethyluridine phosphorothiorate
  modified_base 15: mod_base = OTHER; note = 2'-fluorouridine
  modified_base 21: mod_base = OTHER; note = 2'-fluoroguanosine
  modified_base 27: mod_base = OTHER; note = Cytosine phosphorothiorate
  modified_base 35: mod_base = OTHER; note = 2'-fluoroadenosine
  modified_base 46: mod_base = OTHER; note = 2'-fluorouridine
  modified_base 47: mod_base = OTHER; note = 2'-fluorocytosine
  modified_base 73: mod_base = OTHER; note = Cytosine phosphorothiorate
  modified_base 74: mod_base = OTHER; note = Cytosine phosphorothiorate

SEQ ID NO: 3460 - RNA, 85 nt, synthetic construct; identical to SEQ ID NO: 3317
  source 1..85: mol_type = other RNA
  modified_base 1: mod_base = OTHER; note = 2'-Omethylguanosine phosphorothiorate
  modified_base 2: mod_base = OTHER; note = Cytosine phosphorothiorate
  modified_base 4: mod_base = OTHER; note = 2'-Omethylguanosine phosphorothiorate
  modified_base 14: mod_base = OTHER; note = 2'-Omethyladenosine phosphorothiorate
  modified_base 20: mod_base = OTHER; note = Uridine phosphorothiorate
  modified_base 23: mod_base = OTHER; note = 2'-Omethylguanosine phosphorothiorate
  modified_base 27: mod_base = OTHER; note = 2'-fluorouridine
  modified_base 35: mod_base = OTHER; note = 2'-fluorouridine
  modified_base 41: mod_base = OTHER; note = 2'-fluorocytosine
  modified_base 44: mod_base = OTHER; note = 2'-Omethyluridine
  modified_base 46: mod_base = OTHER; note = 2'-Omethylguanosine
  modified_base 48: mod_base = OTHER; note = Guanosine phosphorothiorate
  modified_base 55: mod_base = OTHER; note = 2'-Omethylcytosine phosphorothiorate
  modified_base 57: mod_base = OTHER; note = 2'-Omethylcytosine
  modified_base 59: mod_base = OTHER; note = 2'-Omethylcytosine
  modified_base 68: mod_base = OTHER; note = Adenosine phosphorothiorate
  modified_base 80: mod_base = OTHER; note = Guanosine phosphorothiorate
  modified_base 81: mod_base = OTHER; note = 2'-fluorocytosine
  modified_base 82: mod_base = OTHER; note = 2'-fluoroguanosine
  modified_base 84: mod_base = OTHER; note = 2'-Omethylcytosine phosphorothiorate

SEQ ID NO: 3461 - RNA, 75 nt, synthetic construct; identical to SEQ ID NO: 3299
  source 1..75: mol_type = other RNA
  modified_base 1: mod_base = OTHER; note = 2'-fluorocytosine phosphorothiorate
  modified_base 13: mod_base = OTHER; note = 2'-fluoroadenosine
  modified_base 20: mod_base = OTHER; note = 2'-fluoroadenosine
  modified_base 42: mod_base = OTHER; note = 2'-fluoroadenosine phosphorothiorate
  modified_base 63: mod_base = OTHER; note = 2'-Omethyluridine phosphorothiorate
  modified_base 71: mod_base = OTHER; note = Cytosine phosphorothiorate

SEQ ID NO: 3462 - RNA, 85 nt, synthetic construct; identical to SEQ ID NO: 3310
  source 1..85: mol_type = other RNA
  modified_base 1: mod_base = OTHER; note = 2'-Omethylcytosine
  modified_base 22: mod_base = OTHER; note = 2'-fluoroguanosine
  modified_base 30: mod_base = OTHER; note = 2'-fluoroadenosine
  modified_base 34: mod_base = OTHER; note = 2'-fluorouridine
  modified_base 38: mod_base = OTHER; note = Uridine phosphorothiorate
  modified_base 54: mod_base = OTHER; note = Cytosine phosphorothiorate
  modified_base 56: mod_base = OTHER; note = 2'-fluoroguanosine
  modified_base 61: mod_base = OTHER; note = 2'-fluoroguanosine
  modified_base 73: mod_base = OTHER; note = 2'-fluoroadenosine
  modified_base 83: mod_base = OTHER; note = 2'-fluorocytosine
  modified_base 84: mod_base = OTHER; note = Cytosine phosphorothiorate

SEQ ID NO: 3463 - RNA, 72 nt, synthetic construct
  source 1..72: mol_type = other RNA
  modified_base 1: mod_base = OTHER; note = 2'-Omethylguanosine
  modified_base 17: mod_base = OTHER; note = 2'-Omethylguanosine
  modified_base 18: mod_base = OTHER; note = 2'-Omethylguanosine
  modified_base 49: mod_base = OTHER; note = 2'-Omethylcytosine
  modified_base 51: mod_base = OTHER; note = 2'-Omethyluridine
gacctcgtggcgcaacggtagcgcgtctgactctagatcagaaggttgcgtgttcaaatcacgtcggggtca

SEQ ID NO: 3464 - RNA, 85 nt, synthetic construct; identical to SEQ ID NO: 3310
  source 1..85: mol_type = other RNA
  modified_base 1: mod_base = OTHER; note = 2'-Omethylcytosine phosphorothiorate
  modified_base 2: mod_base = OTHER; note = 2'-Omethylcytosine phosphorothiorate
  modified_base 3: mod_base = OTHER; note = 2'-Omethyladenosine
  modified_base 29: mod_base = OTHER; note = 2'-fluoroguanosine
  modified_base 44: mod_base = OTHER; note = 2'-Omethylguanosine
  modified_base 50: mod_base = OTHER; note = Adenosine phosphorothiorate
  modified_base 57: mod_base = OTHER; note = 2'-Omethylcytosine
  modified_base 73: mod_base = OTHER; note = 2'-fluoroadenosine
  modified_base 84: mod_base = OTHER; note = 2'-Omethylcytosine phosphorothiorate

SEQ ID NO: 3465 - RNA, 76 nt, synthetic construct; identical to SEQ ID NO: 625
  source 1..76: mol_type = other RNA
  modified_base 2: mod_base = OTHER; note = 2'-Omethylguanosine
  modified_base 3: mod_base = OTHER; note = 2'-fluorocytosine
  modified_base 6: mod_base = OTHER; note = 2'-Omethylcytosine
  modified_base 10: mod_base = OTHER; note = 2'-fluoroguanosine phosphorothiorate
  modified_base 11: mod_base = OTHER; note = 2'-fluorocytosine
  modified_base 13: mod_base = OTHER; note = Cytosine phosphorothiorate
  modified_base 14: mod_base = OTHER; note = 2'-fluoroadenosine
  modified_base 16: mod_base = OTHER; note = 2'-Omethyluridine
  modified_base 18: mod_base = OTHER; note = 2'-Omethylguanosine phosphorothiorate
  modified_base 22: mod_base = OTHER; note = 2'-Omethylguanosine
  modified_base 27: mod_base = OTHER; note = Uridine phosphorothiorate
  modified_base 28: mod_base = OTHER; note = 2'-fluorouridine
  modified_base 36: mod_base = OTHER; note = Adenosine phosphorothiorate
  modified_base 39: mod_base = OTHER; note = 2'-Omethyluridine phosphorothiorate
  modified_base 40: mod_base = OTHER; note = 2'-Omethyluridine
  modified_base 41: mod_base = OTHER; note = 2'-fluorocytosine
  modified_base 46: mod_base = OTHER; note = 2'-fluoroguanosine
  modified_base 47: mod_base = OTHER; note = 2'-fluorouridine
  modified_base 48: mod_base = OTHER; note = Uridine phosphorothiorate
  modified_base 49: mod_base = OTHER; note = 2'-Omethylcytosine
  modified_base 50: mod_base = OTHER; note = 2'-Omethylcytosine
  modified_base 57: mod_base = OTHER; note = 2'-Omethylguanosine
  modified_base 58: mod_base = OTHER; note = 2'-fluoroadenosine
  modified_base 59: mod_base = OTHER; note = Guanosine phosphorothiorate
  modified_base 60: mod_base = OTHER; note = 2'-Omethyluridine
  modified_base 61: mod_base = OTHER; note = 2'-Omethylcytosine phosphorothiorate
  modified_base 62: mod_base = OTHER; note = 2'-Omethylcytosine
  modified_base 64: mod_base = OTHER; note = 2'-Omethylguanosine
  modified_base 66: mod_base = OTHER; note = 2'-Omethylcytosine phosphorothiorate
  modified_base 67: mod_base = OTHER; note = 2'-Omethylguanosine phosphorothiorate
  modified_base 70: mod_base = OTHER; note = 2'-fluoroguanosine phosphorothiorate
  modified_base 71: mod_base = OTHER; note = 2'-fluorouridine
  modified_base 74: mod_base = OTHER; note = Cytosine phosphorothiorate
  modified_base 75: mod_base = OTHER; note = 2'-fluorocytosine
  modified_base 76: mod_base = OTHER; note = 2'-fluoroadenosine

SEQ ID NO: 3466 - RNA, 76 nt, synthetic construct; identical to SEQ ID NO: 3318
  source 1..76: mol_type = other RNA
  modified_base 1: mod_base = OTHER; note = 2'-Omethylcytosine phosphorothiorate
  modified_base 2: mod_base = OTHER; note = 2'-Omethylcytosine phosphorothiorate
  modified_base 3: mod_base = OTHER; note = 2'-Omethyluridine
  modified_base 4: mod_base = OTHER; note = 2'-Omethyluridine
  modified_base 5: mod_base = OTHER; note = 2'-Omethylcytosine
  modified_base 6: mod_base = OTHER; note = 2'-Omethylguanosine
  modified_base 10: mod_base = OTHER; note = 2'-Omethylguanosine
  modified_base 11: mod_base = OTHER; note = 2'-Omethylcytosine
  modified_base 12: mod_base = OTHER; note = 2'-Omethyluridine
  modified_base 13: mod_base = OTHER; note = 2'-Omethylcytosine
  modified_base 22: mod_base = OTHER; note = 2'-Omethylguanosine
  modified_base 23: mod_base = OTHER; note = 2'-Omethyladenosine
  modified_base 24: mod_base = OTHER; note = 2'-Omethylguanosine
  modified_base 25: mod_base = OTHER; note = 2'-Omethylcytosine
  modified_base 33: mod_base = OTHER; note = 2'-fluorouridine
  modified_base 35: mod_base = OTHER; note = Uridine phosphorothiorate
  modified_base 37: mod_base = OTHER; note = Guanosine phosphorothiorate
  modified_base 38: mod_base = OTHER; note = Adenosine phosphorothiorate
  modified_base 49: mod_base = OTHER; note = 2'-Omethylguanosine
  modified_base 50: mod_base = OTHER; note = 2'-Omethylcytosine
  modified_base 51: mod_base = OTHER; note = 2'-Omethyluridine
  modified_base 52: mod_base = OTHER; note = 2'-Omethylguanosine
  modified_base 53: mod_base = OTHER; note = 2'-Omethylguanosine
  modified_base 54: mod_base = OTHER; note = 2'-Omethyluridine
  modified_base 56: mod_base = OTHER; note = 2'-Omethylcytosine
  modified_base 59: mod_base = OTHER; note = 2'-Omethyladenosine
  modified_base 61: mod_base = OTHER; note = 2'-Omethylcytosine
  modified_base 62: mod_base = OTHER; note = 2'-Omethylcytosine
  modified_base 63: mod_base = OTHER; note = 2'-fluoroguanosine
  modified_base 64: mod_base = OTHER; note = 2'-Omethylguanosine
  modified_base 65: mod_base = OTHER; note = 2'-Omethylcytosine
  modified_base 66: mod_base = OTHER; note = 2'-Omethyluridine
  modified_base 67: mod_base = OTHER; note = 2'-Omethylcytosine
  modified_base 68: mod_base = OTHER; note = 2'-Omethylguanosine
  modified_base 73: mod_base = OTHER; note = 2'-Omethyladenosine

SEQ ID NO: 3467 - RNA, 76 nt, synthetic construct; identical to SEQ ID NO: 625
  source 1..76: mol_type = other RNA
  modified_base 1: mod_base = OTHER; note = 2'-fluoroguanosine
  modified_base 2: mod_base = OTHER; note = 2'-Omethylguanosine
  modified_base 8: mod_base = OTHER; note = Uridine phosphorothiorate
  modified_base 12: mod_base = OTHER; note = Guanosine phosphorothiorate
  modified_base 13: mod_base = OTHER; note = 2'-Omethylcytosine phosphorothiorate
  modified_base 14: mod_base = OTHER; note = 2'-Omethyladenosine
  modified_base 17: mod_base = OTHER; note = 2'-Omethylguanosine
  modified_base 18: mod_base = OTHER; note = Guanosine phosphorothiorate
  modified_base 19: mod_base = OTHER; note = Adenosine phosphorothiorate
  modified_base 20: mod_base = OTHER; note = 2'-Omethyluridine phosphorothiorate
  modified_base 23: mod_base = OTHER; note = 2'-fluorocytosine
  modified_base 26: mod_base = OTHER; note = 2'-Omethyladenosine
  modified_base 27: mod_base = OTHER; note = 2'-Omethyluridine
  modified_base 29: mod_base = OTHER; note = Guanosine phosphorothiorate
  modified_base 33: mod_base = OTHER; note = 2'-fluorouridine
  modified_base 39: mod_base = OTHER; note = 2'-Omethyluridine
  modified_base 43: mod_base = OTHER; note = 2'-fluoroadenosine
  modified_base 44: mod_base = OTHER; note = 2'-Omethyladenosine
  modified_base 46: mod_base = OTHER; note = 2'-Omethylguanosine
  modified_base 47: mod_base = OTHER; note = 2'-fluorouridine
  modified_base 48: mod_base = OTHER; note = 2'-Omethyluridine
  modified_base 49: mod_base = OTHER; note = 2'-Omethylcytosine
  modified_base 50: mod_base = OTHER; note = 2'-fluorocytosine
  modified_base 56: mod_base = OTHER; note = 2'-fluorocytosine
  modified_base 57: mod_base = OTHER; note = 2'-fluoroguanosine
  modified_base 60: mod_base = OTHER; note = 2'-Omethyluridine phosphorothiorate
  modified_base 64: mod_base = OTHER; note = 2'-Omethylguanosine
  modified_base 65: mod_base = OTHER; note = 2'-fluoroguanosine
  modified_base 66: mod_base = OTHER; note = 2'-fluorocytosine
  modified_base 67: mod_base = OTHER; note = 2'-Omethylguanosine phosphorothiorate
  modified_base 68: mod_base = OTHER; note = 2'-Omethylguanosine
  modified_base 69: mod_base = OTHER; note = 2'-Omethyladenosine
  modified_base 71: mod_base = OTHER; note = 2'-fluorouridine
  modified_base 72: mod_base = OTHER; note = 2'-Omethylcytosine

SEQ ID NO: 3468 - DNA, 76 bp, synthetic construct; identical to SEQ ID NO: 1924
  source 1..76: mol_type = other DNA
  modified_base 1: mod_base = OTHER; note = 2'-Omethylguanosine phosphorothiorate
  modified_base 2: mod_base = OTHER; note = 2'-Omethylguanosine phosphorothiorate
  modified_base 11: mod_base = OTHER; note = 2'-fluorocytosine
  modified_base 22: mod_base = OTHER; note = Guanosine phosphorothiorate
  modified_base 23: mod_base = OTHER; note = 2'-O-(2-Methoxyethyl) 5-methylcytosine
  modified_base 40: mod_base = OTHER; note = 2'-O-(2-Methoxyethyl) thymine
  modified_base 75: mod_base = OTHER; note = Cytosine phosphorothiorate
  modified_base 76: mod_base = OTHER; note = 2'-Omethyladenosine
  misc_feature 1..32: note = RNA
  misc_feature 33: note = DNA
  misc_feature 34..76: note = RNA

SEQ ID NO: 3469 - RNA, 75 nt, synthetic construct; identical to SEQ ID NO: 3336
  source 1..75: mol_type = other RNA
  modified_base 9: mod_base = OTHER; note = Guanosine phosphorothiorate
  modified_base 16: mod_base = OTHER; note = 2'-fluorocytosine
  modified_base 23: mod_base = OTHER; note = 2'-fluoroguanosine
  modified_base 25: mod_base = OTHER; note = Adenosine phosphorothiorate
  modified_base 27: mod_base = OTHER; note = 2'-fluorocytosine
  modified_base 46: mod_base = OTHER; note = 2'-fluorouridine
  modified_base 47: mod_base = OTHER; note = 2'-fluorocytosine
  modified_base 64: mod_base = OTHER; note = 2'-fluoroguanosine
  modified_base 70: mod_base = OTHER; note = Guanosine phosphorothiorate
  modified_base 73: mod_base = OTHER; note = Cytosine phosphorothiorate
  modified_base 74: mod_base = OTHER; note = Cytosine phosphorothiorate

SEQ ID NO: 3470 - RNA, 75 nt, synthetic construct; identical to SEQ ID NO: 3306
  source 1..75: mol_type = other RNA
  modified_base 1: mod_base = OTHER; note = 2'-Omethylguanosine
  modified_base 14: mod_base = OTHER; note = 2'-Omethyladenosine
  modified_base 15: mod_base = OTHER; note = 2'-fluoroadenosine
  modified_base 16: mod_base = OTHER; note = 2'-Omethylcytosine
  modified_base 17: mod_base = OTHER; note = 2'-Omethylguanosine
  modified_base 18: mod_base = OTHER; note = 2'-Omethylguanosine
  modified_base 19: mod_base = OTHER; note = 2'-fluorouridine
  modified_base 53: mod_base = OTHER; note = 2'-Omethyluridine
  modified_base 55: mod_base = OTHER; note = 2'-Omethylcytosine
  modified_base 58: mod_base = OTHER; note = 2'-Omethyladenosine
  modified_base 72: mod_base = OTHER; note = 2'-Omethyladenosine

SEQ ID NO: 3471 - RNA, 75 nt, synthetic construct; identical to SEQ ID NO: 1045
  source 1..75: mol_type = other RNA
  modified_base 1: mod_base = OTHER; note = 2'-Omethylguanosine phosphorothiorate
  modified_base 2: mod_base = OTHER; note = 2'-Omethylguanosine
  modified_base 17: mod_base = OTHER; note = 2'-fluoroguanosine phosphorothiorate
  modified_base 18: mod_base = OTHER; note = 2'-Omethylguanosine
  modified_base 19: mod_base = OTHER; note = 2'-fluorouridine
  modified_base 20: mod_base = OTHER; note = Adenosine phosphorothiorate
  modified_base 21: mod_base = OTHER; note = 2'-fluoroadenosine
  modified_base 22: mod_base = OTHER; note = 2'-Omethylguanosine
  modified_base 24: mod_base = OTHER; note = 2'-fluoroadenosine
  modified_base 25: mod_base = OTHER; note = Cytosine phosphorothiorate
  modified_base 39: mod_base = OTHER; note = Uridine phosphorothiorate
  modified_base 40: mod_base = OTHER; note = 2'-fluorocytosine
  modified_base 43: mod_base = OTHER; note = 2'-fluoroguanosine
  modified_base 50: mod_base = OTHER; note = Guanosine phosphorothiorate
  modified_base 51: mod_base = OTHER; note = Adenosine phosphorothiorate
  modified_base 52: mod_base = OTHER; note = 2'-fluoroguanosine
  modified_base 54: mod_base = OTHER; note = Uridine phosphorothiorate
  modified_base 57: mod_base = OTHER; note = 2'-fluoroadenosine
  modified_base 58: mod_base = OTHER; note = 2'-fluoroguanosine phosphorothiorate
  modified_base 59: mod_base = OTHER; note = Uridine phosphorothiorate
  modified_base 62: mod_base = OTHER; note = Cytosine phosphorothiorate
  modified_base 64: mod_base = OTHER; note = Guanosine phosphorothiorate
  modified_base 65: mod_base = OTHER; note = 2'-fluorouridine
  modified_base 67: mod_base = OTHER; note = Guanosine phosphorothiorate
  modified_base 68: mod_base = OTHER; note = 2'-fluoroadenosine
  modified_base 73: mod_base = OTHER; note = Cytosine phosphorothiorate
  modified_base 74: mod_base = OTHER; note = Cytosine phosphorothiorate

SEQ ID NO: 3472 - RNA, 75 nt, synthetic construct; identical to SEQ ID NO: 1045
  source 1..75: mol_type = other RNA
  modified_base 1: mod_base = OTHER; note = 2'-Omethylguanosine phosphorothiorate
  modified_base 2: mod_base = OTHER; note = 2'-Omethylguanosine phosphorothiorate
  modified_base 11: mod_base = OTHER; note = Uridine phosphorothiorate
  modified_base 13: mod_base = OTHER; note = 2'-fluorouridine
  modified_base 20: mod_base = OTHER; note = 2'-Omethyladenosine phosphorothiorate
  modified_base 21: mod_base = OTHER; note = 2'-fluoroadenosine
  modified_base 22: mod_base = OTHER; note = 2'-fluoroguanosine
  modified_base 25: mod_base = OTHER; note = 2'-fluorocytosine phosphorothiorate
  modified_base 28: mod_base = OTHER; note = 2'-fluorouridine
  modified_base 29: mod_base = OTHER; note = 2'-fluoroguanosine
  modified_base 36: mod_base = OTHER; note = 2'-fluoroadenosine
  modified_base 41: mod_base = OTHER; note = Cytosine phosphorothiorate
  modified_base 48: mod_base = OTHER; note = 2'-fluorocytosine phosphorothiorate
  modified_base 61: mod_base = OTHER; note = 2'-Omethyluridine
  modified_base 62: mod_base = OTHER; note = Cytosine phosphorothiorate
  modified_base 63: mod_base = OTHER; note = 2'-fluoroguanosine phosphorothiorate
  modified_base 65: mod_base = OTHER; note = 2'-fluorouridine
  modified_base 68: mod_base = OTHER; note = 2'-fluoroadenosine
  modified_base 72: mod_base = OTHER; note = Uridine phosphorothiorate
  modified_base 73: mod_base = OTHER; note = Cytosine phosphorothiorate
  modified_base 74: mod_base = OTHER; note = 2'-fluorocytosine phosphorothiorate

SEQ ID NO: 3473 - RNA, 75 nt, synthetic construct; identical to SEQ ID NO: 1045
  source 1..75: mol_type = other RNA
  modified_base 1: mod_base = OTHER; note = 2'-Omethylguanosine phosphorothiorate
  modified_base 2: mod_base = OTHER; note = 2'-Omethylguanosine
  modified_base 11: mod_base = OTHER; note = 2'-fluorouridine
  modified_base 12: mod_base = OTHER; note = Guanosine phosphorothiorate
  modified_base 19: mod_base = OTHER; note = 2'-fluorouridine
  modified_base 20: mod_base = OTHER; note = Adenosine phosphorothiorate
  modified_base 21: mod_base = OTHER; note = 2'-fluoroadenosine
  modified_base 22: mod_base = OTHER; note = 2'-fluoroguanosine
  modified_base 23: mod_base = OTHER; note = 2'-Omethylcytosine
  modified_base 24: mod_base = OTHER; note = 2'-fluoroadenosine
  modified_base 25: mod_base = OTHER; note = 2'-Omethylcytosine
  modified_base 40: mod_base = OTHER; note = Cytosine phosphorothiorate
  modified_base 42: mod_base = OTHER; note = 2'-fluoroadenosine
  modified_base 44: mod_base = OTHER; note = 2'-fluorocytosine
  modified_base 57: mod_base = OTHER; note = 2'-fluoroadenosine phosphorothiorate
  modified_base 58: mod_base = OTHER; note = 2'-fluoroguanosine
  modified_base 62: mod_base = OTHER; note = Cytosine phosphorothiorate
  modified_base 64: mod_base = OTHER; note = 2'-fluoroguanosine
  modified_base 65: mod_base = OTHER; note = 2'-fluorouridine
  modified_base 73: mod_base = OTHER; note = Cytosine phosphorothiorate
  modified_base 74: mod_base = OTHER; note = 2'-fluorocytosine

SEQ ID NO: 3474 - RNA, 76 nt, synthetic construct; identical to SEQ ID NO: 625
  source 1..76: mol_type = other RNA
  modified_base 61: mod_base = OTHER; note = 2'-O-(2-Methoxyethyl) 5-methylcytosine

SEQ ID NO: 3475 - RNA, 74 nt, synthetic construct; identical to SEQ ID NO: 3293
  source 1..74: mol_type = other RNA
  modified_base 1: mod_base = OTHER; note = 2'-fluoroadenosine
  modified_base 3: mod_base = OTHER; note = Cytosine phosphorothiorate
  modified_base 11: mod_base = OTHER; note = 2'-Omethylguanosine
  modified_base 29: mod_base = OTHER; note = 2'-fluoroadenosine
  modified_base 35: mod_base = OTHER; note = 2'-fluoroguanosine
  modified_base 43: mod_base = OTHER; note = Guanosine phosphorothiorate
  modified_base 48: mod_base = OTHER; note = Cytosine phosphorothiorate
  modified_base 59: mod_base = OTHER; note = 2'-fluorocytosine
  modified_base 73: mod_base = OTHER; note = 2'-Omethylcytosine phosphorothiorate

SEQ ID NO: 3476 - RNA, 76 nt, synthetic construct; identical to SEQ ID NO: 625
  source 1..76: mol_type = other RNA
  modified_base 1: mod_base = OTHER; note = 2'-Omethylguanosine phosphorothiorate
  modified_base 2: mod_base = OTHER; note = 2'-Omethylguanosine
  modified_base 3: mod_base = OTHER; note = 2'-Omethylcytosine
  modified_base 4: mod_base = OTHER; note = 2'-Omethyluridine
  modified_base 5: mod_base = OTHER; note = 2'-Omethylcytosine
  modified_base 6: mod_base = OTHER; note = 2'-Omethylcytosine
  modified_base 10: mod_base = OTHER; note = 2'-Omethylguanosine
  modified_base 11: mod_base = OTHER; note = 2'-Omethylcytosine
  modified_base 12: mod_base = OTHER; note = 2'-Omethylguanosine
  modified_base 13: mod_base = OTHER; note = 2'-Omethylcytosine
  modified_base 14: mod_base = OTHER; note = 2'-Omethyladenosine
  modified_base 15: mod_base = OTHER; note = 2'-fluoroadenosine
  modified_base 16: mod_base = OTHER; note = 2'-Omethyluridine
  modified_base 17: mod_base = OTHER; note = 2'-Omethylguanosine
  modified_base 18: mod_base = OTHER; note = 2'-Omethylguanosine
  modified_base 19: mod_base = OTHER; note = 2'-fluoroadenosine
  modified_base 20: mod_base = OTHER; note = 2'-Omethyluridine
  modified_base 22: mod_base = OTHER; note = 2'-Omethylguanosine
  modified_base 23: mod_base = OTHER; note = 2'-Omethylcytosine
  modified_base 24: mod_base = OTHER; note = 2'-Omethylguanosine
  modified_base 25: mod_base = OTHER; note = 2'-Omethylcytosine
  modified_base 38: mod_base = OTHER; note = Adenosine phosphorothiorate
  modified_base 39: mod_base = OTHER; note = Uridine phosphorothiorate
  modified_base 40: mod_base = OTHER; note = 2'-fluorouridine
  modified_base 43: mod_base = OTHER; note = 2'-Omethyladenosine
  modified_base 44: mod_base = OTHER; note = 2'-Omethyladenosine
  modified_base 45: mod_base = OTHER; note = 2'-Omethylguanosine
  modified_base 46: mod_base = OTHER; note = 2'-fluoroguanosine
  modified_base 48: mod_base = OTHER; note = 2'-fluorouridine
  modified_base 49: mod_base = OTHER; note = 2'-Omethylcytosine
  modified_base 50: mod_base = OTHER; note = 2'-Omethylcytosine
  modified_base 54: mod_base = OTHER; note = 2'-Omethyluridine phosphorothiorate
  modified_base 55: mod_base = OTHER; note = Uridine phosphorothiorate
  modified_base 56: mod_base = OTHER; note = 2'-Omethylcytosine
  modified_base 57: mod_base = OTHER; note = 2'-fluoroguanosine
  modified_base 61: mod_base = OTHER; note = 2'-Omethylcytosine
  modified_base 62: mod_base = OTHER; note = 2'-Omethylcytosine
  modified_base 63: mod_base = OTHER; note = 2'-fluorocytosine
  modified_base 64: mod_base = OTHER; note = 2'-Omethylguanosine
  modified_base 65: mod_base = OTHER; note = 2'-Omethylguanosine
  modified_base 66: mod_base = OTHER; note = 2'-Omethylcytosine
  modified_base 67: mod_base = OTHER; note = 2'-Omethylguanosine
  modified_base 68: mod_base = OTHER; note = 2'-Omethylguanosine
  modified_base 69: mod_base = OTHER; note = 2'-fluoroadenosine

SEQ ID NO: 3477 - RNA, 76 nt, synthetic construct; identical to SEQ ID NO: 625
  source 1..76: mol_type = other RNA
  modified_base 1: mod_base = OTHER; note = 2'-Omethylguanosine phosphorothiorate
  modified_base 2: mod_base = OTHER; note = 2'-Omethylguanosine
  modified_base 17: mod_base = OTHER; note = 2'-Omethylguanosine
  modified_base 33: mod_base = OTHER; note = 2'-fluorouridine
  modified_base 35: mod_base = OTHER; note = Cytosine phosphorothiorate
  modified_base 52: mod_base = OTHER; note = 2'-Omethylguanosine
  modified_base 57: mod_base = OTHER; note = 2'-Omethylguanosine
  modified_base 62: mod_base = OTHER; note = 2'-Omethylcytosine
  modified_base 73: mod_base = OTHER; note = 2'-Omethylguanosine
  modified_base 75: mod_base = OTHER; note = 2'-fluorocytosine phosphorothiorate

SEQ ID NO: 3478 - RNA, 76 nt, synthetic construct; identical to SEQ ID NO: 3295
  source 1..76: mol_type = other RNA
  modified_base 1: mod_base = OTHER; note = 2'-fluorocytosine phosphorothiorate
  modified_base 2: mod_base = OTHER; note = 2'-Omethylcytosine
  modified_base 3: mod_base = OTHER; note = 2'-Omethyluridine
  modified_base 8: mod_base = OTHER; note = 2'-fluorouridine phosphorothiorate
  modified_base 9: mod_base = OTHER; note = Adenosine phosphorothiorate
  modified_base 14: mod_base = OTHER; note = 2'-Omethyladenosine
  modified_base 26: mod_base = OTHER; note = 2'-Omethylguanosine
  modified_base 27: mod_base = OTHER; note = Guanosine phosphorothiorate
  modified_base 31: mod_base = OTHER; note = 2'-fluoroadenosine phosphorothiorate
  modified_base 37: mod_base = OTHER; note = 2'-fluoroguanosine phosphorothiorate
  modified_base 38: mod_base = OTHER; note = 2'-Omethyladenosine
  modified_base 42: mod_base = OTHER; note = 2'-Omethyluridine
  modified_base 49: mod_base = OTHER; note = 2'-Omethylguanosine
  modified_base 53: mod_base = OTHER; note = 2'-fluoroguanosine
  modified_base 54: mod_base = OTHER; note = 2'-Omethyluridine
  modified_base 66: mod_base = OTHER; note = 2'-fluorouridine
  modified_base 70: mod_base = OTHER; note = 2'-fluoroadenosine

SEQ ID NO: 3479 - RNA, 76 nt, synthetic construct; identical to SEQ ID NO: 3295
  source 1..76: mol_type = other RNA
  modified_base 1: mod_base = OTHER; note = 2'-Omethylcytosine
  modified_base 2: mod_base = OTHER; note = Cytosine phosphorothiorate
  modified_base 3: mod_base = OTHER; note = Uridine phosphorothiorate
  modified_base 9: mod_base = OTHER; note = 2'-fluoroadenosine
  modified_base 12: mod_base = OTHER; note = 2'-fluorouridine phosphorothiorate
  modified_base 17: mod_base = OTHER; note = 2'-Omethyluridine
  modified_base 20: mod_base = OTHER; note = 2'-fluorouridine phosphorothiorate
  modified_base 28: mod_base = OTHER; note = Adenosine phosphorothiorate
  modified_base 38: mod_base = OTHER; note = 2'-Omethyladenosine
  modified_base 43: mod_base = OTHER; note = 2'-Omethyluridine
  modified_base 52: mod_base = OTHER; note = 2'-Omethylguanosine
  modified_base 75: mod_base = OTHER; note = 2'-Omethylcytosine phosphorothiorate

SEQ ID NO: 3480 - RNA, 85 nt, synthetic construct; identical to SEQ ID NO: 3297
  source 1..85: mol_type = other RNA
  modified_base 1: mod_base = OTHER; note = 2'-Omethylguanosine phosphorothiorate
  modified_base 2: mod_base = OTHER; note = 2'-Omethylcytosine
  modified_base 56: mod_base = OTHER; note = 2'-fluoroguanosine
  modified_base 68: mod_base = OTHER; note = 2'-Omethyladenosine
  modified_base 84: mod_base = OTHER; note = Cytosine phosphorothiorate
  modified_base 85: mod_base = OTHER; note = 2'-Omethyladenosine

SEQ ID NO: 3481 - RNA, 76 nt, synthetic construct
  source 1..76: mol_type = other RNA
gtcaccgtggcgcaatggatagcgcattggacttcaaattcaaaggttccgggttcgagtcccggcggtgactcca

SEQ ID NO: 3482 - RNA, 75 nt, synthetic construct; identical to SEQ ID NO: 3299
  source 1..75: mol_type = other RNA
  modified_base 2: mod_base = OTHER; note = Cytosine phosphorothiorate
  modified_base 3: mod_base = OTHER; note = 2'-Omethyluridine phosphorothiorate
  modified_base 6: mod_base = OTHER; note = Guanosine phosphorothiorate
  modified_base 20: mod_base = OTHER; note = 2'-fluoroadenosine
  modified_base 21: mod_base = OTHER; note = 2'-Omethylguanosine
  modified_base 22: mod_base = OTHER; note = 2'-fluoroadenosine
  modified_base 23: mod_base = OTHER; note = 2'-Omethylguanosine phosphorothiorate
  modified_base 26: mod_base = OTHER; note = 2'-fluorouridine
  modified_base 27: mod_base = OTHER; note = 2'-fluorocytosine
  modified_base 33: mod_base = OTHER; note = 2'-fluorouridine
  modified_base 36: mod_base = OTHER; note = 2'-fluoroadenosine
  modified_base 37: mod_base = OTHER; note = 2'-fluoroadenosine
  modified_base 48: mod_base = OTHER; note = 2'-fluorocytosine
  modified_base 49: mod_base = OTHER; note = Adenosine phosphorothiorate
  modified_base 53: mod_base = OTHER; note = Uridine phosphorothiorate
  modified_base 61: mod_base = OTHER; note = 2'-Omethylcytosine
  modified_base 62: mod_base = OTHER; note = Cytosine phosphorothiorate
  modified_base 64: mod_base = OTHER; note = 2'-fluoroguanosine
  modified_base 74: mod_base = OTHER; note = Cytosine phosphorothiorate
  modified_base 75: mod_base = OTHER; note = 2'-fluoroadenosine

SEQ ID NO: 3483 - RNA, 75 nt, synthetic construct; identical to SEQ ID NO: 3336
  source 1..75: mol_type = other RNA
  modified_base 1: mod_base = OTHER; note = Cytosine phosphorothiorate
  modified_base 14: mod_base = OTHER; note = 2'-fluoroguanosine
  modified_base 15: mod_base = OTHER; note = 2'-fluorouridine
  modified_base 33: mod_base = OTHER; note = 2'-fluorocytosine
  modified_base 49: mod_base = OTHER; note = 2'-fluoroadenosine phosphorothiorate
  modified_base 51: mod_base = OTHER; note = 2'-Omethylguanosine phosphorothiorate
  modified_base 72: mod_base = OTHER; note = 2'-Omethylguanosine
  modified_base 73: mod_base = OTHER; note = Cytosine phosphorothiorate
  modified_base 74: mod_base = OTHER; note = 2'-Omethylcytosine

SEQ ID NO: 3484 - RNA, 85 nt, synthetic construct; identical to SEQ ID NO: 3297
  source 1..85: mol_type = other RNA
  modified_base 1: mod_base = OTHER; note = 2'-Omethylguanosine phosphorothiorate
  modified_base 2: mod_base = OTHER; note = Cytosine phosphorothiorate
  modified_base 45: mod_base = OTHER; note = 2'-Omethylguanosine phosphorothiorate
  modified_base 47: mod_base = OTHER; note = 2'-Omethylguanosine
  modified_base 55: mod_base = OTHER; note = 2'-fluorocytosine phosphorothiorate
  modified_base 62: mod_base = OTHER; note = 2'-fluoroguanosine phosphorothiorate
  modified_base 82: mod_base = OTHER; note = 2'-Omethylguanosine phosphorothiorate

SEQ ID NO: 3485 - RNA, 85 nt, synthetic construct; identical to SEQ ID NO: 3301
  source 1..85: mol_type = other RNA
  modified_base 1: mod_base = OTHER; note = 2'-Omethylguanosine phosphorothiorate
  modified_base 2: mod_base = OTHER; note = 2'-Omethylcytosine
  modified_base 3: mod_base = OTHER; note = 2'-Omethyluridine phosphorothiorate
  modified_base 10: mod_base = OTHER; note = 2'-fluoroguanosine
  modified_base 11: mod_base = OTHER; note = 2'-fluorocytosine
  modified_base 12: mod_base = OTHER; note = 2'-fluorocytosine phosphorothiorate
  modified_base 17: mod_base = OTHER; note = Guanosine phosphorothiorate
  modified_base 20: mod_base = OTHER; note = 2'-Omethyluridine phosphorothiorate
  modified_base 24: mod_base = OTHER; note = 2'-Omethylguanosine phosphorothiorate
  modified_base 28: mod_base = OTHER; note = Uridine phosphorothiorate
  modified_base 33: mod_base = OTHER; note = 2'-fluorouridine
  modified_base 34: mod_base = OTHER; note = 2'-fluorouridine
  modified_base 38: mod_base = OTHER; note = 2'-Omethyladenosine
  modified_base 44: mod_base = OTHER; note = 2'-Omethyluridine
  modified_base 46: mod_base = OTHER; note = 2'-Omethylguanosine
  modified_base 54: mod_base = OTHER; note = 2'-Omethylcytosine
  modified_base 56: mod_base = OTHER; note = 2'-Omethylguanosine
  modified_base 57: mod_base = OTHER; note = 2'-fluorocytosine
  modified_base 59: mod_base = OTHER; note = 2'-Omethylcytosine
  modified_base 61: mod_base = OTHER; note = 2'-Omethylguanosine
  modified_base 72: mod_base = OTHER; note = 2'-fluorouridine
  modified_base 80: mod_base = OTHER; note = 2'-fluoroguanosine
  modified_base 82: mod_base = OTHER; note = 2'-fluoroguanosine
  modified_base 83: mod_base = OTHER; note = Cytosine phosphorothiorate

SEQ ID NO: 3486 - RNA, 76 nt, synthetic construct
  source 1..76: mol_type = other RNA
ggctgcatggcgcaatggatagcgcattggacttcaaattcaaaggttgggggttcgagtccccctgcagtcgcca

SEQ ID NO: 3487 - RNA, 85 nt, synthetic construct; identical to SEQ ID NO: 3317
  source 1..85: mol_type = other RNA
  modified_base 1: mod_base = OTHER; note = 2'-Omethylguanosine phosphorothiorate
  modified_base 2: mod_base = OTHER; note = 2'-Omethylcytosine phosphorothiorate
  modified_base 13: mod_base = OTHER; note = 2'-Omethylguanosine phosphorothiorate
  modified_base 14: mod_base = OTHER; note = Adenosine phosphorothiorate
  modified_base 20: mod_base = OTHER; note = 2'-Omethyluridine phosphorothiorate
  modified_base 22: mod_base = OTHER; note = 2'-fluoroadenosine
  modified_base 24: mod_base = OTHER; note = 2'-fluoroguanosine
  modified_base 26: mod_base = OTHER; note = 2'-fluoroguanosine phosphorothiorate
  modified_base 31: mod_base = OTHER; note = Adenosine phosphorothiorate
  modified_base 34: mod_base = OTHER; note = 2'-fluorocytosine
  modified_base 46: mod_base = OTHER; note = 2'-fluoroguanosine phosphorothiorate
  modified_base 47: mod_base = OTHER; note = 2'-fluoroguanosine phosphorothiorate
  modified_base 54: mod_base = OTHER; note = 2'-Omethylcytosine
  modified_base 56: mod_base = OTHER; note = 2'-Omethylguanosine
  modified_base 62: mod_base = OTHER; note = 2'-fluoroguanosine
  modified_base 81: mod_base = OTHER; note = 2'-fluorocytosine phosphorothiorate
  modified_base 83: mod_base = OTHER; note = Cytosine phosphorothiorate

SEQ ID NO: 3488 - RNA, 85 nt, synthetic construct; identical to SEQ ID NO: 3310
  source 1..85: mol_type = other RNA
  modified_base 1: mod_base = OTHER; note = 2'-Omethylcytosine phosphorothiorate
  modified_base 16: mod_base = OTHER; note = Guanosine phosphorothiorate
  modified_base 42: mod_base = OTHER; note = Adenosine phosphorothiorate
  modified_base 57: mod_base = OTHER; note = 2'-Omethylcytosine
  modified_base 60: mod_base = OTHER; note = Guanosine phosphorothiorate
  modified_base 67: mod_base = OTHER; note = Adenosine phosphorothiorate
  modified_base 84: mod_base = OTHER; note = 2'-Omethylcytosine

SEQ ID NO: 3489 - RNA, 75 nt, synthetic construct; identical to SEQ ID NO: 3306
  source 1..75: mol_type = other RNA
  modified_base 1: mod_base = OTHER; note = 2'-Omethylguanosine phosphorothiorate
  modified_base 2: mod_base = OTHER; note = 2'-Omethyladenosine phosphorothiorate
  modified_base 3: mod_base = OTHER; note = 2'-Omethylcytosine
  modified_base 4: mod_base = OTHER; note = 2'-Omethylcytosine
  modified_base 5: mod_base = OTHER; note = 2'-Omethyluridine
  modified_base 6: mod_base = OTHER; note = 2'-Omethylcytosine
  modified_base 13: mod_base = OTHER; note = 2'-Omethylcytosine
  modified_base 16: mod_base = OTHER; note = 2'-Omethylcytosine
  modified_base 17: mod_base = OTHER; note = 2'-Omethylguanosine
  modified_base 18: mod_base = OTHER; note = 2'-Omethylguanosine
  modified_base 24: mod_base = OTHER; note = 2'-Omethylcytosine
  modified_base 32: mod_base = OTHER; note = 2'-fluorouridine
  modified_base 34: mod_base = OTHER; note = Uridine phosphorothiorate
  modified_base 36: mod_base = OTHER; note = Guanosine phosphorothiorate
  modified_base 37: mod_base = OTHER; note = Adenosine phosphorothiorate
  modified_base 40: mod_base = OTHER; note = 2'-fluoroadenosine phosphorothiorate
  modified_base 41: mod_base = OTHER; note = 2'-Omethylguanosine
  modified_base 42: mod_base = OTHER; note = 2'-Omethyladenosine
  modified_base 43: mod_base = OTHER; note = 2'-fluoroadenosine
  modified_base 44: mod_base = OTHER; note = 2'-Omethylguanosine
  modified_base 45: mod_base = OTHER; note = 2'-fluoroguanosine
  modified_base 46: mod_base = OTHER; note = 2'-fluorouridine
  modified_base 47: mod_base = OTHER; note = 2'-fluorouridine
  modified_base 55: mod_base = OTHER; note = 2'-Omethylcytosine
  modified_base 58: mod_base = OTHER; note = 2'-Omethyladenosine
  modified_base 60: mod_base = OTHER; note = 2'-Omethylcytosine
  modified_base 61: mod_base = OTHER; note = 2'-Omethyladenosine
  modified_base 62: mod_base = OTHER; note = 2'-fluorocytosine
  modified_base 63: mod_base = OTHER; note = 2'-Omethylguanosine
  modified_base 64: mod_base = OTHER; note = 2'-Omethyluridine
  modified_base 65: mod_base = OTHER; note = 2'-Omethylcytosine
  modified_base 66: mod_base = OTHER; note = 2'-Omethylguanosine
  modified_base 67: mod_base = OTHER; note = 2'-Omethylguanosine
  modified_base 70: mod_base = OTHER; note = 2'-Omethyluridine
  modified_base 72: mod_base = OTHER; note = 2'-Omethyladenosine

SEQ ID NO: 3490 - RNA, 76 nt, synthetic construct
  source 1..76: mol_type = other RNA
  modified_base 1: mod_base = OTHER; note = 2'-Omethylguanosine
  modified_base 2: mod_base = OTHER; note = 2'-Omethylguanosine
  modified_base 3: mod_base = OTHER; note = 2'-Omethylcytosine
  modified_base 4: mod_base = OTHER; note = 2'-Omethyluridine
  modified_base 5: mod_base = OTHER; note = 2'-Omethylcytosine
  modified_base 6: mod_base = OTHER; note = 2'-Omethylcytosine
  modified_base 10: mod_base = OTHER; note = 2'-Omethylguanosine
  modified_base 11: mod_base = OTHER; note = 2'-Omethylcytosine
  modified_base 12: mod_base = OTHER; note = 2'-Omethylguanosine
  modified_base 13: mod_base = OTHER; note = 2'-Omethylcytosine
  modified_base 14: mod_base = OTHER; note = 2'-Omethyladenosine
  modified_base 15: mod_base = OTHER; note = 2'-fluoroadenosine
  modified_base 16: mod_base = OTHER; note = 2'-Omethyluridine
  modified_base 17: mod_base = OTHER; note = 2'-Omethylguanosine
  modified_base 18: mod_base = OTHER; note = 2'-Omethylguanosine
  modified_base 19: mod_base = OTHER; note = 2'-fluoroadenosine
  modified_base 20: mod_base = OTHER; note = 2'-Omethyluridine
  modified_base 25: mod_base = OTHER; note = 2'-Omethylcytosine
  modified_base 33: mod_base = OTHER; note = 2'-fluorouridine
  modified_base 35: mod_base = OTHER; note = Cytosine phosphorothiorate
  modified_base 37: mod_base = OTHER; note = Adenosine phosphorothiorate
  modified_base 38: mod_base = OTHER; note = Adenosine phosphorothiorate
  modified_base 41: mod_base = OTHER; note = 2'-Omethylcytosine
  modified_base 42: mod_base = OTHER; note = 2'-Omethyladenosine
  modified_base 43: mod_base = OTHER; note = 2'-Omethyladenosine
  modified_base 44: mod_base = OTHER; note = 2'-Omethyladenosine
  modified_base 49: mod_base = OTHER; note = 2'-Omethylguanosine
  modified_base 50: mod_base = OTHER; note = 2'-Omethylcytosine
  modified_base 52: mod_base = OTHER; note = 2'-Omethylguanosine
  modified_base 54: mod_base = OTHER; note = 2'-Omethyluridine
  modified_base 55: mod_base = OTHER; note = Uridine phosphorothiorate
  modified_base 56: mod_base = OTHER; note = 2'-Omethylcytosine
  modified_base 57: mod_base = OTHER; note = 2'-fluoroguanosine
  modified_base 59: mod_base = OTHER; note = 2'-Omethylguanosine
  modified_base 61: mod_base = OTHER; note = 2'-Omethylcytosine
  modified_base 65: mod_base = OTHER; note = 2'-Omethylcytosine
  modified_base 73: mod_base = OTHER; note = 2'-Omethylguanosine
ggctccgtggcgcaatggatagcgcattggacttcaaattcaaaggttgcgggttcgagtcccgccggagtcgcca

SEQ ID NO: 3491 - RNA, 76 nt, synthetic construct; identical to SEQ ID NO: 3289
  source 1..76: mol_type = other RNA
  modified_base 1: mod_base = OTHER; note = 2'-Omethylguanosine
  modified_base 16: mod_base = OTHER; note = 2'-Omethyluridine
  modified_base 18: mod_base = OTHER; note = 2'-Omethylguanosine
  modified_base 19: mod_base = OTHER; note = 2'-Omethylguanosine
  modified_base 54: mod_base = OTHER; note = 2'-Omethyluridine
  modified_base 55: mod_base = OTHER; note = Uridine phosphorothiorate
  modified_base 56: mod_base = OTHER; note = 2'-Omethylcytosine
  modified_base 59: mod_base = OTHER; note = 2'-Omethylguanosine
  modified_base 73: mod_base = OTHER; note = 2'-Omethylguanosine

SEQ ID NO: 3492 - RNA, 76 nt, synthetic construct; identical to SEQ ID NO: 3289
  source 1..76: mol_type = other RNA
  modified_base 1: mod_base = OTHER; note = 2'-Omethylguanosine
  modified_base 2: mod_base = OTHER; note = 2'-Omethylcytosine
  modified_base 3: mod_base = OTHER; note = 2'-Omethylcytosine
  modified_base 4: mod_base = OTHER; note = 2'-Omethyluridine
  modified_base 5: mod_base = OTHER; note = 2'-Omethylguanosine
  modified_base 6: mod_base = OTHER; note = 2'-Omethylguanosine
  modified_base 14: mod_base = OTHER; note = 2'-Omethyladenosine
  modified_base 15: mod_base = OTHER; note = 2'-fluoroguanosine
  modified_base 16: mod_base = OTHER; note = 2'-Omethyluridine
  modified_base 18: mod_base = OTHER; note = 2'-Omethylguanosine
  modified_base 19: mod_base = OTHER; note = 2'-Omethylguanosine
  modified_base 20: mod_base = OTHER; note = 2'-fluorouridine
  modified_base 22: mod_base = OTHER; note = 2'-Omethylguanosine
  modified_base 23: mod_base = OTHER; note = 2'-Omethyladenosine
  modified_base 24: mod_base = OTHER; note = 2'-Omethylguanosine
  modified_base 25: mod_base = OTHER; note = 2'-Omethylcytosine
  modified_base 73: mod_base = OTHER; note = 2'-Omethylguanosine

SEQ ID NO: 3493 - RNA, 76 nt, synthetic construct; identical to SEQ ID NO: 625
  source 1..76: mol_type = other RNA
  modified_base 1: mod_base = OTHER; note = 2'-Omethylguanosine phosphorothiorate
  modified_base 2: mod_base = OTHER; note = 2'-Omethylguanosine phosphorothiorate
  modified_base 3: mod_base = OTHER; note = 2'-Omethylcytosine
  modified_base 4: mod_base = OTHER; note = 2'-Omethyluridine
  modified_base 5: mod_base = OTHER; note = 2'-Omethylcytosine
  modified_base 6: mod_base = OTHER; note = 2'-Omethylcytosine
  modified_base 10: mod_base = OTHER; note = 2'-Omethylguanosine
  modified_base 11: mod_base = OTHER; note = 2'-Omethylcytosine
  modified_base 12: mod_base = OTHER; note = 2'-Omethylguanosine
  modified_base 13: mod_base = OTHER; note = 2'-Omethylcytosine
  modified_base 14: mod_base = OTHER; note = 2'-Omethyladenosine
  modified_base 15: mod_base = OTHER; note = 2'-fluoroadenosine
  modified_base 16: mod_base = OTHER; note = 2'-Omethyluridine
  modified_base 17: mod_base = OTHER; note = 2'-Omethylguanosine
  modified_base 18: mod_base = OTHER; note = 2'-Omethylguanosine
  modified_base 19: mod_base = OTHER; note = 2'-fluoroadenosine
  modified_base 20: mod_base = OTHER; note = 2'-Omethyluridine
  modified_base 22: mod_base = OTHER; note = 2'-Omethylguanosine
  modified_base 23: mod_base = OTHER; note = 2'-Omethylcytosine
  modified_base 24: mod_base = OTHER; note = 2'-Omethylguanosine
  modified_base 25: mod_base = OTHER; note = 2'-Omethylcytosine
  modified_base 38: mod_base = OTHER; note = Adenosine phosphorothiorate
  modified_base 39: mod_base = OTHER; note = Uridine phosphorothiorate
  modified_base 40: mod_base = OTHER; note = 2'-fluorouridine
  modified_base 43: mod_base = OTHER; note = 2'-Omethyladenosine
  modified_base 44: mod_base = OTHER; note = 2'-Omethyladenosine
  modified_base 45: mod_base = OTHER; note = 2'-Omethylguanosine
  modified_base 46: mod_base = OTHER; note = 2'-fluoroguanosine
  modified_base 48: mod_base = OTHER; note = 2'-fluorouridine
  modified_base 49: mod_base = OTHER; note = 2'-Omethylcytosine
  modified_base 50: mod_base = OTHER; note = 2'-Omethylcytosine
  modified_base 54: mod_base = OTHER; note = 2'-Omethyluridine phosphorothiorate
  modified_base 55: mod_base = OTHER; note = Uridine phosphorothiorate
  modified_base 56: mod_base = OTHER; note = 2'-Omethylcytosine
  modified_base 57: mod_base = OTHER; note = 2'-fluoroguanosine
  modified_base 61: mod_base = OTHER; note = 2'-Omethylcytosine
  modified_base 62: mod_base = OTHER; note = 2'-Omethylcytosine
  modified_base 63: mod_base = OTHER; note = 2'-fluorocytosine
  modified_base 64: mod_base = OTHER; note = 2'-Omethylguanosine
  modified_base 65: mod_base = OTHER; note = 2'-Omethylguanosine
  modified_base 66: mod_base = OTHER; note = 2'-Omethylcytosine
  modified_base 67: mod_base = OTHER; note = 2'-Omethylguanosine
  modified_base 68: mod_base = OTHER; note = 2'-Omethylguanosine
  modified_base 69: mod_base = OTHER; note = 2'-Omethyladenosine

SEQ ID NO: 3494 - RNA, 75 nt, synthetic construct; identical to SEQ ID NO: 3299
  source 1..75: mol_type = other RNA
  modified_base 2: mod_base = OTHER; note = Cytosine phosphorothiorate
  modified_base 9: mod_base = OTHER; note = 2'-fluoroguanosine phosphorothiorate
  modified_base 28: mod_base = OTHER; note = 2'-fluoroadenosine
  modified_base 38: mod_base = OTHER; note = Uridine phosphorothiorate
  modified_base 48: mod_base = OTHER; note = Cytosine phosphorothiorate
  modified_base 51: mod_base = OTHER; note = 2'-fluoroguanosine
  modified_base 73: mod_base = OTHER; note = 2'-Omethylcytosine

SEQ ID NO: 3495 - RNA, 76 nt, synthetic construct; identical to SEQ ID NO: 3318
  source 1..76: mol_type = other RNA
  modified_base 1: mod_base = OTHER; note = 2'-Omethylcytosine phosphorothiorate
  modified_base 2: mod_base = OTHER; note = 2'-Omethylcytosine phosphorothiorate
  modified_base 74: mod_base = OTHER; note = Cytosine phosphorothiorate
  modified_base 75: mod_base = OTHER; note = Cytosine phosphorothiorate

SEQ ID NO: 3496 - RNA, 74 nt, synthetic construct; identical to SEQ ID NO: 766
  source 1..74: mol_type = other RNA
  modified_base 1: mod_base = OTHER; note = 2'-Omethylguanosine phosphorothiorate
  modified_base 2: mod_base = OTHER; note = 2'-Omethylguanosine
  modified_base 3: mod_base = OTHER; note = 2'-Omethylcytosine
  modified_base 4: mod_base = OTHER; note = 2'-Omethyluridine
  modified_base 5: mod_base = OTHER; note = 2'-Omethylcytosine
  modified_base 6: mod_base = OTHER; note = 2'-Omethylcytosine
  modified_base 49: mod_base = OTHER; note = 2'-Omethylcytosine
  modified_base 50: mod_base = OTHER; note = 2'-Omethylcytosine
  modified_base 51: mod_base = OTHER; note = 2'-Omethylguanosine
  modified_base 52: mod_base = OTHER; note = 2'-Omethylguanosine
  modified_base 53: mod_base = OTHER; note = 2'-Omethylguanosine
  modified_base 61: mod_base = OTHER; note = 2'-Omethylcytosine
  modified_base 62: mod_base = OTHER; note = 2'-Omethylcytosine
  modified_base 63: mod_base = OTHER; note = 2'-fluorocytosine
  modified_base 64: mod_base = OTHER; note = 2'-Omethylguanosine
  modified_base 65: mod_base = OTHER; note = 2'-Omethylguanosine
  modified_base 66: mod_base = OTHER; note = 2'-Omethylcytosine
  modified_base 67: mod_base = OTHER; note = 2'-Omethylguanosine
  modified_base 68: mod_base = OTHER; note = 2'-Omethylguanosine
  modified_base 69: mod_base = OTHER; note = 2'-fluoroadenosine
  modified_base 71: mod_base = OTHER; note = 2'-Omethyluridine
  modified_base 72: mod_base = OTHER; note = 2'-Omethylcytosine
  modified_base 73: mod_base = OTHER; note = 2'-Omethylguanosine

SEQ ID NO: 3497 - RNA, 74 nt, synthetic construct; identical to SEQ ID NO: 3293
  source 1..74: mol_type = other RNA
  modified_base 1: mod_base = OTHER; note = Adenosine phosphorothiorate
  modified_base 3: mod_base = OTHER; note = 2'-fluorocytosine
  modified_base 10: mod_base = OTHER; note = 2'-Omethylcytosine
  modified_base 24: mod_base = OTHER; note = Guanosine phosphorothiorate
  modified_base 46: mod_base = OTHER; note = 2'-fluorouridine
  modified_base 53: mod_base = OTHER; note = 2'-fluorouridine
  modified_base 73: mod_base = OTHER; note = 2'-Omethylcytosine phosphorothiorate

SEQ ID NO: 3498 - RNA, 76 nt, synthetic construct; identical to SEQ ID NO: 625
  source 1..76: mol_type = other RNA
  modified_base 2: mod_base = OTHER; note = 2'-Omethylguanosine
  modified_base 3: mod_base = OTHER; note = Cytosine phosphorothiorate
  modified_base 4: mod_base = OTHER; note = 2'-Omethyluridine
  modified_base 5: mod_base = OTHER; note = 2'-fluorocytosine
  modified_base 6: mod_base = OTHER; note = Cytosine phosphorothiorate
  modified_base 9: mod_base = OTHER; note = Guanosine phosphorothiorate
  modified_base 10: mod_base = OTHER; note = 2'-fluoroguanosine phosphorothiorate
  modified_base 11: mod_base = OTHER; note = 2'-Omethylcytosine phosphorothiorate
  modified_base 13: mod_base = OTHER; note = Cytosine phosphorothiorate
  modified_base 14: mod_base = OTHER; note = 2'-Omethyladenosine
  modified_base 15: mod_base = OTHER; note = 2'-fluoroadenosine phosphorothiorate
  modified_base 16: mod_base = OTHER; note = 2'-fluorouridine
  modified_base 18: mod_base = OTHER; note = 2'-Omethylguanosine
  modified_base 20: mod_base = OTHER; note = 2'-Omethyluridine phosphorothiorate
  modified_base 24: mod_base = OTHER; note = 2'-Omethylguanosine
  modified_base 29: mod_base = OTHER; note = Guanosine phosphorothiorate
  modified_base 34: mod_base = OTHER; note = 2'-Omethyluridine
  modified_base 38: mod_base = OTHER; note = 2'-fluoroadenosine
  modified_base 42: mod_base = OTHER; note = 2'-Omethyladenosine
  modified_base 43: mod_base = OTHER; note = 2'-fluoroadenosine phosphorothiorate
  modified_base 47: mod_base = OTHER; note = 2'-fluorouridine
  modified_base 48: mod_base = OTHER; note = 2'-fluorouridine
  modified_base 49: mod_base = OTHER; note = 2'-fluorocytosine
  modified_base 56: mod_base = OTHER; note = 2'-fluorocytosine
  modified_base 57: mod_base = OTHER; note = 2'-fluoroguanosine
  modified_base 60: mod_base = OTHER; note = 2'-fluorouridine
  modified_base 65: mod_base = OTHER; note = 2'-fluoroguanosine
  modified_base 66: mod_base = OTHER; note = 2'-fluorocytosine
  modified_base 68: mod_base = OTHER; note = Guanosine phosphorothiorate
  modified_base 69: mod_base = OTHER; note = 2'-fluoroadenosine
  modified_base 70: mod_base = OTHER; note = 2'-fluoroguanosine
  modified_base 71: mod_base = OTHER; note = Uridine phosphorothiorate
  modified_base 73: mod_base = OTHER; note = Guanosine phosphorothiorate
  modified_base 74: mod_base = OTHER; note = 2'-Omethylcytosine

SEQ ID NO: 3499 - RNA, 75 nt, synthetic construct; identical to SEQ ID NO: 3306
  source 1..75: mol_type = other RNA
  modified_base 1: mod_base = OTHER; note = 2'-Omethylguanosine phosphorothiorate
  modified_base 2: mod_base = OTHER; note = 2'-Omethyladenosine phosphorothiorate
  modified_base 3: mod_base = OTHER; note = 2'-Omethylcytosine
  modified_base 4: mod_base = OTHER; note = 2'-Omethylcytosine
  modified_base 5: mod_base = OTHER; note = 2'-Omethyluridine
  modified_base 6: mod_base = OTHER; note = 2'-Omethylcytosine
  modified_base 10: mod_base = OTHER; note = 2'-Omethylguanosine
  modified_base 11: mod_base = OTHER; note = 2'-Omethylcytosine
  modified_base 12: mod_base = OTHER; note = 2'-Omethylguanosine
  modified_base 13: mod_base = OTHER; note = 2'-Omethylcytosine
  modified_base 16: mod_base = OTHER; note = 2'-Omethylcytosine
  modified_base 17: mod_base = OTHER; note = 2'-Omethylguanosine
  modified_base 18: mod_base = OTHER; note = 2'-Omethylguanosine
  modified_base 32: mod_base = OTHER; note = 2'-fluorouridine
  modified_base 34: mod_base = OTHER; note = Uridine phosphorothiorate
  modified_base 36: mod_base = OTHER; note = Guanosine phosphorothiorate
  modified_base 37: mod_base = OTHER; note = Adenosine phosphorothiorate
  modified_base 43: mod_base = OTHER; note = 2'-Omethyladenosine
  modified_base 44: mod_base = OTHER; note = 2'-Omethylguanosine
  modified_base 45: mod_base = OTHER; note = 2'-fluoroguanosine
  modified_base 46: mod_base = OTHER; note = 2'-fluorouridine
  modified_base 47: mod_base = OTHER; note = 2'-fluorouridine
  modified_base 55: mod_base = OTHER; note = 2'-Omethylcytosine
  modified_base 58: mod_base = OTHER; note = 2'-Omethyladenosine
  modified_base 60: mod_base = OTHER; note = 2'-Omethylcytosine
  modified_base 61: mod_base = OTHER; note = 2'-Omethyladenosine
  modified_base 62: mod_base = OTHER; note = 2'-fluorocytosine
  modified_base 63: mod_base = OTHER; note = 2'-Omethylguanosine
  modified_base 64: mod_base = OTHER; note = 2'-Omethyluridine
  modified_base 65: mod_base = OTHER; note = 2'-Omethylcytosine
  modified_base 66: mod_base = OTHER; note = 2'-Omethylguanosine
  modified_base 67: mod_base = OTHER; note = 2'-Omethylguanosine
  modified_base 72: mod_base = OTHER; note = 2'-Omethyladenosine

SEQ ID NO: 3500 - RNA, 86 nt, synthetic construct; identical to SEQ ID NO: 3290
  source 1..86: mol_type = other RNA
  modified_base 1: mod_base = OTHER; note = 2'-Omethyladenosine
  modified_base 10: mod_base = OTHER; note = 2'-Omethylguanosine
  modified_base 13: mod_base = OTHER; note = 2'-Omethylguanosine
  modified_base 16: mod_base = OTHER; note = Uridine phosphorothiorate
  modified_base 17: mod_base = OTHER; note = Guanosine phosphorothiorate
  modified_base 18: mod_base = OTHER; note = 2'-Omethylguanosine phosphorothiorate
  modified_base 19: mod_base = OTHER; note = Uridine phosphorothiorate
  modified_base 20: mod_base = OTHER; note = 2'-Omethyluridine phosphorothiorate
  modified_base 25: mod_base = OTHER; note = 2'-Omethylcytosine
  modified_base 29: mod_base = OTHER; note = 2'-Omethylguanosine
  modified_base 33: mod_base = OTHER; note = 2'-fluorouridine phosphorothiorate
  modified_base 35: mod_base = OTHER; note = Cytosine phosphorothiorate
  modified_base 37: mod_base = OTHER; note = Guanosine phosphorothiorate
  modified_base 38: mod_base = OTHER; note = Adenosine phosphorothiorate
  modified_base 41: mod_base = OTHER; note = 2'-fluorocytosine
  modified_base 42: mod_base = OTHER; note = Adenosine phosphorothiorate
  modified_base 43: mod_base = OTHER; note = 2'-Omethyladenosine
  modified_base 44: mod_base = OTHER; note = 2'-fluorouridine
  modified_base 57: mod_base = OTHER; note = Guanosine phosphorothiorate
  modified_base 60: mod_base = OTHER; note = 2'-Omethyluridine
  modified_base 62: mod_base = OTHER; note = 2'-Omethylguanosine
  modified_base 64: mod_base = OTHER; note = Uridine phosphorothiorate
  modified_base 65: mod_base = OTHER; note = Uridine phosphorothiorate
  modified_base 66: mod_base = OTHER; note = 2'-Omethylcytosine
  modified_base 67: mod_base = OTHER; note = Guanosine phosphorothiorate
  modified_base 70: mod_base = OTHER; note = Cytosine phosphorothiorate
  modified_base 72: mod_base = OTHER; note = 2'-Omethylcytosine
  modified_base 73: mod_base = OTHER; note = 2'-fluorocytosine
  modified_base 75: mod_base = OTHER; note = 2'-Omethylcytosine
  modified_base 81: mod_base = OTHER; note = 2'-Omethylguanosine
  modified_base 83: mod_base = OTHER; note = 2'-Omethyladenosine

SEQ ID NO: 3501 - RNA, 85 nt, synthetic construct; identical to SEQ ID NO: 3286
  source 1..85: mol_type = other RNA
  modified_base 1: mod_base = OTHER; note = Cytosine phosphorothiorate
  modified_base 25: mod_base = OTHER; note = 2'-fluoroguanosine
  modified_base 43: mod_base = OTHER; note = 2'-Omethyluridine
  modified_base 46: mod_base = OTHER; note = Adenosine phosphorothiorate
  modified_base 54: mod_base = OTHER; note = 2'-fluorocytosine
  modified_base 59: mod_base = OTHER; note = 2'-fluorouridine
  modified_base 76: mod_base = OTHER; note = 2'-fluorocytosine

SEQ ID NO: 3502 - RNA, 86 nt, synthetic construct; identical to SEQ ID NO: 3290
  source 1..86: mol_type = other RNA
  modified_base 1: mod_base = OTHER; note = 2'-Omethyladenosine
  modified_base 60: mod_base = OTHER; note = 2'-Omethyluridine
  modified_base 62: mod_base = OTHER; note = 2'-Omethylguanosine
  modified_base 83: mod_base = OTHER; note = 2'-Omethyladenosine

SEQ ID NO: 3503 - RNA, 76 nt, synthetic construct; identical to SEQ ID NO: 3447
  source 1..76: mol_type = other RNA
  modified_base 1: mod_base = OTHER; note = 2'-Omethylguanosine
  modified_base 2: mod_base = OTHER; note = 2'-Omethylcytosine
  modified_base 3: mod_base = OTHER; note = 2'-Omethylcytosine
  modified_base 4: mod_base = OTHER; note = 2'-Omethylcytosine
  modified_base 5: mod_base = OTHER; note = 2'-Omethylguanosine
  modified_base 6: mod_base = OTHER; note = 2'-Omethyladenosine
  modified_base 16: mod_base = OTHER; note = 2'-Omethyluridine
  modified_base 17: mod_base = OTHER; note = 2'-Omethylguanosine
  modified_base 18: mod_base = OTHER; note = 2'-Omethylguanosine
  modified_base 33: mod_base = OTHER; note = 2'-fluorouridine
  modified_base 35: mod_base = OTHER; note = Cytosine phosphorothiorate
  modified_base 37: mod_base = OTHER; note = Adenosine phosphorothiorate
  modified_base 38: mod_base = OTHER; note = Adenosine phosphorothiorate
  modified_base 44: mod_base = OTHER; note = 2'-Omethyladenosine
  modified_base 45: mod_base = OTHER; note = 2'-Omethylguanosine
  modified_base 46: mod_base = OTHER; note = 2'-fluoroguanosine
  modified_base 47: mod_base = OTHER; note = 2'-fluorouridine
  modified_base 48: mod_base = OTHER; note = 2'-fluorouridine
  modified_base 56: mod_base = OTHER; note = 2'-Omethylcytosine
  modified_base 59: mod_base = OTHER; note = 2'-Omethylguanosine
  modified_base 61: mod_base = OTHER; note = 2'-Omethylcytosine
  modified_base 62: mod_base = OTHER; note = 2'-Omethylcytosine
  modified_base 63: mod_base = OTHER; note = 2'-fluorocytosine
  modified_base 64: mod_base = OTHER; note = 2'-Omethylguanosine
  modified_base 65: mod_base = OTHER; note = 2'-Omethylguanosine
  modified_base 66: mod_base = OTHER; note = 2'-Omethylcytosine
  modified_base 67: mod_base = OTHER; note = 2'-Omethyluridine
  modified_base 68: mod_base = OTHER; note = 2'-Omethylcytosine
  modified_base 73: mod_base = OTHER; note = 2'-Omethylguanosine

SEQ ID NO: 3504 - RNA, 75 nt, synthetic construct; identical to SEQ ID NO: 3336
  source 1..75: mol_type = other RNA
  modified_base 1: mod_base = OTHER; note = 2'-Omethylcytosine
  modified_base 2: mod_base = OTHER; note = 2'-Omethylcytosine
  modified_base 12: mod_base = OTHER; note = 2'-fluorocytosine
  modified_base 18: mod_base = OTHER; note = 2'-Omethylguanosine phosphorothiorate
  modified_base 19: mod_base = OTHER; note = Uridine phosphorothiorate
  modified_base 20: mod_base = OTHER; note = 2'-fluoroadenosine
  modified_base 21: mod_base = OTHER; note = 2'-Omethylguanosine
  modified_base 23: mod_base = OTHER; note = 2'-fluoroguanosine phosphorothiorate
  modified_base 27: mod_base = OTHER; note = Cytosine phosphorothiorate
  modified_base 35: mod_base = OTHER; note = 2'-fluoroadenosine
  modified_base 37: mod_base = OTHER; note = 2'-fluoroadenosine phosphorothiorate
  modified_base 39: mod_base = OTHER; note = Cytosine phosphorothiorate
  modified_base 45: mod_base = OTHER; note = Guanosine phosphorothiorate
  modified_base 47: mod_base = OTHER; note = 2'-fluorocytosine
  modified_base 49: mod_base = OTHER; note = 2'-fluoroadenosine phosphorothiorate
  modified_base 54: mod_base = OTHER; note = 2'-Omethyluridine phosphorothiorate
  modified_base 60: mod_base = OTHER; note = 2'-fluorocytosine
  modified_base 63: mod_base = OTHER; note = 2'-fluorouridine
  modified_base 72: mod_base = OTHER; note = Guanosine phosphorothiorate
  modified_base 74: mod_base = OTHER; note = 2'-Omethylcytosine

SEQ ID NO: 3505 - RNA, 76 nt, synthetic construct; identical to SEQ ID NO: 625
  source 1..76: mol_type = other RNA
  modified_base 1: mod_base = OTHER; note = 2'-Omethylguanosine
  modified_base 2: mod_base = OTHER; note = 2'-Omethylguanosine
  modified_base 3: mod_base = OTHER; note = 2'-Omethylcytosine
  modified_base 4: mod_base = OTHER; note = 2'-Omethyluridine
  modified_base 5: mod_base = OTHER; note = 2'-Omethylcytosine
  modified_base 6: mod_base = OTHER; note = 2'-Omethylcytosine phosphorothiorate
  modified_base 12: mod_base = OTHER; note = 2'-Omethylguanosine phosphorothiorate
  modified_base 13: mod_base = OTHER; note = 2'-Omethylcytosine
  modified_base 14: mod_base = OTHER; note = 2'-Omethyladenosine
  modified_base 16: mod_base = OTHER; note = 2'-Omethyluridine
  modified_base 17: mod_base = OTHER; note = 2'-Omethylguanosine
  modified_base 18: mod_base = OTHER; note = 2'-Omethylguanosine
  modified_base 19: mod_base = OTHER; note = 2'-fluoroadenosine phosphorothiorate
  modified_base 21: mod_base = OTHER; note = 2'-fluoroadenosine phosphorothiorate
  modified_base 22: mod_base = OTHER; note = 2'-fluoroguanosine phosphorothiorate
  modified_base 24: mod_base = OTHER; note = 2'-Omethylguanosine phosphorothiorate
  modified_base 25: mod_base = OTHER; note = 2'-Omethylcytosine
  modified_base 29: mod_base = OTHER; note = 2'-Omethylguanosine
  modified_base 30: mod_base = OTHER; note = 2'-fluoroguanosine phosphorothiorate
  modified_base 31: mod_base = OTHER; note = 2'-Omethyladenosine phosphorothiorate
  modified_base 33: mod_base = OTHER; note = 2'-fluorouridine
  modified_base 37: mod_base = OTHER; note = Adenosine phosphorothiorate
  modified_base 41: mod_base = OTHER; note = 2'-Omethylcytosine
  modified_base 44: mod_base = OTHER; note = 2'-Omethyladenosine phosphorothiorate
  modified_base 45: mod_base = OTHER; note = 2'-Omethylguanosine
  modified_base 49: mod_base = OTHER; note = 2'-Omethylcytosine
  modified_base 50: mod_base = OTHER; note = 2'-Omethylcytosine
  modified_base 52: mod_base = OTHER; note = 2'-Omethylguanosine
  modified_base 53: mod_base = OTHER; note = 2'-Omethylguanosine phosphorothiorate
  modified_base 55: mod_base = OTHER; note = Uridine phosphorothiorate
  modified_base 57: mod_base = OTHER; note = 2'-Omethylguanosine phosphorothiorate
  modified_base 59: mod_base = OTHER; note = 2'-Omethylguanosine
  modified_base 61: mod_base = OTHER; note = 2'-Omethylcytosine phosphorothiorate
  modified_base 62: mod_base = OTHER; note = 2'-Omethylcytosine
  modified_base 63: mod_base = OTHER; note = 2'-fluorocytosine
  modified_base 64: mod_base = OTHER; note = 2'-Omethylguanosine phosphorothiorate
  modified_base 65: mod_base = OTHER; note = 2'-Omethylguanosine phosphorothiorate
  modified_base 66: mod_base = OTHER; note = 2'-fluorocytosine
  modified_base 68: mod_base = OTHER; note = 2'-fluoroguanosine
  modified_base 69: mod_base = OTHER; note = 2'-fluoroadenosine phosphorothiorate
  modified_base 72: mod_base = OTHER; note = 2'-Omethylcytosine
  modified_base 73: mod_base = OTHER; note = 2'-fluoroguanosine phosphorothiorate
  modified_base 74: mod_base = OTHER; note = 2'-fluorocytosine
  modified_base 75: mod_base = OTHER; note = 2'-fluorocytosine
  modified_base 76: mod_base = OTHER; note = 2'-Omethyladenosine

SEQ ID NO: 3506 - RNA, 86 nt, synthetic construct; identical to SEQ ID NO: 3290
  source 1..86: mol_type = other RNA
  modified_base 38: mod_base = OTHER; note = 2'-fluoroadenosine

SEQ ID NO: 3507 - RNA, 75 nt, synthetic construct; identical to SEQ ID NO: 1045
  source 1..75: mol_type = other RNA
  modified_base 1: mod_base = OTHER; note = 2'-Omethylguanosine phosphorothiorate
  modified_base 2: mod_base = OTHER; note = 2'-Omethylguanosine phosphorothiorate
  modified_base 14: mod_base = OTHER; note = 2'-Omethyladenosine
  modified_base 23: mod_base = OTHER; note = 2'-fluorocytosine
  modified_base 25: mod_base = OTHER; note = 2'-fluorocytosine
  modified_base 36: mod_base = OTHER; note = 2'-fluoroadenosine
  modified_base 38: mod_base = OTHER; note = 2'-Omethyladenosine
  modified_base 48: mod_base = OTHER; note = 2'-fluorocytosine
  modified_base 60: mod_base = OTHER; note = 2'-fluorocytosine
  modified_base 64: mod_base = OTHER; note = 2'-fluoroguanosine
  modified_base 67: mod_base = OTHER; note = Guanosine phosphorothiorate
  modified_base 68: mod_base = OTHER; note = 2'-fluoroadenosine
  modified_base 74: mod_base = OTHER; note = Cytosine phosphorothiorate

SEQ ID NO: 3508 - RNA, 76 nt, synthetic construct; identical to SEQ ID NO: 3295
  source 1..76: mol_type = other RNA
  modified_base 1: mod_base = OTHER; note = 2'-Omethylcytosine phosphorothiorate
  modified_base 2: mod_base = OTHER; note = 2'-Omethylcytosine
  modified_base 3: mod_base = OTHER; note = 2'-fluorouridine phosphorothiorate
  modified_base 6: mod_base = OTHER; note = 2'-fluoroguanosine phosphorothiorate
  modified_base 9: mod_base = OTHER; note = 2'-fluoroadenosine phosphorothiorate
  modified_base 10: mod_base = OTHER; note = 2'-Omethylguanosine phosphorothiorate
  modified_base 22: mod_base = OTHER; note = 2'-fluoroguanosine phosphorothiorate
  modified_base 27: mod_base = OTHER; note = 2'-fluoroguanosine phosphorothiorate
  modified_base 28: mod_base = OTHER; note = Adenosine phosphorothiorate
  modified_base 29: mod_base = OTHER; note = 2'-fluoroguanosine
  modified_base 46: mod_base = OTHER; note = 2'-fluoroguanosine phosphorothiorate
  modified_base 47: mod_base = OTHER; note = 2'-fluorouridine phosphorothiorate
  modified_base 52: mod_base = OTHER; note = 2'-Omethylguanosine
  modified_base 57: mod_base = OTHER; note = Guanosine phosphorothiorate
  modified_base 66: mod_base = OTHER; note = 2'-fluorouridine
  modified_base 72: mod_base = OTHER; note = 2'-fluoroguanosine
  modified_base 74: mod_base = OTHER; note = 2'-Omethylcytosine phosphorothiorate

SEQ ID NO: 3509 - DNA, 76 bp, synthetic construct; identical to SEQ ID NO: 1924
  source 1..76: mol_type = other DNA
  misc_feature 1..9: note = RNA
  misc_feature 10..13: note = DNA
  misc_feature 14..21: note = RNA
  misc_feature 22..25: note = DNA
  misc_feature 26..76: note = RNA

SEQ ID NO: 3510 - RNA, 76 nt, synthetic construct; identical to SEQ ID NO: 625
  source 1..76: mol_type = other RNA
  modified_base 1: mod_base = OTHER; note = 2'-Omethylguanosine phosphorothiorate
  modified_base 2: mod_base = OTHER; note = 2'-Omethylguanosine
  modified_base 18: mod_base = OTHER; note = 2'-Omethylguanosine
  modified_base 20: mod_base = OTHER; note = 2'-Omethyluridine
  modified_base 33: mod_base = OTHER; note = 2'-fluorouridine
  modified_base 35: mod_base = OTHER; note = Cytosine phosphorothiorate
  modified_base 37: mod_base = OTHER; note = Adenosine phosphorothiorate
  modified_base 38: mod_base = OTHER; note = Adenosine phosphorothiorate
  modified_base 52: mod_base = OTHER; note = 2'-Omethylguanosine
  modified_base 57: mod_base = OTHER; note = 2'-Omethylguanosine
  modified_base 62: mod_base = OTHER; note = 2'-Omethylcytosine
  modified_base 73: mod_base = OTHER; note = 2'-Omethylguanosine
  modified_base 75: mod_base = OTHER; note = 2'-fluorocytosine phosphorothiorate

SEQ ID NO: 3511 - RNA, 86 nt, synthetic construct
  source 1..86: mol_type = other RNA
accaggatggccgagtggttaaggcgttggacttcagatccaatggacaattgtccacgtgggttcgagccccactcctggtacca

SEQ ID NO: 3512 - RNA, 85 nt, synthetic construct; identical to SEQ ID NO: 3310
  source 1..85: mol_type = other RNA
  modified_base 1: mod_base = OTHER; note = 2'-Omethylcytosine
  modified_base 11: mod_base = OTHER; note = Cytosine phosphorothiorate
  modified_base 17: mod_base = OTHER; note = 2'-Omethylguanosine
  modified_base 44: mod_base = OTHER; note = 2'-Omethylguanosine
  modified_base 55: mod_base = OTHER; note = 2'-Omethylcytosine
  modified_base 57: mod_base = OTHER; note = 2'-Omethylcytosine
  modified_base 59: mod_base = OTHER; note = 2'-Omethyluridine
  modified_base 67: mod_base = OTHER; note = Adenosine phosphorothiorate
  modified_base 84: mod_base = OTHER; note = 2'-fluorocytosine phosphorothiorate

SEQ ID NO: 3513 - RNA, 76 nt, synthetic construct; identical to SEQ ID NO: 3289
  source 1..76: mol_type = other RNA
  modified_base 1: mod_base = OTHER; note = 2'-Omethylguanosine
  modified_base 18: mod_base = OTHER; note = 2'-Omethylguanosine
  modified_base 19: mod_base = OTHER; note = 2'-Omethylguanosine
  modified_base 33: mod_base = OTHER; note = 2'-fluorouridine
  modified_base 34: mod_base = OTHER; note = 2'-Omethyluridine
  modified_base 35: mod_base = OTHER; note = Uridine phosphorothiorate
  modified_base 37: mod_base = OTHER; note = Adenosine phosphorothiorate
  modified_base 38: mod_base = OTHER; note = Adenosine phosphorothiorate
  modified_base 41: mod_base = OTHER; note = 2'-fluorouridine
  modified_base 42: mod_base = OTHER; note = 2'-Omethylguanosine
  modified_base 43: mod_base = OTHER; note = 2'-Omethyladenosine
  modified_base 44: mod_base = OTHER; note = 2'-fluoroguanosine
  modified_base 50: mod_base = OTHER; note = 2'-Omethyladenosine
  modified_base 52: mod_base = OTHER; note = 2'-Omethylguanosine
  modified_base 73: mod_base = OTHER; note = 2'-Omethylguanosine

SEQ ID NO: 3514 - RNA, 85 nt, synthetic construct; identical to SEQ ID NO: 3297
  source 1..85: mol_type = other RNA
  modified_base 1: mod_base = OTHER; note = 2'-Omethylguanosine
  modified_base 14: mod_base = OTHER; note = 2'-Omethyladenosine
  modified_base 15: mod_base = OTHER; note = 2'-fluoroguanosine
  modified_base 16: mod_base = OTHER; note = 2'-Omethyluridine
  modified_base 17: mod_base = OTHER; note = 2'-Omethylguanosine
  modified_base 18: mod_base = OTHER; note = 2'-Omethylguanosine
  modified_base 19: mod_base = OTHER; note = 2'-fluorouridine
  modified_base 20: mod_base = OTHER; note = 2'-Omethyluridine
  modified_base 63: mod_base = OTHER; note = 2'-Omethyluridine
  modified_base 65: mod_base = OTHER; note = 2'-Omethylcytosine
  modified_base 68: mod_base = OTHER; note = 2'-Omethyladenosine
  modified_base 82: mod_base = OTHER; note = 2'-Omethylguanosine

SEQ ID NO: 3515 - RNA, 85 nt, synthetic construct; identical to SEQ ID NO: 3286
  source 1..85: mol_type = other RNA
  modified_base 1: mod_base = OTHER; note = 2'-Omethylcytosine
  modified_base 3: mod_base = OTHER; note = Adenosine phosphorothiorate
  modified_base 10: mod_base = OTHER; note = Cytosine phosphorothiorate
  modified_base 27: mod_base = OTHER; note = 2'-fluorouridine
  modified_base 29: mod_base = OTHER; note = 2'-fluoroguanosine
  modified_base 35: mod_base = OTHER; note = 2'-fluoroadenosine
  modified_base 36: mod_base = OTHER; note = Guanosine phosphorothiorate
  modified_base 42: mod_base = OTHER; note = Adenosine phosphorothiorate
  modified_base 50: mod_base = OTHER; note = Adenosine phosphorothiorate
  modified_base 53: mod_base = OTHER; note = 2'-Omethyluridine
  modified_base 56: mod_base = OTHER; note = 2'-fluoroguanosine
  modified_base 60: mod_base = OTHER; note = 2'-fluoroguanosine
  modified_base 74: mod_base = OTHER; note = 2'-fluorocytosine
  modified_base 80: mod_base = OTHER; note = 2'-Omethylguanosine phosphorothiorate
  modified_base 84: mod_base = OTHER; note = Cytosine phosphorothiorate

SEQ ID NO: 3516 - RNA, 76 nt, synthetic construct; identical to SEQ ID NO: 3318
  source 1..76: mol_type = other RNA
  modified_base 1: mod_base = OTHER; note = 2'-Omethylcytosine phosphorothiorate
  modified_base 2: mod_base = OTHER; note = 2'-Omethylcytosine phosphorothiorate
  modified_base 3: mod_base = OTHER; note = 2'-Omethyluridine
  modified_base 4: mod_base = OTHER; note = 2'-Omethyluridine
  modified_base 5: mod_base = OTHER; note = 2'-Omethylcytosine
  modified_base 6: mod_base = OTHER; note = 2'-Omethylguanosine
  modified_base 16: mod_base = OTHER; note = 2'-Omethyluridine
  modified_base 18: mod_base = OTHER; note = 2'-Omethylguanosine
  modified_base 19: mod_base = OTHER; note = 2'-Omethylguanosine
  modified_base 33: mod_base = OTHER; note = 2'-fluorouridine
  modified_base 35: mod_base = OTHER; note = Uridine phosphorothiorate
  modified_base 37: mod_base = OTHER; note = Guanosine phosphorothiorate
  modified_base 38: mod_base = OTHER; note = Adenosine phosphorothiorate
  modified_base 44: mod_base = OTHER; note = 2'-Omethyladenosine
  modified_base 45: mod_base = OTHER; note = 2'-Omethylguanosine
  modified_base 46: mod_base = OTHER; note = 2'-fluoroguanosine
  modified_base 47: mod_base = OTHER; note = 2'-fluorouridine
  modified_base 48: mod_base = OTHER; note = 2'-fluorocytosine
  modified_base 56: mod_base = OTHER; note = 2'-Omethylcytosine
  modified_base 59: mod_base = OTHER; note = 2'-Omethyladenosine
  modified_base 61: mod_base = OTHER; note = 2'-Omethylcytosine
  modified_base 62: mod_base = OTHER; note = 2'-Omethylcytosine
  modified_base 63: mod_base = OTHER; note = 2'-fluoroguanosine
  modified_base 64: mod_base = OTHER; note = 2'-Omethylguanosine
  modified_base 65: mod_base = OTHER; note = 2'-Omethylcytosine
  modified_base 66: mod_base = OTHER; note = 2'-Omethyluridine
  modified_base 67: mod_base = OTHER; note = 2'-Omethylcytosine
  modified_base 68: mod_base = OTHER; note = 2'-Omethylguanosine
  modified_base 73: mod_base = OTHER; note = 2'-Omethyladenosine

SEQ ID NO: 3517 - RNA, 75 nt, synthetic construct; identical to SEQ ID NO: 3306
  source 1..75: mol_type = other RNA
  modified_base 1: mod_base = OTHER; note = 2'-Omethylguanosine
  modified_base 2: mod_base = OTHER; note = 2'-Omethyladenosine

SEQ ID NO: 3518 - RNA, 76 nt, synthetic construct; identical to SEQ ID NO: 625
  source 1..76: mol_type = other RNA
  modified_base 2: mod_base = OTHER; note = 2'-Omethylguanosine
  modified_base 4: mod_base = OTHER; note = Uridine phosphorothiorate
  modified_base 5: mod_base = OTHER; note = 2'-Omethylcytosine
  modified_base 6: mod_base = OTHER; note = 2'-Omethylcytosine
  modified_base 8: mod_base = OTHER; note = Uridine phosphorothiorate
  modified_base 10: mod_base = OTHER; note = 2'-Omethylguanosine
  modified_base 11: mod_base = OTHER; note = Cytosine phosphorothiorate
  modified_base 12: mod_base = OTHER; note = Guanosine phosphorothiorate
  modified_base 13: mod_base = OTHER; note = 2'-Omethylcytosine
  modified_base 14: mod_base = OTHER; note = Adenosine phosphorothiorate
  modified_base 15: mod_base = OTHER; note = 2'-fluoroadenosine
  modified_base 17: mod_base = OTHER; note = Guanosine phosphorothiorate
  modified_base 18: mod_base = OTHER; note = 2'-fluoroguanosine
  modified_base 21: mod_base = OTHER; note = Adenosine phosphorothiorate
  modified_base 22: mod_base = OTHER; note = 2'-fluoroguanosine
  modified_base 24: mod_base = OTHER; note = 2'-fluoroguanosine phosphorothiorate
  modified_base 25: mod_base = OTHER; note = 2'-fluorocytosine
  modified_base 28: mod_base = OTHER; note = 2'-fluorouridine
  modified_base 39: mod_base = OTHER; note = Uridine phosphorothiorate
  modified_base 40: mod_base = OTHER; note = 2'-fluorouridine
  modified_base 42: mod_base = OTHER; note = Adenosine phosphorothiorate
  modified_base 43: mod_base = OTHER; note = 2'-Omethyladenosine phosphorothiorate
  modified_base 44: mod_base = OTHER; note = 2'-Omethyladenosine
  modified_base 46: mod_base = OTHER; note = 2'-fluoroguanosine
  modified_base 50: mod_base = OTHER; note = Cytosine phosphorothiorate
  modified_base 51: mod_base = OTHER; note = Guanosine phosphorothiorate
  modified_base 52: mod_base = OTHER; note = 2'-fluoroguanosine phosphorothiorate
  modified_base 54: mod_base = OTHER; note = 2'-fluorouridine
  modified_base 61: mod_base = OTHER; note = 2'-fluorocytosine
  modified_base 62: mod_base = OTHER; note = Cytosine phosphorothiorate
  modified_base 63: mod_base = OTHER; note = Cytosine phosphorothiorate
  modified_base 64: mod_base = OTHER; note = 2'-Omethylguanosine
  modified_base 65: mod_base = OTHER; note = 2'-Omethylguanosine
  modified_base 67: mod_base = OTHER; note = 2'-Omethylguanosine
  modified_base 69: mod_base = OTHER; note = Adenosine phosphorothiorate
  modified_base 70: mod_base = OTHER; note = 2'-fluoroguanosine
  modified_base 71: mod_base = OTHER; note = 2'-fluorouridine
  modified_base 72: mod_base = OTHER; note = 2'-fluorocytosine

SEQ ID NO: 3519 - RNA, 76 nt, synthetic construct; identical to SEQ ID NO: 625
  source 1..76: mol_type = other RNA
  modified_base 2: mod_base = OTHER; note = Guanosine phosphorothiorate
  modified_base 3: mod_base = OTHER; note = Cytosine phosphorothiorate
  modified_base 4: mod_base = OTHER; note = 2'-fluorouridine
  modified_base 10: mod_base = OTHER; note = 2'-fluoroguanosine
  modified_base 13: mod_base = OTHER; note = 2'-Omethylcytosine
  modified_base 14: mod_base = OTHER; note = 2'-Omethyladenosine
  modified_base 15: mod_base = OTHER; note = 2'-Omethyladenosine
  modified_base 17: mod_base = OTHER; note = Guanosine phosphorothiorate
  modified_base 18: mod_base = OTHER; note = 2'-fluoroguanosine
  modified_base 19: mod_base = OTHER; note = Adenosine phosphorothiorate
  modified_base 20: mod_base = OTHER; note = 2'-fluorouridine phosphorothiorate
  modified_base 23: mod_base = OTHER; note = 2'-fluorocytosine
  modified_base 24: mod_base = OTHER; note = 2'-fluoroguanosine phosphorothiorate
  modified_base 25: mod_base = OTHER; note = 2'-fluorocytosine
  modified_base 26: mod_base = OTHER; note = 2'-Omethyladenosine
  modified_base 33: mod_base = OTHER; note = 2'-fluorouridine
  modified_base 34: mod_base = OTHER; note = Uridine phosphorothiorate
  modified_base 40: mod_base = OTHER; note = 2'-Omethyluridine
  modified_base 42: mod_base = OTHER; note = 2'-Omethyladenosine
  modified_base 44: mod_base = OTHER; note = 2'-fluoroadenosine
  modified_base 46: mod_base = OTHER; note = 2'-fluoroguanosine phosphorothiorate
  modified_base 47: mod_base = OTHER; note = 2'-Omethyluridine
  modified_base 52: mod_base = OTHER; note = 2'-fluoroguanosine
  modified_base 56: mod_base = OTHER; note = 2'-Omethylcytosine
  modified_base 59: mod_base = OTHER; note = 2'-Omethylguanosine phosphorothiorate
  modified_base 60: mod_base = OTHER; note = 2'-fluorouridine
  modified_base 61: mod_base = OTHER; note = Cytosine phosphorothiorate
  modified_base 63: mod_base = OTHER; note = 2'-fluorocytosine phosphorothiorate
  modified_base 64: mod_base = OTHER; note = 2'-fluoroguanosine
  modified_base 70: mod_base = OTHER; note = 2'-Omethylguanosine
  modified_base 72: mod_base = OTHER; note = 2'-Omethylcytosine
  modified_base 73: mod_base = OTHER; note = 2'-Omethylguanosine
  modified_base 75: mod_base = OTHER; note = 2'-fluorocytosine
  modified_base 76: mod_base = OTHER; note = 2'-fluoroadenosine

SEQ ID NO: 3520 - RNA, 85 nt, synthetic construct; identical to SEQ ID NO: 3286
  source 1..85: mol_type = other RNA
  modified_base 1: mod_base = OTHER; note = 2'-Omethylcytosine
  modified_base 11: mod_base = OTHER; note = Cytosine phosphorothiorate
  modified_base 26: mod_base = OTHER; note = 2'-Omethyluridine
  modified_base 28: mod_base = OTHER; note = 2'-fluoroguanosine
  modified_base 32: mod_base = OTHER; note = 2'-fluorouridine
  modified_base 36: mod_base = OTHER; note = Guanosine phosphorothiorate
  modified_base 44: mod_base = OTHER; note = 2'-Omethylguanosine
  modified_base 48: mod_base = OTHER; note = Adenosine phosphorothiorate
  modified_base 57: mod_base = OTHER; note = 2'-Omethylcytosine
  modified_base 59: mod_base = OTHER; note = 2'-Omethyluridine
  modified_base 67: mod_base = OTHER; note = Adenosine phosphorothiorate
  modified_base 84: mod_base = OTHER; note = Cytosine phosphorothiorate

SEQ ID NO: 3521 - RNA, 85 nt, synthetic construct; identical to SEQ ID NO: 3301
  source 1..85: mol_type = other RNA
  modified_base 1: mod_base = OTHER; note = 2'-Omethylguanosine phosphorothiorate
  modified_base 3: mod_base = OTHER; note = 2'-Omethyluridine phosphorothiorate
  modified_base 4: mod_base = OTHER; note = 2'-Omethylguanosine phosphorothiorate
  modified_base 9: mod_base = OTHER; note = 2'-fluoroguanosine
  modified_base 11: mod_base = OTHER; note = 2'-fluorocytosine
  modified_base 14: mod_base = OTHER; note = 2'-fluoroadenosine phosphorothiorate
  modified_base 15: mod_base = OTHER; note = 2'-fluoroguanosine
  modified_base 17: mod_base = OTHER; note = 2'-Omethylguanosine
  modified_base 18: mod_base = OTHER; note = 2'-Omethylguanosine
  modified_base 20: mod_base = OTHER; note = 2'-Omethyluridine
  modified_base 25: mod_base = OTHER; note = 2'-Omethylcytosine phosphorothiorate
  modified_base 26: mod_base = OTHER; note = 2'-fluoroguanosine
  modified_base 30: mod_base = OTHER; note = 2'-fluoroguanosine
  modified_base 35: mod_base = OTHER; note = Uridine phosphorothiorate
  modified_base 36: mod_base = OTHER; note = 2'-fluoroadenosine phosphorothiorate
  modified_base 44: mod_base = OTHER; note = 2'-Omethyluridine
  modified_base 46: mod_base = OTHER; note = 2'-Omethylguanosine
  modified_base 56: mod_base = OTHER; note = 2'-fluoroguanosine
  modified_base 57: mod_base = OTHER; note = 2'-Omethylcytosine
  modified_base 59: mod_base = OTHER; note = 2'-Omethylcytosine
  modified_base 82: mod_base = OTHER; note = Guanosine phosphorothiorate

SEQ ID NO: 3522 - RNA, 75 nt, synthetic construct; identical to SEQ ID NO: 3306
  source 1..75: mol_type = other RNA
  modified_base 49: mod_base = OTHER; note = 2'-Omethylcytosine
  modified_base 72: mod_base = OTHER; note = 2'-Omethyladenosine

SEQ ID NO: 3523 - RNA, 85 nt, synthetic construct; identical to SEQ ID NO: 3297
  source 1..85: mol_type = other RNA
  modified_base 1: mod_base = OTHER; note = 2'-Omethylguanosine
  modified_base 2: mod_base = OTHER; note = 2'-Omethylcytosine
  modified_base 3: mod_base = OTHER; note = 2'-Omethyluridine
  modified_base 4: mod_base = OTHER; note = 2'-Omethylguanosine
  modified_base 5: mod_base = OTHER; note = 2'-Omethyluridine
  modified_base 6: mod_base = OTHER; note = 2'-Omethylguanosine
  modified_base 16: mod_base = OTHER; note = 2'-Omethyluridine
  modified_base 17: mod_base = OTHER; note = 2'-Omethylguanosine
  modified_base 18: mod_base = OTHER; note = 2'-Omethylguanosine
  modified_base 20: mod_base = OTHER; note = 2'-Omethyluridine
  modified_base 25: mod_base = OTHER; note = 2'-Omethylcytosine
  modified_base 33: mod_base = OTHER; note = 2'-fluorouridine
  modified_base 35: mod_base = OTHER; note = Cytosine phosphorothiorate
  modified_base 37: mod_base = OTHER; note = Adenosine phosphorothiorate
  modified_base 38: mod_base = OTHER; note = Adenosine phosphorothiorate
  modified_base 41: mod_base = OTHER; note = 2'-fluorocytosine
  modified_base 42: mod_base = OTHER; note = 2'-Omethyladenosine
  modified_base 43: mod_base = OTHER; note = 2'-Omethyladenosine
  modified_base 44: mod_base = OTHER; note = 2'-fluorouridine
  modified_base 58: mod_base = OTHER; note = 2'-Omethylguanosine
  modified_base 59: mod_base = OTHER; note = 2'-Omethylcytosine
  modified_base 61: mod_base = OTHER; note = 2'-Omethylguanosine
  modified_base 63: mod_base = OTHER; note = 2'-Omethyluridine
  modified_base 64: mod_base = OTHER; note = Uridine phosphorothiorate
  modified_base 65: mod_base = OTHER; note = 2'-Omethylcytosine
  modified_base 66: mod_base = OTHER; note = 2'-fluoroguanosine
  modified_base 68: mod_base = OTHER; note = 2'-Omethyladenosine
  modified_base 70: mod_base = OTHER; note = 2'-Omethylcytosine
  modified_base 71: mod_base = OTHER; note = 2'-Omethylcytosine
  modified_base 72: mod_base = OTHER; note = 2'-fluorouridine
  modified_base 73: mod_base = OTHER; note = 2'-Omethylguanosine
  modified_base 74: mod_base = OTHER; note = 2'-Omethylcytosine
  modified_base 82: mod_base = OTHER; note = 2'-Omethylguanosine

SEQ ID NO: 3524 - RNA, 76 nt, synthetic construct; identical to SEQ ID NO: 625
  source 1..76: mol_type = other RNA
  modified_base 1: mod_base = OTHER; note = 2'-Omethylguanosine phosphorothiorate
  modified_base 2: mod_base = OTHER; note = 2'-Omethylguanosine phosphorothiorate
  modified_base 66: mod_base = OTHER; note = Cytosine phosphorothiorate
  modified_base 67: mod_base = OTHER; note = 2'-fluoroguanosine
  modified_base 73: mod_base = OTHER; note = 2'-Omethylguanosine phosphorothiorate
  modified_base 74: mod_base = OTHER; note = Cytosine phosphorothiorate
  modified_base 75: mod_base = OTHER; note = 2'-Omethylcytosine phosphorothiorate
  modified_base 76: mod_base = OTHER; note = 2'-Omethyladenosine

SEQ ID NO: 3525 - RNA, 86 nt, synthetic construct; identical to SEQ ID NO: 3290
  source 1..86: mol_type = other RNA
  modified_base 77: mod_base = OTHER; note = 2'-fluorocytosine

SEQ ID NO: 3526 - RNA, 85 nt, synthetic construct; identical to SEQ ID NO: 3317
  source 1..85: mol_type = other RNA
  modified_base 1: mod_base = OTHER; note = 2'-Omethylguanosine phosphorothiorate
  modified_base 2: mod_base = OTHER; note = 2'-fluorocytosine phosphorothiorate
  modified_base 19: mod_base = OTHER; note = 2'-fluorouridine
  modified_base 22: mod_base = OTHER; note = Adenosine phosphorothiorate
  modified_base 49: mod_base = OTHER; note = 2'-Omethyluridine
  modified_base 60: mod_base = OTHER; note = Adenosine phosphorothiorate

SEQ ID NO: 3527 - RNA, 75 nt, synthetic construct; identical to SEQ ID NO: 1045
  source 1..75: mol_type = other RNA
  modified_base 14: mod_base = OTHER; note = 2'-Omethyladenosine
  modified_base 20: mod_base = OTHER; note = Adenosine phosphorothiorate
  modified_base 21: mod_base = OTHER; note = 2'-fluoroadenosine
  modified_base 29: mod_base = OTHER; note = 2'-fluoroguanosine
  modified_base 58: mod_base = OTHER; note = 2'-Omethylguanosine
  modified_base 72: mod_base = OTHER; note = Uridine phosphorothiorate

SEQ ID NO: 3528 - RNA, 86 nt, synthetic construct; identical to SEQ ID NO: 3290
  source 1..86: mol_type = other RNA
  modified_base 1: mod_base = OTHER; note = 2'-Omethyladenosine
  modified_base 35: mod_base = OTHER; note = Cytosine phosphorothiorate
  modified_base 37: mod_base = OTHER; note = Guanosine phosphorothiorate
  modified_base 38: mod_base = OTHER; note = Adenosine phosphorothiorate
  modified_base 83: mod_base = OTHER; note = 2'-Omethyladenosine

SEQ ID NO: 3529 - RNA, 76 nt, synthetic construct; identical to SEQ ID NO: 625
  source 1..76: mol_type = other RNA
  modified_base 5: mod_base = OTHER; note = 2'-Omethylcytosine
  modified_base 7: mod_base = OTHER; note = Guanosine phosphorothiorate
  modified_base 10: mod_base = OTHER; note = Guanosine phosphorothiorate
  modified_base 11: mod_base = OTHER; note = 2'-fluorocytosine
  modified_base 12: mod_base = OTHER; note = 2'-fluoroguanosine
  modified_base 13: mod_base = OTHER; note = 2'-Omethylcytosine
  modified_base 14: mod_base = OTHER; note = Adenosine phosphorothiorate
  modified_base 15: mod_base = OTHER; note = 2'-Omethyladenosine
  modified_base 16: mod_base = OTHER; note = Uridine phosphorothiorate
  modified_base 17: mod_base = OTHER; note = 2'-Omethylguanosine phosphorothiorate
  modified_base 20: mod_base = OTHER; note = 2'-Omethyluridine
  modified_base 22: mod_base = OTHER; note = 2'-Omethylguanosine
  modified_base 23: mod_base = OTHER; note = 2'-fluorocytosine
  modified_base 24: mod_base = OTHER; note = 2'-Omethylguanosine
  modified_base 27: mod_base = OTHER; note = 2'-fluorouridine
  modified_base 28: mod_base = OTHER; note = 2'-Omethyluridine
  modified_base 29: mod_base = OTHER; note = 2'-fluoroguanosine
  modified_base 30: mod_base = OTHER; note = 2'-fluoroguanosine phosphorothiorate
  modified_base 31: mod_base = OTHER; note = 2'-fluoroadenosine
  modified_base 34: mod_base = OTHER; note = Uridine phosphorothiorate
  modified_base 38: mod_base = OTHER; note = 2'-Omethyladenosine
  modified_base 40: mod_base = OTHER; note = Uridine phosphorothiorate
  modified_base 41: mod_base = OTHER; note = 2'-fluorocytosine phosphorothiorate
  modified_base 42: mod_base = OTHER; note = Adenosine phosphorothiorate
  modified_base 43: mod_base = OTHER; note = 2'-fluoroadenosine
  modified_base 47: mod_base = OTHER; note = 2'-fluorouridine
  modified_base 49: mod_base = OTHER; note = 2'-fluorocytosine
  modified_base 52: mod_base = OTHER; note = 2'-fluoroguanosine
  modified_base 53: mod_base = OTHER; note = Guanosine phosphorothiorate
  modified_base 55: mod_base = OTHER; note = Uridine phosphorothiorate
  modified_base 56: mod_base = OTHER; note = 2'-fluorocytosine
  modified_base 57: mod_base = OTHER; note = 2'-fluoroguanosine
  modified_base 58: mod_base = OTHER; note = 2'-fluoroadenosine
  modified_base 59: mod_base = OTHER; note = 2'-Omethylguanosine
  modified_base 63: mod_base = OTHER; note = Cytosine phosphorothiorate
  modified_base 64: mod_base = OTHER; note = 2'-fluoroguanosine phosphorothiorate
  modified_base 66: mod_base = OTHER; note = 2'-fluorocytosine
  modified_base 73: mod_base = OTHER; note = 2'-Omethylguanosine

SEQ ID NO: 3530 - RNA, 76 nt, synthetic construct; identical to SEQ ID NO: 625
  source 1..76: mol_type = other RNA
  modified_base 1: mod_base = OTHER; note = Guanosine phosphorothiorate
  modified_base 6: mod_base = OTHER; note = Cytosine phosphorothiorate
  modified_base 9: mod_base = OTHER; note = Guanosine phosphorothiorate
  modified_base 11: mod_base = OTHER; note = 2'-Omethylcytosine
  modified_base 12: mod_base = OTHER; note = 2'-Omethylguanosine
  modified_base 13: mod_base = OTHER; note = 2'-fluorocytosine phosphorothiorate
  modified_base 14: mod_base = OTHER; note = 2'-fluoroadenosine
  modified_base 17: mod_base = OTHER; note = 2'-Omethylguanosine
  modified_base 18: mod_base = OTHER; note = 2'-fluoroguanosine
  modified_base 21: mod_base = OTHER; note = Adenosine phosphorothiorate
  modified_base 32: mod_base = OTHER; note = 2'-fluorocytosine
  modified_base 33: mod_base = OTHER; note = 2'-fluorouridine
  modified_base 34: mod_base = OTHER; note = 2'-Omethyluridine phosphorothiorate
  modified_base 39: mod_base = OTHER; note = 2'-Omethyluridine
  modified_base 40: mod_base = OTHER; note = Uridine phosphorothiorate
  modified_base 41: mod_base = OTHER; note = 2'-fluorocytosine
  modified_base 45: mod_base = OTHER; note = 2'-Omethylguanosine
  modified_base 51: mod_base = OTHER; note = 2'-Omethylguanosine
  modified_base 53: mod_base = OTHER; note = 2'-Omethylguanosine
  modified_base 56: mod_base = OTHER; note = Cytosine phosphorothiorate
  modified_base 57: mod_base = OTHER; note = 2'-Omethylguanosine phosphorothiorate
  modified_base 61: mod_base = OTHER; note = 2'-fluorocytosine
  modified_base 62: mod_base = OTHER; note = Cytosine phosphorothiorate
  modified_base 63: mod_base = OTHER; note = 2'-fluorocytosine phosphorothiorate
  modified_base 64: mod_base = OTHER; note = 2'-Omethylguanosine phosphorothiorate
  modified_base 65: mod_base = OTHER; note = 2'-Omethylguanosine
  modified_base 66: mod_base = OTHER; note = 2'-Omethylcytosine
  modified_base 71: mod_base = OTHER; note = 2'-fluorouridine phosphorothiorate
  modified_base 72: mod_base = OTHER; note = 2'-Omethylcytosine
  modified_base 75: mod_base = OTHER; note = 2'-fluorocytosine phosphorothiorate
  modified_base 76: mod_base = OTHER; note = 2'-fluoroadenosine

SEQ ID NO: 3531 - RNA, 85 nt, synthetic construct; identical to SEQ ID NO: 3286
  source 1..85: mol_type = other RNA
  modified_base 2: mod_base = OTHER; note = 2'-Omethylcytosine
  modified_base 3: mod_base = OTHER; note = 2'-fluoroadenosine
  modified_base 10: mod_base = OTHER; note = Cytosine phosphorothiorate
  modified_base 11: mod_base = OTHER; note = 2'-fluorocytosine
  modified_base 25: mod_base = OTHER; note = 2'-fluoroguanosine
  modified_base 28: mod_base = OTHER; note = 2'-fluoroguanosine phosphorothiorate
  modified_base 52: mod_base = OTHER; note = 2'-Omethylguanosine
  modified_base 55: mod_base = OTHER; note = 2'-fluorocytosine
  modified_base 59: mod_base = OTHER; note = 2'-Omethyluridine
  modified_base 62: mod_base = OTHER; note = Guanosine phosphorothiorate
  modified_base 67: mod_base = OTHER; note = Adenosine phosphorothiorate

SEQ ID NO: 3532 - RNA, 76 nt, synthetic construct; identical to SEQ ID NO: 625
  source 1..76: mol_type = other RNA
  modified_base 1: mod_base = OTHER; note = 2'-fluoroguanosine
  modified_base 2: mod_base = OTHER; note = 2'-Omethylguanosine
  modified_base 3: mod_base = OTHER; note = 2'-fluorocytosine
  modified_base 5: mod_base = OTHER; note = 2'-Omethylcytosine
  modified_base 6: mod_base = OTHER; note = 2'-fluorocytosine phosphorothiorate
  modified_base 8: mod_base = OTHER; note = Uridine phosphorothiorate
  modified_base 10: mod_base = OTHER; note = Guanosine phosphorothiorate
  modified_base 11: mod_base = OTHER; note = 2'-Omethylcytosine
  modified_base 12: mod_base = OTHER; note = Guanosine phosphorothiorate
  modified_base 14: mod_base = OTHER; note = Adenosine phosphorothiorate
  modified_base 15: mod_base = OTHER; note = 2'-fluoroadenosine
  modified_base 22: mod_base = OTHER; note = Guanosine phosphorothiorate
  modified_base 27: mod_base = OTHER; note = 2'-fluorouridine
  modified_base 28: mod_base = OTHER; note = 2'-Omethyluridine
  modified_base 29: mod_base = OTHER; note = Guanosine phosphorothiorate
  modified_base 30: mod_base = OTHER; note = 2'-Omethylguanosine phosphorothiorate
  modified_base 31: mod_base = OTHER; note = 2'-fluoroadenosine
  modified_base 33: mod_base = OTHER; note = 2'-fluorouridine
  modified_base 38: mod_base = OTHER; note = 2'-Omethyladenosine
  modified_base 39: mod_base = OTHER; note = 2'-Omethyluridine
  modified_base 40: mod_base = OTHER; note = 2'-Omethyluridine
  modified_base 41: mod_base = OTHER; note = 2'-Omethylcytosine
  modified_base 46: mod_base = OTHER; note = 2'-Omethylguanosine
  modified_base 48: mod_base = OTHER; note = 2'-fluorouridine phosphorothiorate
  modified_base 49: mod_base = OTHER; note = 2'-fluorocytosine
  modified_base 53: mod_base = OTHER; note = Guanosine phosphorothiorate
  modified_base 54: mod_base = OTHER; note = 2'-fluorouridine
  modified_base 59: mod_base = OTHER; note = Guanosine phosphorothiorate
  modified_base 62: mod_base = OTHER; note = 2'-Omethylcytosine
  modified_base 66: mod_base = OTHER; note = 2'-Omethylcytosine
  modified_base 70: mod_base = OTHER; note = Guanosine phosphorothiorate
  modified_base 75: mod_base = OTHER; note = 2'-Omethylcytosine

SEQ ID NO: 3533 - RNA, 76 nt, synthetic construct; identical to SEQ ID NO: 3295
  source 1..76: mol_type = other RNA
  modified_base 1: mod_base = OTHER; note = 2'-Omethylcytosine
  modified_base 8: mod_base = OTHER; note = 2'-fluorouridine phosphorothiorate
  modified_base 23: mod_base = OTHER; note = 2'-fluoroadenosine
  modified_base 28: mod_base = OTHER; note = 2'-Omethyladenosine phosphorothiorate
  modified_base 49: mod_base = OTHER; note = 2'-Omethylguanosine
  modified_base 55: mod_base = OTHER; note = 2'-fluorouridine
  modified_base 74: mod_base = OTHER; note = 2'-Omethylcytosine phosphorothiorate

SEQ ID NO: 3534 - RNA, 75 nt, synthetic construct; identical to SEQ ID NO: 3336
  source 1..75: mol_type = other RNA
  modified_base 10: mod_base = OTHER; note = 2'-Omethylcytosine phosphorothiorate
  modified_base 14: mod_base = OTHER; note = 2'-fluoroguanosine
  modified_base 16: mod_base = OTHER; note = 2'-fluorocytosine
  modified_base 20: mod_base = OTHER; note = 2'-fluoroadenosine
  modified_base 21: mod_base = OTHER; note = 2'-Omethylguanosine
  modified_base 22: mod_base = OTHER; note = 2'-fluoroadenosine phosphorothiorate
  modified_base 30: mod_base = OTHER; note = Adenosine phosphorothiorate
  modified_base 34: mod_base = OTHER; note = 2'-fluorouridine
  modified_base 37: mod_base = OTHER; note = 2'-Omethyladenosine
  modified_base 38: mod_base = OTHER; note = 2'-Omethyluridine phosphorothiorate
  modified_base 39: mod_base = OTHER; note = 2'-Omethylcytosine
  modified_base 46: mod_base = OTHER; note = 2'-fluorouridine
  modified_base 54: mod_base = OTHER; note = 2'-fluorouridine
  modified_base 56: mod_base = OTHER; note = 2'-fluoroadenosine
  modified_base 71: mod_base = OTHER; note = 2'-Omethylcytosine
  modified_base 74: mod_base = OTHER; note = Cytosine phosphorothiorate

SEQ ID NO: 3535 - RNA, 76 nt, synthetic construct; identical to SEQ ID NO: 3289
  source 1..76: mol_type = other RNA
  modified_base 1: mod_base = OTHER; note = 2'-Omethylguanosine
  modified_base 18: mod_base = OTHER; note = 2'-Omethylguanosine

SEQ ID NO: 3536 - RNA, 76 nt, synthetic construct; identical to SEQ ID NO: 3289
  source 1..76: mol_type = other RNA
  modified_base 1: mod_base = OTHER; note = 2'-Omethylguanosine
  modified_base 2: mod_base = OTHER; note = 2'-Omethylcytosine
  modified_base 3: mod_base = OTHER; note = 2'-Omethylcytosine
  modified_base 4: mod_base = OTHER; note = 2'-Omethyluridine
  modified_base 5: mod_base = OTHER; note = 2'-Omethylguanosine
  modified_base 6: mod_base = OTHER; note = 2'-Omethylguanosine
  modified_base 13: mod_base = OTHER; note = 2'-Omethylcytosine
  modified_base 14: mod_base = OTHER; note = 2'-Omethyladenosine
  modified_base 15: mod_base = OTHER; note = 2'-Omethylguanosine
  modified_base 16: mod_base = OTHER; note = 2'-Omethyluridine
  modified_base 18: mod_base = OTHER; note = 2'-Omethylguanosine
  modified_base 19: mod_base = OTHER; note = 2'-Omethylguanosine
  modified_base 20: mod_base = OTHER; note = Uridine phosphorothiorate
  modified_base 21: mod_base = OTHER; note = Adenosine phosphorothiorate
  modified_base 25: mod_base = OTHER; note = 2'-Omethylcytosine
  modified_base 33: mod_base = OTHER; note = 2'-fluorouridine
  modified_base 34: mod_base = OTHER; note = 2'-Omethyluridine
  modified_base 35: mod_base = OTHER; note = Uridine phosphorothiorate
  modified_base 37: mod_base = OTHER; note = Adenosine phosphorothiorate
  modified_base 38: mod_base = OTHER; note = Adenosine phosphorothiorate
  modified_base 49: mod_base = OTHER; note = 2'-Omethylcytosine
  modified_base 50: mod_base = OTHER; note = 2'-Omethyladenosine
  modified_base 51: mod_base = OTHER; note = 2'-Omethylguanosine
  modified_base 52: mod_base = OTHER; note = 2'-Omethylguanosine
  modified_base 53: mod_base = OTHER; note = 2'-Omethylguanosine
  modified_base 54: mod_base = OTHER; note = Uridine phosphorothiorate
  modified_base 55: mod_base = OTHER; note = Uridine phosphorothiorate
  modified_base 61: mod_base = OTHER; note = 2'-Omethylcytosine
  modified_base 65: mod_base = OTHER; note = 2'-Omethylguanosine
  modified_base 73: mod_base = OTHER; note = 2'-Omethylguanosine

SEQ ID NO: 3537 - RNA, 76 nt, synthetic construct; identical to SEQ ID NO: 625
  source 1..76: mol_type = other RNA
  modified_base 2: mod_base = OTHER; note = 2'-fluoroguanosine
  modified_base 4: mod_base = OTHER; note = 2'-Omethyluridine
  modified_base 5: mod_base = OTHER; note = Cytosine phosphorothiorate
  modified_base 6: mod_base = OTHER; note = 2'-Omethylcytosine
  modified_base 12: mod_base = OTHER; note = Guanosine phosphorothiorate
  modified_base 17: mod_base = OTHER; note = 2'-Omethylguanosine
  modified_base 18: mod_base = OTHER; note = 2'-fluoroguanosine
  modified_base 22: mod_base = OTHER; note = 2'-fluoroguanosine
  modified_base 23: mod_base = OTHER; note = 2'-fluorocytosine
  modified_base 25: mod_base = OTHER; note = 2'-Omethylcytosine
  modified_base 27: mod_base = OTHER; note = 2'-fluorouridine phosphorothiorate
  modified_base 30: mod_base = OTHER; note = 2'-fluoroguanosine
  modified_base 32: mod_base = OTHER; note = 2'-fluorocytosine
  modified_base 34: mod_base = OTHER; note = 2'-fluorouridine
  modified_base 39: mod_base = OTHER; note = 2'-fluorouridine
  modified_base 42: mod_base = OTHER; note = Adenosine phosphorothiorate
  modified_base 43: mod_base = OTHER; note = 2'-Omethyladenosine
  modified_base 46: mod_base = OTHER; note = 2'-fluoroguanosine
  modified_base 48: mod_base = OTHER; note = 2'-fluorouridine
  modified_base 52: mod_base = OTHER; note = Guanosine phosphorothiorate
  modified_base 53: mod_base = OTHER; note = 2'-fluoroguanosine
  modified_base 54: mod_base = OTHER; note = 2'-Omethyluridine
  modified_base 55: mod_base = OTHER; note = Uridine phosphorothiorate
  modified_base 56: mod_base = OTHER; note = 2'-Omethylcytosine
  modified_base 57: mod_base = OTHER; note = 2'-Omethylguanosine phosphorothiorate
  modified_base 58: mod_base = OTHER; note = 2'-fluoroadenosine phosphorothiorate
  modified_base 59: mod_base = OTHER; note = 2'-fluoroguanosine
  modified_base 62: mod_base = OTHER; note = 2'-fluorocytosine
  modified_base 64: mod_base = OTHER; note = Guanosine phosphorothiorate
  modified_base 66: mod_base = OTHER; note = 2'-Omethylcytosine phosphorothiorate
  modified_base 67: mod_base = OTHER; note = 2'-Omethylguanosine
  modified_base 68: mod_base = OTHER; note = 2'-fluoroguanosine
  modified_base 70: mod_base = OTHER; note = 2'-fluoroguanosine
  modified_base 72: mod_base = OTHER; note = 2'-fluorocytosine
  modified_base 73: mod_base = OTHER; note = 2'-Omethylguanosine
  modified_base 75: mod_base = OTHER; note = 2'-Omethylcytosine

SEQ ID NO: 3538 - RNA, 76 nt, synthetic construct; identical to SEQ ID NO: 625
  source 1..76: mol_type = other RNA
  modified_base 1: mod_base = OTHER; note = 2'-Omethylguanosine phosphorothiorate
  modified_base 2: mod_base = OTHER; note = 2'-Omethylguanosine phosphorothiorate
  modified_base 3: mod_base = OTHER; note = 2'-Omethylcytosine
  modified_base 4: mod_base = OTHER; note = 2'-Omethyluridine
  modified_base 5: mod_base = OTHER; note = 2'-Omethylcytosine
  modified_base 6: mod_base = OTHER; note = 2'-Omethylcytosine
  modified_base 14: mod_base = OTHER; note = 2'-Omethyladenosine
  modified_base 15: mod_base = OTHER; note = 2'-Omethyladenosine
  modified_base 16: mod_base = OTHER; note = 2'-Omethyluridine
  modified_base 17: mod_base = OTHER; note = 2'-Omethylguanosine
  modified_base 18: mod_base = OTHER; note = 2'-Omethylguanosine
  modified_base 20: mod_base = OTHER; note = 2'-Omethyluridine
  modified_base 22: mod_base = OTHER; note = 2'-Omethylguanosine
  modified_base 23: mod_base = OTHER; note = 2'-Omethylcytosine
  modified_base 24: mod_base = OTHER; note = 2'-Omethylguanosine
  modified_base 25: mod_base = OTHER; note = 2'-Omethylcytosine
  modified_base 33: mod_base = OTHER; note = 2'-fluorouridine
  modified_base 35: mod_base = OTHER; note = Cytosine phosphorothiorate
  modified_base 37: mod_base = OTHER; note = Adenosine phosphorothiorate
  modified_base 38: mod_base = OTHER; note = Adenosine phosphorothiorate
  modified_base 41: mod_base = OTHER; note = 2'-Omethylcytosine
  modified_base 42: mod_base = OTHER; note = 2'-Omethyladenosine
  modified_base 43: mod_base = OTHER; note = 2'-Omethyladenosine
  modified_base 44: mod_base = OTHER; note = 2'-Omethyladenosine
  modified_base 49: mod_base = OTHER; note = 2'-Omethylcytosine
  modified_base 50: mod_base = OTHER; note = 2'-Omethylcytosine
  modified_base 52: mod_base = OTHER; note = 2'-Omethylguanosine
  modified_base 54: mod_base = OTHER; note = 2'-Omethyluridine
  modified_base 55: mod_base = OTHER; note = Uridine phosphorothiorate
  modified_base 56: mod_base = OTHER; note = 2'-Omethylcytosine
  modified_base 57: mod_base = OTHER; note = 2'-fluoroguanosine
  modified_base 59: mod_base = OTHER; note = 2'-Omethylguanosine
  modified_base 61: mod_base = OTHER; note = 2'-Omethylcytosine
  modified_base 62: mod_base = OTHER; note = 2'-Omethylcytosine
  modified_base 63: mod_base = OTHER; note = 2'-fluorocytosine
  modified_base 64: mod_base = OTHER; note = 2'-Omethylguanosine
  modified_base 65: mod_base = OTHER; note = 2'-Omethylguanosine
  modified_base 75: mod_base = OTHER; note = Cytosine phosphorothiorate
  modified_base 76: mod_base = OTHER; note = 2'-Omethyladenosine

SEQ ID NO: 3539 - RNA, 74 nt, synthetic construct; identical to SEQ ID NO: 766
  source 1..74: mol_type = other RNA
  modified_base 1: mod_base = OTHER; note = 2'-Omethylguanosine phosphorothiorate
  modified_base 2: mod_base = OTHER; note = 2'-Omethylguanosine
  modified_base 3: mod_base = OTHER; note = 2'-Omethylcytosine
  modified_base 4: mod_base = OTHER; note = 2'-Omethyluridine
  modified_base 5: mod_base = OTHER; note = 2'-Omethylcytosine
  modified_base 6: mod_base = OTHER; note = 2'-Omethylcytosine
  modified_base 16: mod_base = OTHER; note = 2'-Omethyluridine
  modified_base 17: mod_base = OTHER; note = 2'-Omethylguanosine
  modified_base 18: mod_base = OTHER; note = 2'-Omethylguanosine
  modified_base 20: mod_base = OTHER; note = 2'-Omethyluridine
  modified_base 25: mod_base = OTHER; note = 2'-Omethylcytosine
  modified_base 33: mod_base = OTHER; note = 2'-fluorouridine
  modified_base 35: mod_base = OTHER; note = Cytosine phosphorothiorate
  modified_base 37: mod_base = OTHER; note = Adenosine phosphorothiorate
  modified_base 38: mod_base = OTHER; note = Adenosine phosphorothiorate
  modified_base 41: mod_base = OTHER; note = 2'-Omethylcytosine
  modified_base 42: mod_base = OTHER; note = 2'-Omethyladenosine
  modified_base 43: mod_base = OTHER; note = 2'-Omethyladenosine
  modified_base 44: mod_base = OTHER; note = 2'-Omethyladenosine
  modified_base 49: mod_base = OTHER; note = 2'-Omethylcytosine
  modified_base 50: mod_base = OTHER; note = 2'-Omethylcytosine
  modified_base 52: mod_base = OTHER; note = 2'-Omethylguanosine
  modified_base 54: mod_base = OTHER; note = Uridine phosphorothiorate
  modified_base 55: mod_base = OTHER; note = Uridine phosphorothiorate
  modified_base 61: mod_base = OTHER; note = 2'-Omethylcytosine
  modified_base 65: mod_base = OTHER; note = 2'-Omethylguanosine
  modified_base 73: mod_base = OTHER; note = 2'-Omethylguanosine

SEQ ID NO: 3540 - RNA, 85 nt, synthetic construct; identical to SEQ ID NO: 3297
  source 1..85: mol_type = other RNA
  modified_base 1: mod_base = OTHER; note = 2'-Omethylguanosine
  modified_base 2: mod_base = OTHER; note = 2'-Omethylcytosine
  modified_base 3: mod_base = OTHER; note = 2'-Omethyluridine
  modified_base 4: mod_base = OTHER; note = 2'-Omethylguanosine
  modified_base 5: mod_base = OTHER; note = 2'-Omethyluridine
  modified_base 6: mod_base = OTHER; note = 2'-Omethylguanosine
  modified_base 22: mod_base = OTHER; note = 2'-Omethyladenosine
  modified_base 23: mod_base = OTHER; note = 2'-Omethylguanosine
  modified_base 24: mod_base = OTHER; note = 2'-Omethylguanosine
  modified_base 25: mod_base = OTHER; note = 2'-Omethylcytosine
  modified_base 58: mod_base = OTHER; note = 2'-Omethylguanosine
  modified_base 59: mod_base = OTHER; note = 2'-Omethylcytosine
  modified_base 60: mod_base = OTHER; note = 2'-Omethyladenosine
  modified_base 61: mod_base = OTHER; note = 2'-Omethylguanosine
  modified_base 62: mod_base = OTHER; note = 2'-Omethylguanosine

SEQ ID NO: 3541 - RNA, 76 nt, synthetic construct
  source 1..76: mol_type = other RNA
ggctccgtggcgcaatggatagcgcattggacttcaaattcaaaggctccgggttcgagtcccggcggagtcacca

SEQ ID NO: 3542 - RNA, 86 nt, synthetic construct; identical to SEQ ID NO: 3290
  source 1..86: mol_type = other RNA
  modified_base 82: mod_base = OTHER; note = 2'-Omethyluridine

SEQ ID NO: 3543 - RNA, 86 nt, synthetic construct; identical to SEQ ID NO: 3290
  source 1..86: mol_type = other RNA
  modified_base 1: mod_base = OTHER; note = 2'-Omethyladenosine
  modified_base 17: mod_base = OTHER; note = 2'-Omethylguanosine

SEQ ID NO: 3544 - RNA, 76 nt, synthetic construct; identical to SEQ ID NO: 625
  source 1..76: mol_type = other RNA
  modified_base 6: mod_base = OTHER; note = 2'-Omethylcytosine
  modified_base 7: mod_base = OTHER; note = Guanosine phosphorothiorate
  modified_base 9: mod_base = OTHER; note = Guanosine phosphorothiorate
  modified_base 10: mod_base = OTHER; note = 2'-fluoroguanosine
  modified_base 11: mod_base = OTHER; note = 2'-fluorocytosine
  modified_base 12: mod_base = OTHER; note = Guanosine phosphorothiorate
  modified_base 13: mod_base = OTHER; note = 2'-fluorocytosine phosphorothiorate
  modified_base 14: mod_base = OTHER; note = 2'-Omethyladenosine
  modified_base 16: mod_base = OTHER; note = 2'-fluorouridine phosphorothiorate
  modified_base 22: mod_base = OTHER; note = 2'-fluoroguanosine phosphorothiorate
  modified_base 23: mod_base = OTHER; note = 2'-fluorocytosine
  modified_base 24: mod_base = OTHER; note = 2'-fluoroguanosine
  modified_base 25: mod_base = OTHER; note = 2'-fluorocytosine phosphorothiorate
  modified_base 26: mod_base = OTHER; note = 2'-fluoroadenosine
  modified_base 31: mod_base = OTHER; note = 2'-fluoroadenosine
  modified_base 32: mod_base = OTHER; note = 2'-fluorocytosine
  modified_base 33: mod_base = OTHER; note = 2'-fluorouridine
  modified_base 37: mod_base = OTHER; note = Adenosine phosphorothiorate
  modified_base 39: mod_base = OTHER; note = 2'-Omethyluridine
  modified_base 44: mod_base = OTHER; note = 2'-Omethyladenosine
  modified_base 45: mod_base = OTHER; note = 2'-fluoroguanosine phosphorothiorate
  modified_base 46: mod_base = OTHER; note = 2'-Omethylguanosine
  modified_base 47: mod_base = OTHER; note = 2'-Omethyluridine
  modified_base 49: mod_base = OTHER; note = 2'-Omethylcytosine
  modified_base 50: mod_base = OTHER; note = 2'-fluorocytosine
  modified_base 51: mod_base = OTHER; note = 2'-Omethylguanosine
  modified_base 58: mod_base = OTHER; note = 2'-fluoroadenosine
  modified_base 60: mod_base = OTHER; note = 2'-Omethyluridine
  modified_base 61: mod_base = OTHER; note = 2'-fluorocytosine
  modified_base 67: mod_base = OTHER; note = 2'-fluoroguanosine
  modified_base 68: mod_base = OTHER; note = Guanosine phosphorothiorate
  modified_base 71: mod_base = OTHER; note = 2'-fluorouridine
  modified_base 75: mod_base = OTHER; note = 2'-fluorocytosine
  modified_base 76: mod_base = OTHER; note = 2'-Omethyladenosine

SEQ ID NO: 3545 - RNA, 76 nt, synthetic construct
  source 1..76: mol_type = other RNA
gccccagtggcctaatggataaggcactggccttcaaagccagggattgtgggttcgagtcccatctggggtgcca

SEQ ID NO: 3546 - RNA, 76 nt, synthetic construct; identical to SEQ ID NO: 3318
  source 1..76: mol_type = other RNA
  modified_base 1: mod_base = OTHER; note = 2'-Omethylcytosine phosphorothiorate
  modified_base 2: mod_base = OTHER; note = 2'-Omethylcytosine phosphorothiorate
  modified_base 14: mod_base = OTHER; note = 2'-Omethyladenosine
  modified_base 18: mod_base = OTHER; note = 2'-Omethylguanosine
  modified_base 19: mod_base = OTHER; note = 2'-Omethylguanosine
  modified_base 22: mod_base = OTHER; note = 2'-Omethylguanosine
  modified_base 25: mod_base = OTHER; note = 2'-Omethylcytosine
  modified_base 27: mod_base = OTHER; note = 2'-Omethylguanosine
  modified_base 33: mod_base = OTHER; note = 2'-fluorouridine
  modified_base 41: mod_base = OTHER; note = 2'-Omethylcytosine phosphorothiorate
  modified_base 44: mod_base = OTHER; note = 2'-Omethyladenosine phosphorothiorate
  modified_base 45: mod_base = OTHER; note = 2'-Omethylguanosine
  modified_base 46: mod_base = OTHER; note = 2'-fluoroguanosine
  modified_base 47: mod_base = OTHER; note = 2'-fluorouridine
  modified_base 48: mod_base = OTHER; note = 2'-fluorocytosine
  modified_base 52: mod_base = OTHER; note = 2'-Omethylguanosine
  modified_base 55: mod_base = OTHER; note = Uridine phosphorothiorate
  modified_base 71: mod_base = OTHER; note = 2'-Omethylguanosine
  modified_base 73: mod_base = OTHER; note = 2'-Omethyladenosine

SEQ ID NO: 3547 - RNA, 76 nt, synthetic construct; identical to SEQ ID NO: 625
  source 1..76: mol_type = other RNA
  modified_base 1: mod_base = OTHER; note = 2'-Omethylguanosine
  modified_base 2: mod_base = OTHER; note = 2'-Omethylguanosine
  modified_base 3: mod_base = OTHER; note = 2'-Omethylcytosine
  modified_base 4: mod_base = OTHER; note = 2'-Omethyluridine
  modified_base 5: mod_base = OTHER; note = 2'-Omethylcytosine
  modified_base 6: mod_base = OTHER; note = 2'-Omethylcytosine
  modified_base 7: mod_base = OTHER; note = 2'-Omethylguanosine phosphorothiorate
  modified_base 10: mod_base = OTHER; note = 2'-Omethylguanosine
  modified_base 11: mod_base = OTHER; note = 2'-Omethylcytosine
  modified_base 12: mod_base = OTHER; note = 2'-Omethylguanosine
  modified_base 14: mod_base = OTHER; note = 2'-Omethyladenosine
  modified_base 15: mod_base = OTHER; note = 2'-Omethyladenosine
  modified_base 17: mod_base = OTHER; note = 2'-Omethylguanosine
  modified_base 18: mod_base = OTHER; note = 2'-Omethylguanosine
  modified_base 19: mod_base = OTHER; note = 2'-fluoroadenosine phosphorothiorate
  modified_base 22: mod_base = OTHER; note = 2'-Omethylguanosine
  modified_base 23: mod_base = OTHER; note = 2'-Omethylcytosine
  modified_base 24: mod_base = OTHER; note = 2'-Omethylguanosine phosphorothiorate
  modified_base 26: mod_base = OTHER; note = Adenosine phosphorothiorate
  modified_base 28: mod_base = OTHER; note = 2'-Omethyluridine
  modified_base 29: mod_base = OTHER; note = 2'-Omethylguanosine
  modified_base 30: mod_base = OTHER; note = 2'-Omethylguanosine
  modified_base 33: mod_base = OTHER; note = 2'-fluorouridine
  modified_base 35: mod_base = OTHER; note = 2'-Omethylcytosine phosphorothiorate
  modified_base 37: mod_base = OTHER; note = Adenosine phosphorothiorate
  modified_base 38: mod_base = OTHER; note = Adenosine phosphorothiorate
  modified_base 40: mod_base = OTHER; note = 2'-Omethyluridine
  modified_base 44: mod_base = OTHER; note = 2'-Omethyladenosine phosphorothiorate
  modified_base 48: mod_base = OTHER; note = 2'-fluorouridine
  modified_base 49: mod_base = OTHER; note = 2'-Omethylcytosine phosphorothiorate
  modified_base 50: mod_base = OTHER; note = 2'-Omethylcytosine
  modified_base 51: mod_base = OTHER; note = 2'-Omethylguanosine
  modified_base 52: mod_base = OTHER; note = 2'-Omethylguanosine
  modified_base 55: mod_base = OTHER; note = Uridine phosphorothiorate
  modified_base 56: mod_base = OTHER; note = 2'-Omethylcytosine
  modified_base 59: mod_base = OTHER; note = 2'-Omethylguanosine
  modified_base 61: mod_base = OTHER; note = Cytosine phosphorothiorate
  modified_base 62: mod_base = OTHER; note = 2'-Omethylcytosine
  modified_base 63: mod_base = OTHER; note = 2'-fluorocytosine
  modified_base 64: mod_base = OTHER; note = 2'-Omethylguanosine
  modified_base 65: mod_base = OTHER; note = 2'-Omethylguanosine
  modified_base 66: mod_base = OTHER; note = 2'-fluorocytosine
  modified_base 67: mod_base = OTHER; note = 2'-Omethylguanosine phosphorothiorate
  modified_base 68: mod_base = OTHER; note = 2'-fluoroguanosine
  modified_base 69: mod_base = OTHER; note = 2'-fluoroadenosine
  modified_base 72: mod_base = OTHER; note = 2'-Omethylcytosine
  modified_base 73: mod_base = OTHER; note = 2'-Omethylguanosine
  modified_base 74: mod_base = OTHER; note = 2'-fluorocytosine phosphorothiorate
  modified_base 75: mod_base = OTHER; note = 2'-Omethylcytosine
  modified_base 76: mod_base = OTHER; note = 2'-fluoroadenosine

SEQ ID NO: 3548 - RNA, 76 nt, synthetic construct; identical to SEQ ID NO: 625
  source 1..76: mol_type = other RNA
  modified_base 1: mod_base = OTHER; note = 2'-Omethylguanosine
  modified_base 2: mod_base = OTHER; note = 2'-fluoroguanosine phosphorothiorate
  modified_base 10: mod_base = OTHER; note = 2'-Omethylguanosine
  modified_base 13: mod_base = OTHER; note = 2'-Omethylcytosine
  modified_base 17: mod_base = OTHER; note = Guanosine phosphorothiorate
  modified_base 18: mod_base = OTHER; note = 2'-Omethylguanosine
  modified_base 19: mod_base = OTHER; note = Adenosine phosphorothiorate
  modified_base 20: mod_base = OTHER; note = 2'-Omethyluridine
  modified_base 25: mod_base = OTHER; note = 2'-Omethylcytosine
  modified_base 29: mod_base = OTHER; note = 2'-Omethylguanosine
  modified_base 33: mod_base = OTHER; note = 2'-fluorouridine
  modified_base 35: mod_base = OTHER; note = Cytosine phosphorothiorate
  modified_base 37: mod_base = OTHER; note = Adenosine phosphorothiorate
  modified_base 38: mod_base = OTHER; note = Adenosine phosphorothiorate
  modified_base 43: mod_base = OTHER; note = 2'-Omethyladenosine
  modified_base 44: mod_base = OTHER; note = 2'-fluoroadenosine
  modified_base 46: mod_base = OTHER; note = Guanosine phosphorothiorate
  modified_base 50: mod_base = OTHER; note = 2'-Omethylcytosine
  modified_base 52: mod_base = OTHER; note = 2'-Omethylguanosine
  modified_base 54: mod_base = OTHER; note = Uridine phosphorothiorate
  modified_base 55: mod_base = OTHER; note = Uridine phosphorothiorate
  modified_base 56: mod_base = OTHER; note = 2'-Omethylcytosine
  modified_base 57: mod_base = OTHER; note = Guanosine phosphorothiorate
  modified_base 62: mod_base = OTHER; note = 2'-Omethylcytosine
  modified_base 63: mod_base = OTHER; note = 2'-fluorocytosine
  modified_base 65: mod_base = OTHER; note = 2'-Omethylguanosine
  modified_base 71: mod_base = OTHER; note = 2'-Omethyluridine
  modified_base 73: mod_base = OTHER; note = 2'-Omethylguanosine

SEQ ID NO: 3549 - RNA, 74 nt, synthetic construct; identical to SEQ ID NO: 3293
  source 1..74: mol_type = other RNA
  modified_base 11: mod_base = OTHER; note = 2'-Omethylguanosine
  modified_base 26: mod_base = OTHER; note = 2'-Omethylcytosine
  modified_base 34: mod_base = OTHER; note = 2'-fluoroadenosine
  modified_base 48: mod_base = OTHER; note = 2'-fluorocytosine
  modified_base 60: mod_base = OTHER; note = 2'-Omethyladenosine phosphorothiorate
  modified_base 73: mod_base = OTHER; note = Cytosine phosphorothiorate

SEQ ID NO: 3550 - DNA, 76 bp, synthetic construct; identical to SEQ ID NO: 1924
  source 1..76: mol_type = other DNA
  misc_feature 1..38: note = RNA
  misc_feature 39..43: note = DNA
  misc_feature 44..76: note = RNA

SEQ ID NO: 3551 - RNA, 76 nt, synthetic construct; identical to SEQ ID NO: 3318
  source 1..76: mol_type = other RNA
  modified_base 1: mod_base = OTHER; note = 2'-Omethylcytosine
  modified_base 13: mod_base = OTHER; note = 2'-Omethylcytosine
  modified_base 14: mod_base = OTHER; note = 2'-Omethyladenosine
  modified_base 15: mod_base = OTHER; note = 2'-Omethylguanosine
  modified_base 16: mod_base = OTHER; note = 2'-Omethyluridine
  modified_base 18: mod_base = OTHER; note = 2'-Omethylguanosine
  modified_base 19: mod_base = OTHER; note = 2'-Omethylguanosine
  modified_base 20: mod_base = OTHER; note = Uridine phosphorothiorate
  modified_base 21: mod_base = OTHER; note = Adenosine phosphorothiorate
  modified_base 25: mod_base = OTHER; note = 2'-Omethylcytosine
  modified_base 41: mod_base = OTHER; note = 2'-fluorocytosine
  modified_base 42: mod_base = OTHER; note = 2'-Omethyluridine
  modified_base 43: mod_base = OTHER; note = 2'-Omethyluridine
  modified_base 44: mod_base = OTHER; note = 2'-fluoroadenosine
  modified_base 49: mod_base = OTHER; note = 2'-Omethylguanosine
  modified_base 50: mod_base = OTHER; note = 2'-Omethylcytosine
  modified_base 52: mod_base = OTHER; note = 2'-Omethylguanosine
  modified_base 54: mod_base = OTHER; note = Uridine phosphorothiorate
  modified_base 55: mod_base = OTHER; note = Uridine phosphorothiorate
  modified_base 61: mod_base = OTHER; note = 2'-Omethylcytosine
  modified_base 65: mod_base = OTHER; note = 2'-Omethylcytosine
  modified_base 73: mod_base = OTHER; note = 2'-Omethyladenosine

SEQ ID NO: 3552 - RNA, 76 nt, synthetic construct
  source 1..76: mol_type = other RNA
ggggccgtggcgcaatggatagcgcattggacttcaaattcaaaggttccgggttcgagtcccggcggcctcgcca

SEQ ID NO: 3553 - RNA, 85 nt, synthetic construct; identical to SEQ ID NO: 3317
  source 1..85: mol_type = other RNA
  modified_base 1: mod_base = OTHER; note = 2'-Omethylguanosine phosphorothiorate
  modified_base 2: mod_base = OTHER; note = Cytosine phosphorothiorate
  modified_base 15: mod_base = OTHER; note = 2'-Omethylguanosine phosphorothiorate
  modified_base 27: mod_base = OTHER; note = 2'-fluorouridine
  modified_base 44: mod_base = OTHER; note = 2'-Omethyluridine phosphorothiorate
  modified_base 52: mod_base = OTHER; note = Cytosine phosphorothiorate
  modified_base 61: mod_base = OTHER; note = 2'-Omethylguanosine

SEQ ID NO: 3554 - RNA, 75 nt, synthetic construct; identical to SEQ ID NO: 1045
  source 1..75: mol_type = other RNA
  modified_base 1: mod_base = OTHER; note = 2'-fluoroguanosine
  modified_base 3: mod_base = OTHER; note = Uridine phosphorothiorate
  modified_base 6: mod_base = OTHER; note = Cytosine phosphorothiorate
  modified_base 9: mod_base = OTHER; note = Guanosine phosphorothiorate
  modified_base 14: mod_base = OTHER; note = 2'-fluoroadenosine
  modified_base 17: mod_base = OTHER; note = 2'-fluoroguanosine phosphorothiorate
  modified_base 21: mod_base = OTHER; note = Adenosine phosphorothiorate
  modified_base 22: mod_base = OTHER; note = 2'-fluoroguanosine
  modified_base 36: mod_base = OTHER; note = 2'-fluoroadenosine phosphorothiorate
  modified_base 39: mod_base = OTHER; note = 2'-fluorouridine
  modified_base 43: mod_base = OTHER; note = 2'-fluoroguanosine
  modified_base 51: mod_base = OTHER; note = Adenosine phosphorothiorate
  modified_base 57: mod_base = OTHER; note = 2'-fluoroadenosine
  modified_base 61: mod_base = OTHER; note = 2'-fluorouridine phosphorothiorate
  modified_base 65: mod_base = OTHER; note = Uridine phosphorothiorate
  modified_base 67: mod_base = OTHER; note = Guanosine phosphorothiorate
  modified_base 68: mod_base = OTHER; note = 2'-fluoroadenosine
  modified_base 73: mod_base = OTHER; note = Cytosine phosphorothiorate

SEQ ID NO: 3555 - RNA, 75 nt, synthetic construct; identical to SEQ ID NO: 1045
  source 1..75: mol_type = other RNA
  modified_base 1: mod_base = OTHER; note = 2'-Omethylguanosine
  modified_base 19: mod_base = OTHER; note = 2'-fluorouridine
  modified_base 20: mod_base = OTHER; note = 2'-Omethyladenosine
  modified_base 21: mod_base = OTHER; note = 2'-Omethyladenosine
  modified_base 22: mod_base = OTHER; note = 2'-Omethylguanosine
  modified_base 40: mod_base = OTHER; note = 2'-fluorocytosine
  modified_base 41: mod_base = OTHER; note = 2'-Omethylcytosine
  modified_base 42: mod_base = OTHER; note = 2'-Omethyladenosine
  modified_base 43: mod_base = OTHER; note = 2'-Omethylguanosine
  modified_base 72: mod_base = OTHER; note = 2'-Omethyluridine

SEQ ID NO: 3556 - RNA, 75 nt, synthetic construct; identical to SEQ ID NO: 1045
  source 1..75: mol_type = other RNA
  modified_base 1: mod_base = OTHER; note = 2'-Omethylguanosine
  modified_base 16: mod_base = OTHER; note = 2'-Omethyluridine
  modified_base 17: mod_base = OTHER; note = 2'-Omethylguanosine
  modified_base 18: mod_base = OTHER; note = 2'-Omethylguanosine
  modified_base 53: mod_base = OTHER; note = 2'-Omethyluridine phosphorothiorate
  modified_base 54: mod_base = OTHER; note = Uridine phosphorothiorate
  modified_base 55: mod_base = OTHER; note = 2'-Omethylcytosine
  modified_base 56: mod_base = OTHER; note = 2'-fluoroguanosine
  modified_base 57: mod_base = OTHER; note = 2'-fluoroadenosine
  modified_base 58: mod_base = OTHER; note = 2'-Omethylguanosine
  modified_base 59: mod_base = OTHER; note = 2'-Omethyluridine
  modified_base 72: mod_base = OTHER; note = 2'-Omethyluridine

SEQ ID NO: 3557 - RNA, 76 nt, synthetic construct; identical to SEQ ID NO: 625
  source 1..76: mol_type = other RNA
  modified_base 1: mod_base = OTHER; note = 2'-Omethylguanosine
  modified_base 10: mod_base = OTHER; note = 2'-Omethylguanosine
  modified_base 13: mod_base = OTHER; note = 2'-Omethylcytosine
  modified_base 17: mod_base = OTHER; note = Guanosine phosphorothiorate
  modified_base 18: mod_base = OTHER; note = 2'-Omethylguanosine
  modified_base 19: mod_base = OTHER; note = Adenosine phosphorothiorate
  modified_base 20: mod_base = OTHER; note = 2'-Omethyluridine
  modified_base 25: mod_base = OTHER; note = 2'-Omethylcytosine
  modified_base 29: mod_base = OTHER; note = 2'-Omethylguanosine
  modified_base 33: mod_base = OTHER; note = 2'-fluorouridine
  modified_base 35: mod_base = OTHER; note = Cytosine phosphorothiorate
  modified_base 37: mod_base = OTHER; note = Adenosine phosphorothiorate
  modified_base 38: mod_base = OTHER; note = Adenosine phosphorothiorate
  modified_base 43: mod_base = OTHER; note = 2'-Omethyladenosine
  modified_base 44: mod_base = OTHER; note = 2'-fluoroadenosine
  modified_base 46: mod_base = OTHER; note = Guanosine phosphorothiorate
  modified_base 50: mod_base = OTHER; note = 2'-Omethylcytosine
  modified_base 52: mod_base = OTHER; note = 2'-Omethylguanosine
  modified_base 54: mod_base = OTHER; note = Uridine phosphorothiorate
  modified_base 55: mod_base = OTHER; note = Uridine phosphorothiorate
  modified_base 56: mod_base = OTHER; note = 2'-Omethylcytosine
  modified_base 57: mod_base = OTHER; note = Guanosine phosphorothiorate
  modified_base 63: mod_base = OTHER; note = 2'-fluorocytosine
  modified_base 65: mod_base = OTHER; note = 2'-Omethylguanosine
  modified_base 71: mod_base = OTHER; note = 2'-Omethyluridine
  modified_base 73: mod_base = OTHER; note = 2'-Omethylguanosine

SEQ ID NO: 3558 - RNA, 86 nt, synthetic construct
  source 1..86: mol_type = other RNA
accaggatggccgagtggttaaggcgttggacttcagatccaatgggcagtagctctcgtgggttcgaaccccactcctggtacca

SEQ ID NO: 3559 - RNA, 85 nt, synthetic construct; identical to SEQ ID NO: 3301
  source 1..85: mol_type = other RNA
  modified_base 1: mod_base = OTHER; note = 2'-Omethylguanosine phosphorothiorate
  modified_base 2: mod_base = OTHER; note = 2'-Omethylcytosine phosphorothiorate
  modified_base 3: mod_base = OTHER; note = 2'-Omethyluridine phosphorothiorate
  modified_base 12: mod_base = OTHER; note = 2'-Omethylcytosine phosphorothiorate
  modified_base 22: mod_base = OTHER; note = 2'-fluoroadenosine
  modified_base 23: mod_base = OTHER; note = 2'-fluoroguanosine
  modified_base 27: mod_base = OTHER; note = Uridine phosphorothiorate
  modified_base 30: mod_base = OTHER; note = 2'-fluoroguanosine
  modified_base 34: mod_base = OTHER; note = 2'-fluorouridine
  modified_base 42: mod_base = OTHER; note = 2'-fluoroadenosine
  modified_base 44: mod_base = OTHER; note = Uridine phosphorothiorate
  modified_base 48: mod_base = OTHER; note = Guanosine phosphorothiorate
  modified_base 56: mod_base = OTHER; note = 2'-Omethylguanosine
  modified_base 58: mod_base = OTHER; note = Guanosine phosphorothiorate
  modified_base 62: mod_base = OTHER; note = 2'-Omethylguanosine
  modified_base 73: mod_base = OTHER; note = 2'-Omethylguanosine phosphorothiorate
  modified_base 80: mod_base = OTHER; note = 2'-fluoroguanosine
  modified_base 82: mod_base = OTHER; note = 2'-fluoroguanosine phosphorothiorate

SEQ ID NO: 3560 - RNA, 76 nt, synthetic construct; identical to SEQ ID NO: 625
  source 1..76: mol_type = other RNA
  modified_base 1: mod_base = OTHER; note = 2'-Omethylguanosine phosphorothiorate
  modified_base 2: mod_base = OTHER; note = 2'-Omethylguanosine
  modified_base 16: mod_base = OTHER; note = Uridine phosphorothiorate
  modified_base 17: mod_base = OTHER; note = 2'-O-(2-Methoxyethyl) guanosine
  modified_base 25: mod_base = OTHER; note = 2'-fluorocytosine
  modified_base 30: mod_base = OTHER; note = Guanosine phosphorothiorate
  modified_base 33: mod_base = OTHER; note = 2'-O-(2-Methoxyethyl) thymine
  modified_base 44: mod_base = OTHER; note = 2'-fluoroadenosine
  modified_base 52: mod_base = OTHER; note = Guanosine phosphorothiorate
  modified_base 74: mod_base = OTHER; note = Cytosine phosphorothiorate
  modified_base 75: mod_base = OTHER; note = 2'-Omethylcytosine

SEQ ID NO: 3561 - RNA, 76 nt, synthetic construct; identical to SEQ ID NO: 625
  source 1..76: mol_type = other RNA
  modified_base 2: mod_base = OTHER; note = 2'-fluoroguanosine
  modified_base 5: mod_base = OTHER; note = 2'-Omethylcytosine
  modified_base 6: mod_base = OTHER; note = 2'-Omethylcytosine
  modified_base 7: mod_base = OTHER; note = Guanosine phosphorothiorate
  modified_base 9: mod_base = OTHER; note = Guanosine phosphorothiorate
  modified_base 10: mod_base = OTHER; note = 2'-Omethylguanosine
  modified_base 11: mod_base = OTHER; note = 2'-Omethylcytosine
  modified_base 12: mod_base = OTHER; note = 2'-Omethylguanosine
  modified_base 15: mod_base = OTHER; note = Adenosine phosphorothiorate
  modified_base 17: mod_base = OTHER; note = 2'-Omethylguanosine
  modified_base 18: mod_base = OTHER; note = 2'-Omethylguanosine phosphorothiorate
  modified_base 21: mod_base = OTHER; note = Adenosine phosphorothiorate
  modified_base 22: mod_base = OTHER; note = 2'-fluoroguanosine
  modified_base 23: mod_base = OTHER; note = 2'-Omethylcytosine
  modified_base 24: mod_base = OTHER; note = 2'-fluoroguanosine
  modified_base 27: mod_base = OTHER; note = 2'-Omethyluridine
  modified_base 39: mod_base = OTHER; note = 2'-Omethyluridine
  modified_base 42: mod_base = OTHER; note = 2'-fluoroadenosine
  modified_base 43: mod_base = OTHER; note = Adenosine phosphorothiorate
  modified_base 44: mod_base = OTHER; note = 2'-fluoroadenosine
  modified_base 45: mod_base = OTHER; note = Guanosine phosphorothiorate
  modified_base 47: mod_base = OTHER; note = 2'-Omethyluridine
  modified_base 48: mod_base = OTHER; note = 2'-fluorouridine
  modified_base 50: mod_base = OTHER; note = 2'-Omethylcytosine
  modified_base 51: mod_base = OTHER; note = Guanosine phosphorothiorate
  modified_base 52: mod_base = OTHER; note = 2'-fluoroguanosine
  modified_base 53: mod_base = OTHER; note = 2'-fluoroguanosine
  modified_base 56: mod_base = OTHER; note = 2'-Omethylcytosine
  modified_base 59: mod_base = OTHER; note = 2'-Omethylguanosine
  modified_base 64: mod_base = OTHER; note = 2'-Omethylguanosine
  modified_base 65: mod_base = OTHER; note = 2'-Omethylguanosine
  modified_base 66: mod_base = OTHER; note = 2'-Omethylcytosine phosphorothiorate
  modified_base 67: mod_base = OTHER; note = 2'-fluoroguanosine
  modified_base 68: mod_base = OTHER; note = 2'-fluoroguanosine
  modified_base 69: mod_base = OTHER; note = 2'-Omethyladenosine
  modified_base 71: mod_base = OTHER; note = 2'-fluorouridine phosphorothiorate

SEQ ID NO: 3562 - RNA, 76 nt, synthetic construct; identical to SEQ ID NO: 625
  source 1..76: mol_type = other RNA
  modified_base 3: mod_base = OTHER; note = 2'-Omethylcytosine
  modified_base 4: mod_base = OTHER; note = 2'-Omethyluridine
  modified_base 5: mod_base = OTHER; note = 2'-fluorocytosine
  modified_base 10: mod_base = OTHER; note = 2'-fluoroguanosine
  modified_base 11: mod_base = OTHER; note = 2'-fluorocytosine
  modified_base 14: mod_base = OTHER; note = Adenosine phosphorothiorate
  modified_base 17: mod_base = OTHER; note = 2'-Omethylguanosine
  modified_base 21: mod_base = OTHER; note = Adenosine phosphorothiorate
  modified_base 24: mod_base = OTHER; note = 2'-Omethylguanosine
  modified_base 25: mod_base = OTHER; note = 2'-Omethylcytosine
  modified_base 26: mod_base = OTHER; note = 2'-Omethyladenosine
  modified_base 27: mod_base = OTHER; note = Uridine phosphorothiorate
  modified_base 28: mod_base = OTHER; note = 2'-Omethyluridine
  modified_base 30: mod_base = OTHER; note = Guanosine phosphorothiorate
  modified_base 33: mod_base = OTHER; note = 2'-fluorouridine
  modified_base 36: mod_base = OTHER; note = Adenosine phosphorothiorate
  modified_base 38: mod_base = OTHER; note = 2'-Omethyladenosine
  modified_base 39: mod_base = OTHER; note = 2'-Omethyluridine
  modified_base 43: mod_base = OTHER; note = 2'-fluoroadenosine
  modified_base 46: mod_base = OTHER; note = 2'-fluoroguanosine phosphorothiorate
  modified_base 49: mod_base = OTHER; note = 2'-Omethylcytosine phosphorothiorate
  modified_base 50: mod_base = OTHER; note = 2'-Omethylcytosine
  modified_base 52: mod_base = OTHER; note = 2'-Omethylguanosine
  modified_base 53: mod_base = OTHER; note = 2'-Omethylguanosine
  modified_base 56: mod_base = OTHER; note = 2'-fluorocytosine phosphorothiorate
  modified_base 57: mod_base = OTHER; note = 2'-Omethylguanosine
  modified_base 59: mod_base = OTHER; note = Guanosine phosphorothiorate
  modified_base 60: mod_base = OTHER; note = 2'-Omethyluridine
  modified_base 61: mod_base = OTHER; note = Cytosine phosphorothiorate
  modified_base 62: mod_base = OTHER; note = 2'-Omethylcytosine
  modified_base 65: mod_base = OTHER; note = Guanosine phosphorothiorate
  modified_base 66: mod_base = OTHER; note = 2'-fluorocytosine
  modified_base 68: mod_base = OTHER; note = 2'-fluoroguanosine
  modified_base 71: mod_base = OTHER; note = 2'-fluorouridine
  modified_base 72: mod_base = OTHER; note = 2'-fluorocytosine
  modified_base 75: mod_base = OTHER; note = Cytosine phosphorothiorate
  modified_base 76: mod_base = OTHER; note = 2'-fluoroadenosine

SEQ ID NO: 3563 - RNA, 85 nt, synthetic construct; identical to SEQ ID NO: 3297
  source 1..85: mol_type = other RNA
  modified_base 1: mod_base = OTHER; note = 2'-Omethylguanosine
  modified_base 44: mod_base = OTHER; note = 2'-Omethyluridine
  modified_base 56: mod_base = OTHER; note = 2'-fluoroguanosine
  modified_base 57: mod_base = OTHER; note = 2'-fluorocytosine
  modified_base 82: mod_base = OTHER; note = 2'-Omethylguanosine

SEQ ID NO: 3564 - RNA, 76 nt, synthetic construct; identical to SEQ ID NO: 3419
  source 1..76: mol_type = other RNA
  modified_base 1: mod_base = OTHER; note = 2'-Omethylguanosine
  modified_base 14: mod_base = OTHER; note = 2'-Omethyladenosine
  modified_base 15: mod_base = OTHER; note = 2'-Omethyladenosine
  modified_base 16: mod_base = OTHER; note = 2'-Omethyluridine
  modified_base 17: mod_base = OTHER; note = 2'-Omethylguanosine
  modified_base 18: mod_base = OTHER; note = 2'-Omethylguanosine
  modified_base 19: mod_base = OTHER; note = Adenosine phosphorothiorate
  modified_base 20: mod_base = OTHER; note = 2'-Omethyluridine
  modified_base 21: mod_base = OTHER; note = Adenosine phosphorothiorate
  modified_base 33: mod_base = OTHER; note = 2'-fluorouridine
  modified_base 34: mod_base = OTHER; note = 2'-Omethyluridine
  modified_base 35: mod_base = OTHER; note = Cytosine phosphorothiorate
  modified_base 37: mod_base = OTHER; note = Adenosine phosphorothiorate
  modified_base 38: mod_base = OTHER; note = Adenosine phosphorothiorate
  modified_base 41: mod_base = OTHER; note = 2'-Omethylguanosine
  modified_base 42: mod_base = OTHER; note = 2'-Omethylguanosine
  modified_base 43: mod_base = OTHER; note = 2'-Omethyluridine
  modified_base 44: mod_base = OTHER; note = 2'-Omethyladenosine
  modified_base 50: mod_base = OTHER; note = 2'-Omethylcytosine
  modified_base 52: mod_base = OTHER; note = 2'-Omethylguanosine
  modified_base 73: mod_base = OTHER; note = 2'-Omethylguanosine

SEQ ID NO: 3565 - RNA, 76 nt, synthetic construct; identical to SEQ ID NO: 3289
  source 1..76: mol_type = other RNA
  modified_base 1: mod_base = OTHER; note = 2'-Omethylguanosine
  modified_base 2: mod_base = OTHER; note = 2'-Omethylcytosine
  modified_base 3: mod_base = OTHER; note = 2'-Omethylcytosine
  modified_base 4: mod_base = OTHER; note = 2'-Omethyluridine

SEQ ID NO: 3566 - RNA, 86 nt, synthetic construct; identical to SEQ ID NO: 3290
  source 1..86: mol_type = other RNA
  modified_base 67: mod_base = OTHER; note = 2'-Omethylguanosine

SEQ ID NO: 3567 - RNA, 85 nt, synthetic construct; identical to SEQ ID NO: 3317
  source 1..85: mol_type = other RNA
  modified_base 1: mod_base = OTHER; note = 2'-Omethylguanosine phosphorothiorate
  modified_base 2: mod_base = OTHER; note = 2'-Omethylcytosine phosphorothiorate
  modified_base 3: mod_base = OTHER; note = 2'-Omethyluridine phosphorothiorate
  modified_base 12: mod_base = OTHER; note = 2'-Omethylcytosine phosphorothiorate
  modified_base 22: mod_base = OTHER; note = 2'-fluoroadenosine
  modified_base 23: mod_base = OTHER; note = 2'-fluoroguanosine
  modified_base 27: mod_base = OTHER; note = Uridine phosphorothiorate
  modified_base 30: mod_base = OTHER; note = 2'-fluoroguanosine
  modified_base 34: mod_base = OTHER; note = 2'-fluorocytosine
  modified_base 42: mod_base = OTHER; note = 2'-fluoroadenosine
  modified_base 44: mod_base = OTHER; note = Uridine phosphorothiorate
  modified_base 48: mod_base = OTHER; note = Guanosine phosphorothiorate
  modified_base 56: mod_base = OTHER; note = 2'-Omethylguanosine
  modified_base 58: mod_base = OTHER; note = Guanosine phosphorothiorate
  modified_base 62: mod_base = OTHER; note = 2'-Omethylguanosine
  modified_base 73: mod_base = OTHER; note = 2'-Omethylguanosine phosphorothiorate
  modified_base 80: mod_base = OTHER; note = 2'-fluoroguanosine
  modified_base 82: mod_base = OTHER; note = 2'-fluoroguanosine phosphorothiorate

SEQ ID NO: 3568 - RNA, 75 nt, synthetic construct; identical to SEQ ID NO: 3299
  source 1..75: mol_type = other RNA
  modified_base 3: mod_base = OTHER; note = Uridine phosphorothiorate
  modified_base 10: mod_base = OTHER; note = 2'-Omethylcytosine phosphorothiorate
  modified_base 20: mod_base = OTHER; note = 2'-fluoroadenosine
  modified_base 21: mod_base = OTHER; note = 2'-fluoroguanosine
  modified_base 27: mod_base = OTHER; note = 2'-Omethylcytosine phosphorothiorate
  modified_base 28: mod_base = OTHER; note = 2'-Omethyladenosine phosphorothiorate
  modified_base 37: mod_base = OTHER; note = 2'-fluoroadenosine phosphorothiorate
  modified_base 38: mod_base = OTHER; note = 2'-fluorouridine phosphorothiorate
  modified_base 45: mod_base = OTHER; note = 2'-fluoroguanosine
  modified_base 47: mod_base = OTHER; note = Cytosine phosphorothiorate
  modified_base 50: mod_base = OTHER; note = Guanosine phosphorothiorate
  modified_base 54: mod_base = OTHER; note = 2'-Omethyluridine phosphorothiorate
  modified_base 60: mod_base = OTHER; note = Cytosine phosphorothiorate
  modified_base 62: mod_base = OTHER; note = Cytosine phosphorothiorate
  modified_base 64: mod_base = OTHER; note = Guanosine phosphorothiorate
  modified_base 70: mod_base = OTHER; note = Guanosine phosphorothiorate
  modified_base 72: mod_base = OTHER; note = Guanosine phosphorothiorate
  modified_base 74: mod_base = OTHER; note = Cytosine phosphorothiorate

SEQ ID NO: 3569 - RNA, 76 nt, synthetic construct; identical to SEQ ID NO: 625
  source 1..76: mol_type = other RNA
  modified_base 1: mod_base = OTHER; note = 2'-Omethylguanosine phosphorothiorate
  modified_base 2: mod_base = OTHER; note = 2'-fluoroguanosine
  modified_base 3: mod_base = OTHER; note = 2'-Omethylcytosine phosphorothiorate
  modified_base 5: mod_base = OTHER; note = 2'-fluorocytosine
  modified_base 6: mod_base = OTHER; note = Cytosine phosphorothiorate
  modified_base 11: mod_base = OTHER; note = 2'-Omethylcytosine
  modified_base 13: mod_base = OTHER; note = Cytosine phosphorothiorate
  modified_base 14: mod_base = OTHER; note = 2'-fluoroadenosine
  modified_base 15: mod_base = OTHER; note = Adenosine phosphorothiorate
  modified_base 18: mod_base = OTHER; note = Guanosine phosphorothiorate
  modified_base 22: mod_base = OTHER; note = 2'-fluoroguanosine
  modified_base 24: mod_base = OTHER; note = Guanosine phosphorothiorate
  modified_base 28: mod_base = OTHER; note = 2'-fluorouridine phosphorothiorate
  modified_base 29: mod_base = OTHER; note = 2'-Omethylguanosine
  modified_base 45: mod_base = OTHER; note = 2'-fluoroguanosine
  modified_base 47: mod_base = OTHER; note = 2'-Omethyluridine
  modified_base 50: mod_base = OTHER; note = 2'-Omethylcytosine
  modified_base 52: mod_base = OTHER; note = 2'-Omethylguanosine
  modified_base 53: mod_base = OTHER; note = 2'-Omethylguanosine
  modified_base 54: mod_base = OTHER; note = 2'-fluorouridine
  modified_base 57: mod_base = OTHER; note = 2'-Omethylguanosine
  modified_base 59: mod_base = OTHER; note = 2'-Omethylguanosine
  modified_base 60: mod_base = OTHER; note = 2'-Omethyluridine
  modified_base 62: mod_base = OTHER; note = 2'-fluorocytosine
  modified_base 63: mod_base = OTHER; note = 2'-fluorocytosine phosphorothiorate
  modified_base 64: mod_base = OTHER; note = 2'-fluoroguanosine
  modified_base 66: mod_base = OTHER; note = 2'-fluorocytosine phosphorothiorate
  modified_base 67: mod_base = OTHER; note = 2'-Omethylguanosine
  modified_base 68: mod_base = OTHER; note = 2'-fluoroguanosine
  modified_base 70: mod_base = OTHER; note = 2'-Omethylguanosine
  modified_base 71: mod_base = OTHER; note = Uridine phosphorothiorate
  modified_base 72: mod_base = OTHER; note = 2'-fluorocytosine
  modified_base 74: mod_base = OTHER; note = 2'-fluorocytosine phosphorothiorate
  modified_base 75: mod_base = OTHER; note = 2'-fluorocytosine
  modified_base 76: mod_base = OTHER; note = 2'-fluoroadenosine

SEQ ID NO: 3570 - RNA, 75 nt, synthetic construct; identical to SEQ ID NO: 3336
  source 1..75: mol_type = other RNA
  modified_base 4: mod_base = OTHER; note = 2'-Omethylguanosine phosphorothiorate
  modified_base 10: mod_base = OTHER; note = Cytosine phosphorothiorate
  modified_base 12: mod_base = OTHER; note = 2'-Omethylcytosine
  modified_base 16: mod_base = OTHER; note = Cytosine phosphorothiorate
  modified_base 18: mod_base = OTHER; note = 2'-fluoroguanosine
  modified_base 21: mod_base = OTHER; note = 2'-fluoroguanosine phosphorothiorate
  modified_base 25: mod_base = OTHER; note = 2'-fluoroadenosine
  modified_base 27: mod_base = OTHER; note = 2'-Omethylcytosine
  modified_base 29: mod_base = OTHER; note = 2'-Omethylguanosine phosphorothiorate
  modified_base 38: mod_base = OTHER; note = 2'-fluorouridine
  modified_base 39: mod_base = OTHER; note = 2'-Omethylcytosine phosphorothiorate
  modified_base 40: mod_base = OTHER; note = 2'-fluorouridine
  modified_base 41: mod_base = OTHER; note = 2'-fluoroguanosine
  modified_base 47: mod_base = OTHER; note = 2'-Omethylcytosine phosphorothiorate
  modified_base 52: mod_base = OTHER; note = 2'-fluoroguanosine phosphorothiorate
  modified_base 61: mod_base = OTHER; note = 2'-fluorocytosine phosphorothiorate
  modified_base 62: mod_base = OTHER; note = 2'-fluorocytosine
  modified_base 73: mod_base = OTHER; note = Cytosine phosphorothiorate
  modified_base 74: mod_base = OTHER; note = 2'-Omethylcytosine

SEQ ID NO: 3571 - RNA, 76 nt, synthetic construct; identical to SEQ ID NO: 625
  source 1..76: mol_type = other RNA
  modified_base 66: mod_base = OTHER; note = 2'-O-(2-Methoxyethyl) 5-methylcytosine

SEQ ID NO: 3572 - RNA, 86 nt, synthetic construct; identical to SEQ ID NO: 3290
  source 1..86: mol_type = other RNA
  modified_base 1: mod_base = OTHER; note = 2'-Omethyladenosine phosphorothiorate
  modified_base 2: mod_base = OTHER; note = 2'-Omethylcytosine phosphorothiorate
  modified_base 3: mod_base = OTHER; note = 2'-Omethylcytosine
  modified_base 4: mod_base = OTHER; note = 2'-Omethyladenosine
  modified_base 5: mod_base = OTHER; note = 2'-Omethylguanosine
  modified_base 6: mod_base = OTHER; note = 2'-Omethylguanosine
  modified_base 10: mod_base = OTHER; note = 2'-Omethylguanosine
  modified_base 11: mod_base = OTHER; note = 2'-Omethylcytosine
  modified_base 12: mod_base = OTHER; note = 2'-Omethylcytosine
  modified_base 13: mod_base = OTHER; note = 2'-Omethylguanosine
  modified_base 17: mod_base = OTHER; note = 2'-Omethylguanosine
  modified_base 18: mod_base = OTHER; note = 2'-Omethylguanosine
  modified_base 22: mod_base = OTHER; note = 2'-Omethyladenosine
  modified_base 23: mod_base = OTHER; note = 2'-Omethylguanosine
  modified_base 24: mod_base = OTHER; note = 2'-Omethylguanosine
  modified_base 25: mod_base = OTHER; note = 2'-Omethylcytosine
  modified_base 33: mod_base = OTHER; note = 2'-fluorouridine
  modified_base 35: mod_base = OTHER; note = Cytosine phosphorothiorate
  modified_base 37: mod_base = OTHER; note = Guanosine phosphorothiorate
  modified_base 38: mod_base = OTHER; note = Adenosine phosphorothiorate
  modified_base 41: mod_base = OTHER; note = 2'-fluorocytosine
  modified_base 42: mod_base = OTHER; note = 2'-Omethyladenosine
  modified_base 43: mod_base = OTHER; note = 2'-Omethyladenosine
  modified_base 44: mod_base = OTHER; note = 2'-fluorouridine
  modified_base 59: mod_base = OTHER; note = 2'-Omethylguanosine
  modified_base 60: mod_base = OTHER; note = 2'-Omethyluridine
  modified_base 61: mod_base = OTHER; note = 2'-Omethylguanosine
  modified_base 62: mod_base = OTHER; note = 2'-Omethylguanosine
  modified_base 63: mod_base = OTHER; note = 2'-Omethylguanosine
  modified_base 64: mod_base = OTHER; note = Uridine phosphorothiorate
  modified_base 65: mod_base = OTHER; note = Uridine phosphorothiorate
  modified_base 71: mod_base = OTHER; note = 2'-Omethylcytosine
  modified_base 72: mod_base = OTHER; note = 2'-Omethylcytosine
  modified_base 73: mod_base = OTHER; note = 2'-fluorocytosine
  modified_base 74: mod_base = OTHER; note = 2'-Omethyladenosine
  modified_base 75: mod_base = OTHER; note = 2'-Omethylcytosine
  modified_base 76: mod_base = OTHER; note = 2'-Omethyluridine
  modified_base 77: mod_base = OTHER; note = 2'-Omethylcytosine
  modified_base 78: mod_base = OTHER; note = 2'-Omethylcytosine
  modified_base 83: mod_base = OTHER; note = 2'-Omethyladenosine

SEQ ID NO: 3573 - RNA, 86 nt, synthetic construct; identical to SEQ ID NO: 3290
  source 1..86: mol_type = other RNA
  modified_base 70: mod_base = OTHER; note = Cytosine phosphorothiorate

SEQ ID NO: 3574 - RNA, 76 nt, synthetic construct; identical to SEQ ID NO: 625
  source 1..76: mol_type = other RNA
  modified_base 5: mod_base = OTHER; note = 2'-fluorocytosine
  modified_base 8: mod_base = OTHER; note = Uridine phosphorothiorate
  modified_base 10: mod_base = OTHER; note = 2'-Omethylguanosine
  modified_base 11: mod_base = OTHER; note = 2'-Omethylcytosine
  modified_base 13: mod_base = OTHER; note = Cytosine phosphorothiorate
  modified_base 14: mod_base = OTHER; note = 2'-fluoroadenosine
  modified_base 15: mod_base = OTHER; note = 2'-fluoroadenosine
  modified_base 17: mod_base = OTHER; note = 2'-Omethylguanosine phosphorothiorate
  modified_base 20: mod_base = OTHER; note = 2'-Omethyluridine
  modified_base 22: mod_base = OTHER; note = 2'-fluoroguanosine
  modified_base 24: mod_base = OTHER; note = 2'-fluoroguanosine
  modified_base 25: mod_base = OTHER; note = 2'-Omethylcytosine
  modified_base 26: mod_base = OTHER; note = 2'-Omethyladenosine
  modified_base 30: mod_base = OTHER; note = 2'-Omethylguanosine
  modified_base 31: mod_base = OTHER; note = 2'-Omethyladenosine
  modified_base 32: mod_base = OTHER; note = 2'-fluorocytosine
  modified_base 33: mod_base = OTHER; note = Uridine phosphorothiorate
  modified_base 38: mod_base = OTHER; note = 2'-Omethyladenosine
  modified_base 39: mod_base = OTHER; note = 2'-Omethyluridine
  modified_base 41: mod_base = OTHER; note = 2'-fluorocytosine
  modified_base 42: mod_base = OTHER; note = 2'-fluoroadenosine
  modified_base 44: mod_base = OTHER; note = 2'-fluoroadenosine
  modified_base 46: mod_base = OTHER; note = 2'-fluoroguanosine
  modified_base 49: mod_base = OTHER; note = Cytosine phosphorothiorate
  modified_base 50: mod_base = OTHER; note = 2'-fluorocytosine
  modified_base 53: mod_base = OTHER; note = 2'-Omethylguanosine
  modified_base 54: mod_base = OTHER; note = 2'-Omethyluridine
  modified_base 60: mod_base = OTHER; note = 2'-Omethyluridine
  modified_base 62: mod_base = OTHER; note = 2'-Omethylcytosine
  modified_base 65: mod_base = OTHER; note = 2'-fluoroguanosine
  modified_base 68: mod_base = OTHER; note = 2'-Omethylguanosine
  modified_base 70: mod_base = OTHER; note = Guanosine phosphorothiorate
  modified_base 71: mod_base = OTHER; note = 2'-fluorouridine
  modified_base 72: mod_base = OTHER; note = Cytosine phosphorothiorate
  modified_base 73: mod_base = OTHER; note = 2'-Omethylguanosine
  modified_base 74: mod_base = OTHER; note = 2'-Omethylcytosine
  modified_base 76: mod_base = OTHER; note = 2'-fluoroadenosine

SEQ ID NO: 3575 - RNA, 75 nt, synthetic construct; identical to SEQ ID NO: 1045
  source 1..75: mol_type = other RNA
  modified_base 2: mod_base = OTHER; note = 2'-Omethylguanosine phosphorothiorate
  modified_base 3: mod_base = OTHER; note = Uridine phosphorothiorate
  modified_base 50: mod_base = OTHER; note = 2'-Omethylguanosine
  modified_base 51: mod_base = OTHER; note = 2'-Omethyladenosine phosphorothiorate
  modified_base 52: mod_base = OTHER; note = 2'-Omethylguanosine
  modified_base 53: mod_base = OTHER; note = 2'-Omethyluridine
  modified_base 54: mod_base = OTHER; note = 2'-fluorouridine phosphorothiorate
  modified_base 55: mod_base = OTHER; note = 2'-Omethylcytosine
  modified_base 56: mod_base = OTHER; note = 2'-Omethylguanosine phosphorothiorate
  modified_base 58: mod_base = OTHER; note = 2'-Omethylguanosine
  modified_base 60: mod_base = OTHER; note = Cytosine phosphorothiorate
  modified_base 62: mod_base = OTHER; note = Cytosine phosphorothiorate
  modified_base 63: mod_base = OTHER; note = Guanosine phosphorothiorate
  modified_base 72: mod_base = OTHER; note = 2'-Omethyluridine
  modified_base 74: mod_base = OTHER; note = 2'-Omethylcytosine phosphorothiorate
  modified_base 75: mod_base = OTHER; note = 2'-Omethyladenosine

SEQ ID NO: 3576 - RNA, 74 nt, synthetic construct; identical to SEQ ID NO: 3293
  source 1..74: mol_type = other RNA
  modified_base 1: mod_base = OTHER; note = 2'-fluoroadenosine
  modified_base 2: mod_base = OTHER; note = 2'-fluorocytosine
  modified_base 3: mod_base = OTHER; note = Cytosine phosphorothiorate
  modified_base 4: mod_base = OTHER; note = Uridine phosphorothiorate
  modified_base 6: mod_base = OTHER; note = Guanosine phosphorothiorate
  modified_base 8: mod_base = OTHER; note = Guanosine phosphorothiorate
  modified_base 9: mod_base = OTHER; note = Guanosine phosphorothiorate
  modified_base 11: mod_base = OTHER; note = 2'-fluoroguanosine phosphorothiorate
  modified_base 24: mod_base = OTHER; note = 2'-fluoroguanosine
  modified_base 26: mod_base = OTHER; note = Cytosine phosphorothiorate
  modified_base 35: mod_base = OTHER; note = 2'-Omethylguanosine
  modified_base 42: mod_base = OTHER; note = Adenosine phosphorothiorate
  modified_base 43: mod_base = OTHER; note = 2'-fluoroguanosine
  modified_base 46: mod_base = OTHER; note = Uridine phosphorothiorate
  modified_base 48: mod_base = OTHER; note = 2'-fluorocytosine
  modified_base 50: mod_base = OTHER; note = Uridine phosphorothiorate
  modified_base 51: mod_base = OTHER; note = 2'-Omethylguanosine phosphorothiorate
  modified_base 62: mod_base = OTHER; note = 2'-fluoroguanosine
  modified_base 73: mod_base = OTHER; note = Cytosine phosphorothiorate
  modified_base 74: mod_base = OTHER; note = 2'-Omethyladenosine

SEQ ID NO: 3577 - RNA, 76 nt, synthetic construct; identical to SEQ ID NO: 625
  source 1..76: mol_type = other RNA
  modified_base 2: mod_base = OTHER; note = 2'-fluoroguanosine
  modified_base 4: mod_base = OTHER; note = 2'-fluorouridine
  modified_base 5: mod_base = OTHER; note = 2'-Omethylcytosine
  modified_base 15: mod_base = OTHER; note = 2'-Omethyladenosine phosphorothiorate
  modified_base 16: mod_base = OTHER; note = 2'-fluorouridine
  modified_base 18: mod_base = OTHER; note = Guanosine phosphorothiorate
  modified_base 20: mod_base = OTHER; note = 2'-Omethyluridine
  modified_base 23: mod_base = OTHER; note = 2'-fluorocytosine
  modified_base 25: mod_base = OTHER; note = Cytosine phosphorothiorate
  modified_base 26: mod_base = OTHER; note = 2'-Omethyladenosine
  modified_base 28: mod_base = OTHER; note = 2'-fluorouridine
  modified_base 29: mod_base = OTHER; note = 2'-Omethylguanosine
  modified_base 31: mod_base = OTHER; note = 2'-fluoroadenosine
  modified_base 38: mod_base = OTHER; note = 2'-Omethyladenosine
  modified_base 39: mod_base = OTHER; note = 2'-Omethyluridine
  modified_base 40: mod_base = OTHER; note = 2'-Omethyluridine
  modified_base 42: mod_base = OTHER; note = 2'-fluoroadenosine phosphorothiorate
  modified_base 43: mod_base = OTHER; note = 2'-fluoroadenosine phosphorothiorate
  modified_base 44: mod_base = OTHER; note = 2'-Omethyladenosine phosphorothiorate
  modified_base 48: mod_base = OTHER; note = 2'-fluorouridine
  modified_base 49: mod_base = OTHER; note = 2'-Omethylcytosine
  modified_base 50: mod_base = OTHER; note = 2'-fluorocytosine
  modified_base 52: mod_base = OTHER; note = 2'-Omethylguanosine
  modified_base 53: mod_base = OTHER; note = Guanosine phosphorothiorate
  modified_base 54: mod_base = OTHER; note = Uridine phosphorothiorate
  modified_base 56: mod_base = OTHER; note = Cytosine phosphorothiorate
  modified_base 57: mod_base = OTHER; note = 2'-Omethylguanosine
  modified_base 60: mod_base = OTHER; note = 2'-Omethyluridine
  modified_base 61: mod_base = OTHER; note = 2'-fluorocytosine phosphorothiorate
  modified_base 62: mod_base = OTHER; note = 2'-fluorocytosine
  modified_base 65: mod_base = OTHER; note = 2'-fluoroguanosine
  modified_base 69: mod_base = OTHER; note = 2'-fluoroadenosine
  modified_base 72: mod_base = OTHER; note = Cytosine phosphorothiorate
  modified_base 74: mod_base = OTHER; note = 2'-fluorocytosine phosphorothiorate
  modified_base 75: mod_base = OTHER; note = 2'-fluorocytosine

SEQ ID NO: 3578 - RNA, 86 nt, synthetic construct; identical to SEQ ID NO: 3290
  source 1..86: mol_type = other RNA
  modified_base 71: mod_base = OTHER; note = 2'-fluorocytosine

SEQ ID NO: 3579 - RNA, 75 nt, synthetic construct; identical to SEQ ID NO: 1045
  source 1..75: mol_type = other RNA
  modified_base 3: mod_base = OTHER; note = 2'-fluorouridine phosphorothiorate
  modified_base 11: mod_base = OTHER; note = 2'-Omethyluridine phosphorothiorate
  modified_base 18: mod_base = OTHER; note = 2'-Omethylguanosine
  modified_base 27: mod_base = OTHER; note = 2'-Omethylcytosine
  modified_base 34: mod_base = OTHER; note = 2'-fluorouridine phosphorothiorate
  modified_base 51: mod_base = OTHER; note = Adenosine phosphorothiorate
  modified_base 56: mod_base = OTHER; note = Guanosine phosphorothiorate
  modified_base 62: mod_base = OTHER; note = 2'-Omethylcytosine phosphorothiorate
  modified_base 63: mod_base = OTHER; note = 2'-Omethylguanosine phosphorothiorate
  modified_base 65: mod_base = OTHER; note = 2'-fluorouridine phosphorothiorate
  modified_base 67: mod_base = OTHER; note = 2'-Omethylguanosine
  modified_base 68: mod_base = OTHER; note = 2'-Omethyladenosine
  modified_base 72: mod_base = OTHER; note = 2'-Omethyluridine
  modified_base 74: mod_base = OTHER; note = 2'-Omethylcytosine phosphorothiorate

SEQ ID NO: 3580 - RNA, 76 nt, synthetic construct; identical to SEQ ID NO: 625
  source 1..76: mol_type = other RNA
  modified_base 2: mod_base = OTHER; note = 2'-fluoroguanosine phosphorothiorate
  modified_base 5: mod_base = OTHER; note = Cytosine phosphorothiorate
  modified_base 6: mod_base = OTHER; note = Cytosine phosphorothiorate
  modified_base 10: mod_base = OTHER; note = 2'-Omethylguanosine
  modified_base 12: mod_base = OTHER; note = Guanosine phosphorothiorate
  modified_base 15: mod_base = OTHER; note = Adenosine phosphorothiorate
  modified_base 16: mod_base = OTHER; note = 2'-Omethyluridine
  modified_base 18: mod_base = OTHER; note = 2'-Omethylguanosine
  modified_base 20: mod_base = OTHER; note = 2'-fluorouridine
  modified_base 23: mod_base = OTHER; note = 2'-Omethylcytosine
  modified_base 24: mod_base = OTHER; note = 2'-Omethylguanosine
  modified_base 26: mod_base = OTHER; note = Adenosine phosphorothiorate
  modified_base 28: mod_base = OTHER; note = 2'-Omethyluridine
  modified_base 42: mod_base = OTHER; note = 2'-fluoroadenosine phosphorothiorate
  modified_base 44: mod_base = OTHER; note = 2'-Omethyladenosine
  modified_base 45: mod_base = OTHER; note = Guanosine phosphorothiorate
  modified_base 47: mod_base = OTHER; note = 2'-fluorouridine
  modified_base 48: mod_base = OTHER; note = 2'-fluorouridine
  modified_base 49: mod_base = OTHER; note = 2'-fluorocytosine
  modified_base 50: mod_base = OTHER; note = 2'-fluorocytosine
  modified_base 52: mod_base = OTHER; note = 2'-Omethylguanosine
  modified_base 54: mod_base = OTHER; note = Uridine phosphorothiorate
  modified_base 55: mod_base = OTHER; note = Uridine phosphorothiorate
  modified_base 58: mod_base = OTHER; note = Adenosine phosphorothiorate
  modified_base 60: mod_base = OTHER; note = 2'-fluorouridine
  modified_base 62: mod_base = OTHER; note = 2'-fluorocytosine
  modified_base 66: mod_base = OTHER; note = 2'-Omethylcytosine phosphorothiorate
  modified_base 67: mod_base = OTHER; note = 2'-Omethylguanosine
  modified_base 69: mod_base = OTHER; note = Adenosine phosphorothiorate
  modified_base 70: mod_base = OTHER; note = 2'-fluoroguanosine

SEQ ID NO: 3581 - RNA, 75 nt, synthetic construct; identical to SEQ ID NO: 3336
  source 1..75: mol_type = other RNA
  modified_base 15: mod_base = OTHER; note = 2'-fluorouridine
  modified_base 21: mod_base = OTHER; note = 2'-fluoroguanosine
  modified_base 23: mod_base = OTHER; note = Guanosine phosphorothiorate
  modified_base 38: mod_base = OTHER; note = 2'-fluorouridine
  modified_base 46: mod_base = OTHER; note = 2'-fluorouridine
  modified_base 53: mod_base = OTHER; note = 2'-fluorouridine
  modified_base 55: mod_base = OTHER; note = 2'-fluorocytosine
  modified_base 72: mod_base = OTHER; note = 2'-Omethylguanosine
  modified_base 73: mod_base = OTHER; note = Cytosine phosphorothiorate

SEQ ID NO: 3582 - RNA, 85 nt, synthetic construct; identical to SEQ ID NO: 3286
  source 1..85: mol_type = other RNA
  modified_base 1: mod_base = OTHER; note = 2'-Omethylcytosine
  modified_base 23: mod_base = OTHER; note = 2'-fluoroguanosine
  modified_base 26: mod_base = OTHER; note = 2'-fluorouridine phosphorothiorate
  modified_base 27: mod_base = OTHER; note = 2'-fluorouridine
  modified_base 30: mod_base = OTHER; note = 2'-fluoroadenosine
  modified_base 34: mod_base = OTHER; note = 2'-fluorouridine
  modified_base 35: mod_base = OTHER; note = 2'-fluoroadenosine phosphorothiorate
  modified_base 39: mod_base = OTHER; note = Cytosine phosphorothiorate
  modified_base 45: mod_base = OTHER; note = 2'-Omethylguanosine
  modified_base 46: mod_base = OTHER; note = Adenosine phosphorothiorate
  modified_base 47: mod_base = OTHER; note = 2'-fluorocytosine
  modified_base 51: mod_base = OTHER; note = 2'-fluorouridine
  modified_base 52: mod_base = OTHER; note = Guanosine phosphorothiorate
  modified_base 53: mod_base = OTHER; note = 2'-fluorouridine
  modified_base 56: mod_base = OTHER; note = 2'-fluoroguanosine phosphorothiorate
  modified_base 57: mod_base = OTHER; note = 2'-Omethylcytosine phosphorothiorate
  modified_base 60: mod_base = OTHER; note = 2'-fluoroguanosine phosphorothiorate
  modified_base 64: mod_base = OTHER; note = 2'-fluorouridine phosphorothiorate
  modified_base 76: mod_base = OTHER; note = 2'-fluorocytosine phosphorothiorate
  modified_base 84: mod_base = OTHER; note = 2'-Omethylcytosine phosphorothiorate

SEQ ID NO: 3583 - RNA, 76 nt, synthetic construct; identical to SEQ ID NO: 625
  source 1..76: mol_type = other RNA
  modified_base 2: mod_base = OTHER; note = 2'-Omethylguanosine
  modified_base 4: mod_base = OTHER; note = 2'-Omethyluridine
  modified_base 8: mod_base = OTHER; note = Uridine phosphorothiorate
  modified_base 11: mod_base = OTHER; note = Cytosine phosphorothiorate
  modified_base 12: mod_base = OTHER; note = 2'-Omethylguanosine
  modified_base 13: mod_base = OTHER; note = 2'-Omethylcytosine
  modified_base 14: mod_base = OTHER; note = 2'-fluoroadenosine
  modified_base 15: mod_base = OTHER; note = Adenosine phosphorothiorate
  modified_base 17: mod_base = OTHER; note = 2'-Omethylguanosine
  modified_base 18: mod_base = OTHER; note = 2'-Omethylguanosine
  modified_base 20: mod_base = OTHER; note = 2'-fluorouridine
  modified_base 22: mod_base = OTHER; note = 2'-Omethylguanosine
  modified_base 23: mod_base = OTHER; note = Cytosine phosphorothiorate
  modified_base 25: mod_base = OTHER; note = 2'-Omethylcytosine phosphorothiorate
  modified_base 26: mod_base = OTHER; note = 2'-fluoroadenosine
  modified_base 29: mod_base = OTHER; note = 2'-Omethylguanosine
  modified_base 31: mod_base = OTHER; note = 2'-Omethyladenosine
  modified_base 33: mod_base = OTHER; note = Uridine phosphorothiorate
  modified_base 34: mod_base = OTHER; note = 2'-Omethyluridine phosphorothiorate
  modified_base 38: mod_base = OTHER; note = 2'-Omethyladenosine
  modified_base 42: mod_base = OTHER; note = 2'-fluoroadenosine
  modified_base 43: mod_base = OTHER; note = Adenosine phosphorothiorate
  modified_base 44: mod_base = OTHER; note = 2'-fluoroadenosine
  modified_base 48: mod_base = OTHER; note = Uridine phosphorothiorate
  modified_base 52: mod_base = OTHER; note = 2'-Omethylguanosine
  modified_base 58: mod_base = OTHER; note = 2'-fluoroadenosine
  modified_base 62: mod_base = OTHER; note = 2'-Omethylcytosine
  modified_base 63: mod_base = OTHER; note = Cytosine phosphorothiorate
  modified_base 64: mod_base = OTHER; note = 2'-fluoroguanosine phosphorothiorate
  modified_base 65: mod_base = OTHER; note = 2'-Omethylguanosine phosphorothiorate
  modified_base 66: mod_base = OTHER; note = 2'-fluorocytosine
  modified_base 67: mod_base = OTHER; note = 2'-Omethylguanosine phosphorothiorate
  modified_base 68: mod_base = OTHER; note = 2'-Omethylguanosine
  modified_base 70: mod_base = OTHER; note = 2'-Omethylguanosine
  modified_base 72: mod_base = OTHER; note = 2'-fluorocytosine
  modified_base 73: mod_base = OTHER; note = 2'-Omethylguanosine
  modified_base 75: mod_base = OTHER; note = 2'-Omethylcytosine

SEQ ID NO: 3584 - RNA, 86 nt, synthetic construct; identical to SEQ ID NO: 3290
  source 1..86: mol_type = other RNA
  modified_base 1: mod_base = OTHER; note = 2'-Omethyladenosine
  modified_base 60: mod_base = OTHER; note = 2'-Omethyluridine

SEQ ID NO: 3585 - RNA, 85 nt, synthetic construct; identical to SEQ ID NO: 3297
  source 1..85: mol_type = other RNA
  modified_base 2: mod_base = OTHER; note = 2'-Omethylcytosine phosphorothiorate
  modified_base 3: mod_base = OTHER; note = 2'-Omethyluridine phosphorothiorate
  modified_base 25: mod_base = OTHER; note = 2'-Omethylcytosine phosphorothiorate
  modified_base 32: mod_base = OTHER; note = Cytosine phosphorothiorate
  modified_base 51: mod_base = OTHER; note = Uridine phosphorothiorate
  modified_base 55: mod_base = OTHER; note = 2'-Omethylcytosine phosphorothiorate
  modified_base 82: mod_base = OTHER; note = 2'-Omethylguanosine

SEQ ID NO: 3586 - RNA, 75 nt, synthetic construct; identical to SEQ ID NO: 1045
  source 1..75: mol_type = other RNA
  modified_base 1: mod_base = OTHER; note = 2'-fluoroguanosine phosphorothiorate
  modified_base 2: mod_base = OTHER; note = 2'-fluoroguanosine phosphorothiorate
  modified_base 11: mod_base = OTHER; note = 2'-Omethyluridine phosphorothiorate
  modified_base 16: mod_base = OTHER; note = 2'-fluorouridine phosphorothiorate
  modified_base 21: mod_base = OTHER; note = Adenosine phosphorothiorate
  modified_base 22: mod_base = OTHER; note = 2'-fluoroguanosine
  modified_base 25: mod_base = OTHER; note = 2'-fluorocytosine
  modified_base 28: mod_base = OTHER; note = 2'-Omethyluridine
  modified_base 29: mod_base = OTHER; note = 2'-fluoroguanosine
  modified_base 34: mod_base = OTHER; note = 2'-fluorouridine phosphorothiorate
  modified_base 42: mod_base = OTHER; note = 2'-fluoroadenosine
  modified_base 44: mod_base = OTHER; note = 2'-fluorocytosine
  modified_base 50: mod_base = OTHER; note = 2'-fluoroguanosine
  modified_base 51: mod_base = OTHER; note = 2'-fluoroadenosine phosphorothiorate
  modified_base 53: mod_base = OTHER; note = Uridine phosphorothiorate
  modified_base 62: mod_base = OTHER; note = Cytosine phosphorothiorate
  modified_base 63: mod_base = OTHER; note = Guanosine phosphorothiorate
  modified_base 65: mod_base = OTHER; note = 2'-fluorouridine
  modified_base 68: mod_base = OTHER; note = Adenosine phosphorothiorate
  modified_base 72: mod_base = OTHER; note = Uridine phosphorothiorate
  modified_base 73: mod_base = OTHER; note = Cytosine phosphorothiorate
  modified_base 74: mod_base = OTHER; note = 2'-fluorocytosine phosphorothiorate

SEQ ID NO: 3587 - RNA, 75 nt, synthetic construct; identical to SEQ ID NO: 3336
  source 1..75: mol_type = other RNA
  modified_base 1: mod_base = OTHER; note = 2'-Omethylcytosine
  modified_base 8: mod_base = OTHER; note = 2'-Omethyladenosine
  modified_base 16: mod_base = OTHER; note = 2'-fluorocytosine
  modified_base 21: mod_base = OTHER; note = 2'-fluoroguanosine
  modified_base 22: mod_base = OTHER; note = 2'-Omethyladenosine
  modified_base 26: mod_base = OTHER; note = Uridine phosphorothiorate
  modified_base 27: mod_base = OTHER; note = 2'-Omethylcytosine phosphorothiorate
  modified_base 33: mod_base = OTHER; note = 2'-fluorocytosine
  modified_base 35: mod_base = OTHER; note = 2'-fluoroadenosine
  modified_base 36: mod_base = OTHER; note = 2'-fluoroadenosine
  modified_base 39: mod_base = OTHER; note = 2'-Omethylcytosine phosphorothiorate
  modified_base 46: mod_base = OTHER; note = 2'-fluorouridine
  modified_base 48: mod_base = OTHER; note = 2'-fluorocytosine
  modified_base 49: mod_base = OTHER; note = 2'-fluoroadenosine
  modified_base 53: mod_base = OTHER; note = 2'-fluorouridine
  modified_base 58: mod_base = OTHER; note = Guanosine phosphorothiorate
  modified_base 62: mod_base = OTHER; note = 2'-Omethylcytosine phosphorothiorate
  modified_base 63: mod_base = OTHER; note = 2'-fluorouridine phosphorothiorate
  modified_base 72: mod_base = OTHER; note = 2'-fluoroguanosine phosphorothiorate
  modified_base 74: mod_base = OTHER; note = Cytosine phosphorothiorate

SEQ ID NO: 3588 - RNA, 86 nt, synthetic construct; identical to SEQ ID NO: 3290
  source 1..86: mol_type = other RNA
  modified_base 48: mod_base = OTHER; note = Cytosine phosphorothiorate

SEQ ID NO: 3589 - RNA, 76 nt, synthetic construct
  source 1..76: mol_type = other RNA
ggccgactggcgcaatggatagcgcattggacttcaaattcaaaggttacgggttcgagtcccgtgtcggtcgcca

SEQ ID NO: 3590 - RNA, 75 nt, synthetic construct; identical to SEQ ID NO: 3299
  source 1..75: mol_type = other RNA
  modified_base 11: mod_base = OTHER; note = Uridine phosphorothiorate
  modified_base 13: mod_base = OTHER; note = Adenosine phosphorothiorate
  modified_base 14: mod_base = OTHER; note = 2'-fluoroguanosine
  modified_base 19: mod_base = OTHER; note = 2'-fluorouridine
  modified_base 20: mod_base = OTHER; note = 2'-fluoroadenosine
  modified_base 22: mod_base = OTHER; note = 2'-fluoroadenosine phosphorothiorate
  modified_base 23: mod_base = OTHER; note = Guanosine phosphorothiorate
  modified_base 25: mod_base = OTHER; note = Adenosine phosphorothiorate
  modified_base 28: mod_base = OTHER; note = 2'-fluoroadenosine phosphorothiorate
  modified_base 34: mod_base = OTHER; note = 2'-fluorouridine phosphorothiorate
  modified_base 35: mod_base = OTHER; note = 2'-fluoroadenosine
  modified_base 38: mod_base = OTHER; note = 2'-fluorouridine
  modified_base 40: mod_base = OTHER; note = 2'-fluorouridine
  modified_base 42: mod_base = OTHER; note = Adenosine phosphorothiorate
  modified_base 47: mod_base = OTHER; note = 2'-Omethylcytosine phosphorothiorate
  modified_base 49: mod_base = OTHER; note = Adenosine phosphorothiorate
  modified_base 58: mod_base = OTHER; note = Guanosine phosphorothiorate
  modified_base 73: mod_base = OTHER; note = Cytosine phosphorothiorate
  modified_base 74: mod_base = OTHER; note = 2'-Omethylcytosine

SEQ ID NO: 3591 - RNA, 86 nt, synthetic construct; identical to SEQ ID NO: 3290
  source 1..86: mol_type = other RNA
  modified_base 78: mod_base = OTHER; note = Cytosine phosphorothiorate

SEQ ID NO: 3592 - RNA, 76 nt, synthetic construct; identical to SEQ ID NO: 3318
  source 1..76: mol_type = other RNA
  modified_base 1: mod_base = OTHER; note = 2'-Omethylcytosine
  modified_base 4: mod_base = OTHER; note = 2'-Omethyluridine
  modified_base 13: mod_base = OTHER; note = 2'-Omethylcytosine
  modified_base 18: mod_base = OTHER; note = 2'-Omethylguanosine
  modified_base 19: mod_base = OTHER; note = 2'-Omethylguanosine
  modified_base 25: mod_base = OTHER; note = 2'-Omethylcytosine
  modified_base 29: mod_base = OTHER; note = 2'-Omethylguanosine
  modified_base 30: mod_base = OTHER; note = 2'-Omethylguanosine
  modified_base 49: mod_base = OTHER; note = 2'-Omethylguanosine
  modified_base 50: mod_base = OTHER; note = 2'-Omethylcytosine
  modified_base 52: mod_base = OTHER; note = 2'-Omethylguanosine
  modified_base 56: mod_base = OTHER; note = 2'-Omethylcytosine
  modified_base 59: mod_base = OTHER; note = 2'-Omethyladenosine
  modified_base 65: mod_base = OTHER; note = 2'-Omethylcytosine
  modified_base 69: mod_base = OTHER; note = 2'-Omethyladenosine
  modified_base 71: mod_base = OTHER; note = 2'-Omethylguanosine
  modified_base 72: mod_base = OTHER; note = 2'-Omethylguanosine
  modified_base 73: mod_base = OTHER; note = 2'-Omethyladenosine

SEQ ID NO: 3593 - RNA, 76 nt, synthetic construct; identical to SEQ ID NO: 625
  source 1..76: mol_type = other RNA
  modified_base 1: mod_base = OTHER; note = 2'-Omethylguanosine
  modified_base 13: mod_base = OTHER; note = 2'-Omethylcytosine
  modified_base 17: mod_base = OTHER; note = Guanosine phosphorothiorate
  modified_base 18: mod_base = OTHER; note = 2'-Omethylguanosine
  modified_base 19: mod_base = OTHER; note = Adenosine phosphorothiorate
  modified_base 20: mod_base = OTHER; note = 2'-Omethyluridine
  modified_base 25: mod_base = OTHER; note = 2'-Omethylcytosine
  modified_base 29: mod_base = OTHER; note = 2'-Omethylguanosine
  modified_base 33: mod_base = OTHER; note = 2'-fluorouridine
  modified_base 35: mod_base = OTHER; note = Cytosine phosphorothiorate
  modified_base 37: mod_base = OTHER; note = Adenosine phosphorothiorate
  modified_base 38: mod_base = OTHER; note = Adenosine phosphorothiorate
  modified_base 41: mod_base = OTHER; note = 2'-fluorocytosine
  modified_base 43: mod_base = OTHER; note = 2'-Omethyladenosine
  modified_base 44: mod_base = OTHER; note = 2'-fluoroadenosine
  modified_base 46: mod_base = OTHER; note = Guanosine phosphorothiorate
  modified_base 50: mod_base = OTHER; note = 2'-Omethylcytosine
  modified_base 52: mod_base = OTHER; note = 2'-Omethylguanosine
  modified_base 54: mod_base = OTHER; note = Uridine phosphorothiorate
  modified_base 55: mod_base = OTHER; note = Uridine phosphorothiorate
  modified_base 56: mod_base = OTHER; note = 2'-Omethylcytosine
  modified_base 57: mod_base = OTHER; note = Guanosine phosphorothiorate
  modified_base 62: mod_base = OTHER; note = 2'-Omethylcytosine
  modified_base 63: mod_base = OTHER; note = 2'-fluorocytosine
  modified_base 65: mod_base = OTHER; note = 2'-Omethylguanosine
  modified_base 71: mod_base = OTHER; note = 2'-Omethyluridine
  modified_base 73: mod_base = OTHER; note = 2'-Omethylguanosine

SEQ ID NO: 3594 - RNA, 75 nt, synthetic construct; identical to SEQ ID NO: 1045
  source 1..75: mol_type = other RNA
  modified_base 1: mod_base = OTHER; note = Guanosine phosphorothiorate
  modified_base 2: mod_base = OTHER; note = 2'-Omethylguanosine phosphorothiorate
  modified_base 3: mod_base = OTHER; note = 2'-Omethyluridine
  modified_base 10: mod_base = OTHER; note = 2'-fluoroguanosine phosphorothiorate
  modified_base 14: mod_base = OTHER; note = 2'-fluoroadenosine
  modified_base 15: mod_base = OTHER; note = Adenosine phosphorothiorate
  modified_base 16: mod_base = OTHER; note = 2'-fluorouridine
  modified_base 18: mod_base = OTHER; note = 2'-fluoroguanosine
  modified_base 19: mod_base = OTHER; note = 2'-fluorouridine
  modified_base 22: mod_base = OTHER; note = 2'-fluoroguanosine
  modified_base 23: mod_base = OTHER; note = 2'-fluorocytosine
  modified_base 31: mod_base = OTHER; note = 2'-Omethyladenosine
  modified_base 38: mod_base = OTHER; note = 2'-fluoroadenosine phosphorothiorate
  modified_base 44: mod_base = OTHER; note = 2'-fluorocytosine
  modified_base 56: mod_base = OTHER; note = Guanosine phosphorothiorate
  modified_base 58: mod_base = OTHER; note = 2'-fluoroguanosine
  modified_base 60: mod_base = OTHER; note = 2'-fluorocytosine
  modified_base 67: mod_base = OTHER; note = 2'-fluoroguanosine

SEQ ID NO: 3595 - RNA, 76 nt, synthetic construct; identical to SEQ ID NO: 625
  source 1..76: mol_type = other RNA
  modified_base 1: mod_base = OTHER; note = 2'-Omethylguanosine
  modified_base 2: mod_base = OTHER; note = 2'-Omethylguanosine phosphorothiorate
  modified_base 10: mod_base = OTHER; note = 2'-Omethylguanosine
  modified_base 13: mod_base = OTHER; note = 2'-Omethylcytosine
  modified_base 17: mod_base = OTHER; note = Guanosine phosphorothiorate
  modified_base 18: mod_base = OTHER; note = 2'-Omethylguanosine
  modified_base 19: mod_base = OTHER; note = Adenosine phosphorothiorate
  modified_base 20: mod_base = OTHER; note = 2'-Omethyluridine
  modified_base 25: mod_base = OTHER; note = 2'-Omethylcytosine
  modified_base 29: mod_base = OTHER; note = 2'-Omethylguanosine
  modified_base 33: mod_base = OTHER; note = 2'-fluorouridine
  modified_base 35: mod_base = OTHER; note = Cytosine phosphorothiorate
  modified_base 37: mod_base = OTHER; note = Adenosine phosphorothiorate
  modified_base 38: mod_base = OTHER; note = Adenosine phosphorothiorate
  modified_base 41: mod_base = OTHER; note = 2'-fluorocytosine phosphorothiorate
  modified_base 43: mod_base = OTHER; note = 2'-Omethyladenosine
  modified_base 44: mod_base = OTHER; note = 2'-fluoroadenosine
  modified_base 46: mod_base = OTHER; note = Guanosine phosphorothiorate
  modified_base 50: mod_base = OTHER; note = 2'-Omethylcytosine
  modified_base 52: mod_base = OTHER; note = 2'-Omethylguanosine
  modified_base 54: mod_base = OTHER; note = Uridine phosphorothiorate
  modified_base 55: mod_base = OTHER; note = Uridine phosphorothiorate
  modified_base 56: mod_base = OTHER; note = 2'-Omethylcytosine
  modified_base 57: mod_base = OTHER; note = Guanosine phosphorothiorate
  modified_base 62: mod_base = OTHER; note = 2'-Omethylcytosine
  modified_base 63: mod_base = OTHER; note = 2'-fluorocytosine
  modified_base 65: mod_base = OTHER; note = 2'-Omethylguanosine
  modified_base 73: mod_base = OTHER; note = 2'-Omethylguanosine

SEQ ID NO: 3596 - DNA, 76 bp, synthetic construct; identical to SEQ ID NO: 1924
  source 1..76: mol_type = other DNA
  modified_base 1: mod_base = OTHER; note = 2'-Omethylguanosine phosphorothiorate
  modified_base 2: mod_base = OTHER; note = 2'-Omethylguanosine phosphorothiorate
  modified_base 17: mod_base = OTHER; note = 2'-Omethylguanosine
  modified_base 26: mod_base = OTHER; note = Adenosine phosphorothiorate
  modified_base 48: mod_base = OTHER; note = Uridine phosphorothiorate
  modified_base 49: mod_base = OTHER; note = 2'-O-(2-Methoxyethyl) 5-methylcytosine
  modified_base 59: mod_base = OTHER; note = 2'-O-(2-Methoxyethyl) guanosine
  modified_base 74: mod_base = OTHER; note = 2'-fluorocytosine
  misc_feature 1..24: note = RNA
  misc_feature 25: note = DNA
  misc_feature 26..76: note = RNA

SEQ ID NO: 3597 - RNA, 85 nt, synthetic construct; identical to SEQ ID NO: 3297
  source 1..85: mol_type = other RNA
  modified_base 1: mod_base = OTHER; note = 2'-Omethylguanosine
  modified_base 58: mod_base = OTHER; note = 2'-Omethylguanosine

SEQ ID NO: 3598 - RNA, 76 nt, synthetic construct; identical to SEQ ID NO: 625
  source 1..76: mol_type = other RNA
  modified_base 5: mod_base = OTHER; note = Cytosine phosphorothiorate
  modified_base 10: mod_base = OTHER; note = Guanosine phosphorothiorate
  modified_base 13: mod_base = OTHER; note = 2'-fluorocytosine
  modified_base 14: mod_base = OTHER; note = Adenosine phosphorothiorate
  modified_base 19: mod_base = OTHER; note = Adenosine phosphorothiorate
  modified_base 21: mod_base = OTHER; note = Adenosine phosphorothiorate
  modified_base 22: mod_base = OTHER; note = 2'-Omethylguanosine
  modified_base 23: mod_base = OTHER; note = 2'-fluorocytosine
  modified_base 26: mod_base = OTHER; note = 2'-Omethyladenosine phosphorothiorate
  modified_base 27: mod_base = OTHER; note = 2'-fluorouridine phosphorothiorate
  modified_base 28: mod_base = OTHER; note = 2'-Omethyluridine
  modified_base 29: mod_base = OTHER; note = 2'-fluoroguanosine
  modified_base 30: mod_base = OTHER; note = 2'-fluoroguanosine
  modified_base 33: mod_base = OTHER; note = Uridine phosphorothiorate
  modified_base 34: mod_base = OTHER; note = 2'-fluorouridine
  modified_base 38: mod_base = OTHER; note = 2'-fluoroadenosine
  modified_base 40: mod_base = OTHER; note = 2'-Omethyluridine
  modified_base 42: mod_base = OTHER; note = 2'-Omethyladenosine
  modified_base 44: mod_base = OTHER; note = 2'-Omethyladenosine
  modified_base 47: mod_base = OTHER; note = 2'-Omethyluridine
  modified_base 49: mod_base = OTHER; note = 2'-fluorocytosine
  modified_base 57: mod_base = OTHER; note = 2'-fluoroguanosine phosphorothiorate
  modified_base 59: mod_base = OTHER; note = 2'-Omethylguanosine
  modified_base 60: mod_base = OTHER; note = 2'-Omethyluridine
  modified_base 61: mod_base = OTHER; note = Cytosine phosphorothiorate
  modified_base 62: mod_base = OTHER; note = 2'-fluorocytosine
  modified_base 63: mod_base = OTHER; note = Cytosine phosphorothiorate
  modified_base 64: mod_base = OTHER; note = 2'-Omethylguanosine
  modified_base 65: mod_base = OTHER; note = 2'-fluoroguanosine phosphorothiorate
  modified_base 68: mod_base = OTHER; note = 2'-fluoroguanosine
  modified_base 69: mod_base = OTHER; note = 2'-fluoroadenosine
  modified_base 70: mod_base = OTHER; note = 2'-Omethylguanosine
  modified_base 72: mod_base = OTHER; note = 2'-fluorocytosine phosphorothiorate
  modified_base 75: mod_base = OTHER; note = 2'-fluorocytosine
  modified_base 76: mod_base = OTHER; note = 2'-fluoroadenosine

SEQ ID NO: 3599 - RNA, 76 nt, synthetic construct
  source 1..76: mol_type = other RNA
ggctccgtggcgcaatggatagcgcattggacttcaaattcaaaggttccgggaacatgtcccggcggagtcgcca

SEQ ID NO: 3600 - RNA, 76 nt, synthetic construct; identical to SEQ ID NO: 3295
  source 1..76: mol_type = other RNA
  modified_base 1: mod_base = OTHER; note = 2'-Omethylcytosine
  modified_base 2: mod_base = OTHER; note = 2'-Omethylcytosine
  modified_base 4: mod_base = OTHER; note = 2'-Omethyluridine phosphorothiorate
  modified_base 6: mod_base = OTHER; note = 2'-fluoroguanosine phosphorothiorate
  modified_base 8: mod_base = OTHER; note = 2'-Omethyluridine
  modified_base 9: mod_base = OTHER; note = Adenosine phosphorothiorate
  modified_base 16: mod_base = OTHER; note = 2'-fluorouridine phosphorothiorate
  modified_base 17: mod_base = OTHER; note = 2'-fluorouridine phosphorothiorate
  modified_base 23: mod_base = OTHER; note = 2'-Omethyladenosine phosphorothiorate
  modified_base 28: mod_base = OTHER; note = 2'-Omethyladenosine
  modified_base 31: mod_base = OTHER; note = Adenosine phosphorothiorate
  modified_base 38: mod_base = OTHER; note = Adenosine phosphorothiorate
  modified_base 40: mod_base = OTHER; note = 2'-Omethylcytosine
  modified_base 47: mod_base = OTHER; note = 2'-fluorouridine phosphorothiorate
  modified_base 49: mod_base = OTHER; note = 2'-fluoroguanosine phosphorothiorate
  modified_base 52: mod_base = OTHER; note = 2'-Omethylguanosine
  modified_base 53: mod_base = OTHER; note = 2'-fluoroguanosine phosphorothiorate
  modified_base 58: mod_base = OTHER; note = 2'-Omethyladenosine phosphorothiorate
  modified_base 64: mod_base = OTHER; note = Guanosine phosphorothiorate
  modified_base 75: mod_base = OTHER; note = Cytosine phosphorothiorate
  modified_base 76: mod_base = OTHER; note = 2'-fluoroadenosine

SEQ ID NO: 3601 - RNA, 75 nt, synthetic construct; identical to SEQ ID NO: 3336
  source 1..75: mol_type = other RNA
  modified_base 2: mod_base = OTHER; note = Cytosine phosphorothiorate
  modified_base 9: mod_base = OTHER; note = 2'-fluoroguanosine phosphorothiorate
  modified_base 28: mod_base = OTHER; note = 2'-fluoroadenosine
  modified_base 38: mod_base = OTHER; note = Uridine phosphorothiorate
  modified_base 48: mod_base = OTHER; note = Cytosine phosphorothiorate
  modified_base 51: mod_base = OTHER; note = 2'-fluoroguanosine
  modified_base 73: mod_base = OTHER; note = 2'-Omethylcytosine

SEQ ID NO: 3602 - RNA, 86 nt, synthetic construct; identical to SEQ ID NO: 3290
  source 1..86: mol_type = other RNA
  modified_base 1: mod_base = OTHER; note = 2'-Omethyladenosine
  modified_base 4: mod_base = OTHER; note = 2'-Omethyladenosine
  modified_base 10: mod_base = OTHER; note = 2'-Omethylguanosine
  modified_base 11: mod_base = OTHER; note = 2'-Omethylcytosine
  modified_base 12: mod_base = OTHER; note = 2'-Omethylcytosine
  modified_base 13: mod_base = OTHER; note = 2'-Omethylguanosine
  modified_base 17: mod_base = OTHER; note = 2'-Omethylguanosine
  modified_base 18: mod_base = OTHER; note = 2'-Omethylguanosine
  modified_base 20: mod_base = OTHER; note = 2'-Omethyluridine
  modified_base 25: mod_base = OTHER; note = 2'-Omethylcytosine
  modified_base 29: mod_base = OTHER; note = 2'-Omethylguanosine
  modified_base 30: mod_base = OTHER; note = 2'-Omethylguanosine
  modified_base 59: mod_base = OTHER; note = 2'-Omethylguanosine
  modified_base 60: mod_base = OTHER; note = 2'-Omethyluridine
  modified_base 62: mod_base = OTHER; note = 2'-Omethylguanosine
  modified_base 66: mod_base = OTHER; note = 2'-Omethylcytosine
  modified_base 69: mod_base = OTHER; note = 2'-Omethyladenosine
  modified_base 71: mod_base = OTHER; note = 2'-Omethylcytosine
  modified_base 75: mod_base = OTHER; note = 2'-Omethylcytosine
  modified_base 76: mod_base = OTHER; note = 2'-Omethyluridine
  modified_base 78: mod_base = OTHER; note = 2'-Omethylcytosine
  modified_base 79: mod_base = OTHER; note = 2'-Omethyluridine
  modified_base 81: mod_base = OTHER; note = 2'-Omethylguanosine
  modified_base 82: mod_base = OTHER; note = 2'-Omethyluridine
  modified_base 83: mod_base = OTHER; note = 2'-Omethyladenosine

SEQ ID NO: 3603 - RNA, 85 nt, synthetic construct; identical to SEQ ID NO: 3286
  source 1..85: mol_type = other RNA
  modified_base 1: mod_base = OTHER; note = 2'-Omethylcytosine
  modified_base 11: mod_base = OTHER; note = Cytosine phosphorothiorate
  modified_base 14: mod_base = OTHER; note = Guanosine phosphorothiorate
  modified_base 26: mod_base = OTHER; note = 2'-fluorouridine
  modified_base 28: mod_base = OTHER; note = 2'-fluoroguanosine
  modified_base 30: mod_base = OTHER; note = 2'-fluoroadenosine
  modified_base 34: mod_base = OTHER; note = Uridine phosphorothiorate
  modified_base 35: mod_base = OTHER; note = Adenosine phosphorothiorate
  modified_base 43: mod_base = OTHER; note = 2'-Omethyluridine
  modified_base 54: mod_base = OTHER; note = 2'-fluorocytosine
  modified_base 57: mod_base = OTHER; note = 2'-Omethylcytosine
  modified_base 59: mod_base = OTHER; note = 2'-fluorouridine
  modified_base 72: mod_base = OTHER; note = 2'-fluorocytosine
  modified_base 76: mod_base = OTHER; note = 2'-fluorocytosine
  modified_base 84: mod_base = OTHER; note = Cytosine phosphorothiorate
  modified_base 85: mod_base = OTHER; note = 2'-fluoroadenosine

SEQ ID NO: 3604 - RNA, 85 nt, synthetic construct; identical to SEQ ID NO: 3286
  source 1..85: mol_type = other RNA
  modified_base 1: mod_base = OTHER; note = 2'-Omethylcytosine
  modified_base 3: mod_base = OTHER; note = Adenosine phosphorothiorate
  modified_base 10: mod_base = OTHER; note = Cytosine phosphorothiorate
  modified_base 13: mod_base = OTHER; note = 2'-Omethyladenosine
  modified_base 30: mod_base = OTHER; note = 2'-fluoroadenosine
  modified_base 32: mod_base = OTHER; note = 2'-fluorouridine
  modified_base 35: mod_base = OTHER; note = 2'-fluoroadenosine
  modified_base 36: mod_base = OTHER; note = 2'-fluoroguanosine phosphorothiorate
  modified_base 42: mod_base = OTHER; note = Adenosine phosphorothiorate
  modified_base 43: mod_base = OTHER; note = 2'-Omethyluridine
  modified_base 46: mod_base = OTHER; note = Adenosine phosphorothiorate
  modified_base 53: mod_base = OTHER; note = 2'-Omethyluridine
  modified_base 55: mod_base = OTHER; note = 2'-Omethylcytosine
  modified_base 57: mod_base = OTHER; note = 2'-fluorocytosine
  modified_base 59: mod_base = OTHER; note = Uridine phosphorothiorate
  modified_base 64: mod_base = OTHER; note = Uridine phosphorothiorate
  modified_base 73: mod_base = OTHER; note = 2'-fluoroadenosine phosphorothiorate
  modified_base 83: mod_base = OTHER; note = Cytosine phosphorothiorate

SEQ ID NO: 3605 - RNA, 76 nt, synthetic construct; identical to SEQ ID NO: 625
  source 1..76: mol_type = other RNA
  modified_base 1: mod_base = OTHER; note = 2'-Omethylguanosine
  modified_base 10: mod_base = OTHER; note = 2'-Omethylguanosine
  modified_base 13: mod_base = OTHER; note = 2'-Omethylcytosine
  modified_base 17: mod_base = OTHER; note = Guanosine phosphorothiorate
  modified_base 18: mod_base = OTHER; note = 2'-Omethylguanosine
  modified_base 19: mod_base = OTHER; note = Adenosine phosphorothiorate
  modified_base 20: mod_base = OTHER; note = 2'-Omethyluridine
  modified_base 25: mod_base = OTHER; note = 2'-Omethylcytosine
  modified_base 29: mod_base = OTHER; note = 2'-Omethylguanosine
  modified_base 33: mod_base = OTHER; note = 2'-fluorouridine
  modified_base 35: mod_base = OTHER; note = Cytosine phosphorothiorate
  modified_base 37: mod_base = OTHER; note = Adenosine phosphorothiorate
  modified_base 38: mod_base = OTHER; note = Adenosine phosphorothiorate
  modified_base 43: mod_base = OTHER; note = 2'-Omethyladenosine
  modified_base 44: mod_base = OTHER; note = 2'-fluoroadenosine
  modified_base 46: mod_base = OTHER; note = Guanosine phosphorothiorate
  modified_base 50: mod_base = OTHER; note = 2'-Omethylcytosine
  modified_base 52: mod_base = OTHER; note = 2'-Omethylguanosine
  modified_base 54: mod_base = OTHER; note = Uridine phosphorothiorate
  modified_base 55: mod_base = OTHER; note = Uridine phosphorothiorate
  modified_base 56: mod_base = OTHER; note = 2'-Omethylcytosine
  modified_base 57: mod_base = OTHER; note = 2'-Omethylguanosine phosphorothiorate
  modified_base 62: mod_base = OTHER; note = 2'-Omethylcytosine
  modified_base 63: mod_base = OTHER; note = 2'-fluorocytosine
  modified_base 65: mod_base = OTHER; note = 2'-Omethylguanosine
  modified_base 71: mod_base = OTHER; note = 2'-Omethyluridine
  modified_base 73: mod_base = OTHER; note = 2'-Omethylguanosine

SEQ ID NO: 3606 - RNA, 76 nt, synthetic construct; identical to SEQ ID NO: 3318
  source 1..76: mol_type = other RNA
  modified_base 16: mod_base = OTHER; note = 2'-Omethyluridine
  modified_base 73: mod_base = OTHER; note = 2'-Omethyladenosine

SEQ ID NO: 3607 - RNA, 76 nt, synthetic construct; identical to SEQ ID NO: 625
  source 1..76: mol_type = other RNA
  modified_base 1: mod_base = OTHER; note = 2'-Omethylguanosine phosphorothiorate
  modified_base 2: mod_base = OTHER; note = 2'-Omethylguanosine phosphorothiorate
  modified_base 3: mod_base = OTHER; note = 2'-Omethylcytosine
  modified_base 4: mod_base = OTHER; note = 2'-Omethyluridine
  modified_base 5: mod_base = OTHER; note = 2'-Omethylcytosine
  modified_base 6: mod_base = OTHER; note = 2'-Omethylcytosine
  modified_base 10: mod_base = OTHER; note = 2'-Omethylguanosine
  modified_base 11: mod_base = OTHER; note = 2'-Omethylcytosine
  modified_base 12: mod_base = OTHER; note = 2'-Omethylguanosine
  modified_base 13: mod_base = OTHER; note = 2'-Omethylcytosine
  modified_base 14: mod_base = OTHER; note = 2'-Omethyladenosine
  modified_base 15: mod_base = OTHER; note = 2'-fluoroadenosine
  modified_base 16: mod_base = OTHER; note = 2'-Omethyluridine
  modified_base 17: mod_base = OTHER; note = 2'-Omethylguanosine
  modified_base 18: mod_base = OTHER; note = 2'-Omethylguanosine
  modified_base 19: mod_base = OTHER; note = 2'-fluoroadenosine
  modified_base 20: mod_base = OTHER; note = 2'-Omethyluridine
  modified_base 22: mod_base = OTHER; note = 2'-Omethylguanosine
  modified_base 23: mod_base = OTHER; note = 2'-Omethylcytosine
  modified_base 24: mod_base = OTHER; note = 2'-Omethylguanosine
  modified_base 25: mod_base = OTHER; note = 2'-Omethylcytosine
  modified_base 38: mod_base = OTHER; note = Adenosine phosphorothiorate
  modified_base 39: mod_base = OTHER; note = Uridine phosphorothiorate
  modified_base 40: mod_base = OTHER; note = 2'-fluorouridine
  modified_base 43: mod_base = OTHER; note = 2'-Omethyladenosine
  modified_base 44: mod_base = OTHER; note = 2'-Omethyladenosine
  modified_base 45: mod_base = OTHER; note = 2'-Omethylguanosine
  modified_base 46: mod_base = OTHER; note = 2'-fluoroguanosine
  modified_base 48: mod_base = OTHER; note = 2'-fluorouridine
  modified_base 49: mod_base = OTHER; note = 2'-Omethylcytosine
  modified_base 50: mod_base = OTHER; note = 2'-Omethylcytosine
  modified_base 51: mod_base = OTHER; note = 2'-Omethylguanosine
  modified_base 52: mod_base = OTHER; note = 2'-Omethylguanosine
  modified_base 53: mod_base = OTHER; note = 2'-Omethylguanosine
  modified_base 54: mod_base = OTHER; note = 2'-Omethyluridine
  modified_base 61: mod_base = OTHER; note = 2'-Omethylcytosine
  modified_base 62: mod_base = OTHER; note = 2'-Omethylcytosine
  modified_base 63: mod_base = OTHER; note = 2'-fluorocytosine
  modified_base 64: mod_base = OTHER; note = 2'-Omethylguanosine
  modified_base 65: mod_base = OTHER; note = 2'-Omethylguanosine
  modified_base 66: mod_base = OTHER; note = 2'-Omethylcytosine
  modified_base 67: mod_base = OTHER; note = 2'-Omethylguanosine
  modified_base 68: mod_base = OTHER; note = 2'-Omethylguanosine
  modified_base 69: mod_base = OTHER; note = 2'-fluoroadenosine
  modified_base 70: mod_base = OTHER; note = 2'-fluoroguanosine

SEQ ID NO: 3608 - RNA, 86 nt, synthetic construct; identical to SEQ ID NO: 3290
  source 1..86: mol_type = other RNA
  modified_base 1: mod_base = OTHER; note = 2'-Omethyladenosine
  modified_base 13: mod_base = OTHER; note = 2'-Omethylguanosine
  modified_base 14: mod_base = OTHER; note = 2'-Omethyladenosine
  modified_base 15: mod_base = OTHER; note = 2'-Omethylguanosine
  modified_base 16: mod_base = OTHER; note = 2'-Omethyluridine
  modified_base 17: mod_base = OTHER; note = 2'-Omethylguanosine
  modified_base 18: mod_base = OTHER; note = 2'-Omethylguanosine
  modified_base 19: mod_base = OTHER; note = Uridine phosphorothiorate
  modified_base 20: mod_base = OTHER; note = 2'-Omethyluridine
  modified_base 21: mod_base = OTHER; note = Adenosine phosphorothiorate
  modified_base 25: mod_base = OTHER; note = 2'-Omethylcytosine
  modified_base 33: mod_base = OTHER; note = Uridine phosphorothiorate
  modified_base 34: mod_base = OTHER; note = 2'-Omethyluridine
  modified_base 35: mod_base = OTHER; note = Cytosine phosphorothiorate
  modified_base 37: mod_base = OTHER; note = Guanosine phosphorothiorate
  modified_base 38: mod_base = OTHER; note = Adenosine phosphorothiorate
  modified_base 59: mod_base = OTHER; note = 2'-Omethylguanosine
  modified_base 60: mod_base = OTHER; note = 2'-Omethyluridine
  modified_base 62: mod_base = OTHER; note = 2'-Omethylguanosine
  modified_base 64: mod_base = OTHER; note = Uridine phosphorothiorate
  modified_base 65: mod_base = OTHER; note = Uridine phosphorothiorate
  modified_base 66: mod_base = OTHER; note = 2'-Omethylcytosine
  modified_base 67: mod_base = OTHER; note = Guanosine phosphorothiorate
  modified_base 68: mod_base = OTHER; note = Adenosine phosphorothiorate
  modified_base 69: mod_base = OTHER; note = 2'-Omethyladenosine
  modified_base 71: mod_base = OTHER; note = 2'-Omethylcytosine
  modified_base 75: mod_base = OTHER; note = 2'-Omethylcytosine
  modified_base 83: mod_base = OTHER; note = 2'-Omethyladenosine

SEQ ID NO: 3609 - RNA, 76 nt, synthetic construct; identical to SEQ ID NO: 3289
  source 1..76: mol_type = other RNA
  modified_base 1: mod_base = OTHER; note = 2'-Omethylguanosine
  modified_base 47: mod_base = OTHER; note = 2'-fluorouridine
  modified_base 48: mod_base = OTHER; note = 2'-fluorocytosine
  modified_base 73: mod_base = OTHER; note = 2'-Omethylguanosine

SEQ ID NO: 3610 - RNA, 76 nt, synthetic construct; identical to SEQ ID NO: 3318
  source 1..76: mol_type = other RNA
  modified_base 1: mod_base = OTHER; note = 2'-Omethylcytosine
  modified_base 52: mod_base = OTHER; note = 2'-Omethylguanosine

SEQ ID NO: 3611 - RNA, 76 nt, synthetic construct; identical to SEQ ID NO: 625
  source 1..76: mol_type = other RNA
  modified_base 1: mod_base = OTHER; note = 2'-Omethylguanosine
  modified_base 10: mod_base = OTHER; note = 2'-Omethylguanosine
  modified_base 13: mod_base = OTHER; note = 2'-Omethylcytosine
  modified_base 17: mod_base = OTHER; note = Guanosine phosphorothiorate
  modified_base 18: mod_base = OTHER; note = 2'-Omethylguanosine
  modified_base 19: mod_base = OTHER; note = Adenosine phosphorothiorate
  modified_base 20: mod_base = OTHER; note = 2'-Omethyluridine
  modified_base 25: mod_base = OTHER; note = 2'-Omethylcytosine
  modified_base 29: mod_base = OTHER; note = 2'-Omethylguanosine
  modified_base 33: mod_base = OTHER; note = 2'-fluorouridine
  modified_base 35: mod_base = OTHER; note = Cytosine phosphorothiorate
  modified_base 37: mod_base = OTHER; note = Adenosine phosphorothiorate
  modified_base 43: mod_base = OTHER; note = 2'-Omethyladenosine
  modified_base 44: mod_base = OTHER; note = 2'-fluoroadenosine
  modified_base 46: mod_base = OTHER; note = Guanosine phosphorothiorate
  modified_base 50: mod_base = OTHER; note = 2'-Omethylcytosine
  modified_base 52: mod_base = OTHER; note = 2'-Omethylguanosine
  modified_base 54: mod_base = OTHER; note = Uridine phosphorothiorate
  modified_base 55: mod_base = OTHER; note = Uridine phosphorothiorate
  modified_base 56: mod_base = OTHER; note = 2'-Omethylcytosine
  modified_base 57: mod_base = OTHER; note = Guanosine phosphorothiorate
  modified_base 62: mod_base = OTHER; note = 2'-Omethylcytosine
  modified_base 63: mod_base = OTHER; note = 2'-fluorocytosine
  modified_base 65: mod_base = OTHER; note = 2'-Omethylguanosine
  modified_base 71: mod_base = OTHER; note = 2'-Omethyluridine
  modified_base 73: mod_base = OTHER; note = 2'-Omethylguanosine

SEQ ID NO: 3612 - RNA, 85 nt, synthetic construct; identical to SEQ ID NO: 3297
  source 1..85: mol_type = other RNA
  modified_base 1: mod_base = OTHER; note = 2'-Omethylguanosine phosphorothiorate
  modified_base 2: mod_base = OTHER; note = 2'-Omethylcytosine
  modified_base 3: mod_base = OTHER; note = 2'-Omethyluridine
  modified_base 17: mod_base = OTHER; note = Guanosine phosphorothiorate
  modified_base 18: mod_base = OTHER; note = 2'-Omethylguanosine
  modified_base 19: mod_base = OTHER; note = Uridine phosphorothiorate
  modified_base 20: mod_base = OTHER; note = 2'-Omethyluridine phosphorothiorate
  modified_base 25: mod_base = OTHER; note = 2'-Omethylcytosine
  modified_base 29: mod_base = OTHER; note = 2'-Omethylguanosine
  modified_base 35: mod_base = OTHER; note = Cytosine phosphorothiorate
  modified_base 37: mod_base = OTHER; note = Adenosine phosphorothiorate
  modified_base 38: mod_base = OTHER; note = Adenosine phosphorothiorate
  modified_base 56: mod_base = OTHER; note = Guanosine phosphorothiorate
  modified_base 59: mod_base = OTHER; note = 2'-Omethylcytosine
  modified_base 61: mod_base = OTHER; note = 2'-Omethylguanosine
  modified_base 63: mod_base = OTHER; note = Uridine phosphorothiorate
  modified_base 64: mod_base = OTHER; note = Uridine phosphorothiorate
  modified_base 65: mod_base = OTHER; note = 2'-Omethylcytosine
  modified_base 66: mod_base = OTHER; note = Guanosine phosphorothiorate
  modified_base 74: mod_base = OTHER; note = 2'-Omethylcytosine
  modified_base 80: mod_base = OTHER; note = 2'-Omethylguanosine
  modified_base 82: mod_base = OTHER; note = 2'-Omethylguanosine

SEQ ID NO: 3613 - RNA, 85 nt, synthetic construct; identical to SEQ ID NO: 3297
  source 1..85: mol_type = other RNA
  modified_base 1: mod_base = OTHER; note = 2'-Omethylguanosine
  modified_base 2: mod_base = OTHER; note = 2'-Omethylcytosine
  modified_base 3: mod_base = OTHER; note = 2'-Omethyluridine
  modified_base 4: mod_base = OTHER; note = 2'-Omethylguanosine
  modified_base 5: mod_base = OTHER; note = 2'-Omethyluridine
  modified_base 6: mod_base = OTHER; note = 2'-Omethylguanosine
  modified_base 16: mod_base = OTHER; note = 2'-Omethyluridine
  modified_base 17: mod_base = OTHER; note = 2'-Omethylguanosine
  modified_base 18: mod_base = OTHER; note = 2'-Omethylguanosine
  modified_base 20: mod_base = OTHER; note = 2'-Omethyluridine
  modified_base 25: mod_base = OTHER; note = 2'-Omethylcytosine
  modified_base 33: mod_base = OTHER; note = 2'-fluorouridine
  modified_base 35: mod_base = OTHER; note = Cytosine phosphorothiorate
  modified_base 37: mod_base = OTHER; note = Adenosine phosphorothiorate
  modified_base 38: mod_base = OTHER; note = Adenosine phosphorothiorate
  modified_base 41: mod_base = OTHER; note = 2'-Omethylcytosine
  modified_base 44: mod_base = OTHER; note = 2'-Omethyluridine
  modified_base 56: mod_base = OTHER; note = 2'-fluoroguanosine
  modified_base 57: mod_base = OTHER; note = 2'-fluorocytosine
  modified_base 58: mod_base = OTHER; note = 2'-Omethylguanosine
  modified_base 59: mod_base = OTHER; note = 2'-Omethylcytosine
  modified_base 60: mod_base = OTHER; note = 2'-Omethyladenosine
  modified_base 61: mod_base = OTHER; note = 2'-Omethylguanosine
  modified_base 62: mod_base = OTHER; note = 2'-Omethylguanosine
  modified_base 63: mod_base = OTHER; note = 2'-Omethyluridine
  modified_base 65: mod_base = OTHER; note = 2'-Omethylcytosine
  modified_base 68: mod_base = OTHER; note = 2'-Omethyladenosine
  modified_base 82: mod_base = OTHER; note = 2'-Omethylguanosine

SEQ ID NO: 3614 - RNA, 76 nt, synthetic construct; identical to SEQ ID NO: 625
  source 1..76: mol_type = other RNA
  modified_base 1: mod_base = OTHER; note = 2'-fluoroguanosine
  modified_base 2: mod_base = OTHER; note = 2'-Omethylguanosine
  modified_base 4: mod_base = OTHER; note = 2'-Omethyluridine
  modified_base 5: mod_base = OTHER; note = 2'-fluorocytosine
  modified_base 8: mod_base = OTHER; note = Uridine phosphorothiorate
  modified_base 11: mod_base = OTHER; note = 2'-Omethylcytosine
  modified_base 14: mod_base = OTHER; note = 2'-Omethyladenosine phosphorothiorate
  modified_base 15: mod_base = OTHER; note = 2'-Omethyladenosine
  modified_base 16: mod_base = OTHER; note = 2'-fluorouridine
  modified_base 20: mod_base = OTHER; note = Uridine phosphorothiorate
  modified_base 23: mod_base = OTHER; note = Cytosine phosphorothiorate
  modified_base 24: mod_base = OTHER; note = 2'-fluoroguanosine
  modified_base 27: mod_base = OTHER; note = 2'-Omethyluridine
  modified_base 31: mod_base = OTHER; note = 2'-fluoroadenosine
  modified_base 33: mod_base = OTHER; note = 2'-fluorouridine
  modified_base 34: mod_base = OTHER; note = Uridine phosphorothiorate
  modified_base 37: mod_base = OTHER; note = Adenosine phosphorothiorate
  modified_base 39: mod_base = OTHER; note = 2'-Omethyluridine
  modified_base 41: mod_base = OTHER; note = 2'-fluorocytosine
  modified_base 42: mod_base = OTHER; note = 2'-Omethyladenosine
  modified_base 43: mod_base = OTHER; note = 2'-Omethyladenosine
  modified_base 46: mod_base = OTHER; note = 2'-fluoroguanosine
  modified_base 50: mod_base = OTHER; note = 2'-fluorocytosine phosphorothiorate
  modified_base 52: mod_base = OTHER; note = 2'-Omethylguanosine
  modified_base 54: mod_base = OTHER; note = 2'-Omethyluridine
  modified_base 56: mod_base = OTHER; note = Cytosine phosphorothiorate
  modified_base 57: mod_base = OTHER; note = 2'-Omethylguanosine phosphorothiorate
  modified_base 58: mod_base = OTHER; note = 2'-fluoroadenosine
  modified_base 59: mod_base = OTHER; note = 2'-Omethylguanosine
  modified_base 61: mod_base = OTHER; note = 2'-fluorocytosine
  modified_base 64: mod_base = OTHER; note = Guanosine phosphorothiorate
  modified_base 66: mod_base = OTHER; note = 2'-Omethylcytosine
  modified_base 67: mod_base = OTHER; note = 2'-fluoroguanosine
  modified_base 73: mod_base = OTHER; note = Guanosine phosphorothiorate

SEQ ID NO: 3615 - RNA, 76 nt, synthetic construct
  source 1..76: mol_type = other RNA
  modified_base 1: mod_base = OTHER; note = 2'-Omethylguanosine
  modified_base 19: mod_base = OTHER; note = 2'-Omethyladenosine
  modified_base 20: mod_base = OTHER; note = 2'-Omethyluridine
  modified_base 21: mod_base = OTHER; note = 2'-fluoroadenosine
  modified_base 22: mod_base = OTHER; note = 2'-Omethylguanosine
  modified_base 40: mod_base = OTHER; note = 2'-fluorouridine
  modified_base 41: mod_base = OTHER; note = 2'-Omethylcytosine
  modified_base 42: mod_base = OTHER; note = 2'-Omethyladenosine
  modified_base 43: mod_base = OTHER; note = 2'-Omethyladenosine
  modified_base 73: mod_base = OTHER; note = 2'-Omethylguanosine
ggctccgtggcgcaatggatagcgcattggacttcaaattcaagggttccgggttcgagtcccggcggagtcgcca

SEQ ID NO: 3616 - RNA, 76 nt, synthetic construct; identical to SEQ ID NO: 625
  source 1..76: mol_type = other RNA
  modified_base 1: mod_base = OTHER; note = 2'-Omethylguanosine
  modified_base 2: mod_base = OTHER; note = 2'-fluoroguanosine
  modified_base 5: mod_base = OTHER; note = 2'-Omethylcytosine phosphorothiorate
  modified_base 6: mod_base = OTHER; note = 2'-Omethylcytosine
  modified_base 10: mod_base = OTHER; note = Guanosine phosphorothiorate
  modified_base 11: mod_base = OTHER; note = 2'-Omethylcytosine
  modified_base 13: mod_base = OTHER; note = 2'-fluorocytosine
  modified_base 14: mod_base = OTHER; note = 2'-fluoroadenosine
  modified_base 16: mod_base = OTHER; note = 2'-fluorouridine
  modified_base 18: mod_base = OTHER; note = 2'-Omethylguanosine
  modified_base 29: mod_base = OTHER; note = Guanosine phosphorothiorate
  modified_base 30: mod_base = OTHER; note = 2'-fluoroguanosine
  modified_base 33: mod_base = OTHER; note = 2'-fluorouridine
  modified_base 34: mod_base = OTHER; note = 2'-Omethyluridine phosphorothiorate
  modified_base 39: mod_base = OTHER; note = 2'-Omethyluridine
  modified_base 40: mod_base = OTHER; note = Uridine phosphorothiorate
  modified_base 42: mod_base = OTHER; note = 2'-fluoroadenosine
  modified_base 47: mod_base = OTHER; note = 2'-Omethyluridine
  modified_base 51: mod_base = OTHER; note = Guanosine phosphorothiorate
  modified_base 56: mod_base = OTHER; note = 2'-fluorocytosine phosphorothiorate
  modified_base 57: mod_base = OTHER; note = 2'-fluoroguanosine phosphorothiorate
  modified_base 58: mod_base = OTHER; note = 2'-fluoroadenosine phosphorothiorate
  modified_base 59: mod_base = OTHER; note = 2'-fluoroguanosine phosphorothiorate
  modified_base 60: mod_base = OTHER; note = 2'-fluorouridine
  modified_base 63: mod_base = OTHER; note = Cytosine phosphorothiorate
  modified_base 64: mod_base = OTHER; note = 2'-fluoroguanosine
  modified_base 65: mod_base = OTHER; note = 2'-Omethylguanosine
  modified_base 67: mod_base = OTHER; note = 2'-Omethylguanosine
  modified_base 70: mod_base = OTHER; note = 2'-fluoroguanosine
  modified_base 71: mod_base = OTHER; note = 2'-fluorouridine phosphorothiorate
  modified_base 72: mod_base = OTHER; note = 2'-fluorocytosine
  modified_base 73: mod_base = OTHER; note = 2'-Omethylguanosine phosphorothiorate
  modified_base 74: mod_base = OTHER; note = Cytosine phosphorothiorate
  modified_base 75: mod_base = OTHER; note = 2'-fluorocytosine

SEQ ID NO: 3617 - RNA, 76 nt, synthetic construct; identical to SEQ ID NO: 625
  source 1..76: mol_type = other RNA
  modified_base 1: mod_base = OTHER; note = 2'-fluoroguanosine
  modified_base 4: mod_base = OTHER; note = 2'-fluorouridine
  modified_base 12: mod_base = OTHER; note = 2'-fluoroguanosine
  modified_base 13: mod_base = OTHER; note = 2'-Omethylcytosine
  modified_base 14: mod_base = OTHER; note = 2'-Omethyladenosine phosphorothiorate
  modified_base 15: mod_base = OTHER; note = Adenosine phosphorothiorate
  modified_base 16: mod_base = OTHER; note = 2'-fluorouridine
  modified_base 17: mod_base = OTHER; note = 2'-Omethylguanosine
  modified_base 18: mod_base = OTHER; note = 2'-Omethylguanosine
  modified_base 20: mod_base = OTHER; note = 2'-Omethyluridine phosphorothiorate
  modified_base 21: mod_base = OTHER; note = Adenosine phosphorothiorate
  modified_base 22: mod_base = OTHER; note = 2'-Omethylguanosine
  modified_base 23: mod_base = OTHER; note = 2'-fluorocytosine
  modified_base 27: mod_base = OTHER; note = Uridine phosphorothiorate
  modified_base 28: mod_base = OTHER; note = 2'-Omethyluridine
  modified_base 30: mod_base = OTHER; note = 2'-Omethylguanosine phosphorothiorate
  modified_base 31: mod_base = OTHER; note = 2'-fluoroadenosine
  modified_base 33: mod_base = OTHER; note = 2'-fluorouridine
  modified_base 38: mod_base = OTHER; note = 2'-fluoroadenosine phosphorothiorate
  modified_base 41: mod_base = OTHER; note = Cytosine phosphorothiorate
  modified_base 42: mod_base = OTHER; note = 2'-Omethyladenosine
  modified_base 49: mod_base = OTHER; note = 2'-Omethylcytosine
  modified_base 54: mod_base = OTHER; note = 2'-fluorouridine phosphorothiorate
  modified_base 56: mod_base = OTHER; note = 2'-Omethylcytosine phosphorothiorate
  modified_base 59: mod_base = OTHER; note = Guanosine phosphorothiorate
  modified_base 61: mod_base = OTHER; note = Cytosine phosphorothiorate
  modified_base 62: mod_base = OTHER; note = 2'-Omethylcytosine
  modified_base 63: mod_base = OTHER; note = 2'-fluorocytosine
  modified_base 68: mod_base = OTHER; note = Guanosine phosphorothiorate
  modified_base 73: mod_base = OTHER; note = 2'-Omethylguanosine
  modified_base 74: mod_base = OTHER; note = 2'-Omethylcytosine
  modified_base 76: mod_base = OTHER; note = 2'-Omethyladenosine

SEQ ID NO: 3618 - RNA, 85 nt, synthetic construct; identical to SEQ ID NO: 3288
  source 1..85: mol_type = other RNA
  modified_base 54: mod_base = OTHER; note = 2'-fluorocytosine
  modified_base 55: mod_base = OTHER; note = 2'-Omethylcytosine
  modified_base 58: mod_base = OTHER; note = Guanosine phosphorothiorate
  modified_base 73: mod_base = OTHER; note = 2'-fluoroadenosine
  modified_base 77: mod_base = OTHER; note = 2'-Omethylcytosine
  modified_base 85: mod_base = OTHER; note = 2'-Omethyladenosine

SEQ ID NO: 3619 - RNA, 85 nt, synthetic construct; identical to SEQ ID NO: 3297
  source 1..85: mol_type = other RNA
  modified_base 1: mod_base = OTHER; note = 2'-Omethylguanosine phosphorothiorate
  modified_base 25: mod_base = OTHER; note = 2'-Omethylcytosine phosphorothiorate
  modified_base 37: mod_base = OTHER; note = Adenosine phosphorothiorate
  modified_base 46: mod_base = OTHER; note = 2'-Omethylguanosine phosphorothiorate
  modified_base 74: mod_base = OTHER; note = 2'-fluorocytosine
  modified_base 82: mod_base = OTHER; note = Guanosine phosphorothiorate

SEQ ID NO: 3620 - RNA, 75 nt, synthetic construct; identical to SEQ ID NO: 3299
  source 1..75: mol_type = other RNA
  modified_base 1: mod_base = OTHER; note = 2'-Omethylcytosine
  modified_base 2: mod_base = OTHER; note = 2'-fluorocytosine phosphorothiorate
  modified_base 4: mod_base = OTHER; note = 2'-fluoroguanosine
  modified_base 11: mod_base = OTHER; note = Uridine phosphorothiorate
  modified_base 19: mod_base = OTHER; note = 2'-fluorouridine
  modified_base 20: mod_base = OTHER; note = 2'-fluoroadenosine
  modified_base 21: mod_base = OTHER; note = 2'-Omethylguanosine phosphorothiorate
  modified_base 23: mod_base = OTHER; note = 2'-Omethylguanosine
  modified_base 26: mod_base = OTHER; note = Uridine phosphorothiorate
  modified_base 30: mod_base = OTHER; note = 2'-fluoroadenosine
  modified_base 35: mod_base = OTHER; note = 2'-fluoroadenosine
  modified_base 38: mod_base = OTHER; note = 2'-fluorouridine
  modified_base 39: mod_base = OTHER; note = 2'-fluorocytosine
  modified_base 41: mod_base = OTHER; note = 2'-Omethylguanosine phosphorothiorate
  modified_base 45: mod_base = OTHER; note = 2'-fluoroguanosine
  modified_base 48: mod_base = OTHER; note = 2'-fluorocytosine
  modified_base 49: mod_base = OTHER; note = Adenosine phosphorothiorate
  modified_base 61: mod_base = OTHER; note = 2'-Omethylcytosine phosphorothiorate
  modified_base 69: mod_base = OTHER; note = Guanosine phosphorothiorate
  modified_base 73: mod_base = OTHER; note = Cytosine phosphorothiorate
  modified_base 74: mod_base = OTHER; note = Cytosine phosphorothiorate

SEQ ID NO: 3621 - RNA, 75 nt, synthetic construct; identical to SEQ ID NO: 1045
  source 1..75: mol_type = other RNA
  modified_base 1: mod_base = OTHER; note = 2'-Omethylguanosine
  modified_base 2: mod_base = OTHER; note = 2'-Omethylguanosine
  modified_base 3: mod_base = OTHER; note = 2'-Omethyluridine
  modified_base 4: mod_base = OTHER; note = 2'-Omethyluridine
  modified_base 5: mod_base = OTHER; note = 2'-Omethylcytosine
  modified_base 6: mod_base = OTHER; note = 2'-Omethylcytosine
  modified_base 10: mod_base = OTHER; note = 2'-Omethylguanosine
  modified_base 11: mod_base = OTHER; note = 2'-Omethyluridine
  modified_base 12: mod_base = OTHER; note = 2'-Omethylguanosine
  modified_base 13: mod_base = OTHER; note = 2'-Omethyluridine
  modified_base 22: mod_base = OTHER; note = 2'-Omethylguanosine
  modified_base 23: mod_base = OTHER; note = 2'-Omethylcytosine
  modified_base 24: mod_base = OTHER; note = 2'-Omethyladenosine
  modified_base 25: mod_base = OTHER; note = 2'-Omethylcytosine
  modified_base 48: mod_base = OTHER; note = 2'-Omethylcytosine
  modified_base 49: mod_base = OTHER; note = 2'-Omethylcytosine
  modified_base 50: mod_base = OTHER; note = 2'-Omethylguanosine
  modified_base 51: mod_base = OTHER; note = 2'-Omethyladenosine
  modified_base 52: mod_base = OTHER; note = 2'-Omethylguanosine
  modified_base 65: mod_base = OTHER; note = 2'-Omethyluridine
  modified_base 66: mod_base = OTHER; note = 2'-Omethylguanosine
  modified_base 67: mod_base = OTHER; note = 2'-Omethylguanosine
  modified_base 72: mod_base = OTHER; note = 2'-Omethyluridine

SEQ ID NO: 3622 - DNA, 76 bp, synthetic construct; identical to SEQ ID NO: 1924
  source 1..76: mol_type = other DNA
  modified_base 1: mod_base = OTHER; note = 2'-Omethylguanosine phosphorothiorate
  modified_base 2: mod_base = OTHER; note = 2'-Omethylguanosine phosphorothiorate
  modified_base 4: mod_base = OTHER; note = 2'-O-(2-Methoxyethyl) thymine
  modified_base 5: mod_base = OTHER; note = Cytosine phosphorothiorate
  modified_base 11: mod_base = OTHER; note = 2'-fluorocytosine phosphorothiorate
  modified_base 12: mod_base = OTHER; note = Guanosine phosphorothiorate
  modified_base 13: mod_base = OTHER; note = Cytosine phosphorothiorate
  modified_base 14: mod_base = OTHER; note = 2'-O-(2-Methoxyethyl) adenosine phosphorothiorate
  modified_base 16: mod_base = OTHER; note = 2'-O-(2-Methoxyethyl) thymine
  modified_base 17: mod_base = OTHER; note = Guanosine phosphorothiorate
  modified_base 18: mod_base = OTHER; note = 2'-fluoroguanosine
  modified_base 19: mod_base = OTHER; note = 2'-O-(2-Methoxyethyl) adenosine
  modified_base 21: mod_base = OTHER; note = 2'-O-(2-Methoxyethyl) adenosine
  modified_base 24: mod_base = OTHER; note = Guanosine phosphorothiorate
  modified_base 25: mod_base = OTHER; note = 2'-O-(2-Methoxyethyl) 5-methylcytosine phosphorothiorate
  modified_base 26: mod_base = OTHER; note = 2'-fluoroadenosine phosphorothiorate
  modified_base 33: mod_base = OTHER; note = 2'-O-(2-Methoxyethyl) thymine
  modified_base 34: mod_base = OTHER; note = 2'-Omethyluridine phosphorothiorate
  modified_base 35: mod_base = OTHER; note = Cytosine phosphorothiorate
  modified_base 37: mod_base = OTHER; note = Adenosine phosphorothiorate
  modified_base 40: mod_base = OTHER; note = 2'-fluorouridine
  modified_base 44: mod_base = OTHER; note = deoxyadenosine phosphorothiorate
  modified_base 45: mod_base = OTHER; note = deoxyguanosine phosphorothiorate
  modified_base 49: mod_base = OTHER; note = Cytosine phosphorothiorate
  modified_base 50: mod_base = OTHER; note = 2'-O-(2-Methoxyethyl) 5-methylcytosine phosphorothiorate
  modified_base 51: mod_base = OTHER; note = deoxyguanosine phosphorothiorate
  modified_base 52: mod_base = OTHER; note = 2'-O-(2-Methoxyethyl) guanosine
  modified_base 55: mod_base = OTHER; note = Uridine phosphorothiorate
  modified_base 58: mod_base = OTHER; note = Adenosine phosphorothiorate
  modified_base 59: mod_base = OTHER; note = 2'-Omethylguanosine
  modified_base 60: mod_base = OTHER; note = Uridine phosphorothiorate
  modified_base 61: mod_base = OTHER; note = 2'-fluorocytosine
  modified_base 65: mod_base = OTHER; note = 2'-O-(2-Methoxyethyl) guanosine phosphorothiorate
  modified_base 66: mod_base = OTHER; note = 2'-fluorocytosine
  modified_base 68: mod_base = OTHER; note = 2'-Omethylguanosine
  modified_base 69: mod_base = OTHER; note = Adenosine phosphorothiorate
  modified_base 70: mod_base = OTHER; note = 2'-fluoroguanosine
  modified_base 72: mod_base = OTHER; note = Cytosine phosphorothiorate
  modified_base 74: mod_base = OTHER; note = Cytosine phosphorothiorate
  modified_base 75: mod_base = OTHER; note = 2'-Omethylcytosine phosphorothiorate
  modified_base 76: mod_base = OTHER; note = 2'-Omethyladenosine
  misc_feature 1..37: note = RNA
  misc_feature 38: note = DNA
  misc_feature 39..43: note = RNA
  misc_feature 44..46: note = DNA
  misc_feature 47..50: note = RNA
  misc_feature 51: note = DNA
  misc_feature 52..62: note = RNA
  misc_feature 63: note = DNA
  misc_feature 64..76: note = RNA

SEQ ID NO: 3623 - RNA, 76 nt, synthetic construct; identical to SEQ ID NO: 625
  source 1..76: mol_type = other RNA
  modified_base 1: mod_base = OTHER; note = 2'-Omethylguanosine
  modified_base 16: mod_base = OTHER; note = 2'-Omethyluridine
  modified_base 17: mod_base = OTHER; note = 2'-Omethylguanosine
  modified_base 18: mod_base = OTHER; note = 2'-Omethylguanosine
  modified_base 33: mod_base = OTHER; note = 2'-O-(2-Methoxyethyl) thymine
  modified_base 54: mod_base = OTHER; note = 2'-Omethyluridine
  modified_base 56: mod_base = OTHER; note = 2'-Omethylcytosine
  modified_base 57: mod_base = OTHER; note = 2'-fluoroguanosine
  modified_base 59: mod_base = OTHER; note = 2'-Omethylguanosine
  modified_base 60: mod_base = OTHER; note = 2'-fluorouridine
  modified_base 73: mod_base = OTHER; note = 2'-Omethylguanosine

SEQ ID NO: 3624 - RNA, 76 nt, synthetic construct; identical to SEQ ID NO: 3332
  source 1..76: mol_type = other RNA
  modified_base 1: mod_base = OTHER; note = 2'-Omethylguanosine
  modified_base 2: mod_base = OTHER; note = 2'-Omethylguanosine
  modified_base 3: mod_base = OTHER; note = 2'-Omethylcytosine
  modified_base 4: mod_base = OTHER; note = 2'-Omethylcytosine
  modified_base 5: mod_base = OTHER; note = 2'-Omethylcytosine
  modified_base 6: mod_base = OTHER; note = 2'-Omethylcytosine
  modified_base 14: mod_base = OTHER; note = 2'-Omethyladenosine
  modified_base 15: mod_base = OTHER; note = 2'-Omethyladenosine
  modified_base 16: mod_base = OTHER; note = 2'-Omethyluridine
  modified_base 17: mod_base = OTHER; note = 2'-Omethylguanosine
  modified_base 18: mod_base = OTHER; note = 2'-Omethylguanosine
  modified_base 20: mod_base = OTHER; note = 2'-Omethyluridine
  modified_base 25: mod_base = OTHER; note = 2'-Omethylcytosine
  modified_base 41: mod_base = OTHER; note = 2'-Omethylcytosine
  modified_base 42: mod_base = OTHER; note = 2'-Omethyladenosine
  modified_base 43: mod_base = OTHER; note = 2'-Omethyladenosine
  modified_base 44: mod_base = OTHER; note = 2'-Omethyladenosine
  modified_base 49: mod_base = OTHER; note = 2'-Omethylguanosine
  modified_base 50: mod_base = OTHER; note = 2'-Omethylcytosine
  modified_base 52: mod_base = OTHER; note = 2'-Omethylguanosine
  modified_base 54: mod_base = OTHER; note = 2'-Omethyluridine
  modified_base 55: mod_base = OTHER; note = Uridine phosphorothiorate
  modified_base 56: mod_base = OTHER; note = 2'-Omethylcytosine
  modified_base 57: mod_base = OTHER; note = 2'-fluoroguanosine
  modified_base 59: mod_base = OTHER; note = 2'-Omethylguanosine
  modified_base 61: mod_base = OTHER; note = 2'-Omethylcytosine
  modified_base 65: mod_base = OTHER; note = 2'-Omethylcytosine
  modified_base 73: mod_base = OTHER; note = 2'-Omethylguanosine

SEQ ID NO: 3625 - RNA, 76 nt, synthetic construct; identical to SEQ ID NO: 3289
  source 1..76: mol_type = other RNA
  modified_base 1: mod_base = OTHER; note = 2'-Omethylguanosine phosphorothiorate
  modified_base 2: mod_base = OTHER; note = 2'-Omethylcytosine phosphorothiorate
  modified_base 3: mod_base = OTHER; note = 2'-Omethylcytosine
  modified_base 4: mod_base = OTHER; note = 2'-Omethyluridine
  modified_base 5: mod_base = OTHER; note = 2'-Omethylguanosine
  modified_base 6: mod_base = OTHER; note = 2'-Omethylguanosine
  modified_base 16: mod_base = OTHER; note = 2'-Omethyluridine
  modified_base 18: mod_base = OTHER; note = 2'-Omethylguanosine
  modified_base 19: mod_base = OTHER; note = 2'-Omethylguanosine
  modified_base 25: mod_base = OTHER; note = 2'-Omethylcytosine
  modified_base 33: mod_base = OTHER; note = 2'-fluorouridine
  modified_base 35: mod_base = OTHER; note = Uridine phosphorothiorate
  modified_base 37: mod_base = OTHER; note = Adenosine phosphorothiorate
  modified_base 38: mod_base = OTHER; note = Adenosine phosphorothiorate
  modified_base 41: mod_base = OTHER; note = 2'-fluorouridine phosphorothiorate
  modified_base 42: mod_base = OTHER; note = 2'-Omethylguanosine
  modified_base 43: mod_base = OTHER; note = 2'-Omethyladenosine
  modified_base 44: mod_base = OTHER; note = 2'-Omethylguanosine
  modified_base 45: mod_base = OTHER; note = 2'-Omethylguanosine
  modified_base 46: mod_base = OTHER; note = 2'-fluoroguanosine
  modified_base 47: mod_base = OTHER; note = 2'-fluorouridine
  modified_base 48: mod_base = OTHER; note = 2'-fluorocytosine
  modified_base 56: mod_base = OTHER; note = 2'-Omethylcytosine
  modified_base 59: mod_base = OTHER; note = 2'-Omethylguanosine
  modified_base 61: mod_base = OTHER; note = 2'-Omethylcytosine
  modified_base 62: mod_base = OTHER; note = 2'-Omethylcytosine
  modified_base 63: mod_base = OTHER; note = 2'-fluorocytosine
  modified_base 64: mod_base = OTHER; note = 2'-Omethyluridine
  modified_base 65: mod_base = OTHER; note = 2'-Omethylguanosine
  modified_base 66: mod_base = OTHER; note = 2'-Omethyluridine
  modified_base 67: mod_base = OTHER; note = 2'-Omethylcytosine
  modified_base 68: mod_base = OTHER; note = 2'-Omethylcytosine
  modified_base 73: mod_base = OTHER; note = 2'-Omethylguanosine

SEQ ID NO: 3626 - RNA, 86 nt, synthetic construct; identical to SEQ ID NO: 3290
  source 1..86: mol_type = other RNA
  modified_base 1: mod_base = OTHER; note = 2'-Omethyladenosine
  modified_base 2: mod_base = OTHER; note = 2'-Omethylcytosine
  modified_base 3: mod_base = OTHER; note = 2'-Omethylcytosine
  modified_base 4: mod_base = OTHER; note = 2'-Omethyladenosine
  modified_base 5: mod_base = OTHER; note = 2'-Omethylguanosine
  modified_base 6: mod_base = OTHER; note = 2'-Omethylguanosine
  modified_base 33: mod_base = OTHER; note = 2'-fluorouridine
  modified_base 41: mod_base = OTHER; note = 2'-Omethylcytosine
  modified_base 44: mod_base = OTHER; note = 2'-Omethyluridine
  modified_base 57: mod_base = OTHER; note = 2'-fluoroguanosine
  modified_base 58: mod_base = OTHER; note = 2'-fluorocytosine
  modified_base 62: mod_base = OTHER; note = 2'-Omethylguanosine
  modified_base 65: mod_base = OTHER; note = Uridine phosphorothiorate
  modified_base 81: mod_base = OTHER; note = 2'-Omethylguanosine
  modified_base 83: mod_base = OTHER; note = 2'-Omethyladenosine

SEQ ID NO: 3627 - RNA, 74 nt, synthetic construct; identical to SEQ ID NO: 3293
  source 1..74: mol_type = other RNA
  modified_base 1: mod_base = OTHER; note = 2'-Omethyladenosine
  modified_base 2: mod_base = OTHER; note = Cytosine phosphorothiorate
  modified_base 3: mod_base = OTHER; note = Cytosine phosphorothiorate
  modified_base 4: mod_base = OTHER; note = Uridine phosphorothiorate
  modified_base 6: mod_base = OTHER; note = 2'-fluoroguanosine
  modified_base 8: mod_base = OTHER; note = Guanosine phosphorothiorate
  modified_base 9: mod_base = OTHER; note = 2'-fluoroguanosine
  modified_base 10: mod_base = OTHER; note = 2'-Omethylcytosine phosphorothiorate
  modified_base 11: mod_base = OTHER; note = 2'-Omethylguanosine phosphorothiorate
  modified_base 25: mod_base = OTHER; note = 2'-Omethyluridine
  modified_base 27: mod_base = OTHER; note = 2'-fluorouridine
  modified_base 37: mod_base = OTHER; note = 2'-fluorouridine
  modified_base 40: mod_base = OTHER; note = Guanosine phosphorothiorate
  modified_base 43: mod_base = OTHER; note = 2'-fluoroguanosine
  modified_base 44: mod_base = OTHER; note = Guanosine phosphorothiorate
  modified_base 48: mod_base = OTHER; note = 2'-fluorocytosine
  modified_base 52: mod_base = OTHER; note = 2'-fluorouridine
  modified_base 62: mod_base = OTHER; note = Guanosine phosphorothiorate
  modified_base 73: mod_base = OTHER; note = 2'-Omethylcytosine phosphorothiorate

SEQ ID NO: 3628 - RNA, 75 nt, synthetic construct; identical to SEQ ID NO: 3306
  source 1..75: mol_type = other RNA
  modified_base 1: mod_base = OTHER; note = 2'-Omethylguanosine phosphorothiorate
  modified_base 2: mod_base = OTHER; note = 2'-Omethyladenosine
  modified_base 3: mod_base = OTHER; note = 2'-Omethylcytosine
  modified_base 43: mod_base = OTHER; note = Adenosine phosphorothiorate
  modified_base 49: mod_base = OTHER; note = 2'-Omethylcytosine
  modified_base 74: mod_base = OTHER; note = Cytosine phosphorothiorate
  modified_base 75: mod_base = OTHER; note = 2'-Omethyladenosine

SEQ ID NO: 3629 - RNA, 75 nt, synthetic construct; identical to SEQ ID NO: 1045
  source 1..75: mol_type = other RNA
  modified_base 2: mod_base = OTHER; note = 2'-Omethylguanosine phosphorothiorate
  modified_base 3: mod_base = OTHER; note = 2'-Omethyluridine phosphorothiorate
  modified_base 7: mod_base = OTHER; note = 2'-Omethyladenosine
  modified_base 15: mod_base = OTHER; note = 2'-fluoroadenosine phosphorothiorate
  modified_base 16: mod_base = OTHER; note = 2'-Omethyluridine phosphorothiorate
  modified_base 26: mod_base = OTHER; note = Uridine phosphorothiorate
  modified_base 42: mod_base = OTHER; note = Adenosine phosphorothiorate
  modified_base 44: mod_base = OTHER; note = 2'-Omethylcytosine
  modified_base 55: mod_base = OTHER; note = 2'-Omethylcytosine phosphorothiorate
  modified_base 57: mod_base = OTHER; note = 2'-fluoroadenosine
  modified_base 58: mod_base = OTHER; note = 2'-Omethylguanosine phosphorothiorate
  modified_base 61: mod_base = OTHER; note = 2'-Omethyluridine
  modified_base 72: mod_base = OTHER; note = 2'-Omethyluridine
  modified_base 74: mod_base = OTHER; note = 2'-Omethylcytosine phosphorothiorate

SEQ ID NO: 3630 - RNA, 76 nt, synthetic construct
  source 1..76: mol_type = other RNA
ggctccgtggcgcaaaattaagcgcattggacttcaaattcaaaggttccgggttcgagtcccggcggagtcgcca

SEQ ID NO: 3631 - RNA, 76 nt, synthetic construct; identical to SEQ ID NO: 625
  source 1..76: mol_type = other RNA
  modified_base 2: mod_base = OTHER; note = 2'-Omethylguanosine
  modified_base 5: mod_base = OTHER; note = Cytosine phosphorothiorate
  modified_base 6: mod_base = OTHER; note = 2'-fluorocytosine
  modified_base 8: mod_base = OTHER; note = Uridine phosphorothiorate
  modified_base 10: mod_base = OTHER; note = 2'-Omethylguanosine
  modified_base 11: mod_base = OTHER; note = 2'-Omethylcytosine
  modified_base 13: mod_base = OTHER; note = Cytosine phosphorothiorate
  modified_base 14: mod_base = OTHER; note = 2'-Omethyladenosine
  modified_base 15: mod_base = OTHER; note = Adenosine phosphorothiorate
  modified_base 16: mod_base = OTHER; note = 2'-Omethyluridine
  modified_base 17: mod_base = OTHER; note = Guanosine phosphorothiorate
  modified_base 20: mod_base = OTHER; note = 2'-fluorouridine
  modified_base 22: mod_base = OTHER; note = 2'-Omethylguanosine
  modified_base 23: mod_base = OTHER; note = 2'-fluorocytosine
  modified_base 27: mod_base = OTHER; note = Uridine phosphorothiorate
  modified_base 28: mod_base = OTHER; note = 2'-fluorouridine
  modified_base 29: mod_base = OTHER; note = 2'-Omethylguanosine
  modified_base 31: mod_base = OTHER; note = 2'-fluoroadenosine
  modified_base 33: mod_base = OTHER; note = Uridine phosphorothiorate
  modified_base 34: mod_base = OTHER; note = 2'-fluorouridine
  modified_base 36: mod_base = OTHER; note = Adenosine phosphorothiorate
  modified_base 39: mod_base = OTHER; note = 2'-Omethyluridine
  modified_base 43: mod_base = OTHER; note = 2'-Omethyladenosine phosphorothiorate
  modified_base 44: mod_base = OTHER; note = Adenosine phosphorothiorate
  modified_base 47: mod_base = OTHER; note = 2'-Omethyluridine phosphorothiorate
  modified_base 48: mod_base = OTHER; note = 2'-fluorouridine phosphorothiorate
  modified_base 52: mod_base = OTHER; note = 2'-Omethylguanosine
  modified_base 59: mod_base = OTHER; note = 2'-fluoroguanosine
  modified_base 60: mod_base = OTHER; note = 2'-fluorouridine phosphorothiorate
  modified_base 62: mod_base = OTHER; note = Cytosine phosphorothiorate
  modified_base 63: mod_base = OTHER; note = 2'-Omethylcytosine
  modified_base 64: mod_base = OTHER; note = 2'-fluoroguanosine
  modified_base 65: mod_base = OTHER; note = 2'-Omethylguanosine
  modified_base 66: mod_base = OTHER; note = 2'-Omethylcytosine
  modified_base 70: mod_base = OTHER; note = 2'-fluoroguanosine
  modified_base 72: mod_base = OTHER; note = 2'-fluorocytosine

SEQ ID NO: 3632 - RNA, 85 nt, synthetic construct; identical to SEQ ID NO: 3297
  source 1..85: mol_type = other RNA
  modified_base 1: mod_base = OTHER; note = 2'-Omethylguanosine
  modified_base 61: mod_base = OTHER; note = 2'-Omethylguanosine
  modified_base 82: mod_base = OTHER; note = 2'-Omethylguanosine

SEQ ID NO: 3633 - RNA, 75 nt, synthetic construct; identical to SEQ ID NO: 3299
  source 1..75: mol_type = other RNA
  modified_base 1: mod_base = OTHER; note = 2'-fluorocytosine
  modified_base 3: mod_base = OTHER; note = 2'-Omethyluridine
  modified_base 7: mod_base = OTHER; note = 2'-Omethyluridine
  modified_base 20: mod_base = OTHER; note = 2'-fluoroadenosine
  modified_base 21: mod_base = OTHER; note = 2'-fluoroguanosine
  modified_base 25: mod_base = OTHER; note = 2'-fluoroadenosine
  modified_base 26: mod_base = OTHER; note = 2'-fluorouridine phosphorothiorate
  modified_base 28: mod_base = OTHER; note = 2'-Omethyladenosine phosphorothiorate
  modified_base 35: mod_base = OTHER; note = 2'-fluoroadenosine phosphorothiorate
  modified_base 40: mod_base = OTHER; note = 2'-fluorouridine
  modified_base 41: mod_base = OTHER; note = 2'-fluoroguanosine
  modified_base 46: mod_base = OTHER; note = 2'-fluorouridine
  modified_base 47: mod_base = OTHER; note = 2'-fluorocytosine
  modified_base 49: mod_base = OTHER; note = 2'-fluoroadenosine phosphorothiorate
  modified_base 53: mod_base = OTHER; note = 2'-Omethyluridine phosphorothiorate
  modified_base 61: mod_base = OTHER; note = 2'-fluorocytosine
  modified_base 62: mod_base = OTHER; note = 2'-Omethylcytosine phosphorothiorate
  modified_base 72: mod_base = OTHER; note = Guanosine phosphorothiorate
  modified_base 73: mod_base = OTHER; note = Cytosine phosphorothiorate
  modified_base 74: mod_base = OTHER; note = 2'-Omethylcytosine

SEQ ID NO: 3634 - RNA, 76 nt, synthetic construct; identical to SEQ ID NO: 3318
  source 1..76: mol_type = other RNA
  modified_base 1: mod_base = OTHER; note = 2'-Omethylcytosine
  modified_base 2: mod_base = OTHER; note = 2'-Omethylcytosine
  modified_base 3: mod_base = OTHER; note = 2'-Omethyluridine
  modified_base 4: mod_base = OTHER; note = 2'-Omethyluridine
  modified_base 5: mod_base = OTHER; note = 2'-Omethylcytosine
  modified_base 6: mod_base = OTHER; note = 2'-Omethylguanosine
  modified_base 16: mod_base = OTHER; note = 2'-Omethyluridine
  modified_base 18: mod_base = OTHER; note = 2'-Omethylguanosine
  modified_base 19: mod_base = OTHER; note = 2'-Omethylguanosine
  modified_base 25: mod_base = OTHER; note = 2'-Omethylcytosine
  modified_base 33: mod_base = OTHER; note = 2'-fluorouridine
  modified_base 35: mod_base = OTHER; note = Uridine phosphorothiorate
  modified_base 37: mod_base = OTHER; note = Guanosine phosphorothiorate
  modified_base 38: mod_base = OTHER; note = Adenosine phosphorothiorate
  modified_base 41: mod_base = OTHER; note = 2'-fluorocytosine
  modified_base 42: mod_base = OTHER; note = 2'-Omethyluridine
  modified_base 43: mod_base = OTHER; note = 2'-Omethyluridine
  modified_base 44: mod_base = OTHER; note = 2'-fluoroadenosine
  modified_base 49: mod_base = OTHER; note = 2'-Omethylguanosine
  modified_base 50: mod_base = OTHER; note = 2'-Omethylcytosine
  modified_base 52: mod_base = OTHER; note = 2'-Omethylguanosine
  modified_base 54: mod_base = OTHER; note = 2'-Omethyluridine
  modified_base 55: mod_base = OTHER; note = Uridine phosphorothiorate
  modified_base 56: mod_base = OTHER; note = 2'-Omethylcytosine
  modified_base 57: mod_base = OTHER; note = 2'-fluoroguanosine
  modified_base 59: mod_base = OTHER; note = 2'-Omethyladenosine
  modified_base 61: mod_base = OTHER; note = 2'-Omethylcytosine
  modified_base 62: mod_base = OTHER; note = 2'-Omethylcytosine
  modified_base 63: mod_base = OTHER; note = 2'-fluoroguanosine
  modified_base 64: mod_base = OTHER; note = 2'-Omethylguanosine
  modified_base 65: mod_base = OTHER; note = 2'-Omethylcytosine
  modified_base 73: mod_base = OTHER; note = 2'-Omethyladenosine

SEQ ID NO: 3635 - RNA, 86 nt, synthetic construct; identical to SEQ ID NO: 3290
  source 1..86: mol_type = other RNA
  modified_base 1: mod_base = OTHER; note = 2'-Omethyladenosine phosphorothiorate
  modified_base 2: mod_base = OTHER; note = 2'-Omethylcytosine phosphorothiorate
  modified_base 84: mod_base = OTHER; note = Cytosine phosphorothiorate
  modified_base 85: mod_base = OTHER; note = 2'-Omethylcytosine

SEQ ID NO: 3636 - RNA, 75 nt, synthetic construct; identical to SEQ ID NO: 1045
  source 1..75: mol_type = other RNA
  modified_base 1: mod_base = OTHER; note = 2'-Omethylguanosine phosphorothiorate
  modified_base 3: mod_base = OTHER; note = Uridine phosphorothiorate
  modified_base 10: mod_base = OTHER; note = Guanosine phosphorothiorate
  modified_base 11: mod_base = OTHER; note = 2'-fluorouridine
  modified_base 12: mod_base = OTHER; note = 2'-fluoroguanosine
  modified_base 22: mod_base = OTHER; note = 2'-fluoroguanosine
  modified_base 25: mod_base = OTHER; note = 2'-fluorocytosine
  modified_base 26: mod_base = OTHER; note = 2'-fluorouridine
  modified_base 31: mod_base = OTHER; note = 2'-Omethyladenosine phosphorothiorate
  modified_base 32: mod_base = OTHER; note = 2'-fluorocytosine
  modified_base 37: mod_base = OTHER; note = 2'-fluoroadenosine phosphorothiorate
  modified_base 45: mod_base = OTHER; note = 2'-fluoroguanosine
  modified_base 52: mod_base = OTHER; note = 2'-fluoroguanosine phosphorothiorate
  modified_base 56: mod_base = OTHER; note = 2'-Omethylguanosine
  modified_base 60: mod_base = OTHER; note = Cytosine phosphorothiorate
  modified_base 63: mod_base = OTHER; note = 2'-fluoroguanosine
  modified_base 66: mod_base = OTHER; note = 2'-fluoroguanosine
  modified_base 74: mod_base = OTHER; note = Cytosine phosphorothiorate

SEQ ID NO: 3637 - RNA, 76 nt, synthetic construct
  source 1..76: mol_type = other RNA
ggcacagtggcgcaatggatagcgcattggacttcaaattcaaaggttgcgggttcgagtcccgcctgtgtcgcca

SEQ ID NO: 3638 - RNA, 85 nt, synthetic construct; identical to SEQ ID NO: 3301
  source 1..85: mol_type = other RNA
  modified_base 1: mod_base = OTHER; note = 2'-Omethylguanosine phosphorothiorate
  modified_base 2: mod_base = OTHER; note = 2'-Omethylcytosine
  modified_base 11: mod_base = OTHER; note = Cytosine phosphorothiorate
  modified_base 17: mod_base = OTHER; note = 2'-fluoroguanosine phosphorothiorate
  modified_base 23: mod_base = OTHER; note = 2'-Omethylguanosine phosphorothiorate
  modified_base 27: mod_base = OTHER; note = Uridine phosphorothiorate
  modified_base 29: mod_base = OTHER; note = 2'-fluoroguanosine
  modified_base 30: mod_base = OTHER; note = Guanosine phosphorothiorate
  modified_base 37: mod_base = OTHER; note = Adenosine phosphorothiorate
  modified_base 44: mod_base = OTHER; note = 2'-Omethyluridine
  modified_base 46: mod_base = OTHER; note = 2'-Omethylguanosine
  modified_base 47: mod_base = OTHER; note = 2'-Omethylguanosine
  modified_base 48: mod_base = OTHER; note = 2'-fluoroguanosine
  modified_base 50: mod_base = OTHER; note = Cytosine phosphorothiorate
  modified_base 57: mod_base = OTHER; note = 2'-fluorocytosine
  modified_base 58: mod_base = OTHER; note = 2'-Omethylguanosine
  modified_base 60: mod_base = OTHER; note = 2'-fluoroadenosine
  modified_base 61: mod_base = OTHER; note = 2'-fluoroguanosine phosphorothiorate
  modified_base 68: mod_base = OTHER; note = 2'-fluoroadenosine
  modified_base 81: mod_base = OTHER; note = 2'-fluorocytosine phosphorothiorate
  modified_base 83: mod_base = OTHER; note = Cytosine phosphorothiorate

SEQ ID NO: 3639 - RNA, 86 nt, synthetic construct; identical to SEQ ID NO: 3290
  source 1..86: mol_type = other RNA
  modified_base 1: mod_base = OTHER; note = 2'-Omethyladenosine phosphorothiorate
  modified_base 2: mod_base = OTHER; note = 2'-Omethylcytosine phosphorothiorate
  modified_base 3: mod_base = OTHER; note = 2'-Omethylcytosine
  modified_base 4: mod_base = OTHER; note = 2'-Omethyladenosine
  modified_base 5: mod_base = OTHER; note = 2'-Omethylguanosine
  modified_base 6: mod_base = OTHER; note = 2'-Omethylguanosine
  modified_base 16: mod_base = OTHER; note = 2'-Omethyluridine
  modified_base 17: mod_base = OTHER; note = 2'-Omethylguanosine
  modified_base 18: mod_base = OTHER; note = 2'-Omethylguanosine
  modified_base 20: mod_base = OTHER; note = 2'-Omethyluridine
  modified_base 22: mod_base = OTHER; note = 2'-Omethyladenosine
  modified_base 24: mod_base = OTHER; note = 2'-Omethylguanosine
  modified_base 25: mod_base = OTHER; note = 2'-Omethylcytosine
  modified_base 33: mod_base = OTHER; note = 2'-fluorouridine
  modified_base 35: mod_base = OTHER; note = Cytosine phosphorothiorate
  modified_base 37: mod_base = OTHER; note = Guanosine phosphorothiorate
  modified_base 38: mod_base = OTHER; note = Adenosine phosphorothiorate
  modified_base 44: mod_base = OTHER; note = 2'-Omethyluridine
  modified_base 57: mod_base = OTHER; note = 2'-fluoroguanosine
  modified_base 58: mod_base = OTHER; note = 2'-fluorocytosine
  modified_base 59: mod_base = OTHER; note = 2'-Omethylguanosine
  modified_base 60: mod_base = OTHER; note = 2'-Omethyluridine
  modified_base 61: mod_base = OTHER; note = 2'-Omethylguanosine
  modified_base 62: mod_base = OTHER; note = 2'-Omethylguanosine
  modified_base 63: mod_base = OTHER; note = 2'-Omethylguanosine
  modified_base 64: mod_base = OTHER; note = 2'-Omethyluridine
  modified_base 66: mod_base = OTHER; note = 2'-Omethylcytosine
  modified_base 69: mod_base = OTHER; note = 2'-Omethyladenosine
  modified_base 71: mod_base = OTHER; note = 2'-Omethylcytosine
  modified_base 72: mod_base = OTHER; note = 2'-Omethylcytosine
  modified_base 73: mod_base = OTHER; note = 2'-fluorocytosine
  modified_base 74: mod_base = OTHER; note = 2'-Omethyladenosine
  modified_base 75: mod_base = OTHER; note = 2'-Omethylcytosine
  modified_base 76: mod_base = OTHER; note = 2'-Omethyluridine
  modified_base 77: mod_base = OTHER; note = 2'-Omethylcytosine
  modified_base 78: mod_base = OTHER; note = 2'-Omethylcytosine
  modified_base 83: mod_base = OTHER; note = 2'-Omethyladenosine

SEQ ID NO: 3640 - RNA, 85 nt, synthetic construct; identical to SEQ ID NO: 3288
  source 1..85: mol_type = other RNA
  modified_base 1: mod_base = OTHER; note = 2'-Omethylcytosine
  modified_base 9: mod_base = OTHER; note = 2'-fluoroguanosine phosphorothiorate
  modified_base 13: mod_base = OTHER; note = Adenosine phosphorothiorate
  modified_base 15: mod_base = OTHER; note = 2'-Omethyluridine
  modified_base 22: mod_base = OTHER; note = 2'-fluoroguanosine phosphorothiorate
  modified_base 26: mod_base = OTHER; note = 2'-fluorouridine
  modified_base 30: mod_base = OTHER; note = 2'-fluoroadenosine
  modified_base 34: mod_base = OTHER; note = 2'-fluorocytosine
  modified_base 35: mod_base = OTHER; note = 2'-Omethyladenosine
  modified_base 39: mod_base = OTHER; note = Cytosine phosphorothiorate
  modified_base 43: mod_base = OTHER; note = 2'-Omethyluridine
  modified_base 45: mod_base = OTHER; note = 2'-fluoroguanosine
  modified_base 48: mod_base = OTHER; note = Adenosine phosphorothiorate
  modified_base 53: mod_base = OTHER; note = 2'-Omethyluridine
  modified_base 57: mod_base = OTHER; note = 2'-fluorocytosine
  modified_base 58: mod_base = OTHER; note = 2'-Omethylguanosine
  modified_base 61: mod_base = OTHER; note = 2'-Omethylguanosine
  modified_base 65: mod_base = OTHER; note = Cytosine phosphorothiorate
  modified_base 84: mod_base = OTHER; note = 2'-Omethylcytosine
  modified_base 85: mod_base = OTHER; note = 2'-fluoroadenosine

SEQ ID NO: 3641 - RNA, 76 nt, synthetic construct; identical to SEQ ID NO: 625
  source 1..76: mol_type = other RNA
  modified_base 1: mod_base = OTHER; note = 2'-Omethylguanosine
  modified_base 2: mod_base = OTHER; note = 2'-Omethylguanosine
  modified_base 3: mod_base = OTHER; note = 2'-Omethylcytosine
  modified_base 4: mod_base = OTHER; note = 2'-Omethyluridine
  modified_base 5: mod_base = OTHER; note = 2'-Omethylcytosine
  modified_base 6: mod_base = OTHER; note = 2'-Omethylcytosine
  modified_base 7: mod_base = OTHER; note = 2'-Omethylguanosine phosphorothiorate
  modified_base 9: mod_base = OTHER; note = 2'-Omethylguanosine phosphorothiorate
  modified_base 10: mod_base = OTHER; note = 2'-Omethylguanosine
  modified_base 11: mod_base = OTHER; note = 2'-Omethylcytosine
  modified_base 12: mod_base = OTHER; note = 2'-Omethylguanosine
  modified_base 13: mod_base = OTHER; note = 2'-Omethylcytosine
  modified_base 14: mod_base = OTHER; note = 2'-Omethyladenosine
  modified_base 15: mod_base = OTHER; note = 2'-fluoroadenosine
  modified_base 16: mod_base = OTHER; note = 2'-Omethyluridine
  modified_base 17: mod_base = OTHER; note = 2'-Omethylguanosine
  modified_base 18: mod_base = OTHER; note = 2'-Omethylguanosine
  modified_base 19: mod_base = OTHER; note = 2'-Omethyladenosine
  modified_base 20: mod_base = OTHER; note = 2'-Omethyluridine
  modified_base 21: mod_base = OTHER; note = 2'-fluoroadenosine phosphorothiorate
  modified_base 22: mod_base = OTHER; note = 2'-Omethylguanosine phosphorothiorate
  modified_base 23: mod_base = OTHER; note = 2'-Omethylcytosine
  modified_base 24: mod_base = OTHER; note = 2'-Omethylguanosine
  modified_base 25: mod_base = OTHER; note = 2'-Omethylcytosine
  modified_base 26: mod_base = OTHER; note = Adenosine phosphorothiorate
  modified_base 27: mod_base = OTHER; note = 2'-Omethyluridine
  modified_base 28: mod_base = OTHER; note = 2'-Omethyluridine
  modified_base 29: mod_base = OTHER; note = 2'-fluoroguanosine
  modified_base 30: mod_base = OTHER; note = 2'-Omethylguanosine
  modified_base 31: mod_base = OTHER; note = 2'-fluoroadenosine
  modified_base 33: mod_base = OTHER; note = 2'-Omethyluridine
  modified_base 34: mod_base = OTHER; note = 2'-Omethyluridine phosphorothiorate
  modified_base 35: mod_base = OTHER; note = Cytosine phosphorothiorate
  modified_base 36: mod_base = OTHER; note = 2'-Omethyladenosine phosphorothiorate
  modified_base 37: mod_base = OTHER; note = Adenosine phosphorothiorate
  modified_base 38: mod_base = OTHER; note = Adenosine phosphorothiorate
  modified_base 40: mod_base = OTHER; note = 2'-Omethyluridine
  modified_base 41: mod_base = OTHER; note = 2'-fluorocytosine
  modified_base 43: mod_base = OTHER; note = 2'-Omethyladenosine
  modified_base 44: mod_base = OTHER; note = 2'-fluoroadenosine
  modified_base 45: mod_base = OTHER; note = Guanosine phosphorothiorate
  modified_base 49: mod_base = OTHER; note = 2'-fluorocytosine
  modified_base 51: mod_base = OTHER; note = 2'-Omethylguanosine
  modified_base 52: mod_base = OTHER; note = 2'-Omethylguanosine
  modified_base 53: mod_base = OTHER; note = 2'-fluoroguanosine
  modified_base 54: mod_base = OTHER; note = 2'-Omethyluridine
  modified_base 55: mod_base = OTHER; note = Uridine phosphorothiorate
  modified_base 56: mod_base = OTHER; note = 2'-Omethylcytosine
  modified_base 57: mod_base = OTHER; note = 2'-Omethylguanosine
  modified_base 58: mod_base = OTHER; note = Adenosine phosphorothiorate
  modified_base 59: mod_base = OTHER; note = 2'-Omethylguanosine
  modified_base 60: mod_base = OTHER; note = 2'-Omethyluridine
  modified_base 61: mod_base = OTHER; note = 2'-Omethylcytosine
  modified_base 62: mod_base = OTHER; note = 2'-Omethylcytosine
  modified_base 63: mod_base = OTHER; note = 2'-fluorocytosine
  modified_base 64: mod_base = OTHER; note = 2'-Omethylguanosine
  modified_base 65: mod_base = OTHER; note = 2'-Omethylguanosine
  modified_base 66: mod_base = OTHER; note = 2'-Omethylcytosine
  modified_base 67: mod_base = OTHER; note = 2'-Omethylguanosine
  modified_base 68: mod_base = OTHER; note = 2'-Omethylguanosine
  modified_base 69: mod_base = OTHER; note = 2'-Omethyladenosine phosphorothiorate
  modified_base 70: mod_base = OTHER; note = 2'-Omethylguanosine
  modified_base 71: mod_base = OTHER; note = 2'-fluorouridine
  modified_base 72: mod_base = OTHER; note = 2'-Omethylcytosine
  modified_base 73: mod_base = OTHER; note = 2'-Omethylguanosine
  modified_base 74: mod_base = OTHER; note = 2'-fluorocytosine phosphorothiorate
  modified_base 75: mod_base = OTHER; note = 2'-fluorocytosine phosphorothiorate

SEQ ID NO: 3642 - RNA, 76 nt, synthetic construct; identical to SEQ ID NO: 3295
  source 1..76: mol_type = other RNA
  modified_base 1: mod_base = OTHER; note = 2'-Omethylcytosine phosphorothiorate
  modified_base 2: mod_base = OTHER; note = 2'-Omethylcytosine
  modified_base 9: mod_base = OTHER; note = 2'-fluoroadenosine
  modified_base 17: mod_base = OTHER; note = 2'-Omethyluridine
  modified_base 20: mod_base = OTHER; note = 2'-fluorouridine phosphorothiorate
  modified_base 26: mod_base = OTHER; note = Guanosine phosphorothiorate
  modified_base 29: mod_base = OTHER; note = 2'-Omethylguanosine
  modified_base 40: mod_base = OTHER; note = 2'-Omethylcytosine phosphorothiorate
  modified_base 47: mod_base = OTHER; note = 2'-Omethyluridine
  modified_base 52: mod_base = OTHER; note = 2'-Omethylguanosine phosphorothiorate
  modified_base 66: mod_base = OTHER; note = 2'-fluorouridine
  modified_base 75: mod_base = OTHER; note = Cytosine phosphorothiorate

SEQ ID NO: 3643 - RNA, 76 nt, synthetic construct; identical to SEQ ID NO: 625
  source 1..76: mol_type = other RNA
  modified_base 2: mod_base = OTHER; note = Guanosine phosphorothiorate
  modified_base 4: mod_base = OTHER; note = 2'-Omethyluridine
  modified_base 6: mod_base = OTHER; note = 2'-Omethylcytosine
  modified_base 7: mod_base = OTHER; note = Guanosine phosphorothiorate
  modified_base 10: mod_base = OTHER; note = Guanosine phosphorothiorate
  modified_base 11: mod_base = OTHER; note = 2'-fluorocytosine
  modified_base 13: mod_base = OTHER; note = Cytosine phosphorothiorate
  modified_base 14: mod_base = OTHER; note = 2'-Omethyladenosine phosphorothiorate
  modified_base 16: mod_base = OTHER; note = 2'-fluorouridine
  modified_base 18: mod_base = OTHER; note = 2'-Omethylguanosine
  modified_base 20: mod_base = OTHER; note = Uridine phosphorothiorate
  modified_base 23: mod_base = OTHER; note = 2'-fluorocytosine
  modified_base 25: mod_base = OTHER; note = 2'-fluorocytosine
  modified_base 26: mod_base = OTHER; note = 2'-Omethyladenosine
  modified_base 28: mod_base = OTHER; note = Uridine phosphorothiorate
  modified_base 30: mod_base = OTHER; note = 2'-fluoroguanosine
  modified_base 34: mod_base = OTHER; note = 2'-Omethyluridine
  modified_base 36: mod_base = OTHER; note = Adenosine phosphorothiorate
  modified_base 38: mod_base = OTHER; note = 2'-fluoroadenosine
  modified_base 39: mod_base = OTHER; note = 2'-fluorouridine
  modified_base 42: mod_base = OTHER; note = Adenosine phosphorothiorate
  modified_base 44: mod_base = OTHER; note = Adenosine phosphorothiorate
  modified_base 45: mod_base = OTHER; note = 2'-Omethylguanosine
  modified_base 46: mod_base = OTHER; note = Guanosine phosphorothiorate
  modified_base 47: mod_base = OTHER; note = 2'-fluorouridine phosphorothiorate
  modified_base 49: mod_base = OTHER; note = 2'-Omethylcytosine
  modified_base 52: mod_base = OTHER; note = 2'-fluoroguanosine
  modified_base 53: mod_base = OTHER; note = 2'-Omethylguanosine
  modified_base 54: mod_base = OTHER; note = Uridine phosphorothiorate
  modified_base 56: mod_base = OTHER; note = Cytosine phosphorothiorate
  modified_base 57: mod_base = OTHER; note = 2'-Omethylguanosine
  modified_base 60: mod_base = OTHER; note = Uridine phosphorothiorate
  modified_base 63: mod_base = OTHER; note = 2'-fluorocytosine
  modified_base 64: mod_base = OTHER; note = Guanosine phosphorothiorate
  modified_base 65: mod_base = OTHER; note = 2'-fluoroguanosine
  modified_base 67: mod_base = OTHER; note = 2'-fluoroguanosine
  modified_base 68: mod_base = OTHER; note = 2'-fluoroguanosine
  modified_base 70: mod_base = OTHER; note = 2'-fluoroguanosine
  modified_base 71: mod_base = OTHER; note = 2'-Omethyluridine
  modified_base 74: mod_base = OTHER; note = 2'-Omethylcytosine

SEQ ID NO: 3644 - RNA, 76 nt, synthetic construct; identical to SEQ ID NO: 3318
  source 1..76: mol_type = other RNA
  modified_base 1: mod_base = OTHER; note = 2'-Omethylcytosine
  modified_base 14: mod_base = OTHER; note = 2'-Omethyladenosine
  modified_base 16: mod_base = OTHER; note = 2'-Omethyluridine
  modified_base 73: mod_base = OTHER; note = 2'-Omethyladenosine

SEQ ID NO: 3645 - RNA, 74 nt, synthetic construct; identical to SEQ ID NO: 3293
  source 1..74: mol_type = other RNA
  modified_base 1: mod_base = OTHER; note = 2'-fluoroadenosine
  modified_base 8: mod_base = OTHER; note = Guanosine phosphorothiorate
  modified_base 11: mod_base = OTHER; note = 2'-fluoroguanosine
  modified_base 28: mod_base = OTHER; note = 2'-Omethylguanosine
  modified_base 41: mod_base = OTHER; note = 2'-fluoroadenosine
  modified_base 42: mod_base = OTHER; note = Adenosine phosphorothiorate
  modified_base 46: mod_base = OTHER; note = 2'-fluorouridine
  modified_base 73: mod_base = OTHER; note = 2'-Omethylcytosine phosphorothiorate
  modified_base 74: mod_base = OTHER; note = 2'-Omethyladenosine

SEQ ID NO: 3646 - RNA, 76 nt, synthetic construct; identical to SEQ ID NO: 3318
  source 1..76: mol_type = other RNA
  modified_base 1: mod_base = OTHER; note = 2'-Omethylcytosine
  modified_base 2: mod_base = OTHER; note = 2'-Omethylcytosine
  modified_base 3: mod_base = OTHER; note = 2'-Omethyluridine
  modified_base 4: mod_base = OTHER; note = 2'-Omethyluridine
  modified_base 5: mod_base = OTHER; note = 2'-Omethylcytosine
  modified_base 6: mod_base = OTHER; note = 2'-Omethylguanosine
  modified_base 10: mod_base = OTHER; note = 2'-Omethylguanosine
  modified_base 11: mod_base = OTHER; note = 2'-Omethylcytosine
  modified_base 12: mod_base = OTHER; note = 2'-Omethyluridine
  modified_base 13: mod_base = OTHER; note = 2'-Omethylcytosine
  modified_base 22: mod_base = OTHER; note = 2'-Omethylguanosine
  modified_base 23: mod_base = OTHER; note = 2'-Omethyladenosine
  modified_base 24: mod_base = OTHER; note = 2'-Omethylguanosine
  modified_base 25: mod_base = OTHER; note = 2'-Omethylcytosine
  modified_base 49: mod_base = OTHER; note = 2'-Omethylguanosine
  modified_base 50: mod_base = OTHER; note = 2'-Omethylcytosine
  modified_base 51: mod_base = OTHER; note = 2'-Omethyluridine
  modified_base 52: mod_base = OTHER; note = 2'-Omethylguanosine
  modified_base 53: mod_base = OTHER; note = 2'-Omethylguanosine
  modified_base 61: mod_base = OTHER; note = 2'-Omethylcytosine
  modified_base 62: mod_base = OTHER; note = 2'-Omethylcytosine
  modified_base 63: mod_base = OTHER; note = 2'-fluoroguanosine
  modified_base 64: mod_base = OTHER; note = 2'-Omethylguanosine
  modified_base 65: mod_base = OTHER; note = 2'-Omethylcytosine
  modified_base 66: mod_base = OTHER; note = 2'-Omethyluridine
  modified_base 67: mod_base = OTHER; note = 2'-Omethylcytosine
  modified_base 68: mod_base = OTHER; note = 2'-Omethylguanosine
  modified_base 73: mod_base = OTHER; note = 2'-Omethyladenosine

SEQ ID NO: 3647 - RNA, 75 nt, synthetic construct; identical to SEQ ID NO: 3299
  source 1..75: mol_type = other RNA
  modified_base 4: mod_base = OTHER; note = 2'-Omethylguanosine phosphorothiorate
  modified_base 10: mod_base = OTHER; note = Cytosine phosphorothiorate
  modified_base 20: mod_base = OTHER; note = 2'-fluoroadenosine
  modified_base 25: mod_base = OTHER; note = 2'-fluoroadenosine
  modified_base 26: mod_base = OTHER; note = 2'-Omethyluridine phosphorothiorate
  modified_base 36: mod_base = OTHER; note = 2'-fluoroadenosine
  modified_base 39: mod_base = OTHER; note = 2'-fluorocytosine phosphorothiorate
  modified_base 53: mod_base = OTHER; note = 2'-fluorouridine
  modified_base 68: mod_base = OTHER; note = 2'-fluoroadenosine phosphorothiorate

SEQ ID NO: 3648 - RNA, 76 nt, synthetic construct; identical to SEQ ID NO: 625
  source 1..76: mol_type = other RNA
  modified_base 1: mod_base = OTHER; note = 2'-Omethylguanosine phosphorothiorate
  modified_base 2: mod_base = OTHER; note = 2'-Omethylguanosine phosphorothiorate
  modified_base 3: mod_base = OTHER; note = 2'-Omethylcytosine
  modified_base 4: mod_base = OTHER; note = 2'-Omethyluridine
  modified_base 5: mod_base = OTHER; note = 2'-Omethylcytosine
  modified_base 6: mod_base = OTHER; note = 2'-Omethylcytosine
  modified_base 10: mod_base = OTHER; note = 2'-Omethylguanosine
  modified_base 11: mod_base = OTHER; note = 2'-Omethylcytosine
  modified_base 12: mod_base = OTHER; note = 2'-Omethylguanosine
  modified_base 13: mod_base = OTHER; note = 2'-Omethylcytosine
  modified_base 16: mod_base = OTHER; note = 2'-Omethyluridine
  modified_base 17: mod_base = OTHER; note = 2'-Omethylguanosine
  modified_base 18: mod_base = OTHER; note = 2'-Omethylguanosine
  modified_base 20: mod_base = OTHER; note = 2'-Omethyluridine
  modified_base 25: mod_base = OTHER; note = 2'-Omethylcytosine
  modified_base 33: mod_base = OTHER; note = 2'-fluorouridine
  modified_base 35: mod_base = OTHER; note = Cytosine phosphorothiorate
  modified_base 37: mod_base = OTHER; note = Adenosine phosphorothiorate
  modified_base 38: mod_base = OTHER; note = Adenosine phosphorothiorate
  modified_base 41: mod_base = OTHER; note = 2'-fluorocytosine
  modified_base 42: mod_base = OTHER; note = 2'-Omethyladenosine
  modified_base 43: mod_base = OTHER; note = 2'-Omethyladenosine
  modified_base 44: mod_base = OTHER; note = 2'-fluoroadenosine
  modified_base 49: mod_base = OTHER; note = 2'-Omethylcytosine
  modified_base 50: mod_base = OTHER; note = 2'-Omethylcytosine
  modified_base 52: mod_base = OTHER; note = 2'-Omethylguanosine
  modified_base 54: mod_base = OTHER; note = 2'-Omethyluridine
  modified_base 55: mod_base = OTHER; note = Uridine phosphorothiorate
  modified_base 56: mod_base = OTHER; note = 2'-Omethylcytosine
  modified_base 57: mod_base = OTHER; note = 2'-fluoroguanosine
  modified_base 59: mod_base = OTHER; note = 2'-Omethylguanosine
  modified_base 61: mod_base = OTHER; note = 2'-Omethylcytosine
  modified_base 65: mod_base = OTHER; note = 2'-Omethylguanosine
  modified_base 74: mod_base = OTHER; note = Cytosine phosphorothiorate
  modified_base 75: mod_base = OTHER; note = 2'-Omethylcytosine

SEQ ID NO: 3649 - RNA, 73 nt, synthetic construct; identical to SEQ ID NO: 935
  source 1..73: mol_type = other RNA
  modified_base 1: mod_base = OTHER; note = 2'-Omethylguanosine phosphorothiorate
  modified_base 2: mod_base = OTHER; note = 2'-Omethylguanosine
  modified_base 72: mod_base = OTHER; note = Cytosine phosphorothiorate

SEQ ID NO: 3650 - RNA, 86 nt, synthetic construct; identical to SEQ ID NO: 3290
  source 1..86: mol_type = other RNA
  modified_base 15: mod_base = OTHER; note = 2'-fluoroguanosine

SEQ ID NO: 3651 - RNA, 85 nt, synthetic construct; identical to SEQ ID NO: 3297
  source 1..85: mol_type = other RNA
  modified_base 1: mod_base = OTHER; note = 2'-Omethylguanosine phosphorothiorate
  modified_base 2: mod_base = OTHER; note = Cytosine phosphorothiorate
  modified_base 15: mod_base = OTHER; note = 2'-Omethylguanosine
  modified_base 33: mod_base = OTHER; note = 2'-fluorouridine
  modified_base 34: mod_base = OTHER; note = 2'-fluorouridine
  modified_base 49: mod_base = OTHER; note = Uridine phosphorothiorate
  modified_base 57: mod_base = OTHER; note = 2'-Omethylcytosine phosphorothiorate
  modified_base 62: mod_base = OTHER; note = 2'-Omethylguanosine
  modified_base 84: mod_base = OTHER; note = 2'-fluorocytosine phosphorothiorate

SEQ ID NO: 3652 - RNA, 75 nt, synthetic construct; identical to SEQ ID NO: 3311
  source 1..75: mol_type = other RNA
  modified_base 1: mod_base = OTHER; note = 2'-fluoroguanosine
  modified_base 2: mod_base = OTHER; note = 2'-Omethylguanosine phosphorothiorate
  modified_base 11: mod_base = OTHER; note = Uridine phosphorothiorate
  modified_base 15: mod_base = OTHER; note = 2'-fluoroadenosine
  modified_base 20: mod_base = OTHER; note = 2'-Omethyladenosine phosphorothiorate
  modified_base 21: mod_base = OTHER; note = 2'-Omethyladenosine
  modified_base 22: mod_base = OTHER; note = 2'-fluoroguanosine
  modified_base 25: mod_base = OTHER; note = 2'-fluorocytosine phosphorothiorate
  modified_base 40: mod_base = OTHER; note = Cytosine phosphorothiorate
  modified_base 44: mod_base = OTHER; note = 2'-fluorocytosine
  modified_base 59: mod_base = OTHER; note = 2'-fluorouridine phosphorothiorate
  modified_base 60: mod_base = OTHER; note = Cytosine phosphorothiorate
  modified_base 62: mod_base = OTHER; note = Cytosine phosphorothiorate
  modified_base 63: mod_base = OTHER; note = Guanosine phosphorothiorate
  modified_base 64: mod_base = OTHER; note = 2'-fluoroguanosine
  modified_base 67: mod_base = OTHER; note = Guanosine phosphorothiorate
  modified_base 72: mod_base = OTHER; note = Uridine phosphorothiorate
  modified_base 73: mod_base = OTHER; note = Cytosine phosphorothiorate
  modified_base 74: mod_base = OTHER; note = 2'-fluorocytosine phosphorothiorate
  modified_base 75: mod_base = OTHER; note = 2'-fluoroadenosine

SEQ ID NO: 3653 - RNA, 85 nt, synthetic construct; identical to SEQ ID NO: 3286
  source 1..85: mol_type = other RNA
  modified_base 1: mod_base = OTHER; note = 2'-Omethylcytosine
  modified_base 11: mod_base = OTHER; note = Cytosine phosphorothiorate
  modified_base 26: mod_base = OTHER; note = 2'-fluorouridine
  modified_base 30: mod_base = OTHER; note = 2'-fluoroadenosine
  modified_base 34: mod_base = OTHER; note = 2'-fluorouridine
  modified_base 43: mod_base = OTHER; note = 2'-Omethyluridine
  modified_base 46: mod_base = OTHER; note = 2'-Omethyladenosine
  modified_base 57: mod_base = OTHER; note = 2'-Omethylcytosine
  modified_base 64: mod_base = OTHER; note = Uridine phosphorothiorate
  modified_base 76: mod_base = OTHER; note = 2'-fluorocytosine
  modified_base 84: mod_base = OTHER; note = Cytosine phosphorothiorate

SEQ ID NO: 3654 - RNA, 76 nt, synthetic construct; identical to SEQ ID NO: 625
  source 1..76: mol_type = other RNA
  modified_base 1: mod_base = OTHER; note = 2'-Omethylguanosine phosphorothiorate
  modified_base 2: mod_base = OTHER; note = 2'-Omethylguanosine
  modified_base 3: mod_base = OTHER; note = 2'-Omethylcytosine
  modified_base 4: mod_base = OTHER; note = 2'-Omethyluridine
  modified_base 5: mod_base = OTHER; note = 2'-Omethylcytosine
  modified_base 6: mod_base = OTHER; note = 2'-Omethylcytosine
  modified_base 14: mod_base = OTHER; note = 2'-Omethyladenosine
  modified_base 15: mod_base = OTHER; note = 2'-fluoroadenosine
  modified_base 16: mod_base = OTHER; note = 2'-Omethyluridine
  modified_base 17: mod_base = OTHER; note = 2'-Omethylguanosine
  modified_base 18: mod_base = OTHER; note = 2'-Omethylguanosine
  modified_base 19: mod_base = OTHER; note = 2'-fluoroadenosine
  modified_base 20: mod_base = OTHER; note = 2'-Omethyluridine
  modified_base 40: mod_base = OTHER; note = 2'-fluorouridine
  modified_base 41: mod_base = OTHER; note = 2'-fluorocytosine
  modified_base 42: mod_base = OTHER; note = 2'-fluoroadenosine
  modified_base 43: mod_base = OTHER; note = 2'-fluoroadenosine
  modified_base 49: mod_base = OTHER; note = 2'-Omethylcytosine
  modified_base 50: mod_base = OTHER; note = 2'-Omethylcytosine
  modified_base 51: mod_base = OTHER; note = 2'-Omethylguanosine
  modified_base 52: mod_base = OTHER; note = 2'-Omethylguanosine
  modified_base 53: mod_base = OTHER; note = 2'-Omethylguanosine
  modified_base 54: mod_base = OTHER; note = 2'-Omethyluridine
  modified_base 56: mod_base = OTHER; note = 2'-Omethylcytosine
  modified_base 57: mod_base = OTHER; note = 2'-fluoroguanosine
  modified_base 59: mod_base = OTHER; note = 2'-Omethylguanosine
  modified_base 61: mod_base = OTHER; note = 2'-Omethylcytosine
  modified_base 62: mod_base = OTHER; note = 2'-Omethylcytosine
  modified_base 63: mod_base = OTHER; note = 2'-Omethylcytosine
  modified_base 64: mod_base = OTHER; note = 2'-Omethylguanosine
  modified_base 65: mod_base = OTHER; note = 2'-Omethylguanosine
  modified_base 66: mod_base = OTHER; note = 2'-Omethylcytosine
  modified_base 67: mod_base = OTHER; note = 2'-Omethylguanosine
  modified_base 68: mod_base = OTHER; note = 2'-Omethylguanosine
  modified_base 69: mod_base = OTHER; note = 2'-Omethyladenosine
  modified_base 73: mod_base = OTHER; note = 2'-Omethylguanosine

SEQ ID NO: 3655 - RNA, 76 nt, synthetic construct; identical to SEQ ID NO: 625
  source 1..76: mol_type = other RNA
  modified_base 1: mod_base = OTHER; note = 2'-Omethylguanosine phosphorothiorate
  modified_base 2: mod_base = OTHER; note = 2'-Omethylguanosine phosphorothiorate
  modified_base 11: mod_base = OTHER; note = 2'-fluorocytosine
  modified_base 20: mod_base = OTHER; note = Uridine phosphorothiorate
  modified_base 21: mod_base = OTHER; note = 2'-fluoroadenosine
  modified_base 62: mod_base = OTHER; note = Cytosine phosphorothiorate
  modified_base 63: mod_base = OTHER; note = 2'-O-(2-Methoxyethyl) 5-methylcytosine
  modified_base 74: mod_base = OTHER; note = Cytosine phosphorothiorate
  modified_base 75: mod_base = OTHER; note = 2'-Omethylcytosine phosphorothiorate
  modified_base 76: mod_base = OTHER; note = 2'-Omethyladenosine

SEQ ID NO: 3656 - RNA, 76 nt, synthetic construct; identical to SEQ ID NO: 3295
  source 1..76: mol_type = other RNA
  modified_base 1: mod_base = OTHER; note = 2'-Omethylcytosine phosphorothiorate
  modified_base 2: mod_base = OTHER; note = 2'-Omethylcytosine
  modified_base 3: mod_base = OTHER; note = 2'-fluorouridine
  modified_base 5: mod_base = OTHER; note = 2'-fluorocytosine
  modified_base 8: mod_base = OTHER; note = 2'-Omethyluridine
  modified_base 12: mod_base = OTHER; note = 2'-Omethyluridine
  modified_base 17: mod_base = OTHER; note = 2'-fluorouridine
  modified_base 21: mod_base = OTHER; note = 2'-fluoroadenosine phosphorothiorate
  modified_base 25: mod_base = OTHER; note = 2'-fluorocytosine phosphorothiorate
  modified_base 26: mod_base = OTHER; note = 2'-Omethylguanosine
  modified_base 27: mod_base = OTHER; note = 2'-fluoroguanosine
  modified_base 28: mod_base = OTHER; note = 2'-Omethyladenosine
  modified_base 48: mod_base = OTHER; note = 2'-Omethylcytosine
  modified_base 51: mod_base = OTHER; note = 2'-Omethyluridine
  modified_base 52: mod_base = OTHER; note = 2'-Omethylguanosine
  modified_base 56: mod_base = OTHER; note = Cytosine phosphorothiorate
  modified_base 57: mod_base = OTHER; note = Guanosine phosphorothiorate
  modified_base 74: mod_base = OTHER; note = Cytosine phosphorothiorate
  modified_base 75: mod_base = OTHER; note = 2'-Omethylcytosine phosphorothiorate
  modified_base 76: mod_base = OTHER; note = 2'-fluoroadenosine

SEQ ID NO: 3657 - RNA, 76 nt, synthetic construct; identical to SEQ ID NO: 625
  source 1..76: mol_type = other RNA
  modified_base 1: mod_base = OTHER; note = 2'-Omethylguanosine
  modified_base 2: mod_base = OTHER; note = 2'-Omethylguanosine
  modified_base 4: mod_base = OTHER; note = 2'-Omethyluridine
  modified_base 5: mod_base = OTHER; note = 2'-Omethylcytosine
  modified_base 11: mod_base = OTHER; note = 2'-Omethylcytosine phosphorothiorate
  modified_base 12: mod_base = OTHER; note = 2'-fluoroguanosine
  modified_base 15: mod_base = OTHER; note = 2'-fluoroadenosine
  modified_base 16: mod_base = OTHER; note = Uridine phosphorothiorate
  modified_base 25: mod_base = OTHER; note = Cytosine phosphorothiorate
  modified_base 26: mod_base = OTHER; note = 2'-fluoroadenosine
  modified_base 28: mod_base = OTHER; note = 2'-fluorouridine
  modified_base 30: mod_base = OTHER; note = 2'-Omethylguanosine
  modified_base 31: mod_base = OTHER; note = 2'-fluoroadenosine
  modified_base 33: mod_base = OTHER; note = 2'-fluorouridine
  modified_base 40: mod_base = OTHER; note = 2'-fluorouridine
  modified_base 41: mod_base = OTHER; note = 2'-Omethylcytosine phosphorothiorate
  modified_base 42: mod_base = OTHER; note = 2'-fluoroadenosine
  modified_base 43: mod_base = OTHER; note = 2'-fluoroadenosine
  modified_base 44: mod_base = OTHER; note = 2'-fluoroadenosine
  modified_base 45: mod_base = OTHER; note = Guanosine phosphorothiorate
  modified_base 46: mod_base = OTHER; note = 2'-Omethylguanosine
  modified_base 48: mod_base = OTHER; note = 2'-fluorouridine
  modified_base 49: mod_base = OTHER; note = 2'-Omethylcytosine
  modified_base 52: mod_base = OTHER; note = 2'-Omethylguanosine
  modified_base 53: mod_base = OTHER; note = Guanosine phosphorothiorate
  modified_base 54: mod_base = OTHER; note = 2'-Omethyluridine phosphorothiorate
  modified_base 56: mod_base = OTHER; note = 2'-Omethylcytosine
  modified_base 60: mod_base = OTHER; note = 2'-Omethyluridine phosphorothiorate
  modified_base 61: mod_base = OTHER; note = 2'-fluorocytosine
  modified_base 62: mod_base = OTHER; note = 2'-fluorocytosine phosphorothiorate
  modified_base 71: mod_base = OTHER; note = 2'-Omethyluridine
  modified_base 72: mod_base = OTHER; note = 2'-fluorocytosine
  modified_base 73: mod_base = OTHER; note = Guanosine phosphorothiorate
  modified_base 74: mod_base = OTHER; note = 2'-Omethylcytosine
  modified_base 75: mod_base = OTHER; note = 2'-fluorocytosine
  modified_base 76: mod_base = OTHER; note = 2'-fluoroadenosine

SEQ ID NO: 3658 - RNA, 75 nt, synthetic construct; identical to SEQ ID NO: 3299
  source 1..75: mol_type = other RNA
  modified_base 1: mod_base = OTHER; note = 2'-fluorocytosine phosphorothiorate
  modified_base 2: mod_base = OTHER; note = 2'-Omethylcytosine phosphorothiorate
  modified_base 10: mod_base = OTHER; note = 2'-fluorocytosine phosphorothiorate
  modified_base 14: mod_base = OTHER; note = Guanosine phosphorothiorate
  modified_base 20: mod_base = OTHER; note = 2'-fluoroadenosine
  modified_base 21: mod_base = OTHER; note = 2'-Omethylguanosine phosphorothiorate
  modified_base 25: mod_base = OTHER; note = 2'-fluoroadenosine
  modified_base 34: mod_base = OTHER; note = 2'-fluorouridine
  modified_base 35: mod_base = OTHER; note = 2'-fluoroadenosine
  modified_base 38: mod_base = OTHER; note = 2'-fluorouridine
  modified_base 40: mod_base = OTHER; note = 2'-fluorouridine
  modified_base 44: mod_base = OTHER; note = Guanosine phosphorothiorate
  modified_base 49: mod_base = OTHER; note = Adenosine phosphorothiorate
  modified_base 56: mod_base = OTHER; note = 2'-fluoroadenosine phosphorothiorate
  modified_base 60: mod_base = OTHER; note = 2'-Omethylcytosine phosphorothiorate
  modified_base 62: mod_base = OTHER; note = 2'-fluorocytosine
  modified_base 69: mod_base = OTHER; note = Guanosine phosphorothiorate
  modified_base 74: mod_base = OTHER; note = Cytosine phosphorothiorate
  modified_base 75: mod_base = OTHER; note = 2'-fluoroadenosine

SEQ ID NO: 3659 - RNA, 75 nt, synthetic construct; identical to SEQ ID NO: 3299
  source 1..75: mol_type = other RNA
  modified_base 1: mod_base = OTHER; note = 2'-Omethylcytosine phosphorothiorate
  modified_base 3: mod_base = OTHER; note = Uridine phosphorothiorate
  modified_base 10: mod_base = OTHER; note = Cytosine phosphorothiorate
  modified_base 11: mod_base = OTHER; note = Uridine phosphorothiorate
  modified_base 13: mod_base = OTHER; note = Adenosine phosphorothiorate
  modified_base 16: mod_base = OTHER; note = 2'-Omethylcytosine
  modified_base 19: mod_base = OTHER; note = 2'-fluorouridine
  modified_base 20: mod_base = OTHER; note = 2'-fluoroadenosine phosphorothiorate
  modified_base 21: mod_base = OTHER; note = 2'-fluoroguanosine
  modified_base 25: mod_base = OTHER; note = Adenosine phosphorothiorate
  modified_base 26: mod_base = OTHER; note = Uridine phosphorothiorate
  modified_base 37: mod_base = OTHER; note = 2'-fluoroadenosine
  modified_base 40: mod_base = OTHER; note = 2'-fluorouridine
  modified_base 44: mod_base = OTHER; note = 2'-fluoroguanosine phosphorothiorate
  modified_base 47: mod_base = OTHER; note = 2'-Omethylcytosine phosphorothiorate
  modified_base 52: mod_base = OTHER; note = Guanosine phosphorothiorate
  modified_base 53: mod_base = OTHER; note = 2'-fluorouridine phosphorothiorate
  modified_base 61: mod_base = OTHER; note = 2'-fluorocytosine
  modified_base 62: mod_base = OTHER; note = 2'-fluorocytosine
  modified_base 73: mod_base = OTHER; note = Cytosine phosphorothiorate
  modified_base 74: mod_base = OTHER; note = 2'-Omethylcytosine

SEQ ID NO: 3660 - RNA, 86 nt, synthetic construct; identical to SEQ ID NO: 3290
  source 1..86: mol_type = other RNA
  modified_base 1: mod_base = OTHER; note = 2'-Omethyladenosine
  modified_base 2: mod_base = OTHER; note = 2'-Omethylcytosine
  modified_base 3: mod_base = OTHER; note = 2'-Omethylcytosine
  modified_base 4: mod_base = OTHER; note = 2'-Omethyladenosine
  modified_base 5: mod_base = OTHER; note = 2'-Omethylguanosine
  modified_base 6: mod_base = OTHER; note = 2'-Omethylguanosine
  modified_base 14: mod_base = OTHER; note = 2'-Omethyladenosine
  modified_base 15: mod_base = OTHER; note = 2'-fluoroguanosine
  modified_base 16: mod_base = OTHER; note = 2'-Omethyluridine
  modified_base 17: mod_base = OTHER; note = 2'-Omethylguanosine
  modified_base 18: mod_base = OTHER; note = 2'-Omethylguanosine
  modified_base 20: mod_base = OTHER; note = 2'-Omethyluridine
  modified_base 25: mod_base = OTHER; note = 2'-Omethylcytosine
  modified_base 33: mod_base = OTHER; note = 2'-fluorouridine
  modified_base 35: mod_base = OTHER; note = Cytosine phosphorothiorate
  modified_base 37: mod_base = OTHER; note = Guanosine phosphorothiorate
  modified_base 38: mod_base = OTHER; note = Adenosine phosphorothiorate
  modified_base 41: mod_base = OTHER; note = 2'-Omethylcytosine
  modified_base 42: mod_base = OTHER; note = 2'-Omethyladenosine
  modified_base 43: mod_base = OTHER; note = 2'-Omethyladenosine
  modified_base 44: mod_base = OTHER; note = 2'-Omethyluridine
  modified_base 59: mod_base = OTHER; note = 2'-Omethylguanosine
  modified_base 60: mod_base = OTHER; note = 2'-Omethyluridine
  modified_base 62: mod_base = OTHER; note = 2'-Omethylguanosine
  modified_base 64: mod_base = OTHER; note = 2'-Omethyluridine
  modified_base 65: mod_base = OTHER; note = Uridine phosphorothiorate
  modified_base 66: mod_base = OTHER; note = 2'-Omethylcytosine
  modified_base 67: mod_base = OTHER; note = 2'-fluoroguanosine
  modified_base 69: mod_base = OTHER; note = 2'-Omethyladenosine
  modified_base 71: mod_base = OTHER; note = 2'-Omethylcytosine
  modified_base 75: mod_base = OTHER; note = 2'-Omethylcytosine
  modified_base 83: mod_base = OTHER; note = 2'-Omethyladenosine

SEQ ID NO: 3661 - RNA, 86 nt, synthetic construct; identical to SEQ ID NO: 3290
  source 1..86: mol_type = other RNA
  modified_base 1: mod_base = OTHER; note = 2'-Omethyladenosine phosphorothiorate
  modified_base 2: mod_base = OTHER; note = 2'-Omethylcytosine phosphorothiorate
  modified_base 3: mod_base = OTHER; note = 2'-Omethylcytosine
  modified_base 4: mod_base = OTHER; note = 2'-Omethyladenosine
  modified_base 5: mod_base = OTHER; note = 2'-Omethylguanosine
  modified_base 6: mod_base = OTHER; note = 2'-Omethylguanosine
  modified_base 16: mod_base = OTHER; note = 2'-Omethyluridine
  modified_base 17: mod_base = OTHER; note = 2'-Omethylguanosine
  modified_base 18: mod_base = OTHER; note = 2'-Omethylguanosine
  modified_base 33: mod_base = OTHER; note = 2'-fluorouridine
  modified_base 35: mod_base = OTHER; note = Cytosine phosphorothiorate
  modified_base 37: mod_base = OTHER; note = Guanosine phosphorothiorate
  modified_base 38: mod_base = OTHER; note = Adenosine phosphorothiorate
  modified_base 44: mod_base = OTHER; note = 2'-Omethyluridine
  modified_base 57: mod_base = OTHER; note = 2'-fluoroguanosine
  modified_base 58: mod_base = OTHER; note = 2'-fluorocytosine
  modified_base 62: mod_base = OTHER; note = 2'-Omethylguanosine
  modified_base 63: mod_base = OTHER; note = 2'-Omethylguanosine
  modified_base 64: mod_base = OTHER; note = 2'-Omethyluridine
  modified_base 66: mod_base = OTHER; note = 2'-Omethylcytosine
  modified_base 69: mod_base = OTHER; note = 2'-Omethyladenosine
  modified_base 71: mod_base = OTHER; note = 2'-Omethylcytosine
  modified_base 72: mod_base = OTHER; note = 2'-Omethylcytosine
  modified_base 73: mod_base = OTHER; note = 2'-fluorocytosine
  modified_base 74: mod_base = OTHER; note = 2'-Omethyladenosine
  modified_base 75: mod_base = OTHER; note = 2'-Omethylcytosine
  modified_base 76: mod_base = OTHER; note = 2'-Omethyluridine
  modified_base 77: mod_base = OTHER; note = 2'-Omethylcytosine
  modified_base 78: mod_base = OTHER; note = 2'-Omethylcytosine
  modified_base 83: mod_base = OTHER; note = 2'-Omethyladenosine

SEQ ID NO: 3662 - RNA, 85 nt, synthetic construct; identical to SEQ ID NO: 3301
  source 1..85: mol_type = other RNA
  modified_base 1: mod_base = OTHER; note = 2'-Omethylguanosine phosphorothiorate
  modified_base 2: mod_base = OTHER; note = Cytosine phosphorothiorate
  modified_base 4: mod_base = OTHER; note = 2'-Omethylguanosine phosphorothiorate
  modified_base 9: mod_base = OTHER; note = Guanosine phosphorothiorate
  modified_base 15: mod_base = OTHER; note = 2'-fluoroguanosine
  modified_base 26: mod_base = OTHER; note = Guanosine phosphorothiorate
  modified_base 30: mod_base = OTHER; note = 2'-Omethylguanosine
  modified_base 31: mod_base = OTHER; note = 2'-fluoroadenosine
  modified_base 37: mod_base = OTHER; note = 2'-fluoroadenosine
  modified_base 44: mod_base = OTHER; note = 2'-Omethyluridine phosphorothiorate
  modified_base 58: mod_base = OTHER; note = 2'-fluoroguanosine phosphorothiorate
  modified_base 59: mod_base = OTHER; note = 2'-fluorocytosine phosphorothiorate
  modified_base 62: mod_base = OTHER; note = Guanosine phosphorothiorate
  modified_base 82: mod_base = OTHER; note = 2'-Omethylguanosine
  modified_base 84: mod_base = OTHER; note = Cytosine phosphorothiorate

SEQ ID NO: 3663 - RNA, 75 nt, synthetic construct; identical to SEQ ID NO: 3311
  source 1..75: mol_type = other RNA
  modified_base 1: mod_base = OTHER; note = 2'-fluoroguanosine
  modified_base 3: mod_base = OTHER; note = Uridine phosphorothiorate
  modified_base 8: mod_base = OTHER; note = Uridine phosphorothiorate
  modified_base 14: mod_base = OTHER; note = 2'-fluoroadenosine
  modified_base 15: mod_base = OTHER; note = Adenosine phosphorothiorate
  modified_base 21: mod_base = OTHER; note = Adenosine phosphorothiorate
  modified_base 22: mod_base = OTHER; note = 2'-fluoroguanosine
  modified_base 23: mod_base = OTHER; note = 2'-fluorocytosine
  modified_base 27: mod_base = OTHER; note = 2'-fluorocytosine
  modified_base 38: mod_base = OTHER; note = 2'-fluoroadenosine phosphorothiorate
  modified_base 39: mod_base = OTHER; note = Uridine phosphorothiorate
  modified_base 42: mod_base = OTHER; note = 2'-fluoroadenosine
  modified_base 43: mod_base = OTHER; note = 2'-Omethylguanosine
  modified_base 57: mod_base = OTHER; note = 2'-Omethyladenosine
  modified_base 58: mod_base = OTHER; note = 2'-Omethylguanosine
  modified_base 62: mod_base = OTHER; note = 2'-fluorocytosine
  modified_base 65: mod_base = OTHER; note = Uridine phosphorothiorate
  modified_base 67: mod_base = OTHER; note = Guanosine phosphorothiorate
  modified_base 68: mod_base = OTHER; note = Adenosine phosphorothiorate
  modified_base 74: mod_base = OTHER; note = Cytosine phosphorothiorate

SEQ ID NO: 3664 - RNA, 76 nt, synthetic construct; identical to SEQ ID NO: 3295
  source 1..76: mol_type = other RNA
  modified_base 1: mod_base = OTHER; note = 2'-Omethylcytosine
  modified_base 2: mod_base = OTHER; note = 2'-fluorocytosine
  modified_base 11: mod_base = OTHER; note = 2'-Omethylcytosine
  modified_base 48: mod_base = OTHER; note = 2'-Omethylcytosine
  modified_base 51: mod_base = OTHER; note = 2'-fluorouridine
  modified_base 60: mod_base = OTHER; note = Uridine phosphorothiorate
  modified_base 69: mod_base = OTHER; note = 2'-fluoroadenosine
  modified_base 76: mod_base = OTHER; note = 2'-fluoroadenosine

SEQ ID NO: 3665 - RNA, 76 nt, synthetic construct
  source 1..76: mol_type = other RNA
ggcacgttggcgcaatggatagcgcattggacttcaaattcaaaggttacgggttcgagtcccgtacgtgtcgcca

SEQ ID NO: 3666 - RNA, 85 nt, synthetic construct; identical to SEQ ID NO: 3288
  source 1..85: mol_type = other RNA
  modified_base 1: mod_base = OTHER; note = 2'-Omethylcytosine
  modified_base 5: mod_base = OTHER; note = Guanosine phosphorothiorate
  modified_base 12: mod_base = OTHER; note = 2'-fluoroguanosine phosphorothiorate
  modified_base 16: mod_base = OTHER; note = 2'-Omethylguanosine
  modified_base 25: mod_base = OTHER; note = 2'-fluoroguanosine
  modified_base 26: mod_base = OTHER; note = Uridine phosphorothiorate
  modified_base 33: mod_base = OTHER; note = 2'-fluorouridine
  modified_base 34: mod_base = OTHER; note = Cytosine phosphorothiorate
  modified_base 40: mod_base = OTHER; note = Cytosine phosphorothiorate
  modified_base 51: mod_base = OTHER; note = 2'-Omethyluridine
  modified_base 54: mod_base = OTHER; note = 2'-Omethylcytosine
  modified_base 58: mod_base = OTHER; note = Guanosine phosphorothiorate
  modified_base 69: mod_base = OTHER; note = 2'-fluorocytosine phosphorothiorate
  modified_base 76: mod_base = OTHER; note = Cytosine phosphorothiorate
  modified_base 84: mod_base = OTHER; note = 2'-Omethylcytosine

SEQ ID NO: 3667 - RNA, 85 nt, synthetic construct; identical to SEQ ID NO: 3288
  source 1..85: mol_type = other RNA
  modified_base 1: mod_base = OTHER; note = 2'-Omethylcytosine
  modified_base 12: mod_base = OTHER; note = Guanosine phosphorothiorate
  modified_base 15: mod_base = OTHER; note = Uridine phosphorothiorate
  modified_base 26: mod_base = OTHER; note = 2'-Omethyluridine
  modified_base 30: mod_base = OTHER; note = 2'-fluoroadenosine
  modified_base 34: mod_base = OTHER; note = 2'-fluorocytosine
  modified_base 51: mod_base = OTHER; note = 2'-Omethyluridine
  modified_base 57: mod_base = OTHER; note = 2'-Omethylcytosine
  modified_base 60: mod_base = OTHER; note = Guanosine phosphorothiorate
  modified_base 73: mod_base = OTHER; note = Adenosine phosphorothiorate
  modified_base 83: mod_base = OTHER; note = Cytosine phosphorothiorate
  modified_base 84: mod_base = OTHER; note = 2'-Omethylcytosine

SEQ ID NO: 3668 - RNA, 75 nt, synthetic construct; identical to SEQ ID NO: 1045
  source 1..75: mol_type = other RNA
  modified_base 1: mod_base = OTHER; note = Guanosine phosphorothiorate
  modified_base 2: mod_base = OTHER; note = 2'-Omethylguanosine phosphorothiorate
  modified_base 12: mod_base = OTHER; note = Guanosine phosphorothiorate
  modified_base 13: mod_base = OTHER; note = 2'-fluorouridine phosphorothiorate
  modified_base 21: mod_base = OTHER; note = 2'-fluoroadenosine
  modified_base 22: mod_base = OTHER; note = Guanosine phosphorothiorate
  modified_base 39: mod_base = OTHER; note = 2'-fluorouridine
  modified_base 40: mod_base = OTHER; note = 2'-Omethylcytosine
  modified_base 48: mod_base = OTHER; note = 2'-fluorocytosine
  modified_base 57: mod_base = OTHER; note = Adenosine phosphorothiorate
  modified_base 58: mod_base = OTHER; note = 2'-fluoroguanosine
  modified_base 63: mod_base = OTHER; note = Guanosine phosphorothiorate
  modified_base 68: mod_base = OTHER; note = Adenosine phosphorothiorate
  modified_base 69: mod_base = OTHER; note = 2'-fluoroadenosine
  modified_base 73: mod_base = OTHER; note = Cytosine phosphorothiorate
  modified_base 74: mod_base = OTHER; note = 2'-Omethylcytosine

SEQ ID NO: 3669 - RNA, 76 nt, synthetic construct; identical to SEQ ID NO: 3295
  source 1..76: mol_type = other RNA
  modified_base 1: mod_base = OTHER; note = 2'-Omethylcytosine
  modified_base 2: mod_base = OTHER; note = 2'-Omethylcytosine
  modified_base 4: mod_base = OTHER; note = 2'-fluorouridine
  modified_base 8: mod_base = OTHER; note = 2'-Omethyluridine
  modified_base 26: mod_base = OTHER; note = Guanosine phosphorothiorate
  modified_base 37: mod_base = OTHER; note = 2'-fluoroguanosine
  modified_base 45: mod_base = OTHER; note = 2'-Omethylguanosine
  modified_base 52: mod_base = OTHER; note = 2'-Omethylguanosine
  modified_base 54: mod_base = OTHER; note = Uridine phosphorothiorate
  modified_base 76: mod_base = OTHER; note = 2'-fluoroadenosine

SEQ ID NO: 3670 - RNA, 76 nt, synthetic construct; identical to SEQ ID NO: 625
  source 1..76: mol_type = other RNA
  modified_base 1: mod_base = OTHER; note = Guanosine phosphorothiorate
  modified_base 2: mod_base = OTHER; note = 2'-Omethylguanosine
  modified_base 3: mod_base = OTHER; note = 2'-fluorocytosine
  modified_base 5: mod_base = OTHER; note = 2'-Omethylcytosine
  modified_base 6: mod_base = OTHER; note = 2'-Omethylcytosine
  modified_base 10: mod_base = OTHER; note = 2'-fluoroguanosine
  modified_base 12: mod_base = OTHER; note = 2'-fluoroguanosine phosphorothiorate
  modified_base 13: mod_base = OTHER; note = 2'-Omethylcytosine
  modified_base 15: mod_base = OTHER; note = 2'-fluoroadenosine
  modified_base 20: mod_base = OTHER; note = 2'-fluorouridine
  modified_base 22: mod_base = OTHER; note = 2'-Omethylguanosine
  modified_base 23: mod_base = OTHER; note = 2'-fluorocytosine
  modified_base 24: mod_base = OTHER; note = 2'-Omethylguanosine
  modified_base 25: mod_base = OTHER; note = 2'-fluorocytosine
  modified_base 30: mod_base = OTHER; note = 2'-Omethylguanosine
  modified_base 36: mod_base = OTHER; note = Adenosine phosphorothiorate
  modified_base 38: mod_base = OTHER; note = 2'-Omethyladenosine phosphorothiorate
  modified_base 39: mod_base = OTHER; note = 2'-fluorouridine
  modified_base 41: mod_base = OTHER; note = 2'-fluorocytosine
  modified_base 42: mod_base = OTHER; note = 2'-fluoroadenosine phosphorothiorate
  modified_base 45: mod_base = OTHER; note = 2'-Omethylguanosine
  modified_base 49: mod_base = OTHER; note = 2'-fluorocytosine
  modified_base 52: mod_base = OTHER; note = 2'-fluoroguanosine
  modified_base 53: mod_base = OTHER; note = 2'-fluoroguanosine
  modified_base 55: mod_base = OTHER; note = Uridine phosphorothiorate
  modified_base 56: mod_base = OTHER; note = 2'-Omethylcytosine
  modified_base 57: mod_base = OTHER; note = Guanosine phosphorothiorate
  modified_base 58: mod_base = OTHER; note = 2'-fluoroadenosine
  modified_base 61: mod_base = OTHER; note = 2'-Omethylcytosine
  modified_base 62: mod_base = OTHER; note = 2'-fluorocytosine
  modified_base 66: mod_base = OTHER; note = 2'-fluorocytosine
  modified_base 67: mod_base = OTHER; note = Guanosine phosphorothiorate
  modified_base 68: mod_base = OTHER; note = 2'-Omethylguanosine phosphorothiorate
  modified_base 69: mod_base = OTHER; note = 2'-Omethyladenosine phosphorothiorate
  modified_base 73: mod_base = OTHER; note = 2'-Omethylguanosine
  modified_base 74: mod_base = OTHER; note = 2'-Omethylcytosine phosphorothiorate
  modified_base 75: mod_base = OTHER; note = 2'-Omethylcytosine

SEQ ID NO: 3671 - RNA, 76 nt, synthetic construct; identical to SEQ ID NO: 625
  source 1..76: mol_type = other RNA
  modified_base 1: mod_base = OTHER; note = 2'-Omethylguanosine
  modified_base 2: mod_base = OTHER; note = 2'-Omethylguanosine
  modified_base 10: mod_base = OTHER; note = 2'-Omethylguanosine
  modified_base 13: mod_base = OTHER; note = 2'-Omethylcytosine
  modified_base 17: mod_base = OTHER; note = Guanosine phosphorothiorate
  modified_base 18: mod_base = OTHER; note = 2'-Omethylguanosine
  modified_base 19: mod_base = OTHER; note = Adenosine phosphorothiorate
  modified_base 20: mod_base = OTHER; note = 2'-Omethyluridine
  modified_base 25: mod_base = OTHER; note = 2'-Omethylcytosine
  modified_base 29: mod_base = OTHER; note = 2'-Omethylguanosine
  modified_base 33: mod_base = OTHER; note = 2'-fluorouridine
  modified_base 35: mod_base = OTHER; note = Cytosine phosphorothiorate
  modified_base 37: mod_base = OTHER; note = Adenosine phosphorothiorate
  modified_base 38: mod_base = OTHER; note = Adenosine phosphorothiorate
  modified_base 41: mod_base = OTHER; note = 2'-fluorocytosine phosphorothiorate
  modified_base 43: mod_base = OTHER; note = 2'-Omethyladenosine
  modified_base 44: mod_base = OTHER; note = 2'-fluoroadenosine
  modified_base 46: mod_base = OTHER; note = Guanosine phosphorothiorate
  modified_base 50: mod_base = OTHER; note = 2'-Omethylcytosine
  modified_base 52: mod_base = OTHER; note = 2'-Omethylguanosine
  modified_base 54: mod_base = OTHER; note = Uridine phosphorothiorate
  modified_base 55: mod_base = OTHER; note = Uridine phosphorothiorate
  modified_base 56: mod_base = OTHER; note = 2'-Omethylcytosine
  modified_base 57: mod_base = OTHER; note = Guanosine phosphorothiorate
  modified_base 62: mod_base = OTHER; note = 2'-Omethylcytosine
  modified_base 63: mod_base = OTHER; note = 2'-fluorocytosine
  modified_base 65: mod_base = OTHER; note = 2'-Omethylguanosine
  modified_base 73: mod_base = OTHER; note = 2'-Omethylguanosine

SEQ ID NO: 3672 - RNA, 76 nt, synthetic construct; identical to SEQ ID NO: 3316
  source 1..76: mol_type = other RNA
  modified_base 1: mod_base = OTHER; note = 2'-Omethyladenosine
  modified_base 2: mod_base = OTHER; note = 2'-Omethylcytosine
  modified_base 3: mod_base = OTHER; note = 2'-Omethylcytosine
  modified_base 4: mod_base = OTHER; note = 2'-Omethyladenosine
  modified_base 5: mod_base = OTHER; note = 2'-Omethyladenosine
  modified_base 6: mod_base = OTHER; note = 2'-Omethylcytosine
  modified_base 14: mod_base = OTHER; note = 2'-Omethyladenosine
  modified_base 15: mod_base = OTHER; note = 2'-Omethyladenosine
  modified_base 16: mod_base = OTHER; note = 2'-Omethyluridine
  modified_base 17: mod_base = OTHER; note = 2'-Omethylguanosine
  modified_base 18: mod_base = OTHER; note = 2'-Omethylguanosine
  modified_base 20: mod_base = OTHER; note = 2'-Omethyluridine
  modified_base 25: mod_base = OTHER; note = 2'-Omethylcytosine
  modified_base 41: mod_base = OTHER; note = 2'-Omethylcytosine
  modified_base 42: mod_base = OTHER; note = 2'-Omethyladenosine
  modified_base 43: mod_base = OTHER; note = 2'-Omethyladenosine
  modified_base 44: mod_base = OTHER; note = 2'-Omethyladenosine
  modified_base 49: mod_base = OTHER; note = 2'-Omethylcytosine
  modified_base 50: mod_base = OTHER; note = 2'-Omethylcytosine
  modified_base 52: mod_base = OTHER; note = 2'-Omethylguanosine
  modified_base 54: mod_base = OTHER; note = 2'-Omethyluridine
  modified_base 55: mod_base = OTHER; note = Uridine phosphorothiorate
  modified_base 56: mod_base = OTHER; note = 2'-Omethylcytosine
  modified_base 57: mod_base = OTHER; note = 2'-fluoroguanosine
  modified_base 59: mod_base = OTHER; note = 2'-Omethylguanosine
  modified_base 61: mod_base = OTHER; note = 2'-Omethylcytosine
  modified_base 65: mod_base = OTHER; note = 2'-Omethylguanosine
  modified_base 73: mod_base = OTHER; note = 2'-Omethylguanosine

SEQ ID NO: 3673 - RNA, 73 nt, synthetic construct; identical to SEQ ID NO: 935
  source 1..73: mol_type = other RNA
  modified_base 1: mod_base = OTHER; note = 2'-Omethylguanosine
  modified_base 49: mod_base = OTHER; note = 2'-Omethylcytosine
  modified_base 73: mod_base = OTHER; note = 2'-Omethylguanosine

SEQ ID NO: 3674 - RNA, 86 nt, synthetic construct; identical to SEQ ID NO: 3290
  source 1..86: mol_type = other RNA
  modified_base 1: mod_base = OTHER; note = 2'-Omethyladenosine
  modified_base 75: mod_base = OTHER; note = 2'-Omethylcytosine

SEQ ID NO: 3675 - RNA, 76 nt, synthetic construct
  source 1..76: mol_type = other RNA
  modified_base 1: mod_base = OTHER; note = 2'-Omethylguanosine phosphorothiorate
  modified_base 2: mod_base = OTHER; note = 2'-Omethylcytosine phosphorothiorate
  modified_base 3: mod_base = OTHER; note = 2'-Omethylcytosine
  modified_base 4: mod_base = OTHER; note = 2'-Omethyluridine
  modified_base 5: mod_base = OTHER; note = 2'-Omethylcytosine
  modified_base 6: mod_base = OTHER; note = 2'-Omethylcytosine
  modified_base 16: mod_base = OTHER; note = 2'-Omethyluridine
  modified_base 17: mod_base = OTHER; note = 2'-Omethylguanosine
  modified_base 18: mod_base = OTHER; note = 2'-Omethylguanosine
  modified_base 20: mod_base = OTHER; note = 2'-Omethyluridine
  modified_base 25: mod_base = OTHER; note = 2'-Omethylcytosine
  modified_base 33: mod_base = OTHER; note = 2'-fluorouridine
  modified_base 35: mod_base = OTHER; note = Cytosine phosphorothiorate
  modified_base 37: mod_base = OTHER; note = Adenosine phosphorothiorate
  modified_base 38: mod_base = OTHER; note = Adenosine phosphorothiorate
  modified_base 41: mod_base = OTHER; note = 2'-Omethylcytosine
  modified_base 44: mod_base = OTHER; note = 2'-Omethyladenosine
  modified_base 45: mod_base = OTHER; note = 2'-Omethylguanosine
  modified_base 46: mod_base = OTHER; note = 2'-fluoroguanosine
  modified_base 47: mod_base = OTHER; note = 2'-fluorouridine
  modified_base 48: mod_base = OTHER; note = 2'-fluorouridine
  modified_base 56: mod_base = OTHER; note = 2'-Omethylcytosine
  modified_base 59: mod_base = OTHER; note = 2'-Omethylguanosine
  modified_base 73: mod_base = OTHER; note = 2'-Omethylguanosine
gcctccgtggcgcaatggatagcgcagtggacttcaaattcacaggttccgggttcgagtcccggcggaggcgcca

SEQ ID NO: 3676 - RNA, 75 nt, synthetic construct; identical to SEQ ID NO: 3311
  source 1..75: mol_type = other RNA
  modified_base 1: mod_base = OTHER; note = 2'-Omethylguanosine phosphorothiorate
  modified_base 2: mod_base = OTHER; note = 2'-Omethylguanosine phosphorothiorate
  modified_base 11: mod_base = OTHER; note = 2'-fluorouridine
  modified_base 12: mod_base = OTHER; note = Guanosine phosphorothiorate
  modified_base 15: mod_base = OTHER; note = 2'-fluoroadenosine
  modified_base 19: mod_base = OTHER; note = 2'-fluorouridine
  modified_base 23: mod_base = OTHER; note = 2'-fluorocytosine
  modified_base 39: mod_base = OTHER; note = 2'-fluorouridine
  modified_base 42: mod_base = OTHER; note = 2'-fluoroadenosine
  modified_base 59: mod_base = OTHER; note = Uridine phosphorothiorate
  modified_base 60: mod_base = OTHER; note = 2'-fluorocytosine
  modified_base 61: mod_base = OTHER; note = 2'-fluorouridine
  modified_base 68: mod_base = OTHER; note = 2'-fluoroadenosine
  modified_base 73: mod_base = OTHER; note = Cytosine phosphorothiorate
  modified_base 74: mod_base = OTHER; note = 2'-fluorocytosine phosphorothiorate
  modified_base 75: mod_base = OTHER; note = 2'-fluoroadenosine

SEQ ID NO: 3677 - RNA, 85 nt, synthetic construct; identical to SEQ ID NO: 3310
  source 1..85: mol_type = other RNA
  modified_base 10: mod_base = OTHER; note = Cytosine phosphorothiorate
  modified_base 30: mod_base = OTHER; note = 2'-fluoroadenosine
  modified_base 54: mod_base = OTHER; note = 2'-Omethylcytosine
  modified_base 64: mod_base = OTHER; note = 2'-fluorouridine
  modified_base 85: mod_base = OTHER; note = 2'-fluoroadenosine

SEQ ID NO: 3678 - RNA, 86 nt, synthetic construct
  source 1..86: mol_type = other RNA
ggtggtgtggccgagcggtctaaggcggcagacttcagatctgttatcgggagatatcgtgggttcgaatcccatcgccaccacca

SEQ ID NO: 3679 - RNA, 76 nt, synthetic construct
  source 1..76: mol_type = other RNA
ggctacgtggcgcaatggatagcgcattggacttcaaattcaaaggttgtgggttcgagtcccaccgtagtcgcca

SEQ ID NO: 3680 - RNA, 86 nt, synthetic construct; identical to SEQ ID NO: 3290
  source 1..86: mol_type = other RNA
  modified_base 1: mod_base = OTHER; note = 2'-Omethyladenosine
  modified_base 13: mod_base = OTHER; note = 2'-Omethylguanosine

SEQ ID NO: 3681 - RNA, 76 nt, synthetic construct; identical to SEQ ID NO: 3318
  source 1..76: mol_type = other RNA
  modified_base 1: mod_base = OTHER; note = 2'-Omethylcytosine
  modified_base 16: mod_base = OTHER; note = 2'-Omethyluridine
  modified_base 18: mod_base = OTHER; note = 2'-Omethylguanosine
  modified_base 19: mod_base = OTHER; note = 2'-Omethylguanosine
  modified_base 54: mod_base = OTHER; note = 2'-Omethyluridine phosphorothiorate
  modified_base 56: mod_base = OTHER; note = 2'-Omethylcytosine
  modified_base 59: mod_base = OTHER; note = 2'-Omethyladenosine
  modified_base 73: mod_base = OTHER; note = 2'-Omethyladenosine

SEQ ID NO: 3682 - RNA, 75 nt, synthetic construct; identical to SEQ ID NO: 1045
  source 1..75: mol_type = other RNA
  modified_base 2: mod_base = OTHER; note = 2'-Omethylguanosine phosphorothiorate
  modified_base 7: mod_base = OTHER; note = Adenosine phosphorothiorate
  modified_base 12: mod_base = OTHER; note = 2'-Omethylguanosine
  modified_base 15: mod_base = OTHER; note = 2'-fluoroadenosine
  modified_base 16: mod_base = OTHER; note = 2'-Omethyluridine phosphorothiorate
  modified_base 18: mod_base = OTHER; note = 2'-Omethylguanosine phosphorothiorate
  modified_base 28: mod_base = OTHER; note = Uridine phosphorothiorate
  modified_base 43: mod_base = OTHER; note = 2'-Omethylguanosine
  modified_base 47: mod_base = OTHER; note = 2'-Omethyluridine phosphorothiorate
  modified_base 48: mod_base = OTHER; note = 2'-Omethylcytosine
  modified_base 53: mod_base = OTHER; note = Uridine phosphorothiorate
  modified_base 59: mod_base = OTHER; note = 2'-Omethyluridine
  modified_base 67: mod_base = OTHER; note = 2'-Omethylguanosine
  modified_base 72: mod_base = OTHER; note = 2'-Omethyluridine
  modified_base 73: mod_base = OTHER; note = 2'-Omethylcytosine phosphorothiorate
  modified_base 74: mod_base = OTHER; note = 2'-Omethylcytosine phosphorothiorate

SEQ ID NO: 3683 - RNA, 75 nt, synthetic construct; identical to SEQ ID NO: 3336
  source 1..75: mol_type = other RNA
  modified_base 6: mod_base = OTHER; note = 2'-Omethylguanosine
  modified_base 11: mod_base = OTHER; note = 2'-fluorouridine phosphorothiorate
  modified_base 22: mod_base = OTHER; note = 2'-fluoroadenosine
  modified_base 25: mod_base = OTHER; note = 2'-fluoroadenosine
  modified_base 26: mod_base = OTHER; note = 2'-fluorouridine
  modified_base 61: mod_base = OTHER; note = Cytosine phosphorothiorate
  modified_base 73: mod_base = OTHER; note = Cytosine phosphorothiorate

SEQ ID NO: 3684 - RNA, 76 nt, synthetic construct; identical to SEQ ID NO: 625
  source 1..76: mol_type = other RNA
  modified_base 1: mod_base = OTHER; note = Guanosine phosphorothiorate
  modified_base 2: mod_base = OTHER; note = 2'-Omethylguanosine
  modified_base 5: mod_base = OTHER; note = 2'-Omethylcytosine
  modified_base 6: mod_base = OTHER; note = 2'-fluorocytosine phosphorothiorate
  modified_base 7: mod_base = OTHER; note = Guanosine phosphorothiorate
  modified_base 12: mod_base = OTHER; note = Guanosine phosphorothiorate
  modified_base 13: mod_base = OTHER; note = 2'-Omethylcytosine
  modified_base 15: mod_base = OTHER; note = 2'-fluoroadenosine
  modified_base 16: mod_base = OTHER; note = 2'-fluorouridine
  modified_base 21: mod_base = OTHER; note = Adenosine phosphorothiorate
  modified_base 22: mod_base = OTHER; note = Guanosine phosphorothiorate
  modified_base 24: mod_base = OTHER; note = 2'-fluoroguanosine
  modified_base 27: mod_base = OTHER; note = 2'-Omethyluridine
  modified_base 30: mod_base = OTHER; note = 2'-fluoroguanosine
  modified_base 33: mod_base = OTHER; note = 2'-fluorouridine
  modified_base 34: mod_base = OTHER; note = 2'-fluorouridine
  modified_base 39: mod_base = OTHER; note = Uridine phosphorothiorate
  modified_base 40: mod_base = OTHER; note = 2'-Omethyluridine phosphorothiorate
  modified_base 41: mod_base = OTHER; note = 2'-Omethylcytosine
  modified_base 42: mod_base = OTHER; note = 2'-Omethyladenosine
  modified_base 45: mod_base = OTHER; note = 2'-fluoroguanosine
  modified_base 47: mod_base = OTHER; note = 2'-Omethyluridine
  modified_base 49: mod_base = OTHER; note = 2'-fluorocytosine phosphorothiorate
  modified_base 50: mod_base = OTHER; note = Cytosine phosphorothiorate
  modified_base 52: mod_base = OTHER; note = 2'-Omethylguanosine
  modified_base 58: mod_base = OTHER; note = 2'-fluoroadenosine phosphorothiorate
  modified_base 59: mod_base = OTHER; note = 2'-fluoroguanosine
  modified_base 60: mod_base = OTHER; note = 2'-fluorouridine
  modified_base 61: mod_base = OTHER; note = 2'-fluorocytosine
  modified_base 66: mod_base = OTHER; note = 2'-fluorocytosine
  modified_base 69: mod_base = OTHER; note = 2'-Omethyladenosine phosphorothiorate
  modified_base 70: mod_base = OTHER; note = 2'-fluoroguanosine
  modified_base 71: mod_base = OTHER; note = 2'-fluorouridine
  modified_base 73: mod_base = OTHER; note = 2'-fluoroguanosine

SEQ ID NO: 3685 - RNA, 76 nt, synthetic construct
  source 1..76: mol_type = other RNA
gtctatgtggcgcaatggatagcgcattggacttcaaattcaaaggttccgggttcgagtcccggcatagacgcca

SEQ ID NO: 3686 - RNA, 76 nt, synthetic construct; identical to SEQ ID NO: 3318
  source 1..76: mol_type = other RNA
  modified_base 1: mod_base = OTHER; note = 2'-Omethylcytosine phosphorothiorate
  modified_base 2: mod_base = OTHER; note = 2'-Omethylcytosine phosphorothiorate
  modified_base 3: mod_base = OTHER; note = 2'-Omethyluridine
  modified_base 4: mod_base = OTHER; note = 2'-Omethyluridine
  modified_base 5: mod_base = OTHER; note = 2'-Omethylcytosine
  modified_base 6: mod_base = OTHER; note = 2'-Omethylguanosine
  modified_base 16: mod_base = OTHER; note = 2'-Omethyluridine
  modified_base 18: mod_base = OTHER; note = 2'-Omethylguanosine
  modified_base 19: mod_base = OTHER; note = 2'-Omethylguanosine
  modified_base 22: mod_base = OTHER; note = 2'-Omethylguanosine
  modified_base 24: mod_base = OTHER; note = 2'-Omethylguanosine
  modified_base 25: mod_base = OTHER; note = 2'-Omethylcytosine
  modified_base 27: mod_base = OTHER; note = 2'-Omethylguanosine
  modified_base 33: mod_base = OTHER; note = 2'-fluorouridine
  modified_base 35: mod_base = OTHER; note = Uridine phosphorothiorate
  modified_base 37: mod_base = OTHER; note = Guanosine phosphorothiorate
  modified_base 38: mod_base = OTHER; note = Adenosine phosphorothiorate
  modified_base 44: mod_base = OTHER; note = 2'-Omethyladenosine
  modified_base 45: mod_base = OTHER; note = 2'-Omethylguanosine
  modified_base 46: mod_base = OTHER; note = 2'-fluoroguanosine
  modified_base 47: mod_base = OTHER; note = 2'-fluorouridine
  modified_base 48: mod_base = OTHER; note = 2'-fluorocytosine
  modified_base 49: mod_base = OTHER; note = 2'-Omethylguanosine
  modified_base 50: mod_base = OTHER; note = 2'-Omethylcytosine
  modified_base 51: mod_base = OTHER; note = 2'-Omethyluridine
  modified_base 52: mod_base = OTHER; note = 2'-Omethylguanosine
  modified_base 53: mod_base = OTHER; note = 2'-Omethylguanosine
  modified_base 54: mod_base = OTHER; note = 2'-Omethyluridine
  modified_base 56: mod_base = OTHER; note = 2'-Omethylcytosine
  modified_base 59: mod_base = OTHER; note = 2'-Omethyladenosine
  modified_base 61: mod_base = OTHER; note = 2'-Omethylcytosine
  modified_base 62: mod_base = OTHER; note = 2'-Omethylcytosine
  modified_base 63: mod_base = OTHER; note = 2'-fluoroguanosine
  modified_base 64: mod_base = OTHER; note = 2'-Omethylguanosine
  modified_base 65: mod_base = OTHER; note = 2'-Omethylcytosine
  modified_base 66: mod_base = OTHER; note = 2'-Omethyluridine
  modified_base 67: mod_base = OTHER; note = 2'-Omethylcytosine
  modified_base 68: mod_base = OTHER; note = 2'-Omethylguanosine
  modified_base 73: mod_base = OTHER; note = 2'-Omethyladenosine

SEQ ID NO: 3687 - RNA, 76 nt, synthetic construct; identical to SEQ ID NO: 625
  source 1..76: mol_type = other RNA
  modified_base 1: mod_base = OTHER; note = 2'-Omethylguanosine
  modified_base 10: mod_base = OTHER; note = 2'-Omethylguanosine
  modified_base 13: mod_base = OTHER; note = 2'-Omethylcytosine
  modified_base 17: mod_base = OTHER; note = 2'-Omethylguanosine phosphorothiorate
  modified_base 18: mod_base = OTHER; note = 2'-Omethylguanosine
  modified_base 19: mod_base = OTHER; note = Adenosine phosphorothiorate
  modified_base 20: mod_base = OTHER; note = 2'-Omethyluridine
  modified_base 25: mod_base = OTHER; note = 2'-Omethylcytosine
  modified_base 29: mod_base = OTHER; note = 2'-Omethylguanosine
  modified_base 33: mod_base = OTHER; note = 2'-fluorouridine
  modified_base 35: mod_base = OTHER; note = Cytosine phosphorothiorate
  modified_base 37: mod_base = OTHER; note = Adenosine phosphorothiorate
  modified_base 38: mod_base = OTHER; note = Adenosine phosphorothiorate
  modified_base 41: mod_base = OTHER; note = 2'-fluorocytosine
  modified_base 43: mod_base = OTHER; note = 2'-Omethyladenosine
  modified_base 44: mod_base = OTHER; note = 2'-fluoroadenosine
  modified_base 46: mod_base = OTHER; note = Guanosine phosphorothiorate
  modified_base 50: mod_base = OTHER; note = 2'-Omethylcytosine
  modified_base 52: mod_base = OTHER; note = 2'-Omethylguanosine
  modified_base 54: mod_base = OTHER; note = Uridine phosphorothiorate
  modified_base 55: mod_base = OTHER; note = Uridine phosphorothiorate
  modified_base 56: mod_base = OTHER; note = 2'-Omethylcytosine
  modified_base 57: mod_base = OTHER; note = Guanosine phosphorothiorate
  modified_base 62: mod_base = OTHER; note = 2'-Omethylcytosine
  modified_base 63: mod_base = OTHER; note = 2'-fluorocytosine
  modified_base 65: mod_base = OTHER; note = 2'-Omethylguanosine
  modified_base 71: mod_base = OTHER; note = 2'-Omethyluridine
  modified_base 73: mod_base = OTHER; note = 2'-Omethylguanosine

SEQ ID NO: 3688 - RNA, 76 nt, synthetic construct; identical to SEQ ID NO: 3318
  source 1..76: mol_type = other RNA
  modified_base 1: mod_base = OTHER; note = 2'-Omethylcytosine
  modified_base 2: mod_base = OTHER; note = 2'-Omethylcytosine
  modified_base 3: mod_base = OTHER; note = 2'-Omethyluridine
  modified_base 4: mod_base = OTHER; note = 2'-Omethyluridine
  modified_base 5: mod_base = OTHER; note = 2'-Omethylcytosine
  modified_base 6: mod_base = OTHER; note = 2'-Omethylguanosine
  modified_base 61: mod_base = OTHER; note = 2'-Omethylcytosine
  modified_base 62: mod_base = OTHER; note = 2'-Omethylcytosine
  modified_base 63: mod_base = OTHER; note = 2'-fluoroguanosine
  modified_base 64: mod_base = OTHER; note = 2'-Omethylguanosine
  modified_base 65: mod_base = OTHER; note = 2'-Omethylcytosine
  modified_base 66: mod_base = OTHER; note = 2'-Omethyluridine
  modified_base 67: mod_base = OTHER; note = 2'-Omethylcytosine
  modified_base 68: mod_base = OTHER; note = 2'-Omethylguanosine
  modified_base 73: mod_base = OTHER; note = 2'-Omethyladenosine

SEQ ID NO: 3689 - DNA, 76 bp, synthetic construct; identical to SEQ ID NO: 1924
  source 1..76: mol_type = other DNA
  modified_base 1: mod_base = OTHER; note = 2'-Omethylguanosine phosphorothiorate
  modified_base 2: mod_base = OTHER; note = 2'-Omethylguanosine
  modified_base 6: mod_base = OTHER; note = deoxycytosine phosphorothiorate
  modified_base 8: mod_base = OTHER; note = Uridine phosphorothiorate
  modified_base 9: mod_base = OTHER; note = 2'-Omethylguanosine phosphorothiorate
  modified_base 10: mod_base = OTHER; note = 2'-O-(2-Methoxyethyl) guanosine
  modified_base 12: mod_base = OTHER; note = 2'-O-(2-Methoxyethyl) guanosine phosphorothiorate
  modified_base 13: mod_base = OTHER; note = 2'-O-(2-Methoxyethyl) 5-methylcytosine
  modified_base 14: mod_base = OTHER; note = 2'-Omethyladenosine
  modified_base 20: mod_base = OTHER; note = deoxyuridine phosphorothiorate
  modified_base 21: mod_base = OTHER; note = deoxyadenosine phosphorothiorate
  modified_base 22: mod_base = OTHER; note = 2'-fluoroguanosine
  modified_base 23: mod_base = OTHER; note = 2'-Omethylcytosine phosphorothiorate
  modified_base 24: mod_base = OTHER; note = Guanosine phosphorothiorate
  modified_base 25: mod_base = OTHER; note = 2'-fluorocytosine
  modified_base 28: mod_base = OTHER; note = Uridine phosphorothiorate
  modified_base 31: mod_base = OTHER; note = 2'-O-(2-Methoxyethyl) adenosine phosphorothiorate
  modified_base 32: mod_base = OTHER; note = deoxycytosine phosphorothiorate
  modified_base 34: mod_base = OTHER; note = 2'-Omethyluridine phosphorothiorate
  modified_base 40: mod_base = OTHER; note = 2'-fluorouridine
  modified_base 43: mod_base = OTHER; note = 2'-O-(2-Methoxyethyl) adenosine
  modified_base 48: mod_base = OTHER; note = Uridine phosphorothiorate
  modified_base 49: mod_base = OTHER; note = 2'-Omethylcytosine
  modified_base 54: mod_base = OTHER; note = 2'-O-(2-Methoxyethyl) thymine
  modified_base 56: mod_base = OTHER; note = 2'-fluorocytosine
  modified_base 57: mod_base = OTHER; note = 2'-Omethylguanosine
  modified_base 60: mod_base = OTHER; note = Uridine phosphorothiorate
  modified_base 66: mod_base = OTHER; note = Cytosine phosphorothiorate
  modified_base 70: mod_base = OTHER; note = 2'-Omethylguanosine
  modified_base 74: mod_base = OTHER; note = 2'-O-(2-Methoxyethyl) 5-methylcytosine
  modified_base 75: mod_base = OTHER; note = 2'-O-(2-Methoxyethyl) 5-methylcytosine
  misc_feature 1..5: note = RNA
  misc_feature 6: note = DNA
  misc_feature 7..15: note = RNA
  misc_feature 16: note = DNA
  misc_feature 17..19: note = RNA
  misc_feature 20..21: note = DNA
  misc_feature 22..28: note = RNA
  misc_feature 29: note = DNA
  misc_feature 30..31: note = RNA
  misc_feature 32..33: note = DNA
  misc_feature 34: note = RNA
  misc_feature 35: note = DNA
  misc_feature 36..66: note = RNA
  misc_feature 67: note = DNA
  misc_feature 68..76: note = RNA

SEQ ID NO: 3690 - RNA, 86 nt, synthetic construct; identical to SEQ ID NO: 3290
  source 1..86: mol_type = other RNA
  modified_base 1: mod_base = OTHER; note = 2'-Omethyladenosine phosphorothiorate
  modified_base 2: mod_base = OTHER; note = 2'-Omethylcytosine phosphorothiorate
  modified_base 3: mod_base = OTHER; note = 2'-Omethylcytosine
  modified_base 4: mod_base = OTHER; note = 2'-Omethyladenosine
  modified_base 5: mod_base = OTHER; note = 2'-Omethylguanosine
  modified_base 6: mod_base = OTHER; note = 2'-Omethylguanosine
  modified_base 16: mod_base = OTHER; note = 2'-Omethyluridine
  modified_base 17: mod_base = OTHER; note = 2'-Omethylguanosine
  modified_base 18: mod_base = OTHER; note = 2'-Omethylguanosine
  modified_base 20: mod_base = OTHER; note = 2'-Omethyluridine phosphorothiorate
  modified_base 25: mod_base = OTHER; note = 2'-Omethylcytosine
  modified_base 33: mod_base = OTHER; note = 2'-fluorouridine
  modified_base 35: mod_base = OTHER; note = Cytosine phosphorothiorate
  modified_base 37: mod_base = OTHER; note = Guanosine phosphorothiorate
  modified_base 38: mod_base = OTHER; note = Adenosine phosphorothiorate
  modified_base 41: mod_base = OTHER; note = 2'-fluorocytosine phosphorothiorate
  modified_base 42: mod_base = OTHER; note = 2'-Omethyladenosine
  modified_base 43: mod_base = OTHER; note = 2'-Omethyladenosine
  modified_base 44: mod_base = OTHER; note = 2'-Omethyluridine
  modified_base 57: mod_base = OTHER; note = 2'-fluoroguanosine
  modified_base 58: mod_base = OTHER; note = 2'-fluorocytosine
  modified_base 66: mod_base = OTHER; note = 2'-Omethylcytosine
  modified_base 69: mod_base = OTHER; note = 2'-Omethyladenosine
  modified_base 71: mod_base = OTHER; note = 2'-Omethylcytosine
  modified_base 72: mod_base = OTHER; note = 2'-Omethylcytosine
  modified_base 73: mod_base = OTHER; note = 2'-fluorocytosine
  modified_base 74: mod_base = OTHER; note = 2'-Omethyladenosine
  modified_base 75: mod_base = OTHER; note = 2'-Omethylcytosine
  modified_base 76: mod_base = OTHER; note = 2'-Omethyluridine
  modified_base 77: mod_base = OTHER; note = 2'-Omethylcytosine
  modified_base 78: mod_base = OTHER; note = 2'-Omethylcytosine
  modified_base 83: mod_base = OTHER; note = 2'-Omethyladenosine

SEQ ID NO: 3691 - RNA, 85 nt, synthetic construct; identical to SEQ ID NO: 3286
  source 1..85: mol_type = other RNA
  modified_base 1: mod_base = OTHER; note = 2'-Omethylcytosine phosphorothiorate
  modified_base 2: mod_base = OTHER; note = 2'-fluorocytosine
  modified_base 13: mod_base = OTHER; note = 2'-fluoroadenosine phosphorothiorate
  modified_base 20: mod_base = OTHER; note = Adenosine phosphorothiorate
  modified_base 27: mod_base = OTHER; note = 2'-fluorouridine
  modified_base 29: mod_base = OTHER; note = 2'-fluoroguanosine
  modified_base 32: mod_base = OTHER; note = 2'-fluorouridine
  modified_base 36: mod_base = OTHER; note = Guanosine phosphorothiorate
  modified_base 42: mod_base = OTHER; note = 2'-Omethyladenosine
  modified_base 46: mod_base = OTHER; note = 2'-Omethyladenosine
  modified_base 52: mod_base = OTHER; note = 2'-Omethylguanosine
  modified_base 54: mod_base = OTHER; note = 2'-Omethylcytosine
  modified_base 60: mod_base = OTHER; note = 2'-Omethylguanosine
  modified_base 75: mod_base = OTHER; note = 2'-fluorouridine
  modified_base 76: mod_base = OTHER; note = 2'-Omethylcytosine
  modified_base 85: mod_base = OTHER; note = 2'-fluoroadenosine

SEQ ID NO: 3692 - RNA, 75 nt, synthetic construct; identical to SEQ ID NO: 1045
  source 1..75: mol_type = other RNA
  modified_base 1: mod_base = OTHER; note = 2'-Omethylguanosine
  modified_base 10: mod_base = OTHER; note = 2'-Omethylguanosine
  modified_base 11: mod_base = OTHER; note = 2'-Omethyluridine
  modified_base 12: mod_base = OTHER; note = 2'-Omethylguanosine
  modified_base 13: mod_base = OTHER; note = 2'-Omethyluridine
  modified_base 14: mod_base = OTHER; note = 2'-Omethyladenosine
  modified_base 15: mod_base = OTHER; note = 2'-Omethyladenosine
  modified_base 16: mod_base = OTHER; note = 2'-Omethyluridine
  modified_base 17: mod_base = OTHER; note = 2'-Omethylguanosine
  modified_base 18: mod_base = OTHER; note = 2'-Omethylguanosine
  modified_base 19: mod_base = OTHER; note = Uridine phosphorothiorate
  modified_base 20: mod_base = OTHER; note = 2'-Omethyladenosine
  modified_base 21: mod_base = OTHER; note = Adenosine phosphorothiorate
  modified_base 25: mod_base = OTHER; note = 2'-Omethylcytosine
  modified_base 41: mod_base = OTHER; note = 2'-Omethylcytosine
  modified_base 42: mod_base = OTHER; note = 2'-Omethyladenosine
  modified_base 43: mod_base = OTHER; note = 2'-Omethylguanosine
  modified_base 44: mod_base = OTHER; note = 2'-Omethylcytosine
  modified_base 48: mod_base = OTHER; note = 2'-Omethylcytosine
  modified_base 49: mod_base = OTHER; note = 2'-Omethylcytosine
  modified_base 51: mod_base = OTHER; note = 2'-Omethyladenosine
  modified_base 53: mod_base = OTHER; note = Uridine phosphorothiorate
  modified_base 54: mod_base = OTHER; note = Uridine phosphorothiorate
  modified_base 60: mod_base = OTHER; note = 2'-Omethylcytosine
  modified_base 64: mod_base = OTHER; note = 2'-Omethylguanosine
  modified_base 72: mod_base = OTHER; note = 2'-Omethyluridine

SEQ ID NO: 3693 - RNA, 75 nt, synthetic construct; identical to SEQ ID NO: 3299
  source 1..75: mol_type = other RNA
  modified_base 2: mod_base = OTHER; note = 2'-Omethylcytosine
  modified_base 6: mod_base = OTHER; note = 2'-Omethylguanosine phosphorothiorate
  modified_base 19: mod_base = OTHER; note = 2'-fluorouridine phosphorothiorate
  modified_base 34: mod_base = OTHER; note = 2'-Omethyluridine phosphorothiorate
  modified_base 50: mod_base = OTHER; note = Guanosine phosphorothiorate

SEQ ID NO: 3694 - RNA, 76 nt, synthetic construct; identical to SEQ ID NO: 625
  source 1..76: mol_type = other RNA
  modified_base 1: mod_base = OTHER; note = 2'-Omethylguanosine phosphorothiorate
  modified_base 2: mod_base = OTHER; note = 2'-fluoroguanosine
  modified_base 3: mod_base = OTHER; note = 2'-Omethylcytosine phosphorothiorate
  modified_base 4: mod_base = OTHER; note = 2'-Omethyluridine
  modified_base 5: mod_base = OTHER; note = 2'-Omethylcytosine
  modified_base 6: mod_base = OTHER; note = 2'-fluorocytosine
  modified_base 11: mod_base = OTHER; note = 2'-Omethylcytosine
  modified_base 20: mod_base = OTHER; note = 2'-fluorouridine
  modified_base 22: mod_base = OTHER; note = 2'-fluoroguanosine
  modified_base 26: mod_base = OTHER; note = 2'-fluoroadenosine phosphorothiorate
  modified_base 28: mod_base = OTHER; note = 2'-Omethyluridine phosphorothiorate
  modified_base 29: mod_base = OTHER; note = 2'-Omethylguanosine
  modified_base 30: mod_base = OTHER; note = Guanosine phosphorothiorate
  modified_base 31: mod_base = OTHER; note = 2'-Omethyladenosine
  modified_base 32: mod_base = OTHER; note = 2'-fluorocytosine
  modified_base 33: mod_base = OTHER; note = 2'-fluorouridine
  modified_base 34: mod_base = OTHER; note = 2'-fluorouridine
  modified_base 39: mod_base = OTHER; note = Uridine phosphorothiorate
  modified_base 41: mod_base = OTHER; note = 2'-fluorocytosine
  modified_base 42: mod_base = OTHER; note = 2'-Omethyladenosine
  modified_base 46: mod_base = OTHER; note = 2'-Omethylguanosine
  modified_base 50: mod_base = OTHER; note = 2'-fluorocytosine phosphorothiorate
  modified_base 53: mod_base = OTHER; note = 2'-fluoroguanosine phosphorothiorate
  modified_base 54: mod_base = OTHER; note = 2'-Omethyluridine
  modified_base 56: mod_base = OTHER; note = Cytosine phosphorothiorate
  modified_base 57: mod_base = OTHER; note = 2'-fluoroguanosine
  modified_base 58: mod_base = OTHER; note = 2'-fluoroadenosine
  modified_base 61: mod_base = OTHER; note = 2'-fluorocytosine
  modified_base 62: mod_base = OTHER; note = 2'-Omethylcytosine
  modified_base 63: mod_base = OTHER; note = 2'-Omethylcytosine
  modified_base 65: mod_base = OTHER; note = 2'-Omethylguanosine
  modified_base 74: mod_base = OTHER; note = 2'-Omethylcytosine

SEQ ID NO: 3695 - RNA, 76 nt, synthetic construct; identical to SEQ ID NO: 3289
  source 1..76: mol_type = other RNA
  modified_base 1: mod_base = OTHER; note = 2'-Omethylguanosine
  modified_base 52: mod_base = OTHER; note = 2'-Omethylguanosine
  modified_base 73: mod_base = OTHER; note = 2'-Omethylguanosine

SEQ ID NO: 3696 - RNA, 75 nt, synthetic construct; identical to SEQ ID NO: 3336
  source 1..75: mol_type = other RNA
  modified_base 19: mod_base = OTHER; note = 2'-fluorouridine
  modified_base 21: mod_base = OTHER; note = 2'-fluoroguanosine
  modified_base 37: mod_base = OTHER; note = 2'-fluoroadenosine
  modified_base 42: mod_base = OTHER; note = 2'-fluoroadenosine
  modified_base 49: mod_base = OTHER; note = Adenosine phosphorothiorate
  modified_base 56: mod_base = OTHER; note = 2'-Omethyladenosine phosphorothiorate
  modified_base 60: mod_base = OTHER; note = Cytosine phosphorothiorate
  modified_base 71: mod_base = OTHER; note = Cytosine phosphorothiorate
  modified_base 73: mod_base = OTHER; note = 2'-Omethylcytosine

SEQ ID NO: 3697 - RNA, 74 nt, synthetic construct; identical to SEQ ID NO: 3293
  source 1..74: mol_type = other RNA
  modified_base 2: mod_base = OTHER; note = 2'-Omethylcytosine
  modified_base 4: mod_base = OTHER; note = Uridine phosphorothiorate
  modified_base 12: mod_base = OTHER; note = 2'-fluorocytosine
  modified_base 26: mod_base = OTHER; note = 2'-Omethylcytosine phosphorothiorate
  modified_base 34: mod_base = OTHER; note = 2'-fluoroadenosine
  modified_base 41: mod_base = OTHER; note = 2'-Omethyladenosine
  modified_base 50: mod_base = OTHER; note = Uridine phosphorothiorate
  modified_base 51: mod_base = OTHER; note = 2'-fluoroguanosine phosphorothiorate
  modified_base 62: mod_base = OTHER; note = 2'-Omethylguanosine
  modified_base 67: mod_base = OTHER; note = Guanosine phosphorothiorate
  modified_base 73: mod_base = OTHER; note = 2'-fluorocytosine

SEQ ID NO: 3698 - RNA, 85 nt, synthetic construct; identical to SEQ ID NO: 3288
  source 1..85: mol_type = other RNA
  modified_base 1: mod_base = OTHER; note = 2'-Omethylcytosine
  modified_base 22: mod_base = OTHER; note = 2'-fluoroguanosine
  modified_base 30: mod_base = OTHER; note = 2'-fluoroadenosine
  modified_base 34: mod_base = OTHER; note = 2'-fluorocytosine
  modified_base 38: mod_base = OTHER; note = Uridine phosphorothiorate
  modified_base 54: mod_base = OTHER; note = Cytosine phosphorothiorate
  modified_base 56: mod_base = OTHER; note = 2'-fluoroguanosine
  modified_base 61: mod_base = OTHER; note = 2'-fluoroguanosine
  modified_base 73: mod_base = OTHER; note = 2'-fluoroadenosine
  modified_base 83: mod_base = OTHER; note = 2'-fluorocytosine
  modified_base 84: mod_base = OTHER; note = Cytosine phosphorothiorate

SEQ ID NO: 3699 - RNA, 76 nt, synthetic construct; identical to SEQ ID NO: 3332
  source 1..76: mol_type = other RNA
  modified_base 1: mod_base = OTHER; note = 2'-Omethylguanosine
  modified_base 2: mod_base = OTHER; note = 2'-Omethylguanosine
  modified_base 3: mod_base = OTHER; note = 2'-Omethylcytosine
  modified_base 4: mod_base = OTHER; note = 2'-Omethylcytosine
  modified_base 5: mod_base = OTHER; note = 2'-Omethylcytosine
  modified_base 6: mod_base = OTHER; note = 2'-Omethylcytosine
  modified_base 16: mod_base = OTHER; note = 2'-Omethyluridine
  modified_base 17: mod_base = OTHER; note = 2'-Omethylguanosine
  modified_base 18: mod_base = OTHER; note = 2'-Omethylguanosine
  modified_base 33: mod_base = OTHER; note = 2'-fluorouridine
  modified_base 35: mod_base = OTHER; note = Cytosine phosphorothiorate
  modified_base 37: mod_base = OTHER; note = Adenosine phosphorothiorate
  modified_base 38: mod_base = OTHER; note = Adenosine phosphorothiorate
  modified_base 44: mod_base = OTHER; note = 2'-Omethyladenosine
  modified_base 45: mod_base = OTHER; note = 2'-Omethylguanosine
  modified_base 46: mod_base = OTHER; note = 2'-fluoroguanosine
  modified_base 47: mod_base = OTHER; note = 2'-fluorouridine
  modified_base 48: mod_base = OTHER; note = 2'-fluorouridine
  modified_base 56: mod_base = OTHER; note = 2'-Omethylcytosine
  modified_base 59: mod_base = OTHER; note = 2'-Omethylguanosine
  modified_base 61: mod_base = OTHER; note = 2'-Omethylcytosine
  modified_base 62: mod_base = OTHER; note = 2'-Omethylcytosine
  modified_base 63: mod_base = OTHER; note = 2'-fluorocytosine
  modified_base 64: mod_base = OTHER; note = 2'-Omethylguanosine
  modified_base 65: mod_base = OTHER; note = 2'-Omethylcytosine
  modified_base 66: mod_base = OTHER; note = 2'-Omethylcytosine
  modified_base 67: mod_base = OTHER; note = 2'-Omethylguanosine
  modified_base 68: mod_base = OTHER; note = 2'-Omethylguanosine
  modified_base 73: mod_base = OTHER; note = 2'-Omethylguanosine

SEQ ID NO: 3700 - RNA, 85 nt, synthetic construct
  source 1..85: mol_type = other RNA
gctgtgatggccgagtggttaaggcgttggacttcaaatccaatggggtttccccgcgcaggttcgaatcctgctcgcagcgcca

SEQ ID NO: 3701 - RNA, 85 nt, synthetic construct; identical to SEQ ID NO: 3301
  source 1..85: mol_type = other RNA
  modified_base 1: mod_base = OTHER; note = 2'-Omethylguanosine phosphorothiorate
  modified_base 3: mod_base = OTHER; note = 2'-Omethyluridine
  modified_base 9: mod_base = OTHER; note = 2'-fluoroguanosine
  modified_base 10: mod_base = OTHER; note = 2'-fluoroguanosine
  modified_base 14: mod_base = OTHER; note = 2'-Omethyladenosine phosphorothiorate
  modified_base 17: mod_base = OTHER; note = 2'-Omethylguanosine
  modified_base 22: mod_base = OTHER; note = 2'-Omethyladenosine
  modified_base 23: mod_base = OTHER; note = 2'-Omethylguanosine
  modified_base 26: mod_base = OTHER; note = 2'-fluoroguanosine phosphorothiorate
  modified_base 34: mod_base = OTHER; note = 2'-fluorouridine phosphorothiorate
  modified_base 46: mod_base = OTHER; note = 2'-Omethylguanosine
  modified_base 48: mod_base = OTHER; note = 2'-Omethylguanosine
  modified_base 53: mod_base = OTHER; note = 2'-Omethylcytosine
  modified_base 55: mod_base = OTHER; note = 2'-Omethylcytosine
  modified_base 57: mod_base = OTHER; note = 2'-Omethylcytosine
  modified_base 83: mod_base = OTHER; note = 2'-fluorocytosine phosphorothiorate

SEQ ID NO: 3702 - RNA, 86 nt, synthetic construct; identical to SEQ ID NO: 3290
  source 1..86: mol_type = other RNA
  modified_base 1: mod_base = OTHER; note = 2'-Omethyladenosine
  modified_base 2: mod_base = OTHER; note = 2'-Omethylcytosine
  modified_base 3: mod_base = OTHER; note = 2'-Omethylcytosine
  modified_base 4: mod_base = OTHER; note = 2'-Omethyladenosine
  modified_base 5: mod_base = OTHER; note = 2'-Omethylguanosine
  modified_base 6: mod_base = OTHER; note = 2'-Omethylguanosine
  modified_base 14: mod_base = OTHER; note = 2'-Omethyladenosine
  modified_base 15: mod_base = OTHER; note = 2'-Omethylguanosine
  modified_base 16: mod_base = OTHER; note = 2'-Omethyluridine
  modified_base 17: mod_base = OTHER; note = 2'-Omethylguanosine
  modified_base 18: mod_base = OTHER; note = 2'-Omethylguanosine
  modified_base 20: mod_base = OTHER; note = 2'-Omethyluridine
  modified_base 22: mod_base = OTHER; note = 2'-Omethyladenosine
  modified_base 23: mod_base = OTHER; note = 2'-Omethylguanosine
  modified_base 24: mod_base = OTHER; note = 2'-Omethylguanosine
  modified_base 25: mod_base = OTHER; note = 2'-Omethylcytosine
  modified_base 33: mod_base = OTHER; note = 2'-fluorouridine
  modified_base 35: mod_base = OTHER; note = Cytosine phosphorothiorate
  modified_base 37: mod_base = OTHER; note = Guanosine phosphorothiorate
  modified_base 38: mod_base = OTHER; note = Adenosine phosphorothiorate
  modified_base 41: mod_base = OTHER; note = 2'-Omethylcytosine
  modified_base 42: mod_base = OTHER; note = 2'-Omethyladenosine
  modified_base 43: mod_base = OTHER; note = 2'-Omethyladenosine
  modified_base 44: mod_base = OTHER; note = 2'-Omethyluridine
  modified_base 59: mod_base = OTHER; note = 2'-Omethylguanosine
  modified_base 60: mod_base = OTHER; note = 2'-Omethyluridine
  modified_base 62: mod_base = OTHER; note = 2'-Omethylguanosine
  modified_base 64: mod_base = OTHER; note = 2'-Omethyluridine
  modified_base 65: mod_base = OTHER; note = Uridine phosphorothiorate
  modified_base 66: mod_base = OTHER; note = 2'-Omethylcytosine
  modified_base 67: mod_base = OTHER; note = 2'-fluoroguanosine
  modified_base 69: mod_base = OTHER; note = 2'-Omethyladenosine
  modified_base 71: mod_base = OTHER; note = 2'-Omethylcytosine
  modified_base 75: mod_base = OTHER; note = 2'-Omethylcytosine
  modified_base 83: mod_base = OTHER; note = 2'-Omethyladenosine

SEQ ID NO: 3703 - RNA, 85 nt, synthetic construct; identical to SEQ ID NO: 3317
  source 1..85: mol_type = other RNA
  modified_base 1: mod_base = OTHER; note = 2'-Omethylguanosine phosphorothiorate
  modified_base 2: mod_base = OTHER; note = 2'-Omethylcytosine
  modified_base 11: mod_base = OTHER; note = 2'-fluorocytosine
  modified_base 12: mod_base = OTHER; note = 2'-Omethylcytosine
  modified_base 17: mod_base = OTHER; note = 2'-Omethylguanosine
  modified_base 26: mod_base = OTHER; note = Guanosine phosphorothiorate
  modified_base 27: mod_base = OTHER; note = 2'-fluorouridine
  modified_base 29: mod_base = OTHER; note = Guanosine phosphorothiorate
  modified_base 36: mod_base = OTHER; note = 2'-fluoroadenosine
  modified_base 47: mod_base = OTHER; note = 2'-Omethylguanosine phosphorothiorate
  modified_base 48: mod_base = OTHER; note = 2'-fluoroguanosine phosphorothiorate
  modified_base 49: mod_base = OTHER; note = 2'-fluorouridine
  modified_base 55: mod_base = OTHER; note = 2'-Omethylcytosine phosphorothiorate
  modified_base 59: mod_base = OTHER; note = 2'-Omethylcytosine
  modified_base 61: mod_base = OTHER; note = 2'-Omethylguanosine
  modified_base 71: mod_base = OTHER; note = Cytosine phosphorothiorate
  modified_base 73: mod_base = OTHER; note = 2'-fluoroguanosine
  modified_base 77: mod_base = OTHER; note = 2'-fluoroadenosine
  modified_base 82: mod_base = OTHER; note = 2'-Omethylguanosine

SEQ ID NO: 3704 - RNA, 75 nt, synthetic construct; identical to SEQ ID NO: 1045
  source 1..75: mol_type = other RNA
  modified_base 1: mod_base = OTHER; note = 2'-Omethylguanosine phosphorothiorate
  modified_base 2: mod_base = OTHER; note = 2'-Omethylguanosine phosphorothiorate
  modified_base 3: mod_base = OTHER; note = 2'-Omethyluridine
  modified_base 4: mod_base = OTHER; note = 2'-Omethyluridine
  modified_base 5: mod_base = OTHER; note = 2'-Omethylcytosine
  modified_base 6: mod_base = OTHER; note = 2'-Omethylcytosine
  modified_base 16: mod_base = OTHER; note = 2'-Omethyluridine
  modified_base 17: mod_base = OTHER; note = 2'-Omethylguanosine
  modified_base 18: mod_base = OTHER; note = 2'-Omethylguanosine
  modified_base 33: mod_base = OTHER; note = 2'-fluorouridine
  modified_base 35: mod_base = OTHER; note = Uridine phosphorothiorate
  modified_base 37: mod_base = OTHER; note = Adenosine phosphorothiorate
  modified_base 38: mod_base = OTHER; note = Adenosine phosphorothiorate
  modified_base 44: mod_base = OTHER; note = 2'-Omethylcytosine
  modified_base 45: mod_base = OTHER; note = 2'-Omethylguanosine
  modified_base 46: mod_base = OTHER; note = 2'-fluoroadenosine
  modified_base 47: mod_base = OTHER; note = 2'-fluorouridine
  modified_base 48: mod_base = OTHER; note = 2'-Omethylcytosine
  modified_base 49: mod_base = OTHER; note = 2'-Omethylcytosine
  modified_base 50: mod_base = OTHER; note = 2'-Omethylguanosine
  modified_base 51: mod_base = OTHER; note = 2'-Omethyladenosine
  modified_base 52: mod_base = OTHER; note = 2'-Omethylguanosine
  modified_base 53: mod_base = OTHER; note = 2'-Omethyluridine
  modified_base 55: mod_base = OTHER; note = 2'-Omethylcytosine
  modified_base 58: mod_base = OTHER; note = 2'-Omethylguanosine
  modified_base 60: mod_base = OTHER; note = 2'-Omethylcytosine
  modified_base 61: mod_base = OTHER; note = 2'-Omethyluridine
  modified_base 62: mod_base = OTHER; note = 2'-fluorocytosine
  modified_base 63: mod_base = OTHER; note = 2'-Omethylguanosine
  modified_base 64: mod_base = OTHER; note = 2'-Omethylguanosine
  modified_base 65: mod_base = OTHER; note = 2'-Omethyluridine
  modified_base 66: mod_base = OTHER; note = 2'-Omethylguanosine
  modified_base 67: mod_base = OTHER; note = 2'-Omethylguanosine
  modified_base 72: mod_base = OTHER; note = 2'-Omethyluridine

SEQ ID NO: 3705 - RNA, 76 nt, synthetic construct; identical to SEQ ID NO: 3675
  source 1..76: mol_type = other RNA
  modified_base 1: mod_base = OTHER; note = 2'-Omethylguanosine
  modified_base 2: mod_base = OTHER; note = 2'-Omethylcytosine
  modified_base 3: mod_base = OTHER; note = 2'-Omethylcytosine
  modified_base 4: mod_base = OTHER; note = 2'-Omethyluridine
  modified_base 5: mod_base = OTHER; note = 2'-Omethylcytosine
  modified_base 6: mod_base = OTHER; note = 2'-Omethylcytosine
  modified_base 16: mod_base = OTHER; note = 2'-Omethyluridine
  modified_base 17: mod_base = OTHER; note = 2'-Omethylguanosine
  modified_base 18: mod_base = OTHER; note = 2'-Omethylguanosine
  modified_base 33: mod_base = OTHER; note = 2'-fluorouridine
  modified_base 35: mod_base = OTHER; note = Cytosine phosphorothiorate
  modified_base 37: mod_base = OTHER; note = Adenosine phosphorothiorate
  modified_base 38: mod_base = OTHER; note = Adenosine phosphorothiorate
  modified_base 44: mod_base = OTHER; note = 2'-Omethyladenosine
  modified_base 45: mod_base = OTHER; note = 2'-Omethylguanosine
  modified_base 46: mod_base = OTHER; note = 2'-fluoroguanosine
  modified_base 47: mod_base = OTHER; note = 2'-fluorouridine
  modified_base 48: mod_base = OTHER; note = 2'-fluorouridine
  modified_base 56: mod_base = OTHER; note = 2'-Omethylcytosine
  modified_base 59: mod_base = OTHER; note = 2'-Omethylguanosine
  modified_base 61: mod_base = OTHER; note = 2'-Omethylcytosine
  modified_base 62: mod_base = OTHER; note = 2'-Omethylcytosine
  modified_base 63: mod_base = OTHER; note = 2'-fluorocytosine
  modified_base 64: mod_base = OTHER; note = 2'-Omethylguanosine
  modified_base 65: mod_base = OTHER; note = 2'-Omethylguanosine
  modified_base 66: mod_base = OTHER; note = 2'-Omethylcytosine
  modified_base 67: mod_base = OTHER; note = 2'-Omethylguanosine
  modified_base 68: mod_base = OTHER; note = 2'-Omethylguanosine
  modified_base 73: mod_base = OTHER; note = 2'-Omethylguanosine

SEQ ID NO: 3706 - RNA, 74 nt, synthetic construct; identical to SEQ ID NO: 766
  source 1..74: mol_type = other RNA
  modified_base 1: mod_base = OTHER; note = 2'-Omethylguanosine phosphorothiorate
  modified_base 2: mod_base = OTHER; note = 2'-Omethylguanosine
  modified_base 3: mod_base = OTHER; note = 2'-Omethylcytosine
  modified_base 4: mod_base = OTHER; note = 2'-Omethyluridine
  modified_base 5: mod_base = OTHER; note = 2'-Omethylcytosine
  modified_base 6: mod_base = OTHER; note = 2'-Omethylcytosine
  modified_base 44: mod_base = OTHER; note = 2'-Omethyladenosine
  modified_base 45: mod_base = OTHER; note = 2'-Omethylguanosine
  modified_base 46: mod_base = OTHER; note = 2'-fluoroguanosine
  modified_base 48: mod_base = OTHER; note = 2'-fluorouridine
  modified_base 73: mod_base = OTHER; note = 2'-Omethylguanosine phosphorothiorate

SEQ ID NO: 3707 - RNA, 75 nt, synthetic construct; identical to SEQ ID NO: 1045
  source 1..75: mol_type = other RNA
  modified_base 1: mod_base = OTHER; note = 2'-Omethylguanosine phosphorothiorate
  modified_base 2: mod_base = OTHER; note = 2'-Omethylguanosine phosphorothiorate
  modified_base 12: mod_base = OTHER; note = 2'-Omethylguanosine
  modified_base 13: mod_base = OTHER; note = Uridine phosphorothiorate
  modified_base 14: mod_base = OTHER; note = 2'-Omethyladenosine
  modified_base 18: mod_base = OTHER; note = Guanosine phosphorothiorate
  modified_base 20: mod_base = OTHER; note = Adenosine phosphorothiorate
  modified_base 21: mod_base = OTHER; note = 2'-fluoroadenosine
  modified_base 34: mod_base = OTHER; note = 2'-fluorouridine
  modified_base 37: mod_base = OTHER; note = Adenosine phosphorothiorate
  modified_base 39: mod_base = OTHER; note = 2'-fluorouridine
  modified_base 63: mod_base = OTHER; note = Guanosine phosphorothiorate
  modified_base 64: mod_base = OTHER; note = 2'-fluoroguanosine
  modified_base 73: mod_base = OTHER; note = Cytosine phosphorothiorate

SEQ ID NO: 3708 - RNA, 76 nt, synthetic construct; identical to SEQ ID NO: 625
  source 1..76: mol_type = other RNA
  modified_base 1: mod_base = OTHER; note = 2'-Omethylguanosine phosphorothiorate
  modified_base 2: mod_base = OTHER; note = 2'-Omethylguanosine
  modified_base 3: mod_base = OTHER; note = 2'-Omethylcytosine
  modified_base 4: mod_base = OTHER; note = 2'-Omethyluridine
  modified_base 5: mod_base = OTHER; note = 2'-Omethylcytosine
  modified_base 6: mod_base = OTHER; note = 2'-Omethylcytosine

SEQ ID NO: 3709 - RNA, 85 nt, synthetic construct; identical to SEQ ID NO: 3297
  source 1..85: mol_type = other RNA
  modified_base 1: mod_base = OTHER; note = 2'-Omethylguanosine
  modified_base 2: mod_base = OTHER; note = 2'-Omethylcytosine
  modified_base 3: mod_base = OTHER; note = 2'-Omethyluridine
  modified_base 4: mod_base = OTHER; note = 2'-Omethylguanosine
  modified_base 5: mod_base = OTHER; note = 2'-Omethyluridine
  modified_base 6: mod_base = OTHER; note = 2'-Omethylguanosine
  modified_base 14: mod_base = OTHER; note = 2'-Omethyladenosine
  modified_base 15: mod_base = OTHER; note = 2'-Omethylguanosine
  modified_base 16: mod_base = OTHER; note = 2'-Omethyluridine
  modified_base 17: mod_base = OTHER; note = 2'-Omethylguanosine
  modified_base 18: mod_base = OTHER; note = 2'-Omethylguanosine
  modified_base 20: mod_base = OTHER; note = 2'-Omethyluridine
  modified_base 25: mod_base = OTHER; note = 2'-Omethylcytosine
  modified_base 41: mod_base = OTHER; note = 2'-Omethylcytosine
  modified_base 42: mod_base = OTHER; note = 2'-Omethyladenosine
  modified_base 43: mod_base = OTHER; note = 2'-Omethyladenosine
  modified_base 44: mod_base = OTHER; note = 2'-Omethyluridine
  modified_base 58: mod_base = OTHER; note = 2'-Omethylguanosine
  modified_base 59: mod_base = OTHER; note = 2'-Omethylcytosine
  modified_base 61: mod_base = OTHER; note = 2'-Omethylguanosine
  modified_base 63: mod_base = OTHER; note = 2'-Omethyluridine
  modified_base 64: mod_base = OTHER; note = Uridine phosphorothiorate
  modified_base 65: mod_base = OTHER; note = 2'-Omethylcytosine
  modified_base 66: mod_base = OTHER; note = 2'-fluoroguanosine
  modified_base 68: mod_base = OTHER; note = 2'-Omethyladenosine
  modified_base 70: mod_base = OTHER; note = 2'-Omethylcytosine
  modified_base 71: mod_base = OTHER; note = 2'-Omethylcytosine
  modified_base 72: mod_base = OTHER; note = 2'-fluorouridine
  modified_base 73: mod_base = OTHER; note = 2'-Omethylguanosine
  modified_base 74: mod_base = OTHER; note = 2'-Omethylcytosine
  modified_base 82: mod_base = OTHER; note = 2'-Omethylguanosine

SEQ ID NO: 3710 - RNA, 76 nt, synthetic construct; identical to SEQ ID NO: 3419
  source 1..76: mol_type = other RNA
  modified_base 1: mod_base = OTHER; note = 2'-Omethylguanosine
  modified_base 2: mod_base = OTHER; note = 2'-Omethylguanosine
  modified_base 3: mod_base = OTHER; note = 2'-Omethylcytosine
  modified_base 4: mod_base = OTHER; note = 2'-Omethyluridine
  modified_base 5: mod_base = OTHER; note = 2'-Omethylcytosine
  modified_base 6: mod_base = OTHER; note = 2'-Omethylcytosine
  modified_base 14: mod_base = OTHER; note = 2'-Omethyladenosine
  modified_base 15: mod_base = OTHER; note = 2'-Omethyladenosine
  modified_base 16: mod_base = OTHER; note = 2'-Omethyluridine
  modified_base 17: mod_base = OTHER; note = 2'-Omethylguanosine
  modified_base 18: mod_base = OTHER; note = 2'-Omethylguanosine
  modified_base 20: mod_base = OTHER; note = 2'-Omethyluridine
  modified_base 25: mod_base = OTHER; note = 2'-Omethylcytosine
  modified_base 33: mod_base = OTHER; note = 2'-fluorouridine
  modified_base 35: mod_base = OTHER; note = Cytosine phosphorothiorate
  modified_base 37: mod_base = OTHER; note = Adenosine phosphorothiorate
  modified_base 38: mod_base = OTHER; note = Adenosine phosphorothiorate
  modified_base 41: mod_base = OTHER; note = 2'-Omethylguanosine
  modified_base 42: mod_base = OTHER; note = 2'-Omethylguanosine
  modified_base 43: mod_base = OTHER; note = 2'-Omethyluridine
  modified_base 44: mod_base = OTHER; note = 2'-fluoroadenosine
  modified_base 49: mod_base = OTHER; note = 2'-Omethylcytosine
  modified_base 50: mod_base = OTHER; note = 2'-Omethylcytosine
  modified_base 52: mod_base = OTHER; note = 2'-Omethylguanosine
  modified_base 54: mod_base = OTHER; note = 2'-Omethyluridine
  modified_base 55: mod_base = OTHER; note = Uridine phosphorothiorate
  modified_base 56: mod_base = OTHER; note = 2'-Omethylcytosine
  modified_base 57: mod_base = OTHER; note = 2'-fluoroguanosine
  modified_base 59: mod_base = OTHER; note = 2'-Omethylguanosine
  modified_base 61: mod_base = OTHER; note = 2'-Omethylcytosine
  modified_base 65: mod_base = OTHER; note = 2'-Omethylguanosine
  modified_base 73: mod_base = OTHER; note = 2'-Omethylguanosine

SEQ ID NO: 3711 - RNA, 85 nt, synthetic construct; identical to SEQ ID NO: 3317
  source 1..85: mol_type = other RNA
  modified_base 1: mod_base = OTHER; note = 2'-Omethylguanosine
  modified_base 2: mod_base = OTHER; note = 2'-Omethylcytosine
  modified_base 3: mod_base = OTHER; note = Uridine phosphorothiorate
  modified_base 5: mod_base = OTHER; note = Uridine phosphorothiorate
  modified_base 8: mod_base = OTHER; note = 2'-fluorouridine
  modified_base 10: mod_base = OTHER; note = 2'-fluoroguanosine
  modified_base 23: mod_base = OTHER; note = Guanosine phosphorothiorate
  modified_base 29: mod_base = OTHER; note = 2'-fluoroguanosine
  modified_base 30: mod_base = OTHER; note = 2'-fluoroguanosine
  modified_base 36: mod_base = OTHER; note = 2'-fluoroadenosine
  modified_base 38: mod_base = OTHER; note = Adenosine phosphorothiorate
  modified_base 43: mod_base = OTHER; note = 2'-Omethyladenosine phosphorothiorate
  modified_base 60: mod_base = OTHER; note = 2'-fluoroadenosine
  modified_base 62: mod_base = OTHER; note = Guanosine phosphorothiorate
  modified_base 70: mod_base = OTHER; note = 2'-fluorocytosine
  modified_base 73: mod_base = OTHER; note = 2'-fluoroguanosine
  modified_base 82: mod_base = OTHER; note = 2'-Omethylguanosine phosphorothiorate

SEQ ID NO: 3712 - RNA, 75 nt, synthetic construct; identical to SEQ ID NO: 3311
  source 1..75: mol_type = other RNA
  modified_base 1: mod_base = OTHER; note = 2'-fluoroguanosine
  modified_base 2: mod_base = OTHER; note = Guanosine phosphorothiorate
  modified_base 4: mod_base = OTHER; note = 2'-fluorouridine phosphorothiorate
  modified_base 19: mod_base = OTHER; note = 2'-fluorouridine
  modified_base 20: mod_base = OTHER; note = 2'-Omethyladenosine
  modified_base 21: mod_base = OTHER; note = 2'-fluoroadenosine
  modified_base 22: mod_base = OTHER; note = Guanosine phosphorothiorate
  modified_base 23: mod_base = OTHER; note = 2'-fluorocytosine
  modified_base 28: mod_base = OTHER; note = 2'-fluorouridine
  modified_base 39: mod_base = OTHER; note = Uridine phosphorothiorate
  modified_base 40: mod_base = OTHER; note = 2'-fluorocytosine
  modified_base 47: mod_base = OTHER; note = 2'-fluorouridine phosphorothiorate
  modified_base 53: mod_base = OTHER; note = 2'-fluorouridine phosphorothiorate
  modified_base 64: mod_base = OTHER; note = Guanosine phosphorothiorate
  modified_base 65: mod_base = OTHER; note = Uridine phosphorothiorate
  modified_base 66: mod_base = OTHER; note = 2'-fluoroguanosine
  modified_base 68: mod_base = OTHER; note = 2'-fluoroadenosine
  modified_base 69: mod_base = OTHER; note = Adenosine phosphorothiorate
  modified_base 70: mod_base = OTHER; note = Cytosine phosphorothiorate
  modified_base 72: mod_base = OTHER; note = Uridine phosphorothiorate
  modified_base 73: mod_base = OTHER; note = Cytosine phosphorothiorate

SEQ ID NO: 3713 - RNA, 76 nt, synthetic construct
  source 1..76: mol_type = other RNA
ggctgagtggcgcaatggatagcgcattggacttcaaattcaaaggttgagggttcgagtccctcctcagtcgcca

SEQ ID NO: 3714 - RNA, 75 nt, synthetic construct; identical to SEQ ID NO: 1045
  source 1..75: mol_type = other RNA
  modified_base 1: mod_base = OTHER; note = 2'-Omethylguanosine phosphorothiorate
  modified_base 2: mod_base = OTHER; note = 2'-Omethylguanosine phosphorothiorate
  modified_base 3: mod_base = OTHER; note = 2'-Omethyluridine phosphorothiorate
  modified_base 10: mod_base = OTHER; note = 2'-Omethylguanosine phosphorothiorate
  modified_base 15: mod_base = OTHER; note = 2'-Omethyladenosine
  modified_base 16: mod_base = OTHER; note = 2'-Omethyluridine
  modified_base 17: mod_base = OTHER; note = 2'-Omethylguanosine
  modified_base 19: mod_base = OTHER; note = 2'-fluorouridine
  modified_base 39: mod_base = OTHER; note = 2'-fluorouridine phosphorothiorate
  modified_base 48: mod_base = OTHER; note = 2'-fluorocytosine phosphorothiorate
  modified_base 55: mod_base = OTHER; note = 2'-Omethylcytosine phosphorothiorate
  modified_base 56: mod_base = OTHER; note = 2'-Omethylguanosine phosphorothiorate
  modified_base 58: mod_base = OTHER; note = 2'-Omethylguanosine
  modified_base 67: mod_base = OTHER; note = 2'-Omethylguanosine
  modified_base 72: mod_base = OTHER; note = 2'-Omethyluridine
  modified_base 74: mod_base = OTHER; note = 2'-Omethylcytosine phosphorothiorate

SEQ ID NO: 3715 - RNA, 76 nt, synthetic construct; identical to SEQ ID NO: 625
  source 1..76: mol_type = other RNA
  modified_base 10: mod_base = OTHER; note = 2'-Omethylguanosine
  modified_base 11: mod_base = OTHER; note = 2'-Omethylcytosine
  modified_base 12: mod_base = OTHER; note = 2'-Omethylguanosine
  modified_base 13: mod_base = OTHER; note = 2'-Omethylcytosine
  modified_base 44: mod_base = OTHER; note = 2'-Omethyladenosine
  modified_base 45: mod_base = OTHER; note = 2'-Omethylguanosine
  modified_base 46: mod_base = OTHER; note = 2'-Omethylguanosine

SEQ ID NO: 3716 - RNA, 85 nt, synthetic construct; identical to SEQ ID NO: 3286
  source 1..85: mol_type = other RNA
  modified_base 1: mod_base = OTHER; note = 2'-fluorocytosine
  modified_base 12: mod_base = OTHER; note = Guanosine phosphorothiorate
  modified_base 30: mod_base = OTHER; note = 2'-fluoroadenosine
  modified_base 34: mod_base = OTHER; note = Uridine phosphorothiorate
  modified_base 44: mod_base = OTHER; note = 2'-Omethylguanosine
  modified_base 54: mod_base = OTHER; note = 2'-fluorocytosine
  modified_base 56: mod_base = OTHER; note = Guanosine phosphorothiorate
  modified_base 58: mod_base = OTHER; note = 2'-Omethylguanosine
  modified_base 76: mod_base = OTHER; note = 2'-fluorocytosine
  modified_base 84: mod_base = OTHER; note = Cytosine phosphorothiorate
  modified_base 85: mod_base = OTHER; note = 2'-Omethyladenosine

SEQ ID NO: 3717 - RNA, 75 nt, synthetic construct; identical to SEQ ID NO: 1045
  source 1..75: mol_type = other RNA
  modified_base 1: mod_base = OTHER; note = 2'-Omethylguanosine phosphorothiorate
  modified_base 2: mod_base = OTHER; note = 2'-Omethylguanosine phosphorothiorate
  modified_base 3: mod_base = OTHER; note = 2'-Omethyluridine
  modified_base 4: mod_base = OTHER; note = 2'-Omethyluridine
  modified_base 5: mod_base = OTHER; note = 2'-Omethylcytosine
  modified_base 6: mod_base = OTHER; note = 2'-Omethylcytosine
  modified_base 10: mod_base = OTHER; note = 2'-Omethylguanosine
  modified_base 11: mod_base = OTHER; note = 2'-Omethyluridine
  modified_base 12: mod_base = OTHER; note = 2'-Omethylguanosine
  modified_base 13: mod_base = OTHER; note = 2'-Omethyluridine
  modified_base 17: mod_base = OTHER; note = Guanosine phosphorothiorate
  modified_base 18: mod_base = OTHER; note = 2'-Omethylguanosine
  modified_base 19: mod_base = OTHER; note = Uridine phosphorothiorate
  modified_base 20: mod_base = OTHER; note = 2'-Omethyladenosine
  modified_base 22: mod_base = OTHER; note = 2'-Omethylguanosine
  modified_base 23: mod_base = OTHER; note = 2'-Omethylcytosine
  modified_base 24: mod_base = OTHER; note = 2'-Omethyladenosine
  modified_base 25: mod_base = OTHER; note = 2'-Omethylcytosine
  modified_base 29: mod_base = OTHER; note = 2'-Omethylguanosine
  modified_base 33: mod_base = OTHER; note = 2'-fluorouridine
  modified_base 35: mod_base = OTHER; note = Uridine phosphorothiorate
  modified_base 37: mod_base = OTHER; note = Adenosine phosphorothiorate
  modified_base 38: mod_base = OTHER; note = Adenosine phosphorothiorate
  modified_base 41: mod_base = OTHER; note = 2'-fluorocytosine phosphorothiorate
  modified_base 43: mod_base = OTHER; note = 2'-Omethylguanosine
  modified_base 44: mod_base = OTHER; note = 2'-fluorocytosine
  modified_base 46: mod_base = OTHER; note = Adenosine phosphorothiorate
  modified_base 48: mod_base = OTHER; note = 2'-Omethylcytosine
  modified_base 49: mod_base = OTHER; note = 2'-Omethylcytosine
  modified_base 50: mod_base = OTHER; note = 2'-Omethylguanosine
  modified_base 51: mod_base = OTHER; note = 2'-Omethyladenosine
  modified_base 52: mod_base = OTHER; note = 2'-Omethylguanosine
  modified_base 53: mod_base = OTHER; note = Uridine phosphorothiorate
  modified_base 54: mod_base = OTHER; note = Uridine phosphorothiorate
  modified_base 55: mod_base = OTHER; note = 2'-Omethylcytosine
  modified_base 56: mod_base = OTHER; note = Guanosine phosphorothiorate
  modified_base 60: mod_base = OTHER; note = 2'-Omethylcytosine
  modified_base 61: mod_base = OTHER; note = 2'-Omethyluridine
  modified_base 62: mod_base = OTHER; note = 2'-fluorocytosine
  modified_base 63: mod_base = OTHER; note = 2'-Omethylguanosine
  modified_base 64: mod_base = OTHER; note = 2'-Omethylguanosine
  modified_base 65: mod_base = OTHER; note = 2'-Omethyluridine
  modified_base 66: mod_base = OTHER; note = 2'-Omethylguanosine
  modified_base 67: mod_base = OTHER; note = 2'-Omethylguanosine
  modified_base 70: mod_base = OTHER; note = 2'-Omethylcytosine
  modified_base 72: mod_base = OTHER; note = 2'-Omethyluridine

SEQ ID NO: 3718 - RNA, 76 nt, synthetic construct; identical to SEQ ID NO: 625
  source 1..76: mol_type = other RNA
  modified_base 3: mod_base = OTHER; note = Cytosine phosphorothiorate
  modified_base 4: mod_base = OTHER; note = 2'-fluorouridine
  modified_base 5: mod_base = OTHER; note = 2'-Omethylcytosine
  modified_base 6: mod_base = OTHER; note = 2'-fluorocytosine phosphorothiorate
  modified_base 7: mod_base = OTHER; note = Guanosine phosphorothiorate
  modified_base 10: mod_base = OTHER; note = 2'-fluoroguanosine
  modified_base 13: mod_base = OTHER; note = 2'-Omethylcytosine
  modified_base 14: mod_base = OTHER; note = 2'-Omethyladenosine
  modified_base 15: mod_base = OTHER; note = 2'-Omethyladenosine
  modified_base 16: mod_base = OTHER; note = 2'-fluorouridine
  modified_base 20: mod_base = OTHER; note = Uridine phosphorothiorate
  modified_base 26: mod_base = OTHER; note = 2'-fluoroadenosine
  modified_base 32: mod_base = OTHER; note = 2'-fluorocytosine
  modified_base 33: mod_base = OTHER; note = 2'-fluorouridine
  modified_base 38: mod_base = OTHER; note = 2'-Omethyladenosine
  modified_base 39: mod_base = OTHER; note = Uridine phosphorothiorate
  modified_base 40: mod_base = OTHER; note = 2'-Omethyluridine
  modified_base 43: mod_base = OTHER; note = Adenosine phosphorothiorate
  modified_base 44: mod_base = OTHER; note = 2'-fluoroadenosine
  modified_base 46: mod_base = OTHER; note = Guanosine phosphorothiorate
  modified_base 47: mod_base = OTHER; note = 2'-fluorouridine
  modified_base 48: mod_base = OTHER; note = Uridine phosphorothiorate
  modified_base 49: mod_base = OTHER; note = Cytosine phosphorothiorate
  modified_base 50: mod_base = OTHER; note = 2'-fluorocytosine
  modified_base 51: mod_base = OTHER; note = Guanosine phosphorothiorate
  modified_base 52: mod_base = OTHER; note = 2'-fluoroguanosine
  modified_base 53: mod_base = OTHER; note = Guanosine phosphorothiorate
  modified_base 54: mod_base = OTHER; note = 2'-Omethyluridine
  modified_base 57: mod_base = OTHER; note = Guanosine phosphorothiorate
  modified_base 58: mod_base = OTHER; note = 2'-fluoroadenosine
  modified_base 59: mod_base = OTHER; note = 2'-Omethylguanosine
  modified_base 60: mod_base = OTHER; note = 2'-fluorouridine
  modified_base 61: mod_base = OTHER; note = Cytosine phosphorothiorate
  modified_base 62: mod_base = OTHER; note = 2'-fluorocytosine
  modified_base 68: mod_base = OTHER; note = 2'-fluoroguanosine
  modified_base 70: mod_base = OTHER; note = 2'-fluoroguanosine
  modified_base 73: mod_base = OTHER; note = Guanosine phosphorothiorate
  modified_base 76: mod_base = OTHER; note = 2'-Omethyladenosine

SEQ ID NO: 3719 - RNA, 85 nt, synthetic construct; identical to SEQ ID NO: 3317
  source 1..85: mol_type = other RNA
  modified_base 1: mod_base = OTHER; note = 2'-Omethylguanosine phosphorothiorate
  modified_base 2: mod_base = OTHER; note = Cytosine phosphorothiorate
  modified_base 3: mod_base = OTHER; note = 2'-Omethyluridine phosphorothiorate
  modified_base 12: mod_base = OTHER; note = 2'-Omethylcytosine
  modified_base 14: mod_base = OTHER; note = 2'-Omethyladenosine
  modified_base 20: mod_base = OTHER; note = 2'-Omethyluridine phosphorothiorate
  modified_base 28: mod_base = OTHER; note = Uridine phosphorothiorate
  modified_base 40: mod_base = OTHER; note = 2'-fluorocytosine phosphorothiorate
  modified_base 43: mod_base = OTHER; note = 2'-Omethyladenosine
  modified_base 44: mod_base = OTHER; note = 2'-fluorouridine
  modified_base 45: mod_base = OTHER; note = 2'-fluoroguanosine phosphorothiorate
  modified_base 48: mod_base = OTHER; note = 2'-fluoroguanosine
  modified_base 52: mod_base = OTHER; note = 2'-fluorocytosine
  modified_base 59: mod_base = OTHER; note = 2'-Omethylcytosine
  modified_base 60: mod_base = OTHER; note = Adenosine phosphorothiorate
  modified_base 64: mod_base = OTHER; note = 2'-Omethyluridine
  modified_base 80: mod_base = OTHER; note = 2'-Omethylguanosine
  modified_base 82: mod_base = OTHER; note = 2'-fluoroguanosine
  modified_base 84: mod_base = OTHER; note = 2'-fluorocytosine

SEQ ID NO: 3720 - RNA, 76 nt, synthetic construct; identical to SEQ ID NO: 625
  source 1..76: mol_type = other RNA
  modified_base 5: mod_base = OTHER; note = 2'-Omethylcytosine
  modified_base 7: mod_base = OTHER; note = Guanosine phosphorothiorate
  modified_base 9: mod_base = OTHER; note = Guanosine phosphorothiorate
  modified_base 10: mod_base = OTHER; note = Guanosine phosphorothiorate
  modified_base 11: mod_base = OTHER; note = 2'-Omethylcytosine phosphorothiorate
  modified_base 13: mod_base = OTHER; note = 2'-Omethylcytosine
  modified_base 14: mod_base = OTHER; note = 2'-Omethyladenosine
  modified_base 15: mod_base = OTHER; note = 2'-Omethyladenosine phosphorothiorate
  modified_base 16: mod_base = OTHER; note = 2'-fluorouridine
  modified_base 18: mod_base = OTHER; note = Guanosine phosphorothiorate
  modified_base 20: mod_base = OTHER; note = 2'-Omethyluridine
  modified_base 23: mod_base = OTHER; note = 2'-fluorocytosine
  modified_base 26: mod_base = OTHER; note = 2'-fluoroadenosine
  modified_base 27: mod_base = OTHER; note = 2'-Omethyluridine
  modified_base 28: mod_base = OTHER; note = Uridine phosphorothiorate
  modified_base 29: mod_base = OTHER; note = 2'-fluoroguanosine
  modified_base 31: mod_base = OTHER; note = 2'-fluoroadenosine
  modified_base 32: mod_base = OTHER; note = 2'-fluorocytosine
  modified_base 39: mod_base = OTHER; note = 2'-Omethyluridine phosphorothiorate
  modified_base 40: mod_base = OTHER; note = 2'-fluorouridine
  modified_base 41: mod_base = OTHER; note = Cytosine phosphorothiorate
  modified_base 43: mod_base = OTHER; note = Adenosine phosphorothiorate
  modified_base 44: mod_base = OTHER; note = 2'-fluoroadenosine
  modified_base 47: mod_base = OTHER; note = 2'-fluorouridine
  modified_base 59: mod_base = OTHER; note = 2'-fluoroguanosine phosphorothiorate
  modified_base 60: mod_base = OTHER; note = 2'-fluorouridine phosphorothiorate
  modified_base 61: mod_base = OTHER; note = Cytosine phosphorothiorate
  modified_base 66: mod_base = OTHER; note = 2'-fluorocytosine
  modified_base 67: mod_base = OTHER; note = 2'-fluoroguanosine
  modified_base 70: mod_base = OTHER; note = 2'-Omethylguanosine
  modified_base 72: mod_base = OTHER; note = Cytosine phosphorothiorate
  modified_base 73: mod_base = OTHER; note = 2'-Omethylguanosine
  modified_base 74: mod_base = OTHER; note = Cytosine phosphorothiorate
  modified_base 75: mod_base = OTHER; note = 2'-Omethylcytosine
  modified_base 76: mod_base = OTHER; note = 2'-fluoroadenosine

SEQ ID NO: 3721 - RNA, 76 nt, synthetic construct; identical to SEQ ID NO: 625
  source 1..76: mol_type = other RNA
  modified_base 1: mod_base = OTHER; note = 2'-Omethylguanosine
  modified_base 3: mod_base = OTHER; note = 2'-Omethylcytosine phosphorothiorate
  modified_base 10: mod_base = OTHER; note = 2'-Omethylguanosine
  modified_base 12: mod_base = OTHER; note = 2'-fluoroguanosine
  modified_base 14: mod_base = OTHER; note = 2'-fluoroadenosine
  modified_base 15: mod_base = OTHER; note = 2'-fluoroadenosine
  modified_base 18: mod_base = OTHER; note = 2'-fluoroguanosine
  modified_base 24: mod_base = OTHER; note = 2'-fluoroguanosine
  modified_base 26: mod_base = OTHER; note = 2'-fluoroadenosine
  modified_base 27: mod_base = OTHER; note = Uridine phosphorothiorate
  modified_base 28: mod_base = OTHER; note = 2'-Omethyluridine
  modified_base 30: mod_base = OTHER; note = 2'-fluoroguanosine
  modified_base 33: mod_base = OTHER; note = 2'-fluorouridine
  modified_base 40: mod_base = OTHER; note = 2'-fluorouridine
  modified_base 42: mod_base = OTHER; note = 2'-Omethyladenosine
  modified_base 43: mod_base = OTHER; note = 2'-Omethyladenosine
  modified_base 45: mod_base = OTHER; note = 2'-Omethylguanosine
  modified_base 46: mod_base = OTHER; note = Guanosine phosphorothiorate
  modified_base 50: mod_base = OTHER; note = 2'-Omethylcytosine phosphorothiorate
  modified_base 56: mod_base = OTHER; note = 2'-Omethylcytosine
  modified_base 59: mod_base = OTHER; note = 2'-fluoroguanosine
  modified_base 60: mod_base = OTHER; note = 2'-fluorouridine
  modified_base 63: mod_base = OTHER; note = 2'-fluorocytosine phosphorothiorate
  modified_base 64: mod_base = OTHER; note = 2'-fluoroguanosine phosphorothiorate
  modified_base 65: mod_base = OTHER; note = 2'-fluoroguanosine
  modified_base 66: mod_base = OTHER; note = 2'-fluorocytosine
  modified_base 69: mod_base = OTHER; note = 2'-Omethyladenosine
  modified_base 70: mod_base = OTHER; note = 2'-fluoroguanosine
  modified_base 71: mod_base = OTHER; note = Uridine phosphorothiorate
  modified_base 72: mod_base = OTHER; note = 2'-Omethylcytosine
  modified_base 73: mod_base = OTHER; note = 2'-fluoroguanosine
  modified_base 75: mod_base = OTHER; note = Cytosine phosphorothiorate

SEQ ID NO: 3722 - RNA, 85 nt, synthetic construct; identical to SEQ ID NO: 3297
  source 1..85: mol_type = other RNA
  modified_base 1: mod_base = OTHER; note = 2'-Omethylguanosine
  modified_base 2: mod_base = OTHER; note = 2'-Omethylcytosine
  modified_base 3: mod_base = OTHER; note = 2'-Omethyluridine
  modified_base 4: mod_base = OTHER; note = 2'-Omethylguanosine
  modified_base 5: mod_base = OTHER; note = 2'-Omethyluridine
  modified_base 6: mod_base = OTHER; note = 2'-Omethylguanosine
  modified_base 70: mod_base = OTHER; note = 2'-Omethylcytosine
  modified_base 71: mod_base = OTHER; note = 2'-Omethylcytosine
  modified_base 72: mod_base = OTHER; note = 2'-fluorouridine
  modified_base 73: mod_base = OTHER; note = 2'-Omethylguanosine
  modified_base 74: mod_base = OTHER; note = 2'-Omethylcytosine
  modified_base 75: mod_base = OTHER; note = 2'-Omethyluridine
  modified_base 76: mod_base = OTHER; note = 2'-Omethylcytosine
  modified_base 77: mod_base = OTHER; note = 2'-Omethyladenosine
  modified_base 82: mod_base = OTHER; note = 2'-Omethylguanosine

SEQ ID NO: 3723 - RNA, 76 nt, synthetic construct; identical to SEQ ID NO: 625
  source 1..76: mol_type = other RNA
  modified_base 1: mod_base = OTHER; note = 2'-Omethylguanosine
  modified_base 17: mod_base = OTHER; note = 2'-Omethylguanosine
  modified_base 18: mod_base = OTHER; note = 2'-Omethylguanosine
  modified_base 33: mod_base = OTHER; note = 2'-fluorouridine
  modified_base 50: mod_base = OTHER; note = 2'-Omethylcytosine
  modified_base 52: mod_base = OTHER; note = 2'-Omethylguanosine
  modified_base 55: mod_base = OTHER; note = Uridine phosphorothiorate
  modified_base 73: mod_base = OTHER; note = 2'-Omethylguanosine

SEQ ID NO: 3724 - RNA, 86 nt, synthetic construct; identical to SEQ ID NO: 3290
  source 1..86: mol_type = other RNA
  modified_base 55: mod_base = OTHER; note = 2'-Omethylcytosine

SEQ ID NO: 3725 - RNA, 85 nt, synthetic construct; identical to SEQ ID NO: 3297
  source 1..85: mol_type = other RNA
  modified_base 1: mod_base = OTHER; note = 2'-Omethylguanosine phosphorothiorate
  modified_base 4: mod_base = OTHER; note = 2'-fluoroguanosine
  modified_base 14: mod_base = OTHER; note = 2'-fluoroadenosine
  modified_base 26: mod_base = OTHER; note = 2'-fluoroguanosine
  modified_base 27: mod_base = OTHER; note = 2'-fluorouridine
  modified_base 47: mod_base = OTHER; note = 2'-Omethylguanosine
  modified_base 50: mod_base = OTHER; note = 2'-fluorocytosine
  modified_base 61: mod_base = OTHER; note = 2'-Omethylguanosine
  modified_base 82: mod_base = OTHER; note = 2'-Omethylguanosine

SEQ ID NO: 3726 - RNA, 85 nt, synthetic construct; identical to SEQ ID NO: 3317
  source 1..85: mol_type = other RNA
  modified_base 1: mod_base = OTHER; note = 2'-Omethylguanosine phosphorothiorate
  modified_base 2: mod_base = OTHER; note = Cytosine phosphorothiorate
  modified_base 3: mod_base = OTHER; note = 2'-Omethyluridine phosphorothiorate
  modified_base 7: mod_base = OTHER; note = 2'-fluoroadenosine phosphorothiorate
  modified_base 10: mod_base = OTHER; note = 2'-fluoroguanosine
  modified_base 17: mod_base = OTHER; note = Guanosine phosphorothiorate
  modified_base 18: mod_base = OTHER; note = 2'-Omethylguanosine
  modified_base 24: mod_base = OTHER; note = 2'-fluoroguanosine
  modified_base 36: mod_base = OTHER; note = 2'-fluoroadenosine
  modified_base 47: mod_base = OTHER; note = 2'-Omethylguanosine phosphorothiorate
  modified_base 55: mod_base = OTHER; note = 2'-Omethylcytosine phosphorothiorate
  modified_base 57: mod_base = OTHER; note = 2'-Omethylcytosine phosphorothiorate
  modified_base 58: mod_base = OTHER; note = 2'-fluoroguanosine
  modified_base 59: mod_base = OTHER; note = 2'-Omethylcytosine
  modified_base 71: mod_base = OTHER; note = 2'-fluorocytosine
  modified_base 72: mod_base = OTHER; note = 2'-fluorouridine
  modified_base 73: mod_base = OTHER; note = 2'-Omethylguanosine
  modified_base 83: mod_base = OTHER; note = Cytosine phosphorothiorate
  modified_base 84: mod_base = OTHER; note = 2'-Omethylcytosine

SEQ ID NO: 3727 - RNA, 76 nt, synthetic construct; identical to SEQ ID NO: 625
  source 1..76: mol_type = other RNA
  modified_base 1: mod_base = OTHER; note = 2'-Omethylguanosine phosphorothiorate
  modified_base 2: mod_base = OTHER; note = 2'-Omethylguanosine phosphorothiorate
  modified_base 3: mod_base = OTHER; note = 2'-Omethylcytosine
  modified_base 5: mod_base = OTHER; note = 2'-fluorocytosine phosphorothiorate
  modified_base 6: mod_base = OTHER; note = 2'-Omethylcytosine phosphorothiorate
  modified_base 17: mod_base = OTHER; note = 2'-Omethylguanosine
  modified_base 18: mod_base = OTHER; note = 2'-Omethylguanosine
  modified_base 20: mod_base = OTHER; note = 2'-fluorouridine phosphorothiorate
  modified_base 21: mod_base = OTHER; note = Adenosine phosphorothiorate
  modified_base 23: mod_base = OTHER; note = 2'-fluorocytosine
  modified_base 25: mod_base = OTHER; note = Cytosine phosphorothiorate
  modified_base 28: mod_base = OTHER; note = 2'-Omethyluridine
  modified_base 33: mod_base = OTHER; note = Uridine phosphorothiorate
  modified_base 34: mod_base = OTHER; note = 2'-Omethyluridine
  modified_base 36: mod_base = OTHER; note = Adenosine phosphorothiorate
  modified_base 38: mod_base = OTHER; note = 2'-fluoroadenosine
  modified_base 40: mod_base = OTHER; note = Uridine phosphorothiorate
  modified_base 42: mod_base = OTHER; note = 2'-Omethyladenosine phosphorothiorate
  modified_base 45: mod_base = OTHER; note = Guanosine phosphorothiorate
  modified_base 46: mod_base = OTHER; note = 2'-fluoroguanosine phosphorothiorate
  modified_base 47: mod_base = OTHER; note = 2'-fluorouridine
  modified_base 48: mod_base = OTHER; note = Uridine phosphorothiorate
  modified_base 49: mod_base = OTHER; note = 2'-Omethylcytosine
  modified_base 52: mod_base = OTHER; note = Guanosine phosphorothiorate
  modified_base 53: mod_base = OTHER; note = 2'-fluoroguanosine
  modified_base 56: mod_base = OTHER; note = 2'-Omethylcytosine
  modified_base 57: mod_base = OTHER; note = 2'-Omethylguanosine
  modified_base 59: mod_base = OTHER; note = 2'-Omethylguanosine phosphorothiorate
  modified_base 60: mod_base = OTHER; note = 2'-Omethyluridine
  modified_base 63: mod_base = OTHER; note = Cytosine phosphorothiorate
  modified_base 69: mod_base = OTHER; note = 2'-Omethyladenosine
  modified_base 70: mod_base = OTHER; note = Guanosine phosphorothiorate
  modified_base 71: mod_base = OTHER; note = 2'-Omethyluridine

SEQ ID NO: 3728 - RNA, 76 nt, synthetic construct; identical to SEQ ID NO: 625
  source 1..76: mol_type = other RNA
  modified_base 1: mod_base = OTHER; note = 2'-Omethylguanosine phosphorothiorate
  modified_base 2: mod_base = OTHER; note = 2'-Omethylguanosine
  modified_base 33: mod_base = OTHER; note = 2'-fluorouridine
  modified_base 35: mod_base = OTHER; note = Cytosine phosphorothiorate
  modified_base 37: mod_base = OTHER; note = Adenosine phosphorothiorate
  modified_base 38: mod_base = OTHER; note = Adenosine phosphorothiorate
  modified_base 52: mod_base = OTHER; note = 2'-Omethylguanosine
  modified_base 56: mod_base = OTHER; note = 2'-Omethylcytosine
  modified_base 62: mod_base = OTHER; note = 2'-Omethylcytosine
  modified_base 63: mod_base = OTHER; note = 2'-fluorocytosine
  modified_base 65: mod_base = OTHER; note = 2'-Omethylguanosine
  modified_base 73: mod_base = OTHER; note = 2'-Omethylguanosine
  modified_base 75: mod_base = OTHER; note = 2'-fluorocytosine phosphorothiorate

SEQ ID NO: 3729 - RNA, 76 nt, synthetic construct; identical to SEQ ID NO: 3325
  source 1..76: mol_type = other RNA
  modified_base 1: mod_base = OTHER; note = 2'-Omethyluridine
  modified_base 2: mod_base = OTHER; note = 2'-Omethyladenosine
  modified_base 3: mod_base = OTHER; note = 2'-Omethylcytosine
  modified_base 4: mod_base = OTHER; note = 2'-Omethyladenosine
  modified_base 5: mod_base = OTHER; note = 2'-Omethylcytosine
  modified_base 6: mod_base = OTHER; note = 2'-Omethylcytosine
  modified_base 14: mod_base = OTHER; note = 2'-Omethyladenosine
  modified_base 15: mod_base = OTHER; note = 2'-Omethyladenosine
  modified_base 16: mod_base = OTHER; note = 2'-Omethyluridine
  modified_base 17: mod_base = OTHER; note = 2'-Omethylguanosine
  modified_base 18: mod_base = OTHER; note = 2'-Omethylguanosine
  modified_base 20: mod_base = OTHER; note = 2'-Omethyluridine
  modified_base 25: mod_base = OTHER; note = 2'-Omethylcytosine
  modified_base 33: mod_base = OTHER; note = 2'-fluorouridine
  modified_base 35: mod_base = OTHER; note = Cytosine phosphorothiorate
  modified_base 37: mod_base = OTHER; note = Adenosine phosphorothiorate
  modified_base 38: mod_base = OTHER; note = Adenosine phosphorothiorate
  modified_base 41: mod_base = OTHER; note = 2'-fluorocytosine
  modified_base 42: mod_base = OTHER; note = 2'-Omethyladenosine
  modified_base 43: mod_base = OTHER; note = 2'-Omethyladenosine
  modified_base 44: mod_base = OTHER; note = 2'-fluoroadenosine
  modified_base 49: mod_base = OTHER; note = 2'-Omethylcytosine
  modified_base 50: mod_base = OTHER; note = 2'-Omethylcytosine
  modified_base 52: mod_base = OTHER; note = 2'-Omethylguanosine
  modified_base 54: mod_base = OTHER; note = 2'-Omethyluridine
  modified_base 55: mod_base = OTHER; note = Uridine phosphorothiorate
  modified_base 56: mod_base = OTHER; note = 2'-Omethylcytosine
  modified_base 57: mod_base = OTHER; note = 2'-fluoroguanosine
  modified_base 59: mod_base = OTHER; note = 2'-Omethylguanosine
  modified_base 61: mod_base = OTHER; note = 2'-Omethylcytosine
  modified_base 62: mod_base = OTHER; note = 2'-Omethylcytosine
  modified_base 63: mod_base = OTHER; note = 2'-fluorocytosine
  modified_base 64: mod_base = OTHER; note = 2'-Omethylguanosine
  modified_base 65: mod_base = OTHER; note = 2'-Omethylguanosine
  modified_base 73: mod_base = OTHER; note = 2'-Omethylguanosine

SEQ ID NO: 3730 - RNA, 76 nt, synthetic construct; identical to SEQ ID NO: 625
  source 1..76: mol_type = other RNA
  modified_base 1: mod_base = OTHER; note = 2'-Omethylguanosine phosphorothiorate
  modified_base 2: mod_base = OTHER; note = 2'-Omethylguanosine
  modified_base 12: mod_base = OTHER; note = 2'-Omethylguanosine
  modified_base 33: mod_base = OTHER; note = 2'-fluorouridine
  modified_base 35: mod_base = OTHER; note = Cytosine phosphorothiorate
  modified_base 37: mod_base = OTHER; note = Adenosine phosphorothiorate
  modified_base 52: mod_base = OTHER; note = 2'-Omethylguanosine
  modified_base 62: mod_base = OTHER; note = 2'-Omethylcytosine
  modified_base 73: mod_base = OTHER; note = 2'-Omethylguanosine
  modified_base 75: mod_base = OTHER; note = 2'-fluorocytosine phosphorothiorate

SEQ ID NO: 3731 - RNA, 75 nt, synthetic construct; identical to SEQ ID NO: 3336
  source 1..75: mol_type = other RNA
  modified_base 9: mod_base = OTHER; note = 2'-Omethylguanosine phosphorothiorate
  modified_base 13: mod_base = OTHER; note = Adenosine phosphorothiorate
  modified_base 18: mod_base = OTHER; note = 2'-fluoroguanosine
  modified_base 23: mod_base = OTHER; note = 2'-fluoroguanosine phosphorothiorate
  modified_base 25: mod_base = OTHER; note = Adenosine phosphorothiorate
  modified_base 28: mod_base = OTHER; note = Adenosine phosphorothiorate
  modified_base 29: mod_base = OTHER; note = Guanosine phosphorothiorate
  modified_base 34: mod_base = OTHER; note = 2'-fluorouridine
  modified_base 35: mod_base = OTHER; note = 2'-Omethyladenosine phosphorothiorate
  modified_base 40: mod_base = OTHER; note = 2'-fluorouridine
  modified_base 41: mod_base = OTHER; note = 2'-Omethylguanosine phosphorothiorate
  modified_base 47: mod_base = OTHER; note = 2'-fluorocytosine
  modified_base 48: mod_base = OTHER; note = 2'-fluorocytosine
  modified_base 49: mod_base = OTHER; note = 2'-fluoroadenosine
  modified_base 61: mod_base = OTHER; note = 2'-fluorocytosine
  modified_base 62: mod_base = OTHER; note = 2'-fluorocytosine phosphorothiorate
  modified_base 71: mod_base = OTHER; note = 2'-fluorocytosine
  modified_base 73: mod_base = OTHER; note = Cytosine phosphorothiorate
  modified_base 74: mod_base = OTHER; note = Cytosine phosphorothiorate

SEQ ID NO: 3732 - RNA, 76 nt, synthetic construct; identical to SEQ ID NO: 3289
  source 1..76: mol_type = other RNA
  modified_base 1: mod_base = OTHER; note = 2'-Omethylguanosine
  modified_base 18: mod_base = OTHER; note = 2'-Omethylguanosine
  modified_base 19: mod_base = OTHER; note = 2'-Omethylguanosine
  modified_base 33: mod_base = OTHER; note = Uridine phosphorothiorate
  modified_base 34: mod_base = OTHER; note = 2'-Omethyluridine
  modified_base 35: mod_base = OTHER; note = Uridine phosphorothiorate
  modified_base 36: mod_base = OTHER; note = Adenosine phosphorothiorate
  modified_base 37: mod_base = OTHER; note = Adenosine phosphorothiorate
  modified_base 38: mod_base = OTHER; note = Adenosine phosphorothiorate
  modified_base 50: mod_base = OTHER; note = 2'-Omethyladenosine
  modified_base 52: mod_base = OTHER; note = 2'-Omethylguanosine
  modified_base 73: mod_base = OTHER; note = 2'-Omethylguanosine

SEQ ID NO: 3733 - DNA, 76 bp, synthetic construct; identical to SEQ ID NO: 1924
  source 1..76: mol_type = other DNA
  modified_base 1: mod_base = OTHER; note = 2'-Omethylguanosine phosphorothiorate
  modified_base 2: mod_base = OTHER; note = 2'-Omethylguanosine phosphorothiorate
  modified_base 3: mod_base = OTHER; note = deoxycytosine phosphorothiorate
  modified_base 4: mod_base = OTHER; note = 2'-O-(2-Methoxyethyl) thymine
  modified_base 8: mod_base = OTHER; note = 2'-fluorouridine
  modified_base 10: mod_base = OTHER; note = Guanosine phosphorothiorate
  modified_base 12: mod_base = OTHER; note = Guanosine phosphorothiorate
  modified_base 16: mod_base = OTHER; note = 2'-fluorouridine phosphorothiorate
  modified_base 17: mod_base = OTHER; note = 2'-O-(2-Methoxyethyl) guanosine
  modified_base 20: mod_base = OTHER; note = Uridine phosphorothiorate
  modified_base 26: mod_base = OTHER; note = 2'-fluoroadenosine
  modified_base 27: mod_base = OTHER; note = 2'-O-(2-Methoxyethyl) thymine
  modified_base 30: mod_base = OTHER; note = Guanosine phosphorothiorate
  modified_base 31: mod_base = OTHER; note = 2'-O-(2-Methoxyethyl) adenosine
  modified_base 34: mod_base = OTHER; note = 2'-fluorouridine phosphorothiorate
  modified_base 36: mod_base = OTHER; note = Adenosine phosphorothiorate
  modified_base 37: mod_base = OTHER; note = 2'-fluoroadenosine
  modified_base 42: mod_base = OTHER; note = 2'-fluoroadenosine
  modified_base 45: mod_base = OTHER; note = 2'-O-(2-Methoxyethyl) guanosine
  modified_base 46: mod_base = OTHER; note = 2'-O-(2-Methoxyethyl) guanosine
  modified_base 48: mod_base = OTHER; note = 2'-fluorouridine
  modified_base 50: mod_base = OTHER; note = 2'-O-(2-Methoxyethyl) 5-methylcytosine phosphorothiorate
  modified_base 51: mod_base = OTHER; note = 2'-O-(2-Methoxyethyl) guanosine
  modified_base 52: mod_base = OTHER; note = deoxyguanosine phosphorothiorate
  modified_base 53: mod_base = OTHER; note = deoxyguanosine phosphorothiorate
  modified_base 54: mod_base = OTHER; note = 2'-fluorouridine
  modified_base 60: mod_base = OTHER; note = Uridine phosphorothiorate
  modified_base 62: mod_base = OTHER; note = 2'-Omethylcytosine
  modified_base 63: mod_base = OTHER; note = Cytosine phosphorothiorate
  modified_base 65: mod_base = OTHER; note = Guanosine phosphorothiorate
  modified_base 72: mod_base = OTHER; note = 2'-Omethylcytosine
  modified_base 75: mod_base = OTHER; note = 2'-fluorocytosine phosphorothiorate
  modified_base 76: mod_base = OTHER; note = 2'-Omethyladenosine
  misc_feature 1..2: note = RNA
  misc_feature 3: note = DNA
  misc_feature 4: note = RNA
  misc_feature 5: note = DNA
  misc_feature 6..12: note = RNA
  misc_feature 13: note = DNA
  misc_feature 14..18: note = RNA
  misc_feature 19: note = DNA
  misc_feature 20..34: note = RNA
  misc_feature 35: note = DNA
  misc_feature 36..40: note = RNA
  misc_feature 41: note = DNA
  misc_feature 42..51: note = RNA
  misc_feature 52..53: note = DNA
  misc_feature 54..55: note = RNA
  misc_feature 56: note = DNA
  misc_feature 57..60: note = RNA
  misc_feature 61: note = DNA
  misc_feature 62..69: note = RNA
  misc_feature 70: note = DNA
  misc_feature 71..76: note = RNA

SEQ ID NO: 3734 - RNA, 76 nt, synthetic construct; identical to SEQ ID NO: 3318
  source 1..76: mol_type = other RNA
  modified_base 19: mod_base = OTHER; note = 2'-Omethylguanosine
  modified_base 73: mod_base = OTHER; note = 2'-Omethyladenosine

SEQ ID NO: 3735 - RNA, 76 nt, synthetic construct
  source 1..76: mol_type = other RNA
ggctccgtggcgcaatggacagcgctttggacttcaaattcaaaggttccgggttcgagtcccggcggagtcgcca

SEQ ID NO: 3736 - DNA, 74 bp, synthetic construct; identical to SEQ ID NO: 3384
  source 1..74: mol_type = other DNA
  modified_base 1: mod_base = OTHER; note = 2'-Omethylguanosine phosphorothiorate
  modified_base 2: mod_base = OTHER; note = 2'-Omethylguanosine phosphorothiorate
  modified_base 73: mod_base = OTHER; note = 2'-Omethylguanosine
  misc_feature 1..71: note = RNA
  misc_feature 72: note = DNA
  misc_feature 73..74: note = RNA

SEQ ID NO: 3737 - RNA, 76 nt, synthetic construct; identical to SEQ ID NO: 625
  source 1..76: mol_type = other RNA
  modified_base 1: mod_base = OTHER; note = 2'-Omethylguanosine
  modified_base 5: mod_base = OTHER; note = 2'-Omethylcytosine
  modified_base 6: mod_base = OTHER; note = 2'-fluorocytosine
  modified_base 7: mod_base = OTHER; note = Guanosine phosphorothiorate
  modified_base 10: mod_base = OTHER; note = 2'-fluoroguanosine
  modified_base 13: mod_base = OTHER; note = 2'-Omethylcytosine
  modified_base 14: mod_base = OTHER; note = Adenosine phosphorothiorate
  modified_base 15: mod_base = OTHER; note = 2'-Omethyladenosine
  modified_base 16: mod_base = OTHER; note = 2'-Omethyluridine
  modified_base 17: mod_base = OTHER; note = 2'-Omethylguanosine phosphorothiorate
  modified_base 22: mod_base = OTHER; note = Guanosine phosphorothiorate
  modified_base 23: mod_base = OTHER; note = 2'-Omethylcytosine
  modified_base 24: mod_base = OTHER; note = 2'-fluoroguanosine
  modified_base 27: mod_base = OTHER; note = 2'-Omethyluridine
  modified_base 31: mod_base = OTHER; note = 2'-Omethyladenosine
  modified_base 34: mod_base = OTHER; note = 2'-Omethyluridine
  modified_base 41: mod_base = OTHER; note = Cytosine phosphorothiorate
  modified_base 42: mod_base = OTHER; note = 2'-Omethyladenosine
  modified_base 45: mod_base = OTHER; note = 2'-fluoroguanosine
  modified_base 49: mod_base = OTHER; note = 2'-Omethylcytosine
  modified_base 50: mod_base = OTHER; note = 2'-Omethylcytosine
  modified_base 51: mod_base = OTHER; note = 2'-Omethylguanosine
  modified_base 52: mod_base = OTHER; note = 2'-Omethylguanosine
  modified_base 53: mod_base = OTHER; note = 2'-fluoroguanosine
  modified_base 54: mod_base = OTHER; note = 2'-Omethyluridine
  modified_base 56: mod_base = OTHER; note = 2'-Omethylcytosine
  modified_base 57: mod_base = OTHER; note = 2'-fluoroguanosine
  modified_base 60: mod_base = OTHER; note = 2'-fluorouridine
  modified_base 61: mod_base = OTHER; note = 2'-Omethylcytosine
  modified_base 62: mod_base = OTHER; note = 2'-fluorocytosine
  modified_base 63: mod_base = OTHER; note = 2'-fluorocytosine
  modified_base 64: mod_base = OTHER; note = 2'-Omethylguanosine
  modified_base 65: mod_base = OTHER; note = Guanosine phosphorothiorate
  modified_base 66: mod_base = OTHER; note = 2'-fluorocytosine
  modified_base 68: mod_base = OTHER; note = 2'-Omethylguanosine phosphorothiorate
  modified_base 69: mod_base = OTHER; note = Adenosine phosphorothiorate
  modified_base 70: mod_base = OTHER; note = Guanosine phosphorothiorate
  modified_base 71: mod_base = OTHER; note = 2'-Omethyluridine
  modified_base 73: mod_base = OTHER; note = Guanosine phosphorothiorate
  modified_base 74: mod_base = OTHER; note = 2'-fluorocytosine

SEQ ID NO: 3738 - RNA, 76 nt, synthetic construct; identical to SEQ ID NO: 625
  source 1..76: mol_type = other RNA
  modified_base 1: mod_base = OTHER; note = 2'-Omethylguanosine phosphorothiorate
  modified_base 2: mod_base = OTHER; note = 2'-Omethylguanosine phosphorothiorate
  modified_base 62: mod_base = OTHER; note = Cytosine phosphorothiorate
  modified_base 63: mod_base = OTHER; note = 2'-O-(2-Methoxyethyl) 5-methylcytosine
  modified_base 74: mod_base = OTHER; note = Cytosine phosphorothiorate
  modified_base 75: mod_base = OTHER; note = 2'-Omethylcytosine

SEQ ID NO: 3739 - RNA, 76 nt, synthetic construct; identical to SEQ ID NO: 625
  source 1..76: mol_type = other RNA
  modified_base 1: mod_base = OTHER; note = 2'-Omethylguanosine phosphorothiorate
  modified_base 2: mod_base = OTHER; note = 2'-Omethylguanosine
  modified_base 3: mod_base = OTHER; note = 2'-Omethylcytosine
  modified_base 4: mod_base = OTHER; note = 2'-Omethyluridine
  modified_base 5: mod_base = OTHER; note = 2'-Omethylcytosine
  modified_base 6: mod_base = OTHER; note = 2'-Omethylcytosine
  modified_base 10: mod_base = OTHER; note = 2'-Omethylguanosine
  modified_base 11: mod_base = OTHER; note = 2'-Omethylcytosine
  modified_base 12: mod_base = OTHER; note = 2'-Omethylguanosine
  modified_base 13: mod_base = OTHER; note = 2'-Omethylcytosine
  modified_base 14: mod_base = OTHER; note = 2'-Omethyladenosine
  modified_base 15: mod_base = OTHER; note = 2'-fluoroadenosine
  modified_base 16: mod_base = OTHER; note = 2'-Omethyluridine
  modified_base 17: mod_base = OTHER; note = 2'-Omethylguanosine
  modified_base 18: mod_base = OTHER; note = 2'-Omethylguanosine
  modified_base 19: mod_base = OTHER; note = 2'-fluoroadenosine
  modified_base 20: mod_base = OTHER; note = 2'-Omethyluridine
  modified_base 21: mod_base = OTHER; note = 2'-fluoroadenosine
  modified_base 22: mod_base = OTHER; note = 2'-Omethylguanosine
  modified_base 23: mod_base = OTHER; note = 2'-Omethylcytosine
  modified_base 24: mod_base = OTHER; note = 2'-Omethylguanosine
  modified_base 25: mod_base = OTHER; note = 2'-Omethylcytosine
  modified_base 38: mod_base = OTHER; note = Adenosine phosphorothiorate
  modified_base 39: mod_base = OTHER; note = Uridine phosphorothiorate
  modified_base 40: mod_base = OTHER; note = 2'-fluorouridine
  modified_base 43: mod_base = OTHER; note = 2'-Omethyladenosine
  modified_base 44: mod_base = OTHER; note = 2'-Omethyladenosine
  modified_base 45: mod_base = OTHER; note = 2'-Omethylguanosine
  modified_base 46: mod_base = OTHER; note = 2'-fluoroguanosine
  modified_base 48: mod_base = OTHER; note = 2'-fluorouridine
  modified_base 49: mod_base = OTHER; note = 2'-Omethylcytosine
  modified_base 50: mod_base = OTHER; note = 2'-Omethylcytosine
  modified_base 51: mod_base = OTHER; note = 2'-Omethylguanosine
  modified_base 52: mod_base = OTHER; note = 2'-Omethylguanosine
  modified_base 53: mod_base = OTHER; note = 2'-Omethylguanosine
  modified_base 54: mod_base = OTHER; note = 2'-Omethyluridine
  modified_base 61: mod_base = OTHER; note = 2'-Omethylcytosine
  modified_base 62: mod_base = OTHER; note = 2'-Omethylcytosine
  modified_base 63: mod_base = OTHER; note = 2'-fluorocytosine
  modified_base 64: mod_base = OTHER; note = 2'-Omethylguanosine
  modified_base 65: mod_base = OTHER; note = 2'-Omethylguanosine
  modified_base 66: mod_base = OTHER; note = 2'-Omethylcytosine
  modified_base 67: mod_base = OTHER; note = 2'-Omethylguanosine
  modified_base 68: mod_base = OTHER; note = 2'-Omethylguanosine
  modified_base 69: mod_base = OTHER; note = 2'-Omethyladenosine

SEQ ID NO: 3740 - RNA, 76 nt, synthetic construct; identical to SEQ ID NO: 625
  source 1..76: mol_type = other RNA
  modified_base 1: mod_base = OTHER; note = 2'-Omethylguanosine phosphorothiorate
  modified_base 2: mod_base = OTHER; note = 2'-Omethylguanosine
  modified_base 33: mod_base = OTHER; note = 2'-fluorouridine
  modified_base 35: mod_base = OTHER; note = Cytosine phosphorothiorate
  modified_base 37: mod_base = OTHER; note = Adenosine phosphorothiorate
  modified_base 38: mod_base = OTHER; note = Adenosine phosphorothiorate
  modified_base 52: mod_base = OTHER; note = 2'-Omethylguanosine
  modified_base 62: mod_base = OTHER; note = 2'-Omethylcytosine
  modified_base 68: mod_base = OTHER; note = 2'-Omethylguanosine
  modified_base 73: mod_base = OTHER; note = 2'-Omethylguanosine
  modified_base 75: mod_base = OTHER; note = 2'-fluorocytosine phosphorothiorate

SEQ ID NO: 3741 - RNA, 76 nt, synthetic construct; identical to SEQ ID NO: 3289
  source 1..76: mol_type = other RNA
  modified_base 1: mod_base = OTHER; note = 2'-Omethylguanosine
  modified_base 20: mod_base = OTHER; note = 2'-fluorouridine
  modified_base 21: mod_base = OTHER; note = 2'-Omethyladenosine
  modified_base 22: mod_base = OTHER; note = 2'-Omethylguanosine
  modified_base 40: mod_base = OTHER; note = 2'-fluorocytosine
  modified_base 41: mod_base = OTHER; note = 2'-Omethyluridine
  modified_base 42: mod_base = OTHER; note = 2'-Omethylguanosine
  modified_base 43: mod_base = OTHER; note = 2'-Omethyladenosine
  modified_base 73: mod_base = OTHER; note = 2'-Omethylguanosine

SEQ ID NO: 3742 - RNA, 75 nt, synthetic construct; identical to SEQ ID NO: 3299
  source 1..75: mol_type = other RNA
  modified_base 1: mod_base = OTHER; note = 2'-Omethylcytosine
  modified_base 3: mod_base = OTHER; note = 2'-Omethyluridine
  modified_base 11: mod_base = OTHER; note = Uridine phosphorothiorate
  modified_base 13: mod_base = OTHER; note = 2'-fluoroadenosine
  modified_base 19: mod_base = OTHER; note = 2'-fluorouridine
  modified_base 20: mod_base = OTHER; note = 2'-fluoroadenosine
  modified_base 21: mod_base = OTHER; note = Guanosine phosphorothiorate
  modified_base 23: mod_base = OTHER; note = Guanosine phosphorothiorate
  modified_base 28: mod_base = OTHER; note = 2'-Omethyladenosine phosphorothiorate
  modified_base 36: mod_base = OTHER; note = 2'-fluoroadenosine
  modified_base 37: mod_base = OTHER; note = 2'-fluoroadenosine phosphorothiorate
  modified_base 39: mod_base = OTHER; note = 2'-Omethylcytosine phosphorothiorate
  modified_base 46: mod_base = OTHER; note = 2'-fluorouridine
  modified_base 48: mod_base = OTHER; note = 2'-fluorocytosine
  modified_base 49: mod_base = OTHER; note = Adenosine phosphorothiorate
  modified_base 52: mod_base = OTHER; note = 2'-fluoroguanosine phosphorothiorate
  modified_base 56: mod_base = OTHER; note = 2'-Omethyladenosine phosphorothiorate
  modified_base 61: mod_base = OTHER; note = 2'-fluorocytosine
  modified_base 74: mod_base = OTHER; note = Cytosine phosphorothiorate

SEQ ID NO: 3743 - RNA, 76 nt, synthetic construct; identical to SEQ ID NO: 625
  source 1..76: mol_type = other RNA
  modified_base 1: mod_base = OTHER; note = 2'-Omethylguanosine phosphorothiorate
  modified_base 2: mod_base = OTHER; note = 2'-Omethylguanosine
  modified_base 33: mod_base = OTHER; note = 2'-fluorouridine
  modified_base 35: mod_base = OTHER; note = Cytosine phosphorothiorate
  modified_base 37: mod_base = OTHER; note = Adenosine phosphorothiorate
  modified_base 38: mod_base = OTHER; note = Adenosine phosphorothiorate
  modified_base 52: mod_base = OTHER; note = 2'-Omethylguanosine
  modified_base 54: mod_base = OTHER; note = 2'-Omethyluridine
  modified_base 62: mod_base = OTHER; note = 2'-Omethylcytosine
  modified_base 63: mod_base = OTHER; note = 2'-fluorocytosine
  modified_base 65: mod_base = OTHER; note = 2'-Omethylguanosine
  modified_base 73: mod_base = OTHER; note = 2'-Omethylguanosine
  modified_base 75: mod_base = OTHER; note = 2'-fluorocytosine phosphorothiorate

SEQ ID NO: 3744 - RNA, 76 nt, synthetic construct; identical to SEQ ID NO: 625
  source 1..76: mol_type = other RNA
  modified_base 8: mod_base = OTHER; note = Thymine
  modified_base 16: mod_base = OTHER; note = Thymine
  modified_base 20: mod_base = OTHER; note = Thymine
  modified_base 27: mod_base = OTHER; note = Thymine
  modified_base 28: mod_base = OTHER; note = Thymine
  modified_base 39: mod_base = OTHER; note = Thymine
  modified_base 40: mod_base = OTHER; note = Thymine
  modified_base 47: mod_base = OTHER; note = Thymine
  modified_base 48: mod_base = OTHER; note = Thymine
  modified_base 54: mod_base = OTHER; note = Thymine
  modified_base 55: mod_base = OTHER; note = Thymine
  modified_base 60: mod_base = OTHER; note = Thymine

SEQ ID NO: 3745 - RNA, 76 nt, synthetic construct; identical to SEQ ID NO: 3675
  source 1..76: mol_type = other RNA
  modified_base 1: mod_base = OTHER; note = 2'-Omethylguanosine
  modified_base 2: mod_base = OTHER; note = 2'-Omethylcytosine
  modified_base 3: mod_base = OTHER; note = 2'-Omethylcytosine
  modified_base 4: mod_base = OTHER; note = 2'-Omethyluridine
  modified_base 5: mod_base = OTHER; note = 2'-Omethylcytosine
  modified_base 6: mod_base = OTHER; note = 2'-Omethylcytosine
  modified_base 13: mod_base = OTHER; note = 2'-Omethylcytosine
  modified_base 14: mod_base = OTHER; note = 2'-Omethyladenosine
  modified_base 15: mod_base = OTHER; note = 2'-Omethyladenosine
  modified_base 16: mod_base = OTHER; note = 2'-Omethyluridine
  modified_base 17: mod_base = OTHER; note = 2'-Omethylguanosine
  modified_base 18: mod_base = OTHER; note = 2'-Omethylguanosine
  modified_base 19: mod_base = OTHER; note = Adenosine phosphorothiorate
  modified_base 20: mod_base = OTHER; note = 2'-Omethyluridine
  modified_base 21: mod_base = OTHER; note = Adenosine phosphorothiorate
  modified_base 25: mod_base = OTHER; note = 2'-Omethylcytosine
  modified_base 33: mod_base = OTHER; note = Uridine phosphorothiorate
  modified_base 34: mod_base = OTHER; note = 2'-Omethyluridine
  modified_base 35: mod_base = OTHER; note = Cytosine phosphorothiorate
  modified_base 37: mod_base = OTHER; note = Adenosine phosphorothiorate
  modified_base 38: mod_base = OTHER; note = Adenosine phosphorothiorate
  modified_base 49: mod_base = OTHER; note = 2'-Omethylcytosine
  modified_base 50: mod_base = OTHER; note = 2'-Omethylcytosine
  modified_base 51: mod_base = OTHER; note = 2'-Omethylguanosine
  modified_base 52: mod_base = OTHER; note = 2'-Omethylguanosine
  modified_base 53: mod_base = OTHER; note = 2'-Omethylguanosine
  modified_base 54: mod_base = OTHER; note = Uridine phosphorothiorate
  modified_base 55: mod_base = OTHER; note = Uridine phosphorothiorate
  modified_base 61: mod_base = OTHER; note = 2'-Omethylcytosine
  modified_base 65: mod_base = OTHER; note = 2'-Omethylguanosine
  modified_base 73: mod_base = OTHER; note = 2'-Omethylguanosine

SEQ ID NO: 3746 - RNA, 76 nt, synthetic construct; identical to SEQ ID NO: 625
  source 1..76: mol_type = other RNA
  modified_base 1: mod_base = OTHER; note = 2'-Omethylguanosine
  modified_base 2: mod_base = OTHER; note = 2'-Omethylguanosine
  modified_base 3: mod_base = OTHER; note = 2'-Omethylcytosine
  modified_base 4: mod_base = OTHER; note = 2'-Omethyluridine
  modified_base 5: mod_base = OTHER; note = 2'-Omethylcytosine
  modified_base 6: mod_base = OTHER; note = 2'-Omethylcytosine
  modified_base 10: mod_base = OTHER; note = 2'-Omethylguanosine
  modified_base 11: mod_base = OTHER; note = 2'-Omethylcytosine
  modified_base 12: mod_base = OTHER; note = 2'-Omethylguanosine
  modified_base 13: mod_base = OTHER; note = 2'-Omethylcytosine
  modified_base 14: mod_base = OTHER; note = 2'-Omethyladenosine
  modified_base 15: mod_base = OTHER; note = 2'-fluoroadenosine
  modified_base 16: mod_base = OTHER; note = 2'-Omethyluridine
  modified_base 17: mod_base = OTHER; note = 2'-Omethylguanosine
  modified_base 18: mod_base = OTHER; note = 2'-Omethylguanosine
  modified_base 19: mod_base = OTHER; note = 2'-fluoroadenosine
  modified_base 20: mod_base = OTHER; note = 2'-Omethyluridine
  modified_base 22: mod_base = OTHER; note = 2'-Omethylguanosine
  modified_base 23: mod_base = OTHER; note = 2'-Omethylcytosine
  modified_base 24: mod_base = OTHER; note = 2'-Omethylguanosine
  modified_base 25: mod_base = OTHER; note = 2'-Omethylcytosine
  modified_base 38: mod_base = OTHER; note = Adenosine phosphorothiorate
  modified_base 39: mod_base = OTHER; note = Uridine phosphorothiorate
  modified_base 40: mod_base = OTHER; note = 2'-fluorouridine
  modified_base 43: mod_base = OTHER; note = 2'-Omethyladenosine
  modified_base 44: mod_base = OTHER; note = 2'-Omethyladenosine
  modified_base 45: mod_base = OTHER; note = 2'-Omethylguanosine
  modified_base 46: mod_base = OTHER; note = 2'-fluoroguanosine
  modified_base 48: mod_base = OTHER; note = 2'-fluorouridine
  modified_base 49: mod_base = OTHER; note = 2'-Omethylcytosine
  modified_base 50: mod_base = OTHER; note = 2'-Omethylcytosine
  modified_base 54: mod_base = OTHER; note = 2'-Omethyluridine phosphorothiorate
  modified_base 55: mod_base = OTHER; note = Uridine phosphorothiorate
  modified_base 56: mod_base = OTHER; note = 2'-Omethylcytosine
  modified_base 57: mod_base = OTHER; note = 2'-fluoroguanosine
  modified_base 61: mod_base = OTHER; note = 2'-Omethylcytosine
  modified_base 62: mod_base = OTHER; note = 2'-Omethylcytosine
  modified_base 63: mod_base = OTHER; note = 2'-fluorocytosine
  modified_base 64: mod_base = OTHER; note = 2'-Omethylguanosine
  modified_base 65: mod_base = OTHER; note = 2'-Omethylguanosine
  modified_base 66: mod_base = OTHER; note = 2'-Omethylcytosine
  modified_base 67: mod_base = OTHER; note = 2'-Omethylguanosine
  modified_base 68: mod_base = OTHER; note = 2'-Omethylguanosine
  modified_base 69: mod_base = OTHER; note = 2'-Omethyladenosine

SEQ ID NO: 3747 - RNA, 76 nt, synthetic construct; identical to SEQ ID NO: 3295
  source 1..76: mol_type = other RNA
  modified_base 1: mod_base = OTHER; note = 2'-fluorocytosine
  modified_base 2: mod_base = OTHER; note = 2'-Omethylcytosine
  modified_base 3: mod_base = OTHER; note = 2'-fluorouridine
  modified_base 7: mod_base = OTHER; note = 2'-fluoroadenosine phosphorothiorate
  modified_base 14: mod_base = OTHER; note = 2'-fluoroadenosine phosphorothiorate
  modified_base 16: mod_base = OTHER; note = 2'-Omethyluridine
  modified_base 27: mod_base = OTHER; note = 2'-fluoroguanosine phosphorothiorate
  modified_base 28: mod_base = OTHER; note = 2'-fluoroadenosine phosphorothiorate
  modified_base 37: mod_base = OTHER; note = 2'-Omethylguanosine
  modified_base 39: mod_base = OTHER; note = 2'-fluorouridine phosphorothiorate
  modified_base 40: mod_base = OTHER; note = 2'-fluorocytosine
  modified_base 43: mod_base = OTHER; note = 2'-fluorouridine phosphorothiorate
  modified_base 48: mod_base = OTHER; note = 2'-Omethylcytosine
  modified_base 52: mod_base = OTHER; note = 2'-Omethylguanosine
  modified_base 57: mod_base = OTHER; note = Guanosine phosphorothiorate
  modified_base 66: mod_base = OTHER; note = 2'-fluorouridine
  modified_base 74: mod_base = OTHER; note = 2'-fluorocytosine
  modified_base 75: mod_base = OTHER; note = 2'-fluorocytosine

SEQ ID NO: 3748 - RNA, 76 nt, synthetic construct; identical to SEQ ID NO: 3318
  source 1..76: mol_type = other RNA
  modified_base 1: mod_base = OTHER; note = 2'-Omethylcytosine
  modified_base 61: mod_base = OTHER; note = 2'-Omethylcytosine
  modified_base 62: mod_base = OTHER; note = 2'-Omethylcytosine
  modified_base 64: mod_base = OTHER; note = 2'-Omethylguanosine
  modified_base 65: mod_base = OTHER; note = 2'-Omethylcytosine
  modified_base 66: mod_base = OTHER; note = 2'-Omethyluridine
  modified_base 67: mod_base = OTHER; note = 2'-Omethylcytosine
  modified_base 68: mod_base = OTHER; note = 2'-Omethylguanosine
  modified_base 69: mod_base = OTHER; note = 2'-Omethyladenosine
  modified_base 70: mod_base = OTHER; note = 2'-fluoroadenosine
  modified_base 71: mod_base = OTHER; note = 2'-Omethylguanosine
  modified_base 72: mod_base = OTHER; note = 2'-Omethylguanosine
  modified_base 73: mod_base = OTHER; note = 2'-Omethyladenosine

SEQ ID NO: 3749 - RNA, 76 nt, synthetic construct; identical to SEQ ID NO: 625
  source 1..76: mol_type = other RNA
  modified_base 2: mod_base = OTHER; note = 2'-fluoroguanosine
  modified_base 5: mod_base = OTHER; note = 2'-Omethylcytosine
  modified_base 10: mod_base = OTHER; note = 2'-Omethylguanosine
  modified_base 12: mod_base = OTHER; note = Guanosine phosphorothiorate
  modified_base 13: mod_base = OTHER; note = 2'-Omethylcytosine phosphorothiorate
  modified_base 14: mod_base = OTHER; note = 2'-fluoroadenosine phosphorothiorate
  modified_base 15: mod_base = OTHER; note = 2'-fluoroadenosine phosphorothiorate
  modified_base 16: mod_base = OTHER; note = 2'-fluorouridine
  modified_base 18: mod_base = OTHER; note = Guanosine phosphorothiorate
  modified_base 22: mod_base = OTHER; note = 2'-fluoroguanosine
  modified_base 27: mod_base = OTHER; note = Uridine phosphorothiorate
  modified_base 29: mod_base = OTHER; note = 2'-fluoroguanosine
  modified_base 31: mod_base = OTHER; note = 2'-fluoroadenosine
  modified_base 36: mod_base = OTHER; note = Adenosine phosphorothiorate
  modified_base 41: mod_base = OTHER; note = Cytosine phosphorothiorate
  modified_base 42: mod_base = OTHER; note = 2'-fluoroadenosine
  modified_base 43: mod_base = OTHER; note = 2'-Omethyladenosine phosphorothiorate
  modified_base 44: mod_base = OTHER; note = 2'-Omethyladenosine
  modified_base 46: mod_base = OTHER; note = 2'-Omethylguanosine
  modified_base 47: mod_base = OTHER; note = 2'-Omethyluridine phosphorothiorate
  modified_base 48: mod_base = OTHER; note = 2'-Omethyluridine phosphorothiorate
  modified_base 49: mod_base = OTHER; note = 2'-fluorocytosine
  modified_base 51: mod_base = OTHER; note = 2'-Omethylguanosine
  modified_base 56: mod_base = OTHER; note = 2'-fluorocytosine
  modified_base 58: mod_base = OTHER; note = 2'-fluoroadenosine
  modified_base 59: mod_base = OTHER; note = 2'-fluoroguanosine
  modified_base 66: mod_base = OTHER; note = 2'-Omethylcytosine
  modified_base 68: mod_base = OTHER; note = 2'-Omethylguanosine
  modified_base 69: mod_base = OTHER; note = 2'-fluoroadenosine
  modified_base 71: mod_base = OTHER; note = Uridine phosphorothiorate
  modified_base 72: mod_base = OTHER; note = 2'-fluorocytosine phosphorothiorate
  modified_base 73: mod_base = OTHER; note = 2'-fluoroguanosine phosphorothiorate
  modified_base 74: mod_base = OTHER; note = 2'-Omethylcytosine
  modified_base 75: mod_base = OTHER; note = 2'-fluorocytosine

SEQ ID NO: 3750 - RNA, 86 nt, synthetic construct; identical to SEQ ID NO: 3290
  source 1..86: mol_type = other RNA
  modified_base 12: mod_base = OTHER; note = Cytosine phosphorothiorate

SEQ ID NO: 3751 - RNA, 75 nt, synthetic construct; identical to SEQ ID NO: 1045
  source 1..75: mol_type = other RNA
  modified_base 2: mod_base = OTHER; note = 2'-Omethylguanosine phosphorothiorate
  modified_base 3: mod_base = OTHER; note = 2'-Omethyluridine phosphorothiorate
  modified_base 5: mod_base = OTHER; note = 2'-fluorocytosine
  modified_base 12: mod_base = OTHER; note = 2'-fluoroguanosine phosphorothiorate
  modified_base 14: mod_base = OTHER; note = 2'-fluoroadenosine
  modified_base 18: mod_base = OTHER; note = 2'-Omethylguanosine phosphorothiorate
  modified_base 51: mod_base = OTHER; note = Adenosine phosphorothiorate
  modified_base 53: mod_base = OTHER; note = 2'-Omethyluridine
  modified_base 56: mod_base = OTHER; note = 2'-Omethylguanosine
  modified_base 58: mod_base = OTHER; note = 2'-Omethylguanosine
  modified_base 59: mod_base = OTHER; note = 2'-fluorouridine phosphorothiorate
  modified_base 62: mod_base = OTHER; note = 2'-Omethylcytosine phosphorothiorate
  modified_base 72: mod_base = OTHER; note = 2'-Omethyluridine
  modified_base 73: mod_base = OTHER; note = Cytosine phosphorothiorate
  modified_base 74: mod_base = OTHER; note = 2'-Omethylcytosine phosphorothiorate
  modified_base 75: mod_base = OTHER; note = 2'-Omethyladenosine

SEQ ID NO: 3752 - RNA, 85 nt, synthetic construct; identical to SEQ ID NO: 3286
  source 1..85: mol_type = other RNA
  modified_base 1: mod_base = OTHER; note = 2'-Omethylcytosine
  modified_base 12: mod_base = OTHER; note = Guanosine phosphorothiorate
  modified_base 15: mod_base = OTHER; note = Uridine phosphorothiorate
  modified_base 26: mod_base = OTHER; note = 2'-Omethyluridine
  modified_base 30: mod_base = OTHER; note = 2'-fluoroadenosine
  modified_base 34: mod_base = OTHER; note = 2'-fluorouridine
  modified_base 51: mod_base = OTHER; note = 2'-Omethyluridine
  modified_base 57: mod_base = OTHER; note = 2'-Omethylcytosine
  modified_base 60: mod_base = OTHER; note = Guanosine phosphorothiorate
  modified_base 73: mod_base = OTHER; note = Adenosine phosphorothiorate
  modified_base 83: mod_base = OTHER; note = Cytosine phosphorothiorate
  modified_base 84: mod_base = OTHER; note = 2'-Omethylcytosine

SEQ ID NO: 3753 - RNA, 76 nt, synthetic construct; identical to SEQ ID NO: 3295
  source 1..76: mol_type = other RNA
  modified_base 1: mod_base = OTHER; note = 2'-Omethylcytosine
  modified_base 2: mod_base = OTHER; note = Cytosine phosphorothiorate
  modified_base 15: mod_base = OTHER; note = 2'-fluoroguanosine phosphorothiorate
  modified_base 25: mod_base = OTHER; note = Cytosine phosphorothiorate
  modified_base 49: mod_base = OTHER; note = 2'-Omethylguanosine
  modified_base 54: mod_base = OTHER; note = 2'-fluorouridine phosphorothiorate
  modified_base 58: mod_base = OTHER; note = Adenosine phosphorothiorate
  modified_base 69: mod_base = OTHER; note = 2'-fluoroadenosine
  modified_base 76: mod_base = OTHER; note = 2'-fluoroadenosine

SEQ ID NO: 3754 - RNA, 75 nt, synthetic construct; identical to SEQ ID NO: 3311
  source 1..75: mol_type = other RNA
  modified_base 1: mod_base = OTHER; note = Guanosine phosphorothiorate
  modified_base 2: mod_base = OTHER; note = 2'-Omethylguanosine phosphorothiorate
  modified_base 5: mod_base = OTHER; note = 2'-Omethylcytosine
  modified_base 20: mod_base = OTHER; note = 2'-fluoroadenosine
  modified_base 39: mod_base = OTHER; note = 2'-fluorouridine
  modified_base 41: mod_base = OTHER; note = 2'-fluorocytosine
  modified_base 53: mod_base = OTHER; note = 2'-fluorouridine phosphorothiorate
  modified_base 64: mod_base = OTHER; note = Guanosine phosphorothiorate
  modified_base 65: mod_base = OTHER; note = 2'-fluorouridine

SEQ ID NO: 3755 - RNA, 76 nt, synthetic construct; identical to SEQ ID NO: 625
  source 1..76: mol_type = other RNA
  modified_base 3: mod_base = OTHER; note = 2'-fluorocytosine phosphorothiorate
  modified_base 4: mod_base = OTHER; note = 2'-Omethyluridine
  modified_base 10: mod_base = OTHER; note = Guanosine phosphorothiorate
  modified_base 13: mod_base = OTHER; note = Cytosine phosphorothiorate
  modified_base 14: mod_base = OTHER; note = 2'-fluoroadenosine
  modified_base 15: mod_base = OTHER; note = Adenosine phosphorothiorate
  modified_base 16: mod_base = OTHER; note = 2'-Omethyluridine
  modified_base 19: mod_base = OTHER; note = Adenosine phosphorothiorate
  modified_base 23: mod_base = OTHER; note = 2'-Omethylcytosine
  modified_base 24: mod_base = OTHER; note = 2'-Omethylguanosine
  modified_base 25: mod_base = OTHER; note = Cytosine phosphorothiorate
  modified_base 26: mod_base = OTHER; note = 2'-fluoroadenosine phosphorothiorate
  modified_base 28: mod_base = OTHER; note = 2'-fluorouridine
  modified_base 29: mod_base = OTHER; note = 2'-Omethylguanosine
  modified_base 31: mod_base = OTHER; note = 2'-Omethyladenosine
  modified_base 38: mod_base = OTHER; note = Adenosine phosphorothiorate
  modified_base 39: mod_base = OTHER; note = 2'-Omethyluridine
  modified_base 42: mod_base = OTHER; note = 2'-Omethyladenosine
  modified_base 45: mod_base = OTHER; note = 2'-fluoroguanosine
  modified_base 46: mod_base = OTHER; note = 2'-Omethylguanosine
  modified_base 50: mod_base = OTHER; note = 2'-fluorocytosine phosphorothiorate
  modified_base 51: mod_base = OTHER; note = 2'-Omethylguanosine
  modified_base 52: mod_base = OTHER; note = 2'-fluoroguanosine
  modified_base 58: mod_base = OTHER; note = Adenosine phosphorothiorate
  modified_base 59: mod_base = OTHER; note = 2'-Omethylguanosine
  modified_base 61: mod_base = OTHER; note = Cytosine phosphorothiorate
  modified_base 62: mod_base = OTHER; note = 2'-Omethylcytosine
  modified_base 63: mod_base = OTHER; note = Cytosine phosphorothiorate
  modified_base 64: mod_base = OTHER; note = 2'-Omethylguanosine
  modified_base 66: mod_base = OTHER; note = 2'-Omethylcytosine
  modified_base 69: mod_base = OTHER; note = 2'-Omethyladenosine phosphorothiorate
  modified_base 70: mod_base = OTHER; note = 2'-Omethylguanosine
  modified_base 71: mod_base = OTHER; note = 2'-fluorouridine
  modified_base 75: mod_base = OTHER; note = 2'-Omethylcytosine
  modified_base 76: mod_base = OTHER; note = 2'-fluoroadenosine

SEQ ID NO: 3756 - RNA, 76 nt, synthetic construct; identical to SEQ ID NO: 625
  source 1..76: mol_type = other RNA
  modified_base 1: mod_base = OTHER; note = 2'-Omethylguanosine
  modified_base 10: mod_base = OTHER; note = 2'-Omethylguanosine
  modified_base 13: mod_base = OTHER; note = 2'-Omethylcytosine
  modified_base 17: mod_base = OTHER; note = Guanosine phosphorothiorate
  modified_base 18: mod_base = OTHER; note = 2'-Omethylguanosine
  modified_base 19: mod_base = OTHER; note = Adenosine phosphorothiorate
  modified_base 20: mod_base = OTHER; note = 2'-Omethyluridine
  modified_base 25: mod_base = OTHER; note = 2'-Omethylcytosine
  modified_base 29: mod_base = OTHER; note = 2'-Omethylguanosine
  modified_base 33: mod_base = OTHER; note = 2'-fluorouridine
  modified_base 35: mod_base = OTHER; note = Cytosine phosphorothiorate
  modified_base 37: mod_base = OTHER; note = 2'-Omethyladenosine phosphorothiorate
  modified_base 38: mod_base = OTHER; note = Adenosine phosphorothiorate
  modified_base 43: mod_base = OTHER; note = 2'-Omethyladenosine
  modified_base 44: mod_base = OTHER; note = 2'-fluoroadenosine
  modified_base 46: mod_base = OTHER; note = Guanosine phosphorothiorate
  modified_base 50: mod_base = OTHER; note = 2'-Omethylcytosine
  modified_base 52: mod_base = OTHER; note = 2'-Omethylguanosine
  modified_base 54: mod_base = OTHER; note = Uridine phosphorothiorate
  modified_base 55: mod_base = OTHER; note = Uridine phosphorothiorate
  modified_base 56: mod_base = OTHER; note = 2'-Omethylcytosine
  modified_base 57: mod_base = OTHER; note = Guanosine phosphorothiorate
  modified_base 62: mod_base = OTHER; note = 2'-Omethylcytosine
  modified_base 63: mod_base = OTHER; note = 2'-fluorocytosine
  modified_base 65: mod_base = OTHER; note = 2'-Omethylguanosine
  modified_base 71: mod_base = OTHER; note = 2'-Omethyluridine
  modified_base 73: mod_base = OTHER; note = 2'-Omethylguanosine

SEQ ID NO: 3757 - RNA, 76 nt, synthetic construct; identical to SEQ ID NO: 625
  source 1..76: mol_type = other RNA
  modified_base 1: mod_base = OTHER; note = 2'-Omethylguanosine phosphorothiorate
  modified_base 2: mod_base = OTHER; note = 2'-fluoroguanosine
  modified_base 3: mod_base = OTHER; note = 2'-Omethylcytosine
  modified_base 7: mod_base = OTHER; note = Guanosine phosphorothiorate
  modified_base 11: mod_base = OTHER; note = Cytosine phosphorothiorate
  modified_base 14: mod_base = OTHER; note = Adenosine phosphorothiorate
  modified_base 21: mod_base = OTHER; note = Adenosine phosphorothiorate
  modified_base 22: mod_base = OTHER; note = 2'-Omethylguanosine
  modified_base 23: mod_base = OTHER; note = 2'-Omethylcytosine
  modified_base 26: mod_base = OTHER; note = 2'-fluoroadenosine phosphorothiorate
  modified_base 27: mod_base = OTHER; note = 2'-Omethyluridine
  modified_base 29: mod_base = OTHER; note = 2'-Omethylguanosine
  modified_base 30: mod_base = OTHER; note = 2'-fluoroguanosine
  modified_base 31: mod_base = OTHER; note = 2'-Omethyladenosine
  modified_base 33: mod_base = OTHER; note = 2'-fluorouridine
  modified_base 42: mod_base = OTHER; note = 2'-Omethyladenosine
  modified_base 44: mod_base = OTHER; note = Adenosine phosphorothiorate
  modified_base 45: mod_base = OTHER; note = 2'-fluoroguanosine
  modified_base 46: mod_base = OTHER; note = Guanosine phosphorothiorate
  modified_base 47: mod_base = OTHER; note = 2'-Omethyluridine
  modified_base 49: mod_base = OTHER; note = 2'-fluorocytosine
  modified_base 50: mod_base = OTHER; note = 2'-Omethylcytosine phosphorothiorate
  modified_base 51: mod_base = OTHER; note = 2'-Omethylguanosine
  modified_base 57: mod_base = OTHER; note = Guanosine phosphorothiorate
  modified_base 59: mod_base = OTHER; note = 2'-fluoroguanosine phosphorothiorate
  modified_base 60: mod_base = OTHER; note = 2'-Omethyluridine
  modified_base 61: mod_base = OTHER; note = 2'-fluorocytosine
  modified_base 62: mod_base = OTHER; note = 2'-Omethylcytosine
  modified_base 64: mod_base = OTHER; note = 2'-fluoroguanosine
  modified_base 68: mod_base = OTHER; note = 2'-Omethylguanosine
  modified_base 72: mod_base = OTHER; note = Cytosine phosphorothiorate
  modified_base 73: mod_base = OTHER; note = 2'-Omethylguanosine
  modified_base 74: mod_base = OTHER; note = 2'-fluorocytosine
  modified_base 75: mod_base = OTHER; note = Cytosine phosphorothiorate
  modified_base 76: mod_base = OTHER; note = 2'-Omethyladenosine

SEQ ID NO: 3758 - RNA, 75 nt, synthetic construct; identical to SEQ ID NO: 1045
  source 1..75: mol_type = other RNA
  modified_base 1: mod_base = OTHER; note = 2'-fluoroguanosine phosphorothiorate
  modified_base 2: mod_base = OTHER; note = 2'-Omethylguanosine phosphorothiorate
  modified_base 11: mod_base = OTHER; note = 2'-fluorouridine
  modified_base 13: mod_base = OTHER; note = 2'-fluorouridine
  modified_base 19: mod_base = OTHER; note = 2'-fluorouridine
  modified_base 23: mod_base = OTHER; note = 2'-fluorocytosine
  modified_base 51: mod_base = OTHER; note = 2'-fluoroadenosine
  modified_base 63: mod_base = OTHER; note = Guanosine phosphorothiorate
  modified_base 64: mod_base = OTHER; note = 2'-fluoroguanosine
  modified_base 65: mod_base = OTHER; note = 2'-fluorouridine
  modified_base 66: mod_base = OTHER; note = Guanosine phosphorothiorate
  modified_base 67: mod_base = OTHER; note = 2'-fluoroguanosine
  modified_base 74: mod_base = OTHER; note = Cytosine phosphorothiorate
  modified_base 75: mod_base = OTHER; note = 2'-fluoroadenosine

SEQ ID NO: 3759 - RNA, 76 nt, synthetic construct; identical to SEQ ID NO: 3295
  source 1..76: mol_type = other RNA
  modified_base 1: mod_base = OTHER; note = 2'-fluorocytosine phosphorothiorate
  modified_base 2: mod_base = OTHER; note = 2'-Omethylcytosine
  modified_base 3: mod_base = OTHER; note = 2'-Omethyluridine
  modified_base 8: mod_base = OTHER; note = 2'-fluorouridine phosphorothiorate
  modified_base 10: mod_base = OTHER; note = 2'-Omethylguanosine phosphorothiorate
  modified_base 13: mod_base = OTHER; note = Cytosine phosphorothiorate
  modified_base 15: mod_base = OTHER; note = 2'-fluoroguanosine phosphorothiorate
  modified_base 16: mod_base = OTHER; note = 2'-fluorouridine phosphorothiorate
  modified_base 21: mod_base = OTHER; note = 2'-Omethyladenosine
  modified_base 23: mod_base = OTHER; note = 2'-fluoroadenosine phosphorothiorate
  modified_base 26: mod_base = OTHER; note = 2'-Omethylguanosine
  modified_base 27: mod_base = OTHER; note = 2'-fluoroguanosine phosphorothiorate
  modified_base 47: mod_base = OTHER; note = 2'-Omethyluridine
  modified_base 49: mod_base = OTHER; note = Guanosine phosphorothiorate
  modified_base 52: mod_base = OTHER; note = 2'-fluoroguanosine phosphorothiorate
  modified_base 57: mod_base = OTHER; note = 2'-fluoroguanosine phosphorothiorate
  modified_base 68: mod_base = OTHER; note = 2'-fluoroguanosine
  modified_base 75: mod_base = OTHER; note = 2'-Omethylcytosine phosphorothiorate

SEQ ID NO: 3760 - RNA, 86 nt, synthetic construct; identical to SEQ ID NO: 3290
  source 1..86: mol_type = other RNA
  modified_base 1: mod_base = OTHER; note = 2'-Omethyladenosine phosphorothiorate
  modified_base 2: mod_base = OTHER; note = 2'-Omethylcytosine phosphorothiorate
  modified_base 84: mod_base = OTHER; note = Cytosine phosphorothiorate
  modified_base 85: mod_base = OTHER; note = Cytosine phosphorothiorate

SEQ ID NO: 3761 - RNA, 76 nt, synthetic construct; identical to SEQ ID NO: 625
  source 1..76: mol_type = other RNA
  modified_base 1: mod_base = OTHER; note = 2'-fluoroguanosine
  modified_base 8: mod_base = OTHER; note = Uridine phosphorothiorate
  modified_base 11: mod_base = OTHER; note = Cytosine phosphorothiorate
  modified_base 12: mod_base = OTHER; note = 2'-Omethylguanosine
  modified_base 14: mod_base = OTHER; note = 2'-Omethyladenosine
  modified_base 15: mod_base = OTHER; note = Adenosine phosphorothiorate
  modified_base 16: mod_base = OTHER; note = Uridine phosphorothiorate
  modified_base 18: mod_base = OTHER; note = 2'-Omethylguanosine
  modified_base 20: mod_base = OTHER; note = 2'-fluorouridine
  modified_base 26: mod_base = OTHER; note = 2'-fluoroadenosine phosphorothiorate
  modified_base 27: mod_base = OTHER; note = 2'-fluorouridine
  modified_base 28: mod_base = OTHER; note = Uridine phosphorothiorate
  modified_base 29: mod_base = OTHER; note = 2'-fluoroguanosine phosphorothiorate
  modified_base 31: mod_base = OTHER; note = 2'-fluoroadenosine
  modified_base 33: mod_base = OTHER; note = Uridine phosphorothiorate
  modified_base 34: mod_base = OTHER; note = 2'-Omethyluridine
  modified_base 38: mod_base = OTHER; note = Adenosine phosphorothiorate
  modified_base 39: mod_base = OTHER; note = 2'-fluorouridine
  modified_base 40: mod_base = OTHER; note = Uridine phosphorothiorate
  modified_base 42: mod_base = OTHER; note = 2'-Omethyladenosine phosphorothiorate
  modified_base 43: mod_base = OTHER; note = 2'-fluoroadenosine
  modified_base 50: mod_base = OTHER; note = 2'-fluorocytosine
  modified_base 51: mod_base = OTHER; note = 2'-Omethylguanosine
  modified_base 52: mod_base = OTHER; note = 2'-Omethylguanosine
  modified_base 53: mod_base = OTHER; note = 2'-Omethylguanosine
  modified_base 54: mod_base = OTHER; note = 2'-fluorouridine
  modified_base 55: mod_base = OTHER; note = Uridine phosphorothiorate
  modified_base 56: mod_base = OTHER; note = 2'-fluorocytosine
  modified_base 58: mod_base = OTHER; note = 2'-fluoroadenosine
  modified_base 60: mod_base = OTHER; note = Uridine phosphorothiorate
  modified_base 62: mod_base = OTHER; note = 2'-Omethylcytosine
  modified_base 63: mod_base = OTHER; note = 2'-Omethylcytosine
  modified_base 64: mod_base = OTHER; note = 2'-fluoroguanosine
  modified_base 67: mod_base = OTHER; note = 2'-fluoroguanosine
  modified_base 71: mod_base = OTHER; note = 2'-fluorouridine
  modified_base 74: mod_base = OTHER; note = Cytosine phosphorothiorate

SEQ ID NO: 3762 - RNA, 85 nt, synthetic construct; identical to SEQ ID NO: 3297
  source 1..85: mol_type = other RNA
  modified_base 1: mod_base = OTHER; note = 2'-Omethylguanosine
  modified_base 13: mod_base = OTHER; note = 2'-Omethylguanosine
  modified_base 14: mod_base = OTHER; note = 2'-Omethyladenosine
  modified_base 15: mod_base = OTHER; note = 2'-Omethylguanosine
  modified_base 16: mod_base = OTHER; note = 2'-Omethyluridine
  modified_base 17: mod_base = OTHER; note = 2'-Omethylguanosine
  modified_base 18: mod_base = OTHER; note = 2'-Omethylguanosine
  modified_base 19: mod_base = OTHER; note = Uridine phosphorothiorate
  modified_base 20: mod_base = OTHER; note = 2'-Omethyluridine
  modified_base 21: mod_base = OTHER; note = Adenosine phosphorothiorate
  modified_base 25: mod_base = OTHER; note = 2'-Omethylcytosine
  modified_base 33: mod_base = OTHER; note = 2'-fluorouridine
  modified_base 34: mod_base = OTHER; note = 2'-Omethyluridine
  modified_base 35: mod_base = OTHER; note = Cytosine phosphorothiorate
  modified_base 37: mod_base = OTHER; note = Adenosine phosphorothiorate
  modified_base 38: mod_base = OTHER; note = Adenosine phosphorothiorate
  modified_base 41: mod_base = OTHER; note = 2'-Omethylcytosine
  modified_base 42: mod_base = OTHER; note = 2'-Omethyladenosine
  modified_base 43: mod_base = OTHER; note = 2'-Omethyladenosine
  modified_base 44: mod_base = OTHER; note = 2'-Omethyluridine
  modified_base 58: mod_base = OTHER; note = 2'-Omethylguanosine
  modified_base 59: mod_base = OTHER; note = 2'-Omethylcytosine
  modified_base 61: mod_base = OTHER; note = 2'-Omethylguanosine
  modified_base 63: mod_base = OTHER; note = Uridine phosphorothiorate
  modified_base 64: mod_base = OTHER; note = Uridine phosphorothiorate
  modified_base 70: mod_base = OTHER; note = 2'-Omethylcytosine
  modified_base 74: mod_base = OTHER; note = 2'-Omethylcytosine
  modified_base 82: mod_base = OTHER; note = 2'-Omethylguanosine

SEQ ID NO: 3763 - RNA, 76 nt, synthetic construct; identical to SEQ ID NO: 625
  source 1..76: mol_type = other RNA
  modified_base 1: mod_base = OTHER; note = 2'-Omethylguanosine
  modified_base 2: mod_base = OTHER; note = 2'-Omethylguanosine
  modified_base 3: mod_base = OTHER; note = 2'-Omethylcytosine
  modified_base 4: mod_base = OTHER; note = 2'-Omethyluridine
  modified_base 5: mod_base = OTHER; note = 2'-Omethylcytosine
  modified_base 6: mod_base = OTHER; note = 2'-Omethylcytosine
  modified_base 7: mod_base = OTHER; note = Guanosine phosphorothiorate
  modified_base 10: mod_base = OTHER; note = 2'-Omethylguanosine
  modified_base 11: mod_base = OTHER; note = 2'-Omethylcytosine
  modified_base 12: mod_base = OTHER; note = 2'-Omethylguanosine
  modified_base 13: mod_base = OTHER; note = 2'-Omethylcytosine
  modified_base 14: mod_base = OTHER; note = 2'-Omethyladenosine
  modified_base 16: mod_base = OTHER; note = 2'-Omethyluridine
  modified_base 17: mod_base = OTHER; note = 2'-Omethylguanosine
  modified_base 18: mod_base = OTHER; note = 2'-Omethylguanosine
  modified_base 21: mod_base = OTHER; note = 2'-fluoroadenosine phosphorothiorate
  modified_base 22: mod_base = OTHER; note = 2'-Omethylguanosine
  modified_base 23: mod_base = OTHER; note = 2'-Omethylcytosine
  modified_base 24: mod_base = OTHER; note = 2'-Omethylguanosine phosphorothiorate
  modified_base 25: mod_base = OTHER; note = 2'-Omethylcytosine
  modified_base 28: mod_base = OTHER; note = 2'-Omethyluridine
  modified_base 29: mod_base = OTHER; note = 2'-Omethylguanosine
  modified_base 30: mod_base = OTHER; note = Guanosine phosphorothiorate
  modified_base 33: mod_base = OTHER; note = 2'-fluorouridine
  modified_base 34: mod_base = OTHER; note = 2'-Omethyluridine phosphorothiorate
  modified_base 35: mod_base = OTHER; note = 2'-Omethylcytosine phosphorothiorate
  modified_base 37: mod_base = OTHER; note = Adenosine phosphorothiorate
  modified_base 41: mod_base = OTHER; note = 2'-Omethylcytosine
  modified_base 42: mod_base = OTHER; note = Adenosine phosphorothiorate
  modified_base 44: mod_base = OTHER; note = 2'-Omethyladenosine
  modified_base 45: mod_base = OTHER; note = Guanosine phosphorothiorate
  modified_base 48: mod_base = OTHER; note = 2'-fluorouridine
  modified_base 49: mod_base = OTHER; note = 2'-Omethylcytosine
  modified_base 50: mod_base = OTHER; note = 2'-Omethylcytosine
  modified_base 51: mod_base = OTHER; note = 2'-Omethylguanosine
  modified_base 52: mod_base = OTHER; note = 2'-Omethylguanosine
  modified_base 56: mod_base = OTHER; note = Cytosine phosphorothiorate
  modified_base 57: mod_base = OTHER; note = 2'-Omethylguanosine
  modified_base 59: mod_base = OTHER; note = 2'-Omethylguanosine
  modified_base 60: mod_base = OTHER; note = 2'-Omethyluridine phosphorothiorate
  modified_base 61: mod_base = OTHER; note = 2'-Omethylcytosine phosphorothiorate
  modified_base 62: mod_base = OTHER; note = 2'-Omethylcytosine
  modified_base 63: mod_base = OTHER; note = 2'-Omethylcytosine phosphorothiorate
  modified_base 64: mod_base = OTHER; note = 2'-Omethylguanosine
  modified_base 65: mod_base = OTHER; note = 2'-Omethylguanosine
  modified_base 66: mod_base = OTHER; note = 2'-Omethylcytosine
  modified_base 67: mod_base = OTHER; note = 2'-Omethylguanosine phosphorothiorate
  modified_base 68: mod_base = OTHER; note = 2'-Omethylguanosine phosphorothiorate
  modified_base 69: mod_base = OTHER; note = 2'-fluoroadenosine
  modified_base 72: mod_base = OTHER; note = Cytosine phosphorothiorate
  modified_base 73: mod_base = OTHER; note = 2'-Omethylguanosine
  modified_base 74: mod_base = OTHER; note = 2'-fluorocytosine phosphorothiorate
  modified_base 75: mod_base = OTHER; note = 2'-fluorocytosine phosphorothiorate

SEQ ID NO: 3764 - RNA, 76 nt, synthetic construct; identical to SEQ ID NO: 625
  source 1..76: mol_type = other RNA
  modified_base 1: mod_base = OTHER; note = 2'-Omethylguanosine
  modified_base 2: mod_base = OTHER; note = 2'-Omethylguanosine
  modified_base 3: mod_base = OTHER; note = 2'-Omethylcytosine
  modified_base 4: mod_base = OTHER; note = 2'-Omethyluridine
  modified_base 5: mod_base = OTHER; note = 2'-Omethylcytosine
  modified_base 6: mod_base = OTHER; note = 2'-Omethylcytosine
  modified_base 7: mod_base = OTHER; note = Guanosine phosphorothiorate
  modified_base 9: mod_base = OTHER; note = Guanosine phosphorothiorate
  modified_base 10: mod_base = OTHER; note = 2'-Omethylguanosine
  modified_base 11: mod_base = OTHER; note = 2'-Omethylcytosine
  modified_base 12: mod_base = OTHER; note = 2'-Omethylguanosine phosphorothiorate
  modified_base 13: mod_base = OTHER; note = 2'-Omethylcytosine
  modified_base 14: mod_base = OTHER; note = 2'-Omethyladenosine
  modified_base 15: mod_base = OTHER; note = 2'-fluoroadenosine phosphorothiorate
  modified_base 16: mod_base = OTHER; note = 2'-Omethyluridine
  modified_base 17: mod_base = OTHER; note = 2'-Omethylguanosine
  modified_base 18: mod_base = OTHER; note = 2'-Omethylguanosine
  modified_base 19: mod_base = OTHER; note = Adenosine phosphorothiorate
  modified_base 20: mod_base = OTHER; note = Uridine phosphorothiorate
  modified_base 21: mod_base = OTHER; note = 2'-Omethyladenosine phosphorothiorate
  modified_base 22: mod_base = OTHER; note = 2'-Omethylguanosine
  modified_base 23: mod_base = OTHER; note = 2'-Omethylcytosine
  modified_base 24: mod_base = OTHER; note = 2'-Omethylguanosine
  modified_base 25: mod_base = OTHER; note = 2'-Omethylcytosine
  modified_base 26: mod_base = OTHER; note = Adenosine phosphorothiorate
  modified_base 28: mod_base = OTHER; note = 2'-Omethyluridine phosphorothiorate
  modified_base 29: mod_base = OTHER; note = 2'-fluoroguanosine phosphorothiorate
  modified_base 30: mod_base = OTHER; note = 2'-Omethylguanosine phosphorothiorate
  modified_base 31: mod_base = OTHER; note = 2'-Omethyladenosine phosphorothiorate
  modified_base 32: mod_base = OTHER; note = 2'-Omethylcytosine phosphorothiorate
  modified_base 33: mod_base = OTHER; note = 2'-fluorouridine
  modified_base 34: mod_base = OTHER; note = 2'-Omethyluridine phosphorothiorate
  modified_base 35: mod_base = OTHER; note = 2'-Omethylcytosine phosphorothiorate
  modified_base 36: mod_base = OTHER; note = 2'-Omethyladenosine phosphorothiorate
  modified_base 37: mod_base = OTHER; note = Adenosine phosphorothiorate
  modified_base 38: mod_base = OTHER; note = Adenosine phosphorothiorate
  modified_base 40: mod_base = OTHER; note = 2'-Omethyluridine
  modified_base 41: mod_base = OTHER; note = 2'-fluorocytosine
  modified_base 42: mod_base = OTHER; note = Adenosine phosphorothiorate
  modified_base 43: mod_base = OTHER; note = Adenosine phosphorothiorate
  modified_base 44: mod_base = OTHER; note = 2'-Omethyladenosine
  modified_base 48: mod_base = OTHER; note = 2'-fluorouridine
  modified_base 49: mod_base = OTHER; note = 2'-Omethylcytosine
  modified_base 50: mod_base = OTHER; note = 2'-Omethylcytosine
  modified_base 51: mod_base = OTHER; note = 2'-Omethylguanosine
  modified_base 52: mod_base = OTHER; note = 2'-Omethylguanosine
  modified_base 53: mod_base = OTHER; note = 2'-fluoroguanosine
  modified_base 54: mod_base = OTHER; note = 2'-Omethyluridine
  modified_base 55: mod_base = OTHER; note = Uridine phosphorothiorate
  modified_base 56: mod_base = OTHER; note = Cytosine phosphorothiorate
  modified_base 57: mod_base = OTHER; note = Guanosine phosphorothiorate
  modified_base 59: mod_base = OTHER; note = 2'-Omethylguanosine
  modified_base 61: mod_base = OTHER; note = 2'-Omethylcytosine
  modified_base 62: mod_base = OTHER; note = 2'-Omethylcytosine
  modified_base 63: mod_base = OTHER; note = 2'-fluorocytosine
  modified_base 64: mod_base = OTHER; note = 2'-Omethylguanosine
  modified_base 65: mod_base = OTHER; note = 2'-Omethylguanosine phosphorothiorate
  modified_base 67: mod_base = OTHER; note = 2'-Omethylguanosine phosphorothiorate
  modified_base 68: mod_base = OTHER; note = 2'-Omethylguanosine
  modified_base 69: mod_base = OTHER; note = 2'-fluoroadenosine
  modified_base 70: mod_base = OTHER; note = 2'-fluoroguanosine phosphorothiorate
  modified_base 71: mod_base = OTHER; note = 2'-Omethyluridine
  modified_base 72: mod_base = OTHER; note = 2'-Omethylcytosine
  modified_base 73: mod_base = OTHER; note = 2'-Omethylguanosine
  modified_base 74: mod_base = OTHER; note = 2'-fluorocytosine phosphorothiorate
  modified_base 75: mod_base = OTHER; note = 2'-fluorocytosine phosphorothiorate
  modified_base 76: mod_base = OTHER; note = 2'-fluoroadenosine

SEQ ID NO: 3765 - RNA, 75 nt, synthetic construct; identical to SEQ ID NO: 3336
  source 1..75: mol_type = other RNA
  modified_base 1: mod_base = OTHER; note = 2'-Omethylcytosine
  modified_base 15: mod_base = OTHER; note = 2'-fluorouridine
  modified_base 19: mod_base = OTHER; note = 2'-fluorouridine
  modified_base 21: mod_base = OTHER; note = 2'-fluoroguanosine
  modified_base 23: mod_base = OTHER; note = 2'-fluoroguanosine
  modified_base 35: mod_base = OTHER; note = 2'-fluoroadenosine
  modified_base 37: mod_base = OTHER; note = 2'-fluoroadenosine
  modified_base 39: mod_base = OTHER; note = Cytosine phosphorothiorate
  modified_base 46: mod_base = OTHER; note = 2'-fluorouridine
  modified_base 47: mod_base = OTHER; note = 2'-fluorocytosine
  modified_base 72: mod_base = OTHER; note = 2'-Omethylguanosine
  modified_base 74: mod_base = OTHER; note = Cytosine phosphorothiorate

SEQ ID NO: 3766 - RNA, 75 nt, synthetic construct; identical to SEQ ID NO: 3311
  source 1..75: mol_type = other RNA
  modified_base 1: mod_base = OTHER; note = 2'-Omethylguanosine phosphorothiorate
  modified_base 2: mod_base = OTHER; note = 2'-fluoroguanosine phosphorothiorate
  modified_base 21: mod_base = OTHER; note = Adenosine phosphorothiorate
  modified_base 22: mod_base = OTHER; note = 2'-fluoroguanosine
  modified_base 25: mod_base = OTHER; note = 2'-fluorocytosine
  modified_base 30: mod_base = OTHER; note = 2'-Omethylguanosine
  modified_base 36: mod_base = OTHER; note = 2'-fluoroadenosine
  modified_base 41: mod_base = OTHER; note = 2'-fluorocytosine phosphorothiorate
  modified_base 51: mod_base = OTHER; note = 2'-Omethyladenosine
  modified_base 59: mod_base = OTHER; note = 2'-Omethyluridine
  modified_base 61: mod_base = OTHER; note = 2'-fluorouridine
  modified_base 62: mod_base = OTHER; note = Cytosine phosphorothiorate
  modified_base 64: mod_base = OTHER; note = 2'-fluoroguanosine
  modified_base 65: mod_base = OTHER; note = Uridine phosphorothiorate
  modified_base 67: mod_base = OTHER; note = Guanosine phosphorothiorate
  modified_base 68: mod_base = OTHER; note = 2'-fluoroadenosine
  modified_base 70: mod_base = OTHER; note = Cytosine phosphorothiorate
  modified_base 73: mod_base = OTHER; note = Cytosine phosphorothiorate
  modified_base 75: mod_base = OTHER; note = 2'-fluoroadenosine

SEQ ID NO: 3767 - RNA, 75 nt, synthetic construct; identical to SEQ ID NO: 3306
  source 1..75: mol_type = other RNA
  modified_base 1: mod_base = OTHER; note = 2'-Omethylguanosine phosphorothiorate
  modified_base 2: mod_base = OTHER; note = 2'-Omethyladenosine phosphorothiorate
  modified_base 3: mod_base = OTHER; note = 2'-Omethylcytosine
  modified_base 4: mod_base = OTHER; note = 2'-Omethylcytosine
  modified_base 5: mod_base = OTHER; note = 2'-Omethyluridine
  modified_base 6: mod_base = OTHER; note = 2'-Omethylcytosine
  modified_base 16: mod_base = OTHER; note = 2'-Omethylcytosine
  modified_base 17: mod_base = OTHER; note = 2'-Omethylguanosine
  modified_base 18: mod_base = OTHER; note = 2'-Omethylguanosine
  modified_base 32: mod_base = OTHER; note = 2'-fluorouridine
  modified_base 34: mod_base = OTHER; note = Uridine phosphorothiorate
  modified_base 36: mod_base = OTHER; note = Guanosine phosphorothiorate
  modified_base 37: mod_base = OTHER; note = Adenosine phosphorothiorate
  modified_base 43: mod_base = OTHER; note = 2'-Omethyladenosine
  modified_base 44: mod_base = OTHER; note = 2'-Omethylguanosine
  modified_base 45: mod_base = OTHER; note = 2'-fluoroguanosine
  modified_base 46: mod_base = OTHER; note = 2'-fluorouridine
  modified_base 47: mod_base = OTHER; note = 2'-fluorouridine
  modified_base 51: mod_base = OTHER; note = 2'-Omethyluridine
  modified_base 52: mod_base = OTHER; note = 2'-Omethylguanosine
  modified_base 53: mod_base = OTHER; note = 2'-Omethyluridine
  modified_base 55: mod_base = OTHER; note = 2'-Omethylcytosine
  modified_base 58: mod_base = OTHER; note = 2'-Omethyladenosine
  modified_base 60: mod_base = OTHER; note = 2'-Omethylcytosine
  modified_base 61: mod_base = OTHER; note = 2'-Omethyladenosine
  modified_base 62: mod_base = OTHER; note = 2'-fluorocytosine
  modified_base 63: mod_base = OTHER; note = 2'-Omethylguanosine
  modified_base 64: mod_base = OTHER; note = 2'-Omethyluridine
  modified_base 65: mod_base = OTHER; note = 2'-Omethylcytosine
  modified_base 66: mod_base = OTHER; note = 2'-Omethylguanosine
  modified_base 67: mod_base = OTHER; note = 2'-Omethylguanosine
  modified_base 72: mod_base = OTHER; note = 2'-Omethyladenosine

SEQ ID NO: 3768 - RNA, 76 nt, synthetic construct; identical to SEQ ID NO: 625
  source 1..76: mol_type = other RNA
  modified_base 49: mod_base = OTHER; note = 2'-fluorocytosine
  modified_base 50: mod_base = OTHER; note = 2'-fluorocytosine
  modified_base 51: mod_base = OTHER; note = 2'-fluoroguanosine
  modified_base 52: mod_base = OTHER; note = 2'-fluoroguanosine
  modified_base 53: mod_base = OTHER; note = 2'-fluoroguanosine

SEQ ID NO: 3769 - RNA, 76 nt, synthetic construct; identical to SEQ ID NO: 625
  source 1..76: mol_type = other RNA
  modified_base 1: mod_base = OTHER; note = 2'-Omethylguanosine
  modified_base 2: mod_base = OTHER; note = 2'-Omethylguanosine
  modified_base 3: mod_base = OTHER; note = 2'-Omethylcytosine
  modified_base 4: mod_base = OTHER; note = 2'-Omethyluridine
  modified_base 5: mod_base = OTHER; note = 2'-Omethylcytosine
  modified_base 6: mod_base = OTHER; note = 2'-fluorocytosine phosphorothiorate
  modified_base 12: mod_base = OTHER; note = 2'-Omethylguanosine
  modified_base 13: mod_base = OTHER; note = 2'-Omethylcytosine
  modified_base 14: mod_base = OTHER; note = 2'-Omethyladenosine
  modified_base 16: mod_base = OTHER; note = Uridine phosphorothiorate
  modified_base 18: mod_base = OTHER; note = 2'-fluoroguanosine phosphorothiorate
  modified_base 19: mod_base = OTHER; note = 2'-fluoroadenosine phosphorothiorate
  modified_base 21: mod_base = OTHER; note = 2'-fluoroadenosine phosphorothiorate
  modified_base 22: mod_base = OTHER; note = 2'-Omethylguanosine
  modified_base 23: mod_base = OTHER; note = 2'-Omethylcytosine
  modified_base 24: mod_base = OTHER; note = 2'-Omethylguanosine
  modified_base 25: mod_base = OTHER; note = 2'-Omethylcytosine
  modified_base 26: mod_base = OTHER; note = 2'-Omethyladenosine phosphorothiorate
  modified_base 29: mod_base = OTHER; note = 2'-Omethylguanosine
  modified_base 30: mod_base = OTHER; note = 2'-fluoroguanosine phosphorothiorate
  modified_base 31: mod_base = OTHER; note = 2'-Omethyladenosine phosphorothiorate
  modified_base 33: mod_base = OTHER; note = 2'-fluorouridine
  modified_base 37: mod_base = OTHER; note = 2'-Omethyladenosine phosphorothiorate
  modified_base 40: mod_base = OTHER; note = 2'-Omethyluridine
  modified_base 42: mod_base = OTHER; note = Adenosine phosphorothiorate
  modified_base 43: mod_base = OTHER; note = Adenosine phosphorothiorate
  modified_base 44: mod_base = OTHER; note = 2'-Omethyladenosine
  modified_base 45: mod_base = OTHER; note = 2'-Omethylguanosine phosphorothiorate
  modified_base 49: mod_base = OTHER; note = 2'-Omethylcytosine phosphorothiorate
  modified_base 52: mod_base = OTHER; note = 2'-Omethylguanosine
  modified_base 53: mod_base = OTHER; note = 2'-Omethylguanosine phosphorothiorate
  modified_base 54: mod_base = OTHER; note = Uridine phosphorothiorate
  modified_base 55: mod_base = OTHER; note = Uridine phosphorothiorate
  modified_base 59: mod_base = OTHER; note = 2'-Omethylguanosine
  modified_base 61: mod_base = OTHER; note = 2'-Omethylcytosine
  modified_base 62: mod_base = OTHER; note = 2'-Omethylcytosine phosphorothiorate
  modified_base 63: mod_base = OTHER; note = 2'-fluorocytosine
  modified_base 64: mod_base = OTHER; note = 2'-Omethylguanosine
  modified_base 65: mod_base = OTHER; note = 2'-Omethylguanosine
  modified_base 67: mod_base = OTHER; note = 2'-Omethylguanosine phosphorothiorate
  modified_base 68: mod_base = OTHER; note = 2'-Omethylguanosine
  modified_base 69: mod_base = OTHER; note = 2'-Omethyladenosine
  modified_base 71: mod_base = OTHER; note = 2'-Omethyluridine
  modified_base 74: mod_base = OTHER; note = Cytosine phosphorothiorate
  modified_base 75: mod_base = OTHER; note = 2'-fluorocytosine phosphorothiorate
  modified_base 76: mod_base = OTHER; note = 2'-Omethyladenosine

SEQ ID NO: 3770 - RNA, 73 nt, synthetic construct; identical to SEQ ID NO: 935
  source 1..73: mol_type = other RNA
  modified_base 1: mod_base = OTHER; note = 2'-Omethylguanosine
  modified_base 14: mod_base = OTHER; note = 2'-Omethyladenosine
  modified_base 15: mod_base = OTHER; note = 2'-fluoroadenosine
  modified_base 16: mod_base = OTHER; note = 2'-Omethyluridine
  modified_base 17: mod_base = OTHER; note = 2'-Omethylguanosine
  modified_base 18: mod_base = OTHER; note = 2'-Omethylguanosine
  modified_base 20: mod_base = OTHER; note = 2'-Omethyluridine
  modified_base 72: mod_base = OTHER; note = 2'-Omethylcytosine

SEQ ID NO: 3771 - RNA, 85 nt, synthetic construct; identical to SEQ ID NO: 3297
  source 1..85: mol_type = other RNA
  modified_base 1: mod_base = OTHER; note = 2'-Omethylguanosine phosphorothiorate
  modified_base 2: mod_base = OTHER; note = 2'-Omethylcytosine phosphorothiorate
  modified_base 3: mod_base = OTHER; note = 2'-Omethyluridine
  modified_base 4: mod_base = OTHER; note = 2'-Omethylguanosine
  modified_base 5: mod_base = OTHER; note = 2'-Omethyluridine
  modified_base 6: mod_base = OTHER; note = 2'-Omethylguanosine
  modified_base 16: mod_base = OTHER; note = 2'-Omethyluridine
  modified_base 17: mod_base = OTHER; note = 2'-Omethylguanosine
  modified_base 18: mod_base = OTHER; note = 2'-Omethylguanosine
  modified_base 20: mod_base = OTHER; note = 2'-Omethyluridine
  modified_base 22: mod_base = OTHER; note = 2'-Omethyladenosine
  modified_base 24: mod_base = OTHER; note = 2'-Omethylguanosine
  modified_base 25: mod_base = OTHER; note = 2'-Omethylcytosine
  modified_base 33: mod_base = OTHER; note = 2'-fluorouridine
  modified_base 35: mod_base = OTHER; note = Cytosine phosphorothiorate
  modified_base 37: mod_base = OTHER; note = Adenosine phosphorothiorate
  modified_base 38: mod_base = OTHER; note = Adenosine phosphorothiorate
  modified_base 44: mod_base = OTHER; note = 2'-Omethyluridine
  modified_base 56: mod_base = OTHER; note = 2'-fluoroguanosine
  modified_base 57: mod_base = OTHER; note = 2'-fluorocytosine
  modified_base 58: mod_base = OTHER; note = 2'-Omethylguanosine
  modified_base 59: mod_base = OTHER; note = 2'-Omethylcytosine
  modified_base 60: mod_base = OTHER; note = 2'-Omethyladenosine
  modified_base 61: mod_base = OTHER; note = 2'-Omethylguanosine
  modified_base 62: mod_base = OTHER; note = 2'-Omethylguanosine
  modified_base 63: mod_base = OTHER; note = 2'-Omethyluridine
  modified_base 65: mod_base = OTHER; note = 2'-Omethylcytosine
  modified_base 68: mod_base = OTHER; note = 2'-Omethyladenosine
  modified_base 70: mod_base = OTHER; note = 2'-Omethylcytosine
  modified_base 71: mod_base = OTHER; note = 2'-Omethylcytosine
  modified_base 72: mod_base = OTHER; note = 2'-fluorouridine
  modified_base 73: mod_base = OTHER; note = 2'-Omethylguanosine
  modified_base 74: mod_base = OTHER; note = 2'-Omethylcytosine
  modified_base 75: mod_base = OTHER; note = 2'-Omethyluridine
  modified_base 76: mod_base = OTHER; note = 2'-Omethylcytosine
  modified_base 77: mod_base = OTHER; note = 2'-Omethyladenosine
  modified_base 82: mod_base = OTHER; note = 2'-Omethylguanosine

SEQ ID NO: 3772 - RNA, 85 nt, synthetic construct; identical to SEQ ID NO: 3288
  source 1..85: mol_type = other RNA
  modified_base 1: mod_base = OTHER; note = 2'-Omethylcytosine
  modified_base 13: mod_base = OTHER; note = Adenosine phosphorothiorate
  modified_base 25: mod_base = OTHER; note = Guanosine phosphorothiorate
  modified_base 26: mod_base = OTHER; note = 2'-fluorouridine phosphorothiorate
  modified_base 27: mod_base = OTHER; note = 2'-fluorouridine
  modified_base 30: mod_base = OTHER; note = 2'-fluoroadenosine
  modified_base 33: mod_base = OTHER; note = 2'-fluorouridine phosphorothiorate
  modified_base 34: mod_base = OTHER; note = Cytosine phosphorothiorate
  modified_base 39: mod_base = OTHER; note = Cytosine phosphorothiorate
  modified_base 43: mod_base = OTHER; note = 2'-Omethyluridine
  modified_base 45: mod_base = OTHER; note = 2'-fluoroguanosine
  modified_base 46: mod_base = OTHER; note = 2'-Omethyladenosine
  modified_base 54: mod_base = OTHER; note = 2'-Omethylcytosine
  modified_base 55: mod_base = OTHER; note = 2'-Omethylcytosine
  modified_base 56: mod_base = OTHER; note = 2'-fluoroguanosine
  modified_base 57: mod_base = OTHER; note = 2'-Omethylcytosine
  modified_base 58: mod_base = OTHER; note = 2'-Omethylguanosine
  modified_base 60: mod_base = OTHER; note = 2'-fluoroguanosine phosphorothiorate
  modified_base 67: mod_base = OTHER; note = 2'-fluoroadenosine phosphorothiorate
  modified_base 71: mod_base = OTHER; note = 2'-fluorocytosine phosphorothiorate
  modified_base 75: mod_base = OTHER; note = 2'-fluorouridine
  modified_base 84: mod_base = OTHER; note = Cytosine phosphorothiorate

SEQ ID NO: 3773 - RNA, 75 nt, synthetic construct; identical to SEQ ID NO: 3306
  source 1..75: mol_type = other RNA
  modified_base 1: mod_base = OTHER; note = 2'-Omethylguanosine
  modified_base 2: mod_base = OTHER; note = 2'-Omethyladenosine
  modified_base 3: mod_base = OTHER; note = 2'-Omethylcytosine
  modified_base 4: mod_base = OTHER; note = 2'-Omethylcytosine
  modified_base 5: mod_base = OTHER; note = 2'-Omethyluridine
  modified_base 6: mod_base = OTHER; note = 2'-Omethylcytosine
  modified_base 32: mod_base = OTHER; note = 2'-fluorouridine
  modified_base 40: mod_base = OTHER; note = 2'-Omethyladenosine
  modified_base 43: mod_base = OTHER; note = 2'-Omethyladenosine
  modified_base 44: mod_base = OTHER; note = 2'-Omethylguanosine
  modified_base 45: mod_base = OTHER; note = 2'-fluoroguanosine
  modified_base 46: mod_base = OTHER; note = 2'-fluorouridine
  modified_base 47: mod_base = OTHER; note = 2'-fluorouridine
  modified_base 51: mod_base = OTHER; note = 2'-Omethyluridine
  modified_base 54: mod_base = OTHER; note = Uridine phosphorothiorate
  modified_base 70: mod_base = OTHER; note = 2'-Omethyluridine
  modified_base 72: mod_base = OTHER; note = 2'-Omethyladenosine

SEQ ID NO: 3774 - RNA, 76 nt, synthetic construct; identical to SEQ ID NO: 625
  source 1..76: mol_type = other RNA
  modified_base 1: mod_base = OTHER; note = 2'-Omethylguanosine
  modified_base 3: mod_base = OTHER; note = 2'-Omethylcytosine
  modified_base 4: mod_base = OTHER; note = 2'-fluorouridine
  modified_base 5: mod_base = OTHER; note = 2'-fluorocytosine
  modified_base 6: mod_base = OTHER; note = 2'-Omethylcytosine
  modified_base 9: mod_base = OTHER; note = Guanosine phosphorothiorate
  modified_base 10: mod_base = OTHER; note = 2'-fluoroguanosine phosphorothiorate
  modified_base 13: mod_base = OTHER; note = 2'-Omethylcytosine
  modified_base 14: mod_base = OTHER; note = 2'-Omethyladenosine
  modified_base 15: mod_base = OTHER; note = Adenosine phosphorothiorate
  modified_base 24: mod_base = OTHER; note = 2'-fluoroguanosine
  modified_base 27: mod_base = OTHER; note = 2'-Omethyluridine
  modified_base 28: mod_base = OTHER; note = Uridine phosphorothiorate
  modified_base 30: mod_base = OTHER; note = Guanosine phosphorothiorate
  modified_base 31: mod_base = OTHER; note = 2'-Omethyladenosine
  modified_base 34: mod_base = OTHER; note = Uridine phosphorothiorate
  modified_base 38: mod_base = OTHER; note = 2'-fluoroadenosine
  modified_base 39: mod_base = OTHER; note = 2'-Omethyluridine
  modified_base 40: mod_base = OTHER; note = 2'-Omethyluridine
  modified_base 41: mod_base = OTHER; note = 2'-fluorocytosine
  modified_base 43: mod_base = OTHER; note = Adenosine phosphorothiorate
  modified_base 44: mod_base = OTHER; note = 2'-Omethyladenosine
  modified_base 45: mod_base = OTHER; note = Guanosine phosphorothiorate
  modified_base 46: mod_base = OTHER; note = 2'-fluoroguanosine
  modified_base 48: mod_base = OTHER; note = 2'-Omethyluridine
  modified_base 49: mod_base = OTHER; note = 2'-fluorocytosine phosphorothiorate
  modified_base 52: mod_base = OTHER; note = 2'-Omethylguanosine
  modified_base 53: mod_base = OTHER; note = 2'-fluoroguanosine phosphorothiorate
  modified_base 54: mod_base = OTHER; note = 2'-Omethyluridine
  modified_base 60: mod_base = OTHER; note = Uridine phosphorothiorate
  modified_base 61: mod_base = OTHER; note = 2'-fluorocytosine
  modified_base 62: mod_base = OTHER; note = 2'-Omethylcytosine
  modified_base 71: mod_base = OTHER; note = 2'-Omethyluridine
  modified_base 72: mod_base = OTHER; note = Cytosine phosphorothiorate
  modified_base 75: mod_base = OTHER; note = 2'-fluorocytosine

SEQ ID NO: 3775 - RNA, 75 nt, synthetic construct; identical to SEQ ID NO: 3311
  source 1..75: mol_type = other RNA
  modified_base 1: mod_base = OTHER; note = 2'-Omethylguanosine phosphorothiorate
  modified_base 2: mod_base = OTHER; note = 2'-Omethylguanosine
  modified_base 11: mod_base = OTHER; note = 2'-fluorouridine
  modified_base 12: mod_base = OTHER; note = Guanosine phosphorothiorate
  modified_base 19: mod_base = OTHER; note = 2'-fluorouridine
  modified_base 20: mod_base = OTHER; note = Adenosine phosphorothiorate
  modified_base 21: mod_base = OTHER; note = 2'-fluoroadenosine
  modified_base 22: mod_base = OTHER; note = 2'-fluoroguanosine
  modified_base 23: mod_base = OTHER; note = 2'-Omethylcytosine
  modified_base 24: mod_base = OTHER; note = 2'-fluoroadenosine
  modified_base 25: mod_base = OTHER; note = 2'-Omethylcytosine
  modified_base 40: mod_base = OTHER; note = Cytosine phosphorothiorate
  modified_base 42: mod_base = OTHER; note = 2'-fluoroadenosine
  modified_base 44: mod_base = OTHER; note = 2'-fluorocytosine
  modified_base 57: mod_base = OTHER; note = 2'-fluoroadenosine phosphorothiorate
  modified_base 58: mod_base = OTHER; note = 2'-fluoroguanosine
  modified_base 62: mod_base = OTHER; note = Cytosine phosphorothiorate
  modified_base 64: mod_base = OTHER; note = 2'-fluoroguanosine
  modified_base 65: mod_base = OTHER; note = 2'-fluorouridine
  modified_base 73: mod_base = OTHER; note = Cytosine phosphorothiorate
  modified_base 74: mod_base = OTHER; note = 2'-fluorocytosine

SEQ ID NO: 3776 - RNA, 74 nt, synthetic construct; identical to SEQ ID NO: 3293
  source 1..74: mol_type = other RNA
  modified_base 1: mod_base = OTHER; note = 2'-fluoroadenosine
  modified_base 2: mod_base = OTHER; note = 2'-fluorocytosine
  modified_base 4: mod_base = OTHER; note = 2'-fluorouridine
  modified_base 6: mod_base = OTHER; note = 2'-fluoroguanosine
  modified_base 8: mod_base = OTHER; note = Guanosine phosphorothiorate
  modified_base 9: mod_base = OTHER; note = Guanosine phosphorothiorate
  modified_base 12: mod_base = OTHER; note = 2'-Omethylcytosine
  modified_base 24: mod_base = OTHER; note = Guanosine phosphorothiorate
  modified_base 26: mod_base = OTHER; note = Cytosine phosphorothiorate
  modified_base 27: mod_base = OTHER; note = 2'-fluorouridine
  modified_base 42: mod_base = OTHER; note = Adenosine phosphorothiorate
  modified_base 50: mod_base = OTHER; note = 2'-fluorouridine
  modified_base 51: mod_base = OTHER; note = 2'-fluoroguanosine
  modified_base 62: mod_base = OTHER; note = Guanosine phosphorothiorate
  modified_base 73: mod_base = OTHER; note = 2'-Omethylcytosine phosphorothiorate

SEQ ID NO: 3777 - RNA, 76 nt, synthetic construct; identical to SEQ ID NO: 625
  source 1..76: mol_type = other RNA
  modified_base 4: mod_base = OTHER; note = 2'-Omethyluridine
  modified_base 5: mod_base = OTHER; note = Cytosine phosphorothiorate
  modified_base 6: mod_base = OTHER; note = 2'-Omethylcytosine
  modified_base 7: mod_base = OTHER; note = Guanosine phosphorothiorate
  modified_base 8: mod_base = OTHER; note = Uridine phosphorothiorate
  modified_base 13: mod_base = OTHER; note = 2'-fluorocytosine
  modified_base 14: mod_base = OTHER; note = 2'-Omethyladenosine
  modified_base 15: mod_base = OTHER; note = Adenosine phosphorothiorate
  modified_base 16: mod_base = OTHER; note = 2'-Omethyluridine
  modified_base 20: mod_base = OTHER; note = 2'-fluorouridine
  modified_base 21: mod_base = OTHER; note = Adenosine phosphorothiorate
  modified_base 22: mod_base = OTHER; note = 2'-Omethylguanosine
  modified_base 23: mod_base = OTHER; note = 2'-fluorocytosine
  modified_base 24: mod_base = OTHER; note = Guanosine phosphorothiorate
  modified_base 25: mod_base = OTHER; note = 2'-fluorocytosine
  modified_base 27: mod_base = OTHER; note = 2'-Omethyluridine
  modified_base 36: mod_base = OTHER; note = Adenosine phosphorothiorate
  modified_base 39: mod_base = OTHER; note = Uridine phosphorothiorate
  modified_base 40: mod_base = OTHER; note = 2'-fluorouridine
  modified_base 45: mod_base = OTHER; note = 2'-Omethylguanosine
  modified_base 46: mod_base = OTHER; note = 2'-fluoroguanosine
  modified_base 48: mod_base = OTHER; note = 2'-fluorouridine
  modified_base 50: mod_base = OTHER; note = 2'-Omethylcytosine
  modified_base 51: mod_base = OTHER; note = Guanosine phosphorothiorate
  modified_base 52: mod_base = OTHER; note = 2'-Omethylguanosine phosphorothiorate
  modified_base 53: mod_base = OTHER; note = 2'-fluoroguanosine
  modified_base 55: mod_base = OTHER; note = Uridine phosphorothiorate
  modified_base 56: mod_base = OTHER; note = 2'-fluorocytosine
  modified_base 57: mod_base = OTHER; note = 2'-fluoroguanosine
  modified_base 59: mod_base = OTHER; note = 2'-Omethylguanosine
  modified_base 60: mod_base = OTHER; note = 2'-Omethyluridine
  modified_base 61: mod_base = OTHER; note = Cytosine phosphorothiorate
  modified_base 62: mod_base = OTHER; note = 2'-Omethylcytosine
  modified_base 63: mod_base = OTHER; note = 2'-Omethylcytosine
  modified_base 66: mod_base = OTHER; note = Cytosine phosphorothiorate
  modified_base 67: mod_base = OTHER; note = 2'-Omethylguanosine
  modified_base 68: mod_base = OTHER; note = 2'-fluoroguanosine
  modified_base 71: mod_base = OTHER; note = 2'-Omethyluridine
  modified_base 72: mod_base = OTHER; note = Cytosine phosphorothiorate
  modified_base 74: mod_base = OTHER; note = Cytosine phosphorothiorate
  modified_base 75: mod_base = OTHER; note = Cytosine phosphorothiorate

SEQ ID NO: 3778 - RNA, 76 nt, synthetic construct; identical to SEQ ID NO: 625
  source 1..76: mol_type = other RNA
  modified_base 47: mod_base = OTHER; note = Thymine
  modified_base 48: mod_base = OTHER; note = Thymine
  modified_base 54: mod_base = OTHER; note = Thymine
  modified_base 55: mod_base = OTHER; note = Thymine
  modified_base 60: mod_base = OTHER; note = Thymine

SEQ ID NO: 3779 - RNA, 76 nt, synthetic construct; identical to SEQ ID NO: 625
  source 1..76: mol_type = other RNA
  modified_base 1: mod_base = OTHER; note = 2'-Omethylguanosine
  modified_base 3: mod_base = OTHER; note = 2'-fluorocytosine
  modified_base 5: mod_base = OTHER; note = Cytosine phosphorothiorate
  modified_base 6: mod_base = OTHER; note = 2'-Omethylcytosine
  modified_base 8: mod_base = OTHER; note = Uridine phosphorothiorate
  modified_base 10: mod_base = OTHER; note = 2'-Omethylguanosine
  modified_base 11: mod_base = OTHER; note = 2'-fluorocytosine
  modified_base 12: mod_base = OTHER; note = 2'-Omethylguanosine phosphorothiorate
  modified_base 13: mod_base = OTHER; note = 2'-Omethylcytosine
  modified_base 14: mod_base = OTHER; note = 2'-fluoroadenosine
  modified_base 18: mod_base = OTHER; note = Guanosine phosphorothiorate
  modified_base 24: mod_base = OTHER; note = 2'-fluoroguanosine phosphorothiorate
  modified_base 25: mod_base = OTHER; note = Cytosine phosphorothiorate
  modified_base 26: mod_base = OTHER; note = 2'-fluoroadenosine
  modified_base 31: mod_base = OTHER; note = 2'-Omethyladenosine
  modified_base 34: mod_base = OTHER; note = 2'-fluorouridine phosphorothiorate
  modified_base 37: mod_base = OTHER; note = Adenosine phosphorothiorate
  modified_base 40: mod_base = OTHER; note = 2'-fluorouridine
  modified_base 42: mod_base = OTHER; note = 2'-fluoroadenosine
  modified_base 44: mod_base = OTHER; note = 2'-fluoroadenosine
  modified_base 45: mod_base = OTHER; note = 2'-fluoroguanosine
  modified_base 50: mod_base = OTHER; note = 2'-fluorocytosine
  modified_base 51: mod_base = OTHER; note = 2'-Omethylguanosine phosphorothiorate
  modified_base 52: mod_base = OTHER; note = Guanosine phosphorothiorate
  modified_base 53: mod_base = OTHER; note = 2'-fluoroguanosine
  modified_base 55: mod_base = OTHER; note = Uridine phosphorothiorate
  modified_base 56: mod_base = OTHER; note = 2'-fluorocytosine
  modified_base 57: mod_base = OTHER; note = 2'-Omethylguanosine
  modified_base 60: mod_base = OTHER; note = 2'-fluorouridine
  modified_base 62: mod_base = OTHER; note = 2'-fluorocytosine
  modified_base 66: mod_base = OTHER; note = Cytosine phosphorothiorate
  modified_base 67: mod_base = OTHER; note = 2'-Omethylguanosine
  modified_base 68: mod_base = OTHER; note = Guanosine phosphorothiorate
  modified_base 70: mod_base = OTHER; note = 2'-fluoroguanosine
  modified_base 72: mod_base = OTHER; note = 2'-Omethylcytosine
  modified_base 73: mod_base = OTHER; note = 2'-fluoroguanosine phosphorothiorate
  modified_base 74: mod_base = OTHER; note = 2'-Omethylcytosine
  modified_base 75: mod_base = OTHER; note = Cytosine phosphorothiorate
  modified_base 76: mod_base = OTHER; note = 2'-fluoroadenosine

SEQ ID NO: 3780 - RNA, 75 nt, synthetic construct; identical to SEQ ID NO: 3336
  source 1..75: mol_type = other RNA
  modified_base 3: mod_base = OTHER; note = 2'-Omethyluridine phosphorothiorate
  modified_base 36: mod_base = OTHER; note = 2'-fluoroadenosine phosphorothiorate
  modified_base 40: mod_base = OTHER; note = 2'-Omethyluridine phosphorothiorate
  modified_base 46: mod_base = OTHER; note = Uridine phosphorothiorate
  modified_base 48: mod_base = OTHER; note = 2'-fluorocytosine
  modified_base 63: mod_base = OTHER; note = 2'-Omethyluridine
  modified_base 73: mod_base = OTHER; note = Cytosine phosphorothiorate

SEQ ID NO: 3781 - RNA, 85 nt, synthetic construct; identical to SEQ ID NO: 3288
  source 1..85: mol_type = other RNA
  modified_base 1: mod_base = OTHER; note = 2'-Omethylcytosine phosphorothiorate
  modified_base 11: mod_base = OTHER; note = Cytosine phosphorothiorate
  modified_base 26: mod_base = OTHER; note = 2'-fluorouridine
  modified_base 30: mod_base = OTHER; note = 2'-fluoroadenosine
  modified_base 36: mod_base = OTHER; note = Guanosine phosphorothiorate
  modified_base 44: mod_base = OTHER; note = 2'-Omethylguanosine
  modified_base 50: mod_base = OTHER; note = 2'-Omethyladenosine
  modified_base 55: mod_base = OTHER; note = 2'-Omethylcytosine
  modified_base 58: mod_base = OTHER; note = Guanosine phosphorothiorate
  modified_base 64: mod_base = OTHER; note = Uridine phosphorothiorate
  modified_base 84: mod_base = OTHER; note = 2'-fluorocytosine phosphorothiorate

SEQ ID NO: 3782 - RNA, 76 nt, synthetic construct; identical to SEQ ID NO: 625
  source 1..76: mol_type = other RNA
  modified_base 1: mod_base = OTHER; note = 2'-Omethylguanosine phosphorothiorate
  modified_base 2: mod_base = OTHER; note = 2'-Omethylguanosine
  modified_base 3: mod_base = OTHER; note = 2'-Omethylcytosine
  modified_base 4: mod_base = OTHER; note = 2'-Omethyluridine
  modified_base 5: mod_base = OTHER; note = 2'-Omethylcytosine
  modified_base 6: mod_base = OTHER; note = 2'-Omethylcytosine
  modified_base 10: mod_base = OTHER; note = 2'-Omethylguanosine
  modified_base 11: mod_base = OTHER; note = 2'-Omethylcytosine
  modified_base 12: mod_base = OTHER; note = 2'-Omethylguanosine
  modified_base 13: mod_base = OTHER; note = 2'-Omethylcytosine
  modified_base 16: mod_base = OTHER; note = 2'-Omethyluridine
  modified_base 17: mod_base = OTHER; note = 2'-Omethylguanosine
  modified_base 18: mod_base = OTHER; note = 2'-Omethylguanosine
  modified_base 22: mod_base = OTHER; note = 2'-Omethylguanosine
  modified_base 23: mod_base = OTHER; note = 2'-Omethylcytosine
  modified_base 24: mod_base = OTHER; note = 2'-Omethylguanosine
  modified_base 25: mod_base = OTHER; note = 2'-Omethylcytosine
  modified_base 40: mod_base = OTHER; note = 2'-fluorouridine
  modified_base 41: mod_base = OTHER; note = 2'-fluorocytosine
  modified_base 42: mod_base = OTHER; note = 2'-fluoroadenosine
  modified_base 43: mod_base = OTHER; note = 2'-fluoroadenosine
  modified_base 54: mod_base = OTHER; note = 2'-Omethyluridine phosphorothiorate
  modified_base 56: mod_base = OTHER; note = 2'-Omethylcytosine
  modified_base 57: mod_base = OTHER; note = 2'-fluoroguanosine
  modified_base 59: mod_base = OTHER; note = 2'-Omethylguanosine
  modified_base 61: mod_base = OTHER; note = 2'-Omethylcytosine
  modified_base 62: mod_base = OTHER; note = 2'-Omethylcytosine
  modified_base 63: mod_base = OTHER; note = 2'-Omethylcytosine
  modified_base 64: mod_base = OTHER; note = 2'-Omethylguanosine
  modified_base 65: mod_base = OTHER; note = 2'-Omethylguanosine
  modified_base 66: mod_base = OTHER; note = 2'-Omethylcytosine
  modified_base 67: mod_base = OTHER; note = 2'-Omethylguanosine
  modified_base 68: mod_base = OTHER; note = 2'-Omethylguanosine
  modified_base 69: mod_base = OTHER; note = 2'-Omethyladenosine
  modified_base 73: mod_base = OTHER; note = 2'-Omethylguanosine

SEQ ID NO: 3783 - RNA, 76 nt, synthetic construct; identical to SEQ ID NO: 3447
  source 1..76: mol_type = other RNA
  modified_base 1: mod_base = OTHER; note = 2'-Omethylguanosine
  modified_base 13: mod_base = OTHER; note = 2'-Omethylcytosine
  modified_base 14: mod_base = OTHER; note = 2'-Omethyladenosine
  modified_base 15: mod_base = OTHER; note = 2'-Omethyladenosine
  modified_base 16: mod_base = OTHER; note = 2'-Omethyluridine
  modified_base 17: mod_base = OTHER; note = 2'-Omethylguanosine
  modified_base 18: mod_base = OTHER; note = 2'-Omethylguanosine
  modified_base 19: mod_base = OTHER; note = Adenosine phosphorothiorate
  modified_base 20: mod_base = OTHER; note = 2'-Omethyluridine
  modified_base 21: mod_base = OTHER; note = Adenosine phosphorothiorate
  modified_base 25: mod_base = OTHER; note = 2'-Omethylcytosine
  modified_base 41: mod_base = OTHER; note = 2'-fluorocytosine
  modified_base 42: mod_base = OTHER; note = 2'-Omethyladenosine
  modified_base 43: mod_base = OTHER; note = 2'-Omethyladenosine
  modified_base 44: mod_base = OTHER; note = 2'-fluoroadenosine
  modified_base 49: mod_base = OTHER; note = 2'-Omethylcytosine
  modified_base 50: mod_base = OTHER; note = 2'-Omethylcytosine
  modified_base 51: mod_base = OTHER; note = 2'-Omethylguanosine
  modified_base 52: mod_base = OTHER; note = 2'-Omethylguanosine
  modified_base 53: mod_base = OTHER; note = 2'-Omethylguanosine
  modified_base 54: mod_base = OTHER; note = Uridine phosphorothiorate
  modified_base 55: mod_base = OTHER; note = Uridine phosphorothiorate
  modified_base 61: mod_base = OTHER; note = 2'-Omethylcytosine
  modified_base 65: mod_base = OTHER; note = 2'-Omethylguanosine
  modified_base 73: mod_base = OTHER; note = 2'-Omethylguanosine

SEQ ID NO: 3784 - RNA, 76 nt, synthetic construct; identical to SEQ ID NO: 3318
  source 1..76: mol_type = other RNA
  modified_base 1: mod_base = OTHER; note = 2'-Omethylcytosine
  modified_base 2: mod_base = OTHER; note = 2'-Omethylcytosine
  modified_base 3: mod_base = OTHER; note = 2'-Omethyluridine
  modified_base 4: mod_base = OTHER; note = 2'-Omethyluridine
  modified_base 5: mod_base = OTHER; note = 2'-Omethylcytosine
  modified_base 6: mod_base = OTHER; note = 2'-Omethylguanosine
  modified_base 14: mod_base = OTHER; note = 2'-Omethyladenosine
  modified_base 18: mod_base = OTHER; note = 2'-Omethylguanosine
  modified_base 19: mod_base = OTHER; note = 2'-Omethylguanosine
  modified_base 22: mod_base = OTHER; note = 2'-Omethylguanosine
  modified_base 25: mod_base = OTHER; note = 2'-Omethylcytosine
  modified_base 27: mod_base = OTHER; note = 2'-Omethylguanosine
  modified_base 33: mod_base = OTHER; note = 2'-fluorouridine
  modified_base 41: mod_base = OTHER; note = 2'-Omethylcytosine
  modified_base 44: mod_base = OTHER; note = 2'-Omethyladenosine
  modified_base 45: mod_base = OTHER; note = 2'-Omethylguanosine
  modified_base 46: mod_base = OTHER; note = 2'-fluoroguanosine
  modified_base 47: mod_base = OTHER; note = 2'-fluorouridine
  modified_base 48: mod_base = OTHER; note = 2'-fluorocytosine
  modified_base 52: mod_base = OTHER; note = 2'-Omethylguanosine
  modified_base 55: mod_base = OTHER; note = Uridine phosphorothiorate
  modified_base 73: mod_base = OTHER; note = 2'-Omethyladenosine

SEQ ID NO: 3785 - RNA, 75 nt, synthetic construct; identical to SEQ ID NO: 3306
  source 1..75: mol_type = other RNA
  modified_base 1: mod_base = OTHER; note = 2'-Omethylguanosine phosphorothiorate
  modified_base 2: mod_base = OTHER; note = 2'-Omethyladenosine
  modified_base 45: mod_base = OTHER; note = 2'-fluoroguanosine
  modified_base 58: mod_base = OTHER; note = 2'-Omethyladenosine
  modified_base 74: mod_base = OTHER; note = Cytosine phosphorothiorate
  modified_base 75: mod_base = OTHER; note = 2'-Omethyladenosine

SEQ ID NO: 3786 - RNA, 76 nt, synthetic construct; identical to SEQ ID NO: 625
  source 1..76: mol_type = other RNA
  modified_base 1: mod_base = OTHER; note = 2'-Omethylguanosine phosphorothiorate
  modified_base 2: mod_base = OTHER; note = 2'-Omethylguanosine
  modified_base 10: mod_base = OTHER; note = 2'-Omethylguanosine
  modified_base 11: mod_base = OTHER; note = 2'-Omethylcytosine
  modified_base 12: mod_base = OTHER; note = 2'-Omethylguanosine
  modified_base 13: mod_base = OTHER; note = 2'-Omethylcytosine
  modified_base 17: mod_base = OTHER; note = 2'-Omethylguanosine
  modified_base 33: mod_base = OTHER; note = 2'-fluorouridine
  modified_base 35: mod_base = OTHER; note = Cytosine phosphorothiorate
  modified_base 37: mod_base = OTHER; note = Adenosine phosphorothiorate
  modified_base 38: mod_base = OTHER; note = Adenosine phosphorothiorate
  modified_base 40: mod_base = OTHER; note = 2'-fluorouridine
  modified_base 41: mod_base = OTHER; note = 2'-fluorocytosine
  modified_base 42: mod_base = OTHER; note = 2'-fluoroadenosine
  modified_base 43: mod_base = OTHER; note = 2'-fluoroadenosine
  modified_base 52: mod_base = OTHER; note = 2'-Omethylguanosine
  modified_base 54: mod_base = OTHER; note = Uridine phosphorothiorate
  modified_base 55: mod_base = OTHER; note = Uridine phosphorothiorate
  modified_base 56: mod_base = OTHER; note = Cytosine phosphorothiorate
  modified_base 57: mod_base = OTHER; note = Guanosine phosphorothiorate
  modified_base 62: mod_base = OTHER; note = 2'-Omethylcytosine
  modified_base 63: mod_base = OTHER; note = 2'-fluorocytosine
  modified_base 65: mod_base = OTHER; note = 2'-Omethylguanosine
  modified_base 68: mod_base = OTHER; note = 2'-Omethylguanosine
  modified_base 73: mod_base = OTHER; note = 2'-Omethylguanosine
  modified_base 75: mod_base = OTHER; note = 2'-fluorocytosine phosphorothiorate

SEQ ID NO: 3787 - RNA, 75 nt, synthetic construct; identical to SEQ ID NO: 1045
  source 1..75: mol_type = other RNA
  modified_base 50: mod_base = OTHER; note = 2'-Omethylguanosine
  modified_base 62: mod_base = OTHER; note = 2'-Omethylcytosine

SEQ ID NO: 3788 - RNA, 76 nt, synthetic construct; identical to SEQ ID NO: 625
  source 1..76: mol_type = other RNA
  modified_base 27: mod_base = OTHER; note = 2'-fluorouridine
  modified_base 28: mod_base = OTHER; note = 2'-fluorouridine
  modified_base 29: mod_base = OTHER; note = 2'-fluoroguanosine
  modified_base 30: mod_base = OTHER; note = 2'-fluoroguanosine
  modified_base 31: mod_base = OTHER; note = 2'-fluoroadenosine
  modified_base 39: mod_base = OTHER; note = 2'-fluorouridine
  modified_base 40: mod_base = OTHER; note = 2'-fluorouridine
  modified_base 41: mod_base = OTHER; note = 2'-fluorocytosine
  modified_base 42: mod_base = OTHER; note = 2'-fluoroadenosine
  modified_base 43: mod_base = OTHER; note = 2'-fluoroadenosine

SEQ ID NO: 3789 - RNA, 76 nt, synthetic construct; identical to SEQ ID NO: 3419
  source 1..76: mol_type = other RNA
  modified_base 1: mod_base = OTHER; note = 2'-Omethylguanosine phosphorothiorate
  modified_base 2: mod_base = OTHER; note = 2'-Omethylguanosine phosphorothiorate
  modified_base 3: mod_base = OTHER; note = 2'-Omethylcytosine
  modified_base 4: mod_base = OTHER; note = 2'-Omethyluridine
  modified_base 5: mod_base = OTHER; note = 2'-Omethylcytosine
  modified_base 6: mod_base = OTHER; note = 2'-Omethylcytosine
  modified_base 10: mod_base = OTHER; note = 2'-Omethylguanosine
  modified_base 11: mod_base = OTHER; note = 2'-Omethylcytosine
  modified_base 12: mod_base = OTHER; note = 2'-Omethylguanosine
  modified_base 13: mod_base = OTHER; note = 2'-Omethylcytosine
  modified_base 22: mod_base = OTHER; note = 2'-Omethylguanosine
  modified_base 23: mod_base = OTHER; note = 2'-Omethylcytosine
  modified_base 24: mod_base = OTHER; note = 2'-Omethylguanosine
  modified_base 25: mod_base = OTHER; note = 2'-Omethylcytosine
  modified_base 49: mod_base = OTHER; note = 2'-Omethylcytosine
  modified_base 50: mod_base = OTHER; note = 2'-Omethylcytosine
  modified_base 51: mod_base = OTHER; note = 2'-Omethylguanosine
  modified_base 52: mod_base = OTHER; note = 2'-Omethylguanosine
  modified_base 53: mod_base = OTHER; note = 2'-Omethylguanosine
  modified_base 54: mod_base = OTHER; note = 2'-Omethyluridine
  modified_base 61: mod_base = OTHER; note = 2'-Omethylcytosine
  modified_base 62: mod_base = OTHER; note = 2'-Omethylcytosine
  modified_base 63: mod_base = OTHER; note = 2'-fluorocytosine
  modified_base 64: mod_base = OTHER; note = 2'-Omethylguanosine
  modified_base 65: mod_base = OTHER; note = 2'-Omethylguanosine
  modified_base 66: mod_base = OTHER; note = 2'-Omethylcytosine
  modified_base 67: mod_base = OTHER; note = 2'-Omethylguanosine
  modified_base 68: mod_base = OTHER; note = 2'-Omethylguanosine
  modified_base 73: mod_base = OTHER; note = 2'-Omethylguanosine

SEQ ID NO: 3790 - RNA, 76 nt, synthetic construct; identical to SEQ ID NO: 625
  source 1..76: mol_type = other RNA
  modified_base 1: mod_base = OTHER; note = 2'-Omethylguanosine
  modified_base 2: mod_base = OTHER; note = 2'-Omethylguanosine
  modified_base 3: mod_base = OTHER; note = 2'-Omethylcytosine
  modified_base 4: mod_base = OTHER; note = 2'-Omethyluridine
  modified_base 5: mod_base = OTHER; note = 2'-Omethylcytosine
  modified_base 6: mod_base = OTHER; note = 2'-Omethylcytosine
  modified_base 7: mod_base = OTHER; note = 2'-Omethylguanosine phosphorothiorate
  modified_base 10: mod_base = OTHER; note = 2'-Omethylguanosine
  modified_base 11: mod_base = OTHER; note = 2'-Omethylcytosine
  modified_base 12: mod_base = OTHER; note = 2'-Omethylguanosine phosphorothiorate
  modified_base 13: mod_base = OTHER; note = 2'-Omethylcytosine
  modified_base 14: mod_base = OTHER; note = 2'-Omethyladenosine
  modified_base 15: mod_base = OTHER; note = 2'-Omethyladenosine
  modified_base 16: mod_base = OTHER; note = 2'-Omethyluridine
  modified_base 17: mod_base = OTHER; note = 2'-fluoroguanosine phosphorothiorate
  modified_base 18: mod_base = OTHER; note = 2'-Omethylguanosine
  modified_base 19: mod_base = OTHER; note = 2'-fluoroadenosine phosphorothiorate
  modified_base 21: mod_base = OTHER; note = 2'-fluoroadenosine phosphorothiorate
  modified_base 22: mod_base = OTHER; note = 2'-Omethylguanosine
  modified_base 23: mod_base = OTHER; note = 2'-Omethylcytosine
  modified_base 24: mod_base = OTHER; note = 2'-Omethylguanosine
  modified_base 25: mod_base = OTHER; note = 2'-Omethylcytosine
  modified_base 26: mod_base = OTHER; note = Adenosine phosphorothiorate
  modified_base 28: mod_base = OTHER; note = 2'-Omethyluridine phosphorothiorate
  modified_base 30: mod_base = OTHER; note = 2'-Omethylguanosine phosphorothiorate
  modified_base 31: mod_base = OTHER; note = 2'-Omethyladenosine phosphorothiorate
  modified_base 33: mod_base = OTHER; note = 2'-fluorouridine
  modified_base 35: mod_base = OTHER; note = Cytosine phosphorothiorate
  modified_base 36: mod_base = OTHER; note = 2'-Omethyladenosine phosphorothiorate
  modified_base 37: mod_base = OTHER; note = Adenosine phosphorothiorate
  modified_base 38: mod_base = OTHER; note = Adenosine phosphorothiorate
  modified_base 40: mod_base = OTHER; note = 2'-fluorouridine
  modified_base 41: mod_base = OTHER; note = 2'-fluorocytosine
  modified_base 42: mod_base = OTHER; note = 2'-Omethyladenosine phosphorothiorate
  modified_base 43: mod_base = OTHER; note = Adenosine phosphorothiorate
  modified_base 44: mod_base = OTHER; note = 2'-Omethyladenosine
  modified_base 50: mod_base = OTHER; note = 2'-Omethylcytosine
  modified_base 52: mod_base = OTHER; note = 2'-Omethylguanosine
  modified_base 53: mod_base = OTHER; note = 2'-fluoroguanosine
  modified_base 54: mod_base = OTHER; note = 2'-Omethyluridine
  modified_base 55: mod_base = OTHER; note = Uridine phosphorothiorate
  modified_base 56: mod_base = OTHER; note = 2'-Omethylcytosine
  modified_base 57: mod_base = OTHER; note = 2'-Omethylguanosine phosphorothiorate
  modified_base 59: mod_base = OTHER; note = 2'-Omethylguanosine
  modified_base 61: mod_base = OTHER; note = 2'-Omethylcytosine phosphorothiorate
  modified_base 62: mod_base = OTHER; note = 2'-Omethylcytosine
  modified_base 63: mod_base = OTHER; note = 2'-Omethylcytosine phosphorothiorate
  modified_base 64: mod_base = OTHER; note = 2'-Omethylguanosine phosphorothiorate
  modified_base 65: mod_base = OTHER; note = 2'-Omethylguanosine phosphorothiorate
  modified_base 66: mod_base = OTHER; note = 2'-fluorocytosine
  modified_base 67: mod_base = OTHER; note = Guanosine phosphorothiorate
  modified_base 68: mod_base = OTHER; note = 2'-fluoroguanosine
  modified_base 69: mod_base = OTHER; note = 2'-fluoroadenosine
  modified_base 70: mod_base = OTHER; note = 2'-fluoroguanosine
  modified_base 71: mod_base = OTHER; note = 2'-Omethyluridine phosphorothiorate
  modified_base 73: mod_base = OTHER; note = 2'-Omethylguanosine
  modified_base 74: mod_base = OTHER; note = 2'-fluorocytosine phosphorothiorate
  modified_base 75: mod_base = OTHER; note = 2'-fluorocytosine
  modified_base 76: mod_base = OTHER; note = 2'-Omethyladenosine

SEQ ID NO: 3791 - RNA, 75 nt, synthetic construct; identical to SEQ ID NO: 3306
  source 1..75: mol_type = other RNA
  modified_base 1: mod_base = OTHER; note = 2'-Omethylguanosine phosphorothiorate
  modified_base 2: mod_base = OTHER; note = 2'-Omethyladenosine phosphorothiorate
  modified_base 73: mod_base = OTHER; note = Cytosine phosphorothiorate
  modified_base 74: mod_base = OTHER; note = 2'-Omethylcytosine

SEQ ID NO: 3792 - RNA, 76 nt, synthetic construct; identical to SEQ ID NO: 625
  source 1..76: mol_type = other RNA
  modified_base 1: mod_base = OTHER; note = 2'-Omethylguanosine phosphorothiorate
  modified_base 2: mod_base = OTHER; note = 2'-Omethylguanosine
  modified_base 3: mod_base = OTHER; note = 2'-Omethylcytosine
  modified_base 10: mod_base = OTHER; note = 2'-Omethylguanosine
  modified_base 11: mod_base = OTHER; note = 2'-Omethylcytosine
  modified_base 12: mod_base = OTHER; note = 2'-Omethylguanosine
  modified_base 13: mod_base = OTHER; note = 2'-Omethylcytosine
  modified_base 14: mod_base = OTHER; note = 2'-Omethyladenosine
  modified_base 15: mod_base = OTHER; note = 2'-fluoroadenosine
  modified_base 16: mod_base = OTHER; note = 2'-Omethyluridine
  modified_base 17: mod_base = OTHER; note = 2'-Omethylguanosine
  modified_base 18: mod_base = OTHER; note = 2'-Omethylguanosine
  modified_base 19: mod_base = OTHER; note = 2'-fluoroadenosine
  modified_base 20: mod_base = OTHER; note = 2'-Omethyluridine
  modified_base 21: mod_base = OTHER; note = 2'-fluoroadenosine
  modified_base 22: mod_base = OTHER; note = 2'-Omethylguanosine
  modified_base 23: mod_base = OTHER; note = 2'-Omethylcytosine
  modified_base 24: mod_base = OTHER; note = 2'-Omethylguanosine
  modified_base 25: mod_base = OTHER; note = 2'-Omethylcytosine
  modified_base 38: mod_base = OTHER; note = Adenosine phosphorothiorate
  modified_base 39: mod_base = OTHER; note = Uridine phosphorothiorate
  modified_base 40: mod_base = OTHER; note = 2'-fluorouridine
  modified_base 43: mod_base = OTHER; note = 2'-Omethyladenosine
  modified_base 44: mod_base = OTHER; note = 2'-Omethyladenosine
  modified_base 45: mod_base = OTHER; note = 2'-Omethylguanosine
  modified_base 46: mod_base = OTHER; note = 2'-fluoroguanosine
  modified_base 48: mod_base = OTHER; note = 2'-fluorouridine
  modified_base 49: mod_base = OTHER; note = 2'-Omethylcytosine
  modified_base 50: mod_base = OTHER; note = 2'-Omethylcytosine
  modified_base 54: mod_base = OTHER; note = Uridine phosphorothiorate
  modified_base 55: mod_base = OTHER; note = Uridine phosphorothiorate
  modified_base 56: mod_base = OTHER; note = 2'-Omethylcytosine
  modified_base 57: mod_base = OTHER; note = Guanosine phosphorothiorate
  modified_base 61: mod_base = OTHER; note = 2'-Omethylcytosine
  modified_base 62: mod_base = OTHER; note = 2'-Omethylcytosine
  modified_base 63: mod_base = OTHER; note = 2'-fluorocytosine
  modified_base 64: mod_base = OTHER; note = 2'-Omethylguanosine
  modified_base 65: mod_base = OTHER; note = 2'-Omethylguanosine
  modified_base 66: mod_base = OTHER; note = 2'-Omethylcytosine
  modified_base 67: mod_base = OTHER; note = 2'-Omethylguanosine
  modified_base 68: mod_base = OTHER; note = 2'-Omethylguanosine

SEQ ID NO: 3793 - RNA, 75 nt, synthetic construct; identical to SEQ ID NO: 3299
  source 1..75: mol_type = other RNA
  modified_base 1: mod_base = OTHER; note = 2'-Omethylcytosine
  modified_base 2: mod_base = OTHER; note = 2'-Omethylcytosine
  modified_base 20: mod_base = OTHER; note = 2'-fluoroadenosine phosphorothiorate
  modified_base 36: mod_base = OTHER; note = 2'-Omethyladenosine
  modified_base 47: mod_base = OTHER; note = 2'-fluorocytosine
  modified_base 52: mod_base = OTHER; note = 2'-fluoroguanosine
  modified_base 73: mod_base = OTHER; note = Cytosine phosphorothiorate
  modified_base 74: mod_base = OTHER; note = Cytosine phosphorothiorate
  modified_base 75: mod_base = OTHER; note = 2'-Omethyladenosine

SEQ ID NO: 3794 - RNA, 85 nt, synthetic construct; identical to SEQ ID NO: 3286
  source 1..85: mol_type = other RNA
  modified_base 1: mod_base = OTHER; note = 2'-Omethylcytosine
  modified_base 15: mod_base = OTHER; note = 2'-Omethyluridine
  modified_base 27: mod_base = OTHER; note = 2'-Omethyluridine
  modified_base 30: mod_base = OTHER; note = 2'-fluoroadenosine
  modified_base 32: mod_base = OTHER; note = 2'-fluorouridine
  modified_base 34: mod_base = OTHER; note = 2'-fluorouridine
  modified_base 38: mod_base = OTHER; note = 2'-Omethyluridine
  modified_base 39: mod_base = OTHER; note = Cytosine phosphorothiorate
  modified_base 45: mod_base = OTHER; note = 2'-Omethylguanosine
  modified_base 46: mod_base = OTHER; note = Adenosine phosphorothiorate
  modified_base 52: mod_base = OTHER; note = Guanosine phosphorothiorate
  modified_base 54: mod_base = OTHER; note = 2'-fluorocytosine phosphorothiorate
  modified_base 56: mod_base = OTHER; note = 2'-fluoroguanosine
  modified_base 57: mod_base = OTHER; note = 2'-Omethylcytosine
  modified_base 73: mod_base = OTHER; note = 2'-fluoroadenosine phosphorothiorate
  modified_base 84: mod_base = OTHER; note = Cytosine phosphorothiorate

SEQ ID NO: 3795 - RNA, 76 nt, synthetic construct
  source 1..76: mol_type = other RNA
gcctccgtggcctaatggataaggcatcggccttcaaagccggggattgcgggttcgagtcccgtcggaggtgcca

SEQ ID NO: 3796 - RNA, 76 nt, synthetic construct; identical to SEQ ID NO: 3295
  source 1..76: mol_type = other RNA
  modified_base 1: mod_base = OTHER; note = 2'-Omethylcytosine
  modified_base 2: mod_base = OTHER; note = Cytosine phosphorothiorate
  modified_base 4: mod_base = OTHER; note = 2'-fluorouridine phosphorothiorate
  modified_base 10: mod_base = OTHER; note = 2'-Omethylguanosine phosphorothiorate
  modified_base 36: mod_base = OTHER; note = 2'-fluoroadenosine
  modified_base 44: mod_base = OTHER; note = 2'-Omethyladenosine
  modified_base 52: mod_base = OTHER; note = 2'-Omethylguanosine
  modified_base 75: mod_base = OTHER; note = 2'-Omethylcytosine phosphorothiorate
  modified_base 76: mod_base = OTHER; note = 2'-Omethyladenosine

SEQ ID NO: 3797 - RNA, 76 nt, synthetic construct; identical to SEQ ID NO: 625
  source 1..76: mol_type = other RNA
  modified_base 4: mod_base = OTHER; note = Uridine phosphorothiorate
  modified_base 5: mod_base = OTHER; note = 2'-fluorocytosine phosphorothiorate
  modified_base 6: mod_base = OTHER; note = 2'-fluorocytosine phosphorothiorate
  modified_base 10: mod_base = OTHER; note = 2'-Omethylguanosine
  modified_base 15: mod_base = OTHER; note = 2'-fluoroadenosine
  modified_base 17: mod_base = OTHER; note = 2'-Omethylguanosine
  modified_base 22: mod_base = OTHER; note = Guanosine phosphorothiorate
  modified_base 23: mod_base = OTHER; note = 2'-Omethylcytosine
  modified_base 28: mod_base = OTHER; note = 2'-Omethyluridine
  modified_base 30: mod_base = OTHER; note = Guanosine phosphorothiorate
  modified_base 34: mod_base = OTHER; note = 2'-fluorouridine
  modified_base 37: mod_base = OTHER; note = Adenosine phosphorothiorate
  modified_base 39: mod_base = OTHER; note = Uridine phosphorothiorate
  modified_base 40: mod_base = OTHER; note = 2'-fluorouridine
  modified_base 41: mod_base = OTHER; note = 2'-Omethylcytosine
  modified_base 42: mod_base = OTHER; note = 2'-Omethyladenosine phosphorothiorate
  modified_base 43: mod_base = OTHER; note = 2'-Omethyladenosine
  modified_base 44: mod_base = OTHER; note = 2'-fluoroadenosine
  modified_base 46: mod_base = OTHER; note = 2'-Omethylguanosine
  modified_base 49: mod_base = OTHER; note = Cytosine phosphorothiorate
  modified_base 50: mod_base = OTHER; note = 2'-Omethylcytosine
  modified_base 51: mod_base = OTHER; note = 2'-Omethylguanosine phosphorothiorate
  modified_base 52: mod_base = OTHER; note = 2'-fluoroguanosine phosphorothiorate
  modified_base 53: mod_base = OTHER; note = 2'-fluoroguanosine
  modified_base 54: mod_base = OTHER; note = 2'-fluorouridine phosphorothiorate
  modified_base 57: mod_base = OTHER; note = Guanosine phosphorothiorate
  modified_base 58: mod_base = OTHER; note = Adenosine phosphorothiorate
  modified_base 64: mod_base = OTHER; note = 2'-fluoroguanosine
  modified_base 67: mod_base = OTHER; note = 2'-Omethylguanosine
  modified_base 69: mod_base = OTHER; note = 2'-fluoroadenosine
  modified_base 70: mod_base = OTHER; note = 2'-fluoroguanosine
  modified_base 72: mod_base = OTHER; note = 2'-Omethylcytosine
  modified_base 73: mod_base = OTHER; note = 2'-fluoroguanosine
  modified_base 75: mod_base = OTHER; note = 2'-fluorocytosine
  modified_base 76: mod_base = OTHER; note = 2'-Omethyladenosine

SEQ ID NO: 3798 - RNA, 76 nt, synthetic construct; identical to SEQ ID NO: 625
  source 1..76: mol_type = other RNA
  modified_base 1: mod_base = OTHER; note = 2'-Omethylguanosine
  modified_base 2: mod_base = OTHER; note = 2'-Omethylguanosine
  modified_base 3: mod_base = OTHER; note = 2'-Omethylcytosine
  modified_base 4: mod_base = OTHER; note = 2'-Omethyluridine
  modified_base 5: mod_base = OTHER; note = 2'-Omethylcytosine
  modified_base 6: mod_base = OTHER; note = 2'-Omethylcytosine
  modified_base 7: mod_base = OTHER; note = Guanosine phosphorothiorate
  modified_base 10: mod_base = OTHER; note = 2'-Omethylguanosine
  modified_base 11: mod_base = OTHER; note = 2'-Omethylcytosine
  modified_base 12: mod_base = OTHER; note = 2'-Omethylguanosine
  modified_base 13: mod_base = OTHER; note = 2'-Omethylcytosine
  modified_base 16: mod_base = OTHER; note = Uridine phosphorothiorate
  modified_base 18: mod_base = OTHER; note = 2'-fluoroguanosine phosphorothiorate
  modified_base 20: mod_base = OTHER; note = 2'-Omethyluridine
  modified_base 21: mod_base = OTHER; note = 2'-fluoroadenosine phosphorothiorate
  modified_base 22: mod_base = OTHER; note = 2'-Omethylguanosine
  modified_base 23: mod_base = OTHER; note = 2'-Omethylcytosine
  modified_base 24: mod_base = OTHER; note = 2'-Omethylguanosine
  modified_base 25: mod_base = OTHER; note = 2'-Omethylcytosine
  modified_base 26: mod_base = OTHER; note = Adenosine phosphorothiorate
  modified_base 28: mod_base = OTHER; note = 2'-Omethyluridine
  modified_base 30: mod_base = OTHER; note = 2'-fluoroguanosine phosphorothiorate
  modified_base 33: mod_base = OTHER; note = 2'-fluorouridine
  modified_base 35: mod_base = OTHER; note = 2'-Omethylcytosine phosphorothiorate
  modified_base 37: mod_base = OTHER; note = Adenosine phosphorothiorate
  modified_base 38: mod_base = OTHER; note = Adenosine phosphorothiorate
  modified_base 40: mod_base = OTHER; note = 2'-Omethyluridine
  modified_base 41: mod_base = OTHER; note = 2'-Omethylcytosine
  modified_base 42: mod_base = OTHER; note = Adenosine phosphorothiorate
  modified_base 43: mod_base = OTHER; note = 2'-Omethyladenosine
  modified_base 44: mod_base = OTHER; note = 2'-Omethyladenosine
  modified_base 50: mod_base = OTHER; note = 2'-Omethylcytosine
  modified_base 51: mod_base = OTHER; note = 2'-Omethylguanosine
  modified_base 52: mod_base = OTHER; note = 2'-Omethylguanosine
  modified_base 53: mod_base = OTHER; note = 2'-Omethylguanosine phosphorothiorate
  modified_base 54: mod_base = OTHER; note = Uridine phosphorothiorate
  modified_base 55: mod_base = OTHER; note = Uridine phosphorothiorate
  modified_base 56: mod_base = OTHER; note = 2'-Omethylcytosine
  modified_base 57: mod_base = OTHER; note = 2'-Omethylguanosine phosphorothiorate
  modified_base 59: mod_base = OTHER; note = 2'-Omethylguanosine
  modified_base 61: mod_base = OTHER; note = 2'-Omethylcytosine phosphorothiorate
  modified_base 62: mod_base = OTHER; note = 2'-Omethylcytosine
  modified_base 63: mod_base = OTHER; note = 2'-fluorocytosine
  modified_base 64: mod_base = OTHER; note = 2'-Omethylguanosine
  modified_base 65: mod_base = OTHER; note = 2'-Omethylguanosine
  modified_base 66: mod_base = OTHER; note = 2'-Omethylcytosine
  modified_base 67: mod_base = OTHER; note = 2'-Omethylguanosine phosphorothiorate
  modified_base 68: mod_base = OTHER; note = 2'-Omethylguanosine
  modified_base 69: mod_base = OTHER; note = 2'-fluoroadenosine
  modified_base 70: mod_base = OTHER; note = 2'-Omethylguanosine
  modified_base 71: mod_base = OTHER; note = 2'-fluorouridine
  modified_base 72: mod_base = OTHER; note = Cytosine phosphorothiorate
  modified_base 73: mod_base = OTHER; note = 2'-Omethylguanosine phosphorothiorate
  modified_base 74: mod_base = OTHER; note = 2'-fluorocytosine phosphorothiorate
  modified_base 75: mod_base = OTHER; note = 2'-fluorocytosine phosphorothiorate
  modified_base 76: mod_base = OTHER; note = 2'-fluoroadenosine

SEQ ID NO: 3799 - RNA, 74 nt, synthetic construct; identical to SEQ ID NO: 3293
  source 1..74: mol_type = other RNA
  modified_base 1: mod_base = OTHER; note = 2'-fluoroadenosine
  modified_base 2: mod_base = OTHER; note = Cytosine phosphorothiorate
  modified_base 3: mod_base = OTHER; note = 2'-Omethylcytosine
  modified_base 4: mod_base = OTHER; note = Uridine phosphorothiorate
  modified_base 8: mod_base = OTHER; note = Guanosine phosphorothiorate
  modified_base 9: mod_base = OTHER; note = 2'-fluoroguanosine
  modified_base 11: mod_base = OTHER; note = Guanosine phosphorothiorate
  modified_base 14: mod_base = OTHER; note = 2'-fluoroadenosine
  modified_base 24: mod_base = OTHER; note = 2'-fluoroguanosine
  modified_base 27: mod_base = OTHER; note = 2'-Omethyluridine
  modified_base 28: mod_base = OTHER; note = Guanosine phosphorothiorate
  modified_base 40: mod_base = OTHER; note = Guanosine phosphorothiorate
  modified_base 43: mod_base = OTHER; note = 2'-fluoroguanosine
  modified_base 48: mod_base = OTHER; note = 2'-fluorocytosine
  modified_base 50: mod_base = OTHER; note = Uridine phosphorothiorate
  modified_base 51: mod_base = OTHER; note = 2'-fluoroguanosine
  modified_base 62: mod_base = OTHER; note = Guanosine phosphorothiorate
  modified_base 73: mod_base = OTHER; note = 2'-Omethylcytosine phosphorothiorate
  modified_base 74: mod_base = OTHER; note = 2'-Omethyladenosine

SEQ ID NO: 3800 - DNA, 76 bp, synthetic construct; identical to SEQ ID NO: 1924
  source 1..76: mol_type = other DNA
  modified_base 1: mod_base = OTHER; note = 2'-Omethylguanosine phosphorothiorate
  modified_base 2: mod_base = OTHER; note = 2'-Omethylguanosine phosphorothiorate
  modified_base 16: mod_base = OTHER; note = Uridine phosphorothiorate
  modified_base 28: mod_base = OTHER; note = Uridine phosphorothiorate
  modified_base 50: mod_base = OTHER; note = 2'-O-(2-Methoxyethyl) 5-methylcytosine
  modified_base 53: mod_base = OTHER; note = 2'-O-(2-Methoxyethyl) guanosine
  modified_base 74: mod_base = OTHER; note = Cytosine phosphorothiorate
  modified_base 75: mod_base = OTHER; note = 2'-Omethylcytosine phosphorothiorate
  modified_base 76: mod_base = OTHER; note = 2'-Omethyladenosine
  misc_feature 1..16: note = RNA
  misc_feature 17: note = DNA
  misc_feature 18..76: note = RNA

SEQ ID NO: 3801 - RNA, 76 nt, synthetic construct; identical to SEQ ID NO: 625
  source 1..76: mol_type = other RNA
  modified_base 1: mod_base = OTHER; note = 2'-Omethylguanosine phosphorothiorate
  modified_base 2: mod_base = OTHER; note = 2'-Omethylguanosine
  modified_base 12: mod_base = OTHER; note = 2'-Omethylguanosine
  modified_base 13: mod_base = OTHER; note = 2'-Omethylcytosine
  modified_base 33: mod_base = OTHER; note = 2'-fluorouridine
  modified_base 35: mod_base = OTHER; note = Cytosine phosphorothiorate
  modified_base 37: mod_base = OTHER; note = Adenosine phosphorothiorate
  modified_base 52: mod_base = OTHER; note = 2'-Omethylguanosine
  modified_base 62: mod_base = OTHER; note = 2'-Omethylcytosine
  modified_base 73: mod_base = OTHER; note = 2'-Omethylguanosine
  modified_base 75: mod_base = OTHER; note = 2'-fluorocytosine phosphorothiorate

SEQ ID NO: 3802 - DNA, 74 bp, synthetic construct; identical to SEQ ID NO: 3384
  source 1..74: mol_type = other DNA
  modified_base 1: mod_base = OTHER; note = 2'-Omethylguanosine phosphorothiorate
  modified_base 2: mod_base = OTHER; note = 2'-Omethylguanosine phosphorothiorate
  modified_base 45: mod_base = OTHER; note = 2'-fluoroguanosine
  modified_base 57: mod_base = OTHER; note = 2'-fluoroguanosine
  modified_base 68: mod_base = OTHER; note = 2'-fluoroguanosine
  modified_base 73: mod_base = OTHER; note = 2'-Omethylguanosine
  misc_feature 1..71: note = RNA
  misc_feature 72: note = DNA
  misc_feature 73..74: note = RNA

SEQ ID NO: 3803 - RNA, 75 nt, synthetic construct; identical to SEQ ID NO: 1045
  source 1..75: mol_type = other RNA
  modified_base 2: mod_base = OTHER; note = 2'-Omethylguanosine phosphorothiorate
  modified_base 18: mod_base = OTHER; note = 2'-fluoroguanosine
  modified_base 19: mod_base = OTHER; note = 2'-fluorouridine
  modified_base 28: mod_base = OTHER; note = 2'-fluorouridine
  modified_base 41: mod_base = OTHER; note = 2'-fluorocytosine
  modified_base 42: mod_base = OTHER; note = 2'-fluoroadenosine
  modified_base 60: mod_base = OTHER; note = 2'-fluorocytosine
  modified_base 66: mod_base = OTHER; note = 2'-fluoroguanosine
  modified_base 67: mod_base = OTHER; note = Guanosine phosphorothiorate
  modified_base 73: mod_base = OTHER; note = Cytosine phosphorothiorate

SEQ ID NO: 3804 - RNA, 85 nt, synthetic construct; identical to SEQ ID NO: 3310
  source 1..85: mol_type = other RNA
  modified_base 1: mod_base = OTHER; note = 2'-fluorocytosine phosphorothiorate
  modified_base 13: mod_base = OTHER; note = Adenosine phosphorothiorate
  modified_base 36: mod_base = OTHER; note = Guanosine phosphorothiorate
  modified_base 62: mod_base = OTHER; note = Guanosine phosphorothiorate
  modified_base 82: mod_base = OTHER; note = Adenosine phosphorothiorate

SEQ ID NO: 3805 - RNA, 76 nt, synthetic construct; identical to SEQ ID NO: 3318
  source 1..76: mol_type = other RNA
  modified_base 1: mod_base = OTHER; note = 2'-Omethylcytosine
  modified_base 13: mod_base = OTHER; note = 2'-Omethylcytosine
  modified_base 18: mod_base = OTHER; note = 2'-Omethylguanosine
  modified_base 19: mod_base = OTHER; note = 2'-Omethylguanosine
  modified_base 25: mod_base = OTHER; note = 2'-Omethylcytosine
  modified_base 33: mod_base = OTHER; note = Uridine phosphorothiorate
  modified_base 34: mod_base = OTHER; note = 2'-Omethylcytosine
  modified_base 35: mod_base = OTHER; note = Uridine phosphorothiorate
  modified_base 37: mod_base = OTHER; note = Guanosine phosphorothiorate
  modified_base 38: mod_base = OTHER; note = Adenosine phosphorothiorate
  modified_base 41: mod_base = OTHER; note = 2'-fluorocytosine
  modified_base 42: mod_base = OTHER; note = 2'-Omethyluridine
  modified_base 43: mod_base = OTHER; note = 2'-Omethyluridine
  modified_base 44: mod_base = OTHER; note = 2'-fluoroadenosine
  modified_base 49: mod_base = OTHER; note = 2'-Omethylguanosine
  modified_base 50: mod_base = OTHER; note = 2'-Omethylcytosine
  modified_base 52: mod_base = OTHER; note = 2'-Omethylguanosine
  modified_base 54: mod_base = OTHER; note = Uridine phosphorothiorate
  modified_base 55: mod_base = OTHER; note = Uridine phosphorothiorate
  modified_base 56: mod_base = OTHER; note = 2'-Omethylcytosine
  modified_base 57: mod_base = OTHER; note = Guanosine phosphorothiorate
  modified_base 58: mod_base = OTHER; note = Adenosine phosphorothiorate
  modified_base 59: mod_base = OTHER; note = 2'-Omethyladenosine
  modified_base 61: mod_base = OTHER; note = 2'-Omethylcytosine
  modified_base 65: mod_base = OTHER; note = 2'-Omethylcytosine
  modified_base 73: mod_base = OTHER; note = 2'-Omethyladenosine

SEQ ID NO: 3806 - RNA, 76 nt, synthetic construct; identical to SEQ ID NO: 625
  source 1..76: mol_type = other RNA
  modified_base 1: mod_base = OTHER; note = 2'-Omethylguanosine phosphorothiorate
  modified_base 2: mod_base = OTHER; note = 2'-Omethylguanosine
  modified_base 3: mod_base = OTHER; note = 2'-Omethylcytosine
  modified_base 4: mod_base = OTHER; note = 2'-Omethyluridine
  modified_base 5: mod_base = OTHER; note = 2'-Omethylcytosine
  modified_base 6: mod_base = OTHER; note = 2'-Omethylcytosine
  modified_base 10: mod_base = OTHER; note = 2'-Omethylguanosine
  modified_base 11: mod_base = OTHER; note = 2'-Omethylcytosine
  modified_base 12: mod_base = OTHER; note = 2'-Omethylguanosine
  modified_base 13: mod_base = OTHER; note = 2'-Omethylcytosine
  modified_base 17: mod_base = OTHER; note = 2'-Omethylguanosine
  modified_base 18: mod_base = OTHER; note = 2'-Omethylguanosine
  modified_base 22: mod_base = OTHER; note = 2'-Omethylguanosine
  modified_base 23: mod_base = OTHER; note = 2'-Omethylcytosine
  modified_base 24: mod_base = OTHER; note = 2'-Omethylguanosine
  modified_base 25: mod_base = OTHER; note = 2'-Omethylcytosine
  modified_base 33: mod_base = OTHER; note = 2'-fluorouridine
  modified_base 35: mod_base = OTHER; note = Cytosine phosphorothiorate
  modified_base 37: mod_base = OTHER; note = Adenosine phosphorothiorate
  modified_base 38: mod_base = OTHER; note = Adenosine phosphorothiorate
  modified_base 49: mod_base = OTHER; note = 2'-Omethylcytosine
  modified_base 50: mod_base = OTHER; note = 2'-Omethylcytosine
  modified_base 51: mod_base = OTHER; note = 2'-Omethylguanosine
  modified_base 52: mod_base = OTHER; note = 2'-fluoroguanosine
  modified_base 53: mod_base = OTHER; note = 2'-Omethylguanosine
  modified_base 54: mod_base = OTHER; note = 2'-Omethyluridine
  modified_base 56: mod_base = OTHER; note = 2'-Omethylcytosine
  modified_base 57: mod_base = OTHER; note = 2'-fluoroguanosine
  modified_base 59: mod_base = OTHER; note = 2'-Omethylguanosine
  modified_base 61: mod_base = OTHER; note = 2'-Omethylcytosine
  modified_base 62: mod_base = OTHER; note = 2'-Omethylcytosine
  modified_base 63: mod_base = OTHER; note = 2'-fluorocytosine
  modified_base 64: mod_base = OTHER; note = 2'-Omethylguanosine
  modified_base 65: mod_base = OTHER; note = 2'-Omethylguanosine
  modified_base 66: mod_base = OTHER; note = 2'-Omethylcytosine
  modified_base 67: mod_base = OTHER; note = 2'-Omethylguanosine
  modified_base 68: mod_base = OTHER; note = 2'-Omethylguanosine
  modified_base 69: mod_base = OTHER; note = 2'-Omethyladenosine
  modified_base 73: mod_base = OTHER; note = 2'-Omethylguanosine
  modified_base 75: mod_base = OTHER; note = 2'-fluorocytosine phosphorothiorate

SEQ ID NO: 3807 - RNA, 75 nt, synthetic construct; identical to SEQ ID NO: 1045
  source 1..75: mol_type = other RNA
  modified_base 1: mod_base = OTHER; note = 2'-Omethylguanosine
  modified_base 9: mod_base = OTHER; note = 2'-fluoroguanosine
  modified_base 10: mod_base = OTHER; note = 2'-Omethylguanosine
  modified_base 13: mod_base = OTHER; note = 2'-Omethyluridine
  modified_base 17: mod_base = OTHER; note = Guanosine phosphorothiorate
  modified_base 18: mod_base = OTHER; note = 2'-Omethylguanosine
  modified_base 19: mod_base = OTHER; note = Uridine phosphorothiorate
  modified_base 20: mod_base = OTHER; note = 2'-Omethyladenosine
  modified_base 25: mod_base = OTHER; note = 2'-Omethylcytosine
  modified_base 29: mod_base = OTHER; note = 2'-Omethylguanosine
  modified_base 33: mod_base = OTHER; note = 2'-fluorouridine
  modified_base 35: mod_base = OTHER; note = Uridine phosphorothiorate
  modified_base 37: mod_base = OTHER; note = Adenosine phosphorothiorate
  modified_base 38: mod_base = OTHER; note = Adenosine phosphorothiorate
  modified_base 41: mod_base = OTHER; note = 2'-fluorocytosine
  modified_base 43: mod_base = OTHER; note = 2'-Omethylguanosine
  modified_base 44: mod_base = OTHER; note = 2'-fluorocytosine
  modified_base 46: mod_base = OTHER; note = Adenosine phosphorothiorate
  modified_base 49: mod_base = OTHER; note = 2'-Omethylcytosine
  modified_base 51: mod_base = OTHER; note = 2'-Omethyladenosine
  modified_base 53: mod_base = OTHER; note = Uridine phosphorothiorate
  modified_base 54: mod_base = OTHER; note = Uridine phosphorothiorate
  modified_base 55: mod_base = OTHER; note = 2'-Omethylcytosine
  modified_base 56: mod_base = OTHER; note = Guanosine phosphorothiorate
  modified_base 61: mod_base = OTHER; note = 2'-Omethyluridine
  modified_base 62: mod_base = OTHER; note = 2'-fluorocytosine
  modified_base 64: mod_base = OTHER; note = 2'-Omethylguanosine
  modified_base 70: mod_base = OTHER; note = 2'-Omethylcytosine
  modified_base 72: mod_base = OTHER; note = 2'-Omethyluridine

SEQ ID NO: 3808 - RNA, 74 nt, synthetic construct; identical to SEQ ID NO: 766
  source 1..74: mol_type = other RNA
  modified_base 1: mod_base = OTHER; note = 2'-Omethylguanosine phosphorothiorate
  modified_base 2: mod_base = OTHER; note = 2'-Omethylguanosine
  modified_base 3: mod_base = OTHER; note = 2'-Omethylcytosine
  modified_base 4: mod_base = OTHER; note = 2'-Omethyluridine
  modified_base 5: mod_base = OTHER; note = 2'-Omethylcytosine
  modified_base 6: mod_base = OTHER; note = 2'-Omethylcytosine
  modified_base 49: mod_base = OTHER; note = 2'-Omethylcytosine
  modified_base 50: mod_base = OTHER; note = 2'-Omethylcytosine
  modified_base 51: mod_base = OTHER; note = 2'-Omethylguanosine
  modified_base 52: mod_base = OTHER; note = 2'-Omethylguanosine
  modified_base 53: mod_base = OTHER; note = 2'-Omethylguanosine
  modified_base 61: mod_base = OTHER; note = 2'-Omethylcytosine
  modified_base 62: mod_base = OTHER; note = 2'-Omethylcytosine
  modified_base 63: mod_base = OTHER; note = 2'-fluorocytosine
  modified_base 64: mod_base = OTHER; note = 2'-Omethylguanosine
  modified_base 65: mod_base = OTHER; note = 2'-Omethylguanosine
  modified_base 66: mod_base = OTHER; note = 2'-Omethylcytosine
  modified_base 67: mod_base = OTHER; note = 2'-Omethylguanosine
  modified_base 68: mod_base = OTHER; note = 2'-Omethylguanosine
  modified_base 69: mod_base = OTHER; note = 2'-Omethyladenosine
  modified_base 73: mod_base = OTHER; note = 2'-Omethylguanosine phosphorothiorate

SEQ ID NO: 3809 - RNA, 76 nt, synthetic construct; identical to SEQ ID NO: 3289
  source 1..76: mol_type = other RNA
  modified_base 22: mod_base = OTHER; note = 2'-Omethylguanosine
  modified_base 23: mod_base = OTHER; note = 2'-Omethyladenosine
  modified_base 24: mod_base = OTHER; note = 2'-Omethylguanosine
  modified_base 25: mod_base = OTHER; note = 2'-Omethylcytosine
  modified_base 49: mod_base = OTHER; note = 2'-Omethylcytosine
  modified_base 50: mod_base = OTHER; note = 2'-Omethyladenosine
  modified_base 51: mod_base = OTHER; note = 2'-Omethylguanosine
  modified_base 52: mod_base = OTHER; note = 2'-Omethylguanosine
  modified_base 53: mod_base = OTHER; note = 2'-Omethylguanosine
  modified_base 73: mod_base = OTHER; note = 2'-Omethylguanosine

SEQ ID NO: 3810 - RNA, 75 nt, synthetic construct; identical to SEQ ID NO: 1045
  source 1..75: mol_type = other RNA
  modified_base 1: mod_base = OTHER; note = Guanosine phosphorothiorate
  modified_base 3: mod_base = OTHER; note = Uridine phosphorothiorate
  modified_base 7: mod_base = OTHER; note = Adenosine phosphorothiorate
  modified_base 8: mod_base = OTHER; note = 2'-fluorouridine phosphorothiorate
  modified_base 16: mod_base = OTHER; note = 2'-fluorouridine
  modified_base 23: mod_base = OTHER; note = 2'-fluorocytosine
  modified_base 39: mod_base = OTHER; note = Uridine phosphorothiorate
  modified_base 40: mod_base = OTHER; note = 2'-fluorocytosine
  modified_base 62: mod_base = OTHER; note = Cytosine phosphorothiorate
  modified_base 65: mod_base = OTHER; note = 2'-fluorouridine
  modified_base 68: mod_base = OTHER; note = Adenosine phosphorothiorate
  modified_base 72: mod_base = OTHER; note = 2'-fluorouridine phosphorothiorate
  modified_base 73: mod_base = OTHER; note = Cytosine phosphorothiorate
  modified_base 74: mod_base = OTHER; note = 2'-fluorocytosine phosphorothiorate

SEQ ID NO: 3811 - RNA, 75 nt, synthetic construct; identical to SEQ ID NO: 3311
  source 1..75: mol_type = other RNA
  modified_base 2: mod_base = OTHER; note = 2'-Omethylguanosine phosphorothiorate
  modified_base 12: mod_base = OTHER; note = Guanosine phosphorothiorate
  modified_base 18: mod_base = OTHER; note = 2'-fluoroguanosine
  modified_base 20: mod_base = OTHER; note = 2'-fluoroadenosine
  modified_base 34: mod_base = OTHER; note = Cytosine phosphorothiorate
  modified_base 35: mod_base = OTHER; note = 2'-fluorouridine
  modified_base 40: mod_base = OTHER; note = 2'-fluorocytosine phosphorothiorate
  modified_base 41: mod_base = OTHER; note = 2'-Omethylcytosine
  modified_base 47: mod_base = OTHER; note = 2'-fluorouridine
  modified_base 48: mod_base = OTHER; note = 2'-fluorocytosine
  modified_base 51: mod_base = OTHER; note = 2'-fluoroadenosine
  modified_base 54: mod_base = OTHER; note = 2'-fluorouridine phosphorothiorate
  modified_base 62: mod_base = OTHER; note = 2'-fluorocytosine
  modified_base 65: mod_base = OTHER; note = 2'-Omethyluridine phosphorothiorate
  modified_base 66: mod_base = OTHER; note = 2'-fluoroguanosine
  modified_base 74: mod_base = OTHER; note = Cytosine phosphorothiorate

SEQ ID NO: 3812 - RNA, 75 nt, synthetic construct; identical to SEQ ID NO: 3306
  source 1..75: mol_type = other RNA
  modified_base 1: mod_base = OTHER; note = Guanosine phosphorothiorate
  modified_base 2: mod_base = OTHER; note = Adenosine phosphorothiorate
  modified_base 3: mod_base = OTHER; note = Cytosine phosphorothiorate
  modified_base 49: mod_base = OTHER; note = Cytosine phosphorothiorate
  modified_base 50: mod_base = OTHER; note = Guanosine phosphorothiorate
  modified_base 62: mod_base = OTHER; note = Cytosine phosphorothiorate
  modified_base 63: mod_base = OTHER; note = Guanosine phosphorothiorate
  modified_base 64: mod_base = OTHER; note = Uridine phosphorothiorate
  modified_base 65: mod_base = OTHER; note = Cytosine phosphorothiorate
  modified_base 66: mod_base = OTHER; note = Guanosine phosphorothiorate
  modified_base 68: mod_base = OTHER; note = Guanosine phosphorothiorate
  modified_base 69: mod_base = OTHER; note = Guanosine phosphorothiorate
  modified_base 73: mod_base = OTHER; note = Cytosine phosphorothiorate
  modified_base 74: mod_base = OTHER; note = Cytosine phosphorothiorate

SEQ ID NO: 3813 - RNA, 76 nt, synthetic construct; identical to SEQ ID NO: 3295
  source 1..76: mol_type = other RNA
  modified_base 1: mod_base = OTHER; note = 2'-fluorocytosine phosphorothiorate
  modified_base 2: mod_base = OTHER; note = 2'-Omethylcytosine
  modified_base 3: mod_base = OTHER; note = 2'-Omethyluridine
  modified_base 6: mod_base = OTHER; note = 2'-fluoroguanosine
  modified_base 8: mod_base = OTHER; note = Uridine phosphorothiorate
  modified_base 9: mod_base = OTHER; note = 2'-Omethyladenosine phosphorothiorate
  modified_base 10: mod_base = OTHER; note = 2'-fluoroguanosine
  modified_base 17: mod_base = OTHER; note = 2'-Omethyluridine
  modified_base 26: mod_base = OTHER; note = 2'-fluoroguanosine
  modified_base 27: mod_base = OTHER; note = Guanosine phosphorothiorate
  modified_base 29: mod_base = OTHER; note = 2'-fluoroguanosine phosphorothiorate
  modified_base 37: mod_base = OTHER; note = 2'-Omethylguanosine
  modified_base 49: mod_base = OTHER; note = 2'-fluoroguanosine phosphorothiorate
  modified_base 52: mod_base = OTHER; note = 2'-fluoroguanosine phosphorothiorate
  modified_base 53: mod_base = OTHER; note = Guanosine phosphorothiorate
  modified_base 57: mod_base = OTHER; note = Guanosine phosphorothiorate
  modified_base 74: mod_base = OTHER; note = Cytosine phosphorothiorate
  modified_base 75: mod_base = OTHER; note = 2'-fluorocytosine phosphorothiorate

SEQ ID NO: 3814 - RNA, 76 nt, synthetic construct; identical to SEQ ID NO: 3342
  source 1..76: mol_type = other RNA
  modified_base 1: mod_base = OTHER; note = 2'-Omethylguanosine
  modified_base 14: mod_base = OTHER; note = 2'-Omethyladenosine
  modified_base 15: mod_base = OTHER; note = 2'-Omethyladenosine
  modified_base 16: mod_base = OTHER; note = 2'-Omethyluridine
  modified_base 17: mod_base = OTHER; note = 2'-Omethylguanosine
  modified_base 18: mod_base = OTHER; note = 2'-Omethylguanosine
  modified_base 19: mod_base = OTHER; note = Adenosine phosphorothiorate
  modified_base 20: mod_base = OTHER; note = 2'-Omethyluridine
  modified_base 21: mod_base = OTHER; note = Adenosine phosphorothiorate
  modified_base 33: mod_base = OTHER; note = 2'-fluorouridine
  modified_base 34: mod_base = OTHER; note = 2'-Omethyluridine
  modified_base 35: mod_base = OTHER; note = Cytosine phosphorothiorate
  modified_base 37: mod_base = OTHER; note = Adenosine phosphorothiorate
  modified_base 38: mod_base = OTHER; note = Adenosine phosphorothiorate
  modified_base 41: mod_base = OTHER; note = 2'-Omethylcytosine
  modified_base 42: mod_base = OTHER; note = 2'-Omethylguanosine
  modified_base 43: mod_base = OTHER; note = 2'-Omethyladenosine
  modified_base 44: mod_base = OTHER; note = 2'-Omethyladenosine
  modified_base 50: mod_base = OTHER; note = 2'-Omethylcytosine
  modified_base 52: mod_base = OTHER; note = 2'-Omethylguanosine
  modified_base 73: mod_base = OTHER; note = 2'-Omethylguanosine

SEQ ID NO: 3815 - RNA, 76 nt, synthetic construct; identical to SEQ ID NO: 625
  source 1..76: mol_type = other RNA
  modified_base 1: mod_base = OTHER; note = 2'-fluoroguanosine
  modified_base 13: mod_base = OTHER; note = Cytosine phosphorothiorate
  modified_base 14: mod_base = OTHER; note = 2'-fluoroadenosine
  modified_base 15: mod_base = OTHER; note = 2'-fluoroadenosine
  modified_base 16: mod_base = OTHER; note = Uridine phosphorothiorate
  modified_base 18: mod_base = OTHER; note = 2'-Omethylguanosine
  modified_base 21: mod_base = OTHER; note = Adenosine phosphorothiorate
  modified_base 22: mod_base = OTHER; note = 2'-fluoroguanosine
  modified_base 27: mod_base = OTHER; note = 2'-Omethyluridine phosphorothiorate
  modified_base 31: mod_base = OTHER; note = 2'-Omethyladenosine
  modified_base 32: mod_base = OTHER; note = 2'-fluorocytosine
  modified_base 34: mod_base = OTHER; note = 2'-Omethyluridine phosphorothiorate
  modified_base 36: mod_base = OTHER; note = Adenosine phosphorothiorate
  modified_base 38: mod_base = OTHER; note = 2'-Omethyladenosine
  modified_base 39: mod_base = OTHER; note = 2'-fluorouridine
  modified_base 41: mod_base = OTHER; note = 2'-Omethylcytosine phosphorothiorate
  modified_base 42: mod_base = OTHER; note = 2'-fluoroadenosine
  modified_base 45: mod_base = OTHER; note = 2'-fluoroguanosine
  modified_base 46: mod_base = OTHER; note = 2'-Omethylguanosine
  modified_base 49: mod_base = OTHER; note = 2'-fluorocytosine
  modified_base 52: mod_base = OTHER; note = 2'-fluoroguanosine phosphorothiorate
  modified_base 54: mod_base = OTHER; note = 2'-Omethyluridine
  modified_base 57: mod_base = OTHER; note = 2'-fluoroguanosine
  modified_base 58: mod_base = OTHER; note = Adenosine phosphorothiorate
  modified_base 59: mod_base = OTHER; note = 2'-fluoroguanosine
  modified_base 60: mod_base = OTHER; note = 2'-Omethyluridine
  modified_base 63: mod_base = OTHER; note = 2'-fluorocytosine phosphorothiorate
  modified_base 64: mod_base = OTHER; note = 2'-fluoroguanosine
  modified_base 65: mod_base = OTHER; note = 2'-fluoroguanosine
  modified_base 67: mod_base = OTHER; note = 2'-Omethylguanosine
  modified_base 70: mod_base = OTHER; note = Guanosine phosphorothiorate
  modified_base 71: mod_base = OTHER; note = Uridine phosphorothiorate

SEQ ID NO: 3816 - RNA, 76 nt, synthetic construct; identical to SEQ ID NO: 3318
  source 1..76: mol_type = other RNA
  modified_base 65: mod_base = OTHER; note = 2'-Omethylcytosine
  modified_base 73: mod_base = OTHER; note = 2'-Omethyladenosine

SEQ ID NO: 3817 - RNA, 76 nt, synthetic construct; identical to SEQ ID NO: 625
  source 1..76: mol_type = other RNA
  modified_base 1: mod_base = OTHER; note = 2'-Omethylguanosine phosphorothiorate
  modified_base 2: mod_base = OTHER; note = 2'-Omethylguanosine
  modified_base 33: mod_base = OTHER; note = 2'-fluorouridine
  modified_base 35: mod_base = OTHER; note = Cytosine phosphorothiorate
  modified_base 37: mod_base = OTHER; note = Adenosine phosphorothiorate
  modified_base 38: mod_base = OTHER; note = Adenosine phosphorothiorate
  modified_base 52: mod_base = OTHER; note = 2'-fluoroguanosine
  modified_base 56: mod_base = OTHER; note = 2'-Omethylcytosine
  modified_base 62: mod_base = OTHER; note = 2'-Omethylcytosine
  modified_base 63: mod_base = OTHER; note = 2'-fluorocytosine
  modified_base 73: mod_base = OTHER; note = 2'-Omethylguanosine
  modified_base 75: mod_base = OTHER; note = 2'-fluorocytosine phosphorothiorate

SEQ ID NO: 3818 - RNA, 76 nt, synthetic construct; identical to SEQ ID NO: 3342
  source 1..76: mol_type = other RNA
  modified_base 1: mod_base = OTHER; note = 2'-Omethylguanosine phosphorothiorate
  modified_base 2: mod_base = OTHER; note = 2'-Omethylguanosine phosphorothiorate
  modified_base 3: mod_base = OTHER; note = 2'-Omethylcytosine
  modified_base 4: mod_base = OTHER; note = 2'-Omethyluridine
  modified_base 5: mod_base = OTHER; note = 2'-Omethylcytosine
  modified_base 6: mod_base = OTHER; note = 2'-Omethylcytosine
  modified_base 16: mod_base = OTHER; note = 2'-Omethyluridine
  modified_base 17: mod_base = OTHER; note = 2'-Omethylguanosine
  modified_base 18: mod_base = OTHER; note = 2'-Omethylguanosine
  modified_base 20: mod_base = OTHER; note = 2'-Omethyluridine
  modified_base 25: mod_base = OTHER; note = 2'-Omethylcytosine
  modified_base 33: mod_base = OTHER; note = 2'-fluorouridine
  modified_base 35: mod_base = OTHER; note = Cytosine phosphorothiorate
  modified_base 37: mod_base = OTHER; note = Adenosine phosphorothiorate
  modified_base 38: mod_base = OTHER; note = Adenosine phosphorothiorate
  modified_base 41: mod_base = OTHER; note = 2'-Omethylcytosine
  modified_base 44: mod_base = OTHER; note = 2'-Omethyladenosine
  modified_base 45: mod_base = OTHER; note = 2'-Omethylguanosine
  modified_base 46: mod_base = OTHER; note = 2'-fluoroguanosine
  modified_base 47: mod_base = OTHER; note = 2'-fluorouridine
  modified_base 48: mod_base = OTHER; note = 2'-fluorouridine
  modified_base 49: mod_base = OTHER; note = 2'-Omethylcytosine
  modified_base 50: mod_base = OTHER; note = 2'-Omethylcytosine
  modified_base 51: mod_base = OTHER; note = 2'-Omethylguanosine
  modified_base 52: mod_base = OTHER; note = 2'-Omethylguanosine
  modified_base 53: mod_base = OTHER; note = 2'-Omethylguanosine
  modified_base 54: mod_base = OTHER; note = 2'-Omethyluridine
  modified_base 56: mod_base = OTHER; note = 2'-Omethylcytosine
  modified_base 59: mod_base = OTHER; note = 2'-Omethylguanosine
  modified_base 73: mod_base = OTHER; note = 2'-Omethylguanosine

SEQ ID NO: 3819 - RNA, 76 nt, synthetic construct; identical to SEQ ID NO: 625
  source 1..76: mol_type = other RNA
  modified_base 1: mod_base = OTHER; note = 2'-Omethylguanosine
  modified_base 10: mod_base = OTHER; note = 2'-Omethylguanosine
  modified_base 13: mod_base = OTHER; note = 2'-Omethylcytosine
  modified_base 17: mod_base = OTHER; note = Guanosine phosphorothiorate
  modified_base 18: mod_base = OTHER; note = 2'-Omethylguanosine
  modified_base 19: mod_base = OTHER; note = Adenosine phosphorothiorate
  modified_base 20: mod_base = OTHER; note = 2'-Omethyluridine
  modified_base 29: mod_base = OTHER; note = 2'-Omethylguanosine
  modified_base 33: mod_base = OTHER; note = 2'-fluorouridine
  modified_base 35: mod_base = OTHER; note = Cytosine phosphorothiorate
  modified_base 37: mod_base = OTHER; note = Adenosine phosphorothiorate
  modified_base 38: mod_base = OTHER; note = Adenosine phosphorothiorate
  modified_base 41: mod_base = OTHER; note = 2'-fluorocytosine phosphorothiorate
  modified_base 43: mod_base = OTHER; note = 2'-Omethyladenosine
  modified_base 44: mod_base = OTHER; note = 2'-fluoroadenosine
  modified_base 50: mod_base = OTHER; note = 2'-Omethylcytosine
  modified_base 52: mod_base = OTHER; note = 2'-Omethylguanosine
  modified_base 54: mod_base = OTHER; note = Uridine phosphorothiorate
  modified_base 55: mod_base = OTHER; note = Uridine phosphorothiorate
  modified_base 56: mod_base = OTHER; note = 2'-Omethylcytosine
  modified_base 57: mod_base = OTHER; note = Guanosine phosphorothiorate
  modified_base 62: mod_base = OTHER; note = 2'-Omethylcytosine
  modified_base 63: mod_base = OTHER; note = 2'-fluorocytosine
  modified_base 65: mod_base = OTHER; note = 2'-Omethylguanosine
  modified_base 71: mod_base = OTHER; note = 2'-Omethyluridine
  modified_base 73: mod_base = OTHER; note = 2'-Omethylguanosine

SEQ ID NO: 3820 - RNA, 76 nt, synthetic construct; identical to SEQ ID NO: 625
  source 1..76: mol_type = other RNA
  modified_base 1: mod_base = OTHER; note = 2'-Omethylguanosine
  modified_base 3: mod_base = OTHER; note = Cytosine phosphorothiorate
  modified_base 4: mod_base = OTHER; note = 2'-Omethyluridine
  modified_base 5: mod_base = OTHER; note = Cytosine phosphorothiorate
  modified_base 6: mod_base = OTHER; note = 2'-fluorocytosine
  modified_base 7: mod_base = OTHER; note = Guanosine phosphorothiorate
  modified_base 10: mod_base = OTHER; note = 2'-fluoroguanosine phosphorothiorate
  modified_base 12: mod_base = OTHER; note = Guanosine phosphorothiorate
  modified_base 13: mod_base = OTHER; note = 2'-Omethylcytosine phosphorothiorate
  modified_base 14: mod_base = OTHER; note = 2'-Omethyladenosine
  modified_base 15: mod_base = OTHER; note = 2'-Omethyladenosine
  modified_base 17: mod_base = OTHER; note = Guanosine phosphorothiorate
  modified_base 18: mod_base = OTHER; note = 2'-fluoroguanosine
  modified_base 20: mod_base = OTHER; note = 2'-Omethyluridine
  modified_base 21: mod_base = OTHER; note = Adenosine phosphorothiorate
  modified_base 22: mod_base = OTHER; note = 2'-Omethylguanosine
  modified_base 26: mod_base = OTHER; note = Adenosine phosphorothiorate
  modified_base 27: mod_base = OTHER; note = 2'-Omethyluridine
  modified_base 28: mod_base = OTHER; note = Uridine phosphorothiorate
  modified_base 31: mod_base = OTHER; note = 2'-fluoroadenosine
  modified_base 34: mod_base = OTHER; note = Uridine phosphorothiorate
  modified_base 36: mod_base = OTHER; note = Adenosine phosphorothiorate
  modified_base 42: mod_base = OTHER; note = 2'-Omethyladenosine phosphorothiorate
  modified_base 43: mod_base = OTHER; note = 2'-fluoroadenosine
  modified_base 44: mod_base = OTHER; note = 2'-Omethyladenosine
  modified_base 45: mod_base = OTHER; note = 2'-Omethylguanosine phosphorothiorate
  modified_base 47: mod_base = OTHER; note = 2'-Omethyluridine phosphorothiorate
  modified_base 52: mod_base = OTHER; note = 2'-Omethylguanosine
  modified_base 54: mod_base = OTHER; note = 2'-Omethyluridine
  modified_base 60: mod_base = OTHER; note = 2'-fluorouridine phosphorothiorate
  modified_base 67: mod_base = OTHER; note = 2'-fluoroguanosine
  modified_base 69: mod_base = OTHER; note = 2'-Omethyladenosine
  modified_base 71: mod_base = OTHER; note = 2'-fluorouridine phosphorothiorate
  modified_base 72: mod_base = OTHER; note = 2'-fluorocytosine
  modified_base 74: mod_base = OTHER; note = 2'-Omethylcytosine

SEQ ID NO: 3821 - RNA, 75 nt, synthetic construct; identical to SEQ ID NO: 3306
  source 1..75: mol_type = other RNA
  modified_base 1: mod_base = OTHER; note = 2'-Omethylguanosine phosphorothiorate
  modified_base 2: mod_base = OTHER; note = 2'-Omethyladenosine phosphorothiorate
  modified_base 37: mod_base = OTHER; note = Adenosine phosphorothiorate
  modified_base 38: mod_base = OTHER; note = Uridine phosphorothiorate
  modified_base 39: mod_base = OTHER; note = 2'-fluorocytosine
  modified_base 51: mod_base = OTHER; note = 2'-fluorouridine
  modified_base 73: mod_base = OTHER; note = Cytosine phosphorothiorate
  modified_base 74: mod_base = OTHER; note = 2'-Omethylcytosine phosphorothiorate
  modified_base 75: mod_base = OTHER; note = 2'-Omethyladenosine

SEQ ID NO: 3822 - RNA, 76 nt, synthetic construct; identical to SEQ ID NO: 3490
  source 1..76: mol_type = other RNA
  modified_base 1: mod_base = OTHER; note = 2'-Omethylguanosine
  modified_base 2: mod_base = OTHER; note = 2'-Omethylguanosine
  modified_base 3: mod_base = OTHER; note = 2'-Omethylcytosine
  modified_base 4: mod_base = OTHER; note = 2'-Omethyluridine
  modified_base 5: mod_base = OTHER; note = 2'-Omethylcytosine
  modified_base 6: mod_base = OTHER; note = 2'-Omethylcytosine
  modified_base 16: mod_base = OTHER; note = 2'-Omethyluridine
  modified_base 17: mod_base = OTHER; note = 2'-Omethylguanosine
  modified_base 18: mod_base = OTHER; note = 2'-Omethylguanosine
  modified_base 20: mod_base = OTHER; note = 2'-Omethyluridine
  modified_base 22: mod_base = OTHER; note = 2'-Omethylguanosine
  modified_base 23: mod_base = OTHER; note = 2'-Omethylcytosine
  modified_base 24: mod_base = OTHER; note = 2'-Omethylguanosine
  modified_base 25: mod_base = OTHER; note = 2'-Omethylcytosine
  modified_base 33: mod_base = OTHER; note = 2'-fluorouridine
  modified_base 35: mod_base = OTHER; note = Cytosine phosphorothiorate
  modified_base 37: mod_base = OTHER; note = Adenosine phosphorothiorate
  modified_base 38: mod_base = OTHER; note = Adenosine phosphorothiorate
  modified_base 41: mod_base = OTHER; note = 2'-Omethylcytosine
  modified_base 42: mod_base = OTHER; note = 2'-Omethyladenosine
  modified_base 43: mod_base = OTHER; note = 2'-Omethyladenosine
  modified_base 44: mod_base = OTHER; note = 2'-Omethyladenosine
  modified_base 45: mod_base = OTHER; note = 2'-Omethylguanosine
  modified_base 46: mod_base = OTHER; note = 2'-fluoroguanosine
  modified_base 48: mod_base = OTHER; note = 2'-fluorouridine
  modified_base 49: mod_base = OTHER; note = 2'-Omethylguanosine
  modified_base 50: mod_base = OTHER; note = 2'-Omethylcytosine
  modified_base 52: mod_base = OTHER; note = 2'-Omethylguanosine
  modified_base 54: mod_base = OTHER; note = 2'-Omethyluridine
  modified_base 55: mod_base = OTHER; note = Uridine phosphorothiorate
  modified_base 56: mod_base = OTHER; note = 2'-Omethylcytosine
  modified_base 57: mod_base = OTHER; note = 2'-fluoroguanosine
  modified_base 59: mod_base = OTHER; note = 2'-Omethylguanosine
  modified_base 61: mod_base = OTHER; note = 2'-Omethylcytosine
  modified_base 65: mod_base = OTHER; note = 2'-Omethylcytosine
  modified_base 73: mod_base = OTHER; note = 2'-Omethylguanosine

SEQ ID NO: 3823 - RNA, 75 nt, synthetic construct; identical to SEQ ID NO: 3299
  source 1..75: mol_type = other RNA
  modified_base 1: mod_base = OTHER; note = Cytosine phosphorothiorate
  modified_base 2: mod_base = OTHER; note = 2'-fluorocytosine
  modified_base 7: mod_base = OTHER; note = 2'-Omethyluridine phosphorothiorate
  modified_base 8: mod_base = OTHER; note = 2'-fluoroadenosine
  modified_base 15: mod_base = OTHER; note = 2'-Omethyluridine
  modified_base 17: mod_base = OTHER; note = 2'-fluoroguanosine
  modified_base 21: mod_base = OTHER; note = 2'-fluoroguanosine
  modified_base 28: mod_base = OTHER; note = 2'-fluoroadenosine
  modified_base 29: mod_base = OTHER; note = 2'-fluoroguanosine
  modified_base 34: mod_base = OTHER; note = 2'-Omethyluridine phosphorothiorate
  modified_base 38: mod_base = OTHER; note = Uridine phosphorothiorate
  modified_base 41: mod_base = OTHER; note = 2'-fluoroguanosine
  modified_base 47: mod_base = OTHER; note = 2'-fluorocytosine
  modified_base 48: mod_base = OTHER; note = 2'-fluorocytosine
  modified_base 49: mod_base = OTHER; note = Adenosine phosphorothiorate
  modified_base 54: mod_base = OTHER; note = 2'-fluorouridine phosphorothiorate
  modified_base 61: mod_base = OTHER; note = 2'-fluorocytosine
  modified_base 72: mod_base = OTHER; note = Guanosine phosphorothiorate
  modified_base 74: mod_base = OTHER; note = 2'-Omethylcytosine

SEQ ID NO: 3824 - RNA, 75 nt, synthetic construct; identical to SEQ ID NO: 1045
  source 1..75: mol_type = other RNA
  modified_base 1: mod_base = OTHER; note = 2'-Omethylguanosine
  modified_base 13: mod_base = OTHER; note = 2'-Omethyluridine
  modified_base 14: mod_base = OTHER; note = 2'-Omethyladenosine
  modified_base 15: mod_base = OTHER; note = 2'-Omethyladenosine
  modified_base 16: mod_base = OTHER; note = 2'-Omethyluridine
  modified_base 17: mod_base = OTHER; note = 2'-Omethylguanosine
  modified_base 18: mod_base = OTHER; note = 2'-Omethylguanosine
  modified_base 19: mod_base = OTHER; note = Uridine phosphorothiorate
  modified_base 20: mod_base = OTHER; note = 2'-Omethyladenosine
  modified_base 21: mod_base = OTHER; note = Adenosine phosphorothiorate
  modified_base 25: mod_base = OTHER; note = 2'-Omethylcytosine
  modified_base 41: mod_base = OTHER; note = 2'-fluorocytosine
  modified_base 42: mod_base = OTHER; note = 2'-Omethyladenosine
  modified_base 43: mod_base = OTHER; note = 2'-Omethylguanosine
  modified_base 44: mod_base = OTHER; note = 2'-fluorocytosine
  modified_base 48: mod_base = OTHER; note = 2'-Omethylcytosine
  modified_base 49: mod_base = OTHER; note = 2'-Omethylcytosine
  modified_base 50: mod_base = OTHER; note = 2'-Omethylguanosine
  modified_base 51: mod_base = OTHER; note = 2'-Omethyladenosine
  modified_base 52: mod_base = OTHER; note = 2'-Omethylguanosine
  modified_base 53: mod_base = OTHER; note = Uridine phosphorothiorate
  modified_base 54: mod_base = OTHER; note = Uridine phosphorothiorate
  modified_base 60: mod_base = OTHER; note = 2'-Omethylcytosine
  modified_base 64: mod_base = OTHER; note = 2'-Omethylguanosine
  modified_base 72: mod_base = OTHER; note = 2'-Omethyluridine

SEQ ID NO: 3825 - RNA, 85 nt, synthetic construct; identical to SEQ ID NO: 3288
  source 1..85: mol_type = other RNA

SEQ ID NO: 3826 - RNA, 76 nt, synthetic construct; identical to SEQ ID NO: 3289
  source 1..76: mol_type = other RNA
  modified_base 1: mod_base = OTHER; note = 2'-Omethylguanosine
  modified_base 49: mod_base = OTHER; note = 2'-Omethylcytosine

SEQ ID NO: 3827 - RNA, 76 nt, synthetic construct; identical to SEQ ID NO: 3318
  source 1..76: mol_type = other RNA
  modified_base 49: mod_base = OTHER; note = 2'-Omethylguanosine
  modified_base 73: mod_base = OTHER; note = 2'-Omethyladenosine

SEQ ID NO: 3828 - RNA, 76 nt, synthetic construct; identical to SEQ ID NO: 3675
  source 1..76: mol_type = other RNA
  modified_base 1: mod_base = OTHER; note = 2'-Omethylguanosine
  modified_base 2: mod_base = OTHER; note = 2'-Omethylcytosine
  modified_base 3: mod_base = OTHER; note = 2'-Omethylcytosine
  modified_base 4: mod_base = OTHER; note = 2'-Omethyluridine
  modified_base 5: mod_base = OTHER; note = 2'-Omethylcytosine
  modified_base 6: mod_base = OTHER; note = 2'-Omethylcytosine
  modified_base 14: mod_base = OTHER; note = 2'-Omethyladenosine
  modified_base 17: mod_base = OTHER; note = 2'-Omethylguanosine
  modified_base 18: mod_base = OTHER; note = 2'-Omethylguanosine
  modified_base 20: mod_base = OTHER; note = 2'-Omethyluridine
  modified_base 22: mod_base = OTHER; note = 2'-Omethylguanosine
  modified_base 25: mod_base = OTHER; note = 2'-Omethylcytosine
  modified_base 27: mod_base = OTHER; note = 2'-Omethylguanosine
  modified_base 33: mod_base = OTHER; note = 2'-fluorouridine
  modified_base 71: mod_base = OTHER; note = 2'-Omethylguanosine
  modified_base 73: mod_base = OTHER; note = 2'-Omethylguanosine

SEQ ID NO: 3829 - RNA, 76 nt, synthetic construct; identical to SEQ ID NO: 625
  source 1..76: mol_type = other RNA
  modified_base 1: mod_base = OTHER; note = 2'-Omethylguanosine
  modified_base 10: mod_base = OTHER; note = 2'-Omethylguanosine
  modified_base 13: mod_base = OTHER; note = 2'-Omethylcytosine
  modified_base 17: mod_base = OTHER; note = Guanosine phosphorothiorate
  modified_base 18: mod_base = OTHER; note = 2'-Omethylguanosine
  modified_base 19: mod_base = OTHER; note = Adenosine phosphorothiorate
  modified_base 20: mod_base = OTHER; note = 2'-Omethyluridine
  modified_base 25: mod_base = OTHER; note = 2'-Omethylcytosine
  modified_base 29: mod_base = OTHER; note = 2'-Omethylguanosine
  modified_base 33: mod_base = OTHER; note = 2'-fluorouridine
  modified_base 35: mod_base = OTHER; note = Cytosine phosphorothiorate
  modified_base 37: mod_base = OTHER; note = Adenosine phosphorothiorate
  modified_base 38: mod_base = OTHER; note = Adenosine phosphorothiorate
  modified_base 41: mod_base = OTHER; note = 2'-fluorocytosine
  modified_base 43: mod_base = OTHER; note = 2'-Omethyladenosine
  modified_base 44: mod_base = OTHER; note = 2'-fluoroadenosine
  modified_base 46: mod_base = OTHER; note = Guanosine phosphorothiorate
  modified_base 50: mod_base = OTHER; note = 2'-Omethylcytosine
  modified_base 52: mod_base = OTHER; note = 2'-Omethylguanosine
  modified_base 54: mod_base = OTHER; note = Uridine phosphorothiorate
  modified_base 55: mod_base = OTHER; note = Uridine phosphorothiorate
  modified_base 56: mod_base = OTHER; note = 2'-Omethylcytosine
  modified_base 57: mod_base = OTHER; note = Guanosine phosphorothiorate
  modified_base 62: mod_base = OTHER; note = 2'-Omethylcytosine
  modified_base 63: mod_base = OTHER; note = 2'-fluorocytosine
  modified_base 65: mod_base = OTHER; note = 2'-Omethylguanosine
  modified_base 73: mod_base = OTHER; note = 2'-Omethylguanosine

SEQ ID NO: 3830 - RNA, 76 nt, synthetic construct; identical to SEQ ID NO: 625
  source 1..76: mol_type = other RNA
  modified_base 1: mod_base = OTHER; note = 2'-Omethylguanosine
  modified_base 2: mod_base = OTHER; note = Guanosine phosphorothiorate
  modified_base 4: mod_base = OTHER; note = 2'-fluorouridine
  modified_base 6: mod_base = OTHER; note = Cytosine phosphorothiorate
  modified_base 7: mod_base = OTHER; note = Guanosine phosphorothiorate
  modified_base 8: mod_base = OTHER; note = Uridine phosphorothiorate
  modified_base 12: mod_base = OTHER; note = Guanosine phosphorothiorate
  modified_base 13: mod_base = OTHER; note = 2'-Omethylcytosine
  modified_base 14: mod_base = OTHER; note = 2'-fluoroadenosine
  modified_base 18: mod_base = OTHER; note = 2'-Omethylguanosine
  modified_base 20: mod_base = OTHER; note = 2'-fluorouridine
  modified_base 21: mod_base = OTHER; note = Adenosine phosphorothiorate
  modified_base 23: mod_base = OTHER; note = Cytosine phosphorothiorate
  modified_base 24: mod_base = OTHER; note = 2'-fluoroguanosine
  modified_base 28: mod_base = OTHER; note = 2'-fluorouridine
  modified_base 31: mod_base = OTHER; note = 2'-Omethyladenosine
  modified_base 34: mod_base = OTHER; note = 2'-Omethyluridine
  modified_base 45: mod_base = OTHER; note = 2'-fluoroguanosine
  modified_base 47: mod_base = OTHER; note = 2'-fluorouridine
  modified_base 49: mod_base = OTHER; note = 2'-fluorocytosine
  modified_base 50: mod_base = OTHER; note = 2'-Omethylcytosine
  modified_base 53: mod_base = OTHER; note = Guanosine phosphorothiorate
  modified_base 54: mod_base = OTHER; note = 2'-fluorouridine
  modified_base 55: mod_base = OTHER; note = Uridine phosphorothiorate
  modified_base 56: mod_base = OTHER; note = 2'-Omethylcytosine
  modified_base 61: mod_base = OTHER; note = 2'-fluorocytosine
  modified_base 63: mod_base = OTHER; note = 2'-fluorocytosine
  modified_base 64: mod_base = OTHER; note = 2'-fluoroguanosine phosphorothiorate
  modified_base 66: mod_base = OTHER; note = Cytosine phosphorothiorate
  modified_base 68: mod_base = OTHER; note = 2'-Omethylguanosine
  modified_base 70: mod_base = OTHER; note = 2'-Omethylguanosine
  modified_base 71: mod_base = OTHER; note = 2'-Omethyluridine
  modified_base 72: mod_base = OTHER; note = 2'-Omethylcytosine phosphorothiorate
  modified_base 73: mod_base = OTHER; note = 2'-fluoroguanosine
  modified_base 74: mod_base = OTHER; note = 2'-Omethylcytosine

SEQ ID NO: 3831 - RNA, 75 nt, synthetic construct; identical to SEQ ID NO: 1045
  source 1..75: mol_type = other RNA
  modified_base 18: mod_base = OTHER; note = 2'-Omethylguanosine
  modified_base 39: mod_base = OTHER; note = 2'-Omethyluridine

SEQ ID NO: 3832 - RNA, 76 nt, synthetic construct
  source 1..76: mol_type = other RNA
agggccgtggcgcaatggatagcgcattggacttcaaattcaaaggttccgggttcgagtcccggcggccctgcca

SEQ ID NO: 3833 - RNA, 86 nt, synthetic construct
  source 1..86: mol_type = other RNA
accaggatggccgagtggttaaggcgttggacttcagatccaatggacgtctgtccgcgtgggttcgaaccccactcctggtacca

SEQ ID NO: 3834 - RNA, 74 nt, synthetic construct; identical to SEQ ID NO: 766
  source 1..74: mol_type = other RNA
  modified_base 1: mod_base = OTHER; note = 2'-Omethylguanosine phosphorothiorate
  modified_base 2: mod_base = OTHER; note = 2'-Omethylguanosine
  modified_base 3: mod_base = OTHER; note = 2'-Omethylcytosine
  modified_base 4: mod_base = OTHER; note = 2'-Omethyluridine
  modified_base 5: mod_base = OTHER; note = 2'-Omethylcytosine
  modified_base 6: mod_base = OTHER; note = 2'-Omethylcytosine
  modified_base 16: mod_base = OTHER; note = 2'-Omethyluridine
  modified_base 17: mod_base = OTHER; note = 2'-Omethylguanosine
  modified_base 18: mod_base = OTHER; note = 2'-Omethylguanosine
  modified_base 20: mod_base = OTHER; note = 2'-Omethyluridine
  modified_base 22: mod_base = OTHER; note = 2'-Omethylguanosine
  modified_base 23: mod_base = OTHER; note = 2'-Omethylcytosine
  modified_base 24: mod_base = OTHER; note = 2'-Omethylguanosine
  modified_base 25: mod_base = OTHER; note = 2'-Omethylcytosine
  modified_base 33: mod_base = OTHER; note = 2'-fluorouridine
  modified_base 35: mod_base = OTHER; note = Cytosine phosphorothiorate
  modified_base 37: mod_base = OTHER; note = Adenosine phosphorothiorate
  modified_base 38: mod_base = OTHER; note = Adenosine phosphorothiorate
  modified_base 41: mod_base = OTHER; note = 2'-Omethylcytosine
  modified_base 42: mod_base = OTHER; note = 2'-Omethyladenosine
  modified_base 43: mod_base = OTHER; note = 2'-Omethyladenosine
  modified_base 44: mod_base = OTHER; note = 2'-Omethyladenosine
  modified_base 49: mod_base = OTHER; note = 2'-Omethylcytosine
  modified_base 50: mod_base = OTHER; note = 2'-Omethylcytosine
  modified_base 52: mod_base = OTHER; note = 2'-Omethylguanosine
  modified_base 54: mod_base = OTHER; note = 2'-Omethyluridine
  modified_base 55: mod_base = OTHER; note = Uridine phosphorothiorate
  modified_base 56: mod_base = OTHER; note = 2'-Omethylcytosine
  modified_base 57: mod_base = OTHER; note = 2'-fluoroguanosine
  modified_base 59: mod_base = OTHER; note = 2'-Omethylguanosine
  modified_base 61: mod_base = OTHER; note = 2'-Omethylcytosine
  modified_base 62: mod_base = OTHER; note = 2'-Omethylcytosine
  modified_base 63: mod_base = OTHER; note = 2'-fluorocytosine
  modified_base 64: mod_base = OTHER; note = 2'-Omethylguanosine
  modified_base 65: mod_base = OTHER; note = 2'-Omethylguanosine
  modified_base 73: mod_base = OTHER; note = 2'-Omethylguanosine

SEQ ID NO: 3835 - RNA, 76 nt, synthetic construct; identical to SEQ ID NO: 625
  source 1..76: mol_type = other RNA
  modified_base 1: mod_base = OTHER; note = Guanosine phosphorothiorate
  modified_base 3: mod_base = OTHER; note = 2'-Omethylcytosine
  modified_base 5: mod_base = OTHER; note = 2'-fluorocytosine
  modified_base 8: mod_base = OTHER; note = Uridine phosphorothiorate
  modified_base 10: mod_base = OTHER; note = 2'-fluoroguanosine
  modified_base 11: mod_base = OTHER; note = Cytosine phosphorothiorate
  modified_base 12: mod_base = OTHER; note = 2'-fluoroguanosine phosphorothiorate
  modified_base 13: mod_base = OTHER; note = Cytosine phosphorothiorate
  modified_base 14: mod_base = OTHER; note = 2'-fluoroadenosine
  modified_base 15: mod_base = OTHER; note = Adenosine phosphorothiorate
  modified_base 16: mod_base = OTHER; note = 2'-Omethyluridine
  modified_base 18: mod_base = OTHER; note = 2'-fluoroguanosine
  modified_base 20: mod_base = OTHER; note = 2'-Omethyluridine
  modified_base 21: mod_base = OTHER; note = Adenosine phosphorothiorate
  modified_base 22: mod_base = OTHER; note = 2'-fluoroguanosine
  modified_base 25: mod_base = OTHER; note = 2'-fluorocytosine phosphorothiorate
  modified_base 26: mod_base = OTHER; note = 2'-Omethyladenosine
  modified_base 27: mod_base = OTHER; note = 2'-fluorouridine
  modified_base 28: mod_base = OTHER; note = Uridine phosphorothiorate
  modified_base 31: mod_base = OTHER; note = 2'-fluoroadenosine
  modified_base 38: mod_base = OTHER; note = Adenosine phosphorothiorate
  modified_base 39: mod_base = OTHER; note = 2'-Omethyluridine
  modified_base 42: mod_base = OTHER; note = 2'-fluoroadenosine
  modified_base 43: mod_base = OTHER; note = 2'-fluoroadenosine
  modified_base 48: mod_base = OTHER; note = 2'-Omethyluridine
  modified_base 53: mod_base = OTHER; note = 2'-Omethylguanosine
  modified_base 54: mod_base = OTHER; note = 2'-fluorouridine
  modified_base 56: mod_base = OTHER; note = Cytosine phosphorothiorate
  modified_base 57: mod_base = OTHER; note = 2'-fluoroguanosine
  modified_base 60: mod_base = OTHER; note = 2'-Omethyluridine
  modified_base 62: mod_base = OTHER; note = 2'-Omethylcytosine
  modified_base 63: mod_base = OTHER; note = 2'-Omethylcytosine
  modified_base 64: mod_base = OTHER; note = 2'-fluoroguanosine
  modified_base 67: mod_base = OTHER; note = 2'-Omethylguanosine
  modified_base 70: mod_base = OTHER; note = 2'-fluoroguanosine
  modified_base 74: mod_base = OTHER; note = 2'-fluorocytosine

SEQ ID NO: 3836 - RNA, 75 nt, synthetic construct; identical to SEQ ID NO: 3306
  source 1..75: mol_type = other RNA
  modified_base 1: mod_base = OTHER; note = 2'-Omethylguanosine
  modified_base 10: mod_base = OTHER; note = 2'-Omethylguanosine
  modified_base 11: mod_base = OTHER; note = 2'-Omethylcytosine
  modified_base 12: mod_base = OTHER; note = 2'-Omethylguanosine
  modified_base 13: mod_base = OTHER; note = 2'-Omethylcytosine
  modified_base 14: mod_base = OTHER; note = 2'-Omethyladenosine
  modified_base 15: mod_base = OTHER; note = 2'-Omethyladenosine
  modified_base 16: mod_base = OTHER; note = 2'-Omethylcytosine
  modified_base 17: mod_base = OTHER; note = 2'-Omethylguanosine
  modified_base 18: mod_base = OTHER; note = 2'-Omethylguanosine
  modified_base 19: mod_base = OTHER; note = Uridine phosphorothiorate
  modified_base 20: mod_base = OTHER; note = Adenosine phosphorothiorate
  modified_base 21: mod_base = OTHER; note = 2'-Omethylguanosine
  modified_base 22: mod_base = OTHER; note = 2'-Omethylcytosine
  modified_base 23: mod_base = OTHER; note = 2'-Omethylguanosine
  modified_base 24: mod_base = OTHER; note = 2'-Omethylcytosine
  modified_base 32: mod_base = OTHER; note = 2'-fluorouridine
  modified_base 33: mod_base = OTHER; note = 2'-Omethylcytosine
  modified_base 34: mod_base = OTHER; note = Uridine phosphorothiorate
  modified_base 36: mod_base = OTHER; note = Guanosine phosphorothiorate
  modified_base 37: mod_base = OTHER; note = Adenosine phosphorothiorate
  modified_base 40: mod_base = OTHER; note = 2'-Omethyladenosine
  modified_base 41: mod_base = OTHER; note = 2'-Omethylguanosine
  modified_base 42: mod_base = OTHER; note = 2'-Omethyladenosine
  modified_base 43: mod_base = OTHER; note = 2'-Omethyladenosine
  modified_base 48: mod_base = OTHER; note = 2'-Omethylguanosine
  modified_base 49: mod_base = OTHER; note = 2'-Omethylcytosine
  modified_base 51: mod_base = OTHER; note = 2'-Omethyluridine
  modified_base 53: mod_base = OTHER; note = Uridine phosphorothiorate
  modified_base 54: mod_base = OTHER; note = Uridine phosphorothiorate
  modified_base 60: mod_base = OTHER; note = 2'-Omethylcytosine
  modified_base 64: mod_base = OTHER; note = 2'-Omethyluridine
  modified_base 72: mod_base = OTHER; note = 2'-Omethyladenosine

SEQ ID NO: 3837 - RNA, 76 nt, synthetic construct; identical to SEQ ID NO: 625
  source 1..76: mol_type = other RNA
  modified_base 4: mod_base = OTHER; note = Uridine phosphorothiorate
  modified_base 5: mod_base = OTHER; note = 2'-fluorocytosine
  modified_base 9: mod_base = OTHER; note = Guanosine phosphorothiorate
  modified_base 10: mod_base = OTHER; note = 2'-fluoroguanosine
  modified_base 11: mod_base = OTHER; note = 2'-fluorocytosine
  modified_base 12: mod_base = OTHER; note = 2'-Omethylguanosine
  modified_base 15: mod_base = OTHER; note = 2'-Omethyladenosine
  modified_base 16: mod_base = OTHER; note = 2'-Omethyluridine
  modified_base 18: mod_base = OTHER; note = Guanosine phosphorothiorate
  modified_base 22: mod_base = OTHER; note = Guanosine phosphorothiorate
  modified_base 23: mod_base = OTHER; note = 2'-Omethylcytosine
  modified_base 28: mod_base = OTHER; note = Uridine phosphorothiorate
  modified_base 29: mod_base = OTHER; note = 2'-fluoroguanosine phosphorothiorate
  modified_base 30: mod_base = OTHER; note = 2'-fluoroguanosine
  modified_base 32: mod_base = OTHER; note = 2'-fluorocytosine
  modified_base 36: mod_base = OTHER; note = Adenosine phosphorothiorate
  modified_base 40: mod_base = OTHER; note = 2'-fluorouridine
  modified_base 42: mod_base = OTHER; note = 2'-Omethyladenosine
  modified_base 43: mod_base = OTHER; note = 2'-Omethyladenosine
  modified_base 46: mod_base = OTHER; note = 2'-Omethylguanosine
  modified_base 47: mod_base = OTHER; note = Uridine phosphorothiorate
  modified_base 49: mod_base = OTHER; note = Cytosine phosphorothiorate
  modified_base 50: mod_base = OTHER; note = 2'-fluorocytosine
  modified_base 53: mod_base = OTHER; note = 2'-Omethylguanosine
  modified_base 56: mod_base = OTHER; note = Cytosine phosphorothiorate
  modified_base 57: mod_base = OTHER; note = 2'-fluoroguanosine
  modified_base 58: mod_base = OTHER; note = Adenosine phosphorothiorate
  modified_base 60: mod_base = OTHER; note = 2'-fluorouridine
  modified_base 61: mod_base = OTHER; note = 2'-fluorocytosine phosphorothiorate
  modified_base 62: mod_base = OTHER; note = 2'-fluorocytosine
  modified_base 67: mod_base = OTHER; note = 2'-Omethylguanosine
  modified_base 68: mod_base = OTHER; note = 2'-Omethylguanosine
  modified_base 69: mod_base = OTHER; note = 2'-Omethyladenosine
  modified_base 70: mod_base = OTHER; note = 2'-Omethylguanosine
  modified_base 71: mod_base = OTHER; note = 2'-Omethyluridine
  modified_base 73: mod_base = OTHER; note = 2'-Omethylguanosine phosphorothiorate
  modified_base 74: mod_base = OTHER; note = 2'-Omethylcytosine

SEQ ID NO: 3838 - RNA, 76 nt, synthetic construct; identical to SEQ ID NO: 625
  source 1..76: mol_type = other RNA
  modified_base 1: mod_base = OTHER; note = 2'-Omethylguanosine phosphorothiorate
  modified_base 2: mod_base = OTHER; note = 2'-Omethylguanosine
  modified_base 3: mod_base = OTHER; note = 2'-Omethylcytosine
  modified_base 4: mod_base = OTHER; note = 2'-Omethyluridine
  modified_base 5: mod_base = OTHER; note = 2'-Omethylcytosine
  modified_base 6: mod_base = OTHER; note = 2'-Omethylcytosine
  modified_base 16: mod_base = OTHER; note = 2'-Omethyluridine
  modified_base 17: mod_base = OTHER; note = 2'-Omethylguanosine
  modified_base 18: mod_base = OTHER; note = 2'-Omethylguanosine
  modified_base 20: mod_base = OTHER; note = 2'-Omethyluridine
  modified_base 25: mod_base = OTHER; note = 2'-Omethylcytosine
  modified_base 33: mod_base = OTHER; note = 2'-fluorouridine
  modified_base 35: mod_base = OTHER; note = Cytosine phosphorothiorate
  modified_base 37: mod_base = OTHER; note = Adenosine phosphorothiorate
  modified_base 38: mod_base = OTHER; note = Adenosine phosphorothiorate
  modified_base 41: mod_base = OTHER; note = 2'-Omethylcytosine
  modified_base 42: mod_base = OTHER; note = 2'-Omethyladenosine
  modified_base 43: mod_base = OTHER; note = 2'-Omethyladenosine
  modified_base 44: mod_base = OTHER; note = 2'-Omethyladenosine
  modified_base 49: mod_base = OTHER; note = 2'-Omethylcytosine
  modified_base 50: mod_base = OTHER; note = 2'-Omethylcytosine
  modified_base 52: mod_base = OTHER; note = 2'-Omethylguanosine
  modified_base 54: mod_base = OTHER; note = Uridine phosphorothiorate
  modified_base 55: mod_base = OTHER; note = Uridine phosphorothiorate
  modified_base 61: mod_base = OTHER; note = 2'-Omethylcytosine
  modified_base 65: mod_base = OTHER; note = 2'-Omethylguanosine
  modified_base 73: mod_base = OTHER; note = 2'-Omethylguanosine

SEQ ID NO: 3839 - RNA, 76 nt, synthetic construct; identical to SEQ ID NO: 625
  source 1..76: mol_type = other RNA
  modified_base 54: mod_base = OTHER; note = 2'-Omethyluridine phosphorothiorate
  modified_base 55: mod_base = OTHER; note = Uridine phosphorothiorate
  modified_base 56: mod_base = OTHER; note = 2'-Omethylcytosine
  modified_base 57: mod_base = OTHER; note = 2'-fluoroguanosine

SEQ ID NO: 3840 - RNA, 85 nt, synthetic construct; identical to SEQ ID NO: 3301
  source 1..85: mol_type = other RNA
  modified_base 1: mod_base = OTHER; note = 2'-Omethylguanosine phosphorothiorate
  modified_base 2: mod_base = OTHER; note = Cytosine phosphorothiorate
  modified_base 3: mod_base = OTHER; note = 2'-Omethyluridine phosphorothiorate
  modified_base 12: mod_base = OTHER; note = 2'-Omethylcytosine
  modified_base 14: mod_base = OTHER; note = 2'-Omethyladenosine
  modified_base 20: mod_base = OTHER; note = 2'-Omethyluridine phosphorothiorate
  modified_base 28: mod_base = OTHER; note = Uridine phosphorothiorate
  modified_base 40: mod_base = OTHER; note = 2'-fluorocytosine phosphorothiorate
  modified_base 43: mod_base = OTHER; note = 2'-Omethyladenosine
  modified_base 44: mod_base = OTHER; note = 2'-fluorouridine
  modified_base 45: mod_base = OTHER; note = 2'-fluoroguanosine phosphorothiorate
  modified_base 48: mod_base = OTHER; note = 2'-fluoroguanosine
  modified_base 52: mod_base = OTHER; note = 2'-fluorocytosine
  modified_base 59: mod_base = OTHER; note = 2'-Omethylcytosine
  modified_base 60: mod_base = OTHER; note = Adenosine phosphorothiorate
  modified_base 64: mod_base = OTHER; note = 2'-Omethyluridine
  modified_base 80: mod_base = OTHER; note = 2'-Omethylguanosine
  modified_base 82: mod_base = OTHER; note = 2'-fluoroguanosine
  modified_base 84: mod_base = OTHER; note = 2'-fluorocytosine

SEQ ID NO: 3841 - RNA, 76 nt, synthetic construct; identical to SEQ ID NO: 625
  source 1..76: mol_type = other RNA
  modified_base 2: mod_base = OTHER; note = 2'-Omethylguanosine
  modified_base 5: mod_base = OTHER; note = Cytosine phosphorothiorate
  modified_base 6: mod_base = OTHER; note = 2'-fluorocytosine
  modified_base 10: mod_base = OTHER; note = 2'-fluoroguanosine phosphorothiorate
  modified_base 12: mod_base = OTHER; note = 2'-fluoroguanosine
  modified_base 16: mod_base = OTHER; note = 2'-Omethyluridine
  modified_base 18: mod_base = OTHER; note = 2'-Omethylguanosine
  modified_base 20: mod_base = OTHER; note = 2'-Omethyluridine
  modified_base 21: mod_base = OTHER; note = Adenosine phosphorothiorate
  modified_base 22: mod_base = OTHER; note = 2'-fluoroguanosine
  modified_base 24: mod_base = OTHER; note = 2'-fluoroguanosine
  modified_base 25: mod_base = OTHER; note = 2'-fluorocytosine
  modified_base 27: mod_base = OTHER; note = 2'-Omethyluridine
  modified_base 28: mod_base = OTHER; note = 2'-Omethyluridine phosphorothiorate
  modified_base 29: mod_base = OTHER; note = Guanosine phosphorothiorate
  modified_base 30: mod_base = OTHER; note = Guanosine phosphorothiorate
  modified_base 31: mod_base = OTHER; note = 2'-fluoroadenosine
  modified_base 33: mod_base = OTHER; note = 2'-fluorouridine
  modified_base 39: mod_base = OTHER; note = 2'-fluorouridine
  modified_base 42: mod_base = OTHER; note = 2'-Omethyladenosine
  modified_base 44: mod_base = OTHER; note = 2'-Omethyladenosine
  modified_base 46: mod_base = OTHER; note = Guanosine phosphorothiorate
  modified_base 48: mod_base = OTHER; note = 2'-fluorouridine
  modified_base 51: mod_base = OTHER; note = Guanosine phosphorothiorate
  modified_base 52: mod_base = OTHER; note = 2'-Omethylguanosine
  modified_base 54: mod_base = OTHER; note = Uridine phosphorothiorate
  modified_base 56: mod_base = OTHER; note = Cytosine phosphorothiorate
  modified_base 57: mod_base = OTHER; note = 2'-Omethylguanosine
  modified_base 59: mod_base = OTHER; note = 2'-fluoroguanosine phosphorothiorate
  modified_base 63: mod_base = OTHER; note = 2'-fluorocytosine phosphorothiorate
  modified_base 65: mod_base = OTHER; note = 2'-Omethylguanosine phosphorothiorate
  modified_base 66: mod_base = OTHER; note = 2'-Omethylcytosine
  modified_base 67: mod_base = OTHER; note = 2'-fluoroguanosine
  modified_base 68: mod_base = OTHER; note = Guanosine phosphorothiorate
  modified_base 73: mod_base = OTHER; note = 2'-Omethylguanosine
  modified_base 74: mod_base = OTHER; note = 2'-Omethylcytosine
  modified_base 75: mod_base = OTHER; note = 2'-fluorocytosine
  modified_base 76: mod_base = OTHER; note = 2'-fluoroadenosine

SEQ ID NO: 3842 - RNA, 86 nt, synthetic construct; identical to SEQ ID NO: 3290
  source 1..86: mol_type = other RNA
  modified_base 1: mod_base = OTHER; note = 2'-Omethyladenosine
  modified_base 59: mod_base = OTHER; note = 2'-Omethylguanosine

SEQ ID NO: 3843 - RNA, 74 nt, synthetic construct; identical to SEQ ID NO: 3293
  source 1..74: mol_type = other RNA
  modified_base 1: mod_base = OTHER; note = 2'-fluoroadenosine phosphorothiorate
  modified_base 3: mod_base = OTHER; note = 2'-Omethylcytosine
  modified_base 4: mod_base = OTHER; note = Uridine phosphorothiorate
  modified_base 9: mod_base = OTHER; note = 2'-fluoroguanosine
  modified_base 35: mod_base = OTHER; note = 2'-fluoroguanosine phosphorothiorate
  modified_base 46: mod_base = OTHER; note = 2'-fluorouridine
  modified_base 51: mod_base = OTHER; note = 2'-fluoroguanosine
  modified_base 58: mod_base = OTHER; note = Uridine phosphorothiorate
  modified_base 73: mod_base = OTHER; note = 2'-Omethylcytosine phosphorothiorate

SEQ ID NO: 3844 - DNA, 76 bp, synthetic construct; identical to SEQ ID NO: 1924
  source 1..76: mol_type = other DNA
  modified_base 1: mod_base = OTHER; note = 2'-Omethylguanosine phosphorothiorate
  modified_base 2: mod_base = OTHER; note = 2'-Omethylguanosine phosphorothiorate
  modified_base 13: mod_base = OTHER; note = 2'-O-(2-Methoxyethyl) 5-methylcytosine
  modified_base 33: mod_base = OTHER; note = Uridine phosphorothiorate
  modified_base 34: mod_base = OTHER; note = 2'-fluorouridine
  modified_base 58: mod_base = OTHER; note = Adenosine phosphorothiorate
  modified_base 74: mod_base = OTHER; note = Cytosine phosphorothiorate
  modified_base 75: mod_base = OTHER; note = 2'-Omethylcytosine phosphorothiorate
  misc_feature 1..22: note = RNA
  misc_feature 23: note = DNA
  misc_feature 24..58: note = RNA
  misc_feature 59: note = DNA
  misc_feature 60..76: note = RNA

SEQ ID NO: 3845 - RNA, 85 nt, synthetic construct; identical to SEQ ID NO: 3317
  source 1..85: mol_type = other RNA
  modified_base 1: mod_base = OTHER; note = 2'-Omethylguanosine phosphorothiorate
  modified_base 3: mod_base = OTHER; note = 2'-Omethyluridine phosphorothiorate
  modified_base 4: mod_base = OTHER; note = Guanosine phosphorothiorate
  modified_base 12: mod_base = OTHER; note = Cytosine phosphorothiorate
  modified_base 14: mod_base = OTHER; note = 2'-fluoroadenosine phosphorothiorate
  modified_base 23: mod_base = OTHER; note = Guanosine phosphorothiorate
  modified_base 25: mod_base = OTHER; note = 2'-fluorocytosine
  modified_base 33: mod_base = OTHER; note = 2'-fluorouridine
  modified_base 44: mod_base = OTHER; note = 2'-fluorouridine
  modified_base 45: mod_base = OTHER; note = 2'-fluoroguanosine phosphorothiorate
  modified_base 50: mod_base = OTHER; note = 2'-Omethylcytosine
  modified_base 56: mod_base = OTHER; note = 2'-Omethylguanosine
  modified_base 60: mod_base = OTHER; note = Adenosine phosphorothiorate
  modified_base 62: mod_base = OTHER; note = 2'-Omethylguanosine
  modified_base 72: mod_base = OTHER; note = 2'-fluorouridine phosphorothiorate
  modified_base 74: mod_base = OTHER; note = 2'-fluorocytosine
  modified_base 78: mod_base = OTHER; note = 2'-fluorocytosine
  modified_base 83: mod_base = OTHER; note = Cytosine phosphorothiorate
  modified_base 84: mod_base = OTHER; note = 2'-Omethylcytosine

SEQ ID NO: 3846 - RNA, 85 nt, synthetic construct; identical to SEQ ID NO: 3286
  source 1..85: mol_type = other RNA
  modified_base 1: mod_base = OTHER; note = 2'-Omethylcytosine
  modified_base 17: mod_base = OTHER; note = 2'-Omethylguanosine
  modified_base 26: mod_base = OTHER; note = 2'-Omethyluridine
  modified_base 28: mod_base = OTHER; note = 2'-fluoroguanosine
  modified_base 32: mod_base = OTHER; note = 2'-fluorouridine
  modified_base 36: mod_base = OTHER; note = Guanosine phosphorothiorate
  modified_base 43: mod_base = OTHER; note = 2'-Omethyluridine
  modified_base 46: mod_base = OTHER; note = Adenosine phosphorothiorate
  modified_base 54: mod_base = OTHER; note = 2'-fluorocytosine
  modified_base 58: mod_base = OTHER; note = 2'-Omethylguanosine
  modified_base 61: mod_base = OTHER; note = Guanosine phosphorothiorate
  modified_base 73: mod_base = OTHER; note = Adenosine phosphorothiorate
  modified_base 84: mod_base = OTHER; note = 2'-Omethylcytosine

SEQ ID NO: 3847 - RNA, 76 nt, synthetic construct; identical to SEQ ID NO: 625
  source 1..76: mol_type = other RNA
  modified_base 1: mod_base = OTHER; note = 2'-Omethylguanosine
  modified_base 17: mod_base = OTHER; note = 2'-Omethylguanosine
  modified_base 18: mod_base = OTHER; note = 2'-Omethylguanosine
  modified_base 33: mod_base = OTHER; note = 2'-fluorouridine
  modified_base 50: mod_base = OTHER; note = 2'-Omethylcytosine
  modified_base 52: mod_base = OTHER; note = 2'-Omethylguanosine
  modified_base 73: mod_base = OTHER; note = 2'-Omethylguanosine

SEQ ID NO: 3848 - RNA, 85 nt, synthetic construct; identical to SEQ ID NO: 3288
  source 1..85: mol_type = other RNA
  modified_base 1: mod_base = OTHER; note = 2'-Omethylcytosine phosphorothiorate
  modified_base 2: mod_base = OTHER; note = 2'-Omethylcytosine
  modified_base 4: mod_base = OTHER; note = Guanosine phosphorothiorate
  modified_base 11: mod_base = OTHER; note = Cytosine phosphorothiorate
  modified_base 18: mod_base = OTHER; note = 2'-fluorouridine
  modified_base 26: mod_base = OTHER; note = Uridine phosphorothiorate
  modified_base 28: mod_base = OTHER; note = Guanosine phosphorothiorate
  modified_base 34: mod_base = OTHER; note = Cytosine phosphorothiorate
  modified_base 50: mod_base = OTHER; note = 2'-fluoroadenosine
  modified_base 52: mod_base = OTHER; note = 2'-fluoroguanosine phosphorothiorate
  modified_base 56: mod_base = OTHER; note = 2'-Omethylguanosine
  modified_base 58: mod_base = OTHER; note = 2'-Omethylguanosine
  modified_base 64: mod_base = OTHER; note = Uridine phosphorothiorate

SEQ ID NO: 3849 - RNA, 75 nt, synthetic construct; identical to SEQ ID NO: 1045
  source 1..75: mol_type = other RNA
  modified_base 1: mod_base = OTHER; note = 2'-Omethylguanosine
  modified_base 2: mod_base = OTHER; note = 2'-Omethylguanosine phosphorothiorate
  modified_base 20: mod_base = OTHER; note = Adenosine phosphorothiorate
  modified_base 21: mod_base = OTHER; note = 2'-fluoroadenosine
  modified_base 40: mod_base = OTHER; note = Cytosine phosphorothiorate
  modified_base 41: mod_base = OTHER; note = 2'-fluorocytosine
  modified_base 52: mod_base = OTHER; note = Guanosine phosphorothiorate
  modified_base 55: mod_base = OTHER; note = 2'-Omethylcytosine
  modified_base 63: mod_base = OTHER; note = Guanosine phosphorothiorate
  modified_base 73: mod_base = OTHER; note = Cytosine phosphorothiorate
  modified_base 74: mod_base = OTHER; note = 2'-Omethylcytosine

SEQ ID NO: 3850 - RNA, 76 nt, synthetic construct; identical to SEQ ID NO: 625
  source 1..76: mol_type = other RNA
  modified_base 1: mod_base = OTHER; note = 2'-Omethylguanosine phosphorothiorate
  modified_base 2: mod_base = OTHER; note = 2'-Omethylguanosine
  modified_base 17: mod_base = OTHER; note = 2'-Omethylguanosine
  modified_base 33: mod_base = OTHER; note = 2'-fluorouridine
  modified_base 35: mod_base = OTHER; note = Cytosine phosphorothiorate
  modified_base 37: mod_base = OTHER; note = Adenosine phosphorothiorate
  modified_base 38: mod_base = OTHER; note = Adenosine phosphorothiorate
  modified_base 52: mod_base = OTHER; note = 2'-Omethylguanosine
  modified_base 57: mod_base = OTHER; note = 2'-Omethylguanosine
  modified_base 62: mod_base = OTHER; note = 2'-Omethylcytosine
  modified_base 73: mod_base = OTHER; note = 2'-Omethylguanosine
  modified_base 75: mod_base = OTHER; note = 2'-fluorocytosine phosphorothiorate

SEQ ID NO: 3851 - RNA, 75 nt, synthetic construct; identical to SEQ ID NO: 1045
  source 1..75: mol_type = other RNA
  modified_base 5: mod_base = OTHER; note = 2'-fluorocytosine phosphorothiorate
  modified_base 7: mod_base = OTHER; note = 2'-fluoroadenosine phosphorothiorate
  modified_base 13: mod_base = OTHER; note = 2'-Omethyluridine
  modified_base 21: mod_base = OTHER; note = 2'-fluoroadenosine
  modified_base 30: mod_base = OTHER; note = 2'-Omethylguanosine
  modified_base 42: mod_base = OTHER; note = 2'-fluoroadenosine
  modified_base 49: mod_base = OTHER; note = 2'-fluorocytosine
  modified_base 53: mod_base = OTHER; note = 2'-Omethyluridine
  modified_base 62: mod_base = OTHER; note = 2'-fluorocytosine
  modified_base 68: mod_base = OTHER; note = Adenosine phosphorothiorate
  modified_base 69: mod_base = OTHER; note = 2'-fluoroadenosine
  modified_base 72: mod_base = OTHER; note = Uridine phosphorothiorate
  modified_base 75: mod_base = OTHER; note = 2'-fluoroadenosine

SEQ ID NO: 3852 - RNA, 76 nt, synthetic construct; identical to SEQ ID NO: 625
  source 1..76: mol_type = other RNA
  modified_base 3: mod_base = OTHER; note = 2'-fluorocytosine
  modified_base 6: mod_base = OTHER; note = 2'-Omethylcytosine
  modified_base 11: mod_base = OTHER; note = 2'-Omethylcytosine phosphorothiorate
  modified_base 12: mod_base = OTHER; note = 2'-fluoroguanosine phosphorothiorate
  modified_base 13: mod_base = OTHER; note = 2'-fluorocytosine
  modified_base 15: mod_base = OTHER; note = 2'-fluoroadenosine
  modified_base 17: mod_base = OTHER; note = 2'-Omethylguanosine
  modified_base 22: mod_base = OTHER; note = 2'-fluoroguanosine
  modified_base 23: mod_base = OTHER; note = Cytosine phosphorothiorate
  modified_base 24: mod_base = OTHER; note = 2'-Omethylguanosine
  modified_base 26: mod_base = OTHER; note = 2'-fluoroadenosine
  modified_base 28: mod_base = OTHER; note = 2'-fluorouridine
  modified_base 30: mod_base = OTHER; note = 2'-fluoroguanosine
  modified_base 33: mod_base = OTHER; note = 2'-fluorouridine
  modified_base 34: mod_base = OTHER; note = 2'-fluorouridine
  modified_base 39: mod_base = OTHER; note = 2'-Omethyluridine
  modified_base 41: mod_base = OTHER; note = Cytosine phosphorothiorate
  modified_base 42: mod_base = OTHER; note = 2'-fluoroadenosine
  modified_base 44: mod_base = OTHER; note = 2'-Omethyladenosine
  modified_base 45: mod_base = OTHER; note = 2'-Omethylguanosine
  modified_base 47: mod_base = OTHER; note = 2'-fluorouridine phosphorothiorate
  modified_base 49: mod_base = OTHER; note = 2'-fluorocytosine
  modified_base 51: mod_base = OTHER; note = 2'-Omethylguanosine
  modified_base 58: mod_base = OTHER; note = 2'-fluoroadenosine
  modified_base 61: mod_base = OTHER; note = Cytosine phosphorothiorate
  modified_base 65: mod_base = OTHER; note = 2'-Omethylguanosine
  modified_base 70: mod_base = OTHER; note = Guanosine phosphorothiorate
  modified_base 71: mod_base = OTHER; note = 2'-fluorouridine
  modified_base 72: mod_base = OTHER; note = 2'-Omethylcytosine
  modified_base 74: mod_base = OTHER; note = 2'-Omethylcytosine
  modified_base 75: mod_base = OTHER; note = Cytosine phosphorothiorate

SEQ ID NO: 3853 - RNA, 76 nt, synthetic construct; identical to SEQ ID NO: 3318
  source 1..76: mol_type = other RNA
  modified_base 1: mod_base = OTHER; note = 2'-Omethylcytosine
  modified_base 14: mod_base = OTHER; note = 2'-Omethyladenosine
  modified_base 15: mod_base = OTHER; note = 2'-Omethylguanosine
  modified_base 16: mod_base = OTHER; note = 2'-Omethyluridine
  modified_base 18: mod_base = OTHER; note = 2'-Omethylguanosine
  modified_base 19: mod_base = OTHER; note = 2'-Omethylguanosine
  modified_base 20: mod_base = OTHER; note = Uridine phosphorothiorate
  modified_base 21: mod_base = OTHER; note = Adenosine phosphorothiorate
  modified_base 33: mod_base = OTHER; note = Uridine phosphorothiorate
  modified_base 34: mod_base = OTHER; note = 2'-Omethylcytosine
  modified_base 35: mod_base = OTHER; note = Uridine phosphorothiorate
  modified_base 37: mod_base = OTHER; note = Guanosine phosphorothiorate
  modified_base 38: mod_base = OTHER; note = Adenosine phosphorothiorate
  modified_base 41: mod_base = OTHER; note = 2'-Omethylcytosine
  modified_base 42: mod_base = OTHER; note = 2'-Omethyluridine
  modified_base 43: mod_base = OTHER; note = 2'-Omethyluridine
  modified_base 44: mod_base = OTHER; note = 2'-Omethyladenosine
  modified_base 50: mod_base = OTHER; note = 2'-Omethylcytosine
  modified_base 52: mod_base = OTHER; note = 2'-Omethylguanosine
  modified_base 73: mod_base = OTHER; note = 2'-Omethyladenosine

SEQ ID NO: 3854 - RNA, 76 nt, synthetic construct; identical to SEQ ID NO: 625
  source 1..76: mol_type = other RNA
  modified_base 1: mod_base = OTHER; note = 2'-Omethylguanosine phosphorothiorate
  modified_base 2: mod_base = OTHER; note = 2'-Omethylguanosine
  modified_base 3: mod_base = OTHER; note = 2'-Omethylcytosine
  modified_base 4: mod_base = OTHER; note = 2'-Omethyluridine
  modified_base 5: mod_base = OTHER; note = 2'-Omethylcytosine
  modified_base 6: mod_base = OTHER; note = 2'-Omethylcytosine
  modified_base 14: mod_base = OTHER; note = 2'-Omethyladenosine
  modified_base 15: mod_base = OTHER; note = 2'-fluoroadenosine
  modified_base 16: mod_base = OTHER; note = 2'-Omethyluridine
  modified_base 17: mod_base = OTHER; note = 2'-Omethylguanosine
  modified_base 18: mod_base = OTHER; note = 2'-fluoroguanosine
  modified_base 19: mod_base = OTHER; note = 2'-fluoroadenosine
  modified_base 20: mod_base = OTHER; note = 2'-Omethyluridine
  modified_base 33: mod_base = OTHER; note = 2'-fluorouridine
  modified_base 35: mod_base = OTHER; note = Cytosine phosphorothiorate
  modified_base 37: mod_base = OTHER; note = Adenosine phosphorothiorate
  modified_base 38: mod_base = OTHER; note = Adenosine phosphorothiorate
  modified_base 49: mod_base = OTHER; note = 2'-Omethylcytosine
  modified_base 50: mod_base = OTHER; note = 2'-Omethylcytosine
  modified_base 51: mod_base = OTHER; note = 2'-Omethylguanosine
  modified_base 52: mod_base = OTHER; note = 2'-Omethylguanosine
  modified_base 53: mod_base = OTHER; note = 2'-Omethylguanosine
  modified_base 57: mod_base = OTHER; note = 2'-Omethylguanosine
  modified_base 61: mod_base = OTHER; note = 2'-Omethylcytosine
  modified_base 62: mod_base = OTHER; note = 2'-Omethylcytosine
  modified_base 63: mod_base = OTHER; note = 2'-fluorocytosine
  modified_base 64: mod_base = OTHER; note = 2'-Omethylguanosine
  modified_base 65: mod_base = OTHER; note = 2'-Omethylguanosine
  modified_base 66: mod_base = OTHER; note = 2'-Omethylcytosine
  modified_base 67: mod_base = OTHER; note = 2'-Omethylguanosine
  modified_base 68: mod_base = OTHER; note = 2'-Omethylguanosine
  modified_base 69: mod_base = OTHER; note = 2'-fluoroadenosine
  modified_base 70: mod_base = OTHER; note = 2'-fluoroguanosine
  modified_base 73: mod_base = OTHER; note = 2'-Omethylguanosine
  modified_base 75: mod_base = OTHER; note = 2'-fluorocytosine phosphorothiorate

SEQ ID NO: 3855 - RNA, 76 nt, synthetic construct; identical to SEQ ID NO: 625
  source 1..76: mol_type = other RNA
  modified_base 1: mod_base = OTHER; note = 2'-Omethylguanosine
  modified_base 10: mod_base = OTHER; note = 2'-Omethylguanosine
  modified_base 13: mod_base = OTHER; note = 2'-Omethylcytosine
  modified_base 17: mod_base = OTHER; note = Guanosine phosphorothiorate
  modified_base 18: mod_base = OTHER; note = 2'-Omethylguanosine
  modified_base 19: mod_base = OTHER; note = Adenosine phosphorothiorate
  modified_base 20: mod_base = OTHER; note = 2'-Omethyluridine
  modified_base 25: mod_base = OTHER; note = 2'-Omethylcytosine
  modified_base 29: mod_base = OTHER; note = 2'-Omethylguanosine
  modified_base 33: mod_base = OTHER; note = 2'-fluorouridine
  modified_base 35: mod_base = OTHER; note = Cytosine phosphorothiorate
  modified_base 37: mod_base = OTHER; note = Adenosine phosphorothiorate
  modified_base 38: mod_base = OTHER; note = Adenosine phosphorothiorate
  modified_base 43: mod_base = OTHER; note = 2'-Omethyladenosine
  modified_base 44: mod_base = OTHER; note = 2'-fluoroadenosine
  modified_base 46: mod_base = OTHER; note = 2'-Omethylguanosine phosphorothiorate
  modified_base 50: mod_base = OTHER; note = 2'-Omethylcytosine
  modified_base 52: mod_base = OTHER; note = 2'-Omethylguanosine
  modified_base 54: mod_base = OTHER; note = Uridine phosphorothiorate
  modified_base 55: mod_base = OTHER; note = Uridine phosphorothiorate
  modified_base 56: mod_base = OTHER; note = 2'-Omethylcytosine
  modified_base 57: mod_base = OTHER; note = Guanosine phosphorothiorate
  modified_base 62: mod_base = OTHER; note = 2'-Omethylcytosine
  modified_base 63: mod_base = OTHER; note = 2'-fluorocytosine
  modified_base 65: mod_base = OTHER; note = 2'-Omethylguanosine
  modified_base 71: mod_base = OTHER; note = 2'-Omethyluridine
  modified_base 73: mod_base = OTHER; note = 2'-Omethylguanosine

SEQ ID NO: 3856 - RNA, 76 nt, synthetic construct; identical to SEQ ID NO: 625
  source 1..76: mol_type = other RNA
  modified_base 3: mod_base = OTHER; note = Cytosine phosphorothiorate
  modified_base 4: mod_base = OTHER; note = 2'-fluorouridine phosphorothiorate
  modified_base 5: mod_base = OTHER; note = 2'-fluorocytosine
  modified_base 11: mod_base = OTHER; note = Cytosine phosphorothiorate
  modified_base 12: mod_base = OTHER; note = Guanosine phosphorothiorate
  modified_base 13: mod_base = OTHER; note = 2'-fluorocytosine
  modified_base 15: mod_base = OTHER; note = Adenosine phosphorothiorate
  modified_base 16: mod_base = OTHER; note = 2'-Omethyluridine
  modified_base 18: mod_base = OTHER; note = Guanosine phosphorothiorate
  modified_base 21: mod_base = OTHER; note = Adenosine phosphorothiorate
  modified_base 22: mod_base = OTHER; note = 2'-Omethylguanosine
  modified_base 24: mod_base = OTHER; note = 2'-fluoroguanosine
  modified_base 26: mod_base = OTHER; note = 2'-fluoroadenosine
  modified_base 27: mod_base = OTHER; note = 2'-fluorouridine
  modified_base 28: mod_base = OTHER; note = 2'-fluorouridine phosphorothiorate
  modified_base 29: mod_base = OTHER; note = 2'-Omethylguanosine
  modified_base 30: mod_base = OTHER; note = Guanosine phosphorothiorate
  modified_base 33: mod_base = OTHER; note = 2'-fluorouridine
  modified_base 34: mod_base = OTHER; note = 2'-fluorouridine phosphorothiorate
  modified_base 41: mod_base = OTHER; note = 2'-Omethylcytosine
  modified_base 43: mod_base = OTHER; note = 2'-fluoroadenosine
  modified_base 45: mod_base = OTHER; note = 2'-fluoroguanosine
  modified_base 48: mod_base = OTHER; note = 2'-fluorouridine phosphorothiorate
  modified_base 49: mod_base = OTHER; note = 2'-Omethylcytosine
  modified_base 53: mod_base = OTHER; note = 2'-fluoroguanosine
  modified_base 56: mod_base = OTHER; note = 2'-Omethylcytosine
  modified_base 57: mod_base = OTHER; note = 2'-Omethylguanosine
  modified_base 60: mod_base = OTHER; note = Uridine phosphorothiorate
  modified_base 61: mod_base = OTHER; note = 2'-Omethylcytosine phosphorothiorate
  modified_base 62: mod_base = OTHER; note = 2'-fluorocytosine
  modified_base 64: mod_base = OTHER; note = 2'-fluoroguanosine
  modified_base 68: mod_base = OTHER; note = 2'-Omethylguanosine
  modified_base 73: mod_base = OTHER; note = 2'-fluoroguanosine

SEQ ID NO: 3857 - RNA, 76 nt, synthetic construct; identical to SEQ ID NO: 625
  source 1..76: mol_type = other RNA
  modified_base 1: mod_base = OTHER; note = 2'-Omethylguanosine phosphorothiorate
  modified_base 2: mod_base = OTHER; note = 2'-Omethylguanosine phosphorothiorate
  modified_base 3: mod_base = OTHER; note = 2'-Omethylcytosine
  modified_base 4: mod_base = OTHER; note = 2'-Omethyluridine
  modified_base 5: mod_base = OTHER; note = 2'-Omethylcytosine
  modified_base 6: mod_base = OTHER; note = 2'-Omethylcytosine
  modified_base 10: mod_base = OTHER; note = 2'-Omethylguanosine
  modified_base 11: mod_base = OTHER; note = 2'-Omethylcytosine
  modified_base 12: mod_base = OTHER; note = 2'-Omethylguanosine
  modified_base 13: mod_base = OTHER; note = 2'-Omethylcytosine
  modified_base 14: mod_base = OTHER; note = 2'-Omethyladenosine
  modified_base 15: mod_base = OTHER; note = 2'-fluoroadenosine
  modified_base 16: mod_base = OTHER; note = 2'-Omethyluridine
  modified_base 17: mod_base = OTHER; note = 2'-Omethylguanosine
  modified_base 18: mod_base = OTHER; note = 2'-Omethylguanosine
  modified_base 19: mod_base = OTHER; note = 2'-fluoroadenosine
  modified_base 20: mod_base = OTHER; note = 2'-Omethyluridine
  modified_base 21: mod_base = OTHER; note = 2'-fluoroadenosine
  modified_base 22: mod_base = OTHER; note = 2'-Omethylguanosine
  modified_base 23: mod_base = OTHER; note = 2'-Omethylcytosine
  modified_base 24: mod_base = OTHER; note = 2'-Omethylguanosine
  modified_base 25: mod_base = OTHER; note = 2'-Omethylcytosine
  modified_base 38: mod_base = OTHER; note = Adenosine phosphorothiorate
  modified_base 39: mod_base = OTHER; note = Uridine phosphorothiorate
  modified_base 40: mod_base = OTHER; note = 2'-fluorouridine
  modified_base 43: mod_base = OTHER; note = 2'-Omethyladenosine
  modified_base 44: mod_base = OTHER; note = 2'-Omethyladenosine
  modified_base 45: mod_base = OTHER; note = 2'-Omethylguanosine
  modified_base 46: mod_base = OTHER; note = 2'-fluoroguanosine
  modified_base 48: mod_base = OTHER; note = 2'-fluorouridine
  modified_base 49: mod_base = OTHER; note = 2'-Omethylcytosine
  modified_base 50: mod_base = OTHER; note = 2'-Omethylcytosine
  modified_base 54: mod_base = OTHER; note = 2'-Omethyluridine phosphorothiorate
  modified_base 55: mod_base = OTHER; note = Uridine phosphorothiorate
  modified_base 56: mod_base = OTHER; note = 2'-Omethylcytosine
  modified_base 57: mod_base = OTHER; note = 2'-fluoroguanosine
  modified_base 61: mod_base = OTHER; note = 2'-Omethylcytosine
  modified_base 62: mod_base = OTHER; note = 2'-Omethylcytosine
  modified_base 63: mod_base = OTHER; note = 2'-fluorocytosine
  modified_base 64: mod_base = OTHER; note = 2'-Omethylguanosine
  modified_base 65: mod_base = OTHER; note = 2'-Omethylguanosine
  modified_base 66: mod_base = OTHER; note = 2'-Omethylcytosine
  modified_base 67: mod_base = OTHER; note = 2'-Omethylguanosine
  modified_base 68: mod_base = OTHER; note = 2'-Omethylguanosine
  modified_base 69: mod_base = OTHER; note = 2'-Omethyladenosine

SEQ ID NO: 3858 - RNA, 76 nt, synthetic construct; identical to SEQ ID NO: 625
  source 1..76: mol_type = other RNA
  modified_base 1: mod_base = OTHER; note = 2'-Omethylguanosine
  modified_base 10: mod_base = OTHER; note = 2'-Omethylguanosine
  modified_base 13: mod_base = OTHER; note = 2'-Omethylcytosine
  modified_base 17: mod_base = OTHER; note = Guanosine phosphorothiorate
  modified_base 18: mod_base = OTHER; note = 2'-Omethylguanosine
  modified_base 19: mod_base = OTHER; note = Adenosine phosphorothiorate
  modified_base 20: mod_base = OTHER; note = 2'-Omethyluridine
  modified_base 25: mod_base = OTHER; note = 2'-Omethylcytosine
  modified_base 29: mod_base = OTHER; note = 2'-Omethylguanosine
  modified_base 33: mod_base = OTHER; note = 2'-fluorouridine
  modified_base 35: mod_base = OTHER; note = Cytosine phosphorothiorate
  modified_base 37: mod_base = OTHER; note = Adenosine phosphorothiorate
  modified_base 38: mod_base = OTHER; note = Adenosine phosphorothiorate
  modified_base 41: mod_base = OTHER; note = 2'-fluorocytosine phosphorothiorate
  modified_base 43: mod_base = OTHER; note = 2'-Omethyladenosine
  modified_base 44: mod_base = OTHER; note = 2'-fluoroadenosine
  modified_base 46: mod_base = OTHER; note = Guanosine phosphorothiorate
  modified_base 50: mod_base = OTHER; note = 2'-Omethylcytosine
  modified_base 52: mod_base = OTHER; note = 2'-Omethylguanosine
  modified_base 55: mod_base = OTHER; note = Uridine phosphorothiorate
  modified_base 62: mod_base = OTHER; note = 2'-Omethylcytosine
  modified_base 63: mod_base = OTHER; note = 2'-fluorocytosine
  modified_base 65: mod_base = OTHER; note = 2'-Omethylguanosine
  modified_base 71: mod_base = OTHER; note = 2'-Omethyluridine
  modified_base 73: mod_base = OTHER; note = 2'-Omethylguanosine

SEQ ID NO: 3859 - RNA, 75 nt, synthetic construct; identical to SEQ ID NO: 1045
  source 1..75: mol_type = other RNA
  modified_base 1: mod_base = OTHER; note = 2'-Omethylguanosine
  modified_base 44: mod_base = OTHER; note = 2'-Omethylcytosine
  modified_base 45: mod_base = OTHER; note = 2'-Omethylguanosine
  modified_base 46: mod_base = OTHER; note = 2'-fluoroadenosine
  modified_base 47: mod_base = OTHER; note = 2'-fluorouridine
  modified_base 48: mod_base = OTHER; note = 2'-Omethylcytosine
  modified_base 49: mod_base = OTHER; note = 2'-Omethylcytosine
  modified_base 50: mod_base = OTHER; note = 2'-Omethylguanosine
  modified_base 51: mod_base = OTHER; note = 2'-Omethyladenosine
  modified_base 52: mod_base = OTHER; note = 2'-Omethylguanosine
  modified_base 60: mod_base = OTHER; note = 2'-Omethylcytosine
  modified_base 61: mod_base = OTHER; note = 2'-Omethyluridine
  modified_base 62: mod_base = OTHER; note = 2'-fluorocytosine
  modified_base 63: mod_base = OTHER; note = 2'-Omethylguanosine
  modified_base 64: mod_base = OTHER; note = 2'-Omethylguanosine
  modified_base 72: mod_base = OTHER; note = 2'-Omethyluridine

SEQ ID NO: 3860 - RNA, 76 nt, synthetic construct; identical to SEQ ID NO: 625
  source 1..76: mol_type = other RNA
  modified_base 2: mod_base = OTHER; note = 2'-fluoroguanosine
  modified_base 5: mod_base = OTHER; note = 2'-Omethylcytosine
  modified_base 8: mod_base = OTHER; note = Uridine phosphorothiorate
  modified_base 9: mod_base = OTHER; note = Guanosine phosphorothiorate
  modified_base 10: mod_base = OTHER; note = 2'-Omethylguanosine
  modified_base 11: mod_base = OTHER; note = 2'-Omethylcytosine phosphorothiorate
  modified_base 12: mod_base = OTHER; note = 2'-Omethylguanosine
  modified_base 13: mod_base = OTHER; note = 2'-Omethylcytosine
  modified_base 18: mod_base = OTHER; note = 2'-Omethylguanosine
  modified_base 22: mod_base = OTHER; note = Guanosine phosphorothiorate
  modified_base 23: mod_base = OTHER; note = 2'-fluorocytosine
  modified_base 24: mod_base = OTHER; note = Guanosine phosphorothiorate
  modified_base 25: mod_base = OTHER; note = 2'-fluorocytosine
  modified_base 26: mod_base = OTHER; note = 2'-fluoroadenosine
  modified_base 27: mod_base = OTHER; note = Uridine phosphorothiorate
  modified_base 28: mod_base = OTHER; note = 2'-Omethyluridine
  modified_base 29: mod_base = OTHER; note = 2'-Omethylguanosine
  modified_base 30: mod_base = OTHER; note = Guanosine phosphorothiorate
  modified_base 31: mod_base = OTHER; note = 2'-Omethyladenosine
  modified_base 33: mod_base = OTHER; note = 2'-fluorouridine
  modified_base 42: mod_base = OTHER; note = Adenosine phosphorothiorate
  modified_base 43: mod_base = OTHER; note = 2'-Omethyladenosine
  modified_base 44: mod_base = OTHER; note = Adenosine phosphorothiorate
  modified_base 45: mod_base = OTHER; note = 2'-fluoroguanosine phosphorothiorate
  modified_base 46: mod_base = OTHER; note = 2'-Omethylguanosine
  modified_base 47: mod_base = OTHER; note = 2'-Omethyluridine
  modified_base 48: mod_base = OTHER; note = 2'-fluorouridine
  modified_base 49: mod_base = OTHER; note = 2'-fluorocytosine
  modified_base 50: mod_base = OTHER; note = 2'-Omethylcytosine
  modified_base 51: mod_base = OTHER; note = 2'-Omethylguanosine phosphorothiorate
  modified_base 52: mod_base = OTHER; note = 2'-Omethylguanosine
  modified_base 53: mod_base = OTHER; note = 2'-fluoroguanosine
  modified_base 54: mod_base = OTHER; note = Uridine phosphorothiorate
  modified_base 57: mod_base = OTHER; note = 2'-Omethylguanosine
  modified_base 60: mod_base = OTHER; note = 2'-fluorouridine
  modified_base 61: mod_base = OTHER; note = Cytosine phosphorothiorate
  modified_base 62: mod_base = OTHER; note = 2'-Omethylcytosine
  modified_base 65: mod_base = OTHER; note = Guanosine phosphorothiorate
  modified_base 66: mod_base = OTHER; note = 2'-fluorocytosine
  modified_base 72: mod_base = OTHER; note = Cytosine phosphorothiorate
  modified_base 75: mod_base = OTHER; note = 2'-fluorocytosine
  modified_base 76: mod_base = OTHER; note = 2'-Omethyladenosine

SEQ ID NO: 3861 - DNA, 76 bp, synthetic construct; identical to SEQ ID NO: 1924
  source 1..76: mol_type = other DNA
  modified_base 1: mod_base = OTHER; note = 2'-Omethylguanosine phosphorothiorate
  modified_base 2: mod_base = OTHER; note = 2'-Omethylguanosine phosphorothiorate
  modified_base 13: mod_base = OTHER; note = Cytosine phosphorothiorate
  modified_base 21: mod_base = OTHER; note = 2'-O-(2-Methoxyethyl) adenosine
  modified_base 39: mod_base = OTHER; note = Uridine phosphorothiorate
  modified_base 40: mod_base = OTHER; note = 2'-O-(2-Methoxyethyl) thymine
  modified_base 41: mod_base = OTHER; note = 2'-O-(2-Methoxyethyl) 5-methylcytosine
  modified_base 74: mod_base = OTHER; note = Cytosine phosphorothiorate
  modified_base 75: mod_base = OTHER; note = 2'-Omethylcytosine phosphorothiorate
  modified_base 76: mod_base = OTHER; note = 2'-Omethyladenosine
  misc_feature 1..56: note = RNA
  misc_feature 57: note = DNA
  misc_feature 58..76: note = RNA

SEQ ID NO: 3862 - DNA, 76 bp, synthetic construct; identical to SEQ ID NO: 1924
  source 1..76: mol_type = other DNA
  modified_base 1: mod_base = OTHER; note = 2'-Omethylguanosine phosphorothiorate
  modified_base 2: mod_base = OTHER; note = 2'-fluoroguanosine
  modified_base 3: mod_base = OTHER; note = 2'-O-(2-Methoxyethyl) 5-methylcytosine
  modified_base 7: mod_base = OTHER; note = Guanosine phosphorothiorate
  modified_base 9: mod_base = OTHER; note = Guanosine phosphorothiorate
  modified_base 10: mod_base = OTHER; note = 2'-O-(2-Methoxyethyl) guanosine
  modified_base 12: mod_base = OTHER; note = 2'-fluoroguanosine
  modified_base 13: mod_base = OTHER; note = 2'-Omethylcytosine phosphorothiorate
  modified_base 14: mod_base = OTHER; note = 2'-Omethyladenosine
  modified_base 15: mod_base = OTHER; note = Adenosine phosphorothiorate
  modified_base 16: mod_base = OTHER; note = Uridine phosphorothiorate
  modified_base 18: mod_base = OTHER; note = Guanosine phosphorothiorate
  modified_base 19: mod_base = OTHER; note = 2'-O-(2-Methoxyethyl) adenosine
  modified_base 21: mod_base = OTHER; note = Adenosine phosphorothiorate
  modified_base 24: mod_base = OTHER; note = 2'-Omethylguanosine phosphorothiorate
  modified_base 25: mod_base = OTHER; note = deoxycytosine phosphorothiorate
  modified_base 26: mod_base = OTHER; note = 2'-Omethyladenosine phosphorothiorate
  modified_base 27: mod_base = OTHER; note = 2'-O-(2-Methoxyethyl) thymine
  modified_base 30: mod_base = OTHER; note = Guanosine phosphorothiorate
  modified_base 31: mod_base = OTHER; note = 2'-O-(2-Methoxyethyl) adenosine
  modified_base 33: mod_base = OTHER; note = Uridine phosphorothiorate
  modified_base 35: mod_base = OTHER; note = Cytosine phosphorothiorate
  modified_base 40: mod_base = OTHER; note = deoxyuridine phosphorothiorate
  modified_base 41: mod_base = OTHER; note = 2'-Omethylcytosine
  modified_base 43: mod_base = OTHER; note = 2'-Omethyladenosine
  modified_base 45: mod_base = OTHER; note = 2'-fluoroguanosine phosphorothiorate
  modified_base 46: mod_base = OTHER; note = 2'-fluoroguanosine phosphorothiorate
  modified_base 47: mod_base = OTHER; note = 2'-Omethyluridine phosphorothiorate
  modified_base 51: mod_base = OTHER; note = Guanosine phosphorothiorate
  modified_base 52: mod_base = OTHER; note = 2'-fluoroguanosine
  modified_base 59: mod_base = OTHER; note = 2'-O-(2-Methoxyethyl) guanosine
  modified_base 60: mod_base = OTHER; note = Uridine phosphorothiorate
  modified_base 61: mod_base = OTHER; note = Cytosine phosphorothiorate
  modified_base 63: mod_base = OTHER; note = deoxycytosine phosphorothiorate
  modified_base 64: mod_base = OTHER; note = Guanosine phosphorothiorate
  modified_base 67: mod_base = OTHER; note = Guanosine phosphorothiorate
  modified_base 68: mod_base = OTHER; note = 2'-O-(2-Methoxyethyl) guanosine
  modified_base 69: mod_base = OTHER; note = 2'-fluoroadenosine
  modified_base 70: mod_base = OTHER; note = 2'-O-(2-Methoxyethyl) guanosine
  modified_base 73: mod_base = OTHER; note = Guanosine phosphorothiorate
  modified_base 74: mod_base = OTHER; note = 2'-Omethylcytosine
  misc_feature 1..7: note = RNA
  misc_feature 8: note = DNA
  misc_feature 9..24: note = RNA
  misc_feature 25: note = DNA
  misc_feature 26..39: note = RNA
  misc_feature 40: note = DNA
  misc_feature 41..47: note = RNA
  misc_feature 48: note = DNA
  misc_feature 49..61: note = RNA
  misc_feature 62..63: note = DNA
  misc_feature 64..65: note = RNA
  misc_feature 66: note = DNA
  misc_feature 67..74: note = RNA
  misc_feature 75: note = DNA
  misc_feature 76: note = RNA

SEQ ID NO: 3863 - RNA, 75 nt, synthetic construct; identical to SEQ ID NO: 1045
  source 1..75: mol_type = other RNA
  modified_base 2: mod_base = OTHER; note = 2'-Omethylguanosine phosphorothiorate
  modified_base 3: mod_base = OTHER; note = 2'-Omethyluridine
  modified_base 8: mod_base = OTHER; note = 2'-fluorouridine phosphorothiorate
  modified_base 15: mod_base = OTHER; note = 2'-fluoroadenosine
  modified_base 16: mod_base = OTHER; note = 2'-Omethyluridine
  modified_base 21: mod_base = OTHER; note = Adenosine phosphorothiorate
  modified_base 23: mod_base = OTHER; note = 2'-Omethylcytosine phosphorothiorate
  modified_base 44: mod_base = OTHER; note = 2'-Omethylcytosine
  modified_base 46: mod_base = OTHER; note = Adenosine phosphorothiorate
  modified_base 52: mod_base = OTHER; note = 2'-fluoroguanosine phosphorothiorate
  modified_base 60: mod_base = OTHER; note = 2'-Omethylcytosine
  modified_base 61: mod_base = OTHER; note = 2'-fluorouridine phosphorothiorate
  modified_base 65: mod_base = OTHER; note = 2'-Omethyluridine phosphorothiorate
  modified_base 66: mod_base = OTHER; note = 2'-Omethylguanosine
  modified_base 67: mod_base = OTHER; note = 2'-Omethylguanosine
  modified_base 72: mod_base = OTHER; note = 2'-Omethyluridine
  modified_base 74: mod_base = OTHER; note = 2'-Omethylcytosine phosphorothiorate
  modified_base 75: mod_base = OTHER; note = 2'-Omethyladenosine

SEQ ID NO: 3864 - RNA, 75 nt, synthetic construct; identical to SEQ ID NO: 1045
  source 1..75: mol_type = other RNA
  modified_base 1: mod_base = OTHER; note = 2'-Omethylguanosine phosphorothiorate
  modified_base 2: mod_base = OTHER; note = 2'-Omethylguanosine
  modified_base 42: mod_base = OTHER; note = 2'-fluoroadenosine
  modified_base 45: mod_base = OTHER; note = Guanosine phosphorothiorate
  modified_base 46: mod_base = OTHER; note = 2'-fluoroadenosine
  modified_base 51: mod_base = OTHER; note = Adenosine phosphorothiorate
  modified_base 73: mod_base = OTHER; note = Cytosine phosphorothiorate
  modified_base 74: mod_base = OTHER; note = 2'-Omethylcytosine

SEQ ID NO: 3865 - RNA, 86 nt, synthetic construct; identical to SEQ ID NO: 3290
  source 1..86: mol_type = other RNA
  modified_base 49: mod_base = OTHER; note = 2'-fluoroadenosine

SEQ ID NO: 3866 - RNA, 86 nt, synthetic construct; identical to SEQ ID NO: 3290
  source 1..86: mol_type = other RNA
  modified_base 27: mod_base = OTHER; note = 2'-Omethyluridine
  modified_base 28: mod_base = OTHER; note = 2'-Omethyluridine
  modified_base 29: mod_base = OTHER; note = 2'-Omethylguanosine
  modified_base 30: mod_base = OTHER; note = 2'-Omethylguanosine
  modified_base 31: mod_base = OTHER; note = 2'-Omethyladenosine

SEQ ID NO: 3867 - RNA, 76 nt, synthetic construct; identical to SEQ ID NO: 625
  source 1..76: mol_type = other RNA
  modified_base 1: mod_base = OTHER; note = 2'-Omethylguanosine phosphorothiorate
  modified_base 2: mod_base = OTHER; note = 2'-Omethylguanosine
  modified_base 12: mod_base = OTHER; note = 2'-Omethylguanosine
  modified_base 13: mod_base = OTHER; note = 2'-Omethylcytosine
  modified_base 33: mod_base = OTHER; note = 2'-fluorouridine
  modified_base 35: mod_base = OTHER; note = Cytosine phosphorothiorate
  modified_base 37: mod_base = OTHER; note = Adenosine phosphorothiorate
  modified_base 52: mod_base = OTHER; note = 2'-Omethylguanosine
  modified_base 55: mod_base = OTHER; note = Uridine phosphorothiorate
  modified_base 62: mod_base = OTHER; note = 2'-Omethylcytosine
  modified_base 68: mod_base = OTHER; note = 2'-Omethylguanosine
  modified_base 73: mod_base = OTHER; note = 2'-Omethylguanosine
  modified_base 75: mod_base = OTHER; note = 2'-fluorocytosine phosphorothiorate

SEQ ID NO: 3868 - RNA, 76 nt, synthetic construct; identical to SEQ ID NO: 625
  source 1..76: mol_type = other RNA
  modified_base 1: mod_base = OTHER; note = 2'-fluoroguanosine
  modified_base 2: mod_base = OTHER; note = Guanosine phosphorothiorate
  modified_base 3: mod_base = OTHER; note = 2'-Omethylcytosine
  modified_base 5: mod_base = OTHER; note = Cytosine phosphorothiorate
  modified_base 12: mod_base = OTHER; note = 2'-Omethylguanosine phosphorothiorate
  modified_base 13: mod_base = OTHER; note = 2'-Omethylcytosine
  modified_base 15: mod_base = OTHER; note = 2'-Omethyladenosine phosphorothiorate
  modified_base 16: mod_base = OTHER; note = 2'-fluorouridine
  modified_base 20: mod_base = OTHER; note = 2'-Omethyluridine
  modified_base 24: mod_base = OTHER; note = 2'-Omethylguanosine
  modified_base 26: mod_base = OTHER; note = 2'-fluoroadenosine
  modified_base 27: mod_base = OTHER; note = 2'-Omethyluridine
  modified_base 30: mod_base = OTHER; note = 2'-Omethylguanosine
  modified_base 31: mod_base = OTHER; note = 2'-Omethyladenosine
  modified_base 34: mod_base = OTHER; note = 2'-Omethyluridine phosphorothiorate
  modified_base 37: mod_base = OTHER; note = Adenosine phosphorothiorate
  modified_base 38: mod_base = OTHER; note = 2'-fluoroadenosine
  modified_base 40: mod_base = OTHER; note = Uridine phosphorothiorate
  modified_base 41: mod_base = OTHER; note = 2'-Omethylcytosine
  modified_base 47: mod_base = OTHER; note = 2'-Omethyluridine
  modified_base 48: mod_base = OTHER; note = 2'-Omethyluridine
  modified_base 49: mod_base = OTHER; note = Cytosine phosphorothiorate
  modified_base 50: mod_base = OTHER; note = 2'-fluorocytosine
  modified_base 53: mod_base = OTHER; note = 2'-fluoroguanosine
  modified_base 56: mod_base = OTHER; note = 2'-Omethylcytosine
  modified_base 57: mod_base = OTHER; note = 2'-Omethylguanosine
  modified_base 58: mod_base = OTHER; note = 2'-fluoroadenosine
  modified_base 63: mod_base = OTHER; note = 2'-fluorocytosine
  modified_base 64: mod_base = OTHER; note = 2'-fluoroguanosine
  modified_base 69: mod_base = OTHER; note = Adenosine phosphorothiorate
  modified_base 70: mod_base = OTHER; note = 2'-fluoroguanosine
  modified_base 73: mod_base = OTHER; note = Guanosine phosphorothiorate
  modified_base 74: mod_base = OTHER; note = 2'-Omethylcytosine
  modified_base 75: mod_base = OTHER; note = 2'-fluorocytosine
  modified_base 76: mod_base = OTHER; note = 2'-Omethyladenosine

SEQ ID NO: 3869 - RNA, 75 nt, synthetic construct; identical to SEQ ID NO: 3306
  source 1..75: mol_type = other RNA
  modified_base 1: mod_base = OTHER; note = 2'-Omethylguanosine
  modified_base 18: mod_base = OTHER; note = 2'-Omethylguanosine
  modified_base 49: mod_base = OTHER; note = 2'-Omethylcytosine
  modified_base 51: mod_base = OTHER; note = 2'-Omethyluridine
  modified_base 72: mod_base = OTHER; note = 2'-Omethyladenosine

SEQ ID NO: 3870 - RNA, 76 nt, synthetic construct; identical to SEQ ID NO: 3289
  source 1..76: mol_type = other RNA
  modified_base 1: mod_base = OTHER; note = 2'-Omethylguanosine
  modified_base 13: mod_base = OTHER; note = 2'-Omethylcytosine
  modified_base 18: mod_base = OTHER; note = 2'-Omethylguanosine
  modified_base 19: mod_base = OTHER; note = 2'-Omethylguanosine
  modified_base 25: mod_base = OTHER; note = 2'-Omethylcytosine
  modified_base 33: mod_base = OTHER; note = 2'-fluorouridine
  modified_base 34: mod_base = OTHER; note = 2'-Omethyluridine
  modified_base 35: mod_base = OTHER; note = Uridine phosphorothiorate
  modified_base 37: mod_base = OTHER; note = Adenosine phosphorothiorate
  modified_base 38: mod_base = OTHER; note = Adenosine phosphorothiorate
  modified_base 41: mod_base = OTHER; note = 2'-Omethyluridine
  modified_base 42: mod_base = OTHER; note = 2'-Omethylguanosine
  modified_base 43: mod_base = OTHER; note = 2'-Omethyladenosine
  modified_base 44: mod_base = OTHER; note = 2'-Omethylguanosine
  modified_base 49: mod_base = OTHER; note = 2'-Omethylcytosine
  modified_base 50: mod_base = OTHER; note = 2'-Omethyladenosine
  modified_base 52: mod_base = OTHER; note = 2'-Omethylguanosine
  modified_base 54: mod_base = OTHER; note = Uridine phosphorothiorate
  modified_base 55: mod_base = OTHER; note = Uridine phosphorothiorate
  modified_base 56: mod_base = OTHER; note = 2'-Omethylcytosine
  modified_base 57: mod_base = OTHER; note = Adenosine phosphorothiorate
  modified_base 58: mod_base = OTHER; note = Adenosine phosphorothiorate
  modified_base 59: mod_base = OTHER; note = 2'-Omethylguanosine
  modified_base 61: mod_base = OTHER; note = 2'-Omethylcytosine
  modified_base 65: mod_base = OTHER; note = 2'-Omethylguanosine
  modified_base 73: mod_base = OTHER; note = 2'-Omethylguanosine

SEQ ID NO: 3871 - RNA, 76 nt, synthetic construct; identical to SEQ ID NO: 3342
  source 1..76: mol_type = other RNA
  modified_base 1: mod_base = OTHER; note = 2'-Omethylguanosine phosphorothiorate
  modified_base 2: mod_base = OTHER; note = 2'-Omethylguanosine
  modified_base 3: mod_base = OTHER; note = 2'-Omethylcytosine
  modified_base 4: mod_base = OTHER; note = 2'-Omethyluridine
  modified_base 5: mod_base = OTHER; note = 2'-Omethylcytosine
  modified_base 6: mod_base = OTHER; note = 2'-Omethylcytosine
  modified_base 44: mod_base = OTHER; note = 2'-Omethyladenosine
  modified_base 45: mod_base = OTHER; note = 2'-Omethylguanosine
  modified_base 46: mod_base = OTHER; note = 2'-fluoroguanosine
  modified_base 47: mod_base = OTHER; note = 2'-fluorouridine
  modified_base 48: mod_base = OTHER; note = 2'-Omethyluridine
  modified_base 49: mod_base = OTHER; note = 2'-Omethylcytosine
  modified_base 73: mod_base = OTHER; note = 2'-Omethylguanosine

SEQ ID NO: 3872 - RNA, 74 nt, synthetic construct; identical to SEQ ID NO: 3293
  source 1..74: mol_type = other RNA
  modified_base 1: mod_base = OTHER; note = 2'-fluoroadenosine phosphorothiorate
  modified_base 2: mod_base = OTHER; note = 2'-fluorocytosine phosphorothiorate
  modified_base 4: mod_base = OTHER; note = Uridine phosphorothiorate
  modified_base 6: mod_base = OTHER; note = 2'-fluoroguanosine
  modified_base 8: mod_base = OTHER; note = Guanosine phosphorothiorate
  modified_base 9: mod_base = OTHER; note = 2'-fluoroguanosine
  modified_base 12: mod_base = OTHER; note = 2'-fluorocytosine
  modified_base 15: mod_base = OTHER; note = 2'-Omethylcytosine phosphorothiorate
  modified_base 21: mod_base = OTHER; note = 2'-fluorocytosine
  modified_base 25: mod_base = OTHER; note = Uridine phosphorothiorate
  modified_base 34: mod_base = OTHER; note = 2'-fluoroadenosine
  modified_base 43: mod_base = OTHER; note = 2'-fluoroguanosine
  modified_base 44: mod_base = OTHER; note = Guanosine phosphorothiorate
  modified_base 50: mod_base = OTHER; note = Uridine phosphorothiorate
  modified_base 57: mod_base = OTHER; note = 2'-fluoroadenosine
  modified_base 62: mod_base = OTHER; note = Guanosine phosphorothiorate
  modified_base 73: mod_base = OTHER; note = 2'-Omethylcytosine phosphorothiorate

SEQ ID NO: 3873 - RNA, 76 nt, synthetic construct; identical to SEQ ID NO: 3795
  source 1..76: mol_type = other RNA
  modified_base 1: mod_base = OTHER; note = 2'-Omethylguanosine
  modified_base 2: mod_base = OTHER; note = 2'-Omethylcytosine
  modified_base 3: mod_base = OTHER; note = 2'-Omethylcytosine
  modified_base 4: mod_base = OTHER; note = 2'-Omethyluridine
  modified_base 5: mod_base = OTHER; note = 2'-Omethylcytosine
  modified_base 6: mod_base = OTHER; note = 2'-Omethylcytosine
  modified_base 14: mod_base = OTHER; note = 2'-Omethyladenosine
  modified_base 15: mod_base = OTHER; note = 2'-Omethyladenosine
  modified_base 16: mod_base = OTHER; note = 2'-Omethyluridine
  modified_base 17: mod_base = OTHER; note = 2'-Omethylguanosine
  modified_base 18: mod_base = OTHER; note = 2'-Omethylguanosine
  modified_base 20: mod_base = OTHER; note = 2'-Omethyluridine
  modified_base 25: mod_base = OTHER; note = 2'-Omethylcytosine
  modified_base 41: mod_base = OTHER; note = 2'-Omethylcytosine
  modified_base 42: mod_base = OTHER; note = 2'-Omethylguanosine
  modified_base 43: mod_base = OTHER; note = 2'-Omethylguanosine
  modified_base 44: mod_base = OTHER; note = 2'-Omethylguanosine
  modified_base 49: mod_base = OTHER; note = 2'-Omethylguanosine
  modified_base 50: mod_base = OTHER; note = 2'-Omethylcytosine
  modified_base 52: mod_base = OTHER; note = 2'-Omethylguanosine
  modified_base 54: mod_base = OTHER; note = 2'-Omethyluridine
  modified_base 55: mod_base = OTHER; note = Uridine phosphorothiorate
  modified_base 56: mod_base = OTHER; note = 2'-Omethylcytosine
  modified_base 57: mod_base = OTHER; note = 2'-fluoroguanosine
  modified_base 59: mod_base = OTHER; note = 2'-Omethylguanosine
  modified_base 61: mod_base = OTHER; note = 2'-Omethylcytosine
  modified_base 65: mod_base = OTHER; note = 2'-Omethyluridine
  modified_base 73: mod_base = OTHER; note = 2'-Omethylguanosine

SEQ ID NO: 3874 - RNA, 85 nt, synthetic construct; identical to SEQ ID NO: 3286
  source 1..85: mol_type = other RNA
  modified_base 1: mod_base = OTHER; note = 2'-Omethylcytosine phosphorothiorate
  modified_base 15: mod_base = OTHER; note = 2'-Omethyluridine
  modified_base 22: mod_base = OTHER; note = 2'-fluoroguanosine
  modified_base 46: mod_base = OTHER; note = 2'-Omethyladenosine
  modified_base 73: mod_base = OTHER; note = 2'-fluoroadenosine
  modified_base 84: mod_base = OTHER; note = 2'-fluorocytosine

SEQ ID NO: 3875 - RNA, 75 nt, synthetic construct; identical to SEQ ID NO: 3299
  source 1..75: mol_type = other RNA
  modified_base 2: mod_base = OTHER; note = Cytosine phosphorothiorate
  modified_base 8: mod_base = OTHER; note = Adenosine phosphorothiorate
  modified_base 19: mod_base = OTHER; note = 2'-fluorouridine
  modified_base 21: mod_base = OTHER; note = 2'-Omethylguanosine phosphorothiorate
  modified_base 31: mod_base = OTHER; note = 2'-fluorocytosine
  modified_base 45: mod_base = OTHER; note = 2'-fluoroguanosine
  modified_base 73: mod_base = OTHER; note = Cytosine phosphorothiorate
  modified_base 74: mod_base = OTHER; note = 2'-Omethylcytosine

SEQ ID NO: 3876 - RNA, 76 nt, synthetic construct; identical to SEQ ID NO: 625
  source 1..76: mol_type = other RNA
  modified_base 3: mod_base = OTHER; note = 2'-Omethylcytosine
  modified_base 4: mod_base = OTHER; note = 2'-Omethyluridine
  modified_base 5: mod_base = OTHER; note = 2'-fluorocytosine phosphorothiorate
  modified_base 6: mod_base = OTHER; note = 2'-Omethylcytosine
  modified_base 12: mod_base = OTHER; note = 2'-Omethylguanosine
  modified_base 15: mod_base = OTHER; note = 2'-Omethyladenosine phosphorothiorate
  modified_base 16: mod_base = OTHER; note = 2'-Omethyluridine
  modified_base 17: mod_base = OTHER; note = Guanosine phosphorothiorate
  modified_base 18: mod_base = OTHER; note = 2'-fluoroguanosine phosphorothiorate
  modified_base 23: mod_base = OTHER; note = Cytosine phosphorothiorate
  modified_base 24: mod_base = OTHER; note = 2'-fluoroguanosine phosphorothiorate
  modified_base 27: mod_base = OTHER; note = 2'-fluorouridine
  modified_base 29: mod_base = OTHER; note = 2'-Omethylguanosine
  modified_base 33: mod_base = OTHER; note = 2'-fluorouridine
  modified_base 36: mod_base = OTHER; note = Adenosine phosphorothiorate
  modified_base 38: mod_base = OTHER; note = 2'-fluoroadenosine
  modified_base 42: mod_base = OTHER; note = 2'-fluoroadenosine
  modified_base 43: mod_base = OTHER; note = 2'-Omethyladenosine
  modified_base 44: mod_base = OTHER; note = 2'-fluoroadenosine
  modified_base 46: mod_base = OTHER; note = 2'-Omethylguanosine
  modified_base 47: mod_base = OTHER; note = 2'-fluorouridine
  modified_base 49: mod_base = OTHER; note = Cytosine phosphorothiorate
  modified_base 55: mod_base = OTHER; note = Uridine phosphorothiorate
  modified_base 56: mod_base = OTHER; note = 2'-fluorocytosine
  modified_base 58: mod_base = OTHER; note = Adenosine phosphorothiorate
  modified_base 62: mod_base = OTHER; note = 2'-Omethylcytosine
  modified_base 64: mod_base = OTHER; note = Guanosine phosphorothiorate
  modified_base 66: mod_base = OTHER; note = 2'-Omethylcytosine
  modified_base 68: mod_base = OTHER; note = 2'-fluoroguanosine
  modified_base 69: mod_base = OTHER; note = 2'-fluoroadenosine
  modified_base 72: mod_base = OTHER; note = 2'-fluorocytosine
  modified_base 73: mod_base = OTHER; note = 2'-fluoroguanosine
  modified_base 74: mod_base = OTHER; note = Cytosine phosphorothiorate
  modified_base 75: mod_base = OTHER; note = 2'-fluorocytosine
  modified_base 76: mod_base = OTHER; note = 2'-fluoroadenosine

SEQ ID NO: 3877 - RNA, 76 nt, synthetic construct; identical to SEQ ID NO: 3332
  source 1..76: mol_type = other RNA
  modified_base 1: mod_base = OTHER; note = 2'-Omethylguanosine
  modified_base 61: mod_base = OTHER; note = 2'-Omethylcytosine
  modified_base 62: mod_base = OTHER; note = 2'-Omethylcytosine
  modified_base 64: mod_base = OTHER; note = 2'-Omethylguanosine
  modified_base 65: mod_base = OTHER; note = 2'-Omethylcytosine
  modified_base 66: mod_base = OTHER; note = 2'-Omethylcytosine
  modified_base 67: mod_base = OTHER; note = 2'-Omethylguanosine
  modified_base 68: mod_base = OTHER; note = 2'-Omethylguanosine
  modified_base 69: mod_base = OTHER; note = 2'-Omethylguanosine
  modified_base 70: mod_base = OTHER; note = 2'-fluoroguanosine
  modified_base 71: mod_base = OTHER; note = 2'-Omethyluridine
  modified_base 72: mod_base = OTHER; note = 2'-Omethylcytosine
  modified_base 73: mod_base = OTHER; note = 2'-Omethylguanosine

SEQ ID NO: 3878 - RNA, 85 nt, synthetic construct; identical to SEQ ID NO: 3317
  source 1..85: mol_type = other RNA
  modified_base 1: mod_base = OTHER; note = 2'-Omethylguanosine
  modified_base 2: mod_base = OTHER; note = Cytosine phosphorothiorate
  modified_base 3: mod_base = OTHER; note = Uridine phosphorothiorate
  modified_base 5: mod_base = OTHER; note = Uridine phosphorothiorate
  modified_base 13: mod_base = OTHER; note = 2'-Omethylguanosine phosphorothiorate
  modified_base 16: mod_base = OTHER; note = 2'-fluorouridine phosphorothiorate
  modified_base 18: mod_base = OTHER; note = 2'-Omethylguanosine
  modified_base 23: mod_base = OTHER; note = 2'-fluoroguanosine phosphorothiorate
  modified_base 26: mod_base = OTHER; note = Guanosine phosphorothiorate
  modified_base 27: mod_base = OTHER; note = 2'-Omethyluridine phosphorothiorate
  modified_base 37: mod_base = OTHER; note = 2'-fluoroadenosine phosphorothiorate
  modified_base 41: mod_base = OTHER; note = 2'-Omethylcytosine phosphorothiorate
  modified_base 44: mod_base = OTHER; note = 2'-Omethyluridine phosphorothiorate
  modified_base 46: mod_base = OTHER; note = 2'-Omethylguanosine
  modified_base 48: mod_base = OTHER; note = 2'-Omethylguanosine
  modified_base 59: mod_base = OTHER; note = Cytosine phosphorothiorate
  modified_base 81: mod_base = OTHER; note = 2'-fluorocytosine
  modified_base 82: mod_base = OTHER; note = 2'-fluoroguanosine
  modified_base 84: mod_base = OTHER; note = 2'-Omethylcytosine phosphorothiorate

SEQ ID NO: 3879 - RNA, 75 nt, synthetic construct; identical to SEQ ID NO: 1045
  source 1..75: mol_type = other RNA
  modified_base 2: mod_base = OTHER; note = 2'-Omethylguanosine phosphorothiorate
  modified_base 5: mod_base = OTHER; note = 2'-Omethylcytosine phosphorothiorate
  modified_base 6: mod_base = OTHER; note = 2'-fluorocytosine phosphorothiorate
  modified_base 13: mod_base = OTHER; note = 2'-fluorouridine
  modified_base 15: mod_base = OTHER; note = 2'-Omethyladenosine
  modified_base 16: mod_base = OTHER; note = 2'-Omethyluridine
  modified_base 18: mod_base = OTHER; note = 2'-Omethylguanosine
  modified_base 31: mod_base = OTHER; note = 2'-fluoroadenosine phosphorothiorate
  modified_base 34: mod_base = OTHER; note = 2'-Omethyluridine
  modified_base 36: mod_base = OTHER; note = 2'-fluoroadenosine phosphorothiorate
  modified_base 51: mod_base = OTHER; note = Adenosine phosphorothiorate
  modified_base 65: mod_base = OTHER; note = 2'-Omethyluridine
  modified_base 66: mod_base = OTHER; note = 2'-Omethylguanosine
  modified_base 67: mod_base = OTHER; note = 2'-Omethylguanosine phosphorothiorate
  modified_base 68: mod_base = OTHER; note = 2'-fluoroadenosine
  modified_base 72: mod_base = OTHER; note = 2'-Omethyluridine
  modified_base 73: mod_base = OTHER; note = Cytosine phosphorothiorate
  modified_base 74: mod_base = OTHER; note = 2'-Omethylcytosine phosphorothiorate

SEQ ID NO: 3880 - RNA, 76 nt, synthetic construct; identical to SEQ ID NO: 625
  source 1..76: mol_type = other RNA
  modified_base 1: mod_base = OTHER; note = 2'-Omethylguanosine
  modified_base 10: mod_base = OTHER; note = 2'-Omethylguanosine
  modified_base 13: mod_base = OTHER; note = 2'-Omethylcytosine
  modified_base 17: mod_base = OTHER; note = Guanosine phosphorothiorate
  modified_base 19: mod_base = OTHER; note = Adenosine phosphorothiorate
  modified_base 20: mod_base = OTHER; note = 2'-Omethyluridine
  modified_base 25: mod_base = OTHER; note = 2'-Omethylcytosine
  modified_base 29: mod_base = OTHER; note = 2'-Omethylguanosine
  modified_base 33: mod_base = OTHER; note = 2'-fluorouridine
  modified_base 35: mod_base = OTHER; note = Cytosine phosphorothiorate
  modified_base 37: mod_base = OTHER; note = Adenosine phosphorothiorate
  modified_base 38: mod_base = OTHER; note = Adenosine phosphorothiorate
  modified_base 43: mod_base = OTHER; note = 2'-Omethyladenosine
  modified_base 44: mod_base = OTHER; note = 2'-fluoroadenosine
  modified_base 46: mod_base = OTHER; note = Guanosine phosphorothiorate
  modified_base 50: mod_base = OTHER; note = 2'-Omethylcytosine
  modified_base 52: mod_base = OTHER; note = 2'-Omethylguanosine
  modified_base 54: mod_base = OTHER; note = Uridine phosphorothiorate
  modified_base 55: mod_base = OTHER; note = Uridine phosphorothiorate
  modified_base 56: mod_base = OTHER; note = 2'-Omethylcytosine
  modified_base 57: mod_base = OTHER; note = Guanosine phosphorothiorate
  modified_base 62: mod_base = OTHER; note = 2'-Omethylcytosine
  modified_base 63: mod_base = OTHER; note = 2'-fluorocytosine
  modified_base 65: mod_base = OTHER; note = 2'-Omethylguanosine
  modified_base 71: mod_base = OTHER; note = 2'-Omethyluridine
  modified_base 73: mod_base = OTHER; note = 2'-Omethylguanosine

SEQ ID NO: 3881 - RNA, 86 nt, synthetic construct; identical to SEQ ID NO: 3290
  source 1..86: mol_type = other RNA
  modified_base 19: mod_base = OTHER; note = 2'-fluorouridine

SEQ ID NO: 3882 - RNA, 75 nt, synthetic construct; identical to SEQ ID NO: 3336
  source 1..75: mol_type = other RNA
  modified_base 1: mod_base = OTHER; note = 2'-fluorocytosine phosphorothiorate
  modified_base 2: mod_base = OTHER; note = Cytosine phosphorothiorate
  modified_base 3: mod_base = OTHER; note = Uridine phosphorothiorate
  modified_base 14: mod_base = OTHER; note = 2'-fluoroguanosine
  modified_base 15: mod_base = OTHER; note = 2'-fluorouridine
  modified_base 21: mod_base = OTHER; note = 2'-fluoroguanosine
  modified_base 23: mod_base = OTHER; note = 2'-fluoroguanosine
  modified_base 25: mod_base = OTHER; note = 2'-Omethyladenosine phosphorothiorate
  modified_base 26: mod_base = OTHER; note = Uridine phosphorothiorate
  modified_base 30: mod_base = OTHER; note = 2'-Omethyladenosine phosphorothiorate
  modified_base 36: mod_base = OTHER; note = 2'-fluoroadenosine
  modified_base 39: mod_base = OTHER; note = 2'-fluorocytosine
  modified_base 41: mod_base = OTHER; note = 2'-fluoroguanosine
  modified_base 48: mod_base = OTHER; note = 2'-fluorocytosine
  modified_base 49: mod_base = OTHER; note = 2'-fluoroadenosine
  modified_base 63: mod_base = OTHER; note = 2'-fluorouridine
  modified_base 69: mod_base = OTHER; note = Guanosine phosphorothiorate
  modified_base 73: mod_base = OTHER; note = 2'-fluorocytosine
  modified_base 74: mod_base = OTHER; note = 2'-Omethylcytosine

SEQ ID NO: 3883 - RNA, 75 nt, synthetic construct; identical to SEQ ID NO: 1045
  source 1..75: mol_type = other RNA
  modified_base 2: mod_base = OTHER; note = 2'-Omethylguanosine phosphorothiorate
  modified_base 22: mod_base = OTHER; note = 2'-fluoroguanosine
  modified_base 38: mod_base = OTHER; note = Adenosine phosphorothiorate
  modified_base 42: mod_base = OTHER; note = 2'-fluoroadenosine
  modified_base 55: mod_base = OTHER; note = 2'-fluorocytosine phosphorothiorate
  modified_base 58: mod_base = OTHER; note = 2'-fluoroguanosine
  modified_base 63: mod_base = OTHER; note = Guanosine phosphorothiorate
  modified_base 64: mod_base = OTHER; note = 2'-fluoroguanosine
  modified_base 74: mod_base = OTHER; note = Cytosine phosphorothiorate
  modified_base 75: mod_base = OTHER; note = 2'-fluoroadenosine

SEQ ID NO: 3884 - RNA, 74 nt, synthetic construct; identical to SEQ ID NO: 3293
  source 1..74: mol_type = other RNA
  modified_base 1: mod_base = OTHER; note = 2'-Omethyladenosine
  modified_base 2: mod_base = OTHER; note = Cytosine phosphorothiorate
  modified_base 3: mod_base = OTHER; note = Cytosine phosphorothiorate
  modified_base 4: mod_base = OTHER; note = 2'-fluorouridine
  modified_base 6: mod_base = OTHER; note = 2'-fluoroguanosine
  modified_base 8: mod_base = OTHER; note = Guanosine phosphorothiorate
  modified_base 9: mod_base = OTHER; note = 2'-fluoroguanosine
  modified_base 10: mod_base = OTHER; note = Cytosine phosphorothiorate
  modified_base 15: mod_base = OTHER; note = 2'-Omethylcytosine phosphorothiorate
  modified_base 24: mod_base = OTHER; note = 2'-fluoroguanosine
  modified_base 27: mod_base = OTHER; note = 2'-Omethyluridine
  modified_base 39: mod_base = OTHER; note = 2'-fluoroadenosine
  modified_base 42: mod_base = OTHER; note = Adenosine phosphorothiorate
  modified_base 43: mod_base = OTHER; note = 2'-fluoroguanosine
  modified_base 48: mod_base = OTHER; note = Cytosine phosphorothiorate
  modified_base 62: mod_base = OTHER; note = Guanosine phosphorothiorate
  modified_base 73: mod_base = OTHER; note = 2'-Omethylcytosine phosphorothiorate
  modified_base 74: mod_base = OTHER; note = 2'-Omethyladenosine

SEQ ID NO: 3885 - RNA, 86 nt, synthetic construct; identical to SEQ ID NO: 3290
  source 1..86: mol_type = other RNA
  modified_base 10: mod_base = OTHER; note = 2'-Omethylguanosine
  modified_base 11: mod_base = OTHER; note = 2'-Omethylcytosine
  modified_base 12: mod_base = OTHER; note = 2'-Omethylcytosine
  modified_base 13: mod_base = OTHER; note = 2'-Omethylguanosine
  modified_base 83: mod_base = OTHER; note = 2'-Omethyladenosine

SEQ ID NO: 3886 - RNA, 75 nt, synthetic construct; identical to SEQ ID NO: 3306
  source 1..75: mol_type = other RNA
  modified_base 48: mod_base = OTHER; note = 2'-Omethylguanosine
  modified_base 51: mod_base = OTHER; note = 2'-Omethyluridine

SEQ ID NO: 3887 - RNA, 85 nt, synthetic construct; identical to SEQ ID NO: 3317
  source 1..85: mol_type = other RNA
  modified_base 1: mod_base = OTHER; note = 2'-Omethylguanosine phosphorothiorate
  modified_base 2: mod_base = OTHER; note = 2'-Omethylcytosine phosphorothiorate
  modified_base 9: mod_base = OTHER; note = 2'-fluoroguanosine
  modified_base 14: mod_base = OTHER; note = Adenosine phosphorothiorate
  modified_base 16: mod_base = OTHER; note = 2'-Omethyluridine phosphorothiorate
  modified_base 20: mod_base = OTHER; note = Uridine phosphorothiorate
  modified_base 36: mod_base = OTHER; note = 2'-Omethyladenosine
  modified_base 38: mod_base = OTHER; note = 2'-fluoroadenosine phosphorothiorate
  modified_base 41: mod_base = OTHER; note = 2'-Omethylcytosine phosphorothiorate
  modified_base 45: mod_base = OTHER; note = 2'-fluoroguanosine
  modified_base 51: mod_base = OTHER; note = 2'-fluorouridine
  modified_base 52: mod_base = OTHER; note = 2'-Omethylcytosine phosphorothiorate
  modified_base 57: mod_base = OTHER; note = Cytosine phosphorothiorate
  modified_base 59: mod_base = OTHER; note = Cytosine phosphorothiorate
  modified_base 82: mod_base = OTHER; note = 2'-Omethylguanosine
  modified_base 85: mod_base = OTHER; note = 2'-fluoroadenosine

SEQ ID NO: 3888 - RNA, 76 nt, synthetic construct
  source 1..76: mol_type = other RNA
ggtcccgtggcgcaatggatagcgcattggacttcaaattcaaaggttccgggttcgagtcccggcgggaccacca

SEQ ID NO: 3889 - RNA, 76 nt, synthetic construct; identical to SEQ ID NO: 625
  source 1..76: mol_type = other RNA
  modified_base 1: mod_base = OTHER; note = 2'-Omethylguanosine
  modified_base 2: mod_base = OTHER; note = Guanosine phosphorothiorate
  modified_base 3: mod_base = OTHER; note = 2'-Omethylcytosine
  modified_base 5: mod_base = OTHER; note = 2'-Omethylcytosine
  modified_base 6: mod_base = OTHER; note = 2'-Omethylcytosine
  modified_base 9: mod_base = OTHER; note = Guanosine phosphorothiorate
  modified_base 10: mod_base = OTHER; note = 2'-Omethylguanosine
  modified_base 11: mod_base = OTHER; note = 2'-fluorocytosine
  modified_base 12: mod_base = OTHER; note = 2'-fluoroguanosine
  modified_base 15: mod_base = OTHER; note = 2'-Omethyladenosine
  modified_base 17: mod_base = OTHER; note = Guanosine phosphorothiorate
  modified_base 18: mod_base = OTHER; note = 2'-Omethylguanosine phosphorothiorate
  modified_base 23: mod_base = OTHER; note = 2'-Omethylcytosine phosphorothiorate
  modified_base 30: mod_base = OTHER; note = 2'-Omethylguanosine
  modified_base 38: mod_base = OTHER; note = 2'-fluoroadenosine
  modified_base 39: mod_base = OTHER; note = Uridine phosphorothiorate
  modified_base 40: mod_base = OTHER; note = 2'-fluorouridine
  modified_base 41: mod_base = OTHER; note = Cytosine phosphorothiorate
  modified_base 45: mod_base = OTHER; note = 2'-Omethylguanosine
  modified_base 48: mod_base = OTHER; note = Uridine phosphorothiorate
  modified_base 49: mod_base = OTHER; note = 2'-Omethylcytosine
  modified_base 52: mod_base = OTHER; note = Guanosine phosphorothiorate
  modified_base 53: mod_base = OTHER; note = 2'-Omethylguanosine
  modified_base 54: mod_base = OTHER; note = Uridine phosphorothiorate
  modified_base 57: mod_base = OTHER; note = 2'-fluoroguanosine
  modified_base 58: mod_base = OTHER; note = 2'-fluoroadenosine
  modified_base 62: mod_base = OTHER; note = Cytosine phosphorothiorate
  modified_base 63: mod_base = OTHER; note = 2'-fluorocytosine
  modified_base 64: mod_base = OTHER; note = 2'-fluoroguanosine
  modified_base 65: mod_base = OTHER; note = 2'-Omethylguanosine
  modified_base 69: mod_base = OTHER; note = 2'-fluoroadenosine
  modified_base 70: mod_base = OTHER; note = 2'-fluoroguanosine
  modified_base 74: mod_base = OTHER; note = 2'-fluorocytosine phosphorothiorate
  modified_base 76: mod_base = OTHER; note = 2'-fluoroadenosine

SEQ ID NO: 3890 - RNA, 75 nt, synthetic construct; identical to SEQ ID NO: 3336
  source 1..75: mol_type = other RNA
  modified_base 5: mod_base = OTHER; note = 2'-Omethylguanosine phosphorothiorate
  modified_base 16: mod_base = OTHER; note = 2'-fluorocytosine
  modified_base 24: mod_base = OTHER; note = Cytosine phosphorothiorate
  modified_base 38: mod_base = OTHER; note = 2'-fluorouridine
  modified_base 47: mod_base = OTHER; note = 2'-fluorocytosine
  modified_base 50: mod_base = OTHER; note = 2'-fluoroguanosine phosphorothiorate
  modified_base 62: mod_base = OTHER; note = Cytosine phosphorothiorate
  modified_base 72: mod_base = OTHER; note = 2'-Omethylguanosine

SEQ ID NO: 3891 - RNA, 76 nt, synthetic construct; identical to SEQ ID NO: 625
  source 1..76: mol_type = other RNA
  modified_base 1: mod_base = OTHER; note = 2'-Omethylguanosine
  modified_base 2: mod_base = OTHER; note = 2'-Omethylguanosine
  modified_base 3: mod_base = OTHER; note = 2'-Omethylcytosine
  modified_base 4: mod_base = OTHER; note = 2'-Omethyluridine
  modified_base 5: mod_base = OTHER; note = 2'-Omethylcytosine
  modified_base 6: mod_base = OTHER; note = 2'-Omethylcytosine phosphorothiorate
  modified_base 14: mod_base = OTHER; note = 2'-Omethyladenosine
  modified_base 16: mod_base = OTHER; note = 2'-fluorouridine phosphorothiorate
  modified_base 17: mod_base = OTHER; note = 2'-fluoroguanosine phosphorothiorate
  modified_base 18: mod_base = OTHER; note = 2'-Omethylguanosine
  modified_base 19: mod_base = OTHER; note = 2'-fluoroadenosine phosphorothiorate
  modified_base 20: mod_base = OTHER; note = 2'-Omethyluridine
  modified_base 21: mod_base = OTHER; note = 2'-fluoroadenosine phosphorothiorate
  modified_base 23: mod_base = OTHER; note = 2'-Omethylcytosine
  modified_base 26: mod_base = OTHER; note = Adenosine phosphorothiorate
  modified_base 29: mod_base = OTHER; note = 2'-Omethylguanosine
  modified_base 30: mod_base = OTHER; note = 2'-Omethylguanosine phosphorothiorate
  modified_base 31: mod_base = OTHER; note = 2'-Omethyladenosine phosphorothiorate
  modified_base 33: mod_base = OTHER; note = 2'-fluorouridine
  modified_base 37: mod_base = OTHER; note = Adenosine phosphorothiorate
  modified_base 38: mod_base = OTHER; note = Adenosine phosphorothiorate
  modified_base 41: mod_base = OTHER; note = 2'-Omethylcytosine
  modified_base 44: mod_base = OTHER; note = 2'-Omethyladenosine
  modified_base 45: mod_base = OTHER; note = 2'-Omethylguanosine
  modified_base 48: mod_base = OTHER; note = 2'-Omethyluridine phosphorothiorate
  modified_base 50: mod_base = OTHER; note = 2'-Omethylcytosine
  modified_base 52: mod_base = OTHER; note = 2'-Omethylguanosine
  modified_base 53: mod_base = OTHER; note = 2'-Omethylguanosine phosphorothiorate
  modified_base 55: mod_base = OTHER; note = Uridine phosphorothiorate
  modified_base 57: mod_base = OTHER; note = 2'-Omethylguanosine phosphorothiorate
  modified_base 59: mod_base = OTHER; note = 2'-Omethylguanosine
  modified_base 60: mod_base = OTHER; note = 2'-Omethyluridine phosphorothiorate
  modified_base 61: mod_base = OTHER; note = 2'-Omethylcytosine phosphorothiorate
  modified_base 62: mod_base = OTHER; note = 2'-Omethylcytosine
  modified_base 63: mod_base = OTHER; note = 2'-Omethylcytosine phosphorothiorate
  modified_base 65: mod_base = OTHER; note = 2'-Omethylguanosine phosphorothiorate
  modified_base 66: mod_base = OTHER; note = 2'-Omethylcytosine
  modified_base 67: mod_base = OTHER; note = 2'-Omethylguanosine phosphorothiorate
  modified_base 68: mod_base = OTHER; note = 2'-Omethylguanosine
  modified_base 69: mod_base = OTHER; note = 2'-Omethyladenosine
  modified_base 73: mod_base = OTHER; note = 2'-fluoroguanosine phosphorothiorate
  modified_base 74: mod_base = OTHER; note = 2'-fluorocytosine phosphorothiorate
  modified_base 75: mod_base = OTHER; note = Cytosine phosphorothiorate
  modified_base 76: mod_base = OTHER; note = 2'-Omethyladenosine

SEQ ID NO: 3892 - RNA, 75 nt, synthetic construct; identical to SEQ ID NO: 3306
  source 1..75: mol_type = other RNA
  modified_base 1: mod_base = OTHER; note = 2'-Omethylguanosine phosphorothiorate
  modified_base 2: mod_base = OTHER; note = 2'-Omethyladenosine phosphorothiorate
  modified_base 15: mod_base = OTHER; note = Adenosine phosphorothiorate
  modified_base 32: mod_base = OTHER; note = Uridine phosphorothiorate
  modified_base 33: mod_base = OTHER; note = 2'-fluorocytosine
  modified_base 73: mod_base = OTHER; note = 2'-fluorocytosine phosphorothiorate
  modified_base 74: mod_base = OTHER; note = 2'-Omethylcytosine phosphorothiorate
  modified_base 75: mod_base = OTHER; note = 2'-Omethyladenosine

SEQ ID NO: 3893 - RNA, 76 nt, synthetic construct; identical to SEQ ID NO: 625
  source 1..76: mol_type = other RNA
  modified_base 1: mod_base = OTHER; note = 2'-fluoroguanosine
  modified_base 2: mod_base = OTHER; note = 2'-fluoroguanosine
  modified_base 3: mod_base = OTHER; note = 2'-fluorocytosine
  modified_base 6: mod_base = OTHER; note = 2'-Omethylcytosine
  modified_base 8: mod_base = OTHER; note = Uridine phosphorothiorate
  modified_base 10: mod_base = OTHER; note = 2'-fluoroguanosine
  modified_base 11: mod_base = OTHER; note = 2'-fluorocytosine
  modified_base 13: mod_base = OTHER; note = 2'-fluorocytosine
  modified_base 16: mod_base = OTHER; note = 2'-fluorouridine
  modified_base 18: mod_base = OTHER; note = 2'-fluoroguanosine
  modified_base 20: mod_base = OTHER; note = 2'-Omethyluridine
  modified_base 21: mod_base = OTHER; note = Adenosine phosphorothiorate
  modified_base 22: mod_base = OTHER; note = 2'-fluoroguanosine
  modified_base 23: mod_base = OTHER; note = 2'-fluorocytosine
  modified_base 24: mod_base = OTHER; note = 2'-fluoroguanosine
  modified_base 28: mod_base = OTHER; note = 2'-fluorouridine
  modified_base 30: mod_base = OTHER; note = 2'-Omethylguanosine
  modified_base 36: mod_base = OTHER; note = Adenosine phosphorothiorate
  modified_base 45: mod_base = OTHER; note = Guanosine phosphorothiorate
  modified_base 46: mod_base = OTHER; note = 2'-Omethylguanosine
  modified_base 47: mod_base = OTHER; note = 2'-fluorouridine
  modified_base 49: mod_base = OTHER; note = 2'-fluorocytosine
  modified_base 51: mod_base = OTHER; note = 2'-Omethylguanosine
  modified_base 52: mod_base = OTHER; note = 2'-Omethylguanosine
  modified_base 55: mod_base = OTHER; note = Uridine phosphorothiorate
  modified_base 59: mod_base = OTHER; note = Guanosine phosphorothiorate
  modified_base 60: mod_base = OTHER; note = 2'-Omethyluridine
  modified_base 61: mod_base = OTHER; note = Cytosine phosphorothiorate
  modified_base 62: mod_base = OTHER; note = 2'-Omethylcytosine
  modified_base 63: mod_base = OTHER; note = Cytosine phosphorothiorate
  modified_base 64: mod_base = OTHER; note = 2'-fluoroguanosine
  modified_base 66: mod_base = OTHER; note = Cytosine phosphorothiorate
  modified_base 67: mod_base = OTHER; note = 2'-fluoroguanosine
  modified_base 69: mod_base = OTHER; note = 2'-Omethyladenosine
  modified_base 72: mod_base = OTHER; note = Cytosine phosphorothiorate
  modified_base 73: mod_base = OTHER; note = 2'-Omethylguanosine phosphorothiorate
  modified_base 74: mod_base = OTHER; note = 2'-fluorocytosine
  modified_base 75: mod_base = OTHER; note = Cytosine phosphorothiorate
  modified_base 76: mod_base = OTHER; note = 2'-fluoroadenosine

SEQ ID NO: 3894 - RNA, 76 nt, synthetic construct; identical to SEQ ID NO: 625
  source 1..76: mol_type = other RNA
  modified_base 1: mod_base = OTHER; note = 2'-Omethylguanosine phosphorothiorate
  modified_base 2: mod_base = OTHER; note = 2'-Omethylguanosine
  modified_base 17: mod_base = OTHER; note = 2'-Omethylguanosine
  modified_base 33: mod_base = OTHER; note = 2'-fluorouridine
  modified_base 35: mod_base = OTHER; note = Cytosine phosphorothiorate
  modified_base 37: mod_base = OTHER; note = Adenosine phosphorothiorate
  modified_base 38: mod_base = OTHER; note = Adenosine phosphorothiorate
  modified_base 52: mod_base = OTHER; note = 2'-fluoroguanosine
  modified_base 65: mod_base = OTHER; note = 2'-Omethylguanosine
  modified_base 73: mod_base = OTHER; note = 2'-Omethylguanosine
  modified_base 75: mod_base = OTHER; note = 2'-fluorocytosine phosphorothiorate

SEQ ID NO: 3895 - RNA, 76 nt, synthetic construct; identical to SEQ ID NO: 3490
  source 1..76: mol_type = other RNA
  modified_base 1: mod_base = OTHER; note = 2'-Omethylguanosine
  modified_base 2: mod_base = OTHER; note = 2'-Omethylguanosine
  modified_base 3: mod_base = OTHER; note = 2'-Omethylcytosine
  modified_base 4: mod_base = OTHER; note = 2'-Omethyluridine
  modified_base 5: mod_base = OTHER; note = 2'-Omethylcytosine
  modified_base 6: mod_base = OTHER; note = 2'-Omethylcytosine
  modified_base 14: mod_base = OTHER; note = 2'-Omethyladenosine
  modified_base 15: mod_base = OTHER; note = 2'-Omethyladenosine
  modified_base 16: mod_base = OTHER; note = 2'-Omethyluridine
  modified_base 17: mod_base = OTHER; note = 2'-Omethylguanosine
  modified_base 18: mod_base = OTHER; note = 2'-Omethylguanosine
  modified_base 20: mod_base = OTHER; note = 2'-Omethyluridine
  modified_base 25: mod_base = OTHER; note = 2'-Omethylcytosine
  modified_base 41: mod_base = OTHER; note = 2'-Omethylcytosine
  modified_base 42: mod_base = OTHER; note = 2'-Omethyladenosine
  modified_base 43: mod_base = OTHER; note = 2'-Omethyladenosine
  modified_base 44: mod_base = OTHER; note = 2'-Omethyladenosine
  modified_base 49: mod_base = OTHER; note = 2'-Omethylguanosine
  modified_base 50: mod_base = OTHER; note = 2'-Omethylcytosine
  modified_base 52: mod_base = OTHER; note = 2'-Omethylguanosine
  modified_base 54: mod_base = OTHER; note = 2'-Omethyluridine
  modified_base 55: mod_base = OTHER; note = Uridine phosphorothiorate
  modified_base 56: mod_base = OTHER; note = 2'-Omethylcytosine
  modified_base 57: mod_base = OTHER; note = 2'-fluoroguanosine
  modified_base 59: mod_base = OTHER; note = 2'-Omethylguanosine
  modified_base 61: mod_base = OTHER; note = 2'-Omethylcytosine
  modified_base 65: mod_base = OTHER; note = 2'-Omethylcytosine
  modified_base 73: mod_base = OTHER; note = 2'-Omethylguanosine

SEQ ID NO: 3896 - RNA, 76 nt, synthetic construct; identical to SEQ ID NO: 625
  source 1..76: mol_type = other RNA
  modified_base 1: mod_base = OTHER; note = 2'-Omethylguanosine
  modified_base 2: mod_base = OTHER; note = 2'-Omethylguanosine
  modified_base 3: mod_base = OTHER; note = 2'-Omethylcytosine
  modified_base 4: mod_base = OTHER; note = 2'-Omethyluridine
  modified_base 5: mod_base = OTHER; note = 2'-Omethylcytosine
  modified_base 6: mod_base = OTHER; note = 2'-Omethylcytosine
  modified_base 7: mod_base = OTHER; note = Guanosine phosphorothiorate
  modified_base 10: mod_base = OTHER; note = 2'-Omethylguanosine
  modified_base 11: mod_base = OTHER; note = 2'-fluorocytosine
  modified_base 12: mod_base = OTHER; note = 2'-Omethylguanosine
  modified_base 13: mod_base = OTHER; note = 2'-Omethylcytosine
  modified_base 15: mod_base = OTHER; note = 2'-fluoroadenosine
  modified_base 16: mod_base = OTHER; note = 2'-fluorouridine
  modified_base 17: mod_base = OTHER; note = 2'-Omethylguanosine
  modified_base 18: mod_base = OTHER; note = 2'-fluoroguanosine phosphorothiorate
  modified_base 19: mod_base = OTHER; note = Adenosine phosphorothiorate
  modified_base 20: mod_base = OTHER; note = Uridine phosphorothiorate
  modified_base 21: mod_base = OTHER; note = 2'-fluoroadenosine phosphorothiorate
  modified_base 22: mod_base = OTHER; note = 2'-Omethylguanosine
  modified_base 23: mod_base = OTHER; note = 2'-Omethylcytosine
  modified_base 24: mod_base = OTHER; note = 2'-Omethylguanosine
  modified_base 25: mod_base = OTHER; note = 2'-Omethylcytosine
  modified_base 28: mod_base = OTHER; note = 2'-Omethyluridine phosphorothiorate
  modified_base 29: mod_base = OTHER; note = 2'-fluoroguanosine phosphorothiorate
  modified_base 30: mod_base = OTHER; note = 2'-Omethylguanosine phosphorothiorate
  modified_base 31: mod_base = OTHER; note = 2'-fluoroadenosine
  modified_base 33: mod_base = OTHER; note = 2'-fluorouridine
  modified_base 34: mod_base = OTHER; note = 2'-Omethyluridine phosphorothiorate
  modified_base 35: mod_base = OTHER; note = Cytosine phosphorothiorate
  modified_base 36: mod_base = OTHER; note = 2'-Omethyladenosine phosphorothiorate
  modified_base 37: mod_base = OTHER; note = Adenosine phosphorothiorate
  modified_base 38: mod_base = OTHER; note = Adenosine phosphorothiorate
  modified_base 39: mod_base = OTHER; note = 2'-Omethyluridine phosphorothiorate
  modified_base 40: mod_base = OTHER; note = 2'-fluorouridine
  modified_base 41: mod_base = OTHER; note = 2'-fluorocytosine
  modified_base 44: mod_base = OTHER; note = 2'-Omethyladenosine
  modified_base 48: mod_base = OTHER; note = 2'-fluorouridine phosphorothiorate
  modified_base 50: mod_base = OTHER; note = 2'-Omethylcytosine
  modified_base 51: mod_base = OTHER; note = 2'-Omethylguanosine
  modified_base 52: mod_base = OTHER; note = 2'-Omethylguanosine
  modified_base 53: mod_base = OTHER; note = 2'-fluoroguanosine
  modified_base 54: mod_base = OTHER; note = 2'-fluorouridine
  modified_base 55: mod_base = OTHER; note = Uridine phosphorothiorate
  modified_base 56: mod_base = OTHER; note = Cytosine phosphorothiorate
  modified_base 57: mod_base = OTHER; note = 2'-Omethylguanosine
  modified_base 59: mod_base = OTHER; note = 2'-Omethylguanosine
  modified_base 61: mod_base = OTHER; note = 2'-Omethylcytosine phosphorothiorate
  modified_base 62: mod_base = OTHER; note = 2'-Omethylcytosine
  modified_base 63: mod_base = OTHER; note = 2'-fluorocytosine
  modified_base 64: mod_base = OTHER; note = 2'-Omethylguanosine
  modified_base 65: mod_base = OTHER; note = 2'-Omethylguanosine
  modified_base 66: mod_base = OTHER; note = 2'-fluorocytosine
  modified_base 67: mod_base = OTHER; note = 2'-Omethylguanosine phosphorothiorate
  modified_base 68: mod_base = OTHER; note = 2'-fluoroguanosine phosphorothiorate
  modified_base 69: mod_base = OTHER; note = 2'-fluoroadenosine phosphorothiorate
  modified_base 72: mod_base = OTHER; note = 2'-Omethylcytosine
  modified_base 73: mod_base = OTHER; note = 2'-Omethylguanosine
  modified_base 74: mod_base = OTHER; note = 2'-fluorocytosine phosphorothiorate
  modified_base 75: mod_base = OTHER; note = 2'-fluorocytosine phosphorothiorate
  modified_base 76: mod_base = OTHER; note = 2'-fluoroadenosine

SEQ ID NO: 3897 - RNA, 76 nt, synthetic construct; identical to SEQ ID NO: 625
  source 1..76: mol_type = other RNA
  modified_base 1: mod_base = OTHER; note = 2'-Omethylguanosine phosphorothiorate
  modified_base 2: mod_base = OTHER; note = 2'-Omethylguanosine
  modified_base 18: mod_base = OTHER; note = 2'-Omethylguanosine
  modified_base 23: mod_base = OTHER; note = 2'-Omethylcytosine
  modified_base 33: mod_base = OTHER; note = 2'-fluorouridine
  modified_base 35: mod_base = OTHER; note = Cytosine phosphorothiorate
  modified_base 37: mod_base = OTHER; note = Adenosine phosphorothiorate
  modified_base 38: mod_base = OTHER; note = Adenosine phosphorothiorate
  modified_base 52: mod_base = OTHER; note = 2'-Omethylguanosine
  modified_base 57: mod_base = OTHER; note = 2'-Omethylguanosine
  modified_base 62: mod_base = OTHER; note = 2'-Omethylcytosine
  modified_base 73: mod_base = OTHER; note = 2'-Omethylguanosine
  modified_base 75: mod_base = OTHER; note = 2'-fluorocytosine phosphorothiorate

SEQ ID NO: 3898 - RNA, 74 nt, synthetic construct; identical to SEQ ID NO: 3293
  source 1..74: mol_type = other RNA
  modified_base 1: mod_base = OTHER; note = 2'-fluoroadenosine
  modified_base 2: mod_base = OTHER; note = Cytosine phosphorothiorate
  modified_base 3: mod_base = OTHER; note = Cytosine phosphorothiorate
  modified_base 4: mod_base = OTHER; note = Uridine phosphorothiorate
  modified_base 6: mod_base = OTHER; note = 2'-fluoroguanosine
  modified_base 8: mod_base = OTHER; note = Guanosine phosphorothiorate
  modified_base 9: mod_base = OTHER; note = 2'-fluoroguanosine
  modified_base 11: mod_base = OTHER; note = 2'-Omethylguanosine phosphorothiorate
  modified_base 24: mod_base = OTHER; note = 2'-fluoroguanosine
  modified_base 27: mod_base = OTHER; note = 2'-Omethyluridine
  modified_base 40: mod_base = OTHER; note = Guanosine phosphorothiorate
  modified_base 43: mod_base = OTHER; note = 2'-fluoroguanosine
  modified_base 44: mod_base = OTHER; note = Guanosine phosphorothiorate
  modified_base 46: mod_base = OTHER; note = Uridine phosphorothiorate
  modified_base 48: mod_base = OTHER; note = 2'-fluorocytosine
  modified_base 51: mod_base = OTHER; note = 2'-fluoroguanosine
  modified_base 58: mod_base = OTHER; note = 2'-fluorouridine phosphorothiorate
  modified_base 72: mod_base = OTHER; note = 2'-fluorocytosine
  modified_base 73: mod_base = OTHER; note = 2'-Omethylcytosine phosphorothiorate

SEQ ID NO: 3899 - RNA, 76 nt, synthetic construct; identical to SEQ ID NO: 3295
  source 1..76: mol_type = other RNA
  modified_base 1: mod_base = OTHER; note = 2'-Omethylcytosine
  modified_base 2: mod_base = OTHER; note = 2'-fluorocytosine
  modified_base 4: mod_base = OTHER; note = 2'-Omethyluridine
  modified_base 10: mod_base = OTHER; note = 2'-fluoroguanosine phosphorothiorate
  modified_base 13: mod_base = OTHER; note = 2'-Omethylcytosine phosphorothiorate
  modified_base 26: mod_base = OTHER; note = Guanosine phosphorothiorate
  modified_base 28: mod_base = OTHER; note = 2'-Omethyladenosine
  modified_base 43: mod_base = OTHER; note = 2'-Omethyluridine
  modified_base 52: mod_base = OTHER; note = 2'-Omethylguanosine
  modified_base 54: mod_base = OTHER; note = Uridine phosphorothiorate
  modified_base 64: mod_base = OTHER; note = Guanosine phosphorothiorate
  modified_base 74: mod_base = OTHER; note = Cytosine phosphorothiorate

SEQ ID NO: 3900 - RNA, 85 nt, synthetic construct; identical to SEQ ID NO: 3297
  source 1..85: mol_type = other RNA
  modified_base 1: mod_base = OTHER; note = 2'-Omethylguanosine
  modified_base 14: mod_base = OTHER; note = 2'-Omethyladenosine
  modified_base 15: mod_base = OTHER; note = 2'-Omethylguanosine
  modified_base 16: mod_base = OTHER; note = 2'-Omethyluridine
  modified_base 17: mod_base = OTHER; note = 2'-Omethylguanosine
  modified_base 18: mod_base = OTHER; note = 2'-Omethylguanosine
  modified_base 20: mod_base = OTHER; note = 2'-Omethyluridine
  modified_base 59: mod_base = OTHER; note = 2'-Omethylcytosine
  modified_base 61: mod_base = OTHER; note = 2'-Omethylguanosine
  modified_base 82: mod_base = OTHER; note = 2'-Omethylguanosine

SEQ ID NO: 3901 - RNA, 76 nt, synthetic construct; identical to SEQ ID NO: 625
  source 1..76: mol_type = other RNA
  modified_base 2: mod_base = OTHER; note = Guanosine phosphorothiorate
  modified_base 3: mod_base = OTHER; note = 2'-fluorocytosine
  modified_base 4: mod_base = OTHER; note = 2'-Omethyluridine
  modified_base 10: mod_base = OTHER; note = 2'-Omethylguanosine
  modified_base 11: mod_base = OTHER; note = Cytosine phosphorothiorate
  modified_base 12: mod_base = OTHER; note = 2'-fluoroguanosine
  modified_base 14: mod_base = OTHER; note = 2'-Omethyladenosine
  modified_base 17: mod_base = OTHER; note = Guanosine phosphorothiorate
  modified_base 19: mod_base = OTHER; note = Adenosine phosphorothiorate
  modified_base 20: mod_base = OTHER; note = 2'-Omethyluridine
  modified_base 23: mod_base = OTHER; note = 2'-Omethylcytosine
  modified_base 25: mod_base = OTHER; note = 2'-Omethylcytosine
  modified_base 29: mod_base = OTHER; note = 2'-fluoroguanosine phosphorothiorate
  modified_base 30: mod_base = OTHER; note = 2'-Omethylguanosine
  modified_base 31: mod_base = OTHER; note = 2'-Omethyladenosine
  modified_base 34: mod_base = OTHER; note = 2'-fluorouridine
  modified_base 37: mod_base = OTHER; note = Adenosine phosphorothiorate
  modified_base 44: mod_base = OTHER; note = 2'-fluoroadenosine phosphorothiorate
  modified_base 45: mod_base = OTHER; note = 2'-Omethylguanosine
  modified_base 50: mod_base = OTHER; note = Cytosine phosphorothiorate
  modified_base 51: mod_base = OTHER; note = 2'-Omethylguanosine
  modified_base 52: mod_base = OTHER; note = 2'-Omethylguanosine
  modified_base 54: mod_base = OTHER; note = Uridine phosphorothiorate
  modified_base 55: mod_base = OTHER; note = Uridine phosphorothiorate
  modified_base 60: mod_base = OTHER; note = 2'-fluorouridine
  modified_base 62: mod_base = OTHER; note = Cytosine phosphorothiorate
  modified_base 64: mod_base = OTHER; note = 2'-fluoroguanosine
  modified_base 65: mod_base = OTHER; note = Guanosine phosphorothiorate
  modified_base 72: mod_base = OTHER; note = 2'-fluorocytosine
  modified_base 73: mod_base = OTHER; note = 2'-Omethylguanosine
  modified_base 74: mod_base = OTHER; note = 2'-fluorocytosine
  modified_base 75: mod_base = OTHER; note = 2'-Omethylcytosine
  modified_base 76: mod_base = OTHER; note = 2'-fluoroadenosine

SEQ ID NO: 3902 - RNA, 76 nt, synthetic construct; identical to SEQ ID NO: 625
  source 1..76: mol_type = other RNA
  modified_base 1: mod_base = OTHER; note = 2'-Omethylguanosine phosphorothiorate
  modified_base 2: mod_base = OTHER; note = 2'-Omethylguanosine
  modified_base 13: mod_base = OTHER; note = 2'-Omethylcytosine
  modified_base 33: mod_base = OTHER; note = 2'-fluorouridine
  modified_base 35: mod_base = OTHER; note = Cytosine phosphorothiorate
  modified_base 37: mod_base = OTHER; note = Adenosine phosphorothiorate
  modified_base 52: mod_base = OTHER; note = 2'-Omethylguanosine
  modified_base 57: mod_base = OTHER; note = 2'-Omethylguanosine
  modified_base 73: mod_base = OTHER; note = 2'-Omethylguanosine
  modified_base 75: mod_base = OTHER; note = 2'-fluorocytosine phosphorothiorate
  modified_base 76: mod_base = OTHER; note = 2'-Omethyladenosine

SEQ ID NO: 3903 - RNA, 76 nt, synthetic construct; identical to SEQ ID NO: 3318
  source 1..76: mol_type = other RNA
  modified_base 1: mod_base = OTHER; note = 2'-Omethylcytosine
  modified_base 14: mod_base = OTHER; note = 2'-Omethyladenosine
  modified_base 15: mod_base = OTHER; note = 2'-Omethylguanosine
  modified_base 16: mod_base = OTHER; note = 2'-Omethyluridine
  modified_base 18: mod_base = OTHER; note = 2'-Omethylguanosine
  modified_base 19: mod_base = OTHER; note = 2'-Omethylguanosine
  modified_base 20: mod_base = OTHER; note = Uridine phosphorothiorate
  modified_base 21: mod_base = OTHER; note = Adenosine phosphorothiorate
  modified_base 33: mod_base = OTHER; note = 2'-fluorouridine
  modified_base 34: mod_base = OTHER; note = 2'-Omethylcytosine
  modified_base 35: mod_base = OTHER; note = Uridine phosphorothiorate
  modified_base 37: mod_base = OTHER; note = Guanosine phosphorothiorate
  modified_base 38: mod_base = OTHER; note = Adenosine phosphorothiorate
  modified_base 41: mod_base = OTHER; note = 2'-Omethylcytosine
  modified_base 42: mod_base = OTHER; note = 2'-Omethyluridine
  modified_base 43: mod_base = OTHER; note = 2'-Omethyluridine
  modified_base 44: mod_base = OTHER; note = 2'-Omethyladenosine
  modified_base 50: mod_base = OTHER; note = 2'-Omethylcytosine
  modified_base 52: mod_base = OTHER; note = 2'-Omethylguanosine
  modified_base 73: mod_base = OTHER; note = 2'-Omethyladenosine

SEQ ID NO: 3904 - RNA, 75 nt, synthetic construct; identical to SEQ ID NO: 3336
  source 1..75: mol_type = other RNA
  modified_base 1: mod_base = OTHER; note = Cytosine phosphorothiorate
  modified_base 5: mod_base = OTHER; note = 2'-fluoroguanosine
  modified_base 11: mod_base = OTHER; note = Uridine phosphorothiorate
  modified_base 14: mod_base = OTHER; note = Guanosine phosphorothiorate
  modified_base 15: mod_base = OTHER; note = 2'-fluorouridine
  modified_base 19: mod_base = OTHER; note = 2'-fluorouridine
  modified_base 20: mod_base = OTHER; note = 2'-Omethyladenosine phosphorothiorate
  modified_base 23: mod_base = OTHER; note = 2'-fluoroguanosine
  modified_base 26: mod_base = OTHER; note = Uridine phosphorothiorate
  modified_base 28: mod_base = OTHER; note = 2'-Omethyladenosine phosphorothiorate
  modified_base 35: mod_base = OTHER; note = 2'-Omethyladenosine
  modified_base 39: mod_base = OTHER; note = 2'-fluorocytosine
  modified_base 41: mod_base = OTHER; note = 2'-Omethylguanosine phosphorothiorate
  modified_base 46: mod_base = OTHER; note = 2'-fluorouridine
  modified_base 48: mod_base = OTHER; note = 2'-fluorocytosine
  modified_base 49: mod_base = OTHER; note = 2'-fluoroadenosine
  modified_base 60: mod_base = OTHER; note = 2'-fluorocytosine
  modified_base 62: mod_base = OTHER; note = 2'-fluorocytosine
  modified_base 72: mod_base = OTHER; note = 2'-Omethylguanosine
  modified_base 73: mod_base = OTHER; note = Cytosine phosphorothiorate
  modified_base 74: mod_base = OTHER; note = Cytosine phosphorothiorate

SEQ ID NO: 3905 - RNA, 76 nt, synthetic construct; identical to SEQ ID NO: 625
  source 1..76: mol_type = other RNA
  modified_base 1: mod_base = OTHER; note = 2'-Omethylguanosine phosphorothiorate
  modified_base 2: mod_base = OTHER; note = 2'-Omethylguanosine
  modified_base 3: mod_base = OTHER; note = 2'-Omethylcytosine
  modified_base 4: mod_base = OTHER; note = 2'-Omethyluridine
  modified_base 5: mod_base = OTHER; note = 2'-Omethylcytosine
  modified_base 6: mod_base = OTHER; note = 2'-Omethylcytosine
  modified_base 10: mod_base = OTHER; note = 2'-Omethylguanosine
  modified_base 11: mod_base = OTHER; note = 2'-Omethylcytosine
  modified_base 12: mod_base = OTHER; note = 2'-Omethylguanosine
  modified_base 13: mod_base = OTHER; note = 2'-Omethylcytosine
  modified_base 14: mod_base = OTHER; note = 2'-Omethyladenosine
  modified_base 15: mod_base = OTHER; note = 2'-fluoroadenosine
  modified_base 16: mod_base = OTHER; note = 2'-Omethyluridine
  modified_base 17: mod_base = OTHER; note = 2'-Omethylguanosine
  modified_base 18: mod_base = OTHER; note = 2'-Omethylguanosine
  modified_base 19: mod_base = OTHER; note = 2'-fluoroadenosine
  modified_base 20: mod_base = OTHER; note = 2'-Omethyluridine
  modified_base 21: mod_base = OTHER; note = 2'-fluoroadenosine
  modified_base 22: mod_base = OTHER; note = 2'-Omethylguanosine
  modified_base 23: mod_base = OTHER; note = 2'-Omethylcytosine
  modified_base 24: mod_base = OTHER; note = 2'-Omethylguanosine
  modified_base 25: mod_base = OTHER; note = 2'-Omethylcytosine
  modified_base 38: mod_base = OTHER; note = Adenosine phosphorothiorate
  modified_base 39: mod_base = OTHER; note = Uridine phosphorothiorate
  modified_base 40: mod_base = OTHER; note = 2'-fluorouridine
  modified_base 43: mod_base = OTHER; note = 2'-Omethyladenosine
  modified_base 44: mod_base = OTHER; note = 2'-Omethyladenosine
  modified_base 45: mod_base = OTHER; note = 2'-Omethylguanosine
  modified_base 46: mod_base = OTHER; note = 2'-fluoroguanosine
  modified_base 48: mod_base = OTHER; note = 2'-fluorouridine
  modified_base 49: mod_base = OTHER; note = 2'-Omethylcytosine
  modified_base 50: mod_base = OTHER; note = 2'-Omethylcytosine
  modified_base 51: mod_base = OTHER; note = 2'-Omethylguanosine
  modified_base 52: mod_base = OTHER; note = 2'-Omethylguanosine
  modified_base 53: mod_base = OTHER; note = 2'-Omethylguanosine
  modified_base 54: mod_base = OTHER; note = 2'-Omethyluridine
  modified_base 61: mod_base = OTHER; note = 2'-Omethylcytosine
  modified_base 62: mod_base = OTHER; note = 2'-Omethylcytosine
  modified_base 63: mod_base = OTHER; note = 2'-fluorocytosine
  modified_base 64: mod_base = OTHER; note = 2'-Omethylguanosine
  modified_base 65: mod_base = OTHER; note = 2'-Omethylguanosine
  modified_base 66: mod_base = OTHER; note = 2'-Omethylcytosine
  modified_base 67: mod_base = OTHER; note = 2'-Omethylguanosine
  modified_base 68: mod_base = OTHER; note = 2'-Omethylguanosine

SEQ ID NO: 3906 - RNA, 76 nt, synthetic construct; identical to SEQ ID NO: 625
  source 1..76: mol_type = other RNA
  modified_base 1: mod_base = OTHER; note = 2'-Omethylguanosine
  modified_base 10: mod_base = OTHER; note = 2'-Omethylguanosine phosphorothiorate
  modified_base 11: mod_base = OTHER; note = Cytosine phosphorothiorate
  modified_base 13: mod_base = OTHER; note = 2'-fluorocytosine
  modified_base 15: mod_base = OTHER; note = 2'-Omethyladenosine
  modified_base 17: mod_base = OTHER; note = 2'-Omethylguanosine
  modified_base 18: mod_base = OTHER; note = 2'-Omethylguanosine
  modified_base 20: mod_base = OTHER; note = 2'-fluorouridine phosphorothiorate
  modified_base 23: mod_base = OTHER; note = 2'-fluorocytosine
  modified_base 24: mod_base = OTHER; note = 2'-fluoroguanosine phosphorothiorate
  modified_base 34: mod_base = OTHER; note = Uridine phosphorothiorate
  modified_base 39: mod_base = OTHER; note = 2'-fluorouridine
  modified_base 41: mod_base = OTHER; note = Cytosine phosphorothiorate
  modified_base 43: mod_base = OTHER; note = 2'-fluoroadenosine
  modified_base 44: mod_base = OTHER; note = 2'-Omethyladenosine
  modified_base 48: mod_base = OTHER; note = Uridine phosphorothiorate
  modified_base 49: mod_base = OTHER; note = 2'-Omethylcytosine
  modified_base 50: mod_base = OTHER; note = Cytosine phosphorothiorate
  modified_base 51: mod_base = OTHER; note = 2'-Omethylguanosine
  modified_base 58: mod_base = OTHER; note = Adenosine phosphorothiorate
  modified_base 59: mod_base = OTHER; note = 2'-Omethylguanosine phosphorothiorate
  modified_base 61: mod_base = OTHER; note = Cytosine phosphorothiorate
  modified_base 62: mod_base = OTHER; note = 2'-Omethylcytosine
  modified_base 63: mod_base = OTHER; note = 2'-Omethylcytosine
  modified_base 64: mod_base = OTHER; note = 2'-Omethylguanosine
  modified_base 66: mod_base = OTHER; note = 2'-fluorocytosine phosphorothiorate
  modified_base 71: mod_base = OTHER; note = 2'-fluorouridine
  modified_base 72: mod_base = OTHER; note = 2'-fluorocytosine
  modified_base 76: mod_base = OTHER; note = 2'-fluoroadenosine

SEQ ID NO: 3907 - RNA, 75 nt, synthetic construct; identical to SEQ ID NO: 3306
  source 1..75: mol_type = other RNA
  modified_base 1: mod_base = OTHER; note = 2'-Omethylguanosine phosphorothiorate
  modified_base 2: mod_base = OTHER; note = 2'-Omethyladenosine phosphorothiorate
  modified_base 3: mod_base = OTHER; note = 2'-Omethylcytosine
  modified_base 4: mod_base = OTHER; note = 2'-Omethylcytosine
  modified_base 5: mod_base = OTHER; note = 2'-Omethyluridine
  modified_base 6: mod_base = OTHER; note = 2'-Omethylcytosine
  modified_base 10: mod_base = OTHER; note = 2'-Omethylguanosine
  modified_base 11: mod_base = OTHER; note = 2'-Omethylcytosine
  modified_base 12: mod_base = OTHER; note = 2'-Omethylguanosine
  modified_base 13: mod_base = OTHER; note = 2'-Omethylcytosine
  modified_base 17: mod_base = OTHER; note = 2'-Omethylguanosine
  modified_base 18: mod_base = OTHER; note = 2'-Omethylguanosine
  modified_base 21: mod_base = OTHER; note = 2'-Omethylguanosine
  modified_base 22: mod_base = OTHER; note = 2'-Omethylcytosine
  modified_base 23: mod_base = OTHER; note = 2'-Omethylguanosine
  modified_base 24: mod_base = OTHER; note = 2'-Omethylcytosine
  modified_base 32: mod_base = OTHER; note = 2'-fluorouridine
  modified_base 34: mod_base = OTHER; note = Uridine phosphorothiorate
  modified_base 36: mod_base = OTHER; note = Guanosine phosphorothiorate
  modified_base 37: mod_base = OTHER; note = Adenosine phosphorothiorate
  modified_base 40: mod_base = OTHER; note = 2'-fluoroadenosine
  modified_base 41: mod_base = OTHER; note = 2'-Omethylguanosine
  modified_base 42: mod_base = OTHER; note = 2'-Omethyladenosine
  modified_base 43: mod_base = OTHER; note = 2'-fluoroadenosine
  modified_base 48: mod_base = OTHER; note = 2'-Omethylguanosine
  modified_base 49: mod_base = OTHER; note = 2'-Omethylcytosine
  modified_base 50: mod_base = OTHER; note = 2'-Omethylguanosine
  modified_base 51: mod_base = OTHER; note = 2'-Omethyluridine
  modified_base 52: mod_base = OTHER; note = 2'-Omethylguanosine
  modified_base 53: mod_base = OTHER; note = Uridine phosphorothiorate
  modified_base 54: mod_base = OTHER; note = Uridine phosphorothiorate
  modified_base 60: mod_base = OTHER; note = 2'-Omethylcytosine
  modified_base 61: mod_base = OTHER; note = 2'-Omethyladenosine
  modified_base 62: mod_base = OTHER; note = 2'-fluorocytosine
  modified_base 63: mod_base = OTHER; note = 2'-Omethylguanosine
  modified_base 64: mod_base = OTHER; note = 2'-Omethyluridine
  modified_base 65: mod_base = OTHER; note = 2'-Omethylcytosine
  modified_base 66: mod_base = OTHER; note = 2'-Omethylguanosine
  modified_base 67: mod_base = OTHER; note = 2'-Omethylguanosine
  modified_base 72: mod_base = OTHER; note = 2'-Omethyladenosine

SEQ ID NO: 3908 - RNA, 75 nt, synthetic construct; identical to SEQ ID NO: 3299
  source 1..75: mol_type = other RNA
  modified_base 5: mod_base = OTHER; note = 2'-Omethylguanosine phosphorothiorate
  modified_base 21: mod_base = OTHER; note = 2'-fluoroguanosine
  modified_base 23: mod_base = OTHER; note = 2'-fluoroguanosine
  modified_base 27: mod_base = OTHER; note = 2'-Omethylcytosine phosphorothiorate
  modified_base 39: mod_base = OTHER; note = 2'-Omethylcytosine phosphorothiorate
  modified_base 46: mod_base = OTHER; note = 2'-fluorouridine
  modified_base 47: mod_base = OTHER; note = 2'-Omethylcytosine phosphorothiorate
  modified_base 53: mod_base = OTHER; note = 2'-fluorouridine
  modified_base 63: mod_base = OTHER; note = 2'-Omethyluridine phosphorothiorate
  modified_base 73: mod_base = OTHER; note = Cytosine phosphorothiorate
  modified_base 74: mod_base = OTHER; note = Cytosine phosphorothiorate

SEQ ID NO: 3909 - RNA, 75 nt, synthetic construct; identical to SEQ ID NO: 3299
  source 1..75: mol_type = other RNA
  modified_base 1: mod_base = OTHER; note = 2'-Omethylcytosine phosphorothiorate
  modified_base 3: mod_base = OTHER; note = 2'-fluorouridine
  modified_base 9: mod_base = OTHER; note = 2'-fluoroguanosine phosphorothiorate
  modified_base 15: mod_base = OTHER; note = Uridine phosphorothiorate
  modified_base 16: mod_base = OTHER; note = 2'-fluorocytosine
  modified_base 18: mod_base = OTHER; note = 2'-fluoroguanosine
  modified_base 20: mod_base = OTHER; note = 2'-fluoroadenosine phosphorothiorate
  modified_base 21: mod_base = OTHER; note = 2'-Omethylguanosine phosphorothiorate
  modified_base 26: mod_base = OTHER; note = Uridine phosphorothiorate
  modified_base 28: mod_base = OTHER; note = 2'-fluoroadenosine
  modified_base 29: mod_base = OTHER; note = Guanosine phosphorothiorate
  modified_base 41: mod_base = OTHER; note = 2'-fluoroguanosine
  modified_base 42: mod_base = OTHER; note = 2'-fluoroadenosine phosphorothiorate
  modified_base 46: mod_base = OTHER; note = 2'-fluorouridine
  modified_base 47: mod_base = OTHER; note = 2'-fluorocytosine
  modified_base 54: mod_base = OTHER; note = Uridine phosphorothiorate
  modified_base 58: mod_base = OTHER; note = 2'-Omethylguanosine phosphorothiorate
  modified_base 63: mod_base = OTHER; note = 2'-fluorouridine
  modified_base 73: mod_base = OTHER; note = Cytosine phosphorothiorate
  modified_base 74: mod_base = OTHER; note = 2'-Omethylcytosine
  modified_base 75: mod_base = OTHER; note = 2'-fluoroadenosine

SEQ ID NO: 3910 - RNA, 75 nt, synthetic construct; identical to SEQ ID NO: 3306
  source 1..75: mol_type = other RNA
  modified_base 1: mod_base = OTHER; note = 2'-Omethylguanosine phosphorothiorate
  modified_base 2: mod_base = OTHER; note = 2'-Omethyladenosine phosphorothiorate
  modified_base 74: mod_base = OTHER; note = 2'-Omethylcytosine phosphorothiorate

SEQ ID NO: 3911 - RNA, 76 nt, synthetic construct; identical to SEQ ID NO: 625
  source 1..76: mol_type = other RNA
  modified_base 1: mod_base = OTHER; note = 2'-fluoroguanosine
  modified_base 3: mod_base = OTHER; note = 2'-Omethylcytosine
  modified_base 4: mod_base = OTHER; note = 2'-fluorouridine
  modified_base 5: mod_base = OTHER; note = Cytosine phosphorothiorate
  modified_base 6: mod_base = OTHER; note = 2'-Omethylcytosine
  modified_base 10: mod_base = OTHER; note = Guanosine phosphorothiorate
  modified_base 11: mod_base = OTHER; note = 2'-Omethylcytosine
  modified_base 12: mod_base = OTHER; note = Guanosine phosphorothiorate
  modified_base 13: mod_base = OTHER; note = 2'-fluorocytosine
  modified_base 15: mod_base = OTHER; note = Adenosine phosphorothiorate
  modified_base 16: mod_base = OTHER; note = 2'-Omethyluridine
  modified_base 19: mod_base = OTHER; note = Adenosine phosphorothiorate
  modified_base 25: mod_base = OTHER; note = Cytosine phosphorothiorate
  modified_base 26: mod_base = OTHER; note = 2'-fluoroadenosine
  modified_base 28: mod_base = OTHER; note = 2'-Omethyluridine
  modified_base 29: mod_base = OTHER; note = Guanosine phosphorothiorate
  modified_base 30: mod_base = OTHER; note = 2'-fluoroguanosine
  modified_base 32: mod_base = OTHER; note = 2'-fluorocytosine
  modified_base 36: mod_base = OTHER; note = Adenosine phosphorothiorate
  modified_base 38: mod_base = OTHER; note = Adenosine phosphorothiorate
  modified_base 43: mod_base = OTHER; note = 2'-Omethyladenosine
  modified_base 47: mod_base = OTHER; note = 2'-Omethyluridine phosphorothiorate
  modified_base 48: mod_base = OTHER; note = 2'-fluorouridine
  modified_base 49: mod_base = OTHER; note = 2'-Omethylcytosine
  modified_base 53: mod_base = OTHER; note = 2'-Omethylguanosine phosphorothiorate
  modified_base 54: mod_base = OTHER; note = 2'-Omethyluridine
  modified_base 55: mod_base = OTHER; note = Uridine phosphorothiorate
  modified_base 56: mod_base = OTHER; note = 2'-fluorocytosine
  modified_base 57: mod_base = OTHER; note = 2'-fluoroguanosine
  modified_base 59: mod_base = OTHER; note = 2'-fluoroguanosine phosphorothiorate
  modified_base 61: mod_base = OTHER; note = 2'-Omethylcytosine
  modified_base 63: mod_base = OTHER; note = 2'-fluorocytosine
  modified_base 65: mod_base = OTHER; note = 2'-Omethylguanosine
  modified_base 67: mod_base = OTHER; note = Guanosine phosphorothiorate
  modified_base 68: mod_base = OTHER; note = 2'-fluoroguanosine
  modified_base 71: mod_base = OTHER; note = Uridine phosphorothiorate
  modified_base 72: mod_base = OTHER; note = 2'-fluorocytosine
  modified_base 73: mod_base = OTHER; note = 2'-Omethylguanosine
  modified_base 75: mod_base = OTHER; note = 2'-Omethylcytosine
  modified_base 76: mod_base = OTHER; note = 2'-Omethyladenosine

SEQ ID NO: 3912 - RNA, 76 nt, synthetic construct; identical to SEQ ID NO: 3419
  source 1..76: mol_type = other RNA
  modified_base 1: mod_base = OTHER; note = 2'-Omethylguanosine
  modified_base 2: mod_base = OTHER; note = 2'-Omethylguanosine
  modified_base 3: mod_base = OTHER; note = 2'-Omethylcytosine
  modified_base 4: mod_base = OTHER; note = 2'-Omethyluridine
  modified_base 5: mod_base = OTHER; note = 2'-Omethylcytosine
  modified_base 6: mod_base = OTHER; note = 2'-Omethylcytosine
  modified_base 16: mod_base = OTHER; note = 2'-Omethyluridine
  modified_base 17: mod_base = OTHER; note = 2'-Omethylguanosine
  modified_base 18: mod_base = OTHER; note = 2'-Omethylguanosine
  modified_base 20: mod_base = OTHER; note = 2'-Omethyluridine
  modified_base 25: mod_base = OTHER; note = 2'-Omethylcytosine
  modified_base 33: mod_base = OTHER; note = 2'-fluorouridine
  modified_base 35: mod_base = OTHER; note = Cytosine phosphorothiorate
  modified_base 37: mod_base = OTHER; note = Adenosine phosphorothiorate
  modified_base 38: mod_base = OTHER; note = Adenosine phosphorothiorate
  modified_base 41: mod_base = OTHER; note = 2'-fluoroguanosine
  modified_base 42: mod_base = OTHER; note = 2'-Omethylguanosine
  modified_base 43: mod_base = OTHER; note = 2'-Omethyluridine
  modified_base 44: mod_base = OTHER; note = 2'-fluoroadenosine
  modified_base 49: mod_base = OTHER; note = 2'-Omethylcytosine
  modified_base 50: mod_base = OTHER; note = 2'-Omethylcytosine
  modified_base 52: mod_base = OTHER; note = 2'-Omethylguanosine
  modified_base 54: mod_base = OTHER; note = 2'-Omethyluridine
  modified_base 55: mod_base = OTHER; note = Uridine phosphorothiorate
  modified_base 56: mod_base = OTHER; note = 2'-Omethylcytosine
  modified_base 57: mod_base = OTHER; note = 2'-fluoroguanosine
  modified_base 59: mod_base = OTHER; note = 2'-Omethylguanosine
  modified_base 61: mod_base = OTHER; note = 2'-Omethylcytosine
  modified_base 62: mod_base = OTHER; note = 2'-Omethylcytosine
  modified_base 63: mod_base = OTHER; note = 2'-fluorocytosine
  modified_base 64: mod_base = OTHER; note = 2'-Omethylguanosine
  modified_base 65: mod_base = OTHER; note = 2'-Omethylguanosine
  modified_base 73: mod_base = OTHER; note = 2'-Omethylguanosine

SEQ ID NO: 3913 - RNA, 76 nt, synthetic construct; identical to SEQ ID NO: 3289
  source 1..76: mol_type = other RNA
  modified_base 1: mod_base = OTHER; note = 2'-Omethylguanosine
  modified_base 2: mod_base = OTHER; note = 2'-Omethylcytosine
  modified_base 3: mod_base = OTHER; note = 2'-Omethylcytosine
  modified_base 4: mod_base = OTHER; note = 2'-Omethyluridine
  modified_base 5: mod_base = OTHER; note = 2'-Omethylguanosine
  modified_base 6: mod_base = OTHER; note = 2'-Omethylguanosine
  modified_base 10: mod_base = OTHER; note = 2'-Omethylguanosine
  modified_base 13: mod_base = OTHER; note = 2'-Omethylcytosine
  modified_base 18: mod_base = OTHER; note = Guanosine phosphorothiorate
  modified_base 19: mod_base = OTHER; note = 2'-Omethylguanosine
  modified_base 20: mod_base = OTHER; note = Uridine phosphorothiorate
  modified_base 25: mod_base = OTHER; note = 2'-Omethylcytosine
  modified_base 29: mod_base = OTHER; note = 2'-Omethyladenosine
  modified_base 33: mod_base = OTHER; note = 2'-fluorouridine
  modified_base 35: mod_base = OTHER; note = Uridine phosphorothiorate
  modified_base 37: mod_base = OTHER; note = Adenosine phosphorothiorate
  modified_base 38: mod_base = OTHER; note = Adenosine phosphorothiorate
  modified_base 41: mod_base = OTHER; note = 2'-fluorouridine phosphorothiorate
  modified_base 43: mod_base = OTHER; note = 2'-Omethyladenosine
  modified_base 44: mod_base = OTHER; note = 2'-fluoroguanosine
  modified_base 46: mod_base = OTHER; note = Guanosine phosphorothiorate
  modified_base 50: mod_base = OTHER; note = 2'-Omethyladenosine
  modified_base 52: mod_base = OTHER; note = 2'-Omethylguanosine
  modified_base 54: mod_base = OTHER; note = Uridine phosphorothiorate
  modified_base 55: mod_base = OTHER; note = Uridine phosphorothiorate
  modified_base 56: mod_base = OTHER; note = 2'-Omethylcytosine
  modified_base 57: mod_base = OTHER; note = Adenosine phosphorothiorate
  modified_base 62: mod_base = OTHER; note = 2'-Omethylcytosine
  modified_base 63: mod_base = OTHER; note = 2'-fluorocytosine
  modified_base 65: mod_base = OTHER; note = 2'-Omethylguanosine
  modified_base 71: mod_base = OTHER; note = 2'-Omethylguanosine
  modified_base 73: mod_base = OTHER; note = 2'-Omethylguanosine

SEQ ID NO: 3914 - RNA, 75 nt, synthetic construct; identical to SEQ ID NO: 1045
  source 1..75: mol_type = other RNA
  modified_base 1: mod_base = OTHER; note = 2'-Omethylguanosine phosphorothiorate
  modified_base 2: mod_base = OTHER; note = 2'-Omethylguanosine phosphorothiorate
  modified_base 38: mod_base = OTHER; note = Adenosine phosphorothiorate
  modified_base 39: mod_base = OTHER; note = Uridine phosphorothiorate
  modified_base 40: mod_base = OTHER; note = 2'-fluorocytosine
  modified_base 51: mod_base = OTHER; note = 2'-fluoroadenosine
  modified_base 73: mod_base = OTHER; note = Cytosine phosphorothiorate
  modified_base 74: mod_base = OTHER; note = 2'-Omethylcytosine phosphorothiorate
  modified_base 75: mod_base = OTHER; note = 2'-Omethyladenosine

SEQ ID NO: 3915 - RNA, 86 nt, synthetic construct; identical to SEQ ID NO: 3290
  source 1..86: mol_type = other RNA
  modified_base 55: mod_base = OTHER; note = 2'-fluorocytosine

SEQ ID NO: 3916 - RNA, 85 nt, synthetic construct; identical to SEQ ID NO: 3286
  source 1..85: mol_type = other RNA
  modified_base 1: mod_base = OTHER; note = 2'-Omethylcytosine phosphorothiorate
  modified_base 2: mod_base = OTHER; note = 2'-fluorocytosine phosphorothiorate
  modified_base 3: mod_base = OTHER; note = 2'-fluoroadenosine phosphorothiorate
  modified_base 10: mod_base = OTHER; note = Cytosine phosphorothiorate
  modified_base 13: mod_base = OTHER; note = 2'-Omethyladenosine
  modified_base 22: mod_base = OTHER; note = 2'-fluoroguanosine phosphorothiorate
  modified_base 30: mod_base = OTHER; note = 2'-fluoroadenosine
  modified_base 34: mod_base = OTHER; note = 2'-fluorouridine
  modified_base 36: mod_base = OTHER; note = 2'-fluoroguanosine
  modified_base 52: mod_base = OTHER; note = Guanosine phosphorothiorate
  modified_base 57: mod_base = OTHER; note = 2'-Omethylcytosine
  modified_base 59: mod_base = OTHER; note = 2'-Omethyluridine
  modified_base 65: mod_base = OTHER; note = Cytosine phosphorothiorate
  modified_base 69: mod_base = OTHER; note = 2'-fluorocytosine phosphorothiorate
  modified_base 77: mod_base = OTHER; note = 2'-Omethylcytosine
  modified_base 84: mod_base = OTHER; note = Cytosine phosphorothiorate
  modified_base 85: mod_base = OTHER; note = 2'-Omethyladenosine

SEQ ID NO: 3917 - RNA, 75 nt, synthetic construct; identical to SEQ ID NO: 3311
  source 1..75: mol_type = other RNA
  modified_base 1: mod_base = OTHER; note = 2'-Omethylguanosine
  modified_base 2: mod_base = OTHER; note = 2'-Omethylguanosine phosphorothiorate
  modified_base 3: mod_base = OTHER; note = 2'-fluorouridine
  modified_base 8: mod_base = OTHER; note = 2'-fluorouridine
  modified_base 15: mod_base = OTHER; note = 2'-fluoroadenosine phosphorothiorate
  modified_base 16: mod_base = OTHER; note = 2'-fluorouridine
  modified_base 19: mod_base = OTHER; note = 2'-fluorouridine
  modified_base 22: mod_base = OTHER; note = Guanosine phosphorothiorate
  modified_base 23: mod_base = OTHER; note = 2'-fluorocytosine
  modified_base 28: mod_base = OTHER; note = 2'-fluorouridine
  modified_base 34: mod_base = OTHER; note = 2'-Omethylcytosine phosphorothiorate
  modified_base 35: mod_base = OTHER; note = 2'-fluorouridine
  modified_base 38: mod_base = OTHER; note = 2'-fluoroadenosine
  modified_base 39: mod_base = OTHER; note = 2'-fluorouridine
  modified_base 40: mod_base = OTHER; note = 2'-Omethylcytosine phosphorothiorate
  modified_base 52: mod_base = OTHER; note = Guanosine phosphorothiorate
  modified_base 54: mod_base = OTHER; note = 2'-Omethyluridine
  modified_base 62: mod_base = OTHER; note = Cytosine phosphorothiorate
  modified_base 63: mod_base = OTHER; note = Guanosine phosphorothiorate
  modified_base 64: mod_base = OTHER; note = 2'-fluoroguanosine
  modified_base 73: mod_base = OTHER; note = 2'-fluorocytosine
  modified_base 75: mod_base = OTHER; note = 2'-fluoroadenosine

SEQ ID NO: 3918 - RNA, 76 nt, synthetic construct; identical to SEQ ID NO: 625
  source 1..76: mol_type = other RNA
  modified_base 3: mod_base = OTHER; note = 2'-fluorocytosine
  modified_base 4: mod_base = OTHER; note = 2'-fluorouridine
  modified_base 10: mod_base = OTHER; note = Guanosine phosphorothiorate
  modified_base 11: mod_base = OTHER; note = 2'-Omethylcytosine
  modified_base 12: mod_base = OTHER; note = Guanosine phosphorothiorate
  modified_base 14: mod_base = OTHER; note = 2'-Omethyladenosine phosphorothiorate
  modified_base 15: mod_base = OTHER; note = 2'-fluoroadenosine
  modified_base 17: mod_base = OTHER; note = 2'-Omethylguanosine
  modified_base 18: mod_base = OTHER; note = 2'-Omethylguanosine
  modified_base 22: mod_base = OTHER; note = 2'-Omethylguanosine
  modified_base 23: mod_base = OTHER; note = 2'-fluorocytosine
  modified_base 24: mod_base = OTHER; note = 2'-fluoroguanosine phosphorothiorate
  modified_base 30: mod_base = OTHER; note = 2'-Omethylguanosine
  modified_base 33: mod_base = OTHER; note = Uridine phosphorothiorate
  modified_base 34: mod_base = OTHER; note = 2'-Omethyluridine
  modified_base 38: mod_base = OTHER; note = 2'-fluoroadenosine
  modified_base 39: mod_base = OTHER; note = 2'-fluorouridine
  modified_base 40: mod_base = OTHER; note = 2'-fluorouridine
  modified_base 44: mod_base = OTHER; note = 2'-Omethyladenosine
  modified_base 45: mod_base = OTHER; note = 2'-fluoroguanosine
  modified_base 54: mod_base = OTHER; note = 2'-fluorouridine
  modified_base 57: mod_base = OTHER; note = 2'-fluoroguanosine
  modified_base 58: mod_base = OTHER; note = 2'-fluoroadenosine
  modified_base 61: mod_base = OTHER; note = 2'-fluorocytosine
  modified_base 62: mod_base = OTHER; note = Cytosine phosphorothiorate
  modified_base 63: mod_base = OTHER; note = 2'-fluorocytosine
  modified_base 67: mod_base = OTHER; note = 2'-Omethylguanosine phosphorothiorate
  modified_base 68: mod_base = OTHER; note = 2'-Omethylguanosine phosphorothiorate
  modified_base 69: mod_base = OTHER; note = 2'-Omethyladenosine phosphorothiorate
  modified_base 70: mod_base = OTHER; note = Guanosine phosphorothiorate
  modified_base 71: mod_base = OTHER; note = 2'-Omethyluridine
  modified_base 72: mod_base = OTHER; note = 2'-fluorocytosine
  modified_base 75: mod_base = OTHER; note = 2'-Omethylcytosine

SEQ ID NO: 3919 - RNA, 76 nt, synthetic construct; identical to SEQ ID NO: 625
  source 1..76: mol_type = other RNA
  modified_base 1: mod_base = OTHER; note = 2'-fluoroguanosine
  modified_base 2: mod_base = OTHER; note = Guanosine phosphorothiorate
  modified_base 8: mod_base = OTHER; note = Uridine phosphorothiorate
  modified_base 11: mod_base = OTHER; note = Cytosine phosphorothiorate
  modified_base 12: mod_base = OTHER; note = 2'-Omethylguanosine phosphorothiorate
  modified_base 14: mod_base = OTHER; note = 2'-fluoroadenosine
  modified_base 15: mod_base = OTHER; note = 2'-Omethyladenosine phosphorothiorate
  modified_base 16: mod_base = OTHER; note = 2'-Omethyluridine phosphorothiorate
  modified_base 17: mod_base = OTHER; note = 2'-Omethylguanosine phosphorothiorate
  modified_base 18: mod_base = OTHER; note = 2'-fluoroguanosine
  modified_base 20: mod_base = OTHER; note = Uridine phosphorothiorate
  modified_base 23: mod_base = OTHER; note = 2'-Omethylcytosine
  modified_base 24: mod_base = OTHER; note = Guanosine phosphorothiorate
  modified_base 25: mod_base = OTHER; note = 2'-fluorocytosine
  modified_base 26: mod_base = OTHER; note = Adenosine phosphorothiorate
  modified_base 27: mod_base = OTHER; note = 2'-fluorouridine
  modified_base 29: mod_base = OTHER; note = 2'-Omethylguanosine
  modified_base 30: mod_base = OTHER; note = 2'-fluoroguanosine
  modified_base 33: mod_base = OTHER; note = Uridine phosphorothiorate
  modified_base 34: mod_base = OTHER; note = 2'-fluorouridine
  modified_base 40: mod_base = OTHER; note = 2'-fluorouridine phosphorothiorate
  modified_base 43: mod_base = OTHER; note = 2'-fluoroadenosine
  modified_base 45: mod_base = OTHER; note = 2'-fluoroguanosine
  modified_base 49: mod_base = OTHER; note = 2'-fluorocytosine
  modified_base 51: mod_base = OTHER; note = Guanosine phosphorothiorate
  modified_base 52: mod_base = OTHER; note = 2'-Omethylguanosine
  modified_base 53: mod_base = OTHER; note = 2'-Omethylguanosine
  modified_base 54: mod_base = OTHER; note = 2'-Omethyluridine
  modified_base 60: mod_base = OTHER; note = 2'-fluorouridine
  modified_base 61: mod_base = OTHER; note = 2'-fluorocytosine
  modified_base 63: mod_base = OTHER; note = 2'-Omethylcytosine
  modified_base 66: mod_base = OTHER; note = 2'-fluorocytosine
  modified_base 73: mod_base = OTHER; note = 2'-fluoroguanosine
  modified_base 75: mod_base = OTHER; note = 2'-fluorocytosine

SEQ ID NO: 3920 - RNA, 75 nt, synthetic construct; identical to SEQ ID NO: 1045
  source 1..75: mol_type = other RNA
  modified_base 1: mod_base = OTHER; note = 2'-Omethylguanosine phosphorothiorate
  modified_base 2: mod_base = OTHER; note = 2'-Omethylguanosine

SEQ ID NO: 3921 - RNA, 73 nt, synthetic construct; identical to SEQ ID NO: 935
  source 1..73: mol_type = other RNA
  modified_base 18: mod_base = OTHER; note = 2'-Omethylguanosine
  modified_base 49: mod_base = OTHER; note = 2'-Omethylcytosine
  modified_base 73: mod_base = OTHER; note = 2'-Omethylguanosine

SEQ ID NO: 3922 - RNA, 85 nt, synthetic construct; identical to SEQ ID NO: 3317
  source 1..85: mol_type = other RNA
  modified_base 1: mod_base = OTHER; note = 2'-Omethylguanosine phosphorothiorate
  modified_base 2: mod_base = OTHER; note = Cytosine phosphorothiorate
  modified_base 14: mod_base = OTHER; note = 2'-Omethyladenosine phosphorothiorate
  modified_base 16: mod_base = OTHER; note = Uridine phosphorothiorate
  modified_base 24: mod_base = OTHER; note = 2'-fluoroguanosine
  modified_base 31: mod_base = OTHER; note = 2'-fluoroadenosine phosphorothiorate
  modified_base 33: mod_base = OTHER; note = 2'-fluorouridine
  modified_base 43: mod_base = OTHER; note = 2'-fluoroadenosine phosphorothiorate
  modified_base 48: mod_base = OTHER; note = 2'-fluoroguanosine phosphorothiorate
  modified_base 57: mod_base = OTHER; note = Cytosine phosphorothiorate
  modified_base 61: mod_base = OTHER; note = 2'-Omethylguanosine
  modified_base 62: mod_base = OTHER; note = 2'-Omethylguanosine
  modified_base 73: mod_base = OTHER; note = 2'-fluoroguanosine
  modified_base 82: mod_base = OTHER; note = Guanosine phosphorothiorate
  modified_base 84: mod_base = OTHER; note = 2'-fluorocytosine

SEQ ID NO: 3923 - RNA, 74 nt, synthetic construct; identical to SEQ ID NO: 766
  source 1..74: mol_type = other RNA
  modified_base 1: mod_base = OTHER; note = 2'-Omethylguanosine phosphorothiorate
  modified_base 2: mod_base = OTHER; note = 2'-Omethylguanosine phosphorothiorate
  modified_base 45: mod_base = OTHER; note = 2'-fluoroguanosine
  modified_base 57: mod_base = OTHER; note = 2'-fluoroguanosine
  modified_base 68: mod_base = OTHER; note = 2'-fluoroguanosine
  modified_base 72: mod_base = OTHER; note = 2'-Omethylcytosine
  modified_base 73: mod_base = OTHER; note = 2'-Omethylguanosine

SEQ ID NO: 3924 - DNA, 76 bp, synthetic construct; identical to SEQ ID NO: 1924
  source 1..76: mol_type = other DNA
  modified_base 1: mod_base = OTHER; note = 2'-Omethylguanosine phosphorothiorate
  modified_base 2: mod_base = OTHER; note = 2'-Omethylguanosine phosphorothiorate
  modified_base 6: mod_base = OTHER; note = 2'-O-(2-Methoxyethyl) 5-methylcytosine
  modified_base 8: mod_base = OTHER; note = 2'-O-(2-Methoxyethyl) thymine
  modified_base 9: mod_base = OTHER; note = 2'-O-(2-Methoxyethyl) guanosine phosphorothiorate
  modified_base 10: mod_base = OTHER; note = 2'-Omethylguanosine phosphorothiorate
  modified_base 11: mod_base = OTHER; note = 2'-fluorocytosine phosphorothiorate
  modified_base 14: mod_base = OTHER; note = 2'-fluoroadenosine
  modified_base 15: mod_base = OTHER; note = Adenosine phosphorothiorate
  modified_base 17: mod_base = OTHER; note = 2'-O-(2-Methoxyethyl) guanosine
  modified_base 20: mod_base = OTHER; note = Uridine phosphorothiorate
  modified_base 21: mod_base = OTHER; note = 2'-fluoroadenosine
  modified_base 22: mod_base = OTHER; note = Guanosine phosphorothiorate
  modified_base 25: mod_base = OTHER; note = Cytosine phosphorothiorate
  modified_base 26: mod_base = OTHER; note = 2'-Omethyladenosine
  modified_base 27: mod_base = OTHER; note = 2'-O-(2-Methoxyethyl) thymine
  modified_base 31: mod_base = OTHER; note = Adenosine phosphorothiorate
  modified_base 32: mod_base = OTHER; note = 2'-fluorocytosine
  modified_base 35: mod_base = OTHER; note = 2'-fluorocytosine
  modified_base 36: mod_base = OTHER; note = Adenosine phosphorothiorate
  modified_base 38: mod_base = OTHER; note = Adenosine phosphorothiorate
  modified_base 41: mod_base = OTHER; note = Cytosine phosphorothiorate
  modified_base 42: mod_base = OTHER; note = 2'-O-(2-Methoxyethyl) adenosine
  modified_base 43: mod_base = OTHER; note = 2'-Omethyladenosine
  modified_base 47: mod_base = OTHER; note = Uridine phosphorothiorate
  modified_base 54: mod_base = OTHER; note = 2'-fluorouridine
  modified_base 59: mod_base = OTHER; note = Guanosine phosphorothiorate
  modified_base 60: mod_base = OTHER; note = Uridine phosphorothiorate
  modified_base 66: mod_base = OTHER; note = 2'-Omethylcytosine
  modified_base 68: mod_base = OTHER; note = Guanosine phosphorothiorate
  modified_base 69: mod_base = OTHER; note = 2'-fluoroadenosine phosphorothiorate
  modified_base 70: mod_base = OTHER; note = 2'-fluoroguanosine
  modified_base 75: mod_base = OTHER; note = Cytosine phosphorothiorate
  modified_base 76: mod_base = OTHER; note = 2'-Omethyladenosine
  misc_feature 1..15: note = RNA
  misc_feature 16: note = DNA
  misc_feature 17..36: note = RNA
  misc_feature 37: note = DNA
  misc_feature 38..39: note = RNA
  misc_feature 40: note = DNA
  misc_feature 41..47: note = RNA
  misc_feature 48: note = DNA
  misc_feature 49..50: note = RNA
  misc_feature 51: note = DNA
  misc_feature 52..55: note = RNA
  misc_feature 56: note = DNA
  misc_feature 57..62: note = RNA
  misc_feature 63: note = DNA
  misc_feature 64..66: note = RNA
  misc_feature 67: note = DNA
  misc_feature 68..76: note = RNA

SEQ ID NO: 3925 - RNA, 86 nt, synthetic construct; identical to SEQ ID NO: 3290
  source 1..86: mol_type = other RNA
  modified_base 1: mod_base = OTHER; note = 2'-Omethyladenosine phosphorothiorate
  modified_base 2: mod_base = OTHER; note = 2'-Omethylcytosine phosphorothiorate
  modified_base 24: mod_base = OTHER; note = 2'-Omethylguanosine
  modified_base 38: mod_base = OTHER; note = Adenosine phosphorothiorate
  modified_base 44: mod_base = OTHER; note = 2'-fluorouridine phosphorothiorate
  modified_base 66: mod_base = OTHER; note = Cytosine phosphorothiorate
  modified_base 67: mod_base = OTHER; note = 2'-Omethylguanosine
  modified_base 71: mod_base = OTHER; note = 2'-fluorocytosine
  modified_base 84: mod_base = OTHER; note = Cytosine phosphorothiorate
  modified_base 85: mod_base = OTHER; note = 2'-Omethylcytosine

SEQ ID NO: 3926 - RNA, 76 nt, synthetic construct; identical to SEQ ID NO: 3295
  source 1..76: mol_type = other RNA
  modified_base 1: mod_base = OTHER; note = 2'-fluorocytosine
  modified_base 2: mod_base = OTHER; note = 2'-fluorocytosine phosphorothiorate
  modified_base 14: mod_base = OTHER; note = 2'-fluoroadenosine phosphorothiorate
  modified_base 21: mod_base = OTHER; note = Adenosine phosphorothiorate
  modified_base 27: mod_base = OTHER; note = Guanosine phosphorothiorate
  modified_base 43: mod_base = OTHER; note = 2'-fluorouridine phosphorothiorate
  modified_base 52: mod_base = OTHER; note = 2'-Omethylguanosine
  modified_base 53: mod_base = OTHER; note = Guanosine phosphorothiorate
  modified_base 64: mod_base = OTHER; note = 2'-fluoroguanosine
  modified_base 71: mod_base = OTHER; note = 2'-fluoroguanosine
  modified_base 76: mod_base = OTHER; note = 2'-fluoroadenosine

SEQ ID NO: 3927 - RNA, 86 nt, synthetic construct; identical to SEQ ID NO: 3290
  source 1..86: mol_type = other RNA
  modified_base 1: mod_base = OTHER; note = 2'-Omethyladenosine
  modified_base 62: mod_base = OTHER; note = 2'-Omethylguanosine
  modified_base 83: mod_base = OTHER; note = 2'-Omethyladenosine

SEQ ID NO: 3928 - RNA, 76 nt, synthetic construct; identical to SEQ ID NO: 625
  source 1..76: mol_type = other RNA
  modified_base 1: mod_base = OTHER; note = 2'-fluoroguanosine
  modified_base 4: mod_base = OTHER; note = 2'-fluorouridine
  modified_base 5: mod_base = OTHER; note = 2'-Omethylcytosine phosphorothiorate
  modified_base 10: mod_base = OTHER; note = Guanosine phosphorothiorate
  modified_base 11: mod_base = OTHER; note = 2'-Omethylcytosine
  modified_base 12: mod_base = OTHER; note = 2'-fluoroguanosine phosphorothiorate
  modified_base 13: mod_base = OTHER; note = 2'-Omethylcytosine
  modified_base 18: mod_base = OTHER; note = 2'-Omethylguanosine
  modified_base 19: mod_base = OTHER; note = Adenosine phosphorothiorate
  modified_base 20: mod_base = OTHER; note = 2'-Omethyluridine
  modified_base 21: mod_base = OTHER; note = Adenosine phosphorothiorate
  modified_base 22: mod_base = OTHER; note = 2'-fluoroguanosine
  modified_base 23: mod_base = OTHER; note = 2'-fluorocytosine
  modified_base 24: mod_base = OTHER; note = Guanosine phosphorothiorate
  modified_base 25: mod_base = OTHER; note = 2'-Omethylcytosine
  modified_base 26: mod_base = OTHER; note = 2'-fluoroadenosine
  modified_base 27: mod_base = OTHER; note = Uridine phosphorothiorate
  modified_base 28: mod_base = OTHER; note = 2'-fluorouridine phosphorothiorate
  modified_base 29: mod_base = OTHER; note = 2'-Omethylguanosine
  modified_base 30: mod_base = OTHER; note = 2'-fluoroguanosine
  modified_base 31: mod_base = OTHER; note = 2'-Omethyladenosine
  modified_base 32: mod_base = OTHER; note = 2'-fluorocytosine
  modified_base 37: mod_base = OTHER; note = Adenosine phosphorothiorate
  modified_base 38: mod_base = OTHER; note = 2'-Omethyladenosine phosphorothiorate
  modified_base 39: mod_base = OTHER; note = 2'-fluorouridine phosphorothiorate
  modified_base 40: mod_base = OTHER; note = 2'-Omethyluridine
  modified_base 42: mod_base = OTHER; note = 2'-Omethyladenosine phosphorothiorate
  modified_base 43: mod_base = OTHER; note = 2'-fluoroadenosine
  modified_base 44: mod_base = OTHER; note = 2'-Omethyladenosine
  modified_base 45: mod_base = OTHER; note = 2'-Omethylguanosine
  modified_base 48: mod_base = OTHER; note = 2'-Omethyluridine
  modified_base 51: mod_base = OTHER; note = 2'-Omethylguanosine
  modified_base 59: mod_base = OTHER; note = 2'-fluoroguanosine
  modified_base 62: mod_base = OTHER; note = Cytosine phosphorothiorate
  modified_base 63: mod_base = OTHER; note = 2'-fluorocytosine
  modified_base 64: mod_base = OTHER; note = 2'-fluoroguanosine
  modified_base 66: mod_base = OTHER; note = 2'-Omethylcytosine
  modified_base 67: mod_base = OTHER; note = 2'-Omethylguanosine
  modified_base 71: mod_base = OTHER; note = 2'-Omethyluridine
  modified_base 72: mod_base = OTHER; note = Cytosine phosphorothiorate
  modified_base 73: mod_base = OTHER; note = 2'-fluoroguanosine

SEQ ID NO: 3929 - RNA, 86 nt, synthetic construct; identical to SEQ ID NO: 3290
  source 1..86: mol_type = other RNA
  modified_base 19: mod_base = OTHER; note = Uridine phosphorothiorate

SEQ ID NO: 3930 - RNA, 85 nt, synthetic construct; identical to SEQ ID NO: 3297
  source 1..85: mol_type = other RNA
  modified_base 43: mod_base = OTHER; note = 2'-Omethyladenosine
  modified_base 82: mod_base = OTHER; note = 2'-Omethylguanosine

SEQ ID NO: 3931 - RNA, 76 nt, synthetic construct; identical to SEQ ID NO: 625
  source 1..76: mol_type = other RNA
  modified_base 2: mod_base = OTHER; note = 2'-fluoroguanosine
  modified_base 4: mod_base = OTHER; note = 2'-fluorouridine
  modified_base 5: mod_base = OTHER; note = 2'-fluorocytosine phosphorothiorate
  modified_base 6: mod_base = OTHER; note = 2'-Omethylcytosine
  modified_base 9: mod_base = OTHER; note = Guanosine phosphorothiorate
  modified_base 12: mod_base = OTHER; note = Guanosine phosphorothiorate
  modified_base 13: mod_base = OTHER; note = 2'-Omethylcytosine
  modified_base 14: mod_base = OTHER; note = 2'-fluoroadenosine
  modified_base 15: mod_base = OTHER; note = 2'-Omethyladenosine
  modified_base 16: mod_base = OTHER; note = 2'-fluorouridine
  modified_base 17: mod_base = OTHER; note = 2'-Omethylguanosine
  modified_base 20: mod_base = OTHER; note = 2'-Omethyluridine
  modified_base 23: mod_base = OTHER; note = 2'-fluorocytosine
  modified_base 25: mod_base = OTHER; note = 2'-fluorocytosine
  modified_base 29: mod_base = OTHER; note = Guanosine phosphorothiorate
  modified_base 30: mod_base = OTHER; note = Guanosine phosphorothiorate
  modified_base 31: mod_base = OTHER; note = 2'-Omethyladenosine
  modified_base 36: mod_base = OTHER; note = Adenosine phosphorothiorate
  modified_base 40: mod_base = OTHER; note = Uridine phosphorothiorate
  modified_base 41: mod_base = OTHER; note = Cytosine phosphorothiorate
  modified_base 42: mod_base = OTHER; note = 2'-fluoroadenosine
  modified_base 45: mod_base = OTHER; note = 2'-fluoroguanosine
  modified_base 48: mod_base = OTHER; note = 2'-fluorouridine
  modified_base 50: mod_base = OTHER; note = 2'-fluorocytosine
  modified_base 51: mod_base = OTHER; note = Guanosine phosphorothiorate
  modified_base 52: mod_base = OTHER; note = 2'-fluoroguanosine
  modified_base 54: mod_base = OTHER; note = Uridine phosphorothiorate
  modified_base 56: mod_base = OTHER; note = Cytosine phosphorothiorate
  modified_base 57: mod_base = OTHER; note = 2'-fluoroguanosine
  modified_base 58: mod_base = OTHER; note = 2'-fluoroadenosine
  modified_base 60: mod_base = OTHER; note = 2'-fluorouridine
  modified_base 62: mod_base = OTHER; note = 2'-Omethylcytosine
  modified_base 63: mod_base = OTHER; note = 2'-Omethylcytosine
  modified_base 64: mod_base = OTHER; note = 2'-Omethylguanosine
  modified_base 68: mod_base = OTHER; note = Guanosine phosphorothiorate
  modified_base 70: mod_base = OTHER; note = 2'-Omethylguanosine
  modified_base 72: mod_base = OTHER; note = 2'-fluorocytosine phosphorothiorate
  modified_base 73: mod_base = OTHER; note = Guanosine phosphorothiorate
  modified_base 74: mod_base = OTHER; note = 2'-fluorocytosine phosphorothiorate
  modified_base 75: mod_base = OTHER; note = 2'-Omethylcytosine phosphorothiorate
  modified_base 76: mod_base = OTHER; note = 2'-fluoroadenosine

SEQ ID NO: 3932 - RNA, 85 nt, synthetic construct; identical to SEQ ID NO: 3317
  source 1..85: mol_type = other RNA
  modified_base 1: mod_base = OTHER; note = 2'-Omethylguanosine phosphorothiorate
  modified_base 2: mod_base = OTHER; note = 2'-Omethylcytosine phosphorothiorate
  modified_base 9: mod_base = OTHER; note = 2'-Omethylguanosine
  modified_base 20: mod_base = OTHER; note = Uridine phosphorothiorate
  modified_base 36: mod_base = OTHER; note = 2'-fluoroadenosine
  modified_base 45: mod_base = OTHER; note = 2'-Omethylguanosine
  modified_base 58: mod_base = OTHER; note = Guanosine phosphorothiorate
  modified_base 84: mod_base = OTHER; note = 2'-Omethylcytosine phosphorothiorate

SEQ ID NO: 3933 - RNA, 75 nt, synthetic construct; identical to SEQ ID NO: 1045
  source 1..75: mol_type = other RNA
  modified_base 1: mod_base = OTHER; note = 2'-Omethylguanosine
  modified_base 13: mod_base = OTHER; note = 2'-Omethyluridine
  modified_base 14: mod_base = OTHER; note = 2'-Omethyladenosine
  modified_base 15: mod_base = OTHER; note = 2'-Omethyladenosine
  modified_base 16: mod_base = OTHER; note = 2'-Omethyluridine
  modified_base 17: mod_base = OTHER; note = 2'-Omethylguanosine
  modified_base 18: mod_base = OTHER; note = 2'-Omethylguanosine
  modified_base 19: mod_base = OTHER; note = Uridine phosphorothiorate
  modified_base 20: mod_base = OTHER; note = 2'-Omethyladenosine
  modified_base 21: mod_base = OTHER; note = Adenosine phosphorothiorate
  modified_base 25: mod_base = OTHER; note = 2'-Omethylcytosine
  modified_base 33: mod_base = OTHER; note = 2'-fluorouridine
  modified_base 34: mod_base = OTHER; note = 2'-Omethyluridine
  modified_base 35: mod_base = OTHER; note = Uridine phosphorothiorate
  modified_base 37: mod_base = OTHER; note = Adenosine phosphorothiorate
  modified_base 38: mod_base = OTHER; note = Adenosine phosphorothiorate
  modified_base 48: mod_base = OTHER; note = 2'-Omethylcytosine
  modified_base 49: mod_base = OTHER; note = 2'-Omethylcytosine
  modified_base 50: mod_base = OTHER; note = 2'-Omethylguanosine
  modified_base 51: mod_base = OTHER; note = 2'-Omethyladenosine
  modified_base 52: mod_base = OTHER; note = 2'-Omethylguanosine
  modified_base 53: mod_base = OTHER; note = Uridine phosphorothiorate
  modified_base 54: mod_base = OTHER; note = Uridine phosphorothiorate
  modified_base 60: mod_base = OTHER; note = 2'-Omethylcytosine
  modified_base 64: mod_base = OTHER; note = 2'-Omethylguanosine
  modified_base 72: mod_base = OTHER; note = 2'-Omethyluridine

SEQ ID NO: 3934 - DNA, 76 bp, synthetic construct; identical to SEQ ID NO: 1924
  source 1..76: mol_type = other DNA
  modified_base 1: mod_base = OTHER; note = 2'-Omethylguanosine phosphorothiorate
  modified_base 2: mod_base = OTHER; note = deoxyguanosine phosphorothiorate
  modified_base 10: mod_base = OTHER; note = 2'-O-(2-Methoxyethyl) guanosine
  modified_base 12: mod_base = OTHER; note = 2'-O-(2-Methoxyethyl) guanosine
  modified_base 15: mod_base = OTHER; note = 2'-fluoroadenosine phosphorothiorate
  modified_base 20: mod_base = OTHER; note = Uridine phosphorothiorate
  modified_base 22: mod_base = OTHER; note = 2'-Omethylguanosine
  modified_base 25: mod_base = OTHER; note = Cytosine phosphorothiorate
  modified_base 27: mod_base = OTHER; note = Uridine phosphorothiorate
  modified_base 31: mod_base = OTHER; note = deoxyadenosine phosphorothiorate
  modified_base 33: mod_base = OTHER; note = 2'-Omethyluridine
  modified_base 39: mod_base = OTHER; note = Uridine phosphorothiorate
  modified_base 40: mod_base = OTHER; note = Uridine phosphorothiorate
  modified_base 41: mod_base = OTHER; note = deoxycytosine phosphorothiorate
  modified_base 42: mod_base = OTHER; note = 2'-fluoroadenosine phosphorothiorate
  modified_base 47: mod_base = OTHER; note = Uridine phosphorothiorate
  modified_base 48: mod_base = OTHER; note = Uridine phosphorothiorate
  modified_base 49: mod_base = OTHER; note = 2'-fluorocytosine
  modified_base 52: mod_base = OTHER; note = 2'-O-(2-Methoxyethyl) guanosine
  modified_base 55: mod_base = OTHER; note = Uridine phosphorothiorate
  modified_base 59: mod_base = OTHER; note = 2'-Omethylguanosine
  modified_base 62: mod_base = OTHER; note = 2'-fluorocytosine
  modified_base 65: mod_base = OTHER; note = Guanosine phosphorothiorate
  modified_base 66: mod_base = OTHER; note = 2'-O-(2-Methoxyethyl) 5-methylcytosine
  modified_base 69: mod_base = OTHER; note = 2'-fluoroadenosine
  modified_base 72: mod_base = OTHER; note = 2'-O-(2-Methoxyethyl) 5-methylcytosine
  modified_base 74: mod_base = OTHER; note = Cytosine phosphorothiorate
  modified_base 75: mod_base = OTHER; note = 2'-Omethylcytosine
  modified_base 76: mod_base = OTHER; note = 2'-fluoroadenosine
  misc_feature 1: note = RNA
  misc_feature 2..3: note = DNA
  misc_feature 4..13: note = RNA
  misc_feature 14: note = DNA
  misc_feature 15..18: note = RNA
  misc_feature 19: note = DNA
  misc_feature 20: note = RNA
  misc_feature 21: note = DNA
  misc_feature 22..28: note = RNA
  misc_feature 29: note = DNA
  misc_feature 30: note = RNA
  misc_feature 31: note = DNA
  misc_feature 32..34: note = RNA
  misc_feature 35..36: note = DNA
  misc_feature 37..40: note = RNA
  misc_feature 41: note = DNA
  misc_feature 42: note = RNA
  misc_feature 43: note = DNA
  misc_feature 44..52: note = RNA
  misc_feature 53: note = DNA
  misc_feature 54..69: note = RNA
  misc_feature 70: note = DNA
  misc_feature 71..76: note = RNA

SEQ ID NO: 3935 - RNA, 76 nt, synthetic construct; identical to SEQ ID NO: 625
  source 1..76: mol_type = other RNA
  modified_base 1: mod_base = OTHER; note = 2'-Omethylguanosine
  modified_base 2: mod_base = OTHER; note = 2'-Omethylguanosine
  modified_base 10: mod_base = OTHER; note = 2'-Omethylguanosine
  modified_base 13: mod_base = OTHER; note = 2'-Omethylcytosine
  modified_base 17: mod_base = OTHER; note = Guanosine phosphorothiorate
  modified_base 18: mod_base = OTHER; note = 2'-Omethylguanosine
  modified_base 19: mod_base = OTHER; note = Adenosine phosphorothiorate
  modified_base 20: mod_base = OTHER; note = 2'-Omethyluridine
  modified_base 25: mod_base = OTHER; note = 2'-Omethylcytosine
  modified_base 29: mod_base = OTHER; note = 2'-Omethylguanosine
  modified_base 33: mod_base = OTHER; note = 2'-fluorouridine
  modified_base 35: mod_base = OTHER; note = Cytosine phosphorothiorate
  modified_base 37: mod_base = OTHER; note = Adenosine phosphorothiorate
  modified_base 38: mod_base = OTHER; note = Adenosine phosphorothiorate
  modified_base 41: mod_base = OTHER; note = 2'-fluorocytosine phosphorothiorate
  modified_base 43: mod_base = OTHER; note = 2'-Omethyladenosine
  modified_base 44: mod_base = OTHER; note = 2'-fluoroadenosine
  modified_base 46: mod_base = OTHER; note = Guanosine phosphorothiorate
  modified_base 50: mod_base = OTHER; note = 2'-Omethylcytosine
  modified_base 52: mod_base = OTHER; note = 2'-Omethylguanosine
  modified_base 54: mod_base = OTHER; note = Uridine phosphorothiorate
  modified_base 55: mod_base = OTHER; note = Uridine phosphorothiorate
  modified_base 56: mod_base = OTHER; note = 2'-Omethylcytosine
  modified_base 62: mod_base = OTHER; note = 2'-Omethylcytosine
  modified_base 63: mod_base = OTHER; note = 2'-fluorocytosine
  modified_base 65: mod_base = OTHER; note = 2'-Omethylguanosine
  modified_base 71: mod_base = OTHER; note = 2'-Omethyluridine
  modified_base 73: mod_base = OTHER; note = 2'-Omethylguanosine

SEQ ID NO: 3936 - RNA, 76 nt, synthetic construct; identical to SEQ ID NO: 625
  source 1..76: mol_type = other RNA
  modified_base 2: mod_base = OTHER; note = 2'-Omethylguanosine
  modified_base 10: mod_base = OTHER; note = Guanosine phosphorothiorate
  modified_base 11: mod_base = OTHER; note = 2'-fluorocytosine phosphorothiorate
  modified_base 12: mod_base = OTHER; note = 2'-fluoroguanosine phosphorothiorate
  modified_base 13: mod_base = OTHER; note = 2'-fluorocytosine
  modified_base 15: mod_base = OTHER; note = 2'-fluoroadenosine
  modified_base 18: mod_base = OTHER; note = 2'-Omethylguanosine phosphorothiorate
  modified_base 19: mod_base = OTHER; note = Adenosine phosphorothiorate
  modified_base 20: mod_base = OTHER; note = 2'-fluorouridine
  modified_base 22: mod_base = OTHER; note = 2'-fluoroguanosine
  modified_base 24: mod_base = OTHER; note = 2'-fluoroguanosine
  modified_base 25: mod_base = OTHER; note = 2'-Omethylcytosine phosphorothiorate
  modified_base 26: mod_base = OTHER; note = 2'-Omethyladenosine
  modified_base 30: mod_base = OTHER; note = 2'-fluoroguanosine
  modified_base 33: mod_base = OTHER; note = 2'-fluorouridine
  modified_base 36: mod_base = OTHER; note = Adenosine phosphorothiorate
  modified_base 38: mod_base = OTHER; note = 2'-fluoroadenosine
  modified_base 47: mod_base = OTHER; note = Uridine phosphorothiorate
  modified_base 50: mod_base = OTHER; note = 2'-Omethylcytosine
  modified_base 51: mod_base = OTHER; note = Guanosine phosphorothiorate
  modified_base 52: mod_base = OTHER; note = 2'-Omethylguanosine phosphorothiorate
  modified_base 53: mod_base = OTHER; note = Guanosine phosphorothiorate
  modified_base 54: mod_base = OTHER; note = 2'-Omethyluridine
  modified_base 56: mod_base = OTHER; note = 2'-Omethylcytosine
  modified_base 58: mod_base = OTHER; note = 2'-fluoroadenosine
  modified_base 59: mod_base = OTHER; note = 2'-fluoroguanosine
  modified_base 61: mod_base = OTHER; note = 2'-fluorocytosine
  modified_base 62: mod_base = OTHER; note = Cytosine phosphorothiorate
  modified_base 64: mod_base = OTHER; note = 2'-fluoroguanosine
  modified_base 68: mod_base = OTHER; note = 2'-Omethylguanosine
  modified_base 69: mod_base = OTHER; note = 2'-Omethyladenosine
  modified_base 70: mod_base = OTHER; note = 2'-Omethylguanosine
  modified_base 71: mod_base = OTHER; note = 2'-fluorouridine phosphorothiorate
  modified_base 73: mod_base = OTHER; note = 2'-Omethylguanosine

SEQ ID NO: 3937 - DNA, 76 bp, synthetic construct; identical to SEQ ID NO: 1924
  source 1..76: mol_type = other DNA
  modified_base 1: mod_base = OTHER; note = 2'-Omethylguanosine phosphorothiorate
  modified_base 2: mod_base = OTHER; note = 2'-Omethylguanosine phosphorothiorate
  modified_base 12: mod_base = OTHER; note = Guanosine phosphorothiorate
  modified_base 24: mod_base = OTHER; note = 2'-O-(2-Methoxyethyl) guanosine
  modified_base 26: mod_base = OTHER; note = 2'-fluoroadenosine
  modified_base 57: mod_base = OTHER; note = 2'-O-(2-Methoxyethyl) guanosine
  modified_base 58: mod_base = OTHER; note = Adenosine phosphorothiorate
  modified_base 60: mod_base = OTHER; note = Uridine phosphorothiorate
  modified_base 61: mod_base = OTHER; note = 2'-O-(2-Methoxyethyl) 5-methylcytosine
  modified_base 74: mod_base = OTHER; note = Cytosine phosphorothiorate
  modified_base 75: mod_base = OTHER; note = 2'-Omethylcytosine phosphorothiorate
  modified_base 76: mod_base = OTHER; note = 2'-Omethyladenosine
  misc_feature 1..14: note = RNA
  misc_feature 15: note = DNA
  misc_feature 16..53: note = RNA
  misc_feature 54: note = DNA
  misc_feature 55..76: note = RNA

SEQ ID NO: 3938 - RNA, 75 nt, synthetic construct; identical to SEQ ID NO: 1045
  source 1..75: mol_type = other RNA
  modified_base 2: mod_base = OTHER; note = 2'-Omethylguanosine phosphorothiorate
  modified_base 3: mod_base = OTHER; note = 2'-Omethyluridine phosphorothiorate
  modified_base 16: mod_base = OTHER; note = 2'-Omethyluridine
  modified_base 18: mod_base = OTHER; note = 2'-Omethylguanosine phosphorothiorate
  modified_base 26: mod_base = OTHER; note = 2'-Omethyluridine phosphorothiorate
  modified_base 31: mod_base = OTHER; note = 2'-Omethyladenosine
  modified_base 40: mod_base = OTHER; note = 2'-Omethylcytosine
  modified_base 55: mod_base = OTHER; note = 2'-Omethylcytosine
  modified_base 62: mod_base = OTHER; note = 2'-Omethylcytosine phosphorothiorate
  modified_base 63: mod_base = OTHER; note = 2'-Omethylguanosine
  modified_base 67: mod_base = OTHER; note = 2'-Omethylguanosine
  modified_base 72: mod_base = OTHER; note = 2'-Omethyluridine
  modified_base 73: mod_base = OTHER; note = Cytosine phosphorothiorate
  modified_base 74: mod_base = OTHER; note = 2'-Omethylcytosine phosphorothiorate
  modified_base 75: mod_base = OTHER; note = 2'-fluoroadenosine

SEQ ID NO: 3939 - RNA, 86 nt, synthetic construct; identical to SEQ ID NO: 3290
  source 1..86: mol_type = other RNA
  modified_base 26: mod_base = OTHER; note = Guanosine phosphorothiorate

SEQ ID NO: 3940 - RNA, 75 nt, synthetic construct; identical to SEQ ID NO: 1045
  source 1..75: mol_type = other RNA
  modified_base 1: mod_base = OTHER; note = 2'-Omethylguanosine phosphorothiorate
  modified_base 2: mod_base = OTHER; note = 2'-Omethylguanosine
  modified_base 11: mod_base = OTHER; note = 2'-fluorouridine
  modified_base 16: mod_base = OTHER; note = 2'-fluorouridine
  modified_base 19: mod_base = OTHER; note = 2'-fluorouridine
  modified_base 20: mod_base = OTHER; note = Adenosine phosphorothiorate
  modified_base 21: mod_base = OTHER; note = Adenosine phosphorothiorate
  modified_base 23: mod_base = OTHER; note = Cytosine phosphorothiorate
  modified_base 27: mod_base = OTHER; note = 2'-Omethylcytosine
  modified_base 28: mod_base = OTHER; note = 2'-fluorouridine
  modified_base 29: mod_base = OTHER; note = 2'-Omethylguanosine
  modified_base 30: mod_base = OTHER; note = 2'-Omethylguanosine
  modified_base 37: mod_base = OTHER; note = 2'-fluoroadenosine
  modified_base 44: mod_base = OTHER; note = 2'-fluorocytosine
  modified_base 50: mod_base = OTHER; note = 2'-fluoroguanosine phosphorothiorate
  modified_base 55: mod_base = OTHER; note = 2'-fluorocytosine phosphorothiorate
  modified_base 58: mod_base = OTHER; note = 2'-fluoroguanosine
  modified_base 65: mod_base = OTHER; note = Uridine phosphorothiorate
  modified_base 67: mod_base = OTHER; note = 2'-fluoroguanosine
  modified_base 74: mod_base = OTHER; note = Cytosine phosphorothiorate

SEQ ID NO: 3941 - RNA, 76 nt, synthetic construct; identical to SEQ ID NO: 625
  source 1..76: mol_type = other RNA
  modified_base 10: mod_base = OTHER; note = 2'-Omethylguanosine
  modified_base 11: mod_base = OTHER; note = 2'-Omethylcytosine
  modified_base 12: mod_base = OTHER; note = 2'-Omethylguanosine
  modified_base 13: mod_base = OTHER; note = 2'-Omethylcytosine
  modified_base 22: mod_base = OTHER; note = 2'-Omethylguanosine
  modified_base 23: mod_base = OTHER; note = 2'-Omethylcytosine
  modified_base 24: mod_base = OTHER; note = 2'-Omethylguanosine
  modified_base 25: mod_base = OTHER; note = 2'-Omethylcytosine
  modified_base 54: mod_base = OTHER; note = Uridine phosphorothiorate
  modified_base 55: mod_base = OTHER; note = Uridine phosphorothiorate
  modified_base 56: mod_base = OTHER; note = Cytosine phosphorothiorate
  modified_base 57: mod_base = OTHER; note = Guanosine phosphorothiorate

SEQ ID NO: 3942 - RNA, 76 nt, synthetic construct; identical to SEQ ID NO: 3316
  source 1..76: mol_type = other RNA
  modified_base 1: mod_base = OTHER; note = 2'-Omethyladenosine
  modified_base 2: mod_base = OTHER; note = 2'-Omethylcytosine
  modified_base 3: mod_base = OTHER; note = 2'-Omethylcytosine
  modified_base 4: mod_base = OTHER; note = 2'-Omethyladenosine
  modified_base 5: mod_base = OTHER; note = 2'-Omethyladenosine
  modified_base 6: mod_base = OTHER; note = 2'-Omethylcytosine
  modified_base 14: mod_base = OTHER; note = 2'-Omethyladenosine
  modified_base 15: mod_base = OTHER; note = 2'-Omethyladenosine
  modified_base 16: mod_base = OTHER; note = 2'-Omethyluridine
  modified_base 17: mod_base = OTHER; note = 2'-Omethylguanosine
  modified_base 18: mod_base = OTHER; note = 2'-Omethylguanosine
  modified_base 20: mod_base = OTHER; note = 2'-Omethyluridine
  modified_base 25: mod_base = OTHER; note = 2'-Omethylcytosine
  modified_base 33: mod_base = OTHER; note = 2'-fluorouridine
  modified_base 35: mod_base = OTHER; note = Cytosine phosphorothiorate
  modified_base 37: mod_base = OTHER; note = Adenosine phosphorothiorate
  modified_base 38: mod_base = OTHER; note = Adenosine phosphorothiorate
  modified_base 41: mod_base = OTHER; note = 2'-fluorocytosine
  modified_base 42: mod_base = OTHER; note = 2'-Omethyladenosine
  modified_base 43: mod_base = OTHER; note = 2'-Omethyladenosine
  modified_base 44: mod_base = OTHER; note = 2'-fluoroadenosine
  modified_base 49: mod_base = OTHER; note = 2'-Omethylcytosine
  modified_base 50: mod_base = OTHER; note = 2'-Omethylcytosine
  modified_base 52: mod_base = OTHER; note = 2'-Omethylguanosine
  modified_base 54: mod_base = OTHER; note = 2'-Omethyluridine
  modified_base 55: mod_base = OTHER; note = Uridine phosphorothiorate
  modified_base 56: mod_base = OTHER; note = 2'-Omethylcytosine
  modified_base 57: mod_base = OTHER; note = 2'-fluoroguanosine
  modified_base 59: mod_base = OTHER; note = 2'-Omethylguanosine
  modified_base 61: mod_base = OTHER; note = 2'-Omethylcytosine
  modified_base 62: mod_base = OTHER; note = 2'-Omethylcytosine
  modified_base 63: mod_base = OTHER; note = 2'-fluorocytosine
  modified_base 64: mod_base = OTHER; note = 2'-Omethylguanosine
  modified_base 65: mod_base = OTHER; note = 2'-Omethylguanosine
  modified_base 73: mod_base = OTHER; note = 2'-Omethylguanosine

SEQ ID NO: 3943 - RNA, 85 nt, synthetic construct; identical to SEQ ID NO: 3297
  source 1..85: mol_type = other RNA
  modified_base 1: mod_base = OTHER; note = 2'-Omethylguanosine phosphorothiorate
  modified_base 84: mod_base = OTHER; note = 2'-Omethylcytosine phosphorothiorate

SEQ ID NO: 3944 - RNA, 76 nt, synthetic construct; identical to SEQ ID NO: 625
  source 1..76: mol_type = other RNA
  modified_base 1: mod_base = OTHER; note = 2'-Omethylguanosine phosphorothiorate
  modified_base 2: mod_base = OTHER; note = 2'-Omethylguanosine
  modified_base 3: mod_base = OTHER; note = 2'-Omethylcytosine
  modified_base 4: mod_base = OTHER; note = 2'-Omethyluridine
  modified_base 5: mod_base = OTHER; note = 2'-Omethylcytosine
  modified_base 6: mod_base = OTHER; note = 2'-Omethylcytosine
  modified_base 14: mod_base = OTHER; note = 2'-Omethyladenosine
  modified_base 15: mod_base = OTHER; note = 2'-fluoroadenosine
  modified_base 16: mod_base = OTHER; note = 2'-Omethyluridine
  modified_base 17: mod_base = OTHER; note = 2'-Omethylguanosine
  modified_base 18: mod_base = OTHER; note = 2'-Omethylguanosine
  modified_base 19: mod_base = OTHER; note = 2'-fluoroadenosine
  modified_base 20: mod_base = OTHER; note = 2'-Omethyluridine
  modified_base 49: mod_base = OTHER; note = 2'-Omethylcytosine
  modified_base 50: mod_base = OTHER; note = 2'-Omethylcytosine
  modified_base 51: mod_base = OTHER; note = 2'-Omethylguanosine
  modified_base 52: mod_base = OTHER; note = 2'-Omethylguanosine
  modified_base 53: mod_base = OTHER; note = 2'-Omethylguanosine
  modified_base 54: mod_base = OTHER; note = 2'-Omethyluridine
  modified_base 56: mod_base = OTHER; note = 2'-Omethylcytosine
  modified_base 57: mod_base = OTHER; note = 2'-fluoroguanosine
  modified_base 59: mod_base = OTHER; note = 2'-Omethylguanosine
  modified_base 61: mod_base = OTHER; note = 2'-Omethylcytosine
  modified_base 62: mod_base = OTHER; note = 2'-Omethylcytosine
  modified_base 63: mod_base = OTHER; note = 2'-Omethylcytosine
  modified_base 64: mod_base = OTHER; note = 2'-Omethylguanosine
  modified_base 65: mod_base = OTHER; note = 2'-Omethylguanosine
  modified_base 66: mod_base = OTHER; note = 2'-Omethylcytosine
  modified_base 67: mod_base = OTHER; note = 2'-Omethylguanosine
  modified_base 68: mod_base = OTHER; note = 2'-Omethylguanosine
  modified_base 69: mod_base = OTHER; note = 2'-Omethyladenosine
  modified_base 73: mod_base = OTHER; note = 2'-Omethylguanosine

SEQ ID NO: 3945 - RNA, 74 nt, synthetic construct; identical to SEQ ID NO: 3293
  source 1..74: mol_type = other RNA
  modified_base 1: mod_base = OTHER; note = 2'-Omethyladenosine
  modified_base 4: mod_base = OTHER; note = Uridine phosphorothiorate
  modified_base 9: mod_base = OTHER; note = Guanosine phosphorothiorate
  modified_base 25: mod_base = OTHER; note = Uridine phosphorothiorate
  modified_base 49: mod_base = OTHER; note = 2'-fluoroguanosine
  modified_base 51: mod_base = OTHER; note = 2'-fluoroguanosine
  modified_base 73: mod_base = OTHER; note = 2'-Omethylcytosine phosphorothiorate
  modified_base 74: mod_base = OTHER; note = 2'-fluoroadenosine

SEQ ID NO: 3946 - RNA, 75 nt, synthetic construct; identical to SEQ ID NO: 3299
  source 1..75: mol_type = other RNA
  modified_base 1: mod_base = OTHER; note = 2'-Omethylcytosine
  modified_base 6: mod_base = OTHER; note = 2'-Omethylguanosine phosphorothiorate
  modified_base 9: mod_base = OTHER; note = Guanosine phosphorothiorate
  modified_base 11: mod_base = OTHER; note = 2'-fluorouridine phosphorothiorate
  modified_base 17: mod_base = OTHER; note = 2'-fluoroguanosine
  modified_base 21: mod_base = OTHER; note = 2'-fluoroguanosine phosphorothiorate
  modified_base 23: mod_base = OTHER; note = Guanosine phosphorothiorate
  modified_base 28: mod_base = OTHER; note = 2'-fluoroadenosine
  modified_base 29: mod_base = OTHER; note = 2'-fluoroguanosine
  modified_base 37: mod_base = OTHER; note = 2'-Omethyladenosine phosphorothiorate
  modified_base 38: mod_base = OTHER; note = Uridine phosphorothiorate
  modified_base 39: mod_base = OTHER; note = 2'-Omethylcytosine phosphorothiorate
  modified_base 40: mod_base = OTHER; note = 2'-fluorouridine
  modified_base 41: mod_base = OTHER; note = 2'-Omethylguanosine phosphorothiorate
  modified_base 45: mod_base = OTHER; note = 2'-fluoroguanosine
  modified_base 47: mod_base = OTHER; note = 2'-fluorocytosine
  modified_base 50: mod_base = OTHER; note = 2'-fluoroguanosine phosphorothiorate
  modified_base 54: mod_base = OTHER; note = 2'-Omethyluridine phosphorothiorate
  modified_base 55: mod_base = OTHER; note = Cytosine phosphorothiorate
  modified_base 64: mod_base = OTHER; note = 2'-fluoroguanosine phosphorothiorate
  modified_base 73: mod_base = OTHER; note = Cytosine phosphorothiorate
  modified_base 74: mod_base = OTHER; note = Cytosine phosphorothiorate
  modified_base 75: mod_base = OTHER; note = 2'-fluoroadenosine

SEQ ID NO: 3947 - RNA, 75 nt, synthetic construct; identical to SEQ ID NO: 3299
  source 1..75: mol_type = other RNA
  modified_base 1: mod_base = OTHER; note = Cytosine phosphorothiorate
  modified_base 14: mod_base = OTHER; note = 2'-fluoroguanosine
  modified_base 15: mod_base = OTHER; note = 2'-fluorouridine
  modified_base 33: mod_base = OTHER; note = 2'-fluorouridine
  modified_base 49: mod_base = OTHER; note = 2'-fluoroadenosine phosphorothiorate
  modified_base 51: mod_base = OTHER; note = 2'-Omethylguanosine phosphorothiorate
  modified_base 72: mod_base = OTHER; note = 2'-Omethylguanosine
  modified_base 73: mod_base = OTHER; note = Cytosine phosphorothiorate
  modified_base 74: mod_base = OTHER; note = 2'-Omethylcytosine

SEQ ID NO: 3948 - RNA, 76 nt, synthetic construct; identical to SEQ ID NO: 625
  source 1..76: mol_type = other RNA
  modified_base 1: mod_base = OTHER; note = 2'-Omethylguanosine phosphorothiorate
  modified_base 2: mod_base = OTHER; note = 2'-Omethylguanosine phosphorothiorate
  modified_base 3: mod_base = OTHER; note = 2'-Omethylcytosine
  modified_base 4: mod_base = OTHER; note = 2'-Omethyluridine
  modified_base 5: mod_base = OTHER; note = 2'-Omethylcytosine
  modified_base 6: mod_base = OTHER; note = 2'-Omethylcytosine
  modified_base 10: mod_base = OTHER; note = 2'-Omethylguanosine
  modified_base 11: mod_base = OTHER; note = 2'-Omethylcytosine
  modified_base 12: mod_base = OTHER; note = 2'-Omethylguanosine
  modified_base 13: mod_base = OTHER; note = 2'-Omethylcytosine
  modified_base 14: mod_base = OTHER; note = 2'-Omethyladenosine
  modified_base 15: mod_base = OTHER; note = 2'-fluoroadenosine
  modified_base 16: mod_base = OTHER; note = 2'-Omethyluridine
  modified_base 17: mod_base = OTHER; note = 2'-Omethylguanosine
  modified_base 18: mod_base = OTHER; note = 2'-Omethylguanosine
  modified_base 19: mod_base = OTHER; note = 2'-fluoroadenosine
  modified_base 20: mod_base = OTHER; note = 2'-Omethyluridine
  modified_base 21: mod_base = OTHER; note = 2'-fluoroadenosine
  modified_base 22: mod_base = OTHER; note = 2'-Omethylguanosine
  modified_base 23: mod_base = OTHER; note = 2'-Omethylcytosine
  modified_base 24: mod_base = OTHER; note = 2'-Omethylguanosine
  modified_base 25: mod_base = OTHER; note = 2'-Omethylcytosine
  modified_base 38: mod_base = OTHER; note = Adenosine phosphorothiorate
  modified_base 39: mod_base = OTHER; note = Uridine phosphorothiorate
  modified_base 40: mod_base = OTHER; note = 2'-fluorouridine
  modified_base 43: mod_base = OTHER; note = 2'-Omethyladenosine
  modified_base 44: mod_base = OTHER; note = 2'-Omethyladenosine
  modified_base 45: mod_base = OTHER; note = 2'-Omethylguanosine
  modified_base 46: mod_base = OTHER; note = 2'-fluoroguanosine
  modified_base 48: mod_base = OTHER; note = 2'-fluorouridine
  modified_base 49: mod_base = OTHER; note = 2'-Omethylcytosine
  modified_base 50: mod_base = OTHER; note = 2'-Omethylcytosine
  modified_base 54: mod_base = OTHER; note = Uridine phosphorothiorate
  modified_base 55: mod_base = OTHER; note = Uridine phosphorothiorate
  modified_base 56: mod_base = OTHER; note = 2'-Omethylcytosine
  modified_base 57: mod_base = OTHER; note = Guanosine phosphorothiorate
  modified_base 61: mod_base = OTHER; note = 2'-Omethylcytosine
  modified_base 62: mod_base = OTHER; note = 2'-Omethylcytosine
  modified_base 63: mod_base = OTHER; note = 2'-fluorocytosine
  modified_base 64: mod_base = OTHER; note = 2'-Omethylguanosine
  modified_base 65: mod_base = OTHER; note = 2'-Omethylguanosine
  modified_base 66: mod_base = OTHER; note = 2'-Omethylcytosine
  modified_base 67: mod_base = OTHER; note = 2'-Omethylguanosine
  modified_base 68: mod_base = OTHER; note = 2'-Omethylguanosine

SEQ ID NO: 3949 - RNA, 86 nt, synthetic construct; identical to SEQ ID NO: 3290
  source 1..86: mol_type = other RNA
  modified_base 39: mod_base = OTHER; note = Uridine phosphorothiorate

SEQ ID NO: 3950 - RNA, 76 nt, synthetic construct; identical to SEQ ID NO: 3447
  source 1..76: mol_type = other RNA
  modified_base 1: mod_base = OTHER; note = 2'-Omethylguanosine phosphorothiorate
  modified_base 2: mod_base = OTHER; note = 2'-Omethylcytosine
  modified_base 3: mod_base = OTHER; note = 2'-Omethylcytosine
  modified_base 4: mod_base = OTHER; note = 2'-Omethylcytosine
  modified_base 5: mod_base = OTHER; note = 2'-Omethylguanosine
  modified_base 6: mod_base = OTHER; note = 2'-Omethyladenosine
  modified_base 44: mod_base = OTHER; note = 2'-Omethyladenosine
  modified_base 45: mod_base = OTHER; note = 2'-Omethylguanosine
  modified_base 46: mod_base = OTHER; note = 2'-fluoroguanosine
  modified_base 47: mod_base = OTHER; note = 2'-fluorouridine
  modified_base 48: mod_base = OTHER; note = 2'-Omethyluridine
  modified_base 49: mod_base = OTHER; note = 2'-Omethylcytosine
  modified_base 73: mod_base = OTHER; note = 2'-Omethylguanosine

SEQ ID NO: 3951 - RNA, 76 nt, synthetic construct; identical to SEQ ID NO: 625
  source 1..76: mol_type = other RNA
  modified_base 1: mod_base = OTHER; note = 2'-Omethylguanosine phosphorothiorate
  modified_base 2: mod_base = OTHER; note = 2'-Omethylguanosine
  modified_base 3: mod_base = OTHER; note = 2'-Omethylcytosine
  modified_base 4: mod_base = OTHER; note = 2'-Omethyluridine
  modified_base 5: mod_base = OTHER; note = 2'-Omethylcytosine
  modified_base 6: mod_base = OTHER; note = 2'-Omethylcytosine
  modified_base 13: mod_base = OTHER; note = 2'-Omethylcytosine
  modified_base 17: mod_base = OTHER; note = 2'-Omethylguanosine
  modified_base 20: mod_base = OTHER; note = 2'-Omethyluridine
  modified_base 25: mod_base = OTHER; note = 2'-Omethylcytosine
  modified_base 33: mod_base = OTHER; note = 2'-fluorouridine
  modified_base 35: mod_base = OTHER; note = Cytosine phosphorothiorate
  modified_base 37: mod_base = OTHER; note = Adenosine phosphorothiorate
  modified_base 38: mod_base = OTHER; note = Adenosine phosphorothiorate
  modified_base 49: mod_base = OTHER; note = 2'-Omethylcytosine
  modified_base 50: mod_base = OTHER; note = 2'-Omethylcytosine
  modified_base 51: mod_base = OTHER; note = 2'-Omethylguanosine
  modified_base 52: mod_base = OTHER; note = 2'-Omethylguanosine
  modified_base 53: mod_base = OTHER; note = 2'-Omethylguanosine
  modified_base 56: mod_base = OTHER; note = 2'-Omethylcytosine
  modified_base 57: mod_base = OTHER; note = 2'-Omethylguanosine
  modified_base 61: mod_base = OTHER; note = 2'-Omethylcytosine
  modified_base 62: mod_base = OTHER; note = 2'-Omethylcytosine
  modified_base 63: mod_base = OTHER; note = 2'-fluorocytosine
  modified_base 64: mod_base = OTHER; note = 2'-Omethylguanosine
  modified_base 65: mod_base = OTHER; note = 2'-Omethylguanosine
  modified_base 66: mod_base = OTHER; note = 2'-Omethylcytosine
  modified_base 67: mod_base = OTHER; note = 2'-Omethylguanosine
  modified_base 68: mod_base = OTHER; note = 2'-Omethylguanosine
  modified_base 69: mod_base = OTHER; note = 2'-fluoroadenosine
  modified_base 71: mod_base = OTHER; note = 2'-Omethyluridine
  modified_base 73: mod_base = OTHER; note = 2'-Omethylguanosine
  modified_base 75: mod_base = OTHER; note = 2'-fluorocytosine phosphorothiorate

SEQ ID NO: 3952 - RNA, 86 nt, synthetic construct
  source 1..86: mol_type = other RNA
gctggtttgcccgagtggttaagggggaagacttcagatcttctgcactgaagtgcgcgtgggttcgaaccccacagccagcacca

SEQ ID NO: 3953 - DNA, 76 bp, synthetic construct; identical to SEQ ID NO: 1924
  source 1..76: mol_type = other DNA
  misc_feature 1..53: note = RNA
  misc_feature 54..60: note = DNA
  misc_feature 61..76: note = RNA

SEQ ID NO: 3954 - RNA, 76 nt, synthetic construct; identical to SEQ ID NO: 625
  source 1..76: mol_type = other RNA
  modified_base 1: mod_base = OTHER; note = Guanosine phosphorothiorate
  modified_base 2: mod_base = OTHER; note = 2'-fluoroguanosine
  modified_base 5: mod_base = OTHER; note = 2'-fluorocytosine
  modified_base 8: mod_base = OTHER; note = Uridine phosphorothiorate
  modified_base 11: mod_base = OTHER; note = 2'-fluorocytosine
  modified_base 12: mod_base = OTHER; note = 2'-Omethylguanosine
  modified_base 20: mod_base = OTHER; note = 2'-fluorouridine
  modified_base 22: mod_base = OTHER; note = 2'-Omethylguanosine
  modified_base 24: mod_base = OTHER; note = 2'-Omethylguanosine
  modified_base 31: mod_base = OTHER; note = 2'-Omethyladenosine
  modified_base 32: mod_base = OTHER; note = 2'-fluorocytosine
  modified_base 33: mod_base = OTHER; note = 2'-fluorouridine
  modified_base 34: mod_base = OTHER; note = Uridine phosphorothiorate
  modified_base 40: mod_base = OTHER; note = 2'-Omethyluridine
  modified_base 44: mod_base = OTHER; note = 2'-fluoroadenosine
  modified_base 46: mod_base = OTHER; note = 2'-Omethylguanosine phosphorothiorate
  modified_base 47: mod_base = OTHER; note = 2'-Omethyluridine
  modified_base 49: mod_base = OTHER; note = 2'-Omethylcytosine phosphorothiorate
  modified_base 50: mod_base = OTHER; note = 2'-Omethylcytosine
  modified_base 52: mod_base = OTHER; note = 2'-fluoroguanosine
  modified_base 53: mod_base = OTHER; note = Guanosine phosphorothiorate
  modified_base 62: mod_base = OTHER; note = 2'-fluorocytosine
  modified_base 63: mod_base = OTHER; note = 2'-fluorocytosine phosphorothiorate
  modified_base 64: mod_base = OTHER; note = 2'-Omethylguanosine
  modified_base 65: mod_base = OTHER; note = 2'-fluoroguanosine
  modified_base 67: mod_base = OTHER; note = Guanosine phosphorothiorate
  modified_base 68: mod_base = OTHER; note = 2'-Omethylguanosine
  modified_base 69: mod_base = OTHER; note = Adenosine phosphorothiorate
  modified_base 70: mod_base = OTHER; note = 2'-Omethylguanosine
  modified_base 71: mod_base = OTHER; note = 2'-Omethyluridine
  modified_base 75: mod_base = OTHER; note = Cytosine phosphorothiorate
  modified_base 76: mod_base = OTHER; note = 2'-fluoroadenosine

SEQ ID NO: 3955 - RNA, 76 nt, synthetic construct; identical to SEQ ID NO: 625
  source 1..76: mol_type = other RNA
  modified_base 1: mod_base = OTHER; note = 2'-fluoroguanosine phosphorothiorate
  modified_base 2: mod_base = OTHER; note = 2'-Omethylguanosine
  modified_base 3: mod_base = OTHER; note = 2'-fluorocytosine
  modified_base 4: mod_base = OTHER; note = 2'-Omethyluridine
  modified_base 5: mod_base = OTHER; note = Cytosine phosphorothiorate
  modified_base 7: mod_base = OTHER; note = Guanosine phosphorothiorate
  modified_base 9: mod_base = OTHER; note = Guanosine phosphorothiorate
  modified_base 10: mod_base = OTHER; note = 2'-fluoroguanosine
  modified_base 12: mod_base = OTHER; note = 2'-Omethylguanosine
  modified_base 14: mod_base = OTHER; note = 2'-fluoroadenosine
  modified_base 15: mod_base = OTHER; note = Adenosine phosphorothiorate
  modified_base 16: mod_base = OTHER; note = 2'-Omethyluridine
  modified_base 20: mod_base = OTHER; note = 2'-Omethyluridine
  modified_base 22: mod_base = OTHER; note = Guanosine phosphorothiorate
  modified_base 23: mod_base = OTHER; note = 2'-fluorocytosine
  modified_base 24: mod_base = OTHER; note = Guanosine phosphorothiorate
  modified_base 26: mod_base = OTHER; note = 2'-Omethyladenosine phosphorothiorate
  modified_base 27: mod_base = OTHER; note = 2'-fluorouridine
  modified_base 28: mod_base = OTHER; note = Uridine phosphorothiorate
  modified_base 29: mod_base = OTHER; note = 2'-fluoroguanosine phosphorothiorate
  modified_base 30: mod_base = OTHER; note = 2'-fluoroguanosine phosphorothiorate
  modified_base 34: mod_base = OTHER; note = 2'-Omethyluridine
  modified_base 36: mod_base = OTHER; note = Adenosine phosphorothiorate
  modified_base 40: mod_base = OTHER; note = 2'-fluorouridine
  modified_base 42: mod_base = OTHER; note = 2'-Omethyladenosine
  modified_base 45: mod_base = OTHER; note = Guanosine phosphorothiorate
  modified_base 46: mod_base = OTHER; note = 2'-fluoroguanosine
  modified_base 47: mod_base = OTHER; note = 2'-Omethyluridine
  modified_base 50: mod_base = OTHER; note = Cytosine phosphorothiorate
  modified_base 59: mod_base = OTHER; note = 2'-Omethylguanosine
  modified_base 61: mod_base = OTHER; note = 2'-fluorocytosine
  modified_base 62: mod_base = OTHER; note = Cytosine phosphorothiorate
  modified_base 63: mod_base = OTHER; note = 2'-fluorocytosine
  modified_base 65: mod_base = OTHER; note = 2'-fluoroguanosine
  modified_base 67: mod_base = OTHER; note = 2'-Omethylguanosine
  modified_base 68: mod_base = OTHER; note = 2'-Omethylguanosine
  modified_base 70: mod_base = OTHER; note = Guanosine phosphorothiorate
  modified_base 71: mod_base = OTHER; note = 2'-fluorouridine

SEQ ID NO: 3956 - RNA, 76 nt, synthetic construct; identical to SEQ ID NO: 3342
  source 1..76: mol_type = other RNA
  modified_base 1: mod_base = OTHER; note = 2'-Omethylguanosine phosphorothiorate
  modified_base 2: mod_base = OTHER; note = 2'-Omethylguanosine phosphorothiorate
  modified_base 3: mod_base = OTHER; note = 2'-Omethylcytosine
  modified_base 4: mod_base = OTHER; note = 2'-Omethyluridine
  modified_base 5: mod_base = OTHER; note = 2'-Omethylcytosine
  modified_base 6: mod_base = OTHER; note = 2'-Omethylcytosine
  modified_base 16: mod_base = OTHER; note = 2'-Omethyluridine
  modified_base 17: mod_base = OTHER; note = 2'-Omethylguanosine
  modified_base 18: mod_base = OTHER; note = 2'-Omethylguanosine
  modified_base 20: mod_base = OTHER; note = 2'-Omethyluridine
  modified_base 25: mod_base = OTHER; note = 2'-Omethylcytosine
  modified_base 33: mod_base = OTHER; note = 2'-fluorouridine
  modified_base 35: mod_base = OTHER; note = Cytosine phosphorothiorate
  modified_base 37: mod_base = OTHER; note = Adenosine phosphorothiorate
  modified_base 38: mod_base = OTHER; note = Adenosine phosphorothiorate
  modified_base 41: mod_base = OTHER; note = 2'-Omethylcytosine
  modified_base 44: mod_base = OTHER; note = 2'-Omethyladenosine
  modified_base 45: mod_base = OTHER; note = 2'-Omethylguanosine
  modified_base 46: mod_base = OTHER; note = 2'-fluoroguanosine
  modified_base 47: mod_base = OTHER; note = 2'-fluorouridine
  modified_base 48: mod_base = OTHER; note = 2'-fluorouridine
  modified_base 56: mod_base = OTHER; note = 2'-Omethylcytosine
  modified_base 59: mod_base = OTHER; note = 2'-Omethylguanosine
  modified_base 73: mod_base = OTHER; note = 2'-Omethylguanosine

SEQ ID NO: 3957 - RNA, 76 nt, synthetic construct; identical to SEQ ID NO: 625
  source 1..76: mol_type = other RNA
  modified_base 1: mod_base = OTHER; note = 2'-Omethylguanosine
  modified_base 2: mod_base = OTHER; note = 2'-Omethylguanosine
  modified_base 3: mod_base = OTHER; note = 2'-Omethylcytosine
  modified_base 4: mod_base = OTHER; note = 2'-Omethyluridine
  modified_base 5: mod_base = OTHER; note = 2'-Omethylcytosine
  modified_base 6: mod_base = OTHER; note = 2'-Omethylcytosine
  modified_base 11: mod_base = OTHER; note = 2'-Omethylcytosine
  modified_base 12: mod_base = OTHER; note = 2'-Omethylguanosine phosphorothiorate
  modified_base 13: mod_base = OTHER; note = 2'-Omethylcytosine
  modified_base 14: mod_base = OTHER; note = 2'-Omethyladenosine
  modified_base 16: mod_base = OTHER; note = Uridine phosphorothiorate
  modified_base 17: mod_base = OTHER; note = 2'-Omethylguanosine
  modified_base 18: mod_base = OTHER; note = 2'-Omethylguanosine
  modified_base 20: mod_base = OTHER; note = 2'-Omethyluridine
  modified_base 21: mod_base = OTHER; note = 2'-fluoroadenosine phosphorothiorate
  modified_base 22: mod_base = OTHER; note = 2'-Omethylguanosine
  modified_base 23: mod_base = OTHER; note = 2'-Omethylcytosine
  modified_base 24: mod_base = OTHER; note = 2'-Omethylguanosine
  modified_base 25: mod_base = OTHER; note = 2'-Omethylcytosine
  modified_base 26: mod_base = OTHER; note = Adenosine phosphorothiorate
  modified_base 30: mod_base = OTHER; note = 2'-Omethylguanosine
  modified_base 31: mod_base = OTHER; note = 2'-Omethyladenosine phosphorothiorate
  modified_base 33: mod_base = OTHER; note = 2'-fluorouridine
  modified_base 35: mod_base = OTHER; note = 2'-Omethylcytosine phosphorothiorate
  modified_base 37: mod_base = OTHER; note = 2'-Omethyladenosine phosphorothiorate
  modified_base 38: mod_base = OTHER; note = Adenosine phosphorothiorate
  modified_base 39: mod_base = OTHER; note = 2'-Omethyluridine phosphorothiorate
  modified_base 40: mod_base = OTHER; note = 2'-Omethyluridine
  modified_base 41: mod_base = OTHER; note = 2'-Omethylcytosine
  modified_base 42: mod_base = OTHER; note = Adenosine phosphorothiorate
  modified_base 44: mod_base = OTHER; note = 2'-Omethyladenosine
  modified_base 45: mod_base = OTHER; note = Guanosine phosphorothiorate
  modified_base 48: mod_base = OTHER; note = 2'-Omethyluridine phosphorothiorate
  modified_base 49: mod_base = OTHER; note = 2'-Omethylcytosine phosphorothiorate
  modified_base 50: mod_base = OTHER; note = 2'-Omethylcytosine
  modified_base 51: mod_base = OTHER; note = 2'-Omethylguanosine
  modified_base 52: mod_base = OTHER; note = 2'-Omethylguanosine
  modified_base 55: mod_base = OTHER; note = Uridine phosphorothiorate
  modified_base 57: mod_base = OTHER; note = 2'-Omethylguanosine
  modified_base 59: mod_base = OTHER; note = 2'-Omethylguanosine
  modified_base 62: mod_base = OTHER; note = 2'-Omethylcytosine
  modified_base 63: mod_base = OTHER; note = 2'-fluorocytosine
  modified_base 64: mod_base = OTHER; note = 2'-Omethylguanosine
  modified_base 65: mod_base = OTHER; note = 2'-Omethylguanosine phosphorothiorate
  modified_base 66: mod_base = OTHER; note = 2'-Omethylcytosine
  modified_base 67: mod_base = OTHER; note = 2'-Omethylguanosine phosphorothiorate
  modified_base 68: mod_base = OTHER; note = 2'-Omethylguanosine
  modified_base 69: mod_base = OTHER; note = 2'-Omethyladenosine
  modified_base 70: mod_base = OTHER; note = 2'-Omethylguanosine
  modified_base 72: mod_base = OTHER; note = Cytosine phosphorothiorate
  modified_base 73: mod_base = OTHER; note = 2'-Omethylguanosine
  modified_base 74: mod_base = OTHER; note = 2'-fluorocytosine phosphorothiorate
  modified_base 75: mod_base = OTHER; note = 2'-fluorocytosine phosphorothiorate
  modified_base 76: mod_base = OTHER; note = 2'-Omethyladenosine

SEQ ID NO: 3958 - RNA, 76 nt, synthetic construct; identical to SEQ ID NO: 3289
  source 1..76: mol_type = other RNA
  modified_base 1: mod_base = OTHER; note = 2'-Omethylguanosine
  modified_base 61: mod_base = OTHER; note = 2'-Omethylcytosine
  modified_base 62: mod_base = OTHER; note = 2'-Omethylcytosine
  modified_base 64: mod_base = OTHER; note = 2'-Omethyluridine
  modified_base 65: mod_base = OTHER; note = 2'-Omethylguanosine
  modified_base 66: mod_base = OTHER; note = 2'-Omethyluridine
  modified_base 67: mod_base = OTHER; note = 2'-Omethylcytosine
  modified_base 68: mod_base = OTHER; note = 2'-Omethylcytosine
  modified_base 69: mod_base = OTHER; note = 2'-Omethyladenosine
  modified_base 70: mod_base = OTHER; note = 2'-fluoroguanosine
  modified_base 71: mod_base = OTHER; note = 2'-Omethylguanosine
  modified_base 72: mod_base = OTHER; note = 2'-Omethylcytosine
  modified_base 73: mod_base = OTHER; note = 2'-Omethylguanosine

SEQ ID NO: 3959 - RNA, 76 nt, synthetic construct; identical to SEQ ID NO: 625
  source 1..76: mol_type = other RNA
  modified_base 39: mod_base = OTHER; note = Uridine phosphorothiorate
  modified_base 40: mod_base = OTHER; note = Uridine phosphorothiorate
  modified_base 41: mod_base = OTHER; note = Cytosine phosphorothiorate
  modified_base 42: mod_base = OTHER; note = Adenosine phosphorothiorate
  modified_base 43: mod_base = OTHER; note = Adenosine phosphorothiorate

SEQ ID NO: 3960 - RNA, 76 nt, synthetic construct; identical to SEQ ID NO: 625
  source 1..76: mol_type = other RNA
  modified_base 3: mod_base = OTHER; note = 2'-Omethylcytosine
  modified_base 4: mod_base = OTHER; note = Uridine phosphorothiorate
  modified_base 5: mod_base = OTHER; note = 2'-Omethylcytosine phosphorothiorate
  modified_base 6: mod_base = OTHER; note = 2'-Omethylcytosine
  modified_base 8: mod_base = OTHER; note = Uridine phosphorothiorate
  modified_base 10: mod_base = OTHER; note = 2'-fluoroguanosine
  modified_base 12: mod_base = OTHER; note = 2'-Omethylguanosine
  modified_base 14: mod_base = OTHER; note = 2'-Omethyladenosine
  modified_base 15: mod_base = OTHER; note = 2'-Omethyladenosine
  modified_base 16: mod_base = OTHER; note = 2'-Omethyluridine phosphorothiorate
  modified_base 24: mod_base = OTHER; note = 2'-Omethylguanosine
  modified_base 26: mod_base = OTHER; note = 2'-fluoroadenosine phosphorothiorate
  modified_base 27: mod_base = OTHER; note = 2'-Omethyluridine
  modified_base 29: mod_base = OTHER; note = 2'-fluoroguanosine
  modified_base 30: mod_base = OTHER; note = Guanosine phosphorothiorate
  modified_base 31: mod_base = OTHER; note = 2'-Omethyladenosine
  modified_base 34: mod_base = OTHER; note = 2'-Omethyluridine
  modified_base 38: mod_base = OTHER; note = Adenosine phosphorothiorate
  modified_base 39: mod_base = OTHER; note = 2'-Omethyluridine phosphorothiorate
  modified_base 40: mod_base = OTHER; note = 2'-Omethyluridine
  modified_base 42: mod_base = OTHER; note = 2'-Omethyladenosine
  modified_base 43: mod_base = OTHER; note = 2'-fluoroadenosine phosphorothiorate
  modified_base 44: mod_base = OTHER; note = 2'-Omethyladenosine
  modified_base 46: mod_base = OTHER; note = 2'-fluoroguanosine
  modified_base 51: mod_base = OTHER; note = Guanosine phosphorothiorate
  modified_base 52: mod_base = OTHER; note = 2'-fluoroguanosine
  modified_base 53: mod_base = OTHER; note = 2'-fluoroguanosine phosphorothiorate
  modified_base 57: mod_base = OTHER; note = Guanosine phosphorothiorate
  modified_base 58: mod_base = OTHER; note = 2'-fluoroadenosine
  modified_base 59: mod_base = OTHER; note = Guanosine phosphorothiorate
  modified_base 60: mod_base = OTHER; note = 2'-fluorouridine phosphorothiorate
  modified_base 61: mod_base = OTHER; note = 2'-fluorocytosine phosphorothiorate
  modified_base 62: mod_base = OTHER; note = 2'-Omethylcytosine
  modified_base 65: mod_base = OTHER; note = 2'-fluoroguanosine
  modified_base 68: mod_base = OTHER; note = 2'-Omethylguanosine
  modified_base 73: mod_base = OTHER; note = 2'-Omethylguanosine phosphorothiorate
  modified_base 74: mod_base = OTHER; note = 2'-Omethylcytosine phosphorothiorate
  modified_base 76: mod_base = OTHER; note = 2'-fluoroadenosine

SEQ ID NO: 3961 - RNA, 76 nt, synthetic construct; identical to SEQ ID NO: 625
  source 1..76: mol_type = other RNA
  modified_base 1: mod_base = OTHER; note = 2'-Omethylguanosine phosphorothiorate
  modified_base 2: mod_base = OTHER; note = 2'-Omethylguanosine
  modified_base 3: mod_base = OTHER; note = 2'-Omethylcytosine
  modified_base 4: mod_base = OTHER; note = 2'-Omethyluridine
  modified_base 5: mod_base = OTHER; note = 2'-Omethylcytosine
  modified_base 6: mod_base = OTHER; note = 2'-Omethylcytosine
  modified_base 14: mod_base = OTHER; note = 2'-Omethyladenosine
  modified_base 15: mod_base = OTHER; note = 2'-Omethyladenosine
  modified_base 16: mod_base = OTHER; note = 2'-Omethyluridine
  modified_base 17: mod_base = OTHER; note = 2'-Omethylguanosine
  modified_base 18: mod_base = OTHER; note = 2'-Omethylguanosine
  modified_base 20: mod_base = OTHER; note = 2'-Omethyluridine
  modified_base 22: mod_base = OTHER; note = 2'-Omethylguanosine
  modified_base 23: mod_base = OTHER; note = 2'-Omethylcytosine
  modified_base 24: mod_base = OTHER; note = 2'-Omethylguanosine
  modified_base 25: mod_base = OTHER; note = 2'-Omethylcytosine
  modified_base 33: mod_base = OTHER; note = 2'-fluorouridine
  modified_base 35: mod_base = OTHER; note = Cytosine phosphorothiorate
  modified_base 37: mod_base = OTHER; note = Adenosine phosphorothiorate
  modified_base 38: mod_base = OTHER; note = Adenosine phosphorothiorate
  modified_base 41: mod_base = OTHER; note = 2'-Omethylcytosine
  modified_base 42: mod_base = OTHER; note = 2'-Omethyladenosine
  modified_base 43: mod_base = OTHER; note = 2'-Omethyladenosine
  modified_base 44: mod_base = OTHER; note = 2'-Omethyladenosine
  modified_base 49: mod_base = OTHER; note = 2'-Omethylcytosine
  modified_base 50: mod_base = OTHER; note = 2'-Omethylcytosine
  modified_base 52: mod_base = OTHER; note = 2'-Omethylguanosine
  modified_base 54: mod_base = OTHER; note = 2'-Omethyluridine
  modified_base 55: mod_base = OTHER; note = Uridine phosphorothiorate
  modified_base 56: mod_base = OTHER; note = 2'-Omethylcytosine
  modified_base 57: mod_base = OTHER; note = 2'-fluoroguanosine
  modified_base 59: mod_base = OTHER; note = 2'-Omethylguanosine
  modified_base 61: mod_base = OTHER; note = 2'-Omethylcytosine
  modified_base 62: mod_base = OTHER; note = 2'-Omethylcytosine
  modified_base 63: mod_base = OTHER; note = 2'-fluorocytosine
  modified_base 64: mod_base = OTHER; note = 2'-Omethylguanosine
  modified_base 65: mod_base = OTHER; note = 2'-Omethylguanosine
  modified_base 73: mod_base = OTHER; note = 2'-Omethylguanosine

SEQ ID NO: 3962 - RNA, 76 nt, synthetic construct; identical to SEQ ID NO: 625
  source 1..76: mol_type = other RNA
  modified_base 8: mod_base = OTHER; note = 2'-fluorouridine
  modified_base 9: mod_base = OTHER; note = 2'-fluoroguanosine

SEQ ID NO: 3963 - DNA, 76 bp, synthetic construct; identical to SEQ ID NO: 1924
  source 1..76: mol_type = other DNA
  modified_base 1: mod_base = OTHER; note = 2'-Omethylguanosine phosphorothiorate
  modified_base 2: mod_base = OTHER; note = 2'-Omethylguanosine phosphorothiorate
  modified_base 39: mod_base = OTHER; note = Uridine phosphorothiorate
  modified_base 40: mod_base = OTHER; note = 2'-Omethyluridine
  modified_base 48: mod_base = OTHER; note = 2'-fluorouridine
  modified_base 50: mod_base = OTHER; note = 2'-O-(2-Methoxyethyl) 5-methylcytosine
  modified_base 60: mod_base = OTHER; note = Uridine phosphorothiorate
  modified_base 75: mod_base = OTHER; note = Cytosine phosphorothiorate
  modified_base 76: mod_base = OTHER; note = 2'-Omethyladenosine
  misc_feature 1..60: note = RNA
  misc_feature 61: note = DNA
  misc_feature 62..76: note = RNA

SEQ ID NO: 3964 - RNA, 76 nt, synthetic construct
  source 1..76: mol_type = other RNA
tgctccgtggcgcaatggaaagcgcattggacttcaaattcaaaggttccgggttcgagtcccggcggagtcgcca

SEQ ID NO: 3965 - RNA, 86 nt, synthetic construct; identical to SEQ ID NO: 3290
  source 1..86: mol_type = other RNA
  modified_base 1: mod_base = OTHER; note = 2'-Omethyladenosine
  modified_base 2: mod_base = OTHER; note = 2'-Omethylcytosine
  modified_base 3: mod_base = OTHER; note = 2'-Omethylcytosine
  modified_base 4: mod_base = OTHER; note = 2'-Omethyladenosine
  modified_base 5: mod_base = OTHER; note = 2'-Omethylguanosine
  modified_base 6: mod_base = OTHER; note = 2'-Omethylguanosine
  modified_base 16: mod_base = OTHER; note = 2'-Omethyluridine
  modified_base 17: mod_base = OTHER; note = 2'-Omethylguanosine
  modified_base 18: mod_base = OTHER; note = 2'-Omethylguanosine
  modified_base 33: mod_base = OTHER; note = 2'-fluorouridine
  modified_base 35: mod_base = OTHER; note = Cytosine phosphorothiorate
  modified_base 37: mod_base = OTHER; note = Guanosine phosphorothiorate
  modified_base 38: mod_base = OTHER; note = Adenosine phosphorothiorate
  modified_base 44: mod_base = OTHER; note = 2'-Omethyluridine
  modified_base 57: mod_base = OTHER; note = 2'-fluoroguanosine
  modified_base 58: mod_base = OTHER; note = 2'-fluorocytosine
  modified_base 66: mod_base = OTHER; note = 2'-Omethylcytosine
  modified_base 69: mod_base = OTHER; note = 2'-Omethyladenosine
  modified_base 71: mod_base = OTHER; note = 2'-Omethylcytosine
  modified_base 72: mod_base = OTHER; note = 2'-Omethylcytosine
  modified_base 73: mod_base = OTHER; note = 2'-fluorocytosine
  modified_base 74: mod_base = OTHER; note = 2'-Omethyladenosine
  modified_base 75: mod_base = OTHER; note = 2'-Omethylcytosine
  modified_base 76: mod_base = OTHER; note = 2'-Omethyluridine
  modified_base 77: mod_base = OTHER; note = 2'-Omethylcytosine
  modified_base 78: mod_base = OTHER; note = 2'-Omethylcytosine
  modified_base 83: mod_base = OTHER; note = 2'-Omethyladenosine

SEQ ID NO: 3966 - RNA, 76 nt, synthetic construct; identical to SEQ ID NO: 625
  source 1..76: mol_type = other RNA
  modified_base 2: mod_base = OTHER; note = 2'-Omethylguanosine
  modified_base 7: mod_base = OTHER; note = Guanosine phosphorothiorate
  modified_base 8: mod_base = OTHER; note = Uridine phosphorothiorate
  modified_base 10: mod_base = OTHER; note = 2'-fluoroguanosine
  modified_base 12: mod_base = OTHER; note = 2'-Omethylguanosine
  modified_base 13: mod_base = OTHER; note = 2'-fluorocytosine
  modified_base 15: mod_base = OTHER; note = 2'-fluoroadenosine phosphorothiorate
  modified_base 17: mod_base = OTHER; note = 2'-Omethylguanosine
  modified_base 23: mod_base = OTHER; note = 2'-Omethylcytosine phosphorothiorate
  modified_base 28: mod_base = OTHER; note = 2'-Omethyluridine
  modified_base 30: mod_base = OTHER; note = Guanosine phosphorothiorate
  modified_base 31: mod_base = OTHER; note = 2'-Omethyladenosine
  modified_base 32: mod_base = OTHER; note = 2'-fluorocytosine
  modified_base 33: mod_base = OTHER; note = 2'-fluorouridine
  modified_base 34: mod_base = OTHER; note = Uridine phosphorothiorate
  modified_base 38: mod_base = OTHER; note = 2'-fluoroadenosine
  modified_base 40: mod_base = OTHER; note = 2'-fluorouridine
  modified_base 42: mod_base = OTHER; note = 2'-Omethyladenosine
  modified_base 44: mod_base = OTHER; note = Adenosine phosphorothiorate
  modified_base 45: mod_base = OTHER; note = 2'-fluoroguanosine phosphorothiorate
  modified_base 47: mod_base = OTHER; note = 2'-fluorouridine
  modified_base 48: mod_base = OTHER; note = Uridine phosphorothiorate
  modified_base 50: mod_base = OTHER; note = Cytosine phosphorothiorate
  modified_base 51: mod_base = OTHER; note = 2'-Omethylguanosine phosphorothiorate
  modified_base 52: mod_base = OTHER; note = 2'-Omethylguanosine
  modified_base 53: mod_base = OTHER; note = 2'-Omethylguanosine
  modified_base 57: mod_base = OTHER; note = 2'-Omethylguanosine
  modified_base 60: mod_base = OTHER; note = Uridine phosphorothiorate
  modified_base 61: mod_base = OTHER; note = 2'-Omethylcytosine
  modified_base 64: mod_base = OTHER; note = 2'-fluoroguanosine
  modified_base 65: mod_base = OTHER; note = Guanosine phosphorothiorate
  modified_base 66: mod_base = OTHER; note = 2'-Omethylcytosine
  modified_base 67: mod_base = OTHER; note = 2'-Omethylguanosine
  modified_base 69: mod_base = OTHER; note = 2'-fluoroadenosine

SEQ ID NO: 3967 - RNA, 75 nt, synthetic construct; identical to SEQ ID NO: 3299
  source 1..75: mol_type = other RNA
  modified_base 7: mod_base = OTHER; note = Uridine phosphorothiorate
  modified_base 14: mod_base = OTHER; note = 2'-Omethylguanosine phosphorothiorate
  modified_base 27: mod_base = OTHER; note = Cytosine phosphorothiorate
  modified_base 36: mod_base = OTHER; note = 2'-fluoroadenosine phosphorothiorate
  modified_base 39: mod_base = OTHER; note = 2'-Omethylcytosine phosphorothiorate
  modified_base 46: mod_base = OTHER; note = 2'-fluorouridine
  modified_base 53: mod_base = OTHER; note = 2'-fluorouridine
  modified_base 59: mod_base = OTHER; note = 2'-fluorouridine phosphorothiorate
  modified_base 72: mod_base = OTHER; note = Guanosine phosphorothiorate
  modified_base 73: mod_base = OTHER; note = Cytosine phosphorothiorate
  modified_base 75: mod_base = OTHER; note = 2'-fluoroadenosine

SEQ ID NO: 3968 - RNA, 76 nt, synthetic construct; identical to SEQ ID NO: 625
  source 1..76: mol_type = other RNA
  modified_base 1: mod_base = OTHER; note = 2'-Omethylguanosine
  modified_base 2: mod_base = OTHER; note = 2'-Omethylguanosine
  modified_base 3: mod_base = OTHER; note = Cytosine phosphorothiorate
  modified_base 4: mod_base = OTHER; note = 2'-Omethyluridine
  modified_base 6: mod_base = OTHER; note = 2'-fluorocytosine
  modified_base 14: mod_base = OTHER; note = 2'-Omethyladenosine phosphorothiorate
  modified_base 15: mod_base = OTHER; note = 2'-Omethyladenosine
  modified_base 16: mod_base = OTHER; note = 2'-Omethyluridine phosphorothiorate
  modified_base 17: mod_base = OTHER; note = 2'-Omethylguanosine
  modified_base 18: mod_base = OTHER; note = 2'-fluoroguanosine
  modified_base 24: mod_base = OTHER; note = Guanosine phosphorothiorate
  modified_base 25: mod_base = OTHER; note = Cytosine phosphorothiorate
  modified_base 26: mod_base = OTHER; note = 2'-Omethyladenosine
  modified_base 27: mod_base = OTHER; note = 2'-Omethyluridine
  modified_base 29: mod_base = OTHER; note = 2'-Omethylguanosine
  modified_base 30: mod_base = OTHER; note = 2'-Omethylguanosine
  modified_base 31: mod_base = OTHER; note = 2'-fluoroadenosine
  modified_base 32: mod_base = OTHER; note = 2'-fluorocytosine
  modified_base 40: mod_base = OTHER; note = 2'-Omethyluridine
  modified_base 42: mod_base = OTHER; note = 2'-fluoroadenosine
  modified_base 43: mod_base = OTHER; note = 2'-Omethyladenosine
  modified_base 44: mod_base = OTHER; note = Adenosine phosphorothiorate
  modified_base 47: mod_base = OTHER; note = 2'-Omethyluridine
  modified_base 48: mod_base = OTHER; note = 2'-Omethyluridine
  modified_base 54: mod_base = OTHER; note = 2'-fluorouridine
  modified_base 59: mod_base = OTHER; note = 2'-Omethylguanosine phosphorothiorate
  modified_base 60: mod_base = OTHER; note = 2'-Omethyluridine
  modified_base 61: mod_base = OTHER; note = Cytosine phosphorothiorate
  modified_base 62: mod_base = OTHER; note = 2'-fluorocytosine
  modified_base 65: mod_base = OTHER; note = 2'-fluoroguanosine
  modified_base 68: mod_base = OTHER; note = 2'-Omethylguanosine
  modified_base 72: mod_base = OTHER; note = 2'-fluorocytosine
  modified_base 73: mod_base = OTHER; note = 2'-Omethylguanosine

SEQ ID NO: 3969 - RNA, 85 nt, synthetic construct; identical to SEQ ID NO: 3288
  source 1..85: mol_type = other RNA
  modified_base 1: mod_base = OTHER; note = 2'-Omethylcytosine
  modified_base 10: mod_base = OTHER; note = Cytosine phosphorothiorate
  modified_base 26: mod_base = OTHER; note = Uridine phosphorothiorate
  modified_base 32: mod_base = OTHER; note = 2'-fluorouridine
  modified_base 38: mod_base = OTHER; note = Uridine phosphorothiorate
  modified_base 48: mod_base = OTHER; note = 2'-Omethyladenosine
  modified_base 51: mod_base = OTHER; note = Uridine phosphorothiorate
  modified_base 57: mod_base = OTHER; note = 2'-Omethylcytosine
  modified_base 60: mod_base = OTHER; note = 2'-fluoroguanosine
  modified_base 64: mod_base = OTHER; note = 2'-Omethyluridine
  modified_base 81: mod_base = OTHER; note = 2'-fluorouridine phosphorothiorate

SEQ ID NO: 3970 - RNA, 85 nt, synthetic construct; identical to SEQ ID NO: 3317
  source 1..85: mol_type = other RNA
  modified_base 1: mod_base = OTHER; note = 2'-Omethylguanosine phosphorothiorate
  modified_base 2: mod_base = OTHER; note = Cytosine phosphorothiorate
  modified_base 13: mod_base = OTHER; note = 2'-fluoroguanosine phosphorothiorate
  modified_base 14: mod_base = OTHER; note = 2'-Omethyladenosine
  modified_base 16: mod_base = OTHER; note = 2'-Omethyluridine
  modified_base 18: mod_base = OTHER; note = 2'-Omethylguanosine
  modified_base 26: mod_base = OTHER; note = Guanosine phosphorothiorate
  modified_base 28: mod_base = OTHER; note = 2'-Omethyluridine
  modified_base 36: mod_base = OTHER; note = 2'-fluoroadenosine
  modified_base 37: mod_base = OTHER; note = 2'-fluoroadenosine
  modified_base 41: mod_base = OTHER; note = Cytosine phosphorothiorate
  modified_base 45: mod_base = OTHER; note = 2'-Omethylguanosine
  modified_base 48: mod_base = OTHER; note = 2'-Omethylguanosine phosphorothiorate
  modified_base 55: mod_base = OTHER; note = 2'-Omethylcytosine phosphorothiorate
  modified_base 59: mod_base = OTHER; note = 2'-Omethylcytosine
  modified_base 61: mod_base = OTHER; note = 2'-Omethylguanosine
  modified_base 80: mod_base = OTHER; note = 2'-fluoroguanosine
  modified_base 81: mod_base = OTHER; note = Cytosine phosphorothiorate
  modified_base 82: mod_base = OTHER; note = 2'-Omethylguanosine
  modified_base 84: mod_base = OTHER; note = 2'-fluorocytosine

SEQ ID NO: 3971 - RNA, 76 nt, synthetic construct
  source 1..76: mol_type = other RNA
gccccagtggcctaatggataaggcgtcagccttcaaagttgaagattgcgggttcgaatcccgtctggggtacca

SEQ ID NO: 3972 - RNA, 76 nt, synthetic construct; identical to SEQ ID NO: 3295
  source 1..76: mol_type = other RNA
  modified_base 1: mod_base = OTHER; note = 2'-fluorocytosine phosphorothiorate
  modified_base 5: mod_base = OTHER; note = 2'-fluorocytosine
  modified_base 14: mod_base = OTHER; note = 2'-Omethyladenosine
  modified_base 26: mod_base = OTHER; note = 2'-Omethylguanosine phosphorothiorate
  modified_base 48: mod_base = OTHER; note = 2'-Omethylcytosine
  modified_base 56: mod_base = OTHER; note = 2'-fluorocytosine
  modified_base 75: mod_base = OTHER; note = 2'-Omethylcytosine phosphorothiorate

SEQ ID NO: 3973 - RNA, 75 nt, synthetic construct; identical to SEQ ID NO: 3336
  source 1..75: mol_type = other RNA
  modified_base 3: mod_base = OTHER; note = 2'-Omethyluridine phosphorothiorate
  modified_base 11: mod_base = OTHER; note = Uridine phosphorothiorate
  modified_base 18: mod_base = OTHER; note = 2'-fluoroguanosine
  modified_base 21: mod_base = OTHER; note = 2'-fluoroguanosine
  modified_base 23: mod_base = OTHER; note = 2'-fluoroguanosine
  modified_base 38: mod_base = OTHER; note = 2'-Omethyluridine phosphorothiorate
  modified_base 47: mod_base = OTHER; note = 2'-fluorocytosine
  modified_base 49: mod_base = OTHER; note = 2'-fluoroadenosine
  modified_base 73: mod_base = OTHER; note = Cytosine phosphorothiorate
  modified_base 74: mod_base = OTHER; note = Cytosine phosphorothiorate

SEQ ID NO: 3974 - RNA, 86 nt, synthetic construct; identical to SEQ ID NO: 3290
  source 1..86: mol_type = other RNA
  modified_base 1: mod_base = OTHER; note = 2'-Omethyladenosine phosphorothiorate
  modified_base 2: mod_base = OTHER; note = 2'-Omethylcytosine phosphorothiorate
  modified_base 3: mod_base = OTHER; note = 2'-Omethylcytosine
  modified_base 4: mod_base = OTHER; note = 2'-Omethyladenosine
  modified_base 5: mod_base = OTHER; note = 2'-Omethylguanosine
  modified_base 6: mod_base = OTHER; note = 2'-Omethylguanosine
  modified_base 10: mod_base = OTHER; note = 2'-Omethylguanosine
  modified_base 11: mod_base = OTHER; note = 2'-Omethylcytosine
  modified_base 12: mod_base = OTHER; note = 2'-Omethylcytosine
  modified_base 13: mod_base = OTHER; note = 2'-Omethylguanosine
  modified_base 14: mod_base = OTHER; note = 2'-Omethyladenosine
  modified_base 15: mod_base = OTHER; note = 2'-fluoroguanosine
  modified_base 16: mod_base = OTHER; note = 2'-Omethyluridine
  modified_base 17: mod_base = OTHER; note = 2'-Omethylguanosine
  modified_base 18: mod_base = OTHER; note = 2'-Omethylguanosine
  modified_base 19: mod_base = OTHER; note = 2'-fluorouridine
  modified_base 20: mod_base = OTHER; note = 2'-Omethyluridine
  modified_base 22: mod_base = OTHER; note = 2'-Omethyladenosine
  modified_base 23: mod_base = OTHER; note = 2'-Omethylguanosine
  modified_base 24: mod_base = OTHER; note = 2'-Omethylguanosine
  modified_base 25: mod_base = OTHER; note = 2'-Omethylcytosine
  modified_base 33: mod_base = OTHER; note = 2'-fluorouridine
  modified_base 35: mod_base = OTHER; note = Cytosine phosphorothiorate
  modified_base 37: mod_base = OTHER; note = Guanosine phosphorothiorate
  modified_base 38: mod_base = OTHER; note = Adenosine phosphorothiorate
  modified_base 59: mod_base = OTHER; note = 2'-Omethylguanosine
  modified_base 60: mod_base = OTHER; note = 2'-Omethyluridine
  modified_base 61: mod_base = OTHER; note = 2'-Omethylguanosine
  modified_base 62: mod_base = OTHER; note = 2'-Omethylguanosine
  modified_base 63: mod_base = OTHER; note = 2'-Omethylguanosine
  modified_base 64: mod_base = OTHER; note = 2'-Omethyluridine
  modified_base 66: mod_base = OTHER; note = 2'-Omethylcytosine
  modified_base 69: mod_base = OTHER; note = 2'-Omethyladenosine
  modified_base 71: mod_base = OTHER; note = 2'-Omethylcytosine
  modified_base 72: mod_base = OTHER; note = 2'-Omethylcytosine
  modified_base 73: mod_base = OTHER; note = 2'-fluorocytosine
  modified_base 74: mod_base = OTHER; note = 2'-Omethyladenosine
  modified_base 75: mod_base = OTHER; note = 2'-Omethylcytosine
  modified_base 76: mod_base = OTHER; note = 2'-Omethyluridine
  modified_base 77: mod_base = OTHER; note = 2'-Omethylcytosine
  modified_base 78: mod_base = OTHER; note = 2'-Omethylcytosine
  modified_base 83: mod_base = OTHER; note = 2'-Omethyladenosine

SEQ ID NO: 3975 - RNA, 76 nt, synthetic construct; identical to SEQ ID NO: 3318
  source 1..76: mol_type = other RNA
  modified_base 1: mod_base = OTHER; note = 2'-Omethylcytosine
  modified_base 33: mod_base = OTHER; note = 2'-fluorouridine
  modified_base 35: mod_base = OTHER; note = Uridine phosphorothiorate
  modified_base 37: mod_base = OTHER; note = Guanosine phosphorothiorate
  modified_base 38: mod_base = OTHER; note = Adenosine phosphorothiorate
  modified_base 73: mod_base = OTHER; note = 2'-Omethyladenosine

SEQ ID NO: 3976 - RNA, 76 nt, synthetic construct; identical to SEQ ID NO: 625
  source 1..76: mol_type = other RNA
  modified_base 10: mod_base = OTHER; note = 2'-Omethylguanosine
  modified_base 11: mod_base = OTHER; note = 2'-Omethylcytosine
  modified_base 12: mod_base = OTHER; note = 2'-Omethylguanosine
  modified_base 13: mod_base = OTHER; note = 2'-Omethylcytosine
  modified_base 40: mod_base = OTHER; note = 2'-fluorouridine
  modified_base 41: mod_base = OTHER; note = 2'-fluorocytosine
  modified_base 42: mod_base = OTHER; note = 2'-fluoroadenosine
  modified_base 43: mod_base = OTHER; note = 2'-fluoroadenosine
  modified_base 54: mod_base = OTHER; note = Uridine phosphorothiorate
  modified_base 55: mod_base = OTHER; note = Uridine phosphorothiorate
  modified_base 56: mod_base = OTHER; note = Cytosine phosphorothiorate
  modified_base 57: mod_base = OTHER; note = Guanosine phosphorothiorate

SEQ ID NO: 3977 - RNA, 76 nt, synthetic construct; identical to SEQ ID NO: 625
  source 1..76: mol_type = other RNA
  modified_base 1: mod_base = OTHER; note = 2'-Omethylguanosine
  modified_base 17: mod_base = OTHER; note = 2'-Omethylguanosine
  modified_base 18: mod_base = OTHER; note = 2'-Omethylguanosine
  modified_base 33: mod_base = OTHER; note = 2'-fluorouridine
  modified_base 48: mod_base = OTHER; note = Thymine
  modified_base 50: mod_base = OTHER; note = 2'-Omethylcytosine
  modified_base 52: mod_base = OTHER; note = 2'-Omethylguanosine
  modified_base 55: mod_base = OTHER; note = Uridine phosphorothiorate
  modified_base 73: mod_base = OTHER; note = 2'-Omethylguanosine

SEQ ID NO: 3978 - RNA, 85 nt, synthetic construct; identical to SEQ ID NO: 3317
  source 1..85: mol_type = other RNA
  modified_base 1: mod_base = OTHER; note = 2'-Omethylguanosine phosphorothiorate
  modified_base 4: mod_base = OTHER; note = 2'-Omethylguanosine
  modified_base 37: mod_base = OTHER; note = 2'-Omethyladenosine phosphorothiorate
  modified_base 61: mod_base = OTHER; note = 2'-Omethylguanosine
  modified_base 63: mod_base = OTHER; note = 2'-fluorouridine
  modified_base 81: mod_base = OTHER; note = Cytosine phosphorothiorate
  modified_base 82: mod_base = OTHER; note = 2'-fluoroguanosine

SEQ ID NO: 3979 - RNA, 76 nt, synthetic construct; identical to SEQ ID NO: 625
  source 1..76: mol_type = other RNA
  modified_base 1: mod_base = OTHER; note = 2'-Omethylguanosine phosphorothiorate
  modified_base 2: mod_base = OTHER; note = 2'-Omethylguanosine phosphorothiorate
  modified_base 3: mod_base = OTHER; note = 2'-Omethylcytosine phosphorothiorate
  modified_base 4: mod_base = OTHER; note = 2'-Omethyluridine phosphorothiorate
  modified_base 5: mod_base = OTHER; note = 2'-Omethylcytosine phosphorothiorate
  modified_base 6: mod_base = OTHER; note = 2'-Omethylcytosine phosphorothiorate
  modified_base 10: mod_base = OTHER; note = 2'-Omethylguanosine
  modified_base 11: mod_base = OTHER; note = 2'-Omethylcytosine
  modified_base 12: mod_base = OTHER; note = 2'-Omethylguanosine
  modified_base 13: mod_base = OTHER; note = 2'-Omethylcytosine
  modified_base 49: mod_base = OTHER; note = 2'-Omethylcytosine
  modified_base 50: mod_base = OTHER; note = 2'-Omethylcytosine
  modified_base 51: mod_base = OTHER; note = 2'-Omethylguanosine
  modified_base 52: mod_base = OTHER; note = 2'-Omethylguanosine
  modified_base 53: mod_base = OTHER; note = 2'-Omethylguanosine
  modified_base 61: mod_base = OTHER; note = 2'-Omethylcytosine
  modified_base 62: mod_base = OTHER; note = 2'-Omethylcytosine
  modified_base 63: mod_base = OTHER; note = 2'-Omethylcytosine
  modified_base 64: mod_base = OTHER; note = 2'-Omethylguanosine
  modified_base 65: mod_base = OTHER; note = 2'-Omethylguanosine
  modified_base 66: mod_base = OTHER; note = 2'-Omethylcytosine
  modified_base 67: mod_base = OTHER; note = 2'-Omethylguanosine
  modified_base 68: mod_base = OTHER; note = 2'-Omethylguanosine
  modified_base 69: mod_base = OTHER; note = 2'-Omethyladenosine

SEQ ID NO: 3980 - RNA, 76 nt, synthetic construct; identical to SEQ ID NO: 625
  source 1..76: mol_type = other RNA
  modified_base 1: mod_base = OTHER; note = Guanosine phosphorothiorate
  modified_base 2: mod_base = OTHER; note = 2'-Omethylguanosine
  modified_base 4: mod_base = OTHER; note = 2'-Omethyluridine
  modified_base 9: mod_base = OTHER; note = Guanosine phosphorothiorate
  modified_base 11: mod_base = OTHER; note = 2'-fluorocytosine
  modified_base 13: mod_base = OTHER; note = 2'-fluorocytosine
  modified_base 14: mod_base = OTHER; note = 2'-Omethyladenosine
  modified_base 15: mod_base = OTHER; note = 2'-Omethyladenosine phosphorothiorate
  modified_base 17: mod_base = OTHER; note = 2'-Omethylguanosine
  modified_base 18: mod_base = OTHER; note = 2'-Omethylguanosine
  modified_base 20: mod_base = OTHER; note = 2'-fluorouridine
  modified_base 23: mod_base = OTHER; note = 2'-Omethylcytosine
  modified_base 24: mod_base = OTHER; note = 2'-Omethylguanosine
  modified_base 25: mod_base = OTHER; note = 2'-Omethylcytosine
  modified_base 26: mod_base = OTHER; note = 2'-Omethyladenosine
  modified_base 29: mod_base = OTHER; note = 2'-Omethylguanosine
  modified_base 31: mod_base = OTHER; note = 2'-fluoroadenosine
  modified_base 33: mod_base = OTHER; note = 2'-fluorouridine
  modified_base 41: mod_base = OTHER; note = 2'-fluorocytosine
  modified_base 42: mod_base = OTHER; note = 2'-fluoroadenosine phosphorothiorate
  modified_base 43: mod_base = OTHER; note = 2'-Omethyladenosine phosphorothiorate
  modified_base 44: mod_base = OTHER; note = 2'-Omethyladenosine
  modified_base 45: mod_base = OTHER; note = 2'-fluoroguanosine
  modified_base 46: mod_base = OTHER; note = 2'-Omethylguanosine
  modified_base 49: mod_base = OTHER; note = 2'-Omethylcytosine
  modified_base 52: mod_base = OTHER; note = 2'-Omethylguanosine
  modified_base 53: mod_base = OTHER; note = 2'-Omethylguanosine
  modified_base 56: mod_base = OTHER; note = 2'-fluorocytosine
  modified_base 57: mod_base = OTHER; note = 2'-fluoroguanosine
  modified_base 63: mod_base = OTHER; note = Cytosine phosphorothiorate
  modified_base 64: mod_base = OTHER; note = 2'-fluoroguanosine
  modified_base 65: mod_base = OTHER; note = Guanosine phosphorothiorate
  modified_base 66: mod_base = OTHER; note = 2'-Omethylcytosine phosphorothiorate
  modified_base 67: mod_base = OTHER; note = 2'-Omethylguanosine
  modified_base 68: mod_base = OTHER; note = 2'-Omethylguanosine
  modified_base 75: mod_base = OTHER; note = 2'-fluorocytosine
  modified_base 76: mod_base = OTHER; note = 2'-fluoroadenosine

SEQ ID NO: 3981 - RNA, 76 nt, synthetic construct; identical to SEQ ID NO: 625
  source 1..76: mol_type = other RNA
  modified_base 1: mod_base = OTHER; note = 2'-Omethylguanosine
  modified_base 2: mod_base = OTHER; note = 2'-Omethylguanosine
  modified_base 3: mod_base = OTHER; note = 2'-Omethylcytosine
  modified_base 4: mod_base = OTHER; note = 2'-Omethyluridine
  modified_base 5: mod_base = OTHER; note = 2'-Omethylcytosine
  modified_base 6: mod_base = OTHER; note = 2'-Omethylcytosine
  modified_base 7: mod_base = OTHER; note = 2'-Omethylguanosine phosphorothiorate
  modified_base 10: mod_base = OTHER; note = 2'-Omethylguanosine
  modified_base 12: mod_base = OTHER; note = 2'-Omethylguanosine
  modified_base 13: mod_base = OTHER; note = 2'-Omethylcytosine
  modified_base 14: mod_base = OTHER; note = 2'-Omethyladenosine
  modified_base 15: mod_base = OTHER; note = 2'-Omethyladenosine
  modified_base 16: mod_base = OTHER; note = 2'-Omethyluridine
  modified_base 17: mod_base = OTHER; note = 2'-Omethylguanosine
  modified_base 18: mod_base = OTHER; note = 2'-fluoroguanosine phosphorothiorate
  modified_base 20: mod_base = OTHER; note = 2'-Omethyluridine
  modified_base 21: mod_base = OTHER; note = 2'-fluoroadenosine phosphorothiorate
  modified_base 22: mod_base = OTHER; note = 2'-Omethylguanosine
  modified_base 23: mod_base = OTHER; note = 2'-Omethylcytosine
  modified_base 24: mod_base = OTHER; note = 2'-Omethylguanosine
  modified_base 25: mod_base = OTHER; note = 2'-Omethylcytosine
  modified_base 26: mod_base = OTHER; note = Adenosine phosphorothiorate
  modified_base 28: mod_base = OTHER; note = 2'-Omethyluridine
  modified_base 29: mod_base = OTHER; note = 2'-fluoroguanosine phosphorothiorate
  modified_base 30: mod_base = OTHER; note = 2'-Omethylguanosine
  modified_base 31: mod_base = OTHER; note = 2'-Omethyladenosine phosphorothiorate
  modified_base 32: mod_base = OTHER; note = 2'-Omethylcytosine phosphorothiorate
  modified_base 33: mod_base = OTHER; note = 2'-fluorouridine
  modified_base 34: mod_base = OTHER; note = 2'-Omethyluridine phosphorothiorate
  modified_base 35: mod_base = OTHER; note = 2'-Omethylcytosine phosphorothiorate
  modified_base 37: mod_base = OTHER; note = Adenosine phosphorothiorate
  modified_base 39: mod_base = OTHER; note = 2'-Omethyluridine phosphorothiorate
  modified_base 40: mod_base = OTHER; note = 2'-fluorouridine
  modified_base 41: mod_base = OTHER; note = 2'-fluorocytosine
  modified_base 42: mod_base = OTHER; note = Adenosine phosphorothiorate
  modified_base 43: mod_base = OTHER; note = Adenosine phosphorothiorate
  modified_base 44: mod_base = OTHER; note = 2'-Omethyladenosine
  modified_base 45: mod_base = OTHER; note = Guanosine phosphorothiorate
  modified_base 48: mod_base = OTHER; note = 2'-fluorouridine
  modified_base 49: mod_base = OTHER; note = 2'-Omethylcytosine phosphorothiorate
  modified_base 50: mod_base = OTHER; note = 2'-Omethylcytosine
  modified_base 52: mod_base = OTHER; note = 2'-Omethylguanosine
  modified_base 53: mod_base = OTHER; note = Guanosine phosphorothiorate
  modified_base 54: mod_base = OTHER; note = 2'-Omethyluridine
  modified_base 55: mod_base = OTHER; note = Uridine phosphorothiorate
  modified_base 57: mod_base = OTHER; note = 2'-fluoroguanosine phosphorothiorate
  modified_base 61: mod_base = OTHER; note = 2'-Omethylcytosine phosphorothiorate
  modified_base 62: mod_base = OTHER; note = 2'-Omethylcytosine
  modified_base 63: mod_base = OTHER; note = 2'-fluorocytosine
  modified_base 64: mod_base = OTHER; note = 2'-Omethylguanosine
  modified_base 65: mod_base = OTHER; note = 2'-Omethylguanosine phosphorothiorate
  modified_base 66: mod_base = OTHER; note = 2'-Omethylcytosine phosphorothiorate
  modified_base 67: mod_base = OTHER; note = 2'-Omethylguanosine phosphorothiorate
  modified_base 68: mod_base = OTHER; note = 2'-Omethylguanosine
  modified_base 69: mod_base = OTHER; note = 2'-fluoroadenosine
  modified_base 70: mod_base = OTHER; note = Guanosine phosphorothiorate
  modified_base 72: mod_base = OTHER; note = 2'-Omethylcytosine
  modified_base 73: mod_base = OTHER; note = 2'-Omethylguanosine
  modified_base 75: mod_base = OTHER; note = 2'-fluorocytosine phosphorothiorate
  modified_base 76: mod_base = OTHER; note = 2'-Omethyladenosine

SEQ ID NO: 3982 - RNA, 76 nt, synthetic construct; identical to SEQ ID NO: 625
  source 1..76: mol_type = other RNA
  modified_base 1: mod_base = OTHER; note = 2'-Omethylguanosine phosphorothiorate
  modified_base 2: mod_base = OTHER; note = 2'-Omethylguanosine
  modified_base 3: mod_base = OTHER; note = 2'-Omethylcytosine
  modified_base 4: mod_base = OTHER; note = 2'-Omethyluridine
  modified_base 5: mod_base = OTHER; note = 2'-Omethylcytosine
  modified_base 6: mod_base = OTHER; note = 2'-Omethylcytosine
  modified_base 10: mod_base = OTHER; note = 2'-Omethylguanosine
  modified_base 11: mod_base = OTHER; note = 2'-Omethylcytosine
  modified_base 12: mod_base = OTHER; note = 2'-Omethylguanosine
  modified_base 13: mod_base = OTHER; note = 2'-Omethylcytosine
  modified_base 22: mod_base = OTHER; note = 2'-Omethylguanosine
  modified_base 23: mod_base = OTHER; note = 2'-Omethylcytosine
  modified_base 24: mod_base = OTHER; note = 2'-Omethylguanosine
  modified_base 25: mod_base = OTHER; note = 2'-Omethylcytosine
  modified_base 44: mod_base = OTHER; note = 2'-Omethyladenosine
  modified_base 45: mod_base = OTHER; note = 2'-Omethylguanosine
  modified_base 46: mod_base = OTHER; note = 2'-Omethylguanosine
  modified_base 49: mod_base = OTHER; note = 2'-Omethylcytosine
  modified_base 50: mod_base = OTHER; note = 2'-Omethylcytosine
  modified_base 51: mod_base = OTHER; note = 2'-Omethylguanosine
  modified_base 52: mod_base = OTHER; note = 2'-Omethylguanosine
  modified_base 53: mod_base = OTHER; note = 2'-Omethylguanosine
  modified_base 61: mod_base = OTHER; note = 2'-Omethylcytosine
  modified_base 62: mod_base = OTHER; note = 2'-Omethylcytosine
  modified_base 63: mod_base = OTHER; note = 2'-fluorocytosine
  modified_base 64: mod_base = OTHER; note = 2'-Omethylguanosine
  modified_base 65: mod_base = OTHER; note = 2'-Omethylguanosine
  modified_base 66: mod_base = OTHER; note = 2'-Omethylcytosine
  modified_base 67: mod_base = OTHER; note = 2'-Omethylguanosine
  modified_base 68: mod_base = OTHER; note = 2'-Omethylguanosine
  modified_base 69: mod_base = OTHER; note = 2'-Omethyladenosine
  modified_base 70: mod_base = OTHER; note = 2'-fluoroguanosine

SEQ ID NO: 3983 - RNA, 73 nt, synthetic construct; identical to SEQ ID NO: 935
  source 1..73: mol_type = other RNA
  modified_base 1: mod_base = OTHER; note = 2'-Omethylguanosine phosphorothiorate
  modified_base 2: mod_base = OTHER; note = 2'-Omethylguanosine
  modified_base 13: mod_base = OTHER; note = 2'-fluorocytosine
  modified_base 72: mod_base = OTHER; note = Cytosine phosphorothiorate

SEQ ID NO: 3984 - RNA, 76 nt, synthetic construct; identical to SEQ ID NO: 625
  source 1..76: mol_type = other RNA
  modified_base 13: mod_base = OTHER; note = 2'-O-(2-Methoxyethyl) 5-methylcytosine

SEQ ID NO: 3985 - RNA, 76 nt, synthetic construct
  source 1..76: mol_type = other RNA
ggctccatggcgcaatggatagcgcattggacttcaaattcaaaggttactggttcgagtccagttggagtcgcca

SEQ ID NO: 3986 - RNA, 75 nt, synthetic construct; identical to SEQ ID NO: 1045
  source 1..75: mol_type = other RNA
  modified_base 1: mod_base = OTHER; note = 2'-Omethylguanosine phosphorothiorate
  modified_base 2: mod_base = OTHER; note = 2'-Omethylguanosine phosphorothiorate
  modified_base 41: mod_base = OTHER; note = Cytosine phosphorothiorate
  modified_base 42: mod_base = OTHER; note = 2'-fluoroadenosine
  modified_base 53: mod_base = OTHER; note = 2'-fluorouridine
  modified_base 68: mod_base = OTHER; note = 2'-fluoroadenosine
  modified_base 73: mod_base = OTHER; note = Cytosine phosphorothiorate
  modified_base 74: mod_base = OTHER; note = 2'-Omethylcytosine

SEQ ID NO: 3987 - RNA, 76 nt, synthetic construct; identical to SEQ ID NO: 3316
  source 1..76: mol_type = other RNA
  modified_base 1: mod_base = OTHER; note = 2'-Omethyladenosine
  modified_base 2: mod_base = OTHER; note = 2'-Omethylcytosine
  modified_base 3: mod_base = OTHER; note = 2'-Omethylcytosine
  modified_base 4: mod_base = OTHER; note = 2'-Omethyladenosine
  modified_base 5: mod_base = OTHER; note = 2'-Omethyladenosine
  modified_base 6: mod_base = OTHER; note = 2'-Omethylcytosine
  modified_base 10: mod_base = OTHER; note = 2'-Omethylguanosine
  modified_base 11: mod_base = OTHER; note = 2'-Omethylcytosine
  modified_base 12: mod_base = OTHER; note = 2'-Omethylguanosine
  modified_base 13: mod_base = OTHER; note = 2'-Omethylcytosine
  modified_base 14: mod_base = OTHER; note = 2'-Omethyladenosine
  modified_base 15: mod_base = OTHER; note = 2'-fluoroadenosine
  modified_base 16: mod_base = OTHER; note = 2'-Omethyluridine
  modified_base 17: mod_base = OTHER; note = 2'-Omethylguanosine
  modified_base 18: mod_base = OTHER; note = 2'-Omethylguanosine
  modified_base 19: mod_base = OTHER; note = 2'-fluoroadenosine
  modified_base 20: mod_base = OTHER; note = 2'-Omethyluridine
  modified_base 25: mod_base = OTHER; note = 2'-Omethylcytosine
  modified_base 33: mod_base = OTHER; note = 2'-fluorouridine
  modified_base 35: mod_base = OTHER; note = Cytosine phosphorothiorate
  modified_base 37: mod_base = OTHER; note = Adenosine phosphorothiorate
  modified_base 38: mod_base = OTHER; note = Adenosine phosphorothiorate
  modified_base 41: mod_base = OTHER; note = 2'-Omethylcytosine
  modified_base 42: mod_base = OTHER; note = 2'-Omethyladenosine
  modified_base 43: mod_base = OTHER; note = 2'-Omethyladenosine
  modified_base 44: mod_base = OTHER; note = 2'-Omethyladenosine
  modified_base 49: mod_base = OTHER; note = 2'-Omethylcytosine
  modified_base 50: mod_base = OTHER; note = 2'-Omethylcytosine
  modified_base 52: mod_base = OTHER; note = 2'-Omethylguanosine
  modified_base 54: mod_base = OTHER; note = 2'-Omethyluridine
  modified_base 55: mod_base = OTHER; note = Uridine phosphorothiorate
  modified_base 56: mod_base = OTHER; note = 2'-Omethylcytosine
  modified_base 57: mod_base = OTHER; note = 2'-fluoroguanosine
  modified_base 59: mod_base = OTHER; note = 2'-Omethylguanosine
  modified_base 61: mod_base = OTHER; note = 2'-Omethylcytosine
  modified_base 65: mod_base = OTHER; note = 2'-Omethylguanosine
  modified_base 73: mod_base = OTHER; note = 2'-Omethylguanosine

SEQ ID NO: 3988 - RNA, 76 nt, synthetic construct; identical to SEQ ID NO: 3289
  source 1..76: mol_type = other RNA
  modified_base 1: mod_base = OTHER; note = 2'-Omethylguanosine
  modified_base 2: mod_base = OTHER; note = 2'-Omethylcytosine
  modified_base 3: mod_base = OTHER; note = 2'-Omethylcytosine
  modified_base 4: mod_base = OTHER; note = 2'-Omethyluridine
  modified_base 5: mod_base = OTHER; note = 2'-Omethylguanosine
  modified_base 6: mod_base = OTHER; note = 2'-Omethylguanosine
  modified_base 13: mod_base = OTHER; note = 2'-Omethylcytosine
  modified_base 18: mod_base = OTHER; note = 2'-Omethylguanosine
  modified_base 19: mod_base = OTHER; note = 2'-Omethylguanosine
  modified_base 25: mod_base = OTHER; note = 2'-Omethylcytosine
  modified_base 33: mod_base = OTHER; note = 2'-fluorouridine
  modified_base 34: mod_base = OTHER; note = 2'-Omethyluridine
  modified_base 35: mod_base = OTHER; note = Uridine phosphorothiorate
  modified_base 37: mod_base = OTHER; note = Adenosine phosphorothiorate
  modified_base 38: mod_base = OTHER; note = Adenosine phosphorothiorate
  modified_base 41: mod_base = OTHER; note = 2'-Omethyluridine
  modified_base 42: mod_base = OTHER; note = 2'-Omethylguanosine
  modified_base 43: mod_base = OTHER; note = 2'-Omethyladenosine
  modified_base 44: mod_base = OTHER; note = 2'-Omethylguanosine
  modified_base 49: mod_base = OTHER; note = 2'-Omethylcytosine
  modified_base 50: mod_base = OTHER; note = 2'-Omethyladenosine
  modified_base 51: mod_base = OTHER; note = 2'-Omethylguanosine
  modified_base 52: mod_base = OTHER; note = 2'-Omethylguanosine
  modified_base 53: mod_base = OTHER; note = 2'-Omethylguanosine
  modified_base 54: mod_base = OTHER; note = Uridine phosphorothiorate
  modified_base 55: mod_base = OTHER; note = Uridine phosphorothiorate
  modified_base 61: mod_base = OTHER; note = 2'-Omethylcytosine
  modified_base 65: mod_base = OTHER; note = 2'-Omethylguanosine
  modified_base 73: mod_base = OTHER; note = 2'-Omethylguanosine

SEQ ID NO: 3989 - RNA, 76 nt, synthetic construct; identical to SEQ ID NO: 625
  source 1..76: mol_type = other RNA
  modified_base 2: mod_base = OTHER; note = 2'-Omethylguanosine
  modified_base 3: mod_base = OTHER; note = 2'-Omethylcytosine
  modified_base 4: mod_base = OTHER; note = 2'-fluorouridine
  modified_base 5: mod_base = OTHER; note = 2'-Omethylcytosine
  modified_base 6: mod_base = OTHER; note = 2'-Omethylcytosine phosphorothiorate
  modified_base 10: mod_base = OTHER; note = 2'-Omethylguanosine
  modified_base 12: mod_base = OTHER; note = 2'-fluoroguanosine phosphorothiorate
  modified_base 14: mod_base = OTHER; note = 2'-Omethyladenosine
  modified_base 17: mod_base = OTHER; note = Guanosine phosphorothiorate
  modified_base 18: mod_base = OTHER; note = 2'-Omethylguanosine phosphorothiorate
  modified_base 20: mod_base = OTHER; note = 2'-Omethyluridine
  modified_base 28: mod_base = OTHER; note = Uridine phosphorothiorate
  modified_base 29: mod_base = OTHER; note = 2'-Omethylguanosine phosphorothiorate
  modified_base 34: mod_base = OTHER; note = 2'-Omethyluridine
  modified_base 38: mod_base = OTHER; note = 2'-fluoroadenosine phosphorothiorate
  modified_base 39: mod_base = OTHER; note = 2'-fluorouridine
  modified_base 43: mod_base = OTHER; note = 2'-Omethyladenosine
  modified_base 45: mod_base = OTHER; note = 2'-Omethylguanosine phosphorothiorate
  modified_base 46: mod_base = OTHER; note = 2'-Omethylguanosine
  modified_base 47: mod_base = OTHER; note = 2'-Omethyluridine
  modified_base 48: mod_base = OTHER; note = 2'-fluorouridine
  modified_base 51: mod_base = OTHER; note = 2'-Omethylguanosine
  modified_base 52: mod_base = OTHER; note = 2'-fluoroguanosine
  modified_base 53: mod_base = OTHER; note = 2'-fluoroguanosine
  modified_base 55: mod_base = OTHER; note = Uridine phosphorothiorate
  modified_base 56: mod_base = OTHER; note = 2'-fluorocytosine
  modified_base 57: mod_base = OTHER; note = 2'-fluoroguanosine phosphorothiorate
  modified_base 58: mod_base = OTHER; note = 2'-fluoroadenosine
  modified_base 59: mod_base = OTHER; note = Guanosine phosphorothiorate
  modified_base 60: mod_base = OTHER; note = 2'-Omethyluridine
  modified_base 65: mod_base = OTHER; note = 2'-Omethylguanosine
  modified_base 66: mod_base = OTHER; note = Cytosine phosphorothiorate
  modified_base 67: mod_base = OTHER; note = 2'-fluoroguanosine
  modified_base 68: mod_base = OTHER; note = 2'-Omethylguanosine
  modified_base 69: mod_base = OTHER; note = Adenosine phosphorothiorate
  modified_base 70: mod_base = OTHER; note = 2'-fluoroguanosine
  modified_base 73: mod_base = OTHER; note = 2'-Omethylguanosine
  modified_base 76: mod_base = OTHER; note = 2'-fluoroadenosine

SEQ ID NO: 3990 - RNA, 85 nt, synthetic construct; identical to SEQ ID NO: 3301
  source 1..85: mol_type = other RNA
  modified_base 1: mod_base = OTHER; note = 2'-Omethylguanosine phosphorothiorate
  modified_base 2: mod_base = OTHER; note = 2'-Omethylcytosine
  modified_base 12: mod_base = OTHER; note = 2'-Omethylcytosine
  modified_base 20: mod_base = OTHER; note = Uridine phosphorothiorate
  modified_base 31: mod_base = OTHER; note = 2'-fluoroadenosine
  modified_base 44: mod_base = OTHER; note = 2'-fluorouridine
  modified_base 52: mod_base = OTHER; note = 2'-fluorocytosine
  modified_base 53: mod_base = OTHER; note = 2'-fluorocytosine
  modified_base 54: mod_base = OTHER; note = 2'-fluorocytosine phosphorothiorate
  modified_base 57: mod_base = OTHER; note = 2'-fluorocytosine phosphorothiorate
  modified_base 61: mod_base = OTHER; note = Guanosine phosphorothiorate
  modified_base 63: mod_base = OTHER; note = 2'-Omethyluridine
  modified_base 70: mod_base = OTHER; note = 2'-Omethylcytosine
  modified_base 72: mod_base = OTHER; note = 2'-fluorouridine
  modified_base 81: mod_base = OTHER; note = 2'-fluorocytosine phosphorothiorate
  modified_base 82: mod_base = OTHER; note = 2'-Omethylguanosine

SEQ ID NO: 3991 - RNA, 76 nt, synthetic construct; identical to SEQ ID NO: 625
  source 1..76: mol_type = other RNA
  modified_base 32: mod_base = OTHER; note = 2'-O-(2-Methoxyethyl) cytosine
  modified_base 33: mod_base = OTHER; note = 2'-O-(2-Methoxyethyl) thymine
  modified_base 34: mod_base = OTHER; note = 2'-O-(2-Methoxyethyl) thymine
  modified_base 35: mod_base = OTHER; note = 2'-O-(2-Methoxyethyl) cytosine
  modified_base 36: mod_base = OTHER; note = 2'-O-(2-Methoxyethyl) adenosine
  modified_base 37: mod_base = OTHER; note = 2'-O-(2-Methoxyethyl) adenosine
  modified_base 38: mod_base = OTHER; note = 2'-O-(2-Methoxyethyl) adenosine

SEQ ID NO: 3992 - RNA, 76 nt, synthetic construct; identical to SEQ ID NO: 625
  source 1..76: mol_type = other RNA
  modified_base 5: mod_base = OTHER; note = 2'-fluorocytosine
  modified_base 10: mod_base = OTHER; note = 2'-fluoroguanosine
  modified_base 12: mod_base = OTHER; note = 2'-fluoroguanosine
  modified_base 14: mod_base = OTHER; note = 2'-Omethyladenosine
  modified_base 16: mod_base = OTHER; note = 2'-fluorouridine
  modified_base 17: mod_base = OTHER; note = 2'-Omethylguanosine phosphorothiorate
  modified_base 18: mod_base = OTHER; note = 2'-Omethylguanosine
  modified_base 24: mod_base = OTHER; note = 2'-Omethylguanosine
  modified_base 32: mod_base = OTHER; note = 2'-fluorocytosine
  modified_base 34: mod_base = OTHER; note = 2'-fluorouridine
  modified_base 36: mod_base = OTHER; note = Adenosine phosphorothiorate
  modified_base 38: mod_base = OTHER; note = 2'-Omethyladenosine
  modified_base 39: mod_base = OTHER; note = 2'-fluorouridine phosphorothiorate
  modified_base 41: mod_base = OTHER; note = 2'-fluorocytosine
  modified_base 42: mod_base = OTHER; note = 2'-fluoroadenosine
  modified_base 43: mod_base = OTHER; note = Adenosine phosphorothiorate
  modified_base 46: mod_base = OTHER; note = 2'-Omethylguanosine
  modified_base 47: mod_base = OTHER; note = 2'-Omethyluridine
  modified_base 51: mod_base = OTHER; note = 2'-Omethylguanosine
  modified_base 52: mod_base = OTHER; note = Guanosine phosphorothiorate
  modified_base 54: mod_base = OTHER; note = Uridine phosphorothiorate
  modified_base 56: mod_base = OTHER; note = 2'-Omethylcytosine
  modified_base 57: mod_base = OTHER; note = 2'-Omethylguanosine
  modified_base 59: mod_base = OTHER; note = 2'-fluoroguanosine
  modified_base 60: mod_base = OTHER; note = 2'-Omethyluridine
  modified_base 61: mod_base = OTHER; note = 2'-fluorocytosine
  modified_base 64: mod_base = OTHER; note = 2'-Omethylguanosine
  modified_base 67: mod_base = OTHER; note = 2'-fluoroguanosine
  modified_base 68: mod_base = OTHER; note = 2'-Omethylguanosine
  modified_base 72: mod_base = OTHER; note = 2'-Omethylcytosine
  modified_base 74: mod_base = OTHER; note = 2'-fluorocytosine
  modified_base 75: mod_base = OTHER; note = 2'-Omethylcytosine

SEQ ID NO: 3993 - RNA, 86 nt, synthetic construct; identical to SEQ ID NO: 3290
  source 1..86: mol_type = other RNA
  modified_base 52: mod_base = OTHER; note = 2'-fluorouridine

SEQ ID NO: 3994 - RNA, 85 nt, synthetic construct; identical to SEQ ID NO: 3286
  source 1..85: mol_type = other RNA
  modified_base 1: mod_base = OTHER; note = 2'-Omethylcytosine
  modified_base 23: mod_base = OTHER; note = 2'-fluoroguanosine
  modified_base 26: mod_base = OTHER; note = 2'-fluorouridine
  modified_base 30: mod_base = OTHER; note = 2'-fluoroadenosine
  modified_base 32: mod_base = OTHER; note = 2'-fluorouridine
  modified_base 33: mod_base = OTHER; note = 2'-fluorouridine phosphorothiorate
  modified_base 34: mod_base = OTHER; note = 2'-fluorouridine
  modified_base 43: mod_base = OTHER; note = 2'-Omethyluridine
  modified_base 46: mod_base = OTHER; note = Adenosine phosphorothiorate
  modified_base 47: mod_base = OTHER; note = 2'-fluorocytosine
  modified_base 50: mod_base = OTHER; note = Adenosine phosphorothiorate
  modified_base 59: mod_base = OTHER; note = 2'-fluorouridine
  modified_base 67: mod_base = OTHER; note = Adenosine phosphorothiorate
  modified_base 83: mod_base = OTHER; note = Cytosine phosphorothiorate
  modified_base 84: mod_base = OTHER; note = 2'-Omethylcytosine

SEQ ID NO: 3995 - DNA, 76 bp, synthetic construct; identical to SEQ ID NO: 1924
  source 1..76: mol_type = other DNA
  misc_feature 1..26: note = RNA
  misc_feature 27..31: note = DNA
  misc_feature 32..76: note = RNA

SEQ ID NO: 3996 - RNA, 85 nt, synthetic construct; identical to SEQ ID NO: 3286
  source 1..85: mol_type = other RNA
  modified_base 1: mod_base = OTHER; note = 2'-Omethylcytosine
  modified_base 11: mod_base = OTHER; note = Cytosine phosphorothiorate
  modified_base 27: mod_base = OTHER; note = 2'-fluorouridine
  modified_base 34: mod_base = OTHER; note = 2'-fluorouridine
  modified_base 50: mod_base = OTHER; note = Adenosine phosphorothiorate
  modified_base 59: mod_base = OTHER; note = 2'-Omethyluridine
  modified_base 84: mod_base = OTHER; note = 2'-Omethylcytosine

SEQ ID NO: 3997 - RNA, 76 nt, synthetic construct; identical to SEQ ID NO: 625
  source 1..76: mol_type = other RNA
  modified_base 1: mod_base = OTHER; note = 2'-Omethylguanosine
  modified_base 2: mod_base = OTHER; note = 2'-Omethylguanosine
  modified_base 3: mod_base = OTHER; note = 2'-Omethylcytosine
  modified_base 4: mod_base = OTHER; note = 2'-Omethyluridine
  modified_base 5: mod_base = OTHER; note = 2'-Omethylcytosine
  modified_base 6: mod_base = OTHER; note = 2'-Omethylcytosine
  modified_base 7: mod_base = OTHER; note = Guanosine phosphorothiorate
  modified_base 9: mod_base = OTHER; note = Guanosine phosphorothiorate
  modified_base 10: mod_base = OTHER; note = 2'-Omethylguanosine
  modified_base 11: mod_base = OTHER; note = 2'-Omethylcytosine
  modified_base 12: mod_base = OTHER; note = 2'-Omethylguanosine phosphorothiorate
  modified_base 13: mod_base = OTHER; note = 2'-Omethylcytosine
  modified_base 14: mod_base = OTHER; note = 2'-Omethyladenosine
  modified_base 15: mod_base = OTHER; note = 2'-fluoroadenosine phosphorothiorate
  modified_base 17: mod_base = OTHER; note = 2'-Omethylguanosine
  modified_base 18: mod_base = OTHER; note = 2'-fluoroguanosine phosphorothiorate
  modified_base 19: mod_base = OTHER; note = Adenosine phosphorothiorate
  modified_base 21: mod_base = OTHER; note = 2'-fluoroadenosine phosphorothiorate
  modified_base 22: mod_base = OTHER; note = Guanosine phosphorothiorate
  modified_base 23: mod_base = OTHER; note = 2'-Omethylcytosine
  modified_base 24: mod_base = OTHER; note = 2'-Omethylguanosine
  modified_base 25: mod_base = OTHER; note = 2'-Omethylcytosine
  modified_base 26: mod_base = OTHER; note = Adenosine phosphorothiorate
  modified_base 28: mod_base = OTHER; note = 2'-Omethyluridine phosphorothiorate
  modified_base 29: mod_base = OTHER; note = 2'-fluoroguanosine phosphorothiorate
  modified_base 30: mod_base = OTHER; note = 2'-Omethylguanosine phosphorothiorate
  modified_base 31: mod_base = OTHER; note = 2'-Omethyladenosine phosphorothiorate
  modified_base 32: mod_base = OTHER; note = 2'-Omethylcytosine phosphorothiorate
  modified_base 33: mod_base = OTHER; note = 2'-fluorouridine
  modified_base 35: mod_base = OTHER; note = Cytosine phosphorothiorate
  modified_base 36: mod_base = OTHER; note = 2'-Omethyladenosine phosphorothiorate
  modified_base 37: mod_base = OTHER; note = Adenosine phosphorothiorate
  modified_base 40: mod_base = OTHER; note = 2'-Omethyluridine
  modified_base 41: mod_base = OTHER; note = 2'-Omethylcytosine
  modified_base 43: mod_base = OTHER; note = 2'-Omethyladenosine
  modified_base 44: mod_base = OTHER; note = 2'-Omethyladenosine
  modified_base 48: mod_base = OTHER; note = 2'-fluorouridine
  modified_base 49: mod_base = OTHER; note = 2'-Omethylcytosine
  modified_base 50: mod_base = OTHER; note = 2'-Omethylcytosine
  modified_base 51: mod_base = OTHER; note = 2'-Omethylguanosine phosphorothiorate
  modified_base 52: mod_base = OTHER; note = 2'-Omethylguanosine
  modified_base 53: mod_base = OTHER; note = 2'-Omethylguanosine
  modified_base 54: mod_base = OTHER; note = Uridine phosphorothiorate
  modified_base 55: mod_base = OTHER; note = Uridine phosphorothiorate
  modified_base 56: mod_base = OTHER; note = 2'-Omethylcytosine
  modified_base 57: mod_base = OTHER; note = 2'-Omethylguanosine
  modified_base 59: mod_base = OTHER; note = 2'-Omethylguanosine
  modified_base 60: mod_base = OTHER; note = 2'-Omethyluridine phosphorothiorate
  modified_base 61: mod_base = OTHER; note = 2'-Omethylcytosine
  modified_base 62: mod_base = OTHER; note = 2'-Omethylcytosine
  modified_base 63: mod_base = OTHER; note = 2'-fluorocytosine
  modified_base 64: mod_base = OTHER; note = 2'-Omethylguanosine
  modified_base 65: mod_base = OTHER; note = 2'-Omethylguanosine
  modified_base 66: mod_base = OTHER; note = 2'-fluorocytosine phosphorothiorate
  modified_base 67: mod_base = OTHER; note = 2'-Omethylguanosine phosphorothiorate
  modified_base 68: mod_base = OTHER; note = 2'-Omethylguanosine
  modified_base 70: mod_base = OTHER; note = 2'-Omethylguanosine
  modified_base 71: mod_base = OTHER; note = 2'-Omethyluridine
  modified_base 73: mod_base = OTHER; note = 2'-Omethylguanosine
  modified_base 74: mod_base = OTHER; note = 2'-fluorocytosine phosphorothiorate
  modified_base 75: mod_base = OTHER; note = 2'-fluorocytosine phosphorothiorate
  modified_base 76: mod_base = OTHER; note = 2'-Omethyladenosine

SEQ ID NO: 3998 - RNA, 75 nt, synthetic construct; identical to SEQ ID NO: 1045
  source 1..75: mol_type = other RNA
  modified_base 4: mod_base = OTHER; note = 2'-Omethyluridine
  modified_base 9: mod_base = OTHER; note = Guanosine phosphorothiorate
  modified_base 16: mod_base = OTHER; note = 2'-Omethyluridine phosphorothiorate
  modified_base 19: mod_base = OTHER; note = Uridine phosphorothiorate
  modified_base 20: mod_base = OTHER; note = 2'-fluoroadenosine
  modified_base 38: mod_base = OTHER; note = 2'-fluoroadenosine
  modified_base 41: mod_base = OTHER; note = 2'-fluorocytosine
  modified_base 45: mod_base = OTHER; note = 2'-fluoroguanosine
  modified_base 47: mod_base = OTHER; note = 2'-fluorouridine
  modified_base 54: mod_base = OTHER; note = 2'-fluorouridine
  modified_base 59: mod_base = OTHER; note = 2'-Omethyluridine
  modified_base 65: mod_base = OTHER; note = 2'-fluorouridine
  modified_base 72: mod_base = OTHER; note = Uridine phosphorothiorate
  modified_base 73: mod_base = OTHER; note = Cytosine phosphorothiorate
  modified_base 74: mod_base = OTHER; note = 2'-Omethylcytosine

SEQ ID NO: 3999 - RNA, 75 nt, synthetic construct; identical to SEQ ID NO: 3336
  source 1..75: mol_type = other RNA
  modified_base 10: mod_base = OTHER; note = Cytosine phosphorothiorate
  modified_base 13: mod_base = OTHER; note = 2'-Omethyladenosine phosphorothiorate
  modified_base 20: mod_base = OTHER; note = 2'-fluoroadenosine
  modified_base 29: mod_base = OTHER; note = Guanosine phosphorothiorate
  modified_base 45: mod_base = OTHER; note = 2'-fluoroguanosine
  modified_base 46: mod_base = OTHER; note = 2'-fluorouridine
  modified_base 57: mod_base = OTHER; note = 2'-Omethyladenosine phosphorothiorate
  modified_base 72: mod_base = OTHER; note = 2'-fluoroguanosine phosphorothiorate
  modified_base 73: mod_base = OTHER; note = Cytosine phosphorothiorate

SEQ ID NO: 4000 - RNA, 76 nt, synthetic construct; identical to SEQ ID NO: 3295
  source 1..76: mol_type = other RNA
  modified_base 1: mod_base = OTHER; note = 2'-Omethylcytosine phosphorothiorate
  modified_base 2: mod_base = OTHER; note = 2'-Omethylcytosine phosphorothiorate
  modified_base 3: mod_base = OTHER; note = 2'-fluorouridine
  modified_base 4: mod_base = OTHER; note = Uridine phosphorothiorate
  modified_base 5: mod_base = OTHER; note = 2'-Omethylcytosine
  modified_base 6: mod_base = OTHER; note = 2'-fluoroguanosine phosphorothiorate
  modified_base 7: mod_base = OTHER; note = 2'-Omethyladenosine phosphorothiorate
  modified_base 14: mod_base = OTHER; note = 2'-fluoroadenosine phosphorothiorate
  modified_base 20: mod_base = OTHER; note = 2'-Omethyluridine phosphorothiorate
  modified_base 24: mod_base = OTHER; note = 2'-fluoroguanosine phosphorothiorate
  modified_base 30: mod_base = OTHER; note = 2'-fluoroguanosine phosphorothiorate
  modified_base 36: mod_base = OTHER; note = Adenosine phosphorothiorate
  modified_base 41: mod_base = OTHER; note = 2'-fluorocytosine phosphorothiorate
  modified_base 43: mod_base = OTHER; note = 2'-fluorouridine phosphorothiorate
  modified_base 52: mod_base = OTHER; note = 2'-Omethylguanosine
  modified_base 54: mod_base = OTHER; note = 2'-Omethyluridine phosphorothiorate
  modified_base 58: mod_base = OTHER; note = Adenosine phosphorothiorate
  modified_base 74: mod_base = OTHER; note = 2'-Omethylcytosine phosphorothiorate
  modified_base 75: mod_base = OTHER; note = 2'-fluorocytosine

SEQ ID NO: 4001 - RNA, 86 nt, synthetic construct; identical to SEQ ID NO: 3290
  source 1..86: mol_type = other RNA
  modified_base 14: mod_base = OTHER; note = Adenosine phosphorothiorate

SEQ ID NO: 4002 - RNA, 76 nt, synthetic construct; identical to SEQ ID NO: 3795
  source 1..76: mol_type = other RNA
  modified_base 1: mod_base = OTHER; note = 2'-Omethylguanosine
  modified_base 2: mod_base = OTHER; note = 2'-Omethylcytosine
  modified_base 3: mod_base = OTHER; note = 2'-Omethylcytosine
  modified_base 4: mod_base = OTHER; note = 2'-Omethyluridine
  modified_base 5: mod_base = OTHER; note = 2'-Omethylcytosine
  modified_base 6: mod_base = OTHER; note = 2'-Omethylcytosine
  modified_base 10: mod_base = OTHER; note = 2'-Omethylguanosine
  modified_base 11: mod_base = OTHER; note = 2'-Omethylcytosine
  modified_base 12: mod_base = OTHER; note = 2'-Omethylcytosine
  modified_base 13: mod_base = OTHER; note = 2'-Omethyluridine
  modified_base 14: mod_base = OTHER; note = 2'-Omethyladenosine
  modified_base 15: mod_base = OTHER; note = 2'-fluoroadenosine
  modified_base 16: mod_base = OTHER; note = 2'-Omethyluridine
  modified_base 17: mod_base = OTHER; note = 2'-Omethylguanosine
  modified_base 18: mod_base = OTHER; note = 2'-Omethylguanosine
  modified_base 19: mod_base = OTHER; note = 2'-fluoroadenosine
  modified_base 20: mod_base = OTHER; note = 2'-Omethyluridine
  modified_base 25: mod_base = OTHER; note = 2'-Omethylcytosine
  modified_base 33: mod_base = OTHER; note = 2'-fluorouridine
  modified_base 35: mod_base = OTHER; note = Cytosine phosphorothiorate
  modified_base 37: mod_base = OTHER; note = Adenosine phosphorothiorate
  modified_base 38: mod_base = OTHER; note = Adenosine phosphorothiorate
  modified_base 41: mod_base = OTHER; note = 2'-Omethylcytosine
  modified_base 42: mod_base = OTHER; note = 2'-Omethylguanosine
  modified_base 43: mod_base = OTHER; note = 2'-Omethylguanosine
  modified_base 44: mod_base = OTHER; note = 2'-Omethylguanosine
  modified_base 49: mod_base = OTHER; note = 2'-Omethylguanosine
  modified_base 50: mod_base = OTHER; note = 2'-Omethylcytosine
  modified_base 52: mod_base = OTHER; note = 2'-Omethylguanosine
  modified_base 54: mod_base = OTHER; note = 2'-Omethyluridine
  modified_base 55: mod_base = OTHER; note = Uridine phosphorothiorate
  modified_base 56: mod_base = OTHER; note = 2'-Omethylcytosine
  modified_base 57: mod_base = OTHER; note = 2'-fluoroguanosine
  modified_base 59: mod_base = OTHER; note = 2'-Omethylguanosine
  modified_base 61: mod_base = OTHER; note = 2'-Omethylcytosine
  modified_base 65: mod_base = OTHER; note = 2'-Omethyluridine
  modified_base 73: mod_base = OTHER; note = 2'-Omethylguanosine

SEQ ID NO: 4003 - RNA, 76 nt, synthetic construct; identical to SEQ ID NO: 625
  source 1..76: mol_type = other RNA
  modified_base 1: mod_base = OTHER; note = 2'-Omethylguanosine phosphorothiorate
  modified_base 2: mod_base = OTHER; note = 2'-Omethylguanosine phosphorothiorate
  modified_base 3: mod_base = OTHER; note = 2'-Omethylcytosine phosphorothiorate
  modified_base 4: mod_base = OTHER; note = 2'-Omethyluridine phosphorothiorate
  modified_base 5: mod_base = OTHER; note = 2'-Omethylcytosine phosphorothiorate
  modified_base 6: mod_base = OTHER; note = 2'-Omethylcytosine phosphorothiorate
  modified_base 14: mod_base = OTHER; note = 2'-Omethyladenosine
  modified_base 15: mod_base = OTHER; note = 2'-Omethyladenosine
  modified_base 16: mod_base = OTHER; note = 2'-Omethyluridine
  modified_base 17: mod_base = OTHER; note = 2'-Omethylguanosine
  modified_base 18: mod_base = OTHER; note = 2'-Omethylguanosine
  modified_base 19: mod_base = OTHER; note = 2'-Omethyladenosine
  modified_base 20: mod_base = OTHER; note = 2'-Omethyluridine
  modified_base 49: mod_base = OTHER; note = 2'-Omethylcytosine
  modified_base 50: mod_base = OTHER; note = 2'-Omethylcytosine
  modified_base 51: mod_base = OTHER; note = 2'-Omethylguanosine
  modified_base 52: mod_base = OTHER; note = 2'-Omethylguanosine
  modified_base 53: mod_base = OTHER; note = 2'-Omethylguanosine

SEQ ID NO: 4004 - RNA, 75 nt, synthetic construct; identical to SEQ ID NO: 3311
  source 1..75: mol_type = other RNA
  modified_base 1: mod_base = OTHER; note = 2'-fluoroguanosine phosphorothiorate
  modified_base 2: mod_base = OTHER; note = 2'-Omethylguanosine phosphorothiorate
  modified_base 22: mod_base = OTHER; note = 2'-fluoroguanosine
  modified_base 40: mod_base = OTHER; note = 2'-fluorocytosine
  modified_base 43: mod_base = OTHER; note = 2'-fluoroguanosine
  modified_base 58: mod_base = OTHER; note = 2'-Omethylguanosine
  modified_base 59: mod_base = OTHER; note = 2'-fluorouridine
  modified_base 60: mod_base = OTHER; note = Cytosine phosphorothiorate
  modified_base 68: mod_base = OTHER; note = 2'-fluoroadenosine
  modified_base 72: mod_base = OTHER; note = Uridine phosphorothiorate

SEQ ID NO: 4005 - RNA, 76 nt, synthetic construct; identical to SEQ ID NO: 625
  source 1..76: mol_type = other RNA
  modified_base 1: mod_base = OTHER; note = 2'-Omethylguanosine
  modified_base 5: mod_base = OTHER; note = 2'-Omethylcytosine
  modified_base 12: mod_base = OTHER; note = 2'-Omethylguanosine
  modified_base 13: mod_base = OTHER; note = Cytosine phosphorothiorate
  modified_base 14: mod_base = OTHER; note = 2'-Omethyladenosine phosphorothiorate
  modified_base 15: mod_base = OTHER; note = 2'-fluoroadenosine
  modified_base 17: mod_base = OTHER; note = 2'-Omethylguanosine phosphorothiorate
  modified_base 18: mod_base = OTHER; note = 2'-fluoroguanosine
  modified_base 19: mod_base = OTHER; note = Adenosine phosphorothiorate
  modified_base 20: mod_base = OTHER; note = 2'-Omethyluridine
  modified_base 23: mod_base = OTHER; note = Cytosine phosphorothiorate
  modified_base 24: mod_base = OTHER; note = 2'-fluoroguanosine
  modified_base 27: mod_base = OTHER; note = 2'-fluorouridine
  modified_base 28: mod_base = OTHER; note = 2'-Omethyluridine
  modified_base 30: mod_base = OTHER; note = 2'-Omethylguanosine
  modified_base 33: mod_base = OTHER; note = 2'-fluorouridine
  modified_base 39: mod_base = OTHER; note = 2'-fluorouridine
  modified_base 44: mod_base = OTHER; note = 2'-Omethyladenosine
  modified_base 45: mod_base = OTHER; note = 2'-Omethylguanosine phosphorothiorate
  modified_base 46: mod_base = OTHER; note = 2'-Omethylguanosine
  modified_base 47: mod_base = OTHER; note = 2'-Omethyluridine
  modified_base 48: mod_base = OTHER; note = 2'-fluorouridine
  modified_base 51: mod_base = OTHER; note = Guanosine phosphorothiorate
  modified_base 52: mod_base = OTHER; note = 2'-fluoroguanosine
  modified_base 53: mod_base = OTHER; note = Guanosine phosphorothiorate
  modified_base 54: mod_base = OTHER; note = 2'-fluorouridine
  modified_base 55: mod_base = OTHER; note = Uridine phosphorothiorate
  modified_base 56: mod_base = OTHER; note = 2'-Omethylcytosine
  modified_base 57: mod_base = OTHER; note = 2'-Omethylguanosine
  modified_base 58: mod_base = OTHER; note = Adenosine phosphorothiorate
  modified_base 59: mod_base = OTHER; note = 2'-Omethylguanosine phosphorothiorate
  modified_base 60: mod_base = OTHER; note = Uridine phosphorothiorate
  modified_base 61: mod_base = OTHER; note = 2'-Omethylcytosine
  modified_base 63: mod_base = OTHER; note = 2'-fluorocytosine
  modified_base 66: mod_base = OTHER; note = 2'-fluorocytosine
  modified_base 69: mod_base = OTHER; note = 2'-fluoroadenosine
  modified_base 70: mod_base = OTHER; note = 2'-Omethylguanosine phosphorothiorate
  modified_base 72: mod_base = OTHER; note = Cytosine phosphorothiorate
  modified_base 74: mod_base = OTHER; note = 2'-Omethylcytosine
  modified_base 75: mod_base = OTHER; note = 2'-fluorocytosine

SEQ ID NO: 4006 - RNA, 76 nt, synthetic construct; identical to SEQ ID NO: 3342
  source 1..76: mol_type = other RNA
  modified_base 1: mod_base = OTHER; note = 2'-Omethylguanosine
  modified_base 13: mod_base = OTHER; note = 2'-Omethylcytosine
  modified_base 14: mod_base = OTHER; note = 2'-Omethyladenosine
  modified_base 15: mod_base = OTHER; note = 2'-Omethyladenosine
  modified_base 16: mod_base = OTHER; note = 2'-Omethyluridine
  modified_base 17: mod_base = OTHER; note = 2'-Omethylguanosine
  modified_base 18: mod_base = OTHER; note = 2'-Omethylguanosine
  modified_base 19: mod_base = OTHER; note = Adenosine phosphorothiorate
  modified_base 20: mod_base = OTHER; note = 2'-Omethyluridine
  modified_base 21: mod_base = OTHER; note = Adenosine phosphorothiorate
  modified_base 25: mod_base = OTHER; note = 2'-Omethylcytosine
  modified_base 41: mod_base = OTHER; note = 2'-fluorocytosine
  modified_base 42: mod_base = OTHER; note = 2'-Omethylguanosine
  modified_base 43: mod_base = OTHER; note = 2'-Omethyladenosine
  modified_base 44: mod_base = OTHER; note = 2'-fluoroadenosine
  modified_base 49: mod_base = OTHER; note = 2'-Omethylcytosine
  modified_base 50: mod_base = OTHER; note = 2'-Omethylcytosine
  modified_base 51: mod_base = OTHER; note = 2'-Omethylguanosine
  modified_base 52: mod_base = OTHER; note = 2'-Omethylguanosine
  modified_base 53: mod_base = OTHER; note = 2'-Omethylguanosine
  modified_base 54: mod_base = OTHER; note = Uridine phosphorothiorate
  modified_base 55: mod_base = OTHER; note = Uridine phosphorothiorate
  modified_base 61: mod_base = OTHER; note = 2'-Omethylcytosine
  modified_base 65: mod_base = OTHER; note = 2'-Omethylguanosine
  modified_base 73: mod_base = OTHER; note = 2'-Omethylguanosine

SEQ ID NO: 4007 - RNA, 85 nt, synthetic construct; identical to SEQ ID NO: 3288
  source 1..85: mol_type = other RNA
  modified_base 1: mod_base = OTHER; note = 2'-fluorocytosine phosphorothiorate
  modified_base 11: mod_base = OTHER; note = Cytosine phosphorothiorate
  modified_base 16: mod_base = OTHER; note = 2'-Omethylguanosine
  modified_base 32: mod_base = OTHER; note = 2'-fluorouridine
  modified_base 43: mod_base = OTHER; note = 2'-Omethyluridine
  modified_base 56: mod_base = OTHER; note = 2'-Omethylguanosine
  modified_base 67: mod_base = OTHER; note = Adenosine phosphorothiorate

SEQ ID NO: 4008 - RNA, 85 nt, synthetic construct; identical to SEQ ID NO: 3310
  source 1..85: mol_type = other RNA
  modified_base 1: mod_base = OTHER; note = 2'-Omethylcytosine
  modified_base 30: mod_base = OTHER; note = 2'-fluoroadenosine
  modified_base 44: mod_base = OTHER; note = 2'-Omethylguanosine
  modified_base 50: mod_base = OTHER; note = Adenosine phosphorothiorate
  modified_base 57: mod_base = OTHER; note = 2'-Omethylcytosine
  modified_base 59: mod_base = OTHER; note = 2'-Omethyluridine
  modified_base 85: mod_base = OTHER; note = 2'-Omethyladenosine

SEQ ID NO: 4009 - RNA, 76 nt, synthetic construct; identical to SEQ ID NO: 3316
  source 1..76: mol_type = other RNA
  modified_base 1: mod_base = OTHER; note = 2'-Omethyladenosine
  modified_base 19: mod_base = OTHER; note = 2'-Omethyladenosine
  modified_base 20: mod_base = OTHER; note = 2'-Omethyluridine
  modified_base 21: mod_base = OTHER; note = 2'-fluoroadenosine
  modified_base 22: mod_base = OTHER; note = 2'-Omethylguanosine
  modified_base 40: mod_base = OTHER; note = 2'-fluorouridine
  modified_base 41: mod_base = OTHER; note = 2'-Omethylcytosine
  modified_base 42: mod_base = OTHER; note = 2'-Omethyladenosine
  modified_base 43: mod_base = OTHER; note = 2'-Omethyladenosine
  modified_base 73: mod_base = OTHER; note = 2'-Omethylguanosine

SEQ ID NO: 4010 - RNA, 76 nt, synthetic construct; identical to SEQ ID NO: 625
  source 1..76: mol_type = other RNA
  modified_base 10: mod_base = OTHER; note = 2'-Omethylguanosine
  modified_base 11: mod_base = OTHER; note = 2'-Omethylcytosine
  modified_base 12: mod_base = OTHER; note = 2'-Omethylguanosine
  modified_base 13: mod_base = OTHER; note = 2'-Omethylcytosine
  modified_base 14: mod_base = OTHER; note = 2'-Omethyladenosine
  modified_base 15: mod_base = OTHER; note = 2'-Omethyladenosine
  modified_base 16: mod_base = OTHER; note = 2'-Omethyluridine
  modified_base 17: mod_base = OTHER; note = 2'-Omethylguanosine
  modified_base 18: mod_base = OTHER; note = 2'-Omethylguanosine
  modified_base 19: mod_base = OTHER; note = 2'-Omethyladenosine
  modified_base 20: mod_base = OTHER; note = 2'-Omethyluridine
  modified_base 22: mod_base = OTHER; note = 2'-Omethylguanosine
  modified_base 23: mod_base = OTHER; note = 2'-Omethylcytosine
  modified_base 24: mod_base = OTHER; note = 2'-Omethylguanosine
  modified_base 25: mod_base = OTHER; note = 2'-Omethylcytosine
  modified_base 40: mod_base = OTHER; note = 2'-fluorouridine
  modified_base 41: mod_base = OTHER; note = 2'-fluorocytosine
  modified_base 42: mod_base = OTHER; note = 2'-fluoroadenosine
  modified_base 43: mod_base = OTHER; note = 2'-fluoroadenosine
  modified_base 44: mod_base = OTHER; note = 2'-Omethyladenosine
  modified_base 45: mod_base = OTHER; note = 2'-Omethylguanosine
  modified_base 46: mod_base = OTHER; note = 2'-Omethylguanosine
  modified_base 49: mod_base = OTHER; note = 2'-Omethylcytosine
  modified_base 50: mod_base = OTHER; note = 2'-Omethylcytosine
  modified_base 51: mod_base = OTHER; note = 2'-Omethylguanosine
  modified_base 52: mod_base = OTHER; note = 2'-Omethylguanosine
  modified_base 53: mod_base = OTHER; note = 2'-Omethylguanosine
  modified_base 54: mod_base = OTHER; note = Uridine phosphorothiorate
  modified_base 55: mod_base = OTHER; note = Uridine phosphorothiorate
  modified_base 56: mod_base = OTHER; note = Cytosine phosphorothiorate
  modified_base 57: mod_base = OTHER; note = Guanosine phosphorothiorate

SEQ ID NO: 4011 - RNA, 86 nt, synthetic construct; identical to SEQ ID NO: 3290
  source 1..86: mol_type = other RNA
  modified_base 1: mod_base = OTHER; note = 2'-Omethyladenosine
  modified_base 71: mod_base = OTHER; note = 2'-Omethylcytosine
  modified_base 72: mod_base = OTHER; note = 2'-Omethylcytosine
  modified_base 73: mod_base = OTHER; note = 2'-fluorocytosine
  modified_base 74: mod_base = OTHER; note = 2'-Omethyladenosine
  modified_base 75: mod_base = OTHER; note = 2'-Omethylcytosine
  modified_base 76: mod_base = OTHER; note = 2'-Omethyluridine
  modified_base 77: mod_base = OTHER; note = 2'-Omethylcytosine
  modified_base 78: mod_base = OTHER; note = 2'-Omethylcytosine
  modified_base 79: mod_base = OTHER; note = 2'-Omethyluridine
  modified_base 80: mod_base = OTHER; note = 2'-fluoroguanosine
  modified_base 81: mod_base = OTHER; note = 2'-Omethylguanosine
  modified_base 82: mod_base = OTHER; note = 2'-Omethyluridine
  modified_base 83: mod_base = OTHER; note = 2'-Omethyladenosine

SEQ ID NO: 4012 - RNA, 76 nt, synthetic construct; identical to SEQ ID NO: 625
  source 1..76: mol_type = other RNA
  modified_base 1: mod_base = OTHER; note = 2'-Omethylguanosine phosphorothiorate
  modified_base 2: mod_base = OTHER; note = 2'-Omethylguanosine
  modified_base 3: mod_base = OTHER; note = 2'-Omethylcytosine
  modified_base 4: mod_base = OTHER; note = 2'-Omethyluridine
  modified_base 5: mod_base = OTHER; note = 2'-Omethylcytosine
  modified_base 6: mod_base = OTHER; note = 2'-Omethylcytosine
  modified_base 10: mod_base = OTHER; note = 2'-Omethylguanosine
  modified_base 11: mod_base = OTHER; note = 2'-Omethylcytosine
  modified_base 12: mod_base = OTHER; note = 2'-Omethylguanosine
  modified_base 13: mod_base = OTHER; note = 2'-Omethylcytosine
  modified_base 14: mod_base = OTHER; note = 2'-Omethyladenosine
  modified_base 15: mod_base = OTHER; note = 2'-Omethyladenosine
  modified_base 16: mod_base = OTHER; note = 2'-Omethyluridine
  modified_base 17: mod_base = OTHER; note = 2'-Omethylguanosine
  modified_base 18: mod_base = OTHER; note = 2'-Omethylguanosine
  modified_base 19: mod_base = OTHER; note = 2'-Omethyladenosine
  modified_base 20: mod_base = OTHER; note = 2'-Omethyluridine
  modified_base 22: mod_base = OTHER; note = 2'-Omethylguanosine
  modified_base 23: mod_base = OTHER; note = 2'-Omethylcytosine
  modified_base 24: mod_base = OTHER; note = 2'-Omethylguanosine
  modified_base 25: mod_base = OTHER; note = 2'-Omethylcytosine
  modified_base 49: mod_base = OTHER; note = 2'-Omethylcytosine
  modified_base 50: mod_base = OTHER; note = 2'-Omethylcytosine
  modified_base 51: mod_base = OTHER; note = 2'-Omethylguanosine
  modified_base 52: mod_base = OTHER; note = 2'-Omethylguanosine
  modified_base 53: mod_base = OTHER; note = 2'-Omethylguanosine
  modified_base 54: mod_base = OTHER; note = Uridine phosphorothiorate
  modified_base 55: mod_base = OTHER; note = Uridine phosphorothiorate
  modified_base 56: mod_base = OTHER; note = Cytosine phosphorothiorate
  modified_base 57: mod_base = OTHER; note = Guanosine phosphorothiorate
  modified_base 61: mod_base = OTHER; note = 2'-Omethylcytosine
  modified_base 62: mod_base = OTHER; note = 2'-Omethylcytosine
  modified_base 63: mod_base = OTHER; note = 2'-fluorocytosine
  modified_base 64: mod_base = OTHER; note = 2'-Omethylguanosine
  modified_base 65: mod_base = OTHER; note = 2'-Omethylguanosine
  modified_base 66: mod_base = OTHER; note = 2'-Omethylcytosine
  modified_base 67: mod_base = OTHER; note = 2'-Omethylguanosine
  modified_base 68: mod_base = OTHER; note = 2'-Omethylguanosine
  modified_base 69: mod_base = OTHER; note = 2'-Omethyladenosine
  modified_base 70: mod_base = OTHER; note = 2'-fluoroguanosine

SEQ ID NO: 4013 - RNA, 76 nt, synthetic construct; identical to SEQ ID NO: 625
  source 1..76: mol_type = other RNA
  modified_base 1: mod_base = OTHER; note = 2'-Omethylguanosine
  modified_base 10: mod_base = OTHER; note = 2'-Omethylguanosine
  modified_base 13: mod_base = OTHER; note = 2'-Omethylcytosine
  modified_base 17: mod_base = OTHER; note = Guanosine phosphorothiorate
  modified_base 18: mod_base = OTHER; note = 2'-Omethylguanosine
  modified_base 19: mod_base = OTHER; note = Adenosine phosphorothiorate
  modified_base 20: mod_base = OTHER; note = 2'-Omethyluridine
  modified_base 25: mod_base = OTHER; note = 2'-Omethylcytosine
  modified_base 29: mod_base = OTHER; note = 2'-Omethylguanosine
  modified_base 33: mod_base = OTHER; note = 2'-fluorouridine
  modified_base 35: mod_base = OTHER; note = Cytosine phosphorothiorate
  modified_base 37: mod_base = OTHER; note = Adenosine phosphorothiorate
  modified_base 38: mod_base = OTHER; note = Adenosine phosphorothiorate
  modified_base 43: mod_base = OTHER; note = 2'-Omethyladenosine
  modified_base 44: mod_base = OTHER; note = 2'-fluoroadenosine
  modified_base 46: mod_base = OTHER; note = Guanosine phosphorothiorate
  modified_base 50: mod_base = OTHER; note = 2'-Omethylcytosine
  modified_base 52: mod_base = OTHER; note = 2'-Omethylguanosine
  modified_base 54: mod_base = OTHER; note = Uridine phosphorothiorate
  modified_base 55: mod_base = OTHER; note = Uridine phosphorothiorate
  modified_base 56: mod_base = OTHER; note = 2'-Omethylcytosine
  modified_base 57: mod_base = OTHER; note = Guanosine phosphorothiorate
  modified_base 62: mod_base = OTHER; note = 2'-Omethylcytosine
  modified_base 63: mod_base = OTHER; note = 2'-fluorocytosine
  modified_base 65: mod_base = OTHER; note = 2'-Omethylguanosine
  modified_base 71: mod_base = OTHER; note = 2'-Omethyluridine
  modified_base 73: mod_base = OTHER; note = 2'-Omethylguanosine
  modified_base 75: mod_base = OTHER; note = 2'-fluorocytosine

SEQ ID NO: 4014 - RNA, 85 nt, synthetic construct; identical to SEQ ID NO: 3286
  source 1..85: mol_type = other RNA
  modified_base 1: mod_base = OTHER; note = 2'-Omethylcytosine
  modified_base 11: mod_base = OTHER; note = Cytosine phosphorothiorate
  modified_base 26: mod_base = OTHER; note = 2'-fluorouridine
  modified_base 30: mod_base = OTHER; note = 2'-fluoroadenosine
  modified_base 34: mod_base = OTHER; note = 2'-fluorouridine
  modified_base 43: mod_base = OTHER; note = 2'-Omethyluridine
  modified_base 45: mod_base = OTHER; note = 2'-Omethylguanosine
  modified_base 52: mod_base = OTHER; note = Guanosine phosphorothiorate
  modified_base 56: mod_base = OTHER; note = 2'-Omethylguanosine
  modified_base 58: mod_base = OTHER; note = 2'-Omethylguanosine
  modified_base 64: mod_base = OTHER; note = Uridine phosphorothiorate
  modified_base 73: mod_base = OTHER; note = 2'-fluoroadenosine
  modified_base 83: mod_base = OTHER; note = Cytosine phosphorothiorate
  modified_base 84: mod_base = OTHER; note = Cytosine phosphorothiorate

SEQ ID NO: 4015 - RNA, 76 nt, synthetic construct; identical to SEQ ID NO: 625
  source 1..76: mol_type = other RNA
  modified_base 5: mod_base = OTHER; note = 2'-fluorocytosine
  modified_base 13: mod_base = OTHER; note = 2'-Omethylcytosine
  modified_base 14: mod_base = OTHER; note = Adenosine phosphorothiorate
  modified_base 15: mod_base = OTHER; note = 2'-Omethyladenosine phosphorothiorate
  modified_base 16: mod_base = OTHER; note = 2'-Omethyluridine
  modified_base 18: mod_base = OTHER; note = 2'-fluoroguanosine
  modified_base 19: mod_base = OTHER; note = Adenosine phosphorothiorate
  modified_base 21: mod_base = OTHER; note = Adenosine phosphorothiorate
  modified_base 23: mod_base = OTHER; note = 2'-Omethylcytosine
  modified_base 28: mod_base = OTHER; note = 2'-Omethyluridine
  modified_base 30: mod_base = OTHER; note = 2'-Omethylguanosine phosphorothiorate
  modified_base 31: mod_base = OTHER; note = 2'-fluoroadenosine
  modified_base 33: mod_base = OTHER; note = 2'-fluorouridine
  modified_base 39: mod_base = OTHER; note = 2'-fluorouridine phosphorothiorate
  modified_base 40: mod_base = OTHER; note = 2'-fluorouridine
  modified_base 41: mod_base = OTHER; note = 2'-Omethylcytosine
  modified_base 42: mod_base = OTHER; note = 2'-fluoroadenosine
  modified_base 44: mod_base = OTHER; note = Adenosine phosphorothiorate
  modified_base 46: mod_base = OTHER; note = Guanosine phosphorothiorate
  modified_base 47: mod_base = OTHER; note = 2'-Omethyluridine
  modified_base 49: mod_base = OTHER; note = 2'-Omethylcytosine
  modified_base 50: mod_base = OTHER; note = 2'-Omethylcytosine
  modified_base 52: mod_base = OTHER; note = 2'-fluoroguanosine
  modified_base 56: mod_base = OTHER; note = 2'-fluorocytosine
  modified_base 57: mod_base = OTHER; note = 2'-fluoroguanosine phosphorothiorate
  modified_base 63: mod_base = OTHER; note = Cytosine phosphorothiorate
  modified_base 64: mod_base = OTHER; note = 2'-Omethylguanosine
  modified_base 65: mod_base = OTHER; note = Guanosine phosphorothiorate
  modified_base 69: mod_base = OTHER; note = 2'-Omethyladenosine
  modified_base 70: mod_base = OTHER; note = Guanosine phosphorothiorate
  modified_base 72: mod_base = OTHER; note = Cytosine phosphorothiorate
  modified_base 73: mod_base = OTHER; note = 2'-Omethylguanosine
  modified_base 74: mod_base = OTHER; note = 2'-Omethylcytosine
  modified_base 76: mod_base = OTHER; note = 2'-fluoroadenosine

SEQ ID NO: 4016 - RNA, 75 nt, synthetic construct; identical to SEQ ID NO: 3306
  source 1..75: mol_type = other RNA
  modified_base 1: mod_base = OTHER; note = 2'-Omethylguanosine phosphorothiorate
  modified_base 2: mod_base = OTHER; note = 2'-Omethyladenosine phosphorothiorate
  modified_base 74: mod_base = OTHER; note = Cytosine phosphorothiorate
  modified_base 75: mod_base = OTHER; note = 2'-Omethyladenosine

SEQ ID NO: 4017 - RNA, 85 nt, synthetic construct; identical to SEQ ID NO: 3297
  source 1..85: mol_type = other RNA
  modified_base 1: mod_base = OTHER; note = 2'-Omethylguanosine phosphorothiorate
  modified_base 17: mod_base = OTHER; note = 2'-Omethylguanosine phosphorothiorate
  modified_base 28: mod_base = OTHER; note = 2'-fluorouridine
  modified_base 45: mod_base = OTHER; note = 2'-fluoroguanosine phosphorothiorate
  modified_base 60: mod_base = OTHER; note = Adenosine phosphorothiorate
  modified_base 62: mod_base = OTHER; note = Guanosine phosphorothiorate
  modified_base 80: mod_base = OTHER; note = 2'-Omethylguanosine
  modified_base 82: mod_base = OTHER; note = 2'-Omethylguanosine

SEQ ID NO: 4018 - RNA, 75 nt, synthetic construct; identical to SEQ ID NO: 3299
  source 1..75: mol_type = other RNA
  modified_base 1: mod_base = OTHER; note = 2'-fluorocytosine phosphorothiorate
  modified_base 4: mod_base = OTHER; note = 2'-Omethylguanosine phosphorothiorate
  modified_base 8: mod_base = OTHER; note = 2'-Omethyladenosine phosphorothiorate
  modified_base 17: mod_base = OTHER; note = 2'-fluoroguanosine phosphorothiorate
  modified_base 19: mod_base = OTHER; note = 2'-fluorouridine
  modified_base 21: mod_base = OTHER; note = 2'-fluoroguanosine phosphorothiorate
  modified_base 28: mod_base = OTHER; note = 2'-fluoroadenosine
  modified_base 37: mod_base = OTHER; note = 2'-fluoroadenosine
  modified_base 39: mod_base = OTHER; note = 2'-Omethylcytosine phosphorothiorate
  modified_base 41: mod_base = OTHER; note = 2'-fluoroguanosine phosphorothiorate
  modified_base 47: mod_base = OTHER; note = 2'-fluorocytosine
  modified_base 48: mod_base = OTHER; note = 2'-fluorocytosine
  modified_base 49: mod_base = OTHER; note = 2'-fluoroadenosine
  modified_base 53: mod_base = OTHER; note = Uridine phosphorothiorate
  modified_base 55: mod_base = OTHER; note = 2'-fluorocytosine phosphorothiorate
  modified_base 61: mod_base = OTHER; note = Cytosine phosphorothiorate
  modified_base 69: mod_base = OTHER; note = Guanosine phosphorothiorate
  modified_base 72: mod_base = OTHER; note = 2'-Omethylguanosine
  modified_base 73: mod_base = OTHER; note = Cytosine phosphorothiorate
  modified_base 74: mod_base = OTHER; note = 2'-Omethylcytosine

SEQ ID NO: 4019 - RNA, 76 nt, synthetic construct; identical to SEQ ID NO: 625
  source 1..76: mol_type = other RNA
  modified_base 2: mod_base = OTHER; note = 2'-fluoroguanosine
  modified_base 3: mod_base = OTHER; note = 2'-Omethylcytosine
  modified_base 4: mod_base = OTHER; note = 2'-Omethyluridine phosphorothiorate
  modified_base 6: mod_base = OTHER; note = Cytosine phosphorothiorate
  modified_base 8: mod_base = OTHER; note = Uridine phosphorothiorate
  modified_base 10: mod_base = OTHER; note = 2'-fluoroguanosine
  modified_base 11: mod_base = OTHER; note = Cytosine phosphorothiorate
  modified_base 12: mod_base = OTHER; note = 2'-Omethylguanosine
  modified_base 15: mod_base = OTHER; note = 2'-Omethyladenosine
  modified_base 16: mod_base = OTHER; note = 2'-Omethyluridine
  modified_base 17: mod_base = OTHER; note = 2'-Omethylguanosine
  modified_base 20: mod_base = OTHER; note = Uridine phosphorothiorate
  modified_base 22: mod_base = OTHER; note = 2'-fluoroguanosine
  modified_base 24: mod_base = OTHER; note = 2'-Omethylguanosine
  modified_base 25: mod_base = OTHER; note = 2'-Omethylcytosine
  modified_base 28: mod_base = OTHER; note = 2'-fluorouridine
  modified_base 29: mod_base = OTHER; note = Guanosine phosphorothiorate
  modified_base 30: mod_base = OTHER; note = 2'-Omethylguanosine
  modified_base 34: mod_base = OTHER; note = 2'-Omethyluridine phosphorothiorate
  modified_base 38: mod_base = OTHER; note = 2'-fluoroadenosine phosphorothiorate
  modified_base 39: mod_base = OTHER; note = 2'-fluorouridine
  modified_base 40: mod_base = OTHER; note = 2'-fluorouridine
  modified_base 43: mod_base = OTHER; note = 2'-fluoroadenosine
  modified_base 44: mod_base = OTHER; note = Adenosine phosphorothiorate
  modified_base 45: mod_base = OTHER; note = 2'-Omethylguanosine
  modified_base 46: mod_base = OTHER; note = 2'-fluoroguanosine
  modified_base 52: mod_base = OTHER; note = Guanosine phosphorothiorate
  modified_base 53: mod_base = OTHER; note = 2'-fluoroguanosine
  modified_base 56: mod_base = OTHER; note = 2'-fluorocytosine
  modified_base 59: mod_base = OTHER; note = 2'-fluoroguanosine
  modified_base 60: mod_base = OTHER; note = Uridine phosphorothiorate
  modified_base 61: mod_base = OTHER; note = 2'-Omethylcytosine
  modified_base 69: mod_base = OTHER; note = 2'-Omethyladenosine
  modified_base 71: mod_base = OTHER; note = 2'-Omethyluridine
  modified_base 72: mod_base = OTHER; note = 2'-fluorocytosine phosphorothiorate
  modified_base 73: mod_base = OTHER; note = 2'-Omethylguanosine

SEQ ID NO: 4020 - RNA, 85 nt, synthetic construct; identical to SEQ ID NO: 3297
  source 1..85: mol_type = other RNA
  modified_base 1: mod_base = OTHER; note = 2'-Omethylguanosine
  modified_base 2: mod_base = OTHER; note = 2'-Omethylcytosine
  modified_base 3: mod_base = OTHER; note = 2'-Omethyluridine
  modified_base 4: mod_base = OTHER; note = 2'-Omethylguanosine
  modified_base 5: mod_base = OTHER; note = 2'-Omethyluridine
  modified_base 6: mod_base = OTHER; note = 2'-Omethylguanosine
  modified_base 13: mod_base = OTHER; note = 2'-Omethylguanosine
  modified_base 14: mod_base = OTHER; note = 2'-Omethyladenosine
  modified_base 15: mod_base = OTHER; note = 2'-Omethylguanosine
  modified_base 16: mod_base = OTHER; note = 2'-Omethyluridine
  modified_base 17: mod_base = OTHER; note = 2'-Omethylguanosine
  modified_base 18: mod_base = OTHER; note = 2'-Omethylguanosine
  modified_base 19: mod_base = OTHER; note = Uridine phosphorothiorate
  modified_base 20: mod_base = OTHER; note = 2'-Omethyluridine
  modified_base 21: mod_base = OTHER; note = Adenosine phosphorothiorate
  modified_base 25: mod_base = OTHER; note = 2'-Omethylcytosine
  modified_base 33: mod_base = OTHER; note = 2'-fluorouridine
  modified_base 34: mod_base = OTHER; note = 2'-Omethyluridine
  modified_base 35: mod_base = OTHER; note = Cytosine phosphorothiorate
  modified_base 37: mod_base = OTHER; note = Adenosine phosphorothiorate
  modified_base 38: mod_base = OTHER; note = Adenosine phosphorothiorate
  modified_base 58: mod_base = OTHER; note = 2'-Omethylguanosine
  modified_base 59: mod_base = OTHER; note = 2'-Omethylcytosine
  modified_base 61: mod_base = OTHER; note = 2'-Omethylguanosine
  modified_base 63: mod_base = OTHER; note = Uridine phosphorothiorate
  modified_base 64: mod_base = OTHER; note = Uridine phosphorothiorate
  modified_base 70: mod_base = OTHER; note = 2'-Omethylcytosine
  modified_base 74: mod_base = OTHER; note = 2'-Omethylcytosine
  modified_base 82: mod_base = OTHER; note = 2'-Omethylguanosine

SEQ ID NO: 4021 - RNA, 86 nt, synthetic construct; identical to SEQ ID NO: 3290
  source 1..86: mol_type = other RNA
  modified_base 10: mod_base = OTHER; note = 2'-Omethylguanosine
  modified_base 11: mod_base = OTHER; note = 2'-Omethylcytosine
  modified_base 12: mod_base = OTHER; note = 2'-Omethylcytosine
  modified_base 13: mod_base = OTHER; note = 2'-Omethylguanosine
  modified_base 22: mod_base = OTHER; note = 2'-Omethyladenosine
  modified_base 23: mod_base = OTHER; note = 2'-Omethylguanosine
  modified_base 24: mod_base = OTHER; note = 2'-Omethylguanosine
  modified_base 25: mod_base = OTHER; note = 2'-Omethylcytosine
  modified_base 59: mod_base = OTHER; note = 2'-Omethylguanosine
  modified_base 60: mod_base = OTHER; note = 2'-Omethyluridine
  modified_base 61: mod_base = OTHER; note = 2'-Omethylguanosine
  modified_base 62: mod_base = OTHER; note = 2'-Omethylguanosine
  modified_base 63: mod_base = OTHER; note = 2'-Omethylguanosine

SEQ ID NO: 4022 - RNA, 76 nt, synthetic construct; identical to SEQ ID NO: 625
  source 1..76: mol_type = other RNA
  modified_base 1: mod_base = OTHER; note = 2'-fluoroguanosine
  modified_base 10: mod_base = OTHER; note = Guanosine phosphorothiorate
  modified_base 11: mod_base = OTHER; note = 2'-Omethylcytosine
  modified_base 13: mod_base = OTHER; note = 2'-Omethylcytosine
  modified_base 15: mod_base = OTHER; note = 2'-Omethyladenosine phosphorothiorate
  modified_base 16: mod_base = OTHER; note = Uridine phosphorothiorate
  modified_base 17: mod_base = OTHER; note = 2'-Omethylguanosine
  modified_base 19: mod_base = OTHER; note = Adenosine phosphorothiorate
  modified_base 21: mod_base = OTHER; note = Adenosine phosphorothiorate
  modified_base 22: mod_base = OTHER; note = 2'-fluoroguanosine
  modified_base 24: mod_base = OTHER; note = 2'-fluoroguanosine
  modified_base 25: mod_base = OTHER; note = 2'-Omethylcytosine
  modified_base 26: mod_base = OTHER; note = 2'-fluoroadenosine
  modified_base 30: mod_base = OTHER; note = 2'-Omethylguanosine
  modified_base 34: mod_base = OTHER; note = 2'-fluorouridine
  modified_base 39: mod_base = OTHER; note = 2'-Omethyluridine phosphorothiorate
  modified_base 40: mod_base = OTHER; note = 2'-fluorouridine
  modified_base 42: mod_base = OTHER; note = 2'-Omethyladenosine
  modified_base 43: mod_base = OTHER; note = 2'-Omethyladenosine
  modified_base 44: mod_base = OTHER; note = 2'-Omethyladenosine phosphorothiorate
  modified_base 45: mod_base = OTHER; note = 2'-fluoroguanosine
  modified_base 46: mod_base = OTHER; note = 2'-fluoroguanosine
  modified_base 48: mod_base = OTHER; note = 2'-fluorouridine
  modified_base 49: mod_base = OTHER; note = 2'-Omethylcytosine
  modified_base 53: mod_base = OTHER; note = Guanosine phosphorothiorate
  modified_base 54: mod_base = OTHER; note = 2'-fluorouridine
  modified_base 56: mod_base = OTHER; note = 2'-Omethylcytosine phosphorothiorate
  modified_base 57: mod_base = OTHER; note = 2'-Omethylguanosine
  modified_base 60: mod_base = OTHER; note = Uridine phosphorothiorate
  modified_base 61: mod_base = OTHER; note = 2'-Omethylcytosine
  modified_base 64: mod_base = OTHER; note = 2'-fluoroguanosine
  modified_base 66: mod_base = OTHER; note = 2'-Omethylcytosine
  modified_base 69: mod_base = OTHER; note = 2'-fluoroadenosine
  modified_base 71: mod_base = OTHER; note = Uridine phosphorothiorate
  modified_base 72: mod_base = OTHER; note = 2'-fluorocytosine
  modified_base 73: mod_base = OTHER; note = 2'-fluoroguanosine

SEQ ID NO: 4023 - RNA, 76 nt, synthetic construct; identical to SEQ ID NO: 625
  source 1..76: mol_type = other RNA
  modified_base 1: mod_base = OTHER; note = 2'-Omethylguanosine
  modified_base 2: mod_base = OTHER; note = 2'-Omethylguanosine
  modified_base 3: mod_base = OTHER; note = 2'-Omethylcytosine
  modified_base 4: mod_base = OTHER; note = 2'-Omethyluridine
  modified_base 5: mod_base = OTHER; note = 2'-Omethylcytosine
  modified_base 6: mod_base = OTHER; note = 2'-Omethylcytosine
  modified_base 7: mod_base = OTHER; note = 2'-Omethylguanosine phosphorothiorate
  modified_base 9: mod_base = OTHER; note = 2'-Omethylguanosine phosphorothiorate
  modified_base 10: mod_base = OTHER; note = 2'-Omethylguanosine
  modified_base 11: mod_base = OTHER; note = 2'-Omethylcytosine
  modified_base 12: mod_base = OTHER; note = 2'-Omethylguanosine
  modified_base 13: mod_base = OTHER; note = 2'-Omethylcytosine
  modified_base 14: mod_base = OTHER; note = 2'-Omethyladenosine
  modified_base 15: mod_base = OTHER; note = 2'-fluoroadenosine
  modified_base 16: mod_base = OTHER; note = 2'-Omethyluridine
  modified_base 17: mod_base = OTHER; note = 2'-Omethylguanosine
  modified_base 18: mod_base = OTHER; note = 2'-Omethylguanosine
  modified_base 19: mod_base = OTHER; note = 2'-Omethyladenosine
  modified_base 20: mod_base = OTHER; note = 2'-Omethyluridine
  modified_base 21: mod_base = OTHER; note = 2'-fluoroadenosine phosphorothiorate
  modified_base 22: mod_base = OTHER; note = 2'-Omethylguanosine phosphorothiorate
  modified_base 23: mod_base = OTHER; note = 2'-Omethylcytosine
  modified_base 24: mod_base = OTHER; note = 2'-Omethylguanosine
  modified_base 25: mod_base = OTHER; note = 2'-Omethylcytosine
  modified_base 26: mod_base = OTHER; note = Adenosine phosphorothiorate
  modified_base 27: mod_base = OTHER; note = 2'-Omethyluridine
  modified_base 28: mod_base = OTHER; note = 2'-Omethyluridine
  modified_base 29: mod_base = OTHER; note = 2'-fluoroguanosine
  modified_base 30: mod_base = OTHER; note = 2'-Omethylguanosine
  modified_base 31: mod_base = OTHER; note = 2'-fluoroadenosine
  modified_base 33: mod_base = OTHER; note = 2'-Omethyluridine
  modified_base 34: mod_base = OTHER; note = 2'-Omethyluridine phosphorothiorate
  modified_base 35: mod_base = OTHER; note = Cytosine phosphorothiorate
  modified_base 37: mod_base = OTHER; note = Adenosine phosphorothiorate
  modified_base 38: mod_base = OTHER; note = Adenosine phosphorothiorate
  modified_base 40: mod_base = OTHER; note = 2'-Omethyluridine
  modified_base 41: mod_base = OTHER; note = 2'-fluorocytosine
  modified_base 43: mod_base = OTHER; note = 2'-Omethyladenosine
  modified_base 44: mod_base = OTHER; note = 2'-fluoroadenosine
  modified_base 45: mod_base = OTHER; note = Guanosine phosphorothiorate
  modified_base 49: mod_base = OTHER; note = 2'-fluorocytosine
  modified_base 51: mod_base = OTHER; note = 2'-Omethylguanosine
  modified_base 52: mod_base = OTHER; note = 2'-Omethylguanosine
  modified_base 53: mod_base = OTHER; note = 2'-fluoroguanosine
  modified_base 54: mod_base = OTHER; note = 2'-Omethyluridine
  modified_base 55: mod_base = OTHER; note = Uridine phosphorothiorate
  modified_base 56: mod_base = OTHER; note = 2'-Omethylcytosine
  modified_base 57: mod_base = OTHER; note = 2'-Omethylguanosine
  modified_base 58: mod_base = OTHER; note = Adenosine phosphorothiorate
  modified_base 59: mod_base = OTHER; note = 2'-Omethylguanosine
  modified_base 60: mod_base = OTHER; note = 2'-Omethyluridine
  modified_base 61: mod_base = OTHER; note = 2'-Omethylcytosine
  modified_base 62: mod_base = OTHER; note = 2'-Omethylcytosine
  modified_base 63: mod_base = OTHER; note = 2'-fluorocytosine
  modified_base 64: mod_base = OTHER; note = 2'-Omethylguanosine
  modified_base 65: mod_base = OTHER; note = 2'-Omethylguanosine
  modified_base 66: mod_base = OTHER; note = 2'-Omethylcytosine
  modified_base 67: mod_base = OTHER; note = 2'-Omethylguanosine
  modified_base 68: mod_base = OTHER; note = 2'-Omethylguanosine
  modified_base 69: mod_base = OTHER; note = 2'-Omethyladenosine phosphorothiorate
  modified_base 70: mod_base = OTHER; note = 2'-Omethylguanosine
  modified_base 71: mod_base = OTHER; note = 2'-fluorouridine
  modified_base 72: mod_base = OTHER; note = 2'-Omethylcytosine
  modified_base 73: mod_base = OTHER; note = 2'-Omethylguanosine
  modified_base 74: mod_base = OTHER; note = 2'-fluorocytosine phosphorothiorate
  modified_base 75: mod_base = OTHER; note = 2'-fluorocytosine phosphorothiorate

SEQ ID NO: 4024 - RNA, 76 nt, synthetic construct; identical to SEQ ID NO: 3318
  source 1..76: mol_type = other RNA
  modified_base 1: mod_base = OTHER; note = 2'-Omethylcytosine
  modified_base 2: mod_base = OTHER; note = 2'-Omethylcytosine
  modified_base 3: mod_base = OTHER; note = 2'-Omethyluridine
  modified_base 4: mod_base = OTHER; note = 2'-Omethyluridine
  modified_base 5: mod_base = OTHER; note = 2'-Omethylcytosine
  modified_base 6: mod_base = OTHER; note = 2'-Omethylguanosine
  modified_base 13: mod_base = OTHER; note = 2'-Omethylcytosine
  modified_base 14: mod_base = OTHER; note = 2'-Omethyladenosine
  modified_base 15: mod_base = OTHER; note = 2'-Omethylguanosine
  modified_base 16: mod_base = OTHER; note = 2'-Omethyluridine
  modified_base 18: mod_base = OTHER; note = 2'-Omethylguanosine
  modified_base 19: mod_base = OTHER; note = 2'-Omethylguanosine
  modified_base 20: mod_base = OTHER; note = Uridine phosphorothiorate
  modified_base 21: mod_base = OTHER; note = Adenosine phosphorothiorate
  modified_base 25: mod_base = OTHER; note = 2'-Omethylcytosine
  modified_base 33: mod_base = OTHER; note = 2'-fluorouridine
  modified_base 34: mod_base = OTHER; note = 2'-Omethylcytosine
  modified_base 35: mod_base = OTHER; note = Uridine phosphorothiorate
  modified_base 37: mod_base = OTHER; note = Guanosine phosphorothiorate
  modified_base 38: mod_base = OTHER; note = Adenosine phosphorothiorate
  modified_base 41: mod_base = OTHER; note = 2'-Omethylcytosine
  modified_base 42: mod_base = OTHER; note = 2'-Omethyluridine
  modified_base 43: mod_base = OTHER; note = 2'-Omethyluridine
  modified_base 44: mod_base = OTHER; note = 2'-Omethyladenosine
  modified_base 49: mod_base = OTHER; note = 2'-Omethylguanosine
  modified_base 50: mod_base = OTHER; note = 2'-Omethylcytosine
  modified_base 52: mod_base = OTHER; note = 2'-Omethylguanosine
  modified_base 54: mod_base = OTHER; note = Uridine phosphorothiorate
  modified_base 55: mod_base = OTHER; note = Uridine phosphorothiorate
  modified_base 61: mod_base = OTHER; note = 2'-Omethylcytosine
  modified_base 65: mod_base = OTHER; note = 2'-Omethylcytosine
  modified_base 73: mod_base = OTHER; note = 2'-Omethyladenosine

SEQ ID NO: 4025 - RNA, 85 nt, synthetic construct; identical to SEQ ID NO: 3310
  source 1..85: mol_type = other RNA
  modified_base 1: mod_base = OTHER; note = 2'-Omethylcytosine phosphorothiorate
  modified_base 9: mod_base = OTHER; note = Guanosine phosphorothiorate
  modified_base 14: mod_base = OTHER; note = Guanosine phosphorothiorate
  modified_base 25: mod_base = OTHER; note = Guanosine phosphorothiorate
  modified_base 49: mod_base = OTHER; note = 2'-Omethyluridine
  modified_base 52: mod_base = OTHER; note = Guanosine phosphorothiorate
  modified_base 65: mod_base = OTHER; note = Cytosine phosphorothiorate
  modified_base 83: mod_base = OTHER; note = 2'-fluorocytosine
  modified_base 84: mod_base = OTHER; note = Cytosine phosphorothiorate

SEQ ID NO: 4026 - RNA, 85 nt, synthetic construct; identical to SEQ ID NO: 3301
  source 1..85: mol_type = other RNA
  modified_base 1: mod_base = OTHER; note = 2'-Omethylguanosine phosphorothiorate
  modified_base 2: mod_base = OTHER; note = 2'-Omethylcytosine phosphorothiorate
  modified_base 5: mod_base = OTHER; note = 2'-fluorouridine
  modified_base 12: mod_base = OTHER; note = 2'-Omethylcytosine
  modified_base 14: mod_base = OTHER; note = 2'-Omethyladenosine
  modified_base 25: mod_base = OTHER; note = 2'-fluorocytosine phosphorothiorate
  modified_base 28: mod_base = OTHER; note = Uridine phosphorothiorate
  modified_base 30: mod_base = OTHER; note = 2'-fluoroguanosine
  modified_base 48: mod_base = OTHER; note = 2'-Omethylguanosine
  modified_base 50: mod_base = OTHER; note = 2'-fluorocytosine
  modified_base 56: mod_base = OTHER; note = 2'-fluoroguanosine
  modified_base 59: mod_base = OTHER; note = 2'-Omethylcytosine phosphorothiorate
  modified_base 61: mod_base = OTHER; note = 2'-fluoroguanosine phosphorothiorate
  modified_base 72: mod_base = OTHER; note = Uridine phosphorothiorate
  modified_base 79: mod_base = OTHER; note = 2'-fluoroadenosine phosphorothiorate

SEQ ID NO: 4027 - RNA, 76 nt, synthetic construct; identical to SEQ ID NO: 625
  source 1..76: mol_type = other RNA
  modified_base 1: mod_base = OTHER; note = 2'-Omethylguanosine
  modified_base 2: mod_base = OTHER; note = 2'-Omethylguanosine
  modified_base 3: mod_base = OTHER; note = 2'-Omethylcytosine
  modified_base 10: mod_base = OTHER; note = 2'-Omethylguanosine
  modified_base 11: mod_base = OTHER; note = 2'-Omethylcytosine
  modified_base 12: mod_base = OTHER; note = 2'-Omethylguanosine
  modified_base 13: mod_base = OTHER; note = 2'-Omethylcytosine
  modified_base 14: mod_base = OTHER; note = 2'-Omethyladenosine
  modified_base 15: mod_base = OTHER; note = 2'-fluoroadenosine
  modified_base 16: mod_base = OTHER; note = 2'-Omethyluridine
  modified_base 17: mod_base = OTHER; note = 2'-Omethylguanosine
  modified_base 18: mod_base = OTHER; note = 2'-Omethylguanosine
  modified_base 19: mod_base = OTHER; note = 2'-fluoroadenosine
  modified_base 20: mod_base = OTHER; note = 2'-Omethyluridine
  modified_base 21: mod_base = OTHER; note = 2'-fluoroadenosine
  modified_base 22: mod_base = OTHER; note = 2'-Omethylguanosine
  modified_base 23: mod_base = OTHER; note = 2'-Omethylcytosine
  modified_base 24: mod_base = OTHER; note = 2'-Omethylguanosine
  modified_base 25: mod_base = OTHER; note = 2'-Omethylcytosine
  modified_base 38: mod_base = OTHER; note = Adenosine phosphorothiorate
  modified_base 39: mod_base = OTHER; note = Uridine phosphorothiorate
  modified_base 40: mod_base = OTHER; note = 2'-fluorouridine
  modified_base 43: mod_base = OTHER; note = 2'-Omethyladenosine
  modified_base 44: mod_base = OTHER; note = 2'-Omethyladenosine
  modified_base 45: mod_base = OTHER; note = 2'-Omethylguanosine
  modified_base 46: mod_base = OTHER; note = 2'-fluoroguanosine
  modified_base 48: mod_base = OTHER; note = 2'-fluorouridine
  modified_base 49: mod_base = OTHER; note = 2'-Omethylcytosine
  modified_base 50: mod_base = OTHER; note = 2'-Omethylcytosine
  modified_base 54: mod_base = OTHER; note = 2'-Omethyluridine phosphorothiorate
  modified_base 55: mod_base = OTHER; note = Uridine phosphorothiorate
  modified_base 56: mod_base = OTHER; note = 2'-Omethylcytosine
  modified_base 57: mod_base = OTHER; note = 2'-fluoroguanosine
  modified_base 61: mod_base = OTHER; note = 2'-Omethylcytosine
  modified_base 62: mod_base = OTHER; note = 2'-Omethylcytosine
  modified_base 63: mod_base = OTHER; note = 2'-fluorocytosine
  modified_base 64: mod_base = OTHER; note = 2'-Omethylguanosine
  modified_base 65: mod_base = OTHER; note = 2'-Omethylguanosine
  modified_base 66: mod_base = OTHER; note = 2'-Omethylcytosine
  modified_base 67: mod_base = OTHER; note = 2'-Omethylguanosine
  modified_base 68: mod_base = OTHER; note = 2'-Omethylguanosine
  modified_base 69: mod_base = OTHER; note = 2'-fluoroadenosine

SEQ ID NO: 4028 - RNA, 76 nt, synthetic construct; identical to SEQ ID NO: 625
  source 1..76: mol_type = other RNA
  modified_base 1: mod_base = OTHER; note = 2'-Omethylguanosine phosphorothiorate
  modified_base 2: mod_base = OTHER; note = 2'-Omethylguanosine
  modified_base 12: mod_base = OTHER; note = 2'-Omethylguanosine
  modified_base 13: mod_base = OTHER; note = 2'-Omethylcytosine
  modified_base 33: mod_base = OTHER; note = 2'-fluorouridine
  modified_base 35: mod_base = OTHER; note = Cytosine phosphorothiorate
  modified_base 37: mod_base = OTHER; note = Adenosine phosphorothiorate
  modified_base 52: mod_base = OTHER; note = 2'-Omethylguanosine
  modified_base 62: mod_base = OTHER; note = 2'-Omethylcytosine
  modified_base 73: mod_base = OTHER; note = 2'-Omethylguanosine
  modified_base 75: mod_base = OTHER; note = 2'-fluorocytosine phosphorothiorate
  modified_base 76: mod_base = OTHER; note = 2'-Omethyladenosine

SEQ ID NO: 4029 - RNA, 76 nt, synthetic construct; identical to SEQ ID NO: 625
  source 1..76: mol_type = other RNA
  modified_base 1: mod_base = OTHER; note = 2'-Omethylguanosine phosphorothiorate
  modified_base 2: mod_base = OTHER; note = 2'-Omethylguanosine
  modified_base 3: mod_base = OTHER; note = 2'-Omethylcytosine
  modified_base 4: mod_base = OTHER; note = 2'-Omethyluridine
  modified_base 5: mod_base = OTHER; note = 2'-Omethylcytosine
  modified_base 6: mod_base = OTHER; note = 2'-Omethylcytosine
  modified_base 10: mod_base = OTHER; note = 2'-Omethylguanosine
  modified_base 13: mod_base = OTHER; note = 2'-Omethylcytosine
  modified_base 17: mod_base = OTHER; note = 2'-Omethylguanosine
  modified_base 18: mod_base = OTHER; note = 2'-Omethylguanosine
  modified_base 19: mod_base = OTHER; note = Adenosine phosphorothiorate
  modified_base 20: mod_base = OTHER; note = 2'-Omethyluridine
  modified_base 25: mod_base = OTHER; note = 2'-Omethylcytosine
  modified_base 29: mod_base = OTHER; note = 2'-Omethylguanosine
  modified_base 33: mod_base = OTHER; note = 2'-fluorouridine
  modified_base 35: mod_base = OTHER; note = Cytosine phosphorothiorate
  modified_base 37: mod_base = OTHER; note = Adenosine phosphorothiorate
  modified_base 38: mod_base = OTHER; note = Adenosine phosphorothiorate
  modified_base 41: mod_base = OTHER; note = 2'-Omethylcytosine
  modified_base 43: mod_base = OTHER; note = 2'-Omethyladenosine
  modified_base 44: mod_base = OTHER; note = 2'-fluoroadenosine
  modified_base 46: mod_base = OTHER; note = Guanosine phosphorothiorate
  modified_base 49: mod_base = OTHER; note = 2'-Omethylcytosine
  modified_base 50: mod_base = OTHER; note = 2'-Omethylcytosine
  modified_base 51: mod_base = OTHER; note = 2'-Omethylguanosine
  modified_base 52: mod_base = OTHER; note = 2'-fluoroguanosine
  modified_base 53: mod_base = OTHER; note = 2'-Omethylguanosine
  modified_base 54: mod_base = OTHER; note = 2'-Omethyluridine
  modified_base 55: mod_base = OTHER; note = Uridine phosphorothiorate
  modified_base 56: mod_base = OTHER; note = 2'-Omethylcytosine
  modified_base 57: mod_base = OTHER; note = 2'-fluoroguanosine
  modified_base 61: mod_base = OTHER; note = 2'-Omethylcytosine
  modified_base 62: mod_base = OTHER; note = 2'-Omethylcytosine
  modified_base 63: mod_base = OTHER; note = 2'-fluorocytosine
  modified_base 64: mod_base = OTHER; note = 2'-Omethylguanosine
  modified_base 65: mod_base = OTHER; note = 2'-Omethylguanosine
  modified_base 66: mod_base = OTHER; note = 2'-Omethylcytosine
  modified_base 67: mod_base = OTHER; note = 2'-Omethylguanosine
  modified_base 68: mod_base = OTHER; note = 2'-Omethylguanosine
  modified_base 69: mod_base = OTHER; note = 2'-Omethyladenosine
  modified_base 71: mod_base = OTHER; note = 2'-Omethyluridine
  modified_base 73: mod_base = OTHER; note = 2'-Omethylguanosine
  modified_base 75: mod_base = OTHER; note = 2'-fluorocytosine phosphorothiorate

SEQ ID NO: 4030 - RNA, 75 nt, synthetic construct; identical to SEQ ID NO: 3299
  source 1..75: mol_type = other RNA
  modified_base 2: mod_base = OTHER; note = 2'-fluorocytosine
  modified_base 4: mod_base = OTHER; note = 2'-Omethylguanosine phosphorothiorate
  modified_base 6: mod_base = OTHER; note = 2'-Omethylguanosine
  modified_base 11: mod_base = OTHER; note = 2'-fluorouridine phosphorothiorate
  modified_base 16: mod_base = OTHER; note = 2'-fluorocytosine phosphorothiorate
  modified_base 20: mod_base = OTHER; note = 2'-fluoroadenosine
  modified_base 21: mod_base = OTHER; note = 2'-Omethylguanosine phosphorothiorate
  modified_base 22: mod_base = OTHER; note = 2'-fluoroadenosine
  modified_base 28: mod_base = OTHER; note = 2'-fluoroadenosine
  modified_base 29: mod_base = OTHER; note = 2'-fluoroguanosine
  modified_base 37: mod_base = OTHER; note = 2'-Omethyladenosine phosphorothiorate
  modified_base 38: mod_base = OTHER; note = 2'-fluorouridine
  modified_base 39: mod_base = OTHER; note = 2'-Omethylcytosine phosphorothiorate
  modified_base 40: mod_base = OTHER; note = 2'-fluorouridine
  modified_base 48: mod_base = OTHER; note = Cytosine phosphorothiorate

SEQ ID NO: 4031 - RNA, 75 nt, synthetic construct; identical to SEQ ID NO: 3336
  source 1..75: mol_type = other RNA
  modified_base 20: mod_base = OTHER; note = 2'-fluoroadenosine
  modified_base 21: mod_base = OTHER; note = 2'-fluoroguanosine
  modified_base 25: mod_base = OTHER; note = 2'-fluoroadenosine
  modified_base 39: mod_base = OTHER; note = 2'-Omethylcytosine phosphorothiorate
  modified_base 47: mod_base = OTHER; note = 2'-Omethylcytosine phosphorothiorate
  modified_base 50: mod_base = OTHER; note = 2'-fluoroguanosine
  modified_base 56: mod_base = OTHER; note = 2'-fluoroadenosine phosphorothiorate
  modified_base 60: mod_base = OTHER; note = 2'-fluorocytosine phosphorothiorate
  modified_base 64: mod_base = OTHER; note = 2'-Omethylguanosine phosphorothiorate
  modified_base 73: mod_base = OTHER; note = Cytosine phosphorothiorate
  modified_base 74: mod_base = OTHER; note = 2'-Omethylcytosine

SEQ ID NO: 4032 - RNA, 75 nt, synthetic construct; identical to SEQ ID NO: 1045
  source 1..75: mol_type = other RNA
  modified_base 1: mod_base = OTHER; note = 2'-fluoroguanosine phosphorothiorate
  modified_base 2: mod_base = OTHER; note = 2'-Omethylguanosine phosphorothiorate
  modified_base 21: mod_base = OTHER; note = Adenosine phosphorothiorate
  modified_base 22: mod_base = OTHER; note = Guanosine phosphorothiorate
  modified_base 23: mod_base = OTHER; note = 2'-fluorocytosine
  modified_base 24: mod_base = OTHER; note = Adenosine phosphorothiorate
  modified_base 42: mod_base = OTHER; note = 2'-fluoroadenosine
  modified_base 53: mod_base = OTHER; note = 2'-Omethyluridine
  modified_base 59: mod_base = OTHER; note = 2'-fluorouridine
  modified_base 63: mod_base = OTHER; note = 2'-fluoroguanosine
  modified_base 73: mod_base = OTHER; note = Cytosine phosphorothiorate
  modified_base 74: mod_base = OTHER; note = 2'-fluorocytosine

SEQ ID NO: 4033 - RNA, 85 nt, synthetic construct; identical to SEQ ID NO: 3286
  source 1..85: mol_type = other RNA
  modified_base 1: mod_base = OTHER; note = 2'-Omethylcytosine phosphorothiorate
  modified_base 2: mod_base = OTHER; note = 2'-Omethylcytosine
  modified_base 14: mod_base = OTHER; note = 2'-Omethylguanosine
  modified_base 22: mod_base = OTHER; note = 2'-fluoroguanosine
  modified_base 25: mod_base = OTHER; note = Guanosine phosphorothiorate
  modified_base 26: mod_base = OTHER; note = 2'-fluorouridine
  modified_base 29: mod_base = OTHER; note = 2'-fluoroguanosine
  modified_base 33: mod_base = OTHER; note = 2'-fluorouridine
  modified_base 34: mod_base = OTHER; note = Uridine phosphorothiorate
  modified_base 44: mod_base = OTHER; note = 2'-Omethylguanosine
  modified_base 46: mod_base = OTHER; note = 2'-fluoroadenosine
  modified_base 48: mod_base = OTHER; note = Adenosine phosphorothiorate
  modified_base 55: mod_base = OTHER; note = 2'-Omethylcytosine
  modified_base 58: mod_base = OTHER; note = 2'-fluoroguanosine
  modified_base 64: mod_base = OTHER; note = 2'-Omethyluridine
  modified_base 67: mod_base = OTHER; note = Adenosine phosphorothiorate
  modified_base 76: mod_base = OTHER; note = 2'-fluorocytosine
  modified_base 77: mod_base = OTHER; note = 2'-Omethylcytosine
  modified_base 84: mod_base = OTHER; note = Cytosine phosphorothiorate

SEQ ID NO: 4034 - RNA, 76 nt, synthetic construct; identical to SEQ ID NO: 3318
  source 1..76: mol_type = other RNA
  modified_base 1: mod_base = OTHER; note = 2'-Omethylcytosine
  modified_base 44: mod_base = OTHER; note = 2'-Omethyladenosine
  modified_base 45: mod_base = OTHER; note = 2'-Omethylguanosine
  modified_base 46: mod_base = OTHER; note = 2'-fluoroguanosine
  modified_base 47: mod_base = OTHER; note = 2'-fluorouridine
  modified_base 48: mod_base = OTHER; note = 2'-fluorocytosine
  modified_base 49: mod_base = OTHER; note = 2'-Omethylguanosine
  modified_base 50: mod_base = OTHER; note = 2'-Omethylcytosine
  modified_base 51: mod_base = OTHER; note = 2'-Omethyluridine
  modified_base 52: mod_base = OTHER; note = 2'-Omethylguanosine
  modified_base 53: mod_base = OTHER; note = 2'-Omethylguanosine
  modified_base 61: mod_base = OTHER; note = 2'-Omethylcytosine
  modified_base 62: mod_base = OTHER; note = 2'-Omethylcytosine
  modified_base 63: mod_base = OTHER; note = 2'-fluoroguanosine
  modified_base 64: mod_base = OTHER; note = 2'-Omethylguanosine
  modified_base 65: mod_base = OTHER; note = 2'-Omethylcytosine
  modified_base 73: mod_base = OTHER; note = 2'-Omethyladenosine

SEQ ID NO: 4035 - RNA, 75 nt, synthetic construct; identical to SEQ ID NO: 3336
  source 1..75: mol_type = other RNA
  modified_base 5: mod_base = OTHER; note = 2'-Omethylguanosine phosphorothiorate
  modified_base 10: mod_base = OTHER; note = Cytosine phosphorothiorate
  modified_base 21: mod_base = OTHER; note = 2'-fluoroguanosine
  modified_base 22: mod_base = OTHER; note = 2'-fluoroadenosine
  modified_base 25: mod_base = OTHER; note = Adenosine phosphorothiorate
  modified_base 37: mod_base = OTHER; note = 2'-fluoroadenosine
  modified_base 47: mod_base = OTHER; note = 2'-fluorocytosine
  modified_base 49: mod_base = OTHER; note = Adenosine phosphorothiorate
  modified_base 60: mod_base = OTHER; note = 2'-fluorocytosine
  modified_base 70: mod_base = OTHER; note = Guanosine phosphorothiorate
  modified_base 73: mod_base = OTHER; note = Cytosine phosphorothiorate
  modified_base 74: mod_base = OTHER; note = 2'-Omethylcytosine

SEQ ID NO: 4036 - RNA, 76 nt, synthetic construct; identical to SEQ ID NO: 3332
  source 1..76: mol_type = other RNA
  modified_base 1: mod_base = OTHER; note = 2'-Omethylguanosine
  modified_base 2: mod_base = OTHER; note = 2'-Omethylguanosine
  modified_base 3: mod_base = OTHER; note = 2'-Omethylcytosine
  modified_base 4: mod_base = OTHER; note = 2'-Omethylcytosine
  modified_base 5: mod_base = OTHER; note = 2'-Omethylcytosine
  modified_base 6: mod_base = OTHER; note = 2'-Omethylcytosine
  modified_base 10: mod_base = OTHER; note = 2'-Omethylguanosine
  modified_base 11: mod_base = OTHER; note = 2'-Omethylcytosine
  modified_base 12: mod_base = OTHER; note = 2'-Omethylguanosine
  modified_base 13: mod_base = OTHER; note = 2'-Omethylcytosine
  modified_base 14: mod_base = OTHER; note = 2'-Omethyladenosine
  modified_base 15: mod_base = OTHER; note = 2'-fluoroadenosine
  modified_base 16: mod_base = OTHER; note = 2'-Omethyluridine
  modified_base 17: mod_base = OTHER; note = 2'-Omethylguanosine
  modified_base 18: mod_base = OTHER; note = 2'-Omethylguanosine
  modified_base 19: mod_base = OTHER; note = 2'-fluoroadenosine
  modified_base 20: mod_base = OTHER; note = 2'-Omethyluridine
  modified_base 25: mod_base = OTHER; note = 2'-Omethylcytosine
  modified_base 33: mod_base = OTHER; note = 2'-fluorouridine
  modified_base 35: mod_base = OTHER; note = Cytosine phosphorothiorate
  modified_base 37: mod_base = OTHER; note = Adenosine phosphorothiorate
  modified_base 38: mod_base = OTHER; note = Adenosine phosphorothiorate
  modified_base 41: mod_base = OTHER; note = 2'-Omethylcytosine
  modified_base 42: mod_base = OTHER; note = 2'-Omethyladenosine
  modified_base 43: mod_base = OTHER; note = 2'-Omethyladenosine
  modified_base 44: mod_base = OTHER; note = 2'-Omethyladenosine
  modified_base 49: mod_base = OTHER; note = 2'-Omethylguanosine
  modified_base 50: mod_base = OTHER; note = 2'-Omethylcytosine
  modified_base 52: mod_base = OTHER; note = 2'-Omethylguanosine
  modified_base 54: mod_base = OTHER; note = 2'-Omethyluridine
  modified_base 55: mod_base = OTHER; note = Uridine phosphorothiorate
  modified_base 56: mod_base = OTHER; note = 2'-Omethylcytosine
  modified_base 57: mod_base = OTHER; note = 2'-fluoroguanosine
  modified_base 59: mod_base = OTHER; note = 2'-Omethylguanosine
  modified_base 61: mod_base = OTHER; note = 2'-Omethylcytosine
  modified_base 65: mod_base = OTHER; note = 2'-Omethylcytosine
  modified_base 73: mod_base = OTHER; note = 2'-Omethylguanosine

SEQ ID NO: 4037 - RNA, 76 nt, synthetic construct; identical to SEQ ID NO: 625
  source 1..76: mol_type = other RNA
  modified_base 1: mod_base = OTHER; note = 2'-Omethylguanosine
  modified_base 13: mod_base = OTHER; note = 2'-Omethylcytosine
  modified_base 33: mod_base = OTHER; note = 2'-O-(2-Methoxyethyl) thymine

SEQ ID NO: 4038 - RNA, 74 nt, synthetic construct; identical to SEQ ID NO: 766
  source 1..74: mol_type = other RNA
  modified_base 1: mod_base = OTHER; note = 2'-Omethylguanosine phosphorothiorate
  modified_base 2: mod_base = OTHER; note = 2'-Omethylguanosine phosphorothiorate
  modified_base 18: mod_base = OTHER; note = 2'-fluoroguanosine
  modified_base 73: mod_base = OTHER; note = 2'-Omethylguanosine

SEQ ID NO: 4039 - RNA, 75 nt, synthetic construct; identical to SEQ ID NO: 3299
  source 1..75: mol_type = other RNA
  modified_base 6: mod_base = OTHER; note = 2'-Omethylguanosine phosphorothiorate
  modified_base 10: mod_base = OTHER; note = Cytosine phosphorothiorate
  modified_base 11: mod_base = OTHER; note = 2'-fluorouridine phosphorothiorate
  modified_base 18: mod_base = OTHER; note = 2'-fluoroguanosine phosphorothiorate
  modified_base 19: mod_base = OTHER; note = 2'-fluorouridine
  modified_base 20: mod_base = OTHER; note = 2'-fluoroadenosine
  modified_base 25: mod_base = OTHER; note = 2'-fluoroadenosine
  modified_base 26: mod_base = OTHER; note = 2'-fluorouridine phosphorothiorate
  modified_base 27: mod_base = OTHER; note = Cytosine phosphorothiorate
  modified_base 29: mod_base = OTHER; note = 2'-Omethylguanosine
  modified_base 36: mod_base = OTHER; note = 2'-fluoroadenosine
  modified_base 39: mod_base = OTHER; note = Cytosine phosphorothiorate
  modified_base 50: mod_base = OTHER; note = Guanosine phosphorothiorate
  modified_base 56: mod_base = OTHER; note = Adenosine phosphorothiorate
  modified_base 58: mod_base = OTHER; note = 2'-Omethylguanosine phosphorothiorate
  modified_base 73: mod_base = OTHER; note = Cytosine phosphorothiorate
  modified_base 74: mod_base = OTHER; note = 2'-Omethylcytosine

SEQ ID NO: 4040 - RNA, 75 nt, synthetic construct; identical to SEQ ID NO: 3336
  source 1..75: mol_type = other RNA
  modified_base 1: mod_base = OTHER; note = 2'-Omethylcytosine
  modified_base 17: mod_base = OTHER; note = Guanosine phosphorothiorate
  modified_base 19: mod_base = OTHER; note = 2'-Omethyluridine phosphorothiorate
  modified_base 27: mod_base = OTHER; note = Cytosine phosphorothiorate
  modified_base 37: mod_base = OTHER; note = 2'-Omethyladenosine phosphorothiorate
  modified_base 48: mod_base = OTHER; note = Cytosine phosphorothiorate
  modified_base 49: mod_base = OTHER; note = Adenosine phosphorothiorate
  modified_base 73: mod_base = OTHER; note = Cytosine phosphorothiorate
  modified_base 74: mod_base = OTHER; note = 2'-Omethylcytosine

SEQ ID NO: 4041 - RNA, 75 nt, synthetic construct; identical to SEQ ID NO: 1045
  source 1..75: mol_type = other RNA
  modified_base 1: mod_base = OTHER; note = 2'-Omethylguanosine
  modified_base 9: mod_base = OTHER; note = Guanosine phosphorothiorate
  modified_base 10: mod_base = OTHER; note = 2'-Omethylguanosine
  modified_base 13: mod_base = OTHER; note = 2'-Omethyluridine
  modified_base 17: mod_base = OTHER; note = Guanosine phosphorothiorate
  modified_base 18: mod_base = OTHER; note = 2'-Omethylguanosine
  modified_base 19: mod_base = OTHER; note = Uridine phosphorothiorate
  modified_base 20: mod_base = OTHER; note = 2'-Omethyladenosine
  modified_base 25: mod_base = OTHER; note = 2'-Omethylcytosine
  modified_base 29: mod_base = OTHER; note = 2'-Omethylguanosine
  modified_base 33: mod_base = OTHER; note = 2'-fluorouridine
  modified_base 35: mod_base = OTHER; note = Uridine phosphorothiorate
  modified_base 37: mod_base = OTHER; note = Adenosine phosphorothiorate
  modified_base 38: mod_base = OTHER; note = Adenosine phosphorothiorate
  modified_base 41: mod_base = OTHER; note = 2'-fluorocytosine
  modified_base 43: mod_base = OTHER; note = 2'-Omethylguanosine
  modified_base 44: mod_base = OTHER; note = 2'-fluorocytosine
  modified_base 46: mod_base = OTHER; note = Adenosine phosphorothiorate
  modified_base 49: mod_base = OTHER; note = 2'-Omethylcytosine
  modified_base 51: mod_base = OTHER; note = 2'-Omethyladenosine
  modified_base 53: mod_base = OTHER; note = Uridine phosphorothiorate
  modified_base 54: mod_base = OTHER; note = Uridine phosphorothiorate
  modified_base 55: mod_base = OTHER; note = 2'-Omethylcytosine
  modified_base 56: mod_base = OTHER; note = Guanosine phosphorothiorate
  modified_base 61: mod_base = OTHER; note = 2'-Omethyluridine
  modified_base 62: mod_base = OTHER; note = 2'-fluorocytosine
  modified_base 64: mod_base = OTHER; note = 2'-Omethylguanosine
  modified_base 70: mod_base = OTHER; note = 2'-Omethylcytosine
  modified_base 72: mod_base = OTHER; note = 2'-Omethyluridine

SEQ ID NO: 4042 - RNA, 74 nt, synthetic construct; identical to SEQ ID NO: 3293
  source 1..74: mol_type = other RNA
  modified_base 8: mod_base = OTHER; note = Guanosine phosphorothiorate
  modified_base 11: mod_base = OTHER; note = 2'-Omethylguanosine
  modified_base 26: mod_base = OTHER; note = 2'-fluorocytosine
  modified_base 33: mod_base = OTHER; note = 2'-fluorouridine
  modified_base 44: mod_base = OTHER; note = Guanosine phosphorothiorate
  modified_base 51: mod_base = OTHER; note = 2'-fluoroguanosine
  modified_base 73: mod_base = OTHER; note = 2'-Omethylcytosine phosphorothiorate
  modified_base 74: mod_base = OTHER; note = 2'-Omethyladenosine

SEQ ID NO: 4043 - RNA, 76 nt, synthetic construct; identical to SEQ ID NO: 3615
  source 1..76: mol_type = other RNA
  modified_base 1: mod_base = OTHER; note = 2'-Omethylguanosine
  modified_base 14: mod_base = OTHER; note = 2'-Omethyladenosine
  modified_base 15: mod_base = OTHER; note = 2'-Omethyladenosine
  modified_base 16: mod_base = OTHER; note = 2'-Omethyluridine
  modified_base 17: mod_base = OTHER; note = 2'-Omethylguanosine
  modified_base 18: mod_base = OTHER; note = 2'-Omethylguanosine
  modified_base 19: mod_base = OTHER; note = Adenosine phosphorothiorate
  modified_base 20: mod_base = OTHER; note = 2'-Omethyluridine
  modified_base 21: mod_base = OTHER; note = Adenosine phosphorothiorate
  modified_base 33: mod_base = OTHER; note = 2'-fluorouridine
  modified_base 34: mod_base = OTHER; note = 2'-Omethyluridine
  modified_base 35: mod_base = OTHER; note = Cytosine phosphorothiorate
  modified_base 37: mod_base = OTHER; note = Adenosine phosphorothiorate
  modified_base 38: mod_base = OTHER; note = Adenosine phosphorothiorate
  modified_base 41: mod_base = OTHER; note = 2'-Omethylcytosine
  modified_base 42: mod_base = OTHER; note = 2'-Omethyladenosine
  modified_base 43: mod_base = OTHER; note = 2'-Omethyladenosine
  modified_base 44: mod_base = OTHER; note = 2'-Omethylguanosine
  modified_base 50: mod_base = OTHER; note = 2'-Omethylcytosine
  modified_base 52: mod_base = OTHER; note = 2'-Omethylguanosine
  modified_base 73: mod_base = OTHER; note = 2'-Omethylguanosine

SEQ ID NO: 4044 - RNA, 75 nt, synthetic construct; identical to SEQ ID NO: 3299
  source 1..75: mol_type = other RNA
  modified_base 2: mod_base = OTHER; note = 2'-Omethylcytosine phosphorothiorate
  modified_base 15: mod_base = OTHER; note = 2'-fluorouridine
  modified_base 22: mod_base = OTHER; note = 2'-fluoroadenosine
  modified_base 46: mod_base = OTHER; note = 2'-fluorouridine
  modified_base 47: mod_base = OTHER; note = Cytosine phosphorothiorate
  modified_base 58: mod_base = OTHER; note = 2'-fluoroguanosine
  modified_base 63: mod_base = OTHER; note = 2'-Omethyluridine phosphorothiorate
  modified_base 71: mod_base = OTHER; note = 2'-fluorocytosine
  modified_base 72: mod_base = OTHER; note = Guanosine phosphorothiorate

SEQ ID NO: 4045 - RNA, 85 nt, synthetic construct; identical to SEQ ID NO: 3297
  source 1..85: mol_type = other RNA
  modified_base 1: mod_base = OTHER; note = 2'-Omethylguanosine phosphorothiorate
  modified_base 2: mod_base = OTHER; note = 2'-Omethylcytosine phosphorothiorate
  modified_base 3: mod_base = OTHER; note = 2'-Omethyluridine
  modified_base 4: mod_base = OTHER; note = 2'-Omethylguanosine
  modified_base 5: mod_base = OTHER; note = 2'-Omethyluridine
  modified_base 6: mod_base = OTHER; note = 2'-Omethylguanosine
  modified_base 10: mod_base = OTHER; note = 2'-Omethylguanosine
  modified_base 11: mod_base = OTHER; note = 2'-Omethylcytosine
  modified_base 12: mod_base = OTHER; note = 2'-Omethylcytosine
  modified_base 13: mod_base = OTHER; note = 2'-Omethylguanosine
  modified_base 16: mod_base = OTHER; note = 2'-Omethyluridine
  modified_base 17: mod_base = OTHER; note = 2'-Omethylguanosine
  modified_base 18: mod_base = OTHER; note = 2'-Omethylguanosine
  modified_base 33: mod_base = OTHER; note = 2'-fluorouridine
  modified_base 35: mod_base = OTHER; note = Cytosine phosphorothiorate
  modified_base 37: mod_base = OTHER; note = Adenosine phosphorothiorate
  modified_base 38: mod_base = OTHER; note = Adenosine phosphorothiorate
  modified_base 44: mod_base = OTHER; note = 2'-Omethyluridine
  modified_base 56: mod_base = OTHER; note = 2'-fluoroguanosine
  modified_base 57: mod_base = OTHER; note = 2'-fluorocytosine
  modified_base 65: mod_base = OTHER; note = 2'-Omethylcytosine
  modified_base 68: mod_base = OTHER; note = 2'-Omethyladenosine
  modified_base 70: mod_base = OTHER; note = 2'-Omethylcytosine
  modified_base 71: mod_base = OTHER; note = 2'-Omethylcytosine
  modified_base 72: mod_base = OTHER; note = 2'-fluorouridine
  modified_base 73: mod_base = OTHER; note = 2'-Omethylguanosine
  modified_base 74: mod_base = OTHER; note = 2'-Omethylcytosine
  modified_base 75: mod_base = OTHER; note = 2'-Omethyluridine
  modified_base 76: mod_base = OTHER; note = 2'-Omethylcytosine
  modified_base 77: mod_base = OTHER; note = 2'-Omethyladenosine
  modified_base 82: mod_base = OTHER; note = 2'-Omethylguanosine

SEQ ID NO: 4046 - RNA, 76 nt, synthetic construct; identical to SEQ ID NO: 3419
  source 1..76: mol_type = other RNA
  modified_base 1: mod_base = OTHER; note = 2'-Omethylguanosine
  modified_base 2: mod_base = OTHER; note = 2'-Omethylguanosine
  modified_base 3: mod_base = OTHER; note = 2'-Omethylcytosine
  modified_base 4: mod_base = OTHER; note = 2'-Omethyluridine
  modified_base 5: mod_base = OTHER; note = 2'-Omethylcytosine
  modified_base 6: mod_base = OTHER; note = 2'-Omethylcytosine
  modified_base 14: mod_base = OTHER; note = 2'-Omethyladenosine
  modified_base 17: mod_base = OTHER; note = 2'-Omethylguanosine
  modified_base 18: mod_base = OTHER; note = 2'-Omethylguanosine
  modified_base 20: mod_base = OTHER; note = 2'-Omethyluridine
  modified_base 22: mod_base = OTHER; note = 2'-Omethylguanosine
  modified_base 25: mod_base = OTHER; note = 2'-Omethylcytosine
  modified_base 27: mod_base = OTHER; note = 2'-Omethyladenosine
  modified_base 33: mod_base = OTHER; note = 2'-fluorouridine
  modified_base 71: mod_base = OTHER; note = 2'-Omethyluridine
  modified_base 73: mod_base = OTHER; note = 2'-Omethylguanosine

SEQ ID NO: 4047 - RNA, 85 nt, synthetic construct; identical to SEQ ID NO: 3288
  source 1..85: mol_type = other RNA
  modified_base 1: mod_base = OTHER; note = 2'-Omethylcytosine
  modified_base 5: mod_base = OTHER; note = 2'-fluoroguanosine
  modified_base 19: mod_base = OTHER; note = 2'-Omethyluridine
  modified_base 27: mod_base = OTHER; note = 2'-fluorouridine
  modified_base 29: mod_base = OTHER; note = 2'-fluoroguanosine
  modified_base 30: mod_base = OTHER; note = 2'-fluoroadenosine
  modified_base 34: mod_base = OTHER; note = 2'-fluorocytosine
  modified_base 35: mod_base = OTHER; note = Adenosine phosphorothiorate
  modified_base 36: mod_base = OTHER; note = 2'-fluoroguanosine phosphorothiorate
  modified_base 42: mod_base = OTHER; note = Adenosine phosphorothiorate
  modified_base 45: mod_base = OTHER; note = Guanosine phosphorothiorate
  modified_base 48: mod_base = OTHER; note = 2'-Omethyladenosine
  modified_base 50: mod_base = OTHER; note = 2'-fluoroadenosine
  modified_base 54: mod_base = OTHER; note = 2'-fluorocytosine
  modified_base 57: mod_base = OTHER; note = 2'-Omethylcytosine
  modified_base 62: mod_base = OTHER; note = 2'-fluoroguanosine phosphorothiorate
  modified_base 64: mod_base = OTHER; note = Uridine phosphorothiorate
  modified_base 68: mod_base = OTHER; note = 2'-fluoroadenosine phosphorothiorate
  modified_base 73: mod_base = OTHER; note = 2'-fluoroadenosine phosphorothiorate
  modified_base 77: mod_base = OTHER; note = Cytosine phosphorothiorate
  modified_base 84: mod_base = OTHER; note = Cytosine phosphorothiorate

SEQ ID NO: 4048 - RNA, 86 nt, synthetic construct; identical to SEQ ID NO: 3290
  source 1..86: mol_type = other RNA
  modified_base 1: mod_base = OTHER; note = 2'-Omethyladenosine
  modified_base 71: mod_base = OTHER; note = 2'-Omethylcytosine
  modified_base 72: mod_base = OTHER; note = 2'-Omethylcytosine
  modified_base 74: mod_base = OTHER; note = 2'-Omethyladenosine
  modified_base 75: mod_base = OTHER; note = 2'-Omethylcytosine
  modified_base 76: mod_base = OTHER; note = 2'-Omethyluridine
  modified_base 77: mod_base = OTHER; note = 2'-Omethylcytosine
  modified_base 78: mod_base = OTHER; note = 2'-Omethylcytosine
  modified_base 79: mod_base = OTHER; note = 2'-Omethyluridine
  modified_base 80: mod_base = OTHER; note = 2'-fluoroguanosine
  modified_base 81: mod_base = OTHER; note = 2'-Omethylguanosine
  modified_base 82: mod_base = OTHER; note = 2'-Omethyluridine
  modified_base 83: mod_base = OTHER; note = 2'-Omethyladenosine

SEQ ID NO: 4049 - RNA, 73 nt, synthetic construct; identical to SEQ ID NO: 935
  source 1..73: mol_type = other RNA
  modified_base 1: mod_base = OTHER; note = 2'-Omethylguanosine phosphorothiorate
  modified_base 2: mod_base = OTHER; note = 2'-Omethylguanosine
  modified_base 13: mod_base = OTHER; note = 2'-fluorocytosine
  modified_base 72: mod_base = OTHER; note = 2'-Omethylcytosine phosphorothiorate

SEQ ID NO: 4050 - RNA, 85 nt, synthetic construct; identical to SEQ ID NO: 3297
  source 1..85: mol_type = other RNA
  modified_base 1: mod_base = OTHER; note = 2'-Omethylguanosine
  modified_base 14: mod_base = OTHER; note = 2'-Omethyladenosine
  modified_base 16: mod_base = OTHER; note = 2'-Omethyluridine
  modified_base 20: mod_base = OTHER; note = 2'-Omethyluridine
  modified_base 82: mod_base = OTHER; note = 2'-Omethylguanosine

SEQ ID NO: 4051 - RNA, 76 nt, synthetic construct; identical to SEQ ID NO: 3289
  source 1..76: mol_type = other RNA
  modified_base 1: mod_base = OTHER; note = 2'-Omethylguanosine
  modified_base 14: mod_base = OTHER; note = 2'-Omethyladenosine
  modified_base 15: mod_base = OTHER; note = 2'-Omethylguanosine
  modified_base 16: mod_base = OTHER; note = 2'-Omethyluridine
  modified_base 18: mod_base = OTHER; note = 2'-Omethylguanosine
  modified_base 19: mod_base = OTHER; note = 2'-Omethylguanosine
  modified_base 20: mod_base = OTHER; note = Uridine phosphorothiorate
  modified_base 21: mod_base = OTHER; note = Adenosine phosphorothiorate
  modified_base 33: mod_base = OTHER; note = 2'-fluorouridine
  modified_base 34: mod_base = OTHER; note = 2'-Omethyluridine
  modified_base 35: mod_base = OTHER; note = Uridine phosphorothiorate
  modified_base 37: mod_base = OTHER; note = Adenosine phosphorothiorate
  modified_base 38: mod_base = OTHER; note = Adenosine phosphorothiorate
  modified_base 41: mod_base = OTHER; note = 2'-Omethyluridine
  modified_base 42: mod_base = OTHER; note = 2'-Omethylguanosine
  modified_base 43: mod_base = OTHER; note = 2'-Omethyladenosine
  modified_base 44: mod_base = OTHER; note = 2'-Omethylguanosine
  modified_base 50: mod_base = OTHER; note = 2'-Omethyladenosine
  modified_base 52: mod_base = OTHER; note = 2'-Omethylguanosine
  modified_base 73: mod_base = OTHER; note = 2'-Omethylguanosine

SEQ ID NO: 4052 - RNA, 76 nt, synthetic construct; identical to SEQ ID NO: 625
  source 1..76: mol_type = other RNA
  modified_base 2: mod_base = OTHER; note = 2'-Omethylguanosine
  modified_base 3: mod_base = OTHER; note = 2'-Omethylcytosine phosphorothiorate
  modified_base 5: mod_base = OTHER; note = Cytosine phosphorothiorate
  modified_base 6: mod_base = OTHER; note = 2'-fluorocytosine phosphorothiorate
  modified_base 10: mod_base = OTHER; note = 2'-fluoroguanosine
  modified_base 11: mod_base = OTHER; note = 2'-Omethylcytosine
  modified_base 13: mod_base = OTHER; note = 2'-Omethylcytosine
  modified_base 14: mod_base = OTHER; note = 2'-fluoroadenosine
  modified_base 22: mod_base = OTHER; note = Guanosine phosphorothiorate
  modified_base 26: mod_base = OTHER; note = Adenosine phosphorothiorate
  modified_base 27: mod_base = OTHER; note = 2'-Omethyluridine phosphorothiorate
  modified_base 28: mod_base = OTHER; note = 2'-fluorouridine
  modified_base 30: mod_base = OTHER; note = 2'-Omethylguanosine
  modified_base 31: mod_base = OTHER; note = 2'-fluoroadenosine
  modified_base 41: mod_base = OTHER; note = 2'-Omethylcytosine
  modified_base 42: mod_base = OTHER; note = Adenosine phosphorothiorate
  modified_base 43: mod_base = OTHER; note = 2'-Omethyladenosine phosphorothiorate
  modified_base 45: mod_base = OTHER; note = Guanosine phosphorothiorate
  modified_base 46: mod_base = OTHER; note = 2'-Omethylguanosine
  modified_base 47: mod_base = OTHER; note = 2'-fluorouridine
  modified_base 50: mod_base = OTHER; note = 2'-fluorocytosine phosphorothiorate
  modified_base 51: mod_base = OTHER; note = 2'-Omethylguanosine
  modified_base 53: mod_base = OTHER; note = 2'-Omethylguanosine
  modified_base 56: mod_base = OTHER; note = 2'-Omethylcytosine
  modified_base 57: mod_base = OTHER; note = 2'-Omethylguanosine phosphorothiorate
  modified_base 60: mod_base = OTHER; note = 2'-fluorouridine
  modified_base 63: mod_base = OTHER; note = 2'-fluorocytosine
  modified_base 65: mod_base = OTHER; note = Guanosine phosphorothiorate
  modified_base 66: mod_base = OTHER; note = 2'-fluorocytosine
  modified_base 68: mod_base = OTHER; note = Guanosine phosphorothiorate
  modified_base 71: mod_base = OTHER; note = Uridine phosphorothiorate
  modified_base 72: mod_base = OTHER; note = 2'-Omethylcytosine phosphorothiorate
  modified_base 73: mod_base = OTHER; note = 2'-fluoroguanosine
  modified_base 76: mod_base = OTHER; note = 2'-Omethyladenosine

SEQ ID NO: 4053 - RNA, 76 nt, synthetic construct; identical to SEQ ID NO: 3289
  source 1..76: mol_type = other RNA
  modified_base 1: mod_base = OTHER; note = 2'-Omethylguanosine
  modified_base 2: mod_base = OTHER; note = 2'-Omethylcytosine

SEQ ID NO: 4054 - RNA, 75 nt, synthetic construct; identical to SEQ ID NO: 1045
  source 1..75: mol_type = other RNA
  modified_base 1: mod_base = OTHER; note = 2'-Omethylguanosine phosphorothiorate
  modified_base 4: mod_base = OTHER; note = 2'-Omethyluridine
  modified_base 11: mod_base = OTHER; note = 2'-Omethyluridine
  modified_base 12: mod_base = OTHER; note = Guanosine phosphorothiorate
  modified_base 14: mod_base = OTHER; note = Adenosine phosphorothiorate
  modified_base 26: mod_base = OTHER; note = Uridine phosphorothiorate
  modified_base 40: mod_base = OTHER; note = 2'-fluorocytosine phosphorothiorate
  modified_base 47: mod_base = OTHER; note = 2'-fluorouridine phosphorothiorate
  modified_base 56: mod_base = OTHER; note = Guanosine phosphorothiorate
  modified_base 67: mod_base = OTHER; note = 2'-fluoroguanosine
  modified_base 70: mod_base = OTHER; note = Cytosine phosphorothiorate
  modified_base 71: mod_base = OTHER; note = Cytosine phosphorothiorate
  modified_base 72: mod_base = OTHER; note = 2'-fluorouridine

SEQ ID NO: 4055 - DNA, 76 bp, synthetic construct; identical to SEQ ID NO: 1924
  source 1..76: mol_type = other DNA
  misc_feature 1..48: note = RNA
  misc_feature 49..53: note = DNA
  misc_feature 54..76: note = RNA

SEQ ID NO: 4056 - RNA, 75 nt, synthetic construct; identical to SEQ ID NO: 3306
  source 1..75: mol_type = other RNA
  modified_base 1: mod_base = OTHER; note = 2'-Omethylguanosine phosphorothiorate
  modified_base 2: mod_base = OTHER; note = 2'-Omethyladenosine phosphorothiorate
  modified_base 3: mod_base = OTHER; note = 2'-Omethylcytosine
  modified_base 4: mod_base = OTHER; note = 2'-Omethylcytosine
  modified_base 5: mod_base = OTHER; note = 2'-Omethyluridine
  modified_base 6: mod_base = OTHER; note = 2'-Omethylcytosine
  modified_base 10: mod_base = OTHER; note = 2'-Omethylguanosine
  modified_base 11: mod_base = OTHER; note = 2'-Omethylcytosine
  modified_base 12: mod_base = OTHER; note = 2'-Omethylguanosine
  modified_base 13: mod_base = OTHER; note = 2'-Omethylcytosine
  modified_base 14: mod_base = OTHER; note = 2'-Omethyladenosine
  modified_base 15: mod_base = OTHER; note = 2'-fluoroadenosine
  modified_base 16: mod_base = OTHER; note = 2'-Omethylcytosine
  modified_base 17: mod_base = OTHER; note = 2'-Omethylguanosine
  modified_base 18: mod_base = OTHER; note = 2'-Omethylguanosine
  modified_base 19: mod_base = OTHER; note = 2'-fluorouridine
  modified_base 21: mod_base = OTHER; note = 2'-Omethylguanosine
  modified_base 22: mod_base = OTHER; note = 2'-Omethylcytosine
  modified_base 23: mod_base = OTHER; note = 2'-Omethylguanosine
  modified_base 24: mod_base = OTHER; note = 2'-Omethylcytosine
  modified_base 48: mod_base = OTHER; note = 2'-Omethylguanosine
  modified_base 49: mod_base = OTHER; note = 2'-Omethylcytosine
  modified_base 50: mod_base = OTHER; note = 2'-Omethylguanosine
  modified_base 51: mod_base = OTHER; note = 2'-Omethyluridine
  modified_base 52: mod_base = OTHER; note = 2'-Omethylguanosine
  modified_base 53: mod_base = OTHER; note = 2'-Omethyluridine
  modified_base 60: mod_base = OTHER; note = 2'-Omethylcytosine
  modified_base 61: mod_base = OTHER; note = 2'-Omethyladenosine
  modified_base 62: mod_base = OTHER; note = 2'-fluorocytosine
  modified_base 63: mod_base = OTHER; note = 2'-Omethylguanosine
  modified_base 64: mod_base = OTHER; note = 2'-Omethyluridine
  modified_base 65: mod_base = OTHER; note = 2'-Omethylcytosine
  modified_base 66: mod_base = OTHER; note = 2'-Omethylguanosine
  modified_base 67: mod_base = OTHER; note = 2'-Omethylguanosine
  modified_base 72: mod_base = OTHER; note = 2'-Omethyladenosine

SEQ ID NO: 4057 - RNA, 86 nt, synthetic construct; identical to SEQ ID NO: 3290
  source 1..86: mol_type = other RNA
  modified_base 1: mod_base = OTHER; note = 2'-Omethyladenosine phosphorothiorate
  modified_base 2: mod_base = OTHER; note = 2'-Omethylcytosine phosphorothiorate
  modified_base 3: mod_base = OTHER; note = 2'-Omethylcytosine
  modified_base 4: mod_base = OTHER; note = 2'-Omethyladenosine
  modified_base 5: mod_base = OTHER; note = 2'-Omethylguanosine
  modified_base 6: mod_base = OTHER; note = 2'-Omethylguanosine
  modified_base 16: mod_base = OTHER; note = 2'-Omethyluridine
  modified_base 17: mod_base = OTHER; note = 2'-Omethylguanosine
  modified_base 18: mod_base = OTHER; note = 2'-Omethylguanosine
  modified_base 33: mod_base = OTHER; note = 2'-fluorouridine
  modified_base 35: mod_base = OTHER; note = Cytosine phosphorothiorate
  modified_base 37: mod_base = OTHER; note = Guanosine phosphorothiorate
  modified_base 38: mod_base = OTHER; note = Adenosine phosphorothiorate
  modified_base 44: mod_base = OTHER; note = 2'-Omethyluridine
  modified_base 57: mod_base = OTHER; note = 2'-fluoroguanosine
  modified_base 59: mod_base = OTHER; note = 2'-Omethylguanosine
  modified_base 60: mod_base = OTHER; note = 2'-Omethyluridine
  modified_base 61: mod_base = OTHER; note = 2'-Omethylguanosine
  modified_base 62: mod_base = OTHER; note = 2'-Omethylguanosine
  modified_base 63: mod_base = OTHER; note = 2'-Omethylguanosine
  modified_base 64: mod_base = OTHER; note = 2'-Omethyluridine
  modified_base 66: mod_base = OTHER; note = 2'-Omethylcytosine
  modified_base 69: mod_base = OTHER; note = 2'-Omethyladenosine
  modified_base 71: mod_base = OTHER; note = 2'-Omethylcytosine
  modified_base 72: mod_base = OTHER; note = 2'-Omethylcytosine
  modified_base 73: mod_base = OTHER; note = 2'-fluorocytosine
  modified_base 74: mod_base = OTHER; note = 2'-Omethyladenosine
  modified_base 75: mod_base = OTHER; note = 2'-Omethylcytosine
  modified_base 76: mod_base = OTHER; note = 2'-Omethyluridine
  modified_base 77: mod_base = OTHER; note = 2'-Omethylcytosine
  modified_base 78: mod_base = OTHER; note = 2'-Omethylcytosine
  modified_base 83: mod_base = OTHER; note = 2'-Omethyladenosine

SEQ ID NO: 4058 - RNA, 75 nt, synthetic construct; identical to SEQ ID NO: 3336
  source 1..75: mol_type = other RNA
  modified_base 2: mod_base = OTHER; note = 2'-Omethylcytosine
  modified_base 4: mod_base = OTHER; note = 2'-Omethylguanosine
  modified_base 14: mod_base = OTHER; note = 2'-Omethylguanosine
  modified_base 15: mod_base = OTHER; note = 2'-Omethyluridine phosphorothiorate
  modified_base 17: mod_base = OTHER; note = 2'-fluoroguanosine
  modified_base 19: mod_base = OTHER; note = 2'-fluorouridine
  modified_base 26: mod_base = OTHER; note = 2'-fluorouridine
  modified_base 34: mod_base = OTHER; note = 2'-fluorouridine
  modified_base 46: mod_base = OTHER; note = 2'-fluorouridine
  modified_base 48: mod_base = OTHER; note = 2'-fluorocytosine
  modified_base 49: mod_base = OTHER; note = Adenosine phosphorothiorate
  modified_base 53: mod_base = OTHER; note = 2'-Omethyluridine phosphorothiorate
  modified_base 59: mod_base = OTHER; note = 2'-Omethyluridine phosphorothiorate
  modified_base 63: mod_base = OTHER; note = Uridine phosphorothiorate
  modified_base 72: mod_base = OTHER; note = 2'-Omethylguanosine
  modified_base 74: mod_base = OTHER; note = 2'-Omethylcytosine phosphorothiorate

SEQ ID NO: 4059 - RNA, 76 nt, synthetic construct; identical to SEQ ID NO: 3295
  source 1..76: mol_type = other RNA
  modified_base 1: mod_base = OTHER; note = 2'-Omethylcytosine
  modified_base 2: mod_base = OTHER; note = 2'-Omethylcytosine
  modified_base 5: mod_base = OTHER; note = 2'-fluorocytosine phosphorothiorate
  modified_base 6: mod_base = OTHER; note = 2'-Omethylguanosine phosphorothiorate
  modified_base 10: mod_base = OTHER; note = 2'-fluoroguanosine phosphorothiorate
  modified_base 11: mod_base = OTHER; note = 2'-Omethylcytosine phosphorothiorate
  modified_base 14: mod_base = OTHER; note = 2'-Omethyladenosine
  modified_base 17: mod_base = OTHER; note = 2'-Omethyluridine
  modified_base 20: mod_base = OTHER; note = Uridine phosphorothiorate
  modified_base 28: mod_base = OTHER; note = 2'-fluoroadenosine
  modified_base 35: mod_base = OTHER; note = 2'-fluorouridine
  modified_base 40: mod_base = OTHER; note = 2'-fluorocytosine phosphorothiorate
  modified_base 49: mod_base = OTHER; note = 2'-fluoroguanosine phosphorothiorate
  modified_base 55: mod_base = OTHER; note = Uridine phosphorothiorate
  modified_base 57: mod_base = OTHER; note = Guanosine phosphorothiorate
  modified_base 75: mod_base = OTHER; note = 2'-fluorocytosine

SEQ ID NO: 4060 - RNA, 76 nt, synthetic construct; identical to SEQ ID NO: 625
  source 1..76: mol_type = other RNA
  modified_base 1: mod_base = OTHER; note = 2'-Omethylguanosine
  modified_base 2: mod_base = OTHER; note = 2'-Omethylguanosine
  modified_base 13: mod_base = OTHER; note = 2'-Omethylcytosine
  modified_base 33: mod_base = OTHER; note = 2'-fluorouridine
  modified_base 35: mod_base = OTHER; note = Cytosine phosphorothiorate
  modified_base 37: mod_base = OTHER; note = Adenosine phosphorothiorate
  modified_base 52: mod_base = OTHER; note = 2'-Omethylguanosine
  modified_base 56: mod_base = OTHER; note = 2'-Omethylcytosine
  modified_base 63: mod_base = OTHER; note = 2'-fluorocytosine
  modified_base 73: mod_base = OTHER; note = 2'-Omethylguanosine
  modified_base 75: mod_base = OTHER; note = 2'-fluorocytosine phosphorothiorate

SEQ ID NO: 4061 - RNA, 76 nt, synthetic construct; identical to SEQ ID NO: 625
  source 1..76: mol_type = other RNA
  modified_base 1: mod_base = OTHER; note = 2'-Omethylguanosine
  modified_base 2: mod_base = OTHER; note = 2'-Omethylguanosine
  modified_base 14: mod_base = OTHER; note = 2'-Omethyladenosine
  modified_base 33: mod_base = OTHER; note = 2'-fluorouridine
  modified_base 37: mod_base = OTHER; note = Adenosine phosphorothiorate
  modified_base 52: mod_base = OTHER; note = 2'-Omethylguanosine
  modified_base 62: mod_base = OTHER; note = 2'-Omethylcytosine
  modified_base 73: mod_base = OTHER; note = 2'-Omethylguanosine
  modified_base 75: mod_base = OTHER; note = 2'-fluorocytosine phosphorothiorate

SEQ ID NO: 4062 - RNA, 76 nt, synthetic construct; identical to SEQ ID NO: 625
  source 1..76: mol_type = other RNA
  modified_base 1: mod_base = OTHER; note = 2'-Omethylguanosine phosphorothiorate
  modified_base 2: mod_base = OTHER; note = 2'-Omethylguanosine
  modified_base 3: mod_base = OTHER; note = 2'-Omethylcytosine
  modified_base 4: mod_base = OTHER; note = 2'-Omethyluridine
  modified_base 5: mod_base = OTHER; note = 2'-Omethylcytosine
  modified_base 6: mod_base = OTHER; note = 2'-Omethylcytosine
  modified_base 10: mod_base = OTHER; note = 2'-Omethylguanosine
  modified_base 11: mod_base = OTHER; note = 2'-Omethylcytosine
  modified_base 12: mod_base = OTHER; note = 2'-Omethylguanosine
  modified_base 13: mod_base = OTHER; note = 2'-Omethylcytosine
  modified_base 16: mod_base = OTHER; note = 2'-Omethyluridine
  modified_base 17: mod_base = OTHER; note = 2'-Omethylguanosine
  modified_base 18: mod_base = OTHER; note = 2'-Omethylguanosine
  modified_base 22: mod_base = OTHER; note = 2'-Omethylguanosine
  modified_base 23: mod_base = OTHER; note = 2'-Omethylcytosine
  modified_base 24: mod_base = OTHER; note = 2'-Omethylguanosine
  modified_base 25: mod_base = OTHER; note = 2'-Omethylcytosine
  modified_base 33: mod_base = OTHER; note = 2'-fluorouridine
  modified_base 35: mod_base = OTHER; note = Cytosine phosphorothiorate
  modified_base 37: mod_base = OTHER; note = Adenosine phosphorothiorate
  modified_base 38: mod_base = OTHER; note = Adenosine phosphorothiorate
  modified_base 49: mod_base = OTHER; note = 2'-Omethylcytosine
  modified_base 50: mod_base = OTHER; note = 2'-Omethylcytosine
  modified_base 51: mod_base = OTHER; note = 2'-Omethylguanosine
  modified_base 52: mod_base = OTHER; note = 2'-Omethylguanosine
  modified_base 53: mod_base = OTHER; note = 2'-Omethylguanosine
  modified_base 54: mod_base = OTHER; note = 2'-Omethyluridine phosphorothiorate
  modified_base 55: mod_base = OTHER; note = Uridine phosphorothiorate
  modified_base 56: mod_base = OTHER; note = 2'-Omethylcytosine
  modified_base 57: mod_base = OTHER; note = 2'-fluoroguanosine
  modified_base 59: mod_base = OTHER; note = 2'-Omethylguanosine
  modified_base 61: mod_base = OTHER; note = 2'-Omethylcytosine
  modified_base 62: mod_base = OTHER; note = 2'-Omethylcytosine
  modified_base 63: mod_base = OTHER; note = 2'-fluorocytosine
  modified_base 64: mod_base = OTHER; note = 2'-Omethylguanosine
  modified_base 65: mod_base = OTHER; note = 2'-Omethylguanosine
  modified_base 66: mod_base = OTHER; note = 2'-Omethylcytosine
  modified_base 67: mod_base = OTHER; note = 2'-Omethylguanosine
  modified_base 68: mod_base = OTHER; note = 2'-Omethylguanosine
  modified_base 69: mod_base = OTHER; note = 2'-Omethyladenosine
  modified_base 70: mod_base = OTHER; note = 2'-fluoroguanosine
  modified_base 73: mod_base = OTHER; note = 2'-Omethylguanosine
  modified_base 75: mod_base = OTHER; note = 2'-fluorocytosine phosphorothiorate

SEQ ID NO: 4063 - RNA, 75 nt, synthetic construct; identical to SEQ ID NO: 3311
  source 1..75: mol_type = other RNA
  modified_base 2: mod_base = OTHER; note = Guanosine phosphorothiorate
  modified_base 4: mod_base = OTHER; note = 2'-fluorouridine
  modified_base 10: mod_base = OTHER; note = Guanosine phosphorothiorate
  modified_base 11: mod_base = OTHER; note = 2'-Omethyluridine
  modified_base 12: mod_base = OTHER; note = 2'-fluoroguanosine
  modified_base 13: mod_base = OTHER; note = 2'-Omethyluridine
  modified_base 25: mod_base = OTHER; note = 2'-fluorocytosine
  modified_base 30: mod_base = OTHER; note = 2'-fluoroguanosine
  modified_base 52: mod_base = OTHER; note = 2'-fluoroguanosine phosphorothiorate
  modified_base 59: mod_base = OTHER; note = Uridine phosphorothiorate
  modified_base 61: mod_base = OTHER; note = 2'-fluorouridine
  modified_base 62: mod_base = OTHER; note = Cytosine phosphorothiorate
  modified_base 64: mod_base = OTHER; note = 2'-fluoroguanosine
  modified_base 67: mod_base = OTHER; note = Guanosine phosphorothiorate
  modified_base 68: mod_base = OTHER; note = Adenosine phosphorothiorate
  modified_base 72: mod_base = OTHER; note = Uridine phosphorothiorate
  modified_base 73: mod_base = OTHER; note = Cytosine phosphorothiorate
  modified_base 74: mod_base = OTHER; note = 2'-fluorocytosine phosphorothiorate

SEQ ID NO: 4064 - RNA, 76 nt, synthetic construct; identical to SEQ ID NO: 625
  source 1..76: mol_type = other RNA
  modified_base 1: mod_base = OTHER; note = 2'-Omethylguanosine phosphorothiorate
  modified_base 2: mod_base = OTHER; note = 2'-Omethylguanosine
  modified_base 3: mod_base = OTHER; note = 2'-Omethylcytosine
  modified_base 4: mod_base = OTHER; note = 2'-Omethyluridine
  modified_base 5: mod_base = OTHER; note = 2'-Omethylcytosine
  modified_base 6: mod_base = OTHER; note = 2'-Omethylcytosine
  modified_base 10: mod_base = OTHER; note = 2'-Omethylguanosine
  modified_base 11: mod_base = OTHER; note = 2'-Omethylcytosine
  modified_base 12: mod_base = OTHER; note = 2'-Omethylguanosine
  modified_base 13: mod_base = OTHER; note = 2'-Omethylcytosine
  modified_base 16: mod_base = OTHER; note = 2'-Omethyluridine
  modified_base 17: mod_base = OTHER; note = 2'-Omethylguanosine
  modified_base 18: mod_base = OTHER; note = 2'-Omethylguanosine
  modified_base 22: mod_base = OTHER; note = 2'-Omethylguanosine
  modified_base 23: mod_base = OTHER; note = 2'-Omethylcytosine
  modified_base 24: mod_base = OTHER; note = 2'-Omethylguanosine
  modified_base 25: mod_base = OTHER; note = 2'-Omethylcytosine
  modified_base 49: mod_base = OTHER; note = 2'-Omethylcytosine
  modified_base 50: mod_base = OTHER; note = 2'-Omethylcytosine
  modified_base 51: mod_base = OTHER; note = 2'-Omethylguanosine
  modified_base 52: mod_base = OTHER; note = 2'-Omethylguanosine
  modified_base 53: mod_base = OTHER; note = 2'-Omethylguanosine
  modified_base 54: mod_base = OTHER; note = 2'-Omethyluridine phosphorothiorate
  modified_base 55: mod_base = OTHER; note = Uridine phosphorothiorate
  modified_base 56: mod_base = OTHER; note = 2'-Omethylcytosine
  modified_base 57: mod_base = OTHER; note = 2'-fluoroguanosine
  modified_base 59: mod_base = OTHER; note = 2'-Omethylguanosine
  modified_base 73: mod_base = OTHER; note = 2'-Omethylguanosine

SEQ ID NO: 4065 - RNA, 76 nt, synthetic construct; identical to SEQ ID NO: 625
  source 1..76: mol_type = other RNA
  modified_base 2: mod_base = OTHER; note = 2'-Omethylguanosine phosphorothiorate
  modified_base 4: mod_base = OTHER; note = 2'-fluorouridine
  modified_base 8: mod_base = OTHER; note = Uridine phosphorothiorate
  modified_base 10: mod_base = OTHER; note = 2'-fluoroguanosine
  modified_base 15: mod_base = OTHER; note = 2'-fluoroadenosine
  modified_base 16: mod_base = OTHER; note = 2'-Omethyluridine
  modified_base 20: mod_base = OTHER; note = 2'-fluorouridine phosphorothiorate
  modified_base 22: mod_base = OTHER; note = 2'-Omethylguanosine phosphorothiorate
  modified_base 25: mod_base = OTHER; note = 2'-fluorocytosine
  modified_base 26: mod_base = OTHER; note = 2'-Omethyladenosine
  modified_base 28: mod_base = OTHER; note = 2'-Omethyluridine
  modified_base 33: mod_base = OTHER; note = 2'-fluorouridine
  modified_base 36: mod_base = OTHER; note = Adenosine phosphorothiorate
  modified_base 38: mod_base = OTHER; note = 2'-fluoroadenosine
  modified_base 42: mod_base = OTHER; note = 2'-Omethyladenosine
  modified_base 48: mod_base = OTHER; note = Uridine phosphorothiorate
  modified_base 49: mod_base = OTHER; note = 2'-fluorocytosine
  modified_base 51: mod_base = OTHER; note = 2'-Omethylguanosine
  modified_base 53: mod_base = OTHER; note = 2'-Omethylguanosine
  modified_base 56: mod_base = OTHER; note = 2'-fluorocytosine
  modified_base 58: mod_base = OTHER; note = Adenosine phosphorothiorate
  modified_base 60: mod_base = OTHER; note = 2'-Omethyluridine
  modified_base 62: mod_base = OTHER; note = 2'-fluorocytosine phosphorothiorate
  modified_base 63: mod_base = OTHER; note = 2'-Omethylcytosine
  modified_base 64: mod_base = OTHER; note = 2'-fluoroguanosine
  modified_base 67: mod_base = OTHER; note = Guanosine phosphorothiorate
  modified_base 68: mod_base = OTHER; note = 2'-Omethylguanosine
  modified_base 70: mod_base = OTHER; note = 2'-Omethylguanosine
  modified_base 72: mod_base = OTHER; note = 2'-fluorocytosine
  modified_base 73: mod_base = OTHER; note = Guanosine phosphorothiorate

SEQ ID NO: 4066 - RNA, 85 nt, synthetic construct; identical to SEQ ID NO: 3317
  source 1..85: mol_type = other RNA
  modified_base 1: mod_base = OTHER; note = 2'-Omethylguanosine phosphorothiorate
  modified_base 2: mod_base = OTHER; note = 2'-Omethylcytosine
  modified_base 13: mod_base = OTHER; note = 2'-fluoroguanosine phosphorothiorate
  modified_base 16: mod_base = OTHER; note = Uridine phosphorothiorate
  modified_base 30: mod_base = OTHER; note = Guanosine phosphorothiorate
  modified_base 55: mod_base = OTHER; note = 2'-Omethylcytosine phosphorothiorate

SEQ ID NO: 4067 - RNA, 76 nt, synthetic construct; identical to SEQ ID NO: 625
  source 1..76: mol_type = other RNA
  modified_base 1: mod_base = OTHER; note = 2'-Omethylguanosine phosphorothiorate
  modified_base 2: mod_base = OTHER; note = 2'-Omethylguanosine
  modified_base 17: mod_base = OTHER; note = 2'-Omethylguanosine
  modified_base 33: mod_base = OTHER; note = 2'-fluorouridine
  modified_base 35: mod_base = OTHER; note = Cytosine phosphorothiorate
  modified_base 37: mod_base = OTHER; note = Adenosine phosphorothiorate
  modified_base 38: mod_base = OTHER; note = Adenosine phosphorothiorate
  modified_base 52: mod_base = OTHER; note = 2'-Omethylguanosine
  modified_base 59: mod_base = OTHER; note = 2'-Omethylguanosine
  modified_base 65: mod_base = OTHER; note = 2'-Omethylguanosine
  modified_base 73: mod_base = OTHER; note = 2'-Omethylguanosine
  modified_base 75: mod_base = OTHER; note = 2'-fluorocytosine phosphorothiorate

SEQ ID NO: 4068 - RNA, 85 nt, synthetic construct; identical to SEQ ID NO: 3297
  source 1..85: mol_type = other RNA
  modified_base 1: mod_base = OTHER; note = 2'-Omethylguanosine phosphorothiorate
  modified_base 2: mod_base = OTHER; note = 2'-Omethylcytosine phosphorothiorate
  modified_base 3: mod_base = OTHER; note = 2'-Omethyluridine
  modified_base 4: mod_base = OTHER; note = 2'-Omethylguanosine
  modified_base 5: mod_base = OTHER; note = 2'-Omethyluridine
  modified_base 6: mod_base = OTHER; note = 2'-Omethylguanosine
  modified_base 10: mod_base = OTHER; note = 2'-Omethylguanosine
  modified_base 11: mod_base = OTHER; note = 2'-Omethylcytosine
  modified_base 12: mod_base = OTHER; note = 2'-Omethylcytosine
  modified_base 13: mod_base = OTHER; note = 2'-Omethylguanosine
  modified_base 22: mod_base = OTHER; note = 2'-Omethyladenosine
  modified_base 23: mod_base = OTHER; note = 2'-Omethylguanosine
  modified_base 24: mod_base = OTHER; note = 2'-Omethylguanosine
  modified_base 25: mod_base = OTHER; note = 2'-Omethylcytosine
  modified_base 33: mod_base = OTHER; note = 2'-fluorouridine
  modified_base 35: mod_base = OTHER; note = Cytosine phosphorothiorate
  modified_base 37: mod_base = OTHER; note = Adenosine phosphorothiorate
  modified_base 38: mod_base = OTHER; note = Adenosine phosphorothiorate
  modified_base 58: mod_base = OTHER; note = 2'-Omethylguanosine
  modified_base 59: mod_base = OTHER; note = 2'-Omethylcytosine
  modified_base 60: mod_base = OTHER; note = 2'-Omethyladenosine
  modified_base 61: mod_base = OTHER; note = 2'-Omethylguanosine
  modified_base 62: mod_base = OTHER; note = 2'-Omethylguanosine
  modified_base 63: mod_base = OTHER; note = 2'-Omethyluridine
  modified_base 65: mod_base = OTHER; note = 2'-Omethylcytosine
  modified_base 68: mod_base = OTHER; note = 2'-Omethyladenosine
  modified_base 70: mod_base = OTHER; note = 2'-Omethylcytosine
  modified_base 71: mod_base = OTHER; note = 2'-Omethylcytosine
  modified_base 72: mod_base = OTHER; note = 2'-fluorouridine
  modified_base 73: mod_base = OTHER; note = 2'-Omethylguanosine
  modified_base 74: mod_base = OTHER; note = 2'-Omethylcytosine
  modified_base 75: mod_base = OTHER; note = 2'-Omethyluridine
  modified_base 76: mod_base = OTHER; note = 2'-Omethylcytosine
  modified_base 77: mod_base = OTHER; note = 2'-Omethyladenosine
  modified_base 82: mod_base = OTHER; note = 2'-Omethylguanosine

SEQ ID NO: 4069 - RNA, 85 nt, synthetic construct; identical to SEQ ID NO: 3286
  source 1..85: mol_type = other RNA
  modified_base 1: mod_base = OTHER; note = Cytosine phosphorothiorate
  modified_base 3: mod_base = OTHER; note = 2'-fluoroadenosine
  modified_base 13: mod_base = OTHER; note = 2'-Omethyladenosine
  modified_base 20: mod_base = OTHER; note = Adenosine phosphorothiorate
  modified_base 27: mod_base = OTHER; note = 2'-fluorouridine
  modified_base 29: mod_base = OTHER; note = 2'-fluoroguanosine
  modified_base 33: mod_base = OTHER; note = Uridine phosphorothiorate
  modified_base 40: mod_base = OTHER; note = Cytosine phosphorothiorate
  modified_base 47: mod_base = OTHER; note = Cytosine phosphorothiorate
  modified_base 51: mod_base = OTHER; note = 2'-Omethyluridine
  modified_base 53: mod_base = OTHER; note = Uridine phosphorothiorate
  modified_base 55: mod_base = OTHER; note = 2'-Omethylcytosine
  modified_base 56: mod_base = OTHER; note = 2'-Omethylguanosine phosphorothiorate
  modified_base 57: mod_base = OTHER; note = 2'-Omethylcytosine
  modified_base 62: mod_base = OTHER; note = 2'-fluoroguanosine phosphorothiorate
  modified_base 76: mod_base = OTHER; note = Cytosine phosphorothiorate
  modified_base 84: mod_base = OTHER; note = Cytosine phosphorothiorate

SEQ ID NO: 4070 - RNA, 76 nt, synthetic construct; identical to SEQ ID NO: 625
  source 1..76: mol_type = other RNA
  modified_base 1: mod_base = OTHER; note = 2'-Omethylguanosine phosphorothiorate
  modified_base 2: mod_base = OTHER; note = 2'-Omethylguanosine phosphorothiorate
  modified_base 25: mod_base = OTHER; note = Cytosine phosphorothiorate
  modified_base 43: mod_base = OTHER; note = 2'-fluoroadenosine
  modified_base 55: mod_base = OTHER; note = Uridine phosphorothiorate
  modified_base 73: mod_base = OTHER; note = Guanosine phosphorothiorate
  modified_base 74: mod_base = OTHER; note = Cytosine phosphorothiorate
  modified_base 75: mod_base = OTHER; note = 2'-Omethylcytosine phosphorothiorate
  modified_base 76: mod_base = OTHER; note = 2'-Omethyladenosine

SEQ ID NO: 4071 - RNA, 76 nt, synthetic construct; identical to SEQ ID NO: 3325
  source 1..76: mol_type = other RNA
  modified_base 1: mod_base = OTHER; note = 2'-Omethyluridine phosphorothiorate
  modified_base 2: mod_base = OTHER; note = 2'-Omethyladenosine phosphorothiorate
  modified_base 74: mod_base = OTHER; note = Cytosine phosphorothiorate
  modified_base 75: mod_base = OTHER; note = 2'-Omethylcytosine

SEQ ID NO: 4072 - RNA, 85 nt, synthetic construct; identical to SEQ ID NO: 3297
  source 1..85: mol_type = other RNA
  modified_base 1: mod_base = OTHER; note = 2'-Omethylguanosine
  modified_base 4: mod_base = OTHER; note = 2'-Omethylguanosine
  modified_base 6: mod_base = OTHER; note = 2'-Omethylguanosine
  modified_base 10: mod_base = OTHER; note = 2'-Omethylguanosine
  modified_base 11: mod_base = OTHER; note = 2'-Omethylcytosine
  modified_base 12: mod_base = OTHER; note = 2'-Omethylcytosine
  modified_base 13: mod_base = OTHER; note = 2'-Omethylguanosine
  modified_base 17: mod_base = OTHER; note = 2'-Omethylguanosine
  modified_base 18: mod_base = OTHER; note = 2'-Omethylguanosine
  modified_base 20: mod_base = OTHER; note = 2'-Omethyluridine
  modified_base 22: mod_base = OTHER; note = 2'-Omethyladenosine
  modified_base 25: mod_base = OTHER; note = 2'-Omethylcytosine
  modified_base 29: mod_base = OTHER; note = 2'-Omethylguanosine
  modified_base 30: mod_base = OTHER; note = 2'-Omethylguanosine
  modified_base 41: mod_base = OTHER; note = 2'-Omethylcytosine
  modified_base 42: mod_base = OTHER; note = 2'-Omethyladenosine
  modified_base 43: mod_base = OTHER; note = 2'-Omethyladenosine
  modified_base 58: mod_base = OTHER; note = 2'-Omethylguanosine
  modified_base 59: mod_base = OTHER; note = 2'-Omethylcytosine
  modified_base 61: mod_base = OTHER; note = 2'-Omethylguanosine
  modified_base 65: mod_base = OTHER; note = 2'-Omethylcytosine
  modified_base 68: mod_base = OTHER; note = 2'-Omethyladenosine
  modified_base 70: mod_base = OTHER; note = 2'-Omethylcytosine
  modified_base 71: mod_base = OTHER; note = 2'-Omethylcytosine
  modified_base 74: mod_base = OTHER; note = 2'-Omethylcytosine
  modified_base 75: mod_base = OTHER; note = 2'-Omethyluridine
  modified_base 76: mod_base = OTHER; note = 2'-Omethylcytosine
  modified_base 77: mod_base = OTHER; note = 2'-Omethyladenosine
  modified_base 78: mod_base = OTHER; note = 2'-Omethylcytosine
  modified_base 80: mod_base = OTHER; note = 2'-Omethylguanosine
  modified_base 81: mod_base = OTHER; note = 2'-Omethylcytosine
  modified_base 82: mod_base = OTHER; note = 2'-Omethylguanosine
  modified_base 85: mod_base = OTHER; note = 2'-Omethyladenosine

SEQ ID NO: 4073 - RNA, 76 nt, synthetic construct; identical to SEQ ID NO: 625
  source 1..76: mol_type = other RNA
  modified_base 1: mod_base = OTHER; note = 2'-Omethylguanosine
  modified_base 2: mod_base = OTHER; note = 2'-Omethylguanosine
  modified_base 3: mod_base = OTHER; note = 2'-Omethylcytosine
  modified_base 4: mod_base = OTHER; note = 2'-Omethyluridine
  modified_base 5: mod_base = OTHER; note = 2'-Omethylcytosine
  modified_base 6: mod_base = OTHER; note = 2'-Omethylcytosine
  modified_base 12: mod_base = OTHER; note = 2'-Omethylguanosine
  modified_base 13: mod_base = OTHER; note = 2'-Omethylcytosine
  modified_base 14: mod_base = OTHER; note = 2'-Omethyladenosine
  modified_base 15: mod_base = OTHER; note = 2'-Omethyladenosine
  modified_base 16: mod_base = OTHER; note = 2'-Omethyluridine
  modified_base 17: mod_base = OTHER; note = 2'-Omethylguanosine phosphorothiorate
  modified_base 18: mod_base = OTHER; note = 2'-fluoroguanosine
  modified_base 19: mod_base = OTHER; note = 2'-Omethyladenosine phosphorothiorate
  modified_base 20: mod_base = OTHER; note = 2'-Omethyluridine
  modified_base 21: mod_base = OTHER; note = 2'-fluoroadenosine phosphorothiorate
  modified_base 22: mod_base = OTHER; note = 2'-Omethylguanosine
  modified_base 23: mod_base = OTHER; note = 2'-Omethylcytosine
  modified_base 24: mod_base = OTHER; note = 2'-Omethylguanosine
  modified_base 28: mod_base = OTHER; note = 2'-Omethyluridine phosphorothiorate
  modified_base 30: mod_base = OTHER; note = 2'-Omethylguanosine phosphorothiorate
  modified_base 31: mod_base = OTHER; note = 2'-Omethyladenosine phosphorothiorate
  modified_base 33: mod_base = OTHER; note = 2'-fluorouridine
  modified_base 35: mod_base = OTHER; note = Cytosine phosphorothiorate
  modified_base 36: mod_base = OTHER; note = 2'-Omethyladenosine phosphorothiorate
  modified_base 37: mod_base = OTHER; note = Adenosine phosphorothiorate
  modified_base 38: mod_base = OTHER; note = Adenosine phosphorothiorate
  modified_base 40: mod_base = OTHER; note = 2'-fluorouridine
  modified_base 41: mod_base = OTHER; note = 2'-fluorocytosine
  modified_base 42: mod_base = OTHER; note = Adenosine phosphorothiorate
  modified_base 43: mod_base = OTHER; note = 2'-Omethyladenosine
  modified_base 44: mod_base = OTHER; note = 2'-Omethyladenosine
  modified_base 45: mod_base = OTHER; note = 2'-fluoroguanosine
  modified_base 49: mod_base = OTHER; note = 2'-Omethylcytosine
  modified_base 50: mod_base = OTHER; note = 2'-Omethylcytosine
  modified_base 52: mod_base = OTHER; note = 2'-Omethylguanosine
  modified_base 53: mod_base = OTHER; note = 2'-Omethylguanosine
  modified_base 54: mod_base = OTHER; note = Uridine phosphorothiorate
  modified_base 55: mod_base = OTHER; note = Uridine phosphorothiorate
  modified_base 59: mod_base = OTHER; note = 2'-Omethylguanosine
  modified_base 60: mod_base = OTHER; note = 2'-Omethyluridine phosphorothiorate
  modified_base 61: mod_base = OTHER; note = 2'-Omethylcytosine
  modified_base 62: mod_base = OTHER; note = 2'-Omethylcytosine
  modified_base 63: mod_base = OTHER; note = 2'-fluorocytosine
  modified_base 64: mod_base = OTHER; note = 2'-Omethylguanosine
  modified_base 65: mod_base = OTHER; note = 2'-Omethylguanosine phosphorothiorate
  modified_base 66: mod_base = OTHER; note = 2'-Omethylcytosine
  modified_base 68: mod_base = OTHER; note = 2'-Omethylguanosine
  modified_base 69: mod_base = OTHER; note = 2'-fluoroadenosine
  modified_base 73: mod_base = OTHER; note = 2'-Omethylguanosine
  modified_base 74: mod_base = OTHER; note = 2'-fluorocytosine phosphorothiorate
  modified_base 75: mod_base = OTHER; note = 2'-fluorocytosine phosphorothiorate

SEQ ID NO: 4074 - DNA, 76 bp, synthetic construct; identical to SEQ ID NO: 1924
  source 1..76: mol_type = other DNA
  modified_base 1: mod_base = OTHER; note = 2'-Omethylguanosine phosphorothiorate
  modified_base 2: mod_base = OTHER; note = 2'-Omethylguanosine phosphorothiorate
  modified_base 3: mod_base = OTHER; note = Cytosine phosphorothiorate
  modified_base 4: mod_base = OTHER; note = Uridine phosphorothiorate
  modified_base 5: mod_base = OTHER; note = 2'-fluorocytosine
  modified_base 7: mod_base = OTHER; note = Guanosine phosphorothiorate
  modified_base 8: mod_base = OTHER; note = deoxyuridine phosphorothiorate
  modified_base 9: mod_base = OTHER; note = 2'-fluoroguanosine
  modified_base 11: mod_base = OTHER; note = Cytosine phosphorothiorate
  modified_base 12: mod_base = OTHER; note = deoxyguanosine phosphorothiorate
  modified_base 13: mod_base = OTHER; note = 2'-O-(2-Methoxyethyl) 5-methylcytosine
  modified_base 16: mod_base = OTHER; note = Uridine phosphorothiorate
  modified_base 18: mod_base = OTHER; note = Guanosine phosphorothiorate
  modified_base 19: mod_base = OTHER; note = deoxyadenosine phosphorothiorate
  modified_base 22: mod_base = OTHER; note = Guanosine phosphorothiorate
  modified_base 23: mod_base = OTHER; note = 2'-fluorocytosine
  modified_base 24: mod_base = OTHER; note = deoxyguanosine phosphorothiorate
  modified_base 25: mod_base = OTHER; note = 2'-fluorocytosine
  modified_base 26: mod_base = OTHER; note = Adenosine phosphorothiorate
  modified_base 27: mod_base = OTHER; note = 2'-O-(2-Methoxyethyl) thymine
  modified_base 30: mod_base = OTHER; note = 2'-O-(2-Methoxyethyl) guanosine
  modified_base 31: mod_base = OTHER; note = Adenosine phosphorothiorate
  modified_base 32: mod_base = OTHER; note = 2'-O-(2-Methoxyethyl) 5-methylcytosine
  modified_base 36: mod_base = OTHER; note = Adenosine phosphorothiorate
  modified_base 41: mod_base = OTHER; note = Cytosine phosphorothiorate
  modified_base 42: mod_base = OTHER; note = 2'-O-(2-Methoxyethyl) adenosine phosphorothiorate
  modified_base 43: mod_base = OTHER; note = 2'-O-(2-Methoxyethyl) adenosine phosphorothiorate
  modified_base 44: mod_base = OTHER; note = 2'-Omethyladenosine phosphorothiorate
  modified_base 45: mod_base = OTHER; note = 2'-fluoroguanosine phosphorothiorate
  modified_base 47: mod_base = OTHER; note = Uridine phosphorothiorate
  modified_base 53: mod_base = OTHER; note = Guanosine phosphorothiorate
  modified_base 54: mod_base = OTHER; note = 2'-Omethyluridine
  modified_base 57: mod_base = OTHER; note = 2'-fluoroguanosine
  modified_base 59: mod_base = OTHER; note = 2'-O-(2-Methoxyethyl) guanosine
  modified_base 66: mod_base = OTHER; note = 2'-O-(2-Methoxyethyl) 5-methylcytosine phosphorothiorate
  modified_base 68: mod_base = OTHER; note = 2'-Omethylguanosine
  modified_base 72: mod_base = OTHER; note = 2'-O-(2-Methoxyethyl) 5-methylcytosine phosphorothiorate
  modified_base 73: mod_base = OTHER; note = 2'-fluoroguanosine
  modified_base 74: mod_base = OTHER; note = Cytosine phosphorothiorate
  modified_base 75: mod_base = OTHER; note = 2'-Omethylcytosine phosphorothiorate
  modified_base 76: mod_base = OTHER; note = 2'-fluoroadenosine
  misc_feature 1..7: note = RNA
  misc_feature 8: note = DNA
  misc_feature 9..11: note = RNA
  misc_feature 12: note = DNA
  misc_feature 13: note = RNA
  misc_feature 14: note = DNA
  misc_feature 15..16: note = RNA
  misc_feature 17: note = DNA
  misc_feature 18: note = RNA
  misc_feature 19..20: note = DNA
  misc_feature 21..23: note = RNA
  misc_feature 24: note = DNA
  misc_feature 25..45: note = RNA
  misc_feature 46: note = DNA
  misc_feature 47..66: note = RNA
  misc_feature 67: note = DNA
  misc_feature 68..76: note = RNA

SEQ ID NO: 4075 - RNA, 76 nt, synthetic construct; identical to SEQ ID NO: 625
  source 1..76: mol_type = other RNA
  modified_base 1: mod_base = OTHER; note = 2'-Omethylguanosine
  modified_base 2: mod_base = OTHER; note = 2'-Omethylguanosine
  modified_base 33: mod_base = OTHER; note = 2'-fluorouridine
  modified_base 37: mod_base = OTHER; note = Adenosine phosphorothiorate
  modified_base 52: mod_base = OTHER; note = 2'-Omethylguanosine
  modified_base 57: mod_base = OTHER; note = 2'-Omethylguanosine
  modified_base 65: mod_base = OTHER; note = 2'-Omethylguanosine
  modified_base 73: mod_base = OTHER; note = 2'-Omethylguanosine
  modified_base 75: mod_base = OTHER; note = 2'-fluorocytosine phosphorothiorate

SEQ ID NO: 4076 - RNA, 76 nt, synthetic construct; identical to SEQ ID NO: 625
  source 1..76: mol_type = other RNA
  modified_base 1: mod_base = OTHER; note = 2'-Omethylguanosine
  modified_base 13: mod_base = OTHER; note = 2'-Omethylcytosine
  modified_base 17: mod_base = OTHER; note = Guanosine phosphorothiorate
  modified_base 18: mod_base = OTHER; note = 2'-Omethylguanosine
  modified_base 20: mod_base = OTHER; note = 2'-Omethyluridine
  modified_base 25: mod_base = OTHER; note = 2'-Omethylcytosine
  modified_base 29: mod_base = OTHER; note = 2'-Omethylguanosine
  modified_base 33: mod_base = OTHER; note = 2'-fluorouridine
  modified_base 35: mod_base = OTHER; note = Cytosine phosphorothiorate
  modified_base 37: mod_base = OTHER; note = Adenosine phosphorothiorate
  modified_base 38: mod_base = OTHER; note = Adenosine phosphorothiorate
  modified_base 41: mod_base = OTHER; note = 2'-fluorocytosine phosphorothiorate
  modified_base 43: mod_base = OTHER; note = 2'-Omethyladenosine
  modified_base 44: mod_base = OTHER; note = 2'-fluoroadenosine
  modified_base 46: mod_base = OTHER; note = Guanosine phosphorothiorate
  modified_base 50: mod_base = OTHER; note = 2'-Omethylcytosine
  modified_base 52: mod_base = OTHER; note = 2'-Omethylguanosine
  modified_base 54: mod_base = OTHER; note = Uridine phosphorothiorate
  modified_base 55: mod_base = OTHER; note = Uridine phosphorothiorate
  modified_base 56: mod_base = OTHER; note = 2'-Omethylcytosine
  modified_base 57: mod_base = OTHER; note = Guanosine phosphorothiorate
  modified_base 62: mod_base = OTHER; note = 2'-Omethylcytosine
  modified_base 63: mod_base = OTHER; note = 2'-fluorocytosine
  modified_base 65: mod_base = OTHER; note = 2'-Omethylguanosine
  modified_base 71: mod_base = OTHER; note = 2'-Omethyluridine
  modified_base 73: mod_base = OTHER; note = 2'-Omethylguanosine

SEQ ID NO: 4077 - RNA, 76 nt, synthetic construct; identical to SEQ ID NO: 625
  source 1..76: mol_type = other RNA
  modified_base 1: mod_base = OTHER; note = 2'-Omethylguanosine
  modified_base 10: mod_base = OTHER; note = 2'-Omethylguanosine
  modified_base 13: mod_base = OTHER; note = 2'-Omethylcytosine
  modified_base 17: mod_base = OTHER; note = Guanosine phosphorothiorate
  modified_base 18: mod_base = OTHER; note = 2'-Omethylguanosine
  modified_base 19: mod_base = OTHER; note = Adenosine phosphorothiorate
  modified_base 20: mod_base = OTHER; note = 2'-Omethyluridine
  modified_base 25: mod_base = OTHER; note = 2'-Omethylcytosine
  modified_base 29: mod_base = OTHER; note = 2'-Omethylguanosine
  modified_base 33: mod_base = OTHER; note = 2'-fluorouridine
  modified_base 35: mod_base = OTHER; note = Cytosine phosphorothiorate
  modified_base 37: mod_base = OTHER; note = Adenosine phosphorothiorate
  modified_base 38: mod_base = OTHER; note = Adenosine phosphorothiorate
  modified_base 41: mod_base = OTHER; note = 2'-fluorocytosine phosphorothiorate
  modified_base 43: mod_base = OTHER; note = 2'-Omethyladenosine
  modified_base 44: mod_base = OTHER; note = 2'-fluoroadenosine
  modified_base 50: mod_base = OTHER; note = 2'-Omethylcytosine
  modified_base 52: mod_base = OTHER; note = 2'-Omethylguanosine
  modified_base 54: mod_base = OTHER; note = Uridine phosphorothiorate
  modified_base 55: mod_base = OTHER; note = Uridine phosphorothiorate
  modified_base 56: mod_base = OTHER; note = 2'-Omethylcytosine
  modified_base 57: mod_base = OTHER; note = Guanosine phosphorothiorate
  modified_base 62: mod_base = OTHER; note = 2'-Omethylcytosine
  modified_base 63: mod_base = OTHER; note = 2'-fluorocytosine
  modified_base 65: mod_base = OTHER; note = 2'-Omethylguanosine
  modified_base 73: mod_base = OTHER; note = 2'-Omethylguanosine

SEQ ID NO: 4078 - RNA, 85 nt, synthetic construct
  source 1..85: mol_type = other RNA
gctgtgatggccgagtggttaaggtgttggacttcaaatccaatgggatcttcccgcgcaggttcgagccctgctcacagcgcca

SEQ ID NO: 4079 - RNA, 76 nt, synthetic construct; identical to SEQ ID NO: 625
  source 1..76: mol_type = other RNA
  modified_base 1: mod_base = OTHER; note = 2'-fluoroguanosine phosphorothiorate
  modified_base 2: mod_base = OTHER; note = 2'-Omethylguanosine
  modified_base 3: mod_base = OTHER; note = 2'-fluorocytosine phosphorothiorate
  modified_base 6: mod_base = OTHER; note = 2'-Omethylcytosine
  modified_base 10: mod_base = OTHER; note = 2'-Omethylguanosine
  modified_base 12: mod_base = OTHER; note = 2'-Omethylguanosine phosphorothiorate
  modified_base 16: mod_base = OTHER; note = 2'-fluorouridine
  modified_base 17: mod_base = OTHER; note = 2'-Omethylguanosine
  modified_base 18: mod_base = OTHER; note = 2'-fluoroguanosine
  modified_base 20: mod_base = OTHER; note = 2'-fluorouridine
  modified_base 29: mod_base = OTHER; note = 2'-Omethylguanosine
  modified_base 33: mod_base = OTHER; note = 2'-fluorouridine
  modified_base 36: mod_base = OTHER; note = Adenosine phosphorothiorate
  modified_base 38: mod_base = OTHER; note = 2'-fluoroadenosine
  modified_base 39: mod_base = OTHER; note = Uridine phosphorothiorate
  modified_base 40: mod_base = OTHER; note = 2'-Omethyluridine phosphorothiorate
  modified_base 41: mod_base = OTHER; note = 2'-Omethylcytosine
  modified_base 47: mod_base = OTHER; note = 2'-fluorouridine phosphorothiorate
  modified_base 49: mod_base = OTHER; note = 2'-Omethylcytosine
  modified_base 50: mod_base = OTHER; note = Cytosine phosphorothiorate
  modified_base 52: mod_base = OTHER; note = 2'-Omethylguanosine phosphorothiorate
  modified_base 57: mod_base = OTHER; note = Guanosine phosphorothiorate
  modified_base 58: mod_base = OTHER; note = 2'-fluoroadenosine
  modified_base 63: mod_base = OTHER; note = 2'-fluorocytosine
  modified_base 65: mod_base = OTHER; note = 2'-fluoroguanosine
  modified_base 67: mod_base = OTHER; note = Guanosine phosphorothiorate
  modified_base 68: mod_base = OTHER; note = 2'-Omethylguanosine
  modified_base 71: mod_base = OTHER; note = Uridine phosphorothiorate
  modified_base 72: mod_base = OTHER; note = 2'-Omethylcytosine

SEQ ID NO: 4080 - RNA, 76 nt, synthetic construct; identical to SEQ ID NO: 3447
  source 1..76: mol_type = other RNA
  modified_base 1: mod_base = OTHER; note = 2'-Omethylguanosine
  modified_base 14: mod_base = OTHER; note = 2'-Omethyladenosine
  modified_base 15: mod_base = OTHER; note = 2'-fluoroadenosine
  modified_base 16: mod_base = OTHER; note = 2'-Omethyluridine
  modified_base 17: mod_base = OTHER; note = 2'-Omethylguanosine
  modified_base 18: mod_base = OTHER; note = 2'-Omethylguanosine
  modified_base 19: mod_base = OTHER; note = 2'-fluoroadenosine
  modified_base 20: mod_base = OTHER; note = 2'-Omethyluridine
  modified_base 54: mod_base = OTHER; note = 2'-Omethyluridine phosphorothiorate
  modified_base 55: mod_base = OTHER; note = Uridine phosphorothiorate
  modified_base 56: mod_base = OTHER; note = 2'-Omethylcytosine
  modified_base 57: mod_base = OTHER; note = 2'-Omethylguanosine
  modified_base 59: mod_base = OTHER; note = 2'-Omethylguanosine
  modified_base 73: mod_base = OTHER; note = 2'-Omethylguanosine

SEQ ID NO: 4081 - RNA, 75 nt, synthetic construct; identical to SEQ ID NO: 3299
  source 1..75: mol_type = other RNA
  modified_base 2: mod_base = OTHER; note = 2'-Omethylcytosine
  modified_base 4: mod_base = OTHER; note = 2'-Omethylguanosine
  modified_base 14: mod_base = OTHER; note = 2'-Omethylguanosine
  modified_base 15: mod_base = OTHER; note = 2'-Omethyluridine phosphorothiorate
  modified_base 17: mod_base = OTHER; note = 2'-fluoroguanosine
  modified_base 19: mod_base = OTHER; note = 2'-fluorouridine
  modified_base 26: mod_base = OTHER; note = 2'-fluorouridine
  modified_base 34: mod_base = OTHER; note = 2'-fluorouridine
  modified_base 46: mod_base = OTHER; note = 2'-fluorouridine
  modified_base 48: mod_base = OTHER; note = 2'-fluorocytosine
  modified_base 49: mod_base = OTHER; note = Adenosine phosphorothiorate
  modified_base 53: mod_base = OTHER; note = 2'-Omethyluridine phosphorothiorate
  modified_base 59: mod_base = OTHER; note = 2'-Omethyluridine phosphorothiorate
  modified_base 63: mod_base = OTHER; note = Uridine phosphorothiorate
  modified_base 72: mod_base = OTHER; note = 2'-Omethylguanosine
  modified_base 74: mod_base = OTHER; note = 2'-Omethylcytosine phosphorothiorate

SEQ ID NO: 4082 - DNA, 76 bp, synthetic construct; identical to SEQ ID NO: 1924
  source 1..76: mol_type = other DNA
  modified_base 1: mod_base = OTHER; note = 2'-Omethylguanosine phosphorothiorate
  modified_base 2: mod_base = OTHER; note = 2'-Omethylguanosine
  modified_base 3: mod_base = OTHER; note = 2'-Omethylcytosine
  modified_base 4: mod_base = OTHER; note = 2'-Omethyluridine
  modified_base 5: mod_base = OTHER; note = 2'-Omethylcytosine
  modified_base 6: mod_base = OTHER; note = 2'-Omethylcytosine
  modified_base 9: mod_base = OTHER; note = Guanosine phosphorothiorate
  modified_base 12: mod_base = OTHER; note = 2'-Omethylguanosine
  modified_base 13: mod_base = OTHER; note = 2'-Omethylcytosine
  modified_base 14: mod_base = OTHER; note = 2'-fluoroadenosine
  modified_base 15: mod_base = OTHER; note = 2'-fluoroadenosine
  modified_base 16: mod_base = OTHER; note = 2'-Omethyluridine
  modified_base 17: mod_base = OTHER; note = 2'-Omethylguanosine
  modified_base 18: mod_base = OTHER; note = 2'-Omethylguanosine
  modified_base 19: mod_base = OTHER; note = 2'-fluoroadenosine
  modified_base 20: mod_base = OTHER; note = 2'-fluorouridine
  modified_base 21: mod_base = OTHER; note = 2'-fluoroadenosine
  modified_base 25: mod_base = OTHER; note = 2'-Omethylcytosine
  modified_base 26: mod_base = OTHER; note = Adenosine phosphorothiorate
  modified_base 27: mod_base = OTHER; note = 2'-O-(2-Methoxyethyl) thymine
  modified_base 29: mod_base = OTHER; note = 2'-Omethylguanosine
  modified_base 33: mod_base = OTHER; note = 2'-fluorouridine
  modified_base 35: mod_base = OTHER; note = Cytosine phosphorothiorate
  modified_base 37: mod_base = OTHER; note = Adenosine phosphorothiorate
  modified_base 38: mod_base = OTHER; note = Adenosine phosphorothiorate
  modified_base 41: mod_base = OTHER; note = 2'-fluorocytosine phosphorothiorate
  modified_base 43: mod_base = OTHER; note = 2'-Omethyladenosine
  modified_base 44: mod_base = OTHER; note = 2'-Omethyladenosine
  modified_base 45: mod_base = OTHER; note = 2'-Omethylguanosine
  modified_base 46: mod_base = OTHER; note = 2'-fluoroguanosine
  modified_base 48: mod_base = OTHER; note = 2'-fluorouridine
  modified_base 49: mod_base = OTHER; note = 2'-Omethylcytosine
  modified_base 50: mod_base = OTHER; note = 2'-Omethylcytosine
  modified_base 51: mod_base = OTHER; note = 2'-Omethylguanosine
  modified_base 52: mod_base = OTHER; note = 2'-fluoroguanosine
  modified_base 53: mod_base = OTHER; note = 2'-Omethylguanosine
  modified_base 54: mod_base = OTHER; note = 2'-Omethyluridine
  modified_base 55: mod_base = OTHER; note = Uridine phosphorothiorate
  modified_base 56: mod_base = OTHER; note = 2'-Omethylcytosine
  modified_base 57: mod_base = OTHER; note = 2'-fluoroguanosine
  modified_base 59: mod_base = OTHER; note = 2'-Omethylguanosine
  modified_base 61: mod_base = OTHER; note = 2'-Omethylcytosine
  modified_base 62: mod_base = OTHER; note = 2'-fluorocytosine
  modified_base 63: mod_base = OTHER; note = 2'-fluorocytosine
  modified_base 64: mod_base = OTHER; note = 2'-Omethylguanosine
  modified_base 65: mod_base = OTHER; note = 2'-Omethylguanosine
  modified_base 66: mod_base = OTHER; note = 2'-Omethylcytosine
  modified_base 67: mod_base = OTHER; note = 2'-Omethylguanosine
  modified_base 68: mod_base = OTHER; note = 2'-Omethylguanosine
  modified_base 69: mod_base = OTHER; note = 2'-fluoroadenosine
  modified_base 70: mod_base = OTHER; note = 2'-fluoroguanosine
  modified_base 71: mod_base = OTHER; note = 2'-Omethyluridine
  modified_base 73: mod_base = OTHER; note = 2'-Omethylguanosine
  modified_base 74: mod_base = OTHER; note = Cytosine phosphorothiorate
  modified_base 75: mod_base = OTHER; note = 2'-fluorocytosine phosphorothiorate
  misc_feature 1..9: note = RNA
  misc_feature 10: note = DNA
  misc_feature 11..76: note = RNA

SEQ ID NO: 4083 - DNA, 76 bp, synthetic construct; identical to SEQ ID NO: 1924
  source 1..76: mol_type = other DNA
  modified_base 1: mod_base = OTHER; note = 2'-Omethylguanosine phosphorothiorate
  modified_base 2: mod_base = OTHER; note = 2'-Omethylguanosine
  modified_base 3: mod_base = OTHER; note = 2'-O-(2-Methoxyethyl) 5-methylcytosine
  modified_base 18: mod_base = OTHER; note = 2'-Omethylguanosine
  modified_base 30: mod_base = OTHER; note = Guanosine phosphorothiorate
  modified_base 52: mod_base = OTHER; note = 2'-fluoroguanosine
  modified_base 74: mod_base = OTHER; note = Cytosine phosphorothiorate
  modified_base 75: mod_base = OTHER; note = 2'-Omethylcytosine phosphorothiorate
  modified_base 76: mod_base = OTHER; note = 2'-Omethyladenosine
  misc_feature 1..30: note = RNA
  misc_feature 31: note = DNA
  misc_feature 32..76: note = RNA

SEQ ID NO: 4084 - RNA, 76 nt, synthetic construct
  source 1..76: mol_type = other RNA
ggctccgtggcgcaatggatagcgcattgggcttcaaactcaaaggttccgggttcgagtcccggcggggtcgcca

SEQ ID NO: 4085 - RNA, 75 nt, synthetic construct; identical to SEQ ID NO: 1045
  source 1..75: mol_type = other RNA
  modified_base 1: mod_base = OTHER; note = 2'-Omethylguanosine phosphorothiorate
  modified_base 2: mod_base = OTHER; note = 2'-Omethylguanosine
  modified_base 20: mod_base = OTHER; note = 2'-fluoroadenosine
  modified_base 21: mod_base = OTHER; note = 2'-fluoroadenosine
  modified_base 22: mod_base = OTHER; note = Guanosine phosphorothiorate
  modified_base 42: mod_base = OTHER; note = 2'-fluoroadenosine
  modified_base 43: mod_base = OTHER; note = 2'-fluoroguanosine phosphorothiorate
  modified_base 51: mod_base = OTHER; note = Adenosine phosphorothiorate
  modified_base 52: mod_base = OTHER; note = 2'-fluoroguanosine
  modified_base 59: mod_base = OTHER; note = 2'-fluorouridine
  modified_base 65: mod_base = OTHER; note = Uridine phosphorothiorate
  modified_base 66: mod_base = OTHER; note = 2'-fluoroguanosine
  modified_base 68: mod_base = OTHER; note = Adenosine phosphorothiorate
  modified_base 69: mod_base = OTHER; note = 2'-fluoroadenosine
  modified_base 73: mod_base = OTHER; note = Cytosine phosphorothiorate
  modified_base 74: mod_base = OTHER; note = 2'-Omethylcytosine

SEQ ID NO: 4086 - RNA, 85 nt, synthetic construct; identical to SEQ ID NO: 3286
  source 1..85: mol_type = other RNA
  modified_base 1: mod_base = OTHER; note = 2'-Omethylcytosine
  modified_base 3: mod_base = OTHER; note = 2'-fluoroadenosine
  modified_base 17: mod_base = OTHER; note = Guanosine phosphorothiorate
  modified_base 23: mod_base = OTHER; note = 2'-fluoroguanosine
  modified_base 29: mod_base = OTHER; note = 2'-fluoroguanosine
  modified_base 32: mod_base = OTHER; note = 2'-fluorouridine
  modified_base 34: mod_base = OTHER; note = 2'-fluorouridine phosphorothiorate
  modified_base 38: mod_base = OTHER; note = 2'-Omethyluridine
  modified_base 45: mod_base = OTHER; note = 2'-fluoroguanosine phosphorothiorate
  modified_base 48: mod_base = OTHER; note = Adenosine phosphorothiorate
  modified_base 56: mod_base = OTHER; note = 2'-Omethylguanosine
  modified_base 58: mod_base = OTHER; note = 2'-Omethylguanosine
  modified_base 61: mod_base = OTHER; note = 2'-fluoroguanosine
  modified_base 79: mod_base = OTHER; note = 2'-fluoroguanosine
  modified_base 84: mod_base = OTHER; note = 2'-Omethylcytosine phosphorothiorate

SEQ ID NO: 4087 - RNA, 76 nt, synthetic construct; identical to SEQ ID NO: 3318
  source 1..76: mol_type = other RNA
  modified_base 1: mod_base = OTHER; note = 2'-Omethylcytosine
  modified_base 65: mod_base = OTHER; note = 2'-Omethylcytosine

SEQ ID NO: 4088 - RNA, 76 nt, synthetic construct; identical to SEQ ID NO: 625
  source 1..76: mol_type = other RNA
  modified_base 1: mod_base = OTHER; note = 2'-Omethylguanosine phosphorothiorate
  modified_base 2: mod_base = OTHER; note = 2'-Omethylguanosine phosphorothiorate
  modified_base 3: mod_base = OTHER; note = 2'-Omethylcytosine phosphorothiorate
  modified_base 4: mod_base = OTHER; note = 2'-Omethyluridine phosphorothiorate
  modified_base 5: mod_base = OTHER; note = 2'-Omethylcytosine phosphorothiorate
  modified_base 6: mod_base = OTHER; note = 2'-Omethylcytosine phosphorothiorate
  modified_base 10: mod_base = OTHER; note = 2'-Omethylguanosine
  modified_base 11: mod_base = OTHER; note = 2'-Omethylcytosine
  modified_base 12: mod_base = OTHER; note = 2'-Omethylguanosine
  modified_base 13: mod_base = OTHER; note = 2'-Omethylcytosine
  modified_base 22: mod_base = OTHER; note = 2'-Omethylguanosine
  modified_base 23: mod_base = OTHER; note = 2'-Omethylcytosine
  modified_base 24: mod_base = OTHER; note = 2'-Omethylguanosine
  modified_base 25: mod_base = OTHER; note = 2'-Omethylcytosine
  modified_base 40: mod_base = OTHER; note = 2'-fluorouridine
  modified_base 41: mod_base = OTHER; note = 2'-fluorocytosine
  modified_base 42: mod_base = OTHER; note = 2'-fluoroadenosine
  modified_base 43: mod_base = OTHER; note = 2'-fluoroadenosine
  modified_base 49: mod_base = OTHER; note = 2'-Omethylcytosine
  modified_base 50: mod_base = OTHER; note = 2'-Omethylcytosine
  modified_base 51: mod_base = OTHER; note = 2'-Omethylguanosine
  modified_base 52: mod_base = OTHER; note = 2'-Omethylguanosine
  modified_base 53: mod_base = OTHER; note = 2'-Omethylguanosine
  modified_base 54: mod_base = OTHER; note = Uridine phosphorothiorate
  modified_base 55: mod_base = OTHER; note = Uridine phosphorothiorate
  modified_base 56: mod_base = OTHER; note = Cytosine phosphorothiorate
  modified_base 57: mod_base = OTHER; note = Guanosine phosphorothiorate
  modified_base 61: mod_base = OTHER; note = 2'-Omethylcytosine
  modified_base 62: mod_base = OTHER; note = 2'-Omethylcytosine
  modified_base 63: mod_base = OTHER; note = 2'-Omethylcytosine
  modified_base 64: mod_base = OTHER; note = 2'-Omethylguanosine
  modified_base 65: mod_base = OTHER; note = 2'-Omethylguanosine
  modified_base 66: mod_base = OTHER; note = 2'-Omethylcytosine
  modified_base 67: mod_base = OTHER; note = 2'-Omethylguanosine
  modified_base 68: mod_base = OTHER; note = 2'-Omethylguanosine
  modified_base 69: mod_base = OTHER; note = 2'-Omethyladenosine

SEQ ID NO: 4089 - RNA, 75 nt, synthetic construct; identical to SEQ ID NO: 1045
  source 1..75: mol_type = other RNA
  modified_base 2: mod_base = OTHER; note = 2'-Omethylguanosine phosphorothiorate
  modified_base 16: mod_base = OTHER; note = 2'-Omethyluridine phosphorothiorate
  modified_base 17: mod_base = OTHER; note = 2'-Omethylguanosine phosphorothiorate
  modified_base 18: mod_base = OTHER; note = 2'-Omethylguanosine
  modified_base 40: mod_base = OTHER; note = 2'-Omethylcytosine phosphorothiorate
  modified_base 52: mod_base = OTHER; note = 2'-Omethylguanosine
  modified_base 53: mod_base = OTHER; note = 2'-Omethyluridine phosphorothiorate
  modified_base 54: mod_base = OTHER; note = 2'-Omethyluridine phosphorothiorate
  modified_base 55: mod_base = OTHER; note = 2'-Omethylcytosine phosphorothiorate
  modified_base 56: mod_base = OTHER; note = 2'-Omethylguanosine
  modified_base 63: mod_base = OTHER; note = 2'-Omethylguanosine
  modified_base 64: mod_base = OTHER; note = 2'-Omethylguanosine
  modified_base 72: mod_base = OTHER; note = 2'-Omethyluridine
  modified_base 74: mod_base = OTHER; note = 2'-Omethylcytosine phosphorothiorate

SEQ ID NO: 4090 - RNA, 73 nt, synthetic construct; identical to SEQ ID NO: 935
  source 1..73: mol_type = other RNA
  modified_base 1: mod_base = OTHER; note = 2'-Omethylguanosine phosphorothiorate
  modified_base 2: mod_base = OTHER; note = 2'-Omethylguanosine phosphorothiorate
  modified_base 17: mod_base = OTHER; note = Guanosine phosphorothiorate
  modified_base 25: mod_base = OTHER; note = 2'-fluorocytosine
  modified_base 57: mod_base = OTHER; note = 2'-O-(2-Methoxyethyl) guanosine
  modified_base 73: mod_base = OTHER; note = 2'-Omethylguanosine

SEQ ID NO: 4091 - RNA, 75 nt, synthetic construct; identical to SEQ ID NO: 3306
  source 1..75: mol_type = other RNA
  modified_base 1: mod_base = OTHER; note = 2'-Omethylguanosine phosphorothiorate
  modified_base 2: mod_base = OTHER; note = 2'-Omethyladenosine
  modified_base 3: mod_base = OTHER; note = 2'-Omethylcytosine
  modified_base 4: mod_base = OTHER; note = 2'-Omethylcytosine
  modified_base 5: mod_base = OTHER; note = 2'-Omethyluridine
  modified_base 6: mod_base = OTHER; note = 2'-Omethylcytosine
  modified_base 42: mod_base = OTHER; note = 2'-Omethyladenosine
  modified_base 43: mod_base = OTHER; note = 2'-Omethyladenosine
  modified_base 44: mod_base = OTHER; note = 2'-Omethylguanosine
  modified_base 45: mod_base = OTHER; note = 2'-fluoroguanosine
  modified_base 46: mod_base = OTHER; note = 2'-fluorouridine
  modified_base 47: mod_base = OTHER; note = 2'-Omethyluridine
  modified_base 48: mod_base = OTHER; note = 2'-Omethylguanosine
  modified_base 72: mod_base = OTHER; note = 2'-Omethyladenosine

SEQ ID NO: 4092 - DNA, 73 bp, synthetic construct; identical to SEQ ID NO: 3380
  source 1..73: mol_type = other DNA
  modified_base 1: mod_base = OTHER; note = 2'-Omethylguanosine phosphorothiorate
  modified_base 2: mod_base = OTHER; note = 2'-Omethylguanosine phosphorothiorate
  modified_base 45: mod_base = OTHER; note = Guanosine phosphorothiorate
  modified_base 65: mod_base = OTHER; note = 2'-Omethylguanosine
  modified_base 72: mod_base = OTHER; note = 2'-Omethylcytosine
  misc_feature 1..45: note = RNA
  misc_feature 46: note = DNA
  misc_feature 47..73: note = RNA

SEQ ID NO: 4093 - RNA, 76 nt, synthetic construct; identical to SEQ ID NO: 3289
  source 1..76: mol_type = other RNA
  modified_base 1: mod_base = OTHER; note = 2'-Omethylguanosine
  modified_base 10: mod_base = OTHER; note = 2'-Omethylguanosine
  modified_base 11: mod_base = OTHER; note = 2'-Omethylcytosine
  modified_base 12: mod_base = OTHER; note = 2'-Omethyluridine
  modified_base 13: mod_base = OTHER; note = 2'-Omethylcytosine
  modified_base 18: mod_base = OTHER; note = 2'-Omethylguanosine
  modified_base 19: mod_base = OTHER; note = 2'-Omethylguanosine
  modified_base 25: mod_base = OTHER; note = 2'-Omethylcytosine
  modified_base 33: mod_base = OTHER; note = Uridine phosphorothiorate
  modified_base 34: mod_base = OTHER; note = 2'-Omethyluridine
  modified_base 35: mod_base = OTHER; note = Uridine phosphorothiorate
  modified_base 37: mod_base = OTHER; note = Adenosine phosphorothiorate
  modified_base 38: mod_base = OTHER; note = Adenosine phosphorothiorate
  modified_base 41: mod_base = OTHER; note = 2'-fluorouridine
  modified_base 42: mod_base = OTHER; note = 2'-Omethylguanosine
  modified_base 43: mod_base = OTHER; note = 2'-Omethyladenosine
  modified_base 44: mod_base = OTHER; note = 2'-fluoroguanosine
  modified_base 49: mod_base = OTHER; note = 2'-Omethylcytosine
  modified_base 50: mod_base = OTHER; note = 2'-Omethyladenosine
  modified_base 52: mod_base = OTHER; note = 2'-Omethylguanosine
  modified_base 54: mod_base = OTHER; note = Uridine phosphorothiorate
  modified_base 55: mod_base = OTHER; note = Uridine phosphorothiorate
  modified_base 61: mod_base = OTHER; note = 2'-Omethylcytosine
  modified_base 65: mod_base = OTHER; note = 2'-Omethylguanosine
  modified_base 73: mod_base = OTHER; note = 2'-Omethylguanosine

SEQ ID NO: 4094 - RNA, 75 nt, synthetic construct; identical to SEQ ID NO: 3299
  source 1..75: mol_type = other RNA
  modified_base 5: mod_base = OTHER; note = 2'-Omethylguanosine phosphorothiorate
  modified_base 14: mod_base = OTHER; note = 2'-fluoroguanosine
  modified_base 15: mod_base = OTHER; note = 2'-fluorouridine phosphorothiorate
  modified_base 19: mod_base = OTHER; note = 2'-fluorouridine phosphorothiorate
  modified_base 20: mod_base = OTHER; note = 2'-fluoroadenosine
  modified_base 21: mod_base = OTHER; note = 2'-fluoroguanosine
  modified_base 40: mod_base = OTHER; note = 2'-fluorouridine
  modified_base 41: mod_base = OTHER; note = 2'-fluoroguanosine
  modified_base 42: mod_base = OTHER; note = 2'-fluoroadenosine
  modified_base 50: mod_base = OTHER; note = Guanosine phosphorothiorate
  modified_base 51: mod_base = OTHER; note = Guanosine phosphorothiorate
  modified_base 56: mod_base = OTHER; note = 2'-Omethyladenosine phosphorothiorate
  modified_base 58: mod_base = OTHER; note = 2'-Omethylguanosine phosphorothiorate
  modified_base 64: mod_base = OTHER; note = 2'-fluoroguanosine phosphorothiorate
  modified_base 72: mod_base = OTHER; note = 2'-fluoroguanosine phosphorothiorate
  modified_base 73: mod_base = OTHER; note = Cytosine phosphorothiorate
  modified_base 74: mod_base = OTHER; note = 2'-fluorocytosine phosphorothiorate

SEQ ID NO: 4095 - RNA, 76 nt, synthetic construct; identical to SEQ ID NO: 3318
  source 1..76: mol_type = other RNA
  modified_base 1: mod_base = OTHER; note = 2'-Omethylcytosine
  modified_base 43: mod_base = OTHER; note = 2'-Omethyluridine

SEQ ID NO: 4096 - RNA, 86 nt, synthetic construct; identical to SEQ ID NO: 3290
  source 1..86: mol_type = other RNA
  modified_base 44: mod_base = OTHER; note = 2'-Omethyluridine

SEQ ID NO: 4097 - RNA, 85 nt, synthetic construct; identical to SEQ ID NO: 3310
  source 1..85: mol_type = other RNA
  modified_base 1: mod_base = OTHER; note = 2'-Omethylcytosine phosphorothiorate
  modified_base 2: mod_base = OTHER; note = 2'-fluorocytosine phosphorothiorate
  modified_base 3: mod_base = OTHER; note = 2'-Omethyladenosine
  modified_base 10: mod_base = OTHER; note = Cytosine phosphorothiorate
  modified_base 30: mod_base = OTHER; note = 2'-fluoroadenosine
  modified_base 52: mod_base = OTHER; note = Guanosine phosphorothiorate
  modified_base 53: mod_base = OTHER; note = Uridine phosphorothiorate
  modified_base 60: mod_base = OTHER; note = 2'-fluoroguanosine
  modified_base 84: mod_base = OTHER; note = 2'-Omethylcytosine

SEQ ID NO: 4098 - RNA, 75 nt, synthetic construct; identical to SEQ ID NO: 3311
  source 1..75: mol_type = other RNA
  modified_base 2: mod_base = OTHER; note = 2'-Omethylguanosine phosphorothiorate
  modified_base 12: mod_base = OTHER; note = Guanosine phosphorothiorate
  modified_base 14: mod_base = OTHER; note = 2'-Omethyladenosine
  modified_base 20: mod_base = OTHER; note = Adenosine phosphorothiorate
  modified_base 22: mod_base = OTHER; note = 2'-fluoroguanosine
  modified_base 48: mod_base = OTHER; note = 2'-fluorocytosine
  modified_base 56: mod_base = OTHER; note = 2'-Omethylguanosine
  modified_base 68: mod_base = OTHER; note = 2'-fluoroadenosine
  modified_base 73: mod_base = OTHER; note = Cytosine phosphorothiorate
  modified_base 74: mod_base = OTHER; note = Cytosine phosphorothiorate

SEQ ID NO: 4099 - RNA, 76 nt, synthetic construct; identical to SEQ ID NO: 3289
  source 1..76: mol_type = other RNA
  modified_base 1: mod_base = OTHER; note = 2'-Omethylguanosine phosphorothiorate
  modified_base 2: mod_base = OTHER; note = 2'-Omethylcytosine phosphorothiorate
  modified_base 74: mod_base = OTHER; note = Cytosine phosphorothiorate
  modified_base 75: mod_base = OTHER; note = 2'-Omethylcytosine phosphorothiorate

SEQ ID NO: 4100 - RNA, 76 nt, synthetic construct; identical to SEQ ID NO: 3289
  source 1..76: mol_type = other RNA
  modified_base 27: mod_base = OTHER; note = 2'-Omethyluridine
  modified_base 28: mod_base = OTHER; note = 2'-Omethylcytosine
  modified_base 29: mod_base = OTHER; note = 2'-Omethyladenosine
  modified_base 30: mod_base = OTHER; note = 2'-Omethylguanosine
  modified_base 31: mod_base = OTHER; note = 2'-Omethyladenosine

SEQ ID NO: 4101 - RNA, 76 nt, synthetic construct; identical to SEQ ID NO: 625
  source 1..76: mol_type = other RNA
  modified_base 1: mod_base = OTHER; note = 2'-Omethylguanosine
  modified_base 2: mod_base = OTHER; note = 2'-fluoroguanosine
  modified_base 3: mod_base = OTHER; note = Cytosine phosphorothiorate
  modified_base 5: mod_base = OTHER; note = 2'-Omethylcytosine
  modified_base 6: mod_base = OTHER; note = Cytosine phosphorothiorate
  modified_base 10: mod_base = OTHER; note = 2'-Omethylguanosine
  modified_base 12: mod_base = OTHER; note = 2'-Omethylguanosine
  modified_base 13: mod_base = OTHER; note = 2'-fluorocytosine
  modified_base 16: mod_base = OTHER; note = 2'-fluorouridine
  modified_base 17: mod_base = OTHER; note = Guanosine phosphorothiorate
  modified_base 25: mod_base = OTHER; note = Cytosine phosphorothiorate
  modified_base 26: mod_base = OTHER; note = 2'-Omethyladenosine
  modified_base 29: mod_base = OTHER; note = Guanosine phosphorothiorate
  modified_base 30: mod_base = OTHER; note = 2'-Omethylguanosine
  modified_base 39: mod_base = OTHER; note = 2'-Omethyluridine
  modified_base 43: mod_base = OTHER; note = 2'-fluoroadenosine
  modified_base 44: mod_base = OTHER; note = 2'-Omethyladenosine
  modified_base 45: mod_base = OTHER; note = 2'-Omethylguanosine phosphorothiorate
  modified_base 46: mod_base = OTHER; note = 2'-Omethylguanosine
  modified_base 47: mod_base = OTHER; note = Uridine phosphorothiorate
  modified_base 48: mod_base = OTHER; note = 2'-Omethyluridine
  modified_base 49: mod_base = OTHER; note = 2'-fluorocytosine
  modified_base 50: mod_base = OTHER; note = 2'-Omethylcytosine
  modified_base 51: mod_base = OTHER; note = Guanosine phosphorothiorate
  modified_base 52: mod_base = OTHER; note = 2'-fluoroguanosine
  modified_base 53: mod_base = OTHER; note = 2'-fluoroguanosine
  modified_base 54: mod_base = OTHER; note = 2'-fluorouridine
  modified_base 56: mod_base = OTHER; note = 2'-fluorocytosine
  modified_base 58: mod_base = OTHER; note = Adenosine phosphorothiorate
  modified_base 61: mod_base = OTHER; note = 2'-fluorocytosine
  modified_base 62: mod_base = OTHER; note = 2'-Omethylcytosine
  modified_base 63: mod_base = OTHER; note = 2'-Omethylcytosine
  modified_base 67: mod_base = OTHER; note = 2'-Omethylguanosine
  modified_base 70: mod_base = OTHER; note = 2'-fluoroguanosine phosphorothiorate
  modified_base 71: mod_base = OTHER; note = 2'-Omethyluridine
  modified_base 72: mod_base = OTHER; note = 2'-Omethylcytosine
  modified_base 73: mod_base = OTHER; note = 2'-Omethylguanosine phosphorothiorate
  modified_base 74: mod_base = OTHER; note = 2'-fluorocytosine

SEQ ID NO: 4102 - RNA, 85 nt, synthetic construct; identical to SEQ ID NO: 3297
  source 1..85: mol_type = other RNA
  modified_base 1: mod_base = OTHER; note = 2'-Omethylguanosine
  modified_base 2: mod_base = OTHER; note = 2'-Omethylcytosine
  modified_base 3: mod_base = OTHER; note = 2'-Omethyluridine
  modified_base 4: mod_base = OTHER; note = 2'-Omethylguanosine
  modified_base 5: mod_base = OTHER; note = 2'-Omethyluridine
  modified_base 6: mod_base = OTHER; note = 2'-Omethylguanosine
  modified_base 13: mod_base = OTHER; note = 2'-Omethylguanosine
  modified_base 17: mod_base = OTHER; note = 2'-Omethylguanosine
  modified_base 18: mod_base = OTHER; note = 2'-Omethylguanosine
  modified_base 25: mod_base = OTHER; note = 2'-Omethylcytosine
  modified_base 33: mod_base = OTHER; note = 2'-fluorouridine
  modified_base 34: mod_base = OTHER; note = 2'-Omethyluridine
  modified_base 35: mod_base = OTHER; note = Cytosine phosphorothiorate
  modified_base 37: mod_base = OTHER; note = Adenosine phosphorothiorate
  modified_base 38: mod_base = OTHER; note = Adenosine phosphorothiorate
  modified_base 41: mod_base = OTHER; note = 2'-Omethylcytosine
  modified_base 42: mod_base = OTHER; note = 2'-Omethyladenosine
  modified_base 43: mod_base = OTHER; note = 2'-Omethyladenosine
  modified_base 44: mod_base = OTHER; note = 2'-Omethyluridine
  modified_base 58: mod_base = OTHER; note = 2'-Omethylguanosine
  modified_base 59: mod_base = OTHER; note = 2'-Omethylcytosine
  modified_base 60: mod_base = OTHER; note = 2'-Omethyladenosine
  modified_base 61: mod_base = OTHER; note = 2'-Omethylguanosine
  modified_base 62: mod_base = OTHER; note = 2'-Omethylguanosine
  modified_base 63: mod_base = OTHER; note = Uridine phosphorothiorate
  modified_base 64: mod_base = OTHER; note = Uridine phosphorothiorate
  modified_base 70: mod_base = OTHER; note = 2'-Omethylcytosine
  modified_base 74: mod_base = OTHER; note = 2'-Omethylcytosine
  modified_base 82: mod_base = OTHER; note = 2'-Omethylguanosine

SEQ ID NO: 4103 - RNA, 75 nt, synthetic construct; identical to SEQ ID NO: 3311
  source 1..75: mol_type = other RNA
  modified_base 1: mod_base = OTHER; note = 2'-Omethylguanosine phosphorothiorate
  modified_base 2: mod_base = OTHER; note = 2'-Omethylguanosine phosphorothiorate
  modified_base 11: mod_base = OTHER; note = Uridine phosphorothiorate
  modified_base 12: mod_base = OTHER; note = 2'-fluoroguanosine
  modified_base 15: mod_base = OTHER; note = 2'-fluoroadenosine
  modified_base 19: mod_base = OTHER; note = 2'-fluorouridine
  modified_base 22: mod_base = OTHER; note = Guanosine phosphorothiorate
  modified_base 23: mod_base = OTHER; note = 2'-fluorocytosine
  modified_base 28: mod_base = OTHER; note = 2'-fluorouridine
  modified_base 29: mod_base = OTHER; note = 2'-Omethylguanosine
  modified_base 40: mod_base = OTHER; note = 2'-Omethylcytosine
  modified_base 48: mod_base = OTHER; note = 2'-fluorocytosine
  modified_base 62: mod_base = OTHER; note = Cytosine phosphorothiorate
  modified_base 68: mod_base = OTHER; note = 2'-fluoroadenosine
  modified_base 73: mod_base = OTHER; note = Cytosine phosphorothiorate
  modified_base 74: mod_base = OTHER; note = 2'-fluorocytosine phosphorothiorate

SEQ ID NO: 4104 - RNA, 85 nt, synthetic construct
  source 1..85: mol_type = other RNA
gctgtgatggccgagtggttaaggcgttggacttcaaatccaatgggatcttcccgcgcaggttcgaaccctgctcgcagcgcca

SEQ ID NO: 4105 - RNA, 76 nt, synthetic construct; identical to SEQ ID NO: 625
  source 1..76: mol_type = other RNA
  modified_base 1: mod_base = OTHER; note = 2'-Omethylguanosine phosphorothiorate
  modified_base 2: mod_base = OTHER; note = 2'-Omethylguanosine
  modified_base 3: mod_base = OTHER; note = 2'-Omethylcytosine
  modified_base 4: mod_base = OTHER; note = 2'-Omethyluridine
  modified_base 5: mod_base = OTHER; note = 2'-Omethylcytosine
  modified_base 6: mod_base = OTHER; note = 2'-Omethylcytosine
  modified_base 10: mod_base = OTHER; note = 2'-Omethylguanosine
  modified_base 11: mod_base = OTHER; note = 2'-Omethylcytosine
  modified_base 12: mod_base = OTHER; note = 2'-Omethylguanosine
  modified_base 13: mod_base = OTHER; note = 2'-Omethylcytosine
  modified_base 14: mod_base = OTHER; note = 2'-Omethyladenosine
  modified_base 15: mod_base = OTHER; note = 2'-fluoroadenosine
  modified_base 16: mod_base = OTHER; note = 2'-Omethyluridine
  modified_base 17: mod_base = OTHER; note = 2'-Omethylguanosine
  modified_base 18: mod_base = OTHER; note = 2'-Omethylguanosine
  modified_base 19: mod_base = OTHER; note = 2'-fluoroadenosine
  modified_base 20: mod_base = OTHER; note = 2'-Omethyluridine
  modified_base 49: mod_base = OTHER; note = 2'-Omethylcytosine
  modified_base 50: mod_base = OTHER; note = 2'-Omethylcytosine
  modified_base 51: mod_base = OTHER; note = 2'-Omethylguanosine
  modified_base 52: mod_base = OTHER; note = 2'-Omethylguanosine
  modified_base 53: mod_base = OTHER; note = 2'-Omethylguanosine
  modified_base 54: mod_base = OTHER; note = 2'-Omethyluridine
  modified_base 56: mod_base = OTHER; note = 2'-Omethylcytosine
  modified_base 57: mod_base = OTHER; note = 2'-fluoroguanosine
  modified_base 59: mod_base = OTHER; note = 2'-Omethylguanosine
  modified_base 73: mod_base = OTHER; note = 2'-Omethylguanosine

SEQ ID NO: 4106 - RNA, 76 nt, synthetic construct; identical to SEQ ID NO: 3332
  source 1..76: mol_type = other RNA
  modified_base 1: mod_base = OTHER; note = 2'-Omethylguanosine
  modified_base 2: mod_base = OTHER; note = 2'-Omethylguanosine
  modified_base 3: mod_base = OTHER; note = 2'-Omethylcytosine
  modified_base 4: mod_base = OTHER; note = 2'-Omethylcytosine
  modified_base 5: mod_base = OTHER; note = 2'-Omethylcytosine
  modified_base 6: mod_base = OTHER; note = 2'-Omethylcytosine
  modified_base 14: mod_base = OTHER; note = 2'-Omethyladenosine
  modified_base 15: mod_base = OTHER; note = 2'-Omethyladenosine
  modified_base 16: mod_base = OTHER; note = 2'-Omethyluridine
  modified_base 17: mod_base = OTHER; note = 2'-Omethylguanosine
  modified_base 18: mod_base = OTHER; note = 2'-Omethylguanosine
  modified_base 20: mod_base = OTHER; note = 2'-Omethyluridine
  modified_base 25: mod_base = OTHER; note = 2'-Omethylcytosine
  modified_base 41: mod_base = OTHER; note = 2'-Omethylcytosine
  modified_base 42: mod_base = OTHER; note = 2'-Omethyladenosine
  modified_base 43: mod_base = OTHER; note = 2'-Omethyladenosine
  modified_base 44: mod_base = OTHER; note = 2'-Omethyladenosine
  modified_base 49: mod_base = OTHER; note = 2'-Omethylguanosine
  modified_base 50: mod_base = OTHER; note = 2'-Omethylcytosine
  modified_base 52: mod_base = OTHER; note = 2'-Omethylguanosine
  modified_base 54: mod_base = OTHER; note = 2'-Omethyluridine
  modified_base 55: mod_base = OTHER; note = Uridine phosphorothiorate
  modified_base 56: mod_base = OTHER; note = 2'-Omethylcytosine
  modified_base 57: mod_base = OTHER; note = 2'-fluoroguanosine
  modified_base 59: mod_base = OTHER; note = 2'-Omethylguanosine
  modified_base 61: mod_base = OTHER; note = 2'-Omethylcytosine
  modified_base 62: mod_base = OTHER; note = 2'-Omethylcytosine
  modified_base 63: mod_base = OTHER; note = 2'-fluorocytosine
  modified_base 64: mod_base = OTHER; note = 2'-Omethylguanosine
  modified_base 65: mod_base = OTHER; note = 2'-Omethylcytosine
  modified_base 73: mod_base = OTHER; note = 2'-Omethylguanosine

SEQ ID NO: 4107 - RNA, 73 nt, synthetic construct; identical to SEQ ID NO: 935
  source 1..73: mol_type = other RNA
  modified_base 1: mod_base = OTHER; note = 2'-Omethylguanosine phosphorothiorate
  modified_base 2: mod_base = OTHER; note = 2'-Omethylguanosine
  modified_base 3: mod_base = OTHER; note = 2'-Omethylcytosine
  modified_base 4: mod_base = OTHER; note = 2'-Omethyluridine
  modified_base 5: mod_base = OTHER; note = 2'-Omethylcytosine
  modified_base 6: mod_base = OTHER; note = 2'-Omethylcytosine
  modified_base 14: mod_base = OTHER; note = 2'-Omethyladenosine
  modified_base 15: mod_base = OTHER; note = 2'-fluoroadenosine
  modified_base 16: mod_base = OTHER; note = 2'-Omethyluridine
  modified_base 17: mod_base = OTHER; note = 2'-Omethylguanosine
  modified_base 18: mod_base = OTHER; note = 2'-Omethylguanosine
  modified_base 19: mod_base = OTHER; note = 2'-fluoroadenosine
  modified_base 20: mod_base = OTHER; note = 2'-Omethyluridine
  modified_base 54: mod_base = OTHER; note = 2'-Omethyluridine
  modified_base 56: mod_base = OTHER; note = 2'-Omethylcytosine
  modified_base 57: mod_base = OTHER; note = 2'-fluoroguanosine
  modified_base 59: mod_base = OTHER; note = 2'-Omethylguanosine
  modified_base 73: mod_base = OTHER; note = 2'-Omethylguanosine

SEQ ID NO: 4108 - RNA, 76 nt, synthetic construct; identical to SEQ ID NO: 3295
  source 1..76: mol_type = other RNA
  modified_base 1: mod_base = OTHER; note = Cytosine phosphorothiorate
  modified_base 2: mod_base = OTHER; note = 2'-fluorocytosine phosphorothiorate
  modified_base 3: mod_base = OTHER; note = 2'-Omethyluridine phosphorothiorate
  modified_base 8: mod_base = OTHER; note = 2'-Omethyluridine phosphorothiorate
  modified_base 10: mod_base = OTHER; note = 2'-fluoroguanosine
  modified_base 38: mod_base = OTHER; note = 2'-fluoroadenosine phosphorothiorate
  modified_base 42: mod_base = OTHER; note = 2'-Omethyluridine phosphorothiorate
  modified_base 52: mod_base = OTHER; note = 2'-fluoroguanosine phosphorothiorate

SEQ ID NO: 4109 - RNA, 76 nt, synthetic construct; identical to SEQ ID NO: 625
  source 1..76: mol_type = other RNA
  modified_base 6: mod_base = OTHER; note = 2'-Omethylcytosine
  modified_base 10: mod_base = OTHER; note = 2'-fluoroguanosine
  modified_base 12: mod_base = OTHER; note = 2'-Omethylguanosine phosphorothiorate
  modified_base 13: mod_base = OTHER; note = Cytosine phosphorothiorate
  modified_base 14: mod_base = OTHER; note = 2'-fluoroadenosine
  modified_base 19: mod_base = OTHER; note = Adenosine phosphorothiorate
  modified_base 20: mod_base = OTHER; note = 2'-Omethyluridine
  modified_base 21: mod_base = OTHER; note = Adenosine phosphorothiorate
  modified_base 22: mod_base = OTHER; note = 2'-fluoroguanosine
  modified_base 23: mod_base = OTHER; note = 2'-Omethylcytosine
  modified_base 26: mod_base = OTHER; note = Adenosine phosphorothiorate
  modified_base 27: mod_base = OTHER; note = 2'-fluorouridine
  modified_base 31: mod_base = OTHER; note = 2'-Omethyladenosine
  modified_base 33: mod_base = OTHER; note = Uridine phosphorothiorate
  modified_base 34: mod_base = OTHER; note = Uridine phosphorothiorate
  modified_base 41: mod_base = OTHER; note = 2'-fluorocytosine phosphorothiorate
  modified_base 42: mod_base = OTHER; note = 2'-fluoroadenosine
  modified_base 46: mod_base = OTHER; note = 2'-fluoroguanosine
  modified_base 49: mod_base = OTHER; note = 2'-fluorocytosine
  modified_base 52: mod_base = OTHER; note = 2'-fluoroguanosine
  modified_base 57: mod_base = OTHER; note = Guanosine phosphorothiorate
  modified_base 58: mod_base = OTHER; note = Adenosine phosphorothiorate
  modified_base 61: mod_base = OTHER; note = Cytosine phosphorothiorate
  modified_base 65: mod_base = OTHER; note = 2'-Omethylguanosine phosphorothiorate
  modified_base 66: mod_base = OTHER; note = 2'-fluorocytosine
  modified_base 68: mod_base = OTHER; note = Guanosine phosphorothiorate
  modified_base 69: mod_base = OTHER; note = 2'-Omethyladenosine phosphorothiorate
  modified_base 70: mod_base = OTHER; note = 2'-fluoroguanosine phosphorothiorate
  modified_base 71: mod_base = OTHER; note = 2'-fluorouridine
  modified_base 72: mod_base = OTHER; note = 2'-Omethylcytosine phosphorothiorate
  modified_base 73: mod_base = OTHER; note = 2'-Omethylguanosine
  modified_base 75: mod_base = OTHER; note = Cytosine phosphorothiorate
  modified_base 76: mod_base = OTHER; note = 2'-Omethyladenosine

SEQ ID NO: 4110 - RNA, 85 nt, synthetic construct; identical to SEQ ID NO: 3288
  source 1..85: mol_type = other RNA
  modified_base 1: mod_base = OTHER; note = 2'-Omethylcytosine phosphorothiorate
  modified_base 14: mod_base = OTHER; note = Guanosine phosphorothiorate
  modified_base 17: mod_base = OTHER; note = 2'-Omethylguanosine
  modified_base 19: mod_base = OTHER; note = 2'-fluorouridine phosphorothiorate
  modified_base 35: mod_base = OTHER; note = Adenosine phosphorothiorate
  modified_base 46: mod_base = OTHER; note = 2'-Omethyladenosine
  modified_base 54: mod_base = OTHER; note = 2'-fluorocytosine
  modified_base 56: mod_base = OTHER; note = Guanosine phosphorothiorate
  modified_base 58: mod_base = OTHER; note = 2'-fluoroguanosine phosphorothiorate
  modified_base 84: mod_base = OTHER; note = 2'-fluorocytosine phosphorothiorate

SEQ ID NO: 4111 - RNA, 86 nt, synthetic construct; identical to SEQ ID NO: 3290
  source 1..86: mol_type = other RNA
  modified_base 6: mod_base = OTHER; note = Guanosine phosphorothiorate

SEQ ID NO: 4112 - RNA, 76 nt, synthetic construct; identical to SEQ ID NO: 3795
  source 1..76: mol_type = other RNA
  modified_base 1: mod_base = OTHER; note = 2'-Omethylguanosine phosphorothiorate
  modified_base 2: mod_base = OTHER; note = 2'-Omethylcytosine phosphorothiorate
  modified_base 52: mod_base = OTHER; note = Guanosine phosphorothiorate
  modified_base 74: mod_base = OTHER; note = Cytosine phosphorothiorate
  modified_base 75: mod_base = OTHER; note = 2'-Omethylcytosine

SEQ ID NO: 4113 - RNA, 75 nt, synthetic construct; identical to SEQ ID NO: 3306
  source 1..75: mol_type = other RNA
  modified_base 1: mod_base = OTHER; note = 2'-Omethylguanosine
  modified_base 2: mod_base = OTHER; note = 2'-Omethyladenosine
  modified_base 3: mod_base = OTHER; note = 2'-Omethylcytosine
  modified_base 4: mod_base = OTHER; note = 2'-Omethylcytosine
  modified_base 5: mod_base = OTHER; note = 2'-Omethyluridine
  modified_base 6: mod_base = OTHER; note = 2'-Omethylcytosine
  modified_base 13: mod_base = OTHER; note = 2'-Omethylcytosine
  modified_base 17: mod_base = OTHER; note = 2'-Omethylguanosine
  modified_base 18: mod_base = OTHER; note = 2'-Omethylguanosine
  modified_base 24: mod_base = OTHER; note = 2'-Omethylcytosine
  modified_base 32: mod_base = OTHER; note = Uridine phosphorothiorate
  modified_base 33: mod_base = OTHER; note = 2'-Omethylcytosine
  modified_base 34: mod_base = OTHER; note = Uridine phosphorothiorate
  modified_base 36: mod_base = OTHER; note = Guanosine phosphorothiorate
  modified_base 37: mod_base = OTHER; note = Adenosine phosphorothiorate
  modified_base 40: mod_base = OTHER; note = 2'-fluoroadenosine
  modified_base 41: mod_base = OTHER; note = 2'-Omethylguanosine
  modified_base 42: mod_base = OTHER; note = 2'-Omethyladenosine
  modified_base 43: mod_base = OTHER; note = 2'-fluoroadenosine
  modified_base 48: mod_base = OTHER; note = 2'-Omethylguanosine
  modified_base 49: mod_base = OTHER; note = 2'-Omethylcytosine
  modified_base 50: mod_base = OTHER; note = 2'-Omethylguanosine
  modified_base 51: mod_base = OTHER; note = 2'-Omethyluridine
  modified_base 52: mod_base = OTHER; note = 2'-Omethylguanosine
  modified_base 53: mod_base = OTHER; note = Uridine phosphorothiorate
  modified_base 54: mod_base = OTHER; note = Uridine phosphorothiorate
  modified_base 60: mod_base = OTHER; note = 2'-Omethylcytosine
  modified_base 64: mod_base = OTHER; note = 2'-Omethyluridine
  modified_base 72: mod_base = OTHER; note = 2'-Omethyladenosine

SEQ ID NO: 4114 - RNA, 85 nt, synthetic construct; identical to SEQ ID NO: 3297
  source 1..85: mol_type = other RNA
  modified_base 1: mod_base = OTHER; note = 2'-Omethylguanosine phosphorothiorate
  modified_base 4: mod_base = OTHER; note = 2'-fluoroguanosine phosphorothiorate
  modified_base 24: mod_base = OTHER; note = Guanosine phosphorothiorate
  modified_base 29: mod_base = OTHER; note = 2'-fluoroguanosine
  modified_base 30: mod_base = OTHER; note = 2'-fluoroguanosine
  modified_base 82: mod_base = OTHER; note = 2'-Omethylguanosine

SEQ ID NO: 4115 - RNA, 76 nt, synthetic construct; identical to SEQ ID NO: 625
  source 1..76: mol_type = other RNA
  modified_base 1: mod_base = OTHER; note = 2'-Omethylguanosine
  modified_base 5: mod_base = OTHER; note = 2'-Omethylcytosine phosphorothiorate
  modified_base 10: mod_base = OTHER; note = 2'-fluoroguanosine
  modified_base 14: mod_base = OTHER; note = 2'-Omethyladenosine
  modified_base 15: mod_base = OTHER; note = Adenosine phosphorothiorate
  modified_base 16: mod_base = OTHER; note = 2'-fluorouridine phosphorothiorate
  modified_base 17: mod_base = OTHER; note = 2'-Omethylguanosine
  modified_base 24: mod_base = OTHER; note = Guanosine phosphorothiorate
  modified_base 25: mod_base = OTHER; note = 2'-fluorocytosine
  modified_base 26: mod_base = OTHER; note = Adenosine phosphorothiorate
  modified_base 28: mod_base = OTHER; note = 2'-fluorouridine
  modified_base 29: mod_base = OTHER; note = 2'-Omethylguanosine
  modified_base 30: mod_base = OTHER; note = 2'-Omethylguanosine
  modified_base 36: mod_base = OTHER; note = Adenosine phosphorothiorate
  modified_base 38: mod_base = OTHER; note = 2'-fluoroadenosine
  modified_base 41: mod_base = OTHER; note = 2'-fluorocytosine
  modified_base 42: mod_base = OTHER; note = 2'-Omethyladenosine
  modified_base 43: mod_base = OTHER; note = 2'-Omethyladenosine
  modified_base 45: mod_base = OTHER; note = Guanosine phosphorothiorate
  modified_base 46: mod_base = OTHER; note = 2'-Omethylguanosine
  modified_base 48: mod_base = OTHER; note = 2'-fluorouridine phosphorothiorate
  modified_base 49: mod_base = OTHER; note = 2'-Omethylcytosine
  modified_base 54: mod_base = OTHER; note = 2'-fluorouridine
  modified_base 56: mod_base = OTHER; note = Cytosine phosphorothiorate
  modified_base 57: mod_base = OTHER; note = 2'-Omethylguanosine
  modified_base 58: mod_base = OTHER; note = Adenosine phosphorothiorate
  modified_base 59: mod_base = OTHER; note = 2'-fluoroguanosine
  modified_base 60: mod_base = OTHER; note = 2'-Omethyluridine
  modified_base 61: mod_base = OTHER; note = 2'-fluorocytosine phosphorothiorate
  modified_base 62: mod_base = OTHER; note = 2'-fluorocytosine
  modified_base 63: mod_base = OTHER; note = 2'-fluorocytosine
  modified_base 64: mod_base = OTHER; note = 2'-fluoroguanosine
  modified_base 65: mod_base = OTHER; note = Guanosine phosphorothiorate
  modified_base 66: mod_base = OTHER; note = Cytosine phosphorothiorate
  modified_base 67: mod_base = OTHER; note = 2'-fluoroguanosine
  modified_base 69: mod_base = OTHER; note = Adenosine phosphorothiorate
  modified_base 73: mod_base = OTHER; note = 2'-Omethylguanosine
  modified_base 75: mod_base = OTHER; note = 2'-fluorocytosine

SEQ ID NO: 4116 - RNA, 74 nt, synthetic construct; identical to SEQ ID NO: 3293
  source 1..74: mol_type = other RNA
  modified_base 1: mod_base = OTHER; note = 2'-Omethyladenosine phosphorothiorate
  modified_base 3: mod_base = OTHER; note = 2'-Omethylcytosine
  modified_base 34: mod_base = OTHER; note = Adenosine phosphorothiorate
  modified_base 44: mod_base = OTHER; note = 2'-fluoroguanosine phosphorothiorate
  modified_base 46: mod_base = OTHER; note = 2'-fluorouridine
  modified_base 50: mod_base = OTHER; note = Uridine phosphorothiorate
  modified_base 60: mod_base = OTHER; note = 2'-fluoroadenosine
  modified_base 73: mod_base = OTHER; note = 2'-Omethylcytosine phosphorothiorate

SEQ ID NO: 4117 - RNA, 75 nt, synthetic construct; identical to SEQ ID NO: 3311
  source 1..75: mol_type = other RNA
  modified_base 2: mod_base = OTHER; note = 2'-Omethylguanosine
  modified_base 4: mod_base = OTHER; note = 2'-fluorouridine
  modified_base 18: mod_base = OTHER; note = 2'-Omethylguanosine phosphorothiorate
  modified_base 20: mod_base = OTHER; note = Adenosine phosphorothiorate
  modified_base 21: mod_base = OTHER; note = 2'-fluoroadenosine
  modified_base 22: mod_base = OTHER; note = 2'-fluoroguanosine
  modified_base 30: mod_base = OTHER; note = 2'-fluoroguanosine
  modified_base 37: mod_base = OTHER; note = Adenosine phosphorothiorate
  modified_base 40: mod_base = OTHER; note = 2'-fluorocytosine
  modified_base 52: mod_base = OTHER; note = 2'-fluoroguanosine phosphorothiorate
  modified_base 53: mod_base = OTHER; note = Uridine phosphorothiorate
  modified_base 55: mod_base = OTHER; note = 2'-fluorocytosine phosphorothiorate
  modified_base 59: mod_base = OTHER; note = 2'-fluorouridine
  modified_base 66: mod_base = OTHER; note = Guanosine phosphorothiorate
  modified_base 67: mod_base = OTHER; note = Guanosine phosphorothiorate
  modified_base 68: mod_base = OTHER; note = Adenosine phosphorothiorate
  modified_base 72: mod_base = OTHER; note = Uridine phosphorothiorate
  modified_base 73: mod_base = OTHER; note = Cytosine phosphorothiorate

SEQ ID NO: 4118 - RNA, 76 nt, synthetic construct; identical to SEQ ID NO: 625
  source 1..76: mol_type = other RNA
  modified_base 1: mod_base = OTHER; note = 2'-fluoroguanosine
  modified_base 2: mod_base = OTHER; note = 2'-Omethylguanosine
  modified_base 3: mod_base = OTHER; note = 2'-Omethylcytosine
  modified_base 4: mod_base = OTHER; note = 2'-Omethyluridine
  modified_base 10: mod_base = OTHER; note = Guanosine phosphorothiorate
  modified_base 14: mod_base = OTHER; note = 2'-fluoroadenosine
  modified_base 15: mod_base = OTHER; note = Adenosine phosphorothiorate
  modified_base 16: mod_base = OTHER; note = 2'-Omethyluridine
  modified_base 17: mod_base = OTHER; note = Guanosine phosphorothiorate
  modified_base 18: mod_base = OTHER; note = 2'-fluoroguanosine
  modified_base 23: mod_base = OTHER; note = 2'-Omethylcytosine
  modified_base 25: mod_base = OTHER; note = 2'-Omethylcytosine
  modified_base 28: mod_base = OTHER; note = 2'-fluorouridine
  modified_base 30: mod_base = OTHER; note = Guanosine phosphorothiorate
  modified_base 31: mod_base = OTHER; note = 2'-fluoroadenosine
  modified_base 34: mod_base = OTHER; note = Uridine phosphorothiorate
  modified_base 36: mod_base = OTHER; note = Adenosine phosphorothiorate
  modified_base 39: mod_base = OTHER; note = Uridine phosphorothiorate
  modified_base 43: mod_base = OTHER; note = 2'-fluoroadenosine
  modified_base 44: mod_base = OTHER; note = 2'-Omethyladenosine
  modified_base 46: mod_base = OTHER; note = 2'-Omethylguanosine
  modified_base 49: mod_base = OTHER; note = 2'-Omethylcytosine
  modified_base 51: mod_base = OTHER; note = 2'-Omethylguanosine
  modified_base 53: mod_base = OTHER; note = 2'-Omethylguanosine
  modified_base 56: mod_base = OTHER; note = Cytosine phosphorothiorate
  modified_base 57: mod_base = OTHER; note = 2'-fluoroguanosine
  modified_base 59: mod_base = OTHER; note = 2'-fluoroguanosine phosphorothiorate
  modified_base 60: mod_base = OTHER; note = 2'-Omethyluridine
  modified_base 62: mod_base = OTHER; note = 2'-Omethylcytosine
  modified_base 63: mod_base = OTHER; note = 2'-Omethylcytosine
  modified_base 66: mod_base = OTHER; note = 2'-Omethylcytosine
  modified_base 67: mod_base = OTHER; note = 2'-Omethylguanosine phosphorothiorate
  modified_base 69: mod_base = OTHER; note = 2'-fluoroadenosine
  modified_base 72: mod_base = OTHER; note = 2'-Omethylcytosine
  modified_base 73: mod_base = OTHER; note = 2'-fluoroguanosine
  modified_base 76: mod_base = OTHER; note = 2'-fluoroadenosine

SEQ ID NO: 4119 - RNA, 76 nt, synthetic construct; identical to SEQ ID NO: 3419
  source 1..76: mol_type = other RNA
  modified_base 1: mod_base = OTHER; note = 2'-Omethylguanosine phosphorothiorate
  modified_base 2: mod_base = OTHER; note = 2'-Omethylguanosine
  modified_base 3: mod_base = OTHER; note = 2'-Omethylcytosine
  modified_base 4: mod_base = OTHER; note = 2'-Omethyluridine
  modified_base 5: mod_base = OTHER; note = 2'-Omethylcytosine
  modified_base 6: mod_base = OTHER; note = 2'-Omethylcytosine
  modified_base 27: mod_base = OTHER; note = 2'-Omethyladenosine
  modified_base 28: mod_base = OTHER; note = 2'-Omethylcytosine
  modified_base 29: mod_base = OTHER; note = 2'-fluorocytosine
  modified_base 30: mod_base = OTHER; note = 2'-Omethylguanosine
  modified_base 40: mod_base = OTHER; note = 2'-fluorocytosine
  modified_base 41: mod_base = OTHER; note = 2'-Omethylguanosine
  modified_base 42: mod_base = OTHER; note = 2'-Omethylguanosine
  modified_base 43: mod_base = OTHER; note = 2'-Omethyluridine
  modified_base 73: mod_base = OTHER; note = 2'-Omethylguanosine

SEQ ID NO: 4120 - RNA, 74 nt, synthetic construct; identical to SEQ ID NO: 3293
  source 1..74: mol_type = other RNA
  modified_base 1: mod_base = OTHER; note = Adenosine phosphorothiorate
  modified_base 2: mod_base = OTHER; note = 2'-fluorocytosine
  modified_base 4: mod_base = OTHER; note = Uridine phosphorothiorate
  modified_base 10: mod_base = OTHER; note = 2'-Omethylcytosine
  modified_base 18: mod_base = OTHER; note = 2'-Omethyluridine
  modified_base 24: mod_base = OTHER; note = Guanosine phosphorothiorate
  modified_base 27: mod_base = OTHER; note = 2'-fluorouridine
  modified_base 37: mod_base = OTHER; note = 2'-fluorouridine
  modified_base 43: mod_base = OTHER; note = 2'-fluoroguanosine
  modified_base 44: mod_base = OTHER; note = Guanosine phosphorothiorate
  modified_base 48: mod_base = OTHER; note = Cytosine phosphorothiorate
  modified_base 50: mod_base = OTHER; note = Uridine phosphorothiorate
  modified_base 52: mod_base = OTHER; note = 2'-fluorouridine
  modified_base 62: mod_base = OTHER; note = Guanosine phosphorothiorate
  modified_base 73: mod_base = OTHER; note = 2'-Omethylcytosine phosphorothiorate

SEQ ID NO: 4121 - RNA, 74 nt, synthetic construct; identical to SEQ ID NO: 766
  source 1..74: mol_type = other RNA
  modified_base 1: mod_base = OTHER; note = 2'-Omethylguanosine phosphorothiorate
  modified_base 2: mod_base = OTHER; note = 2'-Omethylguanosine
  modified_base 3: mod_base = OTHER; note = 2'-Omethylcytosine
  modified_base 4: mod_base = OTHER; note = 2'-Omethyluridine
  modified_base 5: mod_base = OTHER; note = 2'-Omethylcytosine
  modified_base 6: mod_base = OTHER; note = 2'-Omethylcytosine
  modified_base 49: mod_base = OTHER; note = 2'-Omethylcytosine
  modified_base 50: mod_base = OTHER; note = 2'-Omethylcytosine
  modified_base 51: mod_base = OTHER; note = 2'-Omethylguanosine
  modified_base 52: mod_base = OTHER; note = 2'-Omethylguanosine
  modified_base 53: mod_base = OTHER; note = 2'-Omethylguanosine
  modified_base 61: mod_base = OTHER; note = 2'-Omethylcytosine
  modified_base 62: mod_base = OTHER; note = 2'-Omethylcytosine
  modified_base 63: mod_base = OTHER; note = 2'-fluorocytosine
  modified_base 64: mod_base = OTHER; note = 2'-Omethylguanosine
  modified_base 65: mod_base = OTHER; note = 2'-Omethylguanosine
  modified_base 66: mod_base = OTHER; note = 2'-Omethylcytosine
  modified_base 67: mod_base = OTHER; note = 2'-Omethylguanosine
  modified_base 68: mod_base = OTHER; note = 2'-Omethylguanosine
  modified_base 69: mod_base = OTHER; note = 2'-Omethyladenosine
  modified_base 70: mod_base = OTHER; note = 2'-fluoroguanosine
  modified_base 73: mod_base = OTHER; note = 2'-Omethylguanosine

SEQ ID NO: 4122 - RNA, 73 nt, synthetic construct; identical to SEQ ID NO: 935
  source 1..73: mol_type = other RNA
  modified_base 1: mod_base = OTHER; note = 2'-Omethylguanosine phosphorothiorate
  modified_base 2: mod_base = OTHER; note = 2'-Omethylguanosine phosphorothiorate
  modified_base 45: mod_base = OTHER; note = 2'-fluoroguanosine
  modified_base 57: mod_base = OTHER; note = 2'-fluoroguanosine
  modified_base 68: mod_base = OTHER; note = 2'-fluoroguanosine
  modified_base 72: mod_base = OTHER; note = 2'-Omethylcytosine

SEQ ID NO: 4123 - RNA, 76 nt, synthetic construct; identical to SEQ ID NO: 625
  source 1..76: mol_type = other RNA
  modified_base 54: mod_base = OTHER; note = 2'-O-(2-Methoxyethyl) thymine
  modified_base 55: mod_base = OTHER; note = 2'-O-(2-Methoxyethyl) thymine
  modified_base 56: mod_base = OTHER; note = 2'-O-(2-Methoxyethyl) cytosine
  modified_base 57: mod_base = OTHER; note = 2'-O-(2-Methoxyethyl) guanosine
  modified_base 58: mod_base = OTHER; note = 2'-O-(2-Methoxyethyl) adenosine
  modified_base 59: mod_base = OTHER; note = 2'-O-(2-Methoxyethyl) guanosine
  modified_base 60: mod_base = OTHER; note = 2'-O-(2-Methoxyethyl) thymine

SEQ ID NO: 4124 - RNA, 75 nt, synthetic construct; identical to SEQ ID NO: 3306
  source 1..75: mol_type = other RNA
  modified_base 1: mod_base = OTHER; note = 2'-Omethylguanosine phosphorothiorate
  modified_base 2: mod_base = OTHER; note = 2'-Omethyladenosine phosphorothiorate
  modified_base 3: mod_base = OTHER; note = 2'-Omethylcytosine
  modified_base 4: mod_base = OTHER; note = 2'-Omethylcytosine
  modified_base 5: mod_base = OTHER; note = 2'-Omethyluridine
  modified_base 6: mod_base = OTHER; note = 2'-Omethylcytosine
  modified_base 10: mod_base = OTHER; note = 2'-Omethylguanosine
  modified_base 11: mod_base = OTHER; note = 2'-Omethylcytosine
  modified_base 12: mod_base = OTHER; note = 2'-Omethylguanosine
  modified_base 13: mod_base = OTHER; note = 2'-Omethylcytosine
  modified_base 16: mod_base = OTHER; note = 2'-Omethylcytosine
  modified_base 17: mod_base = OTHER; note = 2'-Omethylguanosine
  modified_base 18: mod_base = OTHER; note = 2'-Omethylguanosine
  modified_base 32: mod_base = OTHER; note = 2'-fluorouridine
  modified_base 34: mod_base = OTHER; note = Uridine phosphorothiorate
  modified_base 36: mod_base = OTHER; note = Guanosine phosphorothiorate
  modified_base 37: mod_base = OTHER; note = Adenosine phosphorothiorate
  modified_base 43: mod_base = OTHER; note = 2'-Omethyladenosine
  modified_base 44: mod_base = OTHER; note = 2'-Omethylguanosine
  modified_base 45: mod_base = OTHER; note = 2'-fluoroguanosine
  modified_base 46: mod_base = OTHER; note = 2'-fluorouridine
  modified_base 47: mod_base = OTHER; note = 2'-fluorouridine
  modified_base 48: mod_base = OTHER; note = 2'-Omethylguanosine
  modified_base 49: mod_base = OTHER; note = 2'-Omethylcytosine
  modified_base 50: mod_base = OTHER; note = 2'-Omethylguanosine
  modified_base 51: mod_base = OTHER; note = 2'-Omethyluridine
  modified_base 52: mod_base = OTHER; note = 2'-Omethylguanosine
  modified_base 53: mod_base = OTHER; note = 2'-Omethyluridine
  modified_base 55: mod_base = OTHER; note = 2'-Omethylcytosine
  modified_base 58: mod_base = OTHER; note = 2'-Omethyladenosine
  modified_base 60: mod_base = OTHER; note = 2'-Omethylcytosine
  modified_base 61: mod_base = OTHER; note = 2'-Omethyladenosine
  modified_base 62: mod_base = OTHER; note = 2'-fluorocytosine
  modified_base 63: mod_base = OTHER; note = 2'-Omethylguanosine
  modified_base 64: mod_base = OTHER; note = 2'-Omethyluridine
  modified_base 65: mod_base = OTHER; note = 2'-Omethylcytosine
  modified_base 66: mod_base = OTHER; note = 2'-Omethylguanosine
  modified_base 67: mod_base = OTHER; note = 2'-Omethylguanosine
  modified_base 72: mod_base = OTHER; note = 2'-Omethyladenosine

SEQ ID NO: 4125 - RNA, 86 nt, synthetic construct; identical to SEQ ID NO: 3290
  source 1..86: mol_type = other RNA
  modified_base 20: mod_base = OTHER; note = 2'-Omethyluridine

SEQ ID NO: 4126 - RNA, 85 nt, synthetic construct; identical to SEQ ID NO: 3297
  source 1..85: mol_type = other RNA
  modified_base 1: mod_base = OTHER; note = 2'-Omethylguanosine phosphorothiorate
  modified_base 2: mod_base = OTHER; note = 2'-Omethylcytosine phosphorothiorate
  modified_base 30: mod_base = OTHER; note = 2'-Omethylguanosine phosphorothiorate
  modified_base 43: mod_base = OTHER; note = 2'-Omethyladenosine
  modified_base 56: mod_base = OTHER; note = 2'-Omethylguanosine phosphorothiorate
  modified_base 61: mod_base = OTHER; note = 2'-fluoroguanosine phosphorothiorate
  modified_base 63: mod_base = OTHER; note = 2'-fluorouridine phosphorothiorate
  modified_base 82: mod_base = OTHER; note = 2'-Omethylguanosine

SEQ ID NO: 4127 - RNA, 76 nt, synthetic construct; identical to SEQ ID NO: 625
  source 1..76: mol_type = other RNA
  modified_base 1: mod_base = OTHER; note = Guanosine phosphorothiorate
  modified_base 2: mod_base = OTHER; note = 2'-fluoroguanosine
  modified_base 9: mod_base = OTHER; note = Guanosine phosphorothiorate
  modified_base 13: mod_base = OTHER; note = Cytosine phosphorothiorate
  modified_base 14: mod_base = OTHER; note = 2'-Omethyladenosine
  modified_base 17: mod_base = OTHER; note = Guanosine phosphorothiorate
  modified_base 23: mod_base = OTHER; note = 2'-Omethylcytosine
  modified_base 24: mod_base = OTHER; note = 2'-Omethylguanosine
  modified_base 25: mod_base = OTHER; note = 2'-Omethylcytosine
  modified_base 27: mod_base = OTHER; note = 2'-Omethyluridine
  modified_base 30: mod_base = OTHER; note = 2'-fluoroguanosine
  modified_base 33: mod_base = OTHER; note = 2'-fluorouridine
  modified_base 34: mod_base = OTHER; note = 2'-Omethyluridine phosphorothiorate
  modified_base 40: mod_base = OTHER; note = 2'-Omethyluridine
  modified_base 42: mod_base = OTHER; note = 2'-Omethyladenosine
  modified_base 44: mod_base = OTHER; note = 2'-fluoroadenosine
  modified_base 45: mod_base = OTHER; note = 2'-Omethylguanosine phosphorothiorate
  modified_base 46: mod_base = OTHER; note = 2'-Omethylguanosine
  modified_base 47: mod_base = OTHER; note = 2'-fluorouridine
  modified_base 52: mod_base = OTHER; note = 2'-Omethylguanosine
  modified_base 53: mod_base = OTHER; note = 2'-Omethylguanosine
  modified_base 54: mod_base = OTHER; note = 2'-Omethyluridine
  modified_base 59: mod_base = OTHER; note = Guanosine phosphorothiorate
  modified_base 60: mod_base = OTHER; note = 2'-Omethyluridine
  modified_base 65: mod_base = OTHER; note = 2'-Omethylguanosine phosphorothiorate
  modified_base 66: mod_base = OTHER; note = 2'-fluorocytosine
  modified_base 67: mod_base = OTHER; note = 2'-fluoroguanosine
  modified_base 68: mod_base = OTHER; note = Guanosine phosphorothiorate
  modified_base 69: mod_base = OTHER; note = 2'-fluoroadenosine phosphorothiorate
  modified_base 70: mod_base = OTHER; note = 2'-Omethylguanosine
  modified_base 71: mod_base = OTHER; note = Uridine phosphorothiorate
  modified_base 73: mod_base = OTHER; note = 2'-fluoroguanosine
  modified_base 74: mod_base = OTHER; note = 2'-fluorocytosine
  modified_base 75: mod_base = OTHER; note = 2'-Omethylcytosine

SEQ ID NO: 4128 - RNA, 76 nt, synthetic construct; identical to SEQ ID NO: 625
  source 1..76: mol_type = other RNA
  modified_base 1: mod_base = OTHER; note = 2'-Omethylguanosine
  modified_base 10: mod_base = OTHER; note = 2'-Omethylguanosine
  modified_base 13: mod_base = OTHER; note = 2'-Omethylcytosine
  modified_base 17: mod_base = OTHER; note = Guanosine phosphorothiorate
  modified_base 18: mod_base = OTHER; note = 2'-Omethylguanosine
  modified_base 19: mod_base = OTHER; note = Adenosine phosphorothiorate
  modified_base 20: mod_base = OTHER; note = 2'-Omethyluridine
  modified_base 25: mod_base = OTHER; note = 2'-Omethylcytosine
  modified_base 29: mod_base = OTHER; note = 2'-Omethylguanosine
  modified_base 33: mod_base = OTHER; note = 2'-fluorouridine
  modified_base 35: mod_base = OTHER; note = Cytosine phosphorothiorate
  modified_base 37: mod_base = OTHER; note = Adenosine phosphorothiorate
  modified_base 38: mod_base = OTHER; note = Adenosine phosphorothiorate
  modified_base 43: mod_base = OTHER; note = 2'-Omethyladenosine
  modified_base 44: mod_base = OTHER; note = 2'-fluoroadenosine
  modified_base 46: mod_base = OTHER; note = 2'-Omethylguanosine
  modified_base 50: mod_base = OTHER; note = 2'-Omethylcytosine
  modified_base 52: mod_base = OTHER; note = 2'-Omethylguanosine
  modified_base 54: mod_base = OTHER; note = Uridine phosphorothiorate
  modified_base 55: mod_base = OTHER; note = Uridine phosphorothiorate
  modified_base 56: mod_base = OTHER; note = 2'-Omethylcytosine
  modified_base 57: mod_base = OTHER; note = Guanosine phosphorothiorate
  modified_base 62: mod_base = OTHER; note = 2'-Omethylcytosine
  modified_base 63: mod_base = OTHER; note = 2'-fluorocytosine
  modified_base 65: mod_base = OTHER; note = 2'-Omethylguanosine
  modified_base 71: mod_base = OTHER; note = 2'-Omethyluridine
  modified_base 73: mod_base = OTHER; note = 2'-Omethylguanosine

SEQ ID NO: 4129 - RNA, 85 nt, synthetic construct; identical to SEQ ID NO: 3288
  source 1..85: mol_type = other RNA
  modified_base 1: mod_base = OTHER; note = Cytosine phosphorothiorate
  modified_base 3: mod_base = OTHER; note = 2'-fluoroadenosine
  modified_base 6: mod_base = OTHER; note = 2'-fluoroadenosine phosphorothiorate
  modified_base 20: mod_base = OTHER; note = 2'-fluoroadenosine
  modified_base 26: mod_base = OTHER; note = 2'-fluorouridine phosphorothiorate
  modified_base 28: mod_base = OTHER; note = 2'-fluoroguanosine
  modified_base 33: mod_base = OTHER; note = 2'-fluorouridine
  modified_base 34: mod_base = OTHER; note = Cytosine phosphorothiorate
  modified_base 37: mod_base = OTHER; note = 2'-fluoroadenosine phosphorothiorate
  modified_base 42: mod_base = OTHER; note = Adenosine phosphorothiorate
  modified_base 51: mod_base = OTHER; note = 2'-Omethyluridine
  modified_base 55: mod_base = OTHER; note = 2'-Omethylcytosine
  modified_base 57: mod_base = OTHER; note = 2'-Omethylcytosine
  modified_base 65: mod_base = OTHER; note = Cytosine phosphorothiorate
  modified_base 71: mod_base = OTHER; note = 2'-fluorocytosine
  modified_base 73: mod_base = OTHER; note = 2'-fluoroadenosine
  modified_base 75: mod_base = OTHER; note = Uridine phosphorothiorate
  modified_base 77: mod_base = OTHER; note = 2'-fluorocytosine
  modified_base 83: mod_base = OTHER; note = Cytosine phosphorothiorate
  modified_base 84: mod_base = OTHER; note = 2'-Omethylcytosine

SEQ ID NO: 4130 - RNA, 86 nt, synthetic construct; identical to SEQ ID NO: 3290
  source 1..86: mol_type = other RNA
  modified_base 1: mod_base = OTHER; note = 2'-Omethyladenosine
  modified_base 2: mod_base = OTHER; note = 2'-Omethylcytosine
  modified_base 3: mod_base = OTHER; note = 2'-Omethylcytosine
  modified_base 4: mod_base = OTHER; note = 2'-Omethyladenosine
  modified_base 5: mod_base = OTHER; note = 2'-Omethylguanosine
  modified_base 6: mod_base = OTHER; note = 2'-Omethylguanosine
  modified_base 14: mod_base = OTHER; note = 2'-Omethyladenosine
  modified_base 15: mod_base = OTHER; note = 2'-Omethylguanosine
  modified_base 16: mod_base = OTHER; note = 2'-Omethyluridine
  modified_base 17: mod_base = OTHER; note = 2'-Omethylguanosine
  modified_base 18: mod_base = OTHER; note = 2'-Omethylguanosine
  modified_base 20: mod_base = OTHER; note = 2'-Omethyluridine
  modified_base 25: mod_base = OTHER; note = 2'-Omethylcytosine
  modified_base 33: mod_base = OTHER; note = 2'-fluorouridine
  modified_base 35: mod_base = OTHER; note = Cytosine phosphorothiorate
  modified_base 37: mod_base = OTHER; note = Guanosine phosphorothiorate
  modified_base 38: mod_base = OTHER; note = Adenosine phosphorothiorate
  modified_base 41: mod_base = OTHER; note = 2'-Omethylcytosine
  modified_base 42: mod_base = OTHER; note = 2'-Omethyladenosine
  modified_base 43: mod_base = OTHER; note = 2'-Omethyladenosine
  modified_base 44: mod_base = OTHER; note = 2'-fluorouridine
  modified_base 59: mod_base = OTHER; note = 2'-Omethylguanosine
  modified_base 60: mod_base = OTHER; note = 2'-Omethyluridine
  modified_base 62: mod_base = OTHER; note = 2'-Omethylguanosine
  modified_base 64: mod_base = OTHER; note = 2'-Omethyluridine
  modified_base 65: mod_base = OTHER; note = Uridine phosphorothiorate
  modified_base 66: mod_base = OTHER; note = 2'-Omethylcytosine
  modified_base 67: mod_base = OTHER; note = 2'-fluoroguanosine
  modified_base 69: mod_base = OTHER; note = 2'-Omethyladenosine
  modified_base 71: mod_base = OTHER; note = 2'-Omethylcytosine
  modified_base 75: mod_base = OTHER; note = 2'-Omethylcytosine
  modified_base 83: mod_base = OTHER; note = 2'-Omethyladenosine

SEQ ID NO: 4131 - RNA, 76 nt, synthetic construct; identical to SEQ ID NO: 625
  source 1..76: mol_type = other RNA
  modified_base 1: mod_base = OTHER; note = 2'-fluoroguanosine
  modified_base 3: mod_base = OTHER; note = 2'-Omethylcytosine
  modified_base 6: mod_base = OTHER; note = Cytosine phosphorothiorate
  modified_base 11: mod_base = OTHER; note = 2'-fluorocytosine
  modified_base 16: mod_base = OTHER; note = 2'-Omethyluridine
  modified_base 24: mod_base = OTHER; note = 2'-fluoroguanosine
  modified_base 26: mod_base = OTHER; note = 2'-Omethyladenosine
  modified_base 27: mod_base = OTHER; note = 2'-Omethyluridine phosphorothiorate
  modified_base 28: mod_base = OTHER; note = 2'-fluorouridine
  modified_base 29: mod_base = OTHER; note = 2'-fluoroguanosine phosphorothiorate
  modified_base 30: mod_base = OTHER; note = 2'-fluoroguanosine phosphorothiorate
  modified_base 33: mod_base = OTHER; note = 2'-fluorouridine
  modified_base 34: mod_base = OTHER; note = 2'-Omethyluridine phosphorothiorate
  modified_base 36: mod_base = OTHER; note = Adenosine phosphorothiorate
  modified_base 38: mod_base = OTHER; note = Adenosine phosphorothiorate
  modified_base 39: mod_base = OTHER; note = 2'-Omethyluridine
  modified_base 40: mod_base = OTHER; note = 2'-Omethyluridine
  modified_base 46: mod_base = OTHER; note = 2'-Omethylguanosine
  modified_base 47: mod_base = OTHER; note = 2'-fluorouridine
  modified_base 48: mod_base = OTHER; note = 2'-fluorouridine
  modified_base 49: mod_base = OTHER; note = Cytosine phosphorothiorate
  modified_base 52: mod_base = OTHER; note = 2'-Omethylguanosine
  modified_base 53: mod_base = OTHER; note = Guanosine phosphorothiorate
  modified_base 54: mod_base = OTHER; note = 2'-fluorouridine
  modified_base 55: mod_base = OTHER; note = Uridine phosphorothiorate
  modified_base 56: mod_base = OTHER; note = 2'-Omethylcytosine phosphorothiorate
  modified_base 59: mod_base = OTHER; note = 2'-fluoroguanosine
  modified_base 60: mod_base = OTHER; note = 2'-Omethyluridine
  modified_base 61: mod_base = OTHER; note = 2'-Omethylcytosine
  modified_base 62: mod_base = OTHER; note = 2'-fluorocytosine
  modified_base 64: mod_base = OTHER; note = 2'-Omethylguanosine
  modified_base 67: mod_base = OTHER; note = 2'-Omethylguanosine
  modified_base 69: mod_base = OTHER; note = Adenosine phosphorothiorate
  modified_base 70: mod_base = OTHER; note = 2'-fluoroguanosine
  modified_base 71: mod_base = OTHER; note = 2'-fluorouridine
  modified_base 74: mod_base = OTHER; note = 2'-Omethylcytosine phosphorothiorate
  modified_base 75: mod_base = OTHER; note = 2'-Omethylcytosine phosphorothiorate
  modified_base 76: mod_base = OTHER; note = 2'-fluoroadenosine

SEQ ID NO: 4132 - RNA, 75 nt, synthetic construct; identical to SEQ ID NO: 3336
  source 1..75: mol_type = other RNA
  modified_base 8: mod_base = OTHER; note = 2'-fluoroadenosine
  modified_base 10: mod_base = OTHER; note = Cytosine phosphorothiorate
  modified_base 13: mod_base = OTHER; note = Adenosine phosphorothiorate
  modified_base 20: mod_base = OTHER; note = 2'-fluoroadenosine
  modified_base 21: mod_base = OTHER; note = 2'-fluoroguanosine
  modified_base 22: mod_base = OTHER; note = 2'-fluoroadenosine
  modified_base 25: mod_base = OTHER; note = 2'-fluoroadenosine
  modified_base 26: mod_base = OTHER; note = Uridine phosphorothiorate
  modified_base 34: mod_base = OTHER; note = 2'-Omethyluridine phosphorothiorate
  modified_base 38: mod_base = OTHER; note = 2'-fluorouridine phosphorothiorate
  modified_base 40: mod_base = OTHER; note = 2'-fluorouridine phosphorothiorate
  modified_base 47: mod_base = OTHER; note = 2'-fluorocytosine
  modified_base 48: mod_base = OTHER; note = 2'-Omethylcytosine phosphorothiorate
  modified_base 49: mod_base = OTHER; note = 2'-fluoroadenosine
  modified_base 58: mod_base = OTHER; note = 2'-Omethylguanosine phosphorothiorate
  modified_base 69: mod_base = OTHER; note = Guanosine phosphorothiorate
  modified_base 73: mod_base = OTHER; note = Cytosine phosphorothiorate
  modified_base 74: mod_base = OTHER; note = 2'-Omethylcytosine

SEQ ID NO: 4133 - RNA, 76 nt, synthetic construct; identical to SEQ ID NO: 625
  source 1..76: mol_type = other RNA
  modified_base 1: mod_base = OTHER; note = 2'-Omethylguanosine phosphorothiorate
  modified_base 2: mod_base = OTHER; note = 2'-Omethylguanosine
  modified_base 3: mod_base = OTHER; note = 2'-Omethylcytosine
  modified_base 4: mod_base = OTHER; note = 2'-Omethyluridine
  modified_base 5: mod_base = OTHER; note = 2'-Omethylcytosine
  modified_base 6: mod_base = OTHER; note = 2'-Omethylcytosine
  modified_base 10: mod_base = OTHER; note = 2'-Omethylguanosine
  modified_base 11: mod_base = OTHER; note = 2'-Omethylcytosine
  modified_base 12: mod_base = OTHER; note = Guanosine phosphorothiorate
  modified_base 13: mod_base = OTHER; note = 2'-Omethylcytosine
  modified_base 14: mod_base = OTHER; note = 2'-fluoroadenosine
  modified_base 16: mod_base = OTHER; note = 2'-Omethyluridine
  modified_base 17: mod_base = OTHER; note = 2'-Omethylguanosine
  modified_base 18: mod_base = OTHER; note = 2'-Omethylguanosine
  modified_base 19: mod_base = OTHER; note = Adenosine phosphorothiorate
  modified_base 20: mod_base = OTHER; note = 2'-fluorouridine
  modified_base 22: mod_base = OTHER; note = 2'-Omethylguanosine
  modified_base 23: mod_base = OTHER; note = 2'-Omethylcytosine
  modified_base 24: mod_base = OTHER; note = 2'-Omethylguanosine
  modified_base 25: mod_base = OTHER; note = Cytosine phosphorothiorate
  modified_base 26: mod_base = OTHER; note = Adenosine phosphorothiorate
  modified_base 27: mod_base = OTHER; note = 2'-O-(2-Methoxyethyl) thymine
  modified_base 29: mod_base = OTHER; note = 2'-Omethylguanosine
  modified_base 33: mod_base = OTHER; note = 2'-fluorouridine
  modified_base 35: mod_base = OTHER; note = Cytosine phosphorothiorate
  modified_base 37: mod_base = OTHER; note = Adenosine phosphorothiorate
  modified_base 38: mod_base = OTHER; note = Adenosine phosphorothiorate
  modified_base 40: mod_base = OTHER; note = 2'-fluorouridine
  modified_base 41: mod_base = OTHER; note = 2'-Omethylcytosine
  modified_base 42: mod_base = OTHER; note = 2'-Omethyladenosine
  modified_base 43: mod_base = OTHER; note = 2'-Omethyladenosine
  modified_base 44: mod_base = OTHER; note = Adenosine phosphorothiorate
  modified_base 45: mod_base = OTHER; note = 2'-O-(2-Methoxyethyl) guanosine
  modified_base 46: mod_base = OTHER; note = Guanosine phosphorothiorate
  modified_base 50: mod_base = OTHER; note = 2'-Omethylcytosine
  modified_base 51: mod_base = OTHER; note = Guanosine phosphorothiorate
  modified_base 52: mod_base = OTHER; note = 2'-fluoroguanosine
  modified_base 53: mod_base = OTHER; note = 2'-Omethylguanosine
  modified_base 54: mod_base = OTHER; note = 2'-Omethyluridine
  modified_base 55: mod_base = OTHER; note = Uridine phosphorothiorate
  modified_base 56: mod_base = OTHER; note = 2'-Omethylcytosine
  modified_base 57: mod_base = OTHER; note = 2'-fluoroguanosine
  modified_base 59: mod_base = OTHER; note = 2'-Omethylguanosine
  modified_base 62: mod_base = OTHER; note = 2'-fluorocytosine
  modified_base 63: mod_base = OTHER; note = 2'-fluorocytosine
  modified_base 65: mod_base = OTHER; note = 2'-Omethylguanosine
  modified_base 68: mod_base = OTHER; note = 2'-Omethylguanosine
  modified_base 71: mod_base = OTHER; note = 2'-Omethyluridine
  modified_base 73: mod_base = OTHER; note = 2'-Omethylguanosine
  modified_base 74: mod_base = OTHER; note = Cytosine phosphorothiorate
  modified_base 75: mod_base = OTHER; note = 2'-fluorocytosine phosphorothiorate

SEQ ID NO: 4134 - RNA, 76 nt, synthetic construct; identical to SEQ ID NO: 3289
  source 1..76: mol_type = other RNA
  modified_base 1: mod_base = OTHER; note = 2'-Omethylguanosine phosphorothiorate
  modified_base 2: mod_base = OTHER; note = 2'-Omethylcytosine phosphorothiorate
  modified_base 3: mod_base = OTHER; note = 2'-Omethylcytosine
  modified_base 4: mod_base = OTHER; note = 2'-Omethyluridine
  modified_base 5: mod_base = OTHER; note = 2'-Omethylguanosine
  modified_base 6: mod_base = OTHER; note = 2'-Omethylguanosine
  modified_base 14: mod_base = OTHER; note = 2'-Omethyladenosine
  modified_base 18: mod_base = OTHER; note = 2'-Omethylguanosine
  modified_base 19: mod_base = OTHER; note = 2'-Omethylguanosine
  modified_base 22: mod_base = OTHER; note = 2'-Omethylguanosine
  modified_base 25: mod_base = OTHER; note = 2'-Omethylcytosine
  modified_base 27: mod_base = OTHER; note = 2'-Omethyluridine
  modified_base 33: mod_base = OTHER; note = 2'-fluorouridine
  modified_base 41: mod_base = OTHER; note = 2'-Omethyluridine
  modified_base 44: mod_base = OTHER; note = 2'-Omethylguanosine
  modified_base 45: mod_base = OTHER; note = 2'-Omethylguanosine
  modified_base 46: mod_base = OTHER; note = 2'-fluoroguanosine
  modified_base 47: mod_base = OTHER; note = 2'-fluorouridine
  modified_base 48: mod_base = OTHER; note = 2'-fluorocytosine
  modified_base 52: mod_base = OTHER; note = 2'-Omethylguanosine
  modified_base 55: mod_base = OTHER; note = Uridine phosphorothiorate
  modified_base 71: mod_base = OTHER; note = 2'-Omethylguanosine
  modified_base 73: mod_base = OTHER; note = 2'-Omethylguanosine

SEQ ID NO: 4135 - RNA, 75 nt, synthetic construct; identical to SEQ ID NO: 3311
  source 1..75: mol_type = other RNA
  modified_base 1: mod_base = OTHER; note = 2'-Omethylguanosine phosphorothiorate
  modified_base 2: mod_base = OTHER; note = 2'-Omethylguanosine phosphorothiorate
  modified_base 13: mod_base = OTHER; note = Uridine phosphorothiorate
  modified_base 19: mod_base = OTHER; note = Uridine phosphorothiorate
  modified_base 20: mod_base = OTHER; note = 2'-fluoroadenosine
  modified_base 21: mod_base = OTHER; note = 2'-fluoroadenosine
  modified_base 28: mod_base = OTHER; note = 2'-fluorouridine
  modified_base 41: mod_base = OTHER; note = 2'-fluorocytosine
  modified_base 43: mod_base = OTHER; note = 2'-fluoroguanosine
  modified_base 47: mod_base = OTHER; note = 2'-fluorouridine
  modified_base 65: mod_base = OTHER; note = Uridine phosphorothiorate
  modified_base 66: mod_base = OTHER; note = 2'-fluoroguanosine
  modified_base 73: mod_base = OTHER; note = Cytosine phosphorothiorate
  modified_base 74: mod_base = OTHER; note = 2'-Omethylcytosine

SEQ ID NO: 4136 - RNA, 76 nt, synthetic construct; identical to SEQ ID NO: 3318
  source 1..76: mol_type = other RNA
  modified_base 49: mod_base = OTHER; note = 2'-Omethylguanosine
  modified_base 50: mod_base = OTHER; note = 2'-Omethylcytosine
  modified_base 51: mod_base = OTHER; note = 2'-Omethyluridine
  modified_base 52: mod_base = OTHER; note = 2'-Omethylguanosine
  modified_base 53: mod_base = OTHER; note = 2'-Omethylguanosine
  modified_base 73: mod_base = OTHER; note = 2'-Omethyladenosine

SEQ ID NO: 4137 - RNA, 76 nt, synthetic construct; identical to SEQ ID NO: 625
  source 1..76: mol_type = other RNA
  modified_base 1: mod_base = OTHER; note = 2'-Omethylguanosine phosphorothiorate
  modified_base 2: mod_base = OTHER; note = Guanosine phosphorothiorate
  modified_base 3: mod_base = OTHER; note = 2'-fluorocytosine
  modified_base 4: mod_base = OTHER; note = Uridine phosphorothiorate
  modified_base 5: mod_base = OTHER; note = 2'-Omethylcytosine
  modified_base 7: mod_base = OTHER; note = Guanosine phosphorothiorate
  modified_base 9: mod_base = OTHER; note = Guanosine phosphorothiorate
  modified_base 11: mod_base = OTHER; note = 2'-Omethylcytosine phosphorothiorate
  modified_base 14: mod_base = OTHER; note = 2'-fluoroadenosine
  modified_base 18: mod_base = OTHER; note = 2'-fluoroguanosine phosphorothiorate
  modified_base 20: mod_base = OTHER; note = 2'-fluorouridine
  modified_base 22: mod_base = OTHER; note = Guanosine phosphorothiorate
  modified_base 23: mod_base = OTHER; note = 2'-Omethylcytosine
  modified_base 24: mod_base = OTHER; note = 2'-fluoroguanosine
  modified_base 25: mod_base = OTHER; note = Cytosine phosphorothiorate
  modified_base 28: mod_base = OTHER; note = 2'-Omethyluridine phosphorothiorate
  modified_base 29: mod_base = OTHER; note = 2'-fluoroguanosine
  modified_base 32: mod_base = OTHER; note = 2'-fluorocytosine
  modified_base 33: mod_base = OTHER; note = 2'-fluorouridine
  modified_base 34: mod_base = OTHER; note = 2'-fluorouridine
  modified_base 37: mod_base = OTHER; note = Adenosine phosphorothiorate
  modified_base 45: mod_base = OTHER; note = 2'-Omethylguanosine phosphorothiorate
  modified_base 46: mod_base = OTHER; note = 2'-fluoroguanosine
  modified_base 52: mod_base = OTHER; note = 2'-fluoroguanosine
  modified_base 56: mod_base = OTHER; note = 2'-Omethylcytosine
  modified_base 59: mod_base = OTHER; note = 2'-Omethylguanosine
  modified_base 60: mod_base = OTHER; note = 2'-Omethyluridine
  modified_base 61: mod_base = OTHER; note = 2'-fluorocytosine
  modified_base 64: mod_base = OTHER; note = 2'-Omethylguanosine
  modified_base 66: mod_base = OTHER; note = 2'-Omethylcytosine
  modified_base 67: mod_base = OTHER; note = 2'-Omethylguanosine
  modified_base 69: mod_base = OTHER; note = 2'-Omethyladenosine
  modified_base 73: mod_base = OTHER; note = 2'-fluoroguanosine
  modified_base 76: mod_base = OTHER; note = 2'-Omethyladenosine

SEQ ID NO: 4138 - RNA, 76 nt, synthetic construct; identical to SEQ ID NO: 3675
  source 1..76: mol_type = other RNA
  modified_base 1: mod_base = OTHER; note = 2'-Omethylguanosine phosphorothiorate
  modified_base 2: mod_base = OTHER; note = 2'-Omethylcytosine phosphorothiorate
  modified_base 3: mod_base = OTHER; note = 2'-Omethylcytosine
  modified_base 4: mod_base = OTHER; note = 2'-Omethyluridine
  modified_base 5: mod_base = OTHER; note = 2'-Omethylcytosine
  modified_base 6: mod_base = OTHER; note = 2'-Omethylcytosine
  modified_base 10: mod_base = OTHER; note = 2'-Omethylguanosine
  modified_base 11: mod_base = OTHER; note = 2'-Omethylcytosine
  modified_base 12: mod_base = OTHER; note = 2'-Omethylguanosine
  modified_base 13: mod_base = OTHER; note = 2'-Omethylcytosine
  modified_base 14: mod_base = OTHER; note = 2'-Omethyladenosine
  modified_base 15: mod_base = OTHER; note = 2'-fluoroadenosine
  modified_base 16: mod_base = OTHER; note = 2'-Omethyluridine
  modified_base 17: mod_base = OTHER; note = 2'-Omethylguanosine
  modified_base 18: mod_base = OTHER; note = 2'-Omethylguanosine
  modified_base 19: mod_base = OTHER; note = 2'-fluoroadenosine
  modified_base 20: mod_base = OTHER; note = 2'-Omethyluridine
  modified_base 22: mod_base = OTHER; note = 2'-Omethylguanosine
  modified_base 23: mod_base = OTHER; note = 2'-Omethylcytosine
  modified_base 24: mod_base = OTHER; note = 2'-Omethylguanosine
  modified_base 25: mod_base = OTHER; note = 2'-Omethylcytosine
  modified_base 33: mod_base = OTHER; note = 2'-fluorouridine
  modified_base 35: mod_base = OTHER; note = Cytosine phosphorothiorate
  modified_base 37: mod_base = OTHER; note = Adenosine phosphorothiorate
  modified_base 38: mod_base = OTHER; note = Adenosine phosphorothiorate
  modified_base 44: mod_base = OTHER; note = 2'-Omethyladenosine
  modified_base 45: mod_base = OTHER; note = 2'-Omethylguanosine
  modified_base 46: mod_base = OTHER; note = 2'-fluoroguanosine
  modified_base 47: mod_base = OTHER; note = 2'-fluorouridine
  modified_base 48: mod_base = OTHER; note = 2'-fluorouridine
  modified_base 56: mod_base = OTHER; note = 2'-Omethylcytosine
  modified_base 59: mod_base = OTHER; note = 2'-Omethylguanosine
  modified_base 61: mod_base = OTHER; note = 2'-Omethylcytosine
  modified_base 62: mod_base = OTHER; note = 2'-Omethylcytosine
  modified_base 63: mod_base = OTHER; note = 2'-fluorocytosine
  modified_base 64: mod_base = OTHER; note = 2'-Omethylguanosine
  modified_base 65: mod_base = OTHER; note = 2'-Omethylguanosine
  modified_base 66: mod_base = OTHER; note = 2'-Omethylcytosine
  modified_base 67: mod_base = OTHER; note = 2'-Omethylguanosine
  modified_base 68: mod_base = OTHER; note = 2'-Omethylguanosine
  modified_base 73: mod_base = OTHER; note = 2'-Omethylguanosine

SEQ ID NO: 4139 - RNA, 75 nt, synthetic construct; identical to SEQ ID NO: 3311
  source 1..75: mol_type = other RNA
  modified_base 1: mod_base = OTHER; note = Guanosine phosphorothiorate
  modified_base 2: mod_base = OTHER; note = 2'-Omethylguanosine phosphorothiorate
  modified_base 5: mod_base = OTHER; note = 2'-Omethylcytosine
  modified_base 12: mod_base = OTHER; note = 2'-fluoroguanosine
  modified_base 19: mod_base = OTHER; note = 2'-Omethyluridine
  modified_base 20: mod_base = OTHER; note = 2'-fluoroadenosine
  modified_base 21: mod_base = OTHER; note = 2'-fluoroadenosine
  modified_base 27: mod_base = OTHER; note = 2'-Omethylcytosine
  modified_base 28: mod_base = OTHER; note = 2'-fluorouridine
  modified_base 29: mod_base = OTHER; note = 2'-Omethylguanosine
  modified_base 37: mod_base = OTHER; note = 2'-fluoroadenosine phosphorothiorate
  modified_base 40: mod_base = OTHER; note = 2'-fluorocytosine
  modified_base 50: mod_base = OTHER; note = 2'-fluoroguanosine phosphorothiorate
  modified_base 59: mod_base = OTHER; note = 2'-fluorouridine
  modified_base 60: mod_base = OTHER; note = 2'-fluorocytosine
  modified_base 65: mod_base = OTHER; note = 2'-fluorouridine
  modified_base 66: mod_base = OTHER; note = Guanosine phosphorothiorate
  modified_base 68: mod_base = OTHER; note = Adenosine phosphorothiorate
  modified_base 72: mod_base = OTHER; note = Uridine phosphorothiorate
  modified_base 73: mod_base = OTHER; note = Cytosine phosphorothiorate

SEQ ID NO: 4140 - RNA, 86 nt, synthetic construct; identical to SEQ ID NO: 3290
  source 1..86: mol_type = other RNA
  modified_base 45: mod_base = OTHER; note = 2'-fluoroguanosine

SEQ ID NO: 4141 - RNA, 75 nt, synthetic construct; identical to SEQ ID NO: 3299
  source 1..75: mol_type = other RNA
  modified_base 1: mod_base = OTHER; note = 2'-Omethylcytosine
  modified_base 2: mod_base = OTHER; note = 2'-Omethylcytosine
  modified_base 7: mod_base = OTHER; note = 2'-fluorouridine
  modified_base 10: mod_base = OTHER; note = 2'-Omethylcytosine phosphorothiorate
  modified_base 14: mod_base = OTHER; note = Guanosine phosphorothiorate
  modified_base 17: mod_base = OTHER; note = 2'-fluoroguanosine
  modified_base 20: mod_base = OTHER; note = 2'-Omethyladenosine phosphorothiorate
  modified_base 23: mod_base = OTHER; note = 2'-fluoroguanosine
  modified_base 25: mod_base = OTHER; note = 2'-fluoroadenosine
  modified_base 36: mod_base = OTHER; note = 2'-fluoroadenosine
  modified_base 39: mod_base = OTHER; note = 2'-fluorocytosine
  modified_base 46: mod_base = OTHER; note = 2'-fluorouridine
  modified_base 47: mod_base = OTHER; note = 2'-Omethylcytosine phosphorothiorate
  modified_base 48: mod_base = OTHER; note = Cytosine phosphorothiorate
  modified_base 49: mod_base = OTHER; note = 2'-fluoroadenosine
  modified_base 56: mod_base = OTHER; note = 2'-fluoroadenosine
  modified_base 61: mod_base = OTHER; note = 2'-fluorocytosine
  modified_base 62: mod_base = OTHER; note = 2'-fluorocytosine
  modified_base 63: mod_base = OTHER; note = 2'-Omethyluridine phosphorothiorate
  modified_base 68: mod_base = OTHER; note = 2'-Omethyladenosine
  modified_base 72: mod_base = OTHER; note = Guanosine phosphorothiorate
  modified_base 73: mod_base = OTHER; note = Cytosine phosphorothiorate
  modified_base 74: mod_base = OTHER; note = 2'-Omethylcytosine

SEQ ID NO: 4142 - RNA, 76 nt, synthetic construct; identical to SEQ ID NO: 625
  source 1..76: mol_type = other RNA
  modified_base 1: mod_base = OTHER; note = Guanosine phosphorothiorate
  modified_base 2: mod_base = OTHER; note = 2'-fluoroguanosine
  modified_base 3: mod_base = OTHER; note = 2'-fluorocytosine
  modified_base 9: mod_base = OTHER; note = Guanosine phosphorothiorate
  modified_base 10: mod_base = OTHER; note = 2'-fluoroguanosine
  modified_base 11: mod_base = OTHER; note = 2'-Omethylcytosine
  modified_base 12: mod_base = OTHER; note = 2'-Omethylguanosine phosphorothiorate
  modified_base 13: mod_base = OTHER; note = 2'-fluorocytosine phosphorothiorate
  modified_base 16: mod_base = OTHER; note = 2'-fluorouridine
  modified_base 20: mod_base = OTHER; note = 2'-Omethyluridine
  modified_base 25: mod_base = OTHER; note = Cytosine phosphorothiorate
  modified_base 27: mod_base = OTHER; note = 2'-fluorouridine
  modified_base 28: mod_base = OTHER; note = 2'-Omethyluridine
  modified_base 29: mod_base = OTHER; note = Guanosine phosphorothiorate
  modified_base 34: mod_base = OTHER; note = 2'-Omethyluridine
  modified_base 38: mod_base = OTHER; note = 2'-Omethyladenosine
  modified_base 39: mod_base = OTHER; note = 2'-fluorouridine phosphorothiorate
  modified_base 40: mod_base = OTHER; note = 2'-Omethyluridine
  modified_base 43: mod_base = OTHER; note = 2'-fluoroadenosine phosphorothiorate
  modified_base 44: mod_base = OTHER; note = 2'-Omethyladenosine phosphorothiorate
  modified_base 45: mod_base = OTHER; note = 2'-fluoroguanosine
  modified_base 46: mod_base = OTHER; note = 2'-Omethylguanosine
  modified_base 47: mod_base = OTHER; note = Uridine phosphorothiorate
  modified_base 48: mod_base = OTHER; note = 2'-Omethyluridine
  modified_base 54: mod_base = OTHER; note = 2'-Omethyluridine
  modified_base 56: mod_base = OTHER; note = Cytosine phosphorothiorate
  modified_base 57: mod_base = OTHER; note = 2'-fluoroguanosine
  modified_base 61: mod_base = OTHER; note = 2'-Omethylcytosine
  modified_base 63: mod_base = OTHER; note = 2'-fluorocytosine
  modified_base 65: mod_base = OTHER; note = 2'-Omethylguanosine phosphorothiorate
  modified_base 66: mod_base = OTHER; note = 2'-fluorocytosine
  modified_base 67: mod_base = OTHER; note = 2'-Omethylguanosine phosphorothiorate
  modified_base 68: mod_base = OTHER; note = 2'-Omethylguanosine
  modified_base 69: mod_base = OTHER; note = 2'-fluoroadenosine
  modified_base 75: mod_base = OTHER; note = 2'-Omethylcytosine
  modified_base 76: mod_base = OTHER; note = 2'-Omethyladenosine

SEQ ID NO: 4143 - RNA, 76 nt, synthetic construct; identical to SEQ ID NO: 3318
  source 1..76: mol_type = other RNA
  modified_base 1: mod_base = OTHER; note = 2'-Omethylcytosine phosphorothiorate
  modified_base 2: mod_base = OTHER; note = 2'-Omethylcytosine
  modified_base 3: mod_base = OTHER; note = 2'-Omethyluridine
  modified_base 4: mod_base = OTHER; note = 2'-Omethyluridine
  modified_base 5: mod_base = OTHER; note = 2'-Omethylcytosine
  modified_base 6: mod_base = OTHER; note = 2'-Omethylguanosine
  modified_base 54: mod_base = OTHER; note = 2'-Omethyluridine phosphorothiorate
  modified_base 55: mod_base = OTHER; note = Uridine phosphorothiorate
  modified_base 56: mod_base = OTHER; note = 2'-Omethylcytosine
  modified_base 57: mod_base = OTHER; note = 2'-fluoroguanosine
  modified_base 58: mod_base = OTHER; note = Adenosine phosphorothiorate
  modified_base 59: mod_base = OTHER; note = 2'-Omethyladenosine
  modified_base 60: mod_base = OTHER; note = 2'-fluorouridine
  modified_base 73: mod_base = OTHER; note = 2'-Omethyladenosine

SEQ ID NO: 4144 - RNA, 76 nt, synthetic construct; identical to SEQ ID NO: 625
  source 1..76: mol_type = other RNA
  modified_base 1: mod_base = OTHER; note = 2'-Omethylguanosine phosphorothiorate
  modified_base 2: mod_base = OTHER; note = 2'-Omethylguanosine
  modified_base 10: mod_base = OTHER; note = 2'-Omethylguanosine
  modified_base 11: mod_base = OTHER; note = 2'-Omethylcytosine
  modified_base 12: mod_base = OTHER; note = 2'-Omethylguanosine
  modified_base 13: mod_base = OTHER; note = 2'-Omethylcytosine
  modified_base 17: mod_base = OTHER; note = 2'-Omethylguanosine
  modified_base 22: mod_base = OTHER; note = 2'-Omethylguanosine
  modified_base 23: mod_base = OTHER; note = 2'-Omethylcytosine
  modified_base 24: mod_base = OTHER; note = 2'-Omethylguanosine
  modified_base 25: mod_base = OTHER; note = 2'-Omethylcytosine
  modified_base 33: mod_base = OTHER; note = 2'-fluorouridine
  modified_base 35: mod_base = OTHER; note = Cytosine phosphorothiorate
  modified_base 37: mod_base = OTHER; note = Adenosine phosphorothiorate
  modified_base 38: mod_base = OTHER; note = Adenosine phosphorothiorate
  modified_base 52: mod_base = OTHER; note = 2'-Omethylguanosine
  modified_base 56: mod_base = OTHER; note = 2'-Omethylcytosine
  modified_base 59: mod_base = OTHER; note = 2'-Omethylguanosine
  modified_base 62: mod_base = OTHER; note = 2'-Omethylcytosine
  modified_base 63: mod_base = OTHER; note = 2'-fluorocytosine
  modified_base 73: mod_base = OTHER; note = 2'-Omethylguanosine
  modified_base 75: mod_base = OTHER; note = 2'-fluorocytosine phosphorothiorate

SEQ ID NO: 4145 - RNA, 76 nt, synthetic construct; identical to SEQ ID NO: 625
  source 1..76: mol_type = other RNA
  modified_base 1: mod_base = OTHER; note = 2'-Omethylguanosine
  modified_base 2: mod_base = OTHER; note = 2'-Omethylguanosine
  modified_base 3: mod_base = OTHER; note = 2'-Omethylcytosine
  modified_base 4: mod_base = OTHER; note = 2'-Omethyluridine
  modified_base 5: mod_base = OTHER; note = 2'-Omethylcytosine
  modified_base 6: mod_base = OTHER; note = 2'-Omethylcytosine
  modified_base 10: mod_base = OTHER; note = 2'-Omethylguanosine
  modified_base 11: mod_base = OTHER; note = 2'-Omethylcytosine
  modified_base 12: mod_base = OTHER; note = 2'-Omethylguanosine
  modified_base 13: mod_base = OTHER; note = 2'-Omethylcytosine
  modified_base 14: mod_base = OTHER; note = 2'-Omethyladenosine
  modified_base 15: mod_base = OTHER; note = 2'-fluoroadenosine
  modified_base 16: mod_base = OTHER; note = 2'-Omethyluridine
  modified_base 17: mod_base = OTHER; note = 2'-Omethylguanosine
  modified_base 18: mod_base = OTHER; note = 2'-Omethylguanosine
  modified_base 19: mod_base = OTHER; note = 2'-fluoroadenosine
  modified_base 20: mod_base = OTHER; note = 2'-Omethyluridine
  modified_base 21: mod_base = OTHER; note = 2'-fluoroadenosine
  modified_base 22: mod_base = OTHER; note = 2'-Omethylguanosine
  modified_base 23: mod_base = OTHER; note = 2'-Omethylcytosine
  modified_base 24: mod_base = OTHER; note = 2'-Omethylguanosine
  modified_base 25: mod_base = OTHER; note = 2'-Omethylcytosine
  modified_base 54: mod_base = OTHER; note = Uridine phosphorothiorate
  modified_base 55: mod_base = OTHER; note = Uridine phosphorothiorate
  modified_base 56: mod_base = OTHER; note = Cytosine phosphorothiorate
  modified_base 57: mod_base = OTHER; note = Guanosine phosphorothiorate
  modified_base 73: mod_base = OTHER; note = 2'-Omethylguanosine

SEQ ID NO: 4146 - RNA, 75 nt, synthetic construct; identical to SEQ ID NO: 1045
  source 1..75: mol_type = other RNA
  modified_base 1: mod_base = OTHER; note = 2'-Omethylguanosine phosphorothiorate
  modified_base 2: mod_base = OTHER; note = 2'-Omethylguanosine
  modified_base 9: mod_base = OTHER; note = 2'-Omethylguanosine
  modified_base 13: mod_base = OTHER; note = 2'-Omethyluridine phosphorothiorate
  modified_base 14: mod_base = OTHER; note = 2'-Omethyladenosine phosphorothiorate
  modified_base 15: mod_base = OTHER; note = 2'-Omethyladenosine
  modified_base 17: mod_base = OTHER; note = 2'-Omethylguanosine phosphorothiorate
  modified_base 22: mod_base = OTHER; note = 2'-Omethylguanosine phosphorothiorate
  modified_base 32: mod_base = OTHER; note = 2'-Omethylcytosine
  modified_base 34: mod_base = OTHER; note = 2'-Omethyluridine
  modified_base 56: mod_base = OTHER; note = 2'-Omethylguanosine phosphorothiorate
  modified_base 63: mod_base = OTHER; note = 2'-fluoroguanosine phosphorothiorate
  modified_base 65: mod_base = OTHER; note = 2'-Omethyluridine
  modified_base 72: mod_base = OTHER; note = 2'-Omethyluridine
  modified_base 73: mod_base = OTHER; note = 2'-Omethylcytosine phosphorothiorate
  modified_base 74: mod_base = OTHER; note = 2'-Omethylcytosine phosphorothiorate

SEQ ID NO: 4147 - RNA, 76 nt, synthetic construct; identical to SEQ ID NO: 625
  source 1..76: mol_type = other RNA
  modified_base 3: mod_base = OTHER; note = 2'-fluorocytosine
  modified_base 5: mod_base = OTHER; note = 2'-Omethylcytosine
  modified_base 11: mod_base = OTHER; note = 2'-Omethylcytosine
  modified_base 12: mod_base = OTHER; note = Guanosine phosphorothiorate
  modified_base 13: mod_base = OTHER; note = 2'-Omethylcytosine
  modified_base 15: mod_base = OTHER; note = 2'-Omethyladenosine phosphorothiorate
  modified_base 16: mod_base = OTHER; note = 2'-Omethyluridine phosphorothiorate
  modified_base 20: mod_base = OTHER; note = Uridine phosphorothiorate
  modified_base 23: mod_base = OTHER; note = 2'-fluorocytosine
  modified_base 24: mod_base = OTHER; note = 2'-fluoroguanosine phosphorothiorate
  modified_base 28: mod_base = OTHER; note = Uridine phosphorothiorate
  modified_base 29: mod_base = OTHER; note = 2'-fluoroguanosine
  modified_base 30: mod_base = OTHER; note = 2'-Omethylguanosine phosphorothiorate
  modified_base 31: mod_base = OTHER; note = 2'-Omethyladenosine
  modified_base 32: mod_base = OTHER; note = 2'-fluorocytosine
  modified_base 33: mod_base = OTHER; note = Uridine phosphorothiorate
  modified_base 37: mod_base = OTHER; note = Adenosine phosphorothiorate
  modified_base 38: mod_base = OTHER; note = 2'-Omethyladenosine
  modified_base 42: mod_base = OTHER; note = 2'-Omethyladenosine
  modified_base 46: mod_base = OTHER; note = Guanosine phosphorothiorate
  modified_base 47: mod_base = OTHER; note = 2'-fluorouridine
  modified_base 48: mod_base = OTHER; note = 2'-fluorouridine
  modified_base 50: mod_base = OTHER; note = Cytosine phosphorothiorate
  modified_base 51: mod_base = OTHER; note = Guanosine phosphorothiorate
  modified_base 53: mod_base = OTHER; note = 2'-fluoroguanosine
  modified_base 54: mod_base = OTHER; note = 2'-Omethyluridine phosphorothiorate
  modified_base 55: mod_base = OTHER; note = Uridine phosphorothiorate
  modified_base 56: mod_base = OTHER; note = 2'-fluorocytosine
  modified_base 61: mod_base = OTHER; note = 2'-fluorocytosine
  modified_base 62: mod_base = OTHER; note = 2'-Omethylcytosine
  modified_base 64: mod_base = OTHER; note = Guanosine phosphorothiorate
  modified_base 65: mod_base = OTHER; note = 2'-fluoroguanosine
  modified_base 67: mod_base = OTHER; note = 2'-fluoroguanosine phosphorothiorate
  modified_base 71: mod_base = OTHER; note = 2'-Omethyluridine
  modified_base 76: mod_base = OTHER; note = 2'-Omethyladenosine

SEQ ID NO: 4148 - RNA, 75 nt, synthetic construct; identical to SEQ ID NO: 3306
  source 1..75: mol_type = other RNA
  modified_base 21: mod_base = OTHER; note = 2'-Omethylguanosine
  modified_base 22: mod_base = OTHER; note = 2'-Omethylcytosine
  modified_base 23: mod_base = OTHER; note = 2'-Omethylguanosine
  modified_base 24: mod_base = OTHER; note = 2'-Omethylcytosine
  modified_base 72: mod_base = OTHER; note = 2'-Omethyladenosine

SEQ ID NO: 4149 - RNA, 76 nt, synthetic construct; identical to SEQ ID NO: 3615
  source 1..76: mol_type = other RNA
  modified_base 1: mod_base = OTHER; note = 2'-Omethylguanosine phosphorothiorate
  modified_base 2: mod_base = OTHER; note = 2'-Omethylguanosine phosphorothiorate
  modified_base 52: mod_base = OTHER; note = Guanosine phosphorothiorate
  modified_base 74: mod_base = OTHER; note = Cytosine phosphorothiorate
  modified_base 75: mod_base = OTHER; note = 2'-Omethylcytosine

SEQ ID NO: 4150 - RNA, 76 nt, synthetic construct; identical to SEQ ID NO: 3490
  source 1..76: mol_type = other RNA
  modified_base 1: mod_base = OTHER; note = 2'-Omethylguanosine
  modified_base 10: mod_base = OTHER; note = 2'-Omethylguanosine
  modified_base 13: mod_base = OTHER; note = 2'-Omethylcytosine
  modified_base 17: mod_base = OTHER; note = Guanosine phosphorothiorate
  modified_base 18: mod_base = OTHER; note = 2'-Omethylguanosine
  modified_base 19: mod_base = OTHER; note = Adenosine phosphorothiorate
  modified_base 20: mod_base = OTHER; note = 2'-Omethyluridine
  modified_base 25: mod_base = OTHER; note = 2'-Omethylcytosine
  modified_base 29: mod_base = OTHER; note = 2'-Omethylguanosine
  modified_base 33: mod_base = OTHER; note = 2'-fluorouridine
  modified_base 35: mod_base = OTHER; note = Cytosine phosphorothiorate
  modified_base 37: mod_base = OTHER; note = Adenosine phosphorothiorate
  modified_base 38: mod_base = OTHER; note = Adenosine phosphorothiorate
  modified_base 41: mod_base = OTHER; note = 2'-fluorocytosine phosphorothiorate
  modified_base 43: mod_base = OTHER; note = 2'-Omethyladenosine
  modified_base 44: mod_base = OTHER; note = 2'-fluoroadenosine
  modified_base 46: mod_base = OTHER; note = Guanosine phosphorothiorate
  modified_base 50: mod_base = OTHER; note = 2'-Omethylcytosine
  modified_base 52: mod_base = OTHER; note = 2'-Omethylguanosine
  modified_base 54: mod_base = OTHER; note = Uridine phosphorothiorate
  modified_base 55: mod_base = OTHER; note = Uridine phosphorothiorate
  modified_base 56: mod_base = OTHER; note = 2'-Omethylcytosine
  modified_base 57: mod_base = OTHER; note = Guanosine phosphorothiorate
  modified_base 62: mod_base = OTHER; note = 2'-Omethylcytosine
  modified_base 63: mod_base = OTHER; note = 2'-fluorocytosine
  modified_base 65: mod_base = OTHER; note = 2'-Omethylcytosine
  modified_base 71: mod_base = OTHER; note = 2'-Omethyluridine
  modified_base 73: mod_base = OTHER; note = 2'-Omethylguanosine

SEQ ID NO: 4151 - RNA, 75 nt, synthetic construct; identical to SEQ ID NO: 3306
  source 1..75: mol_type = other RNA
  modified_base 1: mod_base = OTHER; note = 2'-Omethylguanosine
  modified_base 19: mod_base = OTHER; note = 2'-Omethyluridine
  modified_base 21: mod_base = OTHER; note = 2'-Omethylguanosine
  modified_base 39: mod_base = OTHER; note = 2'-fluorocytosine
  modified_base 40: mod_base = OTHER; note = 2'-Omethyladenosine
  modified_base 41: mod_base = OTHER; note = 2'-Omethylguanosine
  modified_base 42: mod_base = OTHER; note = 2'-Omethyladenosine
  modified_base 72: mod_base = OTHER; note = 2'-Omethyladenosine

SEQ ID NO: 4152 - RNA, 76 nt, synthetic construct; identical to SEQ ID NO: 3295
  source 1..76: mol_type = other RNA
  modified_base 1: mod_base = OTHER; note = 2'-Omethylcytosine phosphorothiorate
  modified_base 2: mod_base = OTHER; note = 2'-Omethylcytosine phosphorothiorate
  modified_base 7: mod_base = OTHER; note = 2'-fluoroadenosine
  modified_base 15: mod_base = OTHER; note = 2'-fluoroguanosine phosphorothiorate
  modified_base 25: mod_base = OTHER; note = 2'-fluorocytosine phosphorothiorate
  modified_base 43: mod_base = OTHER; note = 2'-fluorouridine
  modified_base 48: mod_base = OTHER; note = 2'-fluorocytosine phosphorothiorate
  modified_base 52: mod_base = OTHER; note = 2'-Omethylguanosine phosphorothiorate
  modified_base 69: mod_base = OTHER; note = 2'-fluoroadenosine
  modified_base 75: mod_base = OTHER; note = Cytosine phosphorothiorate

SEQ ID NO: 4153 - RNA, 75 nt, synthetic construct; identical to SEQ ID NO: 3306
  source 1..75: mol_type = other RNA
  modified_base 1: mod_base = OTHER; note = 2'-Omethylguanosine
  modified_base 10: mod_base = OTHER; note = 2'-Omethylguanosine
  modified_base 11: mod_base = OTHER; note = 2'-Omethylcytosine
  modified_base 12: mod_base = OTHER; note = 2'-Omethylguanosine
  modified_base 13: mod_base = OTHER; note = 2'-Omethylcytosine
  modified_base 14: mod_base = OTHER; note = 2'-Omethyladenosine
  modified_base 15: mod_base = OTHER; note = 2'-Omethyladenosine
  modified_base 16: mod_base = OTHER; note = 2'-Omethylcytosine
  modified_base 17: mod_base = OTHER; note = 2'-Omethylguanosine
  modified_base 18: mod_base = OTHER; note = 2'-Omethylguanosine
  modified_base 19: mod_base = OTHER; note = Uridine phosphorothiorate
  modified_base 20: mod_base = OTHER; note = Adenosine phosphorothiorate
  modified_base 24: mod_base = OTHER; note = 2'-Omethylcytosine
  modified_base 40: mod_base = OTHER; note = 2'-Omethyladenosine
  modified_base 41: mod_base = OTHER; note = 2'-Omethylguanosine
  modified_base 42: mod_base = OTHER; note = 2'-Omethyladenosine
  modified_base 43: mod_base = OTHER; note = 2'-Omethyladenosine
  modified_base 48: mod_base = OTHER; note = 2'-Omethylguanosine
  modified_base 49: mod_base = OTHER; note = 2'-Omethylcytosine
  modified_base 51: mod_base = OTHER; note = 2'-Omethyluridine
  modified_base 53: mod_base = OTHER; note = Uridine phosphorothiorate
  modified_base 54: mod_base = OTHER; note = Uridine phosphorothiorate
  modified_base 60: mod_base = OTHER; note = 2'-Omethylcytosine
  modified_base 64: mod_base = OTHER; note = 2'-Omethyluridine
  modified_base 72: mod_base = OTHER; note = 2'-Omethyladenosine

SEQ ID NO: 4154 - RNA, 75 nt, synthetic construct; identical to SEQ ID NO: 3306
  source 1..75: mol_type = other RNA
  modified_base 1: mod_base = OTHER; note = 2'-Omethylguanosine
  modified_base 34: mod_base = OTHER; note = Uridine phosphorothiorate
  modified_base 36: mod_base = OTHER; note = Guanosine phosphorothiorate
  modified_base 37: mod_base = OTHER; note = Adenosine phosphorothiorate
  modified_base 72: mod_base = OTHER; note = 2'-Omethyladenosine

SEQ ID NO: 4155 - RNA, 86 nt, synthetic construct; identical to SEQ ID NO: 3290
  source 1..86: mol_type = other RNA
  modified_base 38: mod_base = OTHER; note = Adenosine phosphorothiorate

SEQ ID NO: 4156 - RNA, 76 nt, synthetic construct; identical to SEQ ID NO: 3447
  source 1..76: mol_type = other RNA
  modified_base 1: mod_base = OTHER; note = 2'-Omethylguanosine
  modified_base 2: mod_base = OTHER; note = 2'-Omethylcytosine
  modified_base 3: mod_base = OTHER; note = 2'-Omethylcytosine
  modified_base 4: mod_base = OTHER; note = 2'-Omethylcytosine
  modified_base 5: mod_base = OTHER; note = 2'-Omethylguanosine
  modified_base 6: mod_base = OTHER; note = 2'-Omethyladenosine
  modified_base 14: mod_base = OTHER; note = 2'-Omethyladenosine
  modified_base 15: mod_base = OTHER; note = 2'-Omethyladenosine
  modified_base 16: mod_base = OTHER; note = 2'-Omethyluridine
  modified_base 17: mod_base = OTHER; note = 2'-Omethylguanosine
  modified_base 18: mod_base = OTHER; note = 2'-Omethylguanosine
  modified_base 20: mod_base = OTHER; note = 2'-Omethyluridine
  modified_base 25: mod_base = OTHER; note = 2'-Omethylcytosine
  modified_base 33: mod_base = OTHER; note = 2'-fluorouridine
  modified_base 35: mod_base = OTHER; note = Cytosine phosphorothiorate
  modified_base 37: mod_base = OTHER; note = Adenosine phosphorothiorate
  modified_base 38: mod_base = OTHER; note = Adenosine phosphorothiorate
  modified_base 41: mod_base = OTHER; note = 2'-Omethylcytosine
  modified_base 42: mod_base = OTHER; note = 2'-Omethyladenosine
  modified_base 43: mod_base = OTHER; note = 2'-Omethyladenosine
  modified_base 44: mod_base = OTHER; note = 2'-fluoroadenosine
  modified_base 49: mod_base = OTHER; note = 2'-Omethylcytosine
  modified_base 50: mod_base = OTHER; note = 2'-Omethylcytosine
  modified_base 52: mod_base = OTHER; note = 2'-Omethylguanosine
  modified_base 54: mod_base = OTHER; note = 2'-Omethyluridine
  modified_base 55: mod_base = OTHER; note = Uridine phosphorothiorate
  modified_base 56: mod_base = OTHER; note = 2'-Omethylcytosine
  modified_base 57: mod_base = OTHER; note = 2'-fluoroguanosine
  modified_base 59: mod_base = OTHER; note = 2'-Omethylguanosine
  modified_base 61: mod_base = OTHER; note = 2'-Omethylcytosine
  modified_base 65: mod_base = OTHER; note = 2'-Omethylguanosine
  modified_base 73: mod_base = OTHER; note = 2'-Omethylguanosine

SEQ ID NO: 4157 - RNA, 76 nt, synthetic construct; identical to SEQ ID NO: 625
  source 1..76: mol_type = other RNA
  modified_base 1: mod_base = OTHER; note = 2'-Omethylguanosine phosphorothiorate
  modified_base 2: mod_base = OTHER; note = 2'-Omethylguanosine
  modified_base 3: mod_base = OTHER; note = 2'-Omethylcytosine
  modified_base 4: mod_base = OTHER; note = 2'-Omethyluridine
  modified_base 5: mod_base = OTHER; note = 2'-Omethylcytosine
  modified_base 6: mod_base = OTHER; note = 2'-Omethylcytosine
  modified_base 10: mod_base = OTHER; note = 2'-Omethylguanosine
  modified_base 11: mod_base = OTHER; note = 2'-Omethylcytosine
  modified_base 12: mod_base = OTHER; note = 2'-Omethylguanosine
  modified_base 13: mod_base = OTHER; note = 2'-Omethylcytosine
  modified_base 22: mod_base = OTHER; note = 2'-Omethylguanosine
  modified_base 23: mod_base = OTHER; note = 2'-Omethylcytosine
  modified_base 24: mod_base = OTHER; note = 2'-Omethylguanosine
  modified_base 25: mod_base = OTHER; note = 2'-Omethylcytosine
  modified_base 40: mod_base = OTHER; note = 2'-fluorouridine
  modified_base 41: mod_base = OTHER; note = 2'-fluorocytosine
  modified_base 42: mod_base = OTHER; note = 2'-fluoroadenosine
  modified_base 43: mod_base = OTHER; note = 2'-fluoroadenosine
  modified_base 49: mod_base = OTHER; note = 2'-Omethylcytosine
  modified_base 50: mod_base = OTHER; note = 2'-Omethylcytosine
  modified_base 51: mod_base = OTHER; note = 2'-Omethylguanosine
  modified_base 52: mod_base = OTHER; note = 2'-Omethylguanosine
  modified_base 53: mod_base = OTHER; note = 2'-Omethylguanosine
  modified_base 61: mod_base = OTHER; note = 2'-Omethylcytosine
  modified_base 62: mod_base = OTHER; note = 2'-Omethylcytosine
  modified_base 63: mod_base = OTHER; note = 2'-fluorocytosine
  modified_base 64: mod_base = OTHER; note = 2'-Omethylguanosine
  modified_base 65: mod_base = OTHER; note = 2'-Omethylguanosine
  modified_base 66: mod_base = OTHER; note = 2'-Omethylcytosine
  modified_base 67: mod_base = OTHER; note = 2'-Omethylguanosine
  modified_base 68: mod_base = OTHER; note = 2'-Omethylguanosine
  modified_base 69: mod_base = OTHER; note = 2'-fluoroadenosine
  modified_base 71: mod_base = OTHER; note = 2'-Omethyluridine

SEQ ID NO: 4158 - RNA, 85 nt, synthetic construct; identical to SEQ ID NO: 3286
  source 1..85: mol_type = other RNA
  modified_base 1: mod_base = OTHER; note = 2'-Omethylcytosine
  modified_base 15: mod_base = OTHER; note = 2'-Omethyluridine
  modified_base 25: mod_base = OTHER; note = 2'-fluoroguanosine phosphorothiorate
  modified_base 30: mod_base = OTHER; note = 2'-fluoroadenosine
  modified_base 32: mod_base = OTHER; note = 2'-fluorouridine phosphorothiorate
  modified_base 44: mod_base = OTHER; note = Guanosine phosphorothiorate
  modified_base 48: mod_base = OTHER; note = 2'-Omethyladenosine
  modified_base 50: mod_base = OTHER; note = 2'-Omethyladenosine
  modified_base 52: mod_base = OTHER; note = Guanosine phosphorothiorate
  modified_base 56: mod_base = OTHER; note = 2'-fluoroguanosine
  modified_base 57: mod_base = OTHER; note = 2'-Omethylcytosine
  modified_base 60: mod_base = OTHER; note = 2'-fluoroguanosine
  modified_base 66: mod_base = OTHER; note = Guanosine phosphorothiorate
  modified_base 67: mod_base = OTHER; note = 2'-fluoroadenosine phosphorothiorate
  modified_base 74: mod_base = OTHER; note = 2'-fluorocytosine
  modified_base 83: mod_base = OTHER; note = Cytosine phosphorothiorate

SEQ ID NO: 4159 - RNA, 85 nt, synthetic construct; identical to SEQ ID NO: 3310
  source 1..85: mol_type = other RNA
  modified_base 28: mod_base = OTHER; note = 2'-fluoroguanosine
  modified_base 47: mod_base = OTHER; note = 2'-Omethylcytosine
  modified_base 58: mod_base = OTHER; note = 2'-fluoroguanosine
  modified_base 61: mod_base = OTHER; note = Guanosine phosphorothiorate
  modified_base 76: mod_base = OTHER; note = 2'-fluorocytosine

SEQ ID NO: 4160 - RNA, 76 nt, synthetic construct; identical to SEQ ID NO: 3318
  source 1..76: mol_type = other RNA
  modified_base 1: mod_base = OTHER; note = 2'-Omethylcytosine phosphorothiorate
  modified_base 2: mod_base = OTHER; note = 2'-Omethylcytosine phosphorothiorate
  modified_base 3: mod_base = OTHER; note = 2'-Omethyluridine
  modified_base 4: mod_base = OTHER; note = 2'-Omethyluridine
  modified_base 5: mod_base = OTHER; note = 2'-Omethylcytosine
  modified_base 6: mod_base = OTHER; note = 2'-Omethylguanosine
  modified_base 10: mod_base = OTHER; note = 2'-Omethylguanosine
  modified_base 11: mod_base = OTHER; note = 2'-Omethylcytosine
  modified_base 12: mod_base = OTHER; note = 2'-Omethyluridine
  modified_base 13: mod_base = OTHER; note = 2'-Omethylcytosine
  modified_base 16: mod_base = OTHER; note = 2'-Omethyluridine
  modified_base 18: mod_base = OTHER; note = 2'-Omethylguanosine
  modified_base 19: mod_base = OTHER; note = 2'-Omethylguanosine
  modified_base 33: mod_base = OTHER; note = 2'-fluorouridine
  modified_base 35: mod_base = OTHER; note = Uridine phosphorothiorate
  modified_base 37: mod_base = OTHER; note = Guanosine phosphorothiorate
  modified_base 38: mod_base = OTHER; note = Adenosine phosphorothiorate
  modified_base 44: mod_base = OTHER; note = 2'-Omethyladenosine
  modified_base 45: mod_base = OTHER; note = 2'-Omethylguanosine
  modified_base 46: mod_base = OTHER; note = 2'-fluoroguanosine
  modified_base 47: mod_base = OTHER; note = 2'-fluorouridine
  modified_base 48: mod_base = OTHER; note = 2'-fluorocytosine
  modified_base 56: mod_base = OTHER; note = 2'-Omethylcytosine
  modified_base 59: mod_base = OTHER; note = 2'-Omethyladenosine
  modified_base 61: mod_base = OTHER; note = 2'-Omethylcytosine
  modified_base 62: mod_base = OTHER; note = 2'-Omethylcytosine
  modified_base 63: mod_base = OTHER; note = 2'-fluoroguanosine
  modified_base 64: mod_base = OTHER; note = 2'-Omethylguanosine
  modified_base 65: mod_base = OTHER; note = 2'-Omethylcytosine
  modified_base 66: mod_base = OTHER; note = 2'-Omethyluridine
  modified_base 67: mod_base = OTHER; note = 2'-Omethylcytosine
  modified_base 68: mod_base = OTHER; note = 2'-Omethylguanosine
  modified_base 73: mod_base = OTHER; note = 2'-Omethyladenosine

SEQ ID NO: 4161 - RNA, 76 nt, synthetic construct; identical to SEQ ID NO: 625
  source 1..76: mol_type = other RNA
  modified_base 1: mod_base = OTHER; note = 2'-Omethylguanosine
  modified_base 2: mod_base = OTHER; note = 2'-Omethylguanosine
  modified_base 3: mod_base = OTHER; note = 2'-Omethylcytosine
  modified_base 10: mod_base = OTHER; note = 2'-Omethylguanosine
  modified_base 11: mod_base = OTHER; note = 2'-Omethylcytosine
  modified_base 12: mod_base = OTHER; note = 2'-Omethylguanosine
  modified_base 13: mod_base = OTHER; note = 2'-Omethylcytosine
  modified_base 14: mod_base = OTHER; note = 2'-Omethyladenosine
  modified_base 15: mod_base = OTHER; note = 2'-fluoroadenosine
  modified_base 16: mod_base = OTHER; note = 2'-Omethyluridine
  modified_base 17: mod_base = OTHER; note = 2'-Omethylguanosine
  modified_base 18: mod_base = OTHER; note = 2'-Omethylguanosine
  modified_base 19: mod_base = OTHER; note = 2'-fluoroadenosine
  modified_base 20: mod_base = OTHER; note = 2'-Omethyluridine
  modified_base 21: mod_base = OTHER; note = 2'-fluoroadenosine
  modified_base 22: mod_base = OTHER; note = 2'-Omethylguanosine
  modified_base 23: mod_base = OTHER; note = 2'-Omethylcytosine
  modified_base 24: mod_base = OTHER; note = 2'-Omethylguanosine
  modified_base 25: mod_base = OTHER; note = 2'-Omethylcytosine
  modified_base 38: mod_base = OTHER; note = Adenosine phosphorothiorate
  modified_base 39: mod_base = OTHER; note = Uridine phosphorothiorate
  modified_base 40: mod_base = OTHER; note = 2'-fluorouridine
  modified_base 43: mod_base = OTHER; note = 2'-Omethyladenosine
  modified_base 44: mod_base = OTHER; note = 2'-Omethyladenosine
  modified_base 45: mod_base = OTHER; note = 2'-Omethylguanosine
  modified_base 46: mod_base = OTHER; note = 2'-fluoroguanosine
  modified_base 48: mod_base = OTHER; note = 2'-fluorouridine
  modified_base 49: mod_base = OTHER; note = 2'-Omethylcytosine
  modified_base 50: mod_base = OTHER; note = 2'-Omethylcytosine
  modified_base 54: mod_base = OTHER; note = Uridine phosphorothiorate
  modified_base 55: mod_base = OTHER; note = Uridine phosphorothiorate
  modified_base 56: mod_base = OTHER; note = 2'-Omethylcytosine
  modified_base 57: mod_base = OTHER; note = Guanosine phosphorothiorate
  modified_base 61: mod_base = OTHER; note = 2'-Omethylcytosine
  modified_base 62: mod_base = OTHER; note = 2'-Omethylcytosine
  modified_base 63: mod_base = OTHER; note = 2'-fluorocytosine
  modified_base 64: mod_base = OTHER; note = 2'-Omethylguanosine
  modified_base 65: mod_base = OTHER; note = 2'-Omethylguanosine
  modified_base 66: mod_base = OTHER; note = 2'-Omethylcytosine
  modified_base 67: mod_base = OTHER; note = 2'-Omethylguanosine
  modified_base 68: mod_base = OTHER; note = 2'-Omethylguanosine
  modified_base 69: mod_base = OTHER; note = 2'-Omethyladenosine

SEQ ID NO: 4162 - RNA, 75 nt, synthetic construct; identical to SEQ ID NO: 3311
  source 1..75: mol_type = other RNA
  modified_base 1: mod_base = OTHER; note = 2'-Omethylguanosine phosphorothiorate
  modified_base 2: mod_base = OTHER; note = 2'-Omethylguanosine phosphorothiorate
  modified_base 14: mod_base = OTHER; note = 2'-fluoroadenosine
  modified_base 16: mod_base = OTHER; note = 2'-fluorouridine
  modified_base 22: mod_base = OTHER; note = 2'-fluoroguanosine
  modified_base 24: mod_base = OTHER; note = 2'-fluoroadenosine
  modified_base 40: mod_base = OTHER; note = Cytosine phosphorothiorate
  modified_base 43: mod_base = OTHER; note = 2'-fluoroguanosine
  modified_base 44: mod_base = OTHER; note = 2'-fluorocytosine
  modified_base 45: mod_base = OTHER; note = 2'-fluoroguanosine phosphorothiorate
  modified_base 51: mod_base = OTHER; note = 2'-fluoroadenosine
  modified_base 60: mod_base = OTHER; note = 2'-fluorocytosine
  modified_base 73: mod_base = OTHER; note = Cytosine phosphorothiorate

SEQ ID NO: 4163 - RNA, 76 nt, synthetic construct; identical to SEQ ID NO: 3447
  source 1..76: mol_type = other RNA
  modified_base 1: mod_base = OTHER; note = 2'-Omethylguanosine phosphorothiorate
  modified_base 2: mod_base = OTHER; note = 2'-Omethylcytosine phosphorothiorate
  modified_base 52: mod_base = OTHER; note = Guanosine phosphorothiorate
  modified_base 74: mod_base = OTHER; note = Cytosine phosphorothiorate
  modified_base 75: mod_base = OTHER; note = 2'-Omethylcytosine

SEQ ID NO: 4164 - RNA, 76 nt, synthetic construct; identical to SEQ ID NO: 3289
  source 1..76: mol_type = other RNA
  modified_base 1: mod_base = OTHER; note = 2'-Omethylguanosine
  modified_base 2: mod_base = OTHER; note = 2'-Omethylcytosine
  modified_base 3: mod_base = OTHER; note = 2'-Omethylcytosine
  modified_base 4: mod_base = OTHER; note = 2'-Omethyluridine
  modified_base 5: mod_base = OTHER; note = 2'-Omethylguanosine
  modified_base 6: mod_base = OTHER; note = 2'-Omethylguanosine
  modified_base 13: mod_base = OTHER; note = 2'-Omethylcytosine
  modified_base 14: mod_base = OTHER; note = 2'-Omethyladenosine
  modified_base 15: mod_base = OTHER; note = 2'-Omethylguanosine
  modified_base 16: mod_base = OTHER; note = 2'-Omethyluridine
  modified_base 18: mod_base = OTHER; note = 2'-Omethylguanosine
  modified_base 19: mod_base = OTHER; note = 2'-Omethylguanosine
  modified_base 20: mod_base = OTHER; note = Uridine phosphorothiorate
  modified_base 21: mod_base = OTHER; note = Adenosine phosphorothiorate
  modified_base 25: mod_base = OTHER; note = 2'-Omethylcytosine
  modified_base 33: mod_base = OTHER; note = 2'-fluorouridine
  modified_base 34: mod_base = OTHER; note = 2'-Omethyluridine
  modified_base 35: mod_base = OTHER; note = Uridine phosphorothiorate
  modified_base 37: mod_base = OTHER; note = Adenosine phosphorothiorate
  modified_base 38: mod_base = OTHER; note = Adenosine phosphorothiorate
  modified_base 41: mod_base = OTHER; note = 2'-Omethyluridine
  modified_base 42: mod_base = OTHER; note = 2'-Omethylguanosine
  modified_base 43: mod_base = OTHER; note = 2'-Omethyladenosine
  modified_base 44: mod_base = OTHER; note = 2'-Omethylguanosine
  modified_base 49: mod_base = OTHER; note = 2'-Omethylcytosine
  modified_base 50: mod_base = OTHER; note = 2'-Omethyladenosine
  modified_base 52: mod_base = OTHER; note = 2'-Omethylguanosine
  modified_base 54: mod_base = OTHER; note = Uridine phosphorothiorate
  modified_base 55: mod_base = OTHER; note = Uridine phosphorothiorate
  modified_base 61: mod_base = OTHER; note = 2'-Omethylcytosine
  modified_base 65: mod_base = OTHER; note = 2'-Omethylguanosine
  modified_base 73: mod_base = OTHER; note = 2'-Omethylguanosine

SEQ ID NO: 4165 - RNA, 76 nt, synthetic construct; identical to SEQ ID NO: 625
  source 1..76: mol_type = other RNA
  modified_base 4: mod_base = OTHER; note = 2'-Omethyluridine phosphorothiorate
  modified_base 5: mod_base = OTHER; note = 2'-Omethylcytosine
  modified_base 8: mod_base = OTHER; note = Uridine phosphorothiorate
  modified_base 11: mod_base = OTHER; note = Cytosine phosphorothiorate
  modified_base 12: mod_base = OTHER; note = 2'-fluoroguanosine
  modified_base 16: mod_base = OTHER; note = 2'-Omethyluridine phosphorothiorate
  modified_base 23: mod_base = OTHER; note = 2'-Omethylcytosine
  modified_base 24: mod_base = OTHER; note = Guanosine phosphorothiorate
  modified_base 26: mod_base = OTHER; note = 2'-Omethyladenosine
  modified_base 27: mod_base = OTHER; note = Uridine phosphorothiorate
  modified_base 28: mod_base = OTHER; note = 2'-Omethyluridine
  modified_base 29: mod_base = OTHER; note = 2'-fluoroguanosine
  modified_base 33: mod_base = OTHER; note = 2'-fluorouridine phosphorothiorate
  modified_base 34: mod_base = OTHER; note = 2'-Omethyluridine
  modified_base 38: mod_base = OTHER; note = 2'-Omethyladenosine
  modified_base 39: mod_base = OTHER; note = 2'-Omethyluridine
  modified_base 41: mod_base = OTHER; note = 2'-Omethylcytosine
  modified_base 43: mod_base = OTHER; note = 2'-fluoroadenosine
  modified_base 48: mod_base = OTHER; note = 2'-Omethyluridine
  modified_base 50: mod_base = OTHER; note = 2'-fluorocytosine
  modified_base 52: mod_base = OTHER; note = 2'-Omethylguanosine phosphorothiorate
  modified_base 53: mod_base = OTHER; note = 2'-Omethylguanosine
  modified_base 55: mod_base = OTHER; note = Uridine phosphorothiorate
  modified_base 57: mod_base = OTHER; note = 2'-fluoroguanosine
  modified_base 60: mod_base = OTHER; note = 2'-Omethyluridine phosphorothiorate
  modified_base 61: mod_base = OTHER; note = 2'-fluorocytosine
  modified_base 62: mod_base = OTHER; note = 2'-Omethylcytosine phosphorothiorate
  modified_base 63: mod_base = OTHER; note = 2'-fluorocytosine
  modified_base 66: mod_base = OTHER; note = 2'-fluorocytosine
  modified_base 67: mod_base = OTHER; note = 2'-Omethylguanosine
  modified_base 70: mod_base = OTHER; note = 2'-Omethylguanosine phosphorothiorate
  modified_base 71: mod_base = OTHER; note = 2'-Omethyluridine
  modified_base 75: mod_base = OTHER; note = Cytosine phosphorothiorate
  modified_base 76: mod_base = OTHER; note = 2'-Omethyladenosine

SEQ ID NO: 4166 - RNA, 76 nt, synthetic construct; identical to SEQ ID NO: 625
  source 1..76: mol_type = other RNA
  modified_base 2: mod_base = OTHER; note = 2'-fluoroguanosine
  modified_base 3: mod_base = OTHER; note = 2'-fluorocytosine
  modified_base 4: mod_base = OTHER; note = 2'-fluorouridine
  modified_base 5: mod_base = OTHER; note = 2'-fluorocytosine phosphorothiorate
  modified_base 6: mod_base = OTHER; note = 2'-fluorocytosine
  modified_base 8: mod_base = OTHER; note = Uridine phosphorothiorate
  modified_base 11: mod_base = OTHER; note = Cytosine phosphorothiorate
  modified_base 14: mod_base = OTHER; note = 2'-fluoroadenosine
  modified_base 22: mod_base = OTHER; note = Guanosine phosphorothiorate
  modified_base 23: mod_base = OTHER; note = 2'-fluorocytosine
  modified_base 24: mod_base = OTHER; note = Guanosine phosphorothiorate
  modified_base 27: mod_base = OTHER; note = Uridine phosphorothiorate
  modified_base 28: mod_base = OTHER; note = 2'-Omethyluridine
  modified_base 29: mod_base = OTHER; note = 2'-fluoroguanosine phosphorothiorate
  modified_base 30: mod_base = OTHER; note = 2'-fluoroguanosine
  modified_base 33: mod_base = OTHER; note = 2'-fluorouridine
  modified_base 34: mod_base = OTHER; note = 2'-fluorouridine
  modified_base 37: mod_base = OTHER; note = Adenosine phosphorothiorate
  modified_base 38: mod_base = OTHER; note = 2'-fluoroadenosine
  modified_base 39: mod_base = OTHER; note = Uridine phosphorothiorate
  modified_base 40: mod_base = OTHER; note = 2'-fluorouridine
  modified_base 41: mod_base = OTHER; note = 2'-Omethylcytosine
  modified_base 46: mod_base = OTHER; note = Guanosine phosphorothiorate
  modified_base 47: mod_base = OTHER; note = 2'-Omethyluridine phosphorothiorate
  modified_base 48: mod_base = OTHER; note = 2'-Omethyluridine
  modified_base 53: mod_base = OTHER; note = 2'-fluoroguanosine
  modified_base 54: mod_base = OTHER; note = 2'-Omethyluridine
  modified_base 56: mod_base = OTHER; note = 2'-Omethylcytosine
  modified_base 57: mod_base = OTHER; note = 2'-Omethylguanosine
  modified_base 59: mod_base = OTHER; note = 2'-fluoroguanosine
  modified_base 61: mod_base = OTHER; note = Cytosine phosphorothiorate
  modified_base 62: mod_base = OTHER; note = 2'-fluorocytosine
  modified_base 63: mod_base = OTHER; note = 2'-fluorocytosine
  modified_base 64: mod_base = OTHER; note = Guanosine phosphorothiorate
  modified_base 66: mod_base = OTHER; note = Cytosine phosphorothiorate
  modified_base 67: mod_base = OTHER; note = 2'-Omethylguanosine
  modified_base 69: mod_base = OTHER; note = 2'-Omethyladenosine
  modified_base 74: mod_base = OTHER; note = 2'-Omethylcytosine phosphorothiorate
  modified_base 75: mod_base = OTHER; note = 2'-fluorocytosine phosphorothiorate

SEQ ID NO: 4167 - RNA, 85 nt, synthetic construct; identical to SEQ ID NO: 3297
  source 1..85: mol_type = other RNA
  modified_base 1: mod_base = OTHER; note = 2'-Omethylguanosine phosphorothiorate
  modified_base 2: mod_base = OTHER; note = 2'-Omethylcytosine phosphorothiorate
  modified_base 83: mod_base = OTHER; note = Cytosine phosphorothiorate
  modified_base 84: mod_base = OTHER; note = 2'-Omethylcytosine phosphorothiorate
  modified_base 85: mod_base = OTHER; note = 2'-Omethyladenosine

SEQ ID NO: 4168 - RNA, 74 nt, synthetic construct; identical to SEQ ID NO: 3293
  source 1..74: mol_type = other RNA
  modified_base 1: mod_base = OTHER; note = 2'-fluoroadenosine
  modified_base 2: mod_base = OTHER; note = Cytosine phosphorothiorate
  modified_base 3: mod_base = OTHER; note = Cytosine phosphorothiorate
  modified_base 4: mod_base = OTHER; note = Uridine phosphorothiorate
  modified_base 6: mod_base = OTHER; note = Guanosine phosphorothiorate
  modified_base 7: mod_base = OTHER; note = 2'-fluorouridine
  modified_base 8: mod_base = OTHER; note = Guanosine phosphorothiorate
  modified_base 9: mod_base = OTHER; note = 2'-fluoroguanosine
  modified_base 11: mod_base = OTHER; note = 2'-fluoroguanosine
  modified_base 15: mod_base = OTHER; note = 2'-fluorocytosine
  modified_base 19: mod_base = OTHER; note = 2'-fluoroadenosine
  modified_base 24: mod_base = OTHER; note = 2'-fluoroguanosine
  modified_base 27: mod_base = OTHER; note = 2'-Omethyluridine
  modified_base 40: mod_base = OTHER; note = Guanosine phosphorothiorate
  modified_base 42: mod_base = OTHER; note = Adenosine phosphorothiorate
  modified_base 44: mod_base = OTHER; note = Guanosine phosphorothiorate
  modified_base 48: mod_base = OTHER; note = 2'-fluorocytosine
  modified_base 50: mod_base = OTHER; note = Uridine phosphorothiorate
  modified_base 51: mod_base = OTHER; note = 2'-fluoroguanosine
  modified_base 62: mod_base = OTHER; note = Guanosine phosphorothiorate
  modified_base 73: mod_base = OTHER; note = 2'-Omethylcytosine phosphorothiorate

SEQ ID NO: 4169 - RNA, 85 nt, synthetic construct; identical to SEQ ID NO: 3297
  source 1..85: mol_type = other RNA
  modified_base 1: mod_base = OTHER; note = 2'-Omethylguanosine
  modified_base 82: mod_base = OTHER; note = 2'-Omethylguanosine

SEQ ID NO: 4170 - RNA, 86 nt, synthetic construct; identical to SEQ ID NO: 3290
  source 1..86: mol_type = other RNA
  modified_base 30: mod_base = OTHER; note = 2'-fluoroguanosine

SEQ ID NO: 4171 - RNA, 75 nt, synthetic construct; identical to SEQ ID NO: 3299
  source 1..75: mol_type = other RNA
  modified_base 1: mod_base = OTHER; note = 2'-Omethylcytosine
  modified_base 3: mod_base = OTHER; note = 2'-Omethyluridine phosphorothiorate
  modified_base 12: mod_base = OTHER; note = 2'-fluorocytosine
  modified_base 17: mod_base = OTHER; note = 2'-Omethylguanosine
  modified_base 39: mod_base = OTHER; note = Cytosine phosphorothiorate
  modified_base 44: mod_base = OTHER; note = 2'-fluoroguanosine
  modified_base 47: mod_base = OTHER; note = 2'-fluorocytosine
  modified_base 61: mod_base = OTHER; note = 2'-Omethylcytosine
  modified_base 73: mod_base = OTHER; note = Cytosine phosphorothiorate
  modified_base 75: mod_base = OTHER; note = 2'-fluoroadenosine

SEQ ID NO: 4172 - RNA, 76 nt, synthetic construct; identical to SEQ ID NO: 625
  source 1..76: mol_type = other RNA
  modified_base 1: mod_base = OTHER; note = 2'-Omethylguanosine
  modified_base 2: mod_base = OTHER; note = 2'-Omethylguanosine
  modified_base 3: mod_base = OTHER; note = 2'-Omethylcytosine
  modified_base 4: mod_base = OTHER; note = 2'-Omethyluridine
  modified_base 5: mod_base = OTHER; note = 2'-Omethylcytosine
  modified_base 6: mod_base = OTHER; note = 2'-Omethylcytosine
  modified_base 7: mod_base = OTHER; note = 2'-Omethylguanosine phosphorothiorate
  modified_base 9: mod_base = OTHER; note = Guanosine phosphorothiorate
  modified_base 10: mod_base = OTHER; note = 2'-Omethylguanosine
  modified_base 11: mod_base = OTHER; note = 2'-Omethylcytosine
  modified_base 12: mod_base = OTHER; note = 2'-Omethylguanosine phosphorothiorate
  modified_base 13: mod_base = OTHER; note = 2'-Omethylcytosine
  modified_base 14: mod_base = OTHER; note = 2'-Omethyladenosine
  modified_base 15: mod_base = OTHER; note = 2'-Omethyladenosine
  modified_base 16: mod_base = OTHER; note = 2'-Omethyluridine
  modified_base 17: mod_base = OTHER; note = 2'-Omethylguanosine
  modified_base 18: mod_base = OTHER; note = 2'-fluoroguanosine phosphorothiorate
  modified_base 19: mod_base = OTHER; note = 2'-fluoroadenosine phosphorothiorate
  modified_base 21: mod_base = OTHER; note = 2'-fluoroadenosine phosphorothiorate
  modified_base 22: mod_base = OTHER; note = 2'-Omethylguanosine
  modified_base 23: mod_base = OTHER; note = 2'-Omethylcytosine
  modified_base 24: mod_base = OTHER; note = 2'-Omethylguanosine phosphorothiorate
  modified_base 25: mod_base = OTHER; note = 2'-Omethylcytosine
  modified_base 26: mod_base = OTHER; note = Adenosine phosphorothiorate
  modified_base 28: mod_base = OTHER; note = 2'-Omethyluridine phosphorothiorate
  modified_base 29: mod_base = OTHER; note = 2'-Omethylguanosine
  modified_base 30: mod_base = OTHER; note = 2'-Omethylguanosine phosphorothiorate
  modified_base 31: mod_base = OTHER; note = 2'-Omethyladenosine phosphorothiorate
  modified_base 33: mod_base = OTHER; note = 2'-fluorouridine
  modified_base 34: mod_base = OTHER; note = 2'-Omethyluridine phosphorothiorate
  modified_base 35: mod_base = OTHER; note = Cytosine phosphorothiorate
  modified_base 36: mod_base = OTHER; note = 2'-Omethyladenosine phosphorothiorate
  modified_base 37: mod_base = OTHER; note = Adenosine phosphorothiorate
  modified_base 38: mod_base = OTHER; note = Adenosine phosphorothiorate
  modified_base 39: mod_base = OTHER; note = 2'-Omethyluridine phosphorothiorate
  modified_base 40: mod_base = OTHER; note = 2'-Omethyluridine
  modified_base 41: mod_base = OTHER; note = 2'-fluorocytosine
  modified_base 44: mod_base = OTHER; note = 2'-Omethyladenosine
  modified_base 48: mod_base = OTHER; note = 2'-fluorouridine
  modified_base 49: mod_base = OTHER; note = 2'-Omethylcytosine
  modified_base 50: mod_base = OTHER; note = 2'-Omethylcytosine
  modified_base 51: mod_base = OTHER; note = 2'-Omethylguanosine phosphorothiorate
  modified_base 52: mod_base = OTHER; note = 2'-Omethylguanosine
  modified_base 53: mod_base = OTHER; note = 2'-Omethylguanosine
  modified_base 55: mod_base = OTHER; note = Uridine phosphorothiorate
  modified_base 56: mod_base = OTHER; note = 2'-Omethylcytosine phosphorothiorate
  modified_base 57: mod_base = OTHER; note = 2'-Omethylguanosine
  modified_base 59: mod_base = OTHER; note = 2'-Omethylguanosine
  modified_base 61: mod_base = OTHER; note = 2'-Omethylcytosine
  modified_base 62: mod_base = OTHER; note = 2'-Omethylcytosine
  modified_base 63: mod_base = OTHER; note = 2'-fluorocytosine
  modified_base 64: mod_base = OTHER; note = 2'-Omethylguanosine
  modified_base 65: mod_base = OTHER; note = 2'-Omethylguanosine phosphorothiorate
  modified_base 66: mod_base = OTHER; note = 2'-Omethylcytosine phosphorothiorate
  modified_base 67: mod_base = OTHER; note = 2'-Omethylguanosine phosphorothiorate
  modified_base 68: mod_base = OTHER; note = 2'-fluoroguanosine
  modified_base 69: mod_base = OTHER; note = 2'-fluoroadenosine
  modified_base 70: mod_base = OTHER; note = Guanosine phosphorothiorate
  modified_base 72: mod_base = OTHER; note = 2'-Omethylcytosine
  modified_base 73: mod_base = OTHER; note = 2'-Omethylguanosine
  modified_base 74: mod_base = OTHER; note = 2'-fluorocytosine phosphorothiorate
  modified_base 75: mod_base = OTHER; note = 2'-fluorocytosine
  modified_base 76: mod_base = OTHER; note = 2'-fluoroadenosine

SEQ ID NO: 4173 - RNA, 75 nt, synthetic construct; identical to SEQ ID NO: 1045
  source 1..75: mol_type = other RNA
  modified_base 1: mod_base = OTHER; note = 2'-Omethylguanosine phosphorothiorate
  modified_base 2: mod_base = OTHER; note = 2'-Omethylguanosine
  modified_base 5: mod_base = OTHER; note = 2'-fluorocytosine phosphorothiorate
  modified_base 11: mod_base = OTHER; note = Uridine phosphorothiorate
  modified_base 20: mod_base = OTHER; note = 2'-fluoroadenosine
  modified_base 23: mod_base = OTHER; note = 2'-fluorocytosine
  modified_base 34: mod_base = OTHER; note = 2'-fluorouridine phosphorothiorate
  modified_base 41: mod_base = OTHER; note = 2'-Omethylcytosine phosphorothiorate
  modified_base 44: mod_base = OTHER; note = 2'-fluorocytosine
  modified_base 55: mod_base = OTHER; note = 2'-Omethylcytosine
  modified_base 59: mod_base = OTHER; note = Uridine phosphorothiorate
  modified_base 60: mod_base = OTHER; note = Cytosine phosphorothiorate
  modified_base 62: mod_base = OTHER; note = Cytosine phosphorothiorate
  modified_base 66: mod_base = OTHER; note = 2'-fluoroguanosine
  modified_base 69: mod_base = OTHER; note = 2'-fluoroadenosine phosphorothiorate

SEQ ID NO: 4174 - RNA, 76 nt, synthetic construct; identical to SEQ ID NO: 3318
  source 1..76: mol_type = other RNA
  modified_base 1: mod_base = OTHER; note = 2'-Omethylcytosine phosphorothiorate
  modified_base 2: mod_base = OTHER; note = 2'-Omethylcytosine phosphorothiorate
  modified_base 74: mod_base = OTHER; note = 2'-Omethylcytosine phosphorothiorate
  modified_base 75: mod_base = OTHER; note = 2'-Omethylcytosine phosphorothiorate
  modified_base 76: mod_base = OTHER; note = 2'-Omethyladenosine

SEQ ID NO: 4175 - RNA, 76 nt, synthetic construct; identical to SEQ ID NO: 625
  source 1..76: mol_type = other RNA
  modified_base 2: mod_base = OTHER; note = 2'-Omethylguanosine
  modified_base 5: mod_base = OTHER; note = Cytosine phosphorothiorate
  modified_base 6: mod_base = OTHER; note = 2'-Omethylcytosine
  modified_base 8: mod_base = OTHER; note = Uridine phosphorothiorate
  modified_base 12: mod_base = OTHER; note = 2'-Omethylguanosine
  modified_base 13: mod_base = OTHER; note = 2'-fluorocytosine
  modified_base 14: mod_base = OTHER; note = 2'-Omethyladenosine
  modified_base 18: mod_base = OTHER; note = 2'-Omethylguanosine
  modified_base 20: mod_base = OTHER; note = 2'-fluorouridine
  modified_base 23: mod_base = OTHER; note = 2'-Omethylcytosine phosphorothiorate
  modified_base 24: mod_base = OTHER; note = 2'-Omethylguanosine
  modified_base 25: mod_base = OTHER; note = 2'-fluorocytosine
  modified_base 26: mod_base = OTHER; note = Adenosine phosphorothiorate
  modified_base 27: mod_base = OTHER; note = 2'-Omethyluridine
  modified_base 28: mod_base = OTHER; note = 2'-fluorouridine
  modified_base 29: mod_base = OTHER; note = Guanosine phosphorothiorate
  modified_base 36: mod_base = OTHER; note = Adenosine phosphorothiorate
  modified_base 38: mod_base = OTHER; note = 2'-fluoroadenosine phosphorothiorate
  modified_base 39: mod_base = OTHER; note = 2'-fluorouridine
  modified_base 41: mod_base = OTHER; note = Cytosine phosphorothiorate
  modified_base 43: mod_base = OTHER; note = 2'-fluoroadenosine
  modified_base 44: mod_base = OTHER; note = Adenosine phosphorothiorate
  modified_base 45: mod_base = OTHER; note = 2'-Omethylguanosine
  modified_base 48: mod_base = OTHER; note = 2'-Omethyluridine
  modified_base 49: mod_base = OTHER; note = 2'-Omethylcytosine
  modified_base 53: mod_base = OTHER; note = 2'-Omethylguanosine
  modified_base 56: mod_base = OTHER; note = 2'-fluorocytosine
  modified_base 59: mod_base = OTHER; note = 2'-Omethylguanosine
  modified_base 62: mod_base = OTHER; note = 2'-fluorocytosine
  modified_base 63: mod_base = OTHER; note = Cytosine phosphorothiorate
  modified_base 64: mod_base = OTHER; note = 2'-Omethylguanosine
  modified_base 65: mod_base = OTHER; note = 2'-fluoroguanosine
  modified_base 67: mod_base = OTHER; note = 2'-fluoroguanosine
  modified_base 68: mod_base = OTHER; note = 2'-fluoroguanosine
  modified_base 69: mod_base = OTHER; note = Adenosine phosphorothiorate
  modified_base 73: mod_base = OTHER; note = 2'-Omethylguanosine
  modified_base 74: mod_base = OTHER; note = 2'-fluorocytosine
  modified_base 75: mod_base = OTHER; note = Cytosine phosphorothiorate
  modified_base 76: mod_base = OTHER; note = 2'-Omethyladenosine

SEQ ID NO: 4176 - RNA, 86 nt, synthetic construct; identical to SEQ ID NO: 3290
  source 1..86: mol_type = other RNA
  modified_base 1: mod_base = OTHER; note = 2'-Omethyladenosine phosphorothiorate
  modified_base 2: mod_base = OTHER; note = 2'-Omethylcytosine
  modified_base 3: mod_base = OTHER; note = 2'-Omethylcytosine
  modified_base 4: mod_base = OTHER; note = 2'-Omethyladenosine
  modified_base 5: mod_base = OTHER; note = 2'-Omethylguanosine
  modified_base 6: mod_base = OTHER; note = 2'-Omethylguanosine
  modified_base 59: mod_base = OTHER; note = 2'-Omethylguanosine
  modified_base 60: mod_base = OTHER; note = 2'-Omethyluridine
  modified_base 61: mod_base = OTHER; note = 2'-Omethylguanosine
  modified_base 62: mod_base = OTHER; note = 2'-Omethylguanosine
  modified_base 63: mod_base = OTHER; note = 2'-Omethylguanosine
  modified_base 71: mod_base = OTHER; note = 2'-Omethylcytosine
  modified_base 72: mod_base = OTHER; note = 2'-Omethylcytosine
  modified_base 73: mod_base = OTHER; note = 2'-fluorocytosine
  modified_base 74: mod_base = OTHER; note = 2'-Omethyladenosine
  modified_base 75: mod_base = OTHER; note = 2'-Omethylcytosine
  modified_base 76: mod_base = OTHER; note = 2'-Omethyluridine
  modified_base 77: mod_base = OTHER; note = 2'-Omethylcytosine
  modified_base 78: mod_base = OTHER; note = 2'-Omethylcytosine
  modified_base 79: mod_base = OTHER; note = 2'-fluorouridine
  modified_base 81: mod_base = OTHER; note = 2'-Omethylguanosine
  modified_base 82: mod_base = OTHER; note = 2'-Omethyluridine

SEQ ID NO: 4177 - RNA, 76 nt, synthetic construct; identical to SEQ ID NO: 625
  source 1..76: mol_type = other RNA
  modified_base 1: mod_base = OTHER; note = 2'-Omethylguanosine
  modified_base 9: mod_base = OTHER; note = Guanosine phosphorothiorate
  modified_base 16: mod_base = OTHER; note = 2'-Omethyluridine
  modified_base 22: mod_base = OTHER; note = Guanosine phosphorothiorate
  modified_base 23: mod_base = OTHER; note = 2'-fluorocytosine
  modified_base 24: mod_base = OTHER; note = 2'-fluoroguanosine phosphorothiorate
  modified_base 25: mod_base = OTHER; note = 2'-fluorocytosine
  modified_base 26: mod_base = OTHER; note = 2'-Omethyladenosine
  modified_base 31: mod_base = OTHER; note = 2'-fluoroadenosine
  modified_base 34: mod_base = OTHER; note = 2'-fluorouridine phosphorothiorate
  modified_base 37: mod_base = OTHER; note = Adenosine phosphorothiorate
  modified_base 38: mod_base = OTHER; note = 2'-Omethyladenosine
  modified_base 42: mod_base = OTHER; note = 2'-fluoroadenosine
  modified_base 46: mod_base = OTHER; note = 2'-fluoroguanosine phosphorothiorate
  modified_base 47: mod_base = OTHER; note = 2'-fluorouridine
  modified_base 49: mod_base = OTHER; note = 2'-Omethylcytosine
  modified_base 50: mod_base = OTHER; note = 2'-Omethylcytosine phosphorothiorate
  modified_base 53: mod_base = OTHER; note = 2'-Omethylguanosine
  modified_base 56: mod_base = OTHER; note = 2'-Omethylcytosine phosphorothiorate
  modified_base 60: mod_base = OTHER; note = 2'-fluorouridine
  modified_base 62: mod_base = OTHER; note = 2'-Omethylcytosine
  modified_base 63: mod_base = OTHER; note = Cytosine phosphorothiorate
  modified_base 64: mod_base = OTHER; note = 2'-fluoroguanosine
  modified_base 65: mod_base = OTHER; note = 2'-Omethylguanosine phosphorothiorate
  modified_base 69: mod_base = OTHER; note = Adenosine phosphorothiorate
  modified_base 70: mod_base = OTHER; note = 2'-fluoroguanosine
  modified_base 72: mod_base = OTHER; note = 2'-fluorocytosine phosphorothiorate
  modified_base 74: mod_base = OTHER; note = Cytosine phosphorothiorate
  modified_base 76: mod_base = OTHER; note = 2'-Omethyladenosine

SEQ ID NO: 4178 - RNA, 75 nt, synthetic construct; identical to SEQ ID NO: 3311
  source 1..75: mol_type = other RNA
  modified_base 1: mod_base = OTHER; note = 2'-fluoroguanosine phosphorothiorate
  modified_base 11: mod_base = OTHER; note = Uridine phosphorothiorate
  modified_base 12: mod_base = OTHER; note = Guanosine phosphorothiorate
  modified_base 18: mod_base = OTHER; note = Guanosine phosphorothiorate
  modified_base 19: mod_base = OTHER; note = 2'-fluorouridine
  modified_base 24: mod_base = OTHER; note = 2'-fluoroadenosine
  modified_base 40: mod_base = OTHER; note = 2'-fluorocytosine
  modified_base 44: mod_base = OTHER; note = 2'-fluorocytosine
  modified_base 59: mod_base = OTHER; note = 2'-Omethyluridine
  modified_base 60: mod_base = OTHER; note = 2'-fluorocytosine
  modified_base 68: mod_base = OTHER; note = 2'-fluoroadenosine
  modified_base 73: mod_base = OTHER; note = Cytosine phosphorothiorate

SEQ ID NO: 4179 - RNA, 76 nt, synthetic construct; identical to SEQ ID NO: 3316
  source 1..76: mol_type = other RNA
  modified_base 1: mod_base = OTHER; note = 2'-Omethyladenosine
  modified_base 17: mod_base = OTHER; note = 2'-Omethylguanosine
  modified_base 18: mod_base = OTHER; note = 2'-Omethylguanosine
  modified_base 50: mod_base = OTHER; note = 2'-Omethylcytosine
  modified_base 52: mod_base = OTHER; note = 2'-Omethylguanosine
  modified_base 73: mod_base = OTHER; note = 2'-Omethylguanosine

SEQ ID NO: 4180 - DNA, 76 bp, synthetic construct; identical to SEQ ID NO: 1924
  source 1..76: mol_type = other DNA
  modified_base 1: mod_base = OTHER; note = 2'-Omethylguanosine phosphorothiorate
  modified_base 2: mod_base = OTHER; note = 2'-Omethylguanosine
  modified_base 3: mod_base = OTHER; note = 2'-Omethylcytosine
  modified_base 4: mod_base = OTHER; note = 2'-Omethyluridine
  modified_base 5: mod_base = OTHER; note = 2'-Omethylcytosine
  modified_base 6: mod_base = OTHER; note = 2'-Omethylcytosine
  modified_base 10: mod_base = OTHER; note = 2'-Omethylguanosine
  modified_base 11: mod_base = OTHER; note = 2'-Omethylcytosine
  modified_base 12: mod_base = OTHER; note = 2'-Omethylguanosine
  modified_base 13: mod_base = OTHER; note = 2'-Omethylcytosine
  modified_base 17: mod_base = OTHER; note = Guanosine phosphorothiorate
  modified_base 18: mod_base = OTHER; note = 2'-Omethylguanosine
  modified_base 20: mod_base = OTHER; note = 2'-Omethyluridine
  modified_base 21: mod_base = OTHER; note = Adenosine phosphorothiorate
  modified_base 23: mod_base = OTHER; note = 2'-Omethylcytosine
  modified_base 24: mod_base = OTHER; note = 2'-Omethylguanosine
  modified_base 25: mod_base = OTHER; note = 2'-Omethylcytosine
  modified_base 29: mod_base = OTHER; note = 2'-Omethylguanosine
  modified_base 33: mod_base = OTHER; note = 2'-fluorouridine
  modified_base 35: mod_base = OTHER; note = Cytosine phosphorothiorate
  modified_base 37: mod_base = OTHER; note = Adenosine phosphorothiorate
  modified_base 38: mod_base = OTHER; note = Adenosine phosphorothiorate
  modified_base 41: mod_base = OTHER; note = 2'-fluorocytosine phosphorothiorate
  modified_base 43: mod_base = OTHER; note = 2'-Omethyladenosine
  modified_base 44: mod_base = OTHER; note = Adenosine phosphorothiorate
  modified_base 45: mod_base = OTHER; note = 2'-fluoroguanosine
  modified_base 46: mod_base = OTHER; note = Guanosine phosphorothiorate
  modified_base 49: mod_base = OTHER; note = 2'-Omethylcytosine
  modified_base 50: mod_base = OTHER; note = 2'-Omethylcytosine
  modified_base 51: mod_base = OTHER; note = 2'-Omethylguanosine
  modified_base 52: mod_base = OTHER; note = 2'-Omethylguanosine
  modified_base 53: mod_base = OTHER; note = 2'-Omethylguanosine
  modified_base 54: mod_base = OTHER; note = 2'-Omethyluridine
  modified_base 55: mod_base = OTHER; note = Uridine phosphorothiorate
  modified_base 56: mod_base = OTHER; note = 2'-Omethylcytosine
  modified_base 57: mod_base = OTHER; note = 2'-Omethylguanosine
  modified_base 59: mod_base = OTHER; note = 2'-Omethylguanosine
  modified_base 61: mod_base = OTHER; note = 2'-Omethylcytosine
  modified_base 62: mod_base = OTHER; note = 2'-Omethylcytosine
  modified_base 63: mod_base = OTHER; note = 2'-fluorocytosine
  modified_base 64: mod_base = OTHER; note = 2'-Omethylguanosine
  modified_base 65: mod_base = OTHER; note = 2'-Omethylguanosine
  modified_base 66: mod_base = OTHER; note = 2'-Omethylcytosine
  modified_base 67: mod_base = OTHER; note = 2'-Omethylguanosine
  modified_base 68: mod_base = OTHER; note = 2'-Omethylguanosine
  modified_base 69: mod_base = OTHER; note = 2'-fluoroadenosine
  modified_base 70: mod_base = OTHER; note = 2'-fluoroguanosine
  modified_base 71: mod_base = OTHER; note = 2'-Omethyluridine
  modified_base 73: mod_base = OTHER; note = 2'-Omethylguanosine
  modified_base 74: mod_base = OTHER; note = Cytosine phosphorothiorate
  modified_base 75: mod_base = OTHER; note = 2'-fluorocytosine phosphorothiorate
  misc_feature 1..21: note = RNA
  misc_feature 22: note = DNA
  misc_feature 23..76: note = RNA

SEQ ID NO: 4181 - RNA, 86 nt, synthetic construct; identical to SEQ ID NO: 3290
  source 1..86: mol_type = other RNA
  modified_base 1: mod_base = OTHER; note = 2'-Omethyladenosine phosphorothiorate
  modified_base 2: mod_base = OTHER; note = 2'-Omethylcytosine
  modified_base 42: mod_base = OTHER; note = 2'-fluoroadenosine
  modified_base 57: mod_base = OTHER; note = 2'-fluoroguanosine
  modified_base 62: mod_base = OTHER; note = Guanosine phosphorothiorate
  modified_base 84: mod_base = OTHER; note = Cytosine phosphorothiorate
  modified_base 85: mod_base = OTHER; note = 2'-Omethylcytosine

SEQ ID NO: 4182 - RNA, 76 nt, synthetic construct; identical to SEQ ID NO: 625
  source 1..76: mol_type = other RNA
  modified_base 1: mod_base = OTHER; note = 2'-Omethylguanosine phosphorothiorate
  modified_base 2: mod_base = OTHER; note = 2'-Omethylguanosine
  modified_base 33: mod_base = OTHER; note = 2'-fluorouridine
  modified_base 35: mod_base = OTHER; note = Cytosine phosphorothiorate
  modified_base 37: mod_base = OTHER; note = Adenosine phosphorothiorate
  modified_base 38: mod_base = OTHER; note = Adenosine phosphorothiorate
  modified_base 52: mod_base = OTHER; note = 2'-Omethylguanosine
  modified_base 56: mod_base = OTHER; note = 2'-Omethylcytosine
  modified_base 62: mod_base = OTHER; note = 2'-Omethylcytosine
  modified_base 63: mod_base = OTHER; note = 2'-fluorocytosine
  modified_base 73: mod_base = OTHER; note = 2'-Omethylguanosine
  modified_base 75: mod_base = OTHER; note = 2'-fluorocytosine phosphorothiorate

SEQ ID NO: 4183 - RNA, 85 nt, synthetic construct; identical to SEQ ID NO: 3301
  source 1..85: mol_type = other RNA
  modified_base 1: mod_base = OTHER; note = 2'-Omethylguanosine phosphorothiorate
  modified_base 2: mod_base = OTHER; note = 2'-Omethylcytosine
  modified_base 4: mod_base = OTHER; note = 2'-Omethylguanosine
  modified_base 14: mod_base = OTHER; note = Adenosine phosphorothiorate
  modified_base 19: mod_base = OTHER; note = 2'-Omethyluridine
  modified_base 34: mod_base = OTHER; note = 2'-Omethyluridine
  modified_base 35: mod_base = OTHER; note = 2'-fluorouridine
  modified_base 36: mod_base = OTHER; note = 2'-fluoroadenosine
  modified_base 41: mod_base = OTHER; note = 2'-fluorocytosine phosphorothiorate
  modified_base 42: mod_base = OTHER; note = 2'-fluoroadenosine
  modified_base 44: mod_base = OTHER; note = 2'-Omethyluridine
  modified_base 46: mod_base = OTHER; note = 2'-Omethylguanosine
  modified_base 47: mod_base = OTHER; note = 2'-fluoroguanosine phosphorothiorate
  modified_base 50: mod_base = OTHER; note = Cytosine phosphorothiorate
  modified_base 59: mod_base = OTHER; note = 2'-fluorocytosine
  modified_base 60: mod_base = OTHER; note = 2'-fluoroadenosine
  modified_base 62: mod_base = OTHER; note = 2'-Omethylguanosine
  modified_base 82: mod_base = OTHER; note = 2'-Omethylguanosine

SEQ ID NO: 4184 - RNA, 86 nt, synthetic construct; identical to SEQ ID NO: 3290
  source 1..86: mol_type = other RNA
  modified_base 13: mod_base = OTHER; note = 2'-Omethylguanosine
  modified_base 62: mod_base = OTHER; note = 2'-Omethylguanosine

SEQ ID NO: 4185 - RNA, 76 nt, synthetic construct; identical to SEQ ID NO: 625
  source 1..76: mol_type = other RNA
  modified_base 2: mod_base = OTHER; note = 2'-Omethylguanosine
  modified_base 8: mod_base = OTHER; note = Uridine phosphorothiorate
  modified_base 13: mod_base = OTHER; note = Cytosine phosphorothiorate
  modified_base 14: mod_base = OTHER; note = 2'-fluoroadenosine
  modified_base 15: mod_base = OTHER; note = 2'-Omethyladenosine
  modified_base 16: mod_base = OTHER; note = 2'-fluorouridine
  modified_base 17: mod_base = OTHER; note = 2'-Omethylguanosine phosphorothiorate
  modified_base 18: mod_base = OTHER; note = 2'-fluoroguanosine
  modified_base 21: mod_base = OTHER; note = Adenosine phosphorothiorate
  modified_base 23: mod_base = OTHER; note = 2'-Omethylcytosine
  modified_base 28: mod_base = OTHER; note = 2'-fluorouridine phosphorothiorate
  modified_base 29: mod_base = OTHER; note = 2'-Omethylguanosine
  modified_base 31: mod_base = OTHER; note = 2'-Omethyladenosine
  modified_base 34: mod_base = OTHER; note = 2'-fluorouridine
  modified_base 39: mod_base = OTHER; note = 2'-Omethyluridine phosphorothiorate
  modified_base 40: mod_base = OTHER; note = 2'-Omethyluridine phosphorothiorate
  modified_base 41: mod_base = OTHER; note = 2'-Omethylcytosine
  modified_base 42: mod_base = OTHER; note = 2'-Omethyladenosine
  modified_base 44: mod_base = OTHER; note = Adenosine phosphorothiorate
  modified_base 49: mod_base = OTHER; note = 2'-fluorocytosine
  modified_base 50: mod_base = OTHER; note = 2'-Omethylcytosine
  modified_base 51: mod_base = OTHER; note = Guanosine phosphorothiorate
  modified_base 52: mod_base = OTHER; note = 2'-Omethylguanosine
  modified_base 54: mod_base = OTHER; note = Uridine phosphorothiorate
  modified_base 56: mod_base = OTHER; note = 2'-Omethylcytosine phosphorothiorate
  modified_base 57: mod_base = OTHER; note = 2'-fluoroguanosine
  modified_base 61: mod_base = OTHER; note = 2'-Omethylcytosine
  modified_base 62: mod_base = OTHER; note = Cytosine phosphorothiorate
  modified_base 63: mod_base = OTHER; note = 2'-Omethylcytosine
  modified_base 68: mod_base = OTHER; note = Guanosine phosphorothiorate
  modified_base 70: mod_base = OTHER; note = 2'-Omethylguanosine
  modified_base 72: mod_base = OTHER; note = 2'-fluorocytosine
  modified_base 73: mod_base = OTHER; note = 2'-fluoroguanosine
  modified_base 76: mod_base = OTHER; note = 2'-Omethyladenosine

SEQ ID NO: 4186 - RNA, 76 nt, synthetic construct; identical to SEQ ID NO: 625
  source 1..76: mol_type = other RNA
  modified_base 1: mod_base = OTHER; note = 2'-Omethylguanosine phosphorothiorate
  modified_base 2: mod_base = OTHER; note = 2'-Omethylguanosine
  modified_base 12: mod_base = OTHER; note = 2'-Omethylguanosine
  modified_base 13: mod_base = OTHER; note = 2'-Omethylcytosine
  modified_base 33: mod_base = OTHER; note = 2'-fluorouridine
  modified_base 35: mod_base = OTHER; note = Cytosine phosphorothiorate
  modified_base 37: mod_base = OTHER; note = Adenosine phosphorothiorate
  modified_base 52: mod_base = OTHER; note = 2'-Omethylguanosine
  modified_base 59: mod_base = OTHER; note = 2'-Omethylguanosine
  modified_base 62: mod_base = OTHER; note = 2'-Omethylcytosine
  modified_base 73: mod_base = OTHER; note = 2'-Omethylguanosine
  modified_base 75: mod_base = OTHER; note = 2'-fluorocytosine phosphorothiorate

SEQ ID NO: 4187 - RNA, 85 nt, synthetic construct; identical to SEQ ID NO: 3286
  source 1..85: mol_type = other RNA
  modified_base 1: mod_base = OTHER; note = 2'-Omethylcytosine phosphorothiorate
  modified_base 2: mod_base = OTHER; note = 2'-fluorocytosine
  modified_base 14: mod_base = OTHER; note = 2'-fluoroguanosine phosphorothiorate
  modified_base 25: mod_base = OTHER; note = 2'-fluoroguanosine
  modified_base 26: mod_base = OTHER; note = 2'-Omethyluridine phosphorothiorate
  modified_base 27: mod_base = OTHER; note = 2'-fluorouridine
  modified_base 30: mod_base = OTHER; note = 2'-fluoroadenosine
  modified_base 34: mod_base = OTHER; note = 2'-fluorouridine
  modified_base 36: mod_base = OTHER; note = Guanosine phosphorothiorate
  modified_base 42: mod_base = OTHER; note = Adenosine phosphorothiorate
  modified_base 50: mod_base = OTHER; note = Adenosine phosphorothiorate
  modified_base 53: mod_base = OTHER; note = 2'-Omethyluridine
  modified_base 54: mod_base = OTHER; note = Cytosine phosphorothiorate
  modified_base 58: mod_base = OTHER; note = 2'-fluoroguanosine
  modified_base 60: mod_base = OTHER; note = 2'-fluoroguanosine
  modified_base 65: mod_base = OTHER; note = Cytosine phosphorothiorate
  modified_base 73: mod_base = OTHER; note = 2'-fluoroadenosine
  modified_base 75: mod_base = OTHER; note = Uridine phosphorothiorate
  modified_base 77: mod_base = OTHER; note = 2'-fluorocytosine
  modified_base 84: mod_base = OTHER; note = Cytosine phosphorothiorate

SEQ ID NO: 4188 - RNA, 76 nt, synthetic construct; identical to SEQ ID NO: 625
  source 1..76: mol_type = other RNA
  modified_base 2: mod_base = OTHER; note = 2'-fluoroguanosine
  modified_base 3: mod_base = OTHER; note = 2'-fluorocytosine
  modified_base 11: mod_base = OTHER; note = 2'-fluorocytosine phosphorothiorate
  modified_base 12: mod_base = OTHER; note = 2'-Omethylguanosine
  modified_base 13: mod_base = OTHER; note = 2'-Omethylcytosine
  modified_base 14: mod_base = OTHER; note = Adenosine phosphorothiorate
  modified_base 15: mod_base = OTHER; note = Adenosine phosphorothiorate
  modified_base 16: mod_base = OTHER; note = 2'-Omethyluridine
  modified_base 22: mod_base = OTHER; note = 2'-Omethylguanosine
  modified_base 25: mod_base = OTHER; note = Cytosine phosphorothiorate
  modified_base 27: mod_base = OTHER; note = 2'-Omethyluridine
  modified_base 28: mod_base = OTHER; note = Uridine phosphorothiorate
  modified_base 29: mod_base = OTHER; note = 2'-fluoroguanosine
  modified_base 32: mod_base = OTHER; note = 2'-fluorocytosine
  modified_base 34: mod_base = OTHER; note = 2'-Omethyluridine
  modified_base 37: mod_base = OTHER; note = Adenosine phosphorothiorate
  modified_base 38: mod_base = OTHER; note = 2'-fluoroadenosine phosphorothiorate
  modified_base 40: mod_base = OTHER; note = 2'-Omethyluridine
  modified_base 42: mod_base = OTHER; note = 2'-Omethyladenosine
  modified_base 44: mod_base = OTHER; note = Adenosine phosphorothiorate
  modified_base 47: mod_base = OTHER; note = Uridine phosphorothiorate
  modified_base 48: mod_base = OTHER; note = 2'-fluorouridine phosphorothiorate
  modified_base 50: mod_base = OTHER; note = 2'-Omethylcytosine
  modified_base 51: mod_base = OTHER; note = Guanosine phosphorothiorate
  modified_base 52: mod_base = OTHER; note = 2'-fluoroguanosine
  modified_base 54: mod_base = OTHER; note = 2'-Omethyluridine
  modified_base 59: mod_base = OTHER; note = Guanosine phosphorothiorate
  modified_base 61: mod_base = OTHER; note = 2'-fluorocytosine
  modified_base 62: mod_base = OTHER; note = 2'-Omethylcytosine
  modified_base 65: mod_base = OTHER; note = 2'-Omethylguanosine
  modified_base 66: mod_base = OTHER; note = 2'-fluorocytosine phosphorothiorate
  modified_base 67: mod_base = OTHER; note = 2'-fluoroguanosine
  modified_base 72: mod_base = OTHER; note = Cytosine phosphorothiorate
  modified_base 74: mod_base = OTHER; note = 2'-Omethylcytosine
  modified_base 76: mod_base = OTHER; note = 2'-Omethyladenosine

SEQ ID NO: 4189 - RNA, 76 nt, synthetic construct; identical to SEQ ID NO: 3318
  source 1..76: mol_type = other RNA
  modified_base 1: mod_base = OTHER; note = 2'-Omethylcytosine
  modified_base 2: mod_base = OTHER; note = 2'-Omethylcytosine
  modified_base 3: mod_base = OTHER; note = 2'-Omethyluridine
  modified_base 4: mod_base = OTHER; note = 2'-Omethyluridine
  modified_base 5: mod_base = OTHER; note = 2'-Omethylcytosine
  modified_base 6: mod_base = OTHER; note = 2'-Omethylguanosine
  modified_base 13: mod_base = OTHER; note = 2'-Omethylcytosine
  modified_base 14: mod_base = OTHER; note = 2'-Omethyladenosine
  modified_base 15: mod_base = OTHER; note = 2'-Omethylguanosine
  modified_base 16: mod_base = OTHER; note = 2'-Omethyluridine
  modified_base 18: mod_base = OTHER; note = 2'-Omethylguanosine
  modified_base 19: mod_base = OTHER; note = 2'-Omethylguanosine
  modified_base 20: mod_base = OTHER; note = Uridine phosphorothiorate
  modified_base 21: mod_base = OTHER; note = Adenosine phosphorothiorate
  modified_base 25: mod_base = OTHER; note = 2'-Omethylcytosine
  modified_base 33: mod_base = OTHER; note = 2'-fluorouridine
  modified_base 34: mod_base = OTHER; note = 2'-Omethylcytosine
  modified_base 35: mod_base = OTHER; note = Uridine phosphorothiorate
  modified_base 37: mod_base = OTHER; note = Guanosine phosphorothiorate
  modified_base 38: mod_base = OTHER; note = Adenosine phosphorothiorate
  modified_base 49: mod_base = OTHER; note = 2'-Omethylguanosine
  modified_base 50: mod_base = OTHER; note = 2'-Omethylcytosine
  modified_base 51: mod_base = OTHER; note = 2'-Omethyluridine
  modified_base 52: mod_base = OTHER; note = 2'-Omethylguanosine
  modified_base 53: mod_base = OTHER; note = 2'-Omethylguanosine
  modified_base 54: mod_base = OTHER; note = Uridine phosphorothiorate
  modified_base 55: mod_base = OTHER; note = Uridine phosphorothiorate
  modified_base 61: mod_base = OTHER; note = 2'-Omethylcytosine
  modified_base 65: mod_base = OTHER; note = 2'-Omethylcytosine
  modified_base 73: mod_base = OTHER; note = 2'-Omethyladenosine

SEQ ID NO: 4190 - RNA, 85 nt, synthetic construct; identical to SEQ ID NO: 3297
  source 1..85: mol_type = other RNA
  modified_base 1: mod_base = OTHER; note = 2'-Omethylguanosine
  modified_base 17: mod_base = OTHER; note = 2'-Omethylguanosine
  modified_base 18: mod_base = OTHER; note = 2'-Omethylguanosine
  modified_base 33: mod_base = OTHER; note = Uridine phosphorothiorate
  modified_base 34: mod_base = OTHER; note = 2'-Omethyluridine
  modified_base 35: mod_base = OTHER; note = Cytosine phosphorothiorate
  modified_base 36: mod_base = OTHER; note = Adenosine phosphorothiorate
  modified_base 37: mod_base = OTHER; note = Adenosine phosphorothiorate
  modified_base 38: mod_base = OTHER; note = Adenosine phosphorothiorate
  modified_base 59: mod_base = OTHER; note = 2'-Omethylcytosine
  modified_base 61: mod_base = OTHER; note = 2'-Omethylguanosine
  modified_base 82: mod_base = OTHER; note = 2'-Omethylguanosine

SEQ ID NO: 4191 - RNA, 75 nt, synthetic construct; identical to SEQ ID NO: 3311
  source 1..75: mol_type = other RNA
  modified_base 1: mod_base = OTHER; note = 2'-Omethylguanosine phosphorothiorate
  modified_base 2: mod_base = OTHER; note = 2'-Omethylguanosine phosphorothiorate
  modified_base 12: mod_base = OTHER; note = 2'-fluoroguanosine
  modified_base 19: mod_base = OTHER; note = 2'-Omethyluridine
  modified_base 20: mod_base = OTHER; note = 2'-fluoroadenosine
  modified_base 21: mod_base = OTHER; note = 2'-Omethyladenosine
  modified_base 22: mod_base = OTHER; note = Guanosine phosphorothiorate
  modified_base 42: mod_base = OTHER; note = 2'-fluoroadenosine
  modified_base 48: mod_base = OTHER; note = 2'-fluorocytosine
  modified_base 56: mod_base = OTHER; note = 2'-Omethylguanosine
  modified_base 65: mod_base = OTHER; note = Uridine phosphorothiorate
  modified_base 66: mod_base = OTHER; note = 2'-fluoroguanosine
  modified_base 73: mod_base = OTHER; note = 2'-fluorocytosine phosphorothiorate

SEQ ID NO: 4192 - RNA, 75 nt, synthetic construct; identical to SEQ ID NO: 3306
  source 1..75: mol_type = other RNA
  modified_base 1: mod_base = OTHER; note = 2'-Omethylguanosine
  modified_base 13: mod_base = OTHER; note = 2'-Omethylcytosine
  modified_base 14: mod_base = OTHER; note = 2'-Omethyladenosine
  modified_base 15: mod_base = OTHER; note = 2'-Omethyladenosine
  modified_base 16: mod_base = OTHER; note = 2'-Omethylcytosine
  modified_base 17: mod_base = OTHER; note = 2'-Omethylguanosine
  modified_base 18: mod_base = OTHER; note = 2'-Omethylguanosine
  modified_base 19: mod_base = OTHER; note = Uridine phosphorothiorate
  modified_base 20: mod_base = OTHER; note = Adenosine phosphorothiorate
  modified_base 24: mod_base = OTHER; note = 2'-Omethylcytosine
  modified_base 32: mod_base = OTHER; note = Uridine phosphorothiorate
  modified_base 33: mod_base = OTHER; note = 2'-Omethylcytosine
  modified_base 34: mod_base = OTHER; note = Uridine phosphorothiorate
  modified_base 36: mod_base = OTHER; note = Guanosine phosphorothiorate
  modified_base 37: mod_base = OTHER; note = Adenosine phosphorothiorate
  modified_base 40: mod_base = OTHER; note = 2'-fluoroadenosine
  modified_base 41: mod_base = OTHER; note = 2'-Omethylguanosine
  modified_base 42: mod_base = OTHER; note = 2'-Omethyladenosine
  modified_base 43: mod_base = OTHER; note = 2'-fluoroadenosine
  modified_base 48: mod_base = OTHER; note = 2'-Omethylguanosine
  modified_base 49: mod_base = OTHER; note = 2'-Omethylcytosine
  modified_base 51: mod_base = OTHER; note = 2'-Omethyluridine
  modified_base 53: mod_base = OTHER; note = Uridine phosphorothiorate
  modified_base 54: mod_base = OTHER; note = Uridine phosphorothiorate
  modified_base 60: mod_base = OTHER; note = 2'-Omethylcytosine
  modified_base 64: mod_base = OTHER; note = 2'-Omethyluridine
  modified_base 72: mod_base = OTHER; note = 2'-Omethyladenosine

SEQ ID NO: 4193 - RNA, 74 nt, synthetic construct; identical to SEQ ID NO: 3293
  source 1..74: mol_type = other RNA
  modified_base 1: mod_base = OTHER; note = 2'-fluoroadenosine phosphorothiorate
  modified_base 3: mod_base = OTHER; note = Cytosine phosphorothiorate
  modified_base 13: mod_base = OTHER; note = 2'-fluoroadenosine
  modified_base 27: mod_base = OTHER; note = 2'-Omethyluridine
  modified_base 42: mod_base = OTHER; note = Adenosine phosphorothiorate
  modified_base 46: mod_base = OTHER; note = 2'-fluorouridine
  modified_base 51: mod_base = OTHER; note = 2'-fluoroguanosine
  modified_base 73: mod_base = OTHER; note = 2'-Omethylcytosine phosphorothiorate

SEQ ID NO: 4194 - RNA, 76 nt, synthetic construct; identical to SEQ ID NO: 3318
  source 1..76: mol_type = other RNA
  modified_base 50: mod_base = OTHER; note = 2'-Omethylcytosine
  modified_base 73: mod_base = OTHER; note = 2'-Omethyladenosine

SEQ ID NO: 4195 - RNA, 86 nt, synthetic construct; identical to SEQ ID NO: 3290
  source 1..86: mol_type = other RNA
  modified_base 1: mod_base = OTHER; note = 2'-Omethyladenosine phosphorothiorate
  modified_base 2: mod_base = OTHER; note = 2'-Omethylcytosine phosphorothiorate
  modified_base 3: mod_base = OTHER; note = 2'-Omethylcytosine
  modified_base 4: mod_base = OTHER; note = 2'-Omethyladenosine
  modified_base 5: mod_base = OTHER; note = 2'-Omethylguanosine
  modified_base 6: mod_base = OTHER; note = 2'-Omethylguanosine
  modified_base 8: mod_base = OTHER; note = Uridine phosphorothiorate
  modified_base 16: mod_base = OTHER; note = 2'-Omethyluridine
  modified_base 17: mod_base = OTHER; note = 2'-Omethylguanosine
  modified_base 18: mod_base = OTHER; note = 2'-Omethylguanosine
  modified_base 33: mod_base = OTHER; note = 2'-fluorouridine
  modified_base 35: mod_base = OTHER; note = Cytosine phosphorothiorate
  modified_base 37: mod_base = OTHER; note = Guanosine phosphorothiorate
  modified_base 38: mod_base = OTHER; note = Adenosine phosphorothiorate
  modified_base 44: mod_base = OTHER; note = 2'-Omethyluridine
  modified_base 57: mod_base = OTHER; note = 2'-fluoroguanosine
  modified_base 58: mod_base = OTHER; note = 2'-fluorocytosine
  modified_base 59: mod_base = OTHER; note = 2'-Omethylguanosine
  modified_base 60: mod_base = OTHER; note = 2'-Omethyluridine
  modified_base 61: mod_base = OTHER; note = 2'-Omethylguanosine
  modified_base 62: mod_base = OTHER; note = 2'-Omethylguanosine
  modified_base 63: mod_base = OTHER; note = 2'-Omethylguanosine
  modified_base 64: mod_base = OTHER; note = 2'-Omethyluridine
  modified_base 66: mod_base = OTHER; note = 2'-Omethylcytosine
  modified_base 69: mod_base = OTHER; note = 2'-Omethyladenosine
  modified_base 71: mod_base = OTHER; note = 2'-Omethylcytosine
  modified_base 72: mod_base = OTHER; note = 2'-Omethylcytosine
  modified_base 73: mod_base = OTHER; note = 2'-fluorocytosine
  modified_base 74: mod_base = OTHER; note = 2'-Omethyladenosine
  modified_base 75: mod_base = OTHER; note = 2'-Omethylcytosine
  modified_base 76: mod_base = OTHER; note = 2'-Omethyluridine
  modified_base 77: mod_base = OTHER; note = 2'-Omethylcytosine
  modified_base 78: mod_base = OTHER; note = 2'-Omethylcytosine
  modified_base 83: mod_base = OTHER; note = 2'-Omethyladenosine

SEQ ID NO: 4196 - RNA, 76 nt, synthetic construct; identical to SEQ ID NO: 625
  source 1..76: mol_type = other RNA
  modified_base 1: mod_base = OTHER; note = Guanosine phosphorothiorate
  modified_base 2: mod_base = OTHER; note = 2'-Omethylguanosine
  modified_base 8: mod_base = OTHER; note = Uridine phosphorothiorate
  modified_base 10: mod_base = OTHER; note = 2'-Omethylguanosine
  modified_base 16: mod_base = OTHER; note = 2'-Omethyluridine
  modified_base 18: mod_base = OTHER; note = 2'-Omethylguanosine
  modified_base 19: mod_base = OTHER; note = Adenosine phosphorothiorate
  modified_base 20: mod_base = OTHER; note = 2'-Omethyluridine
  modified_base 21: mod_base = OTHER; note = Adenosine phosphorothiorate
  modified_base 22: mod_base = OTHER; note = 2'-Omethylguanosine
  modified_base 27: mod_base = OTHER; note = 2'-fluorouridine
  modified_base 28: mod_base = OTHER; note = 2'-Omethyluridine
  modified_base 29: mod_base = OTHER; note = 2'-Omethylguanosine
  modified_base 30: mod_base = OTHER; note = 2'-fluoroguanosine
  modified_base 32: mod_base = OTHER; note = 2'-fluorocytosine
  modified_base 33: mod_base = OTHER; note = 2'-fluorouridine
  modified_base 41: mod_base = OTHER; note = 2'-fluorocytosine
  modified_base 42: mod_base = OTHER; note = Adenosine phosphorothiorate
  modified_base 43: mod_base = OTHER; note = 2'-fluoroadenosine
  modified_base 44: mod_base = OTHER; note = 2'-Omethyladenosine
  modified_base 45: mod_base = OTHER; note = 2'-fluoroguanosine
  modified_base 48: mod_base = OTHER; note = 2'-fluorouridine
  modified_base 49: mod_base = OTHER; note = 2'-fluorocytosine phosphorothiorate
  modified_base 50: mod_base = OTHER; note = 2'-Omethylcytosine
  modified_base 52: mod_base = OTHER; note = Guanosine phosphorothiorate
  modified_base 54: mod_base = OTHER; note = 2'-Omethyluridine phosphorothiorate
  modified_base 57: mod_base = OTHER; note = 2'-fluoroguanosine
  modified_base 60: mod_base = OTHER; note = 2'-fluorouridine
  modified_base 61: mod_base = OTHER; note = Cytosine phosphorothiorate
  modified_base 62: mod_base = OTHER; note = 2'-fluorocytosine
  modified_base 63: mod_base = OTHER; note = 2'-Omethylcytosine
  modified_base 65: mod_base = OTHER; note = 2'-fluoroguanosine
  modified_base 68: mod_base = OTHER; note = 2'-Omethylguanosine
  modified_base 69: mod_base = OTHER; note = 2'-fluoroadenosine
  modified_base 70: mod_base = OTHER; note = 2'-Omethylguanosine
  modified_base 72: mod_base = OTHER; note = 2'-Omethylcytosine
  modified_base 74: mod_base = OTHER; note = 2'-fluorocytosine
  modified_base 76: mod_base = OTHER; note = 2'-Omethyladenosine

SEQ ID NO: 4197 - RNA, 75 nt, synthetic construct; identical to SEQ ID NO: 1045
  source 1..75: mol_type = other RNA
  modified_base 1: mod_base = OTHER; note = 2'-Omethylguanosine
  modified_base 10: mod_base = OTHER; note = 2'-Omethylguanosine
  modified_base 13: mod_base = OTHER; note = 2'-Omethyluridine
  modified_base 16: mod_base = OTHER; note = Uridine phosphorothiorate
  modified_base 17: mod_base = OTHER; note = Guanosine phosphorothiorate
  modified_base 18: mod_base = OTHER; note = 2'-Omethylguanosine phosphorothiorate
  modified_base 19: mod_base = OTHER; note = Uridine phosphorothiorate
  modified_base 20: mod_base = OTHER; note = 2'-Omethyladenosine phosphorothiorate
  modified_base 25: mod_base = OTHER; note = 2'-Omethylcytosine
  modified_base 29: mod_base = OTHER; note = 2'-Omethylguanosine
  modified_base 33: mod_base = OTHER; note = 2'-fluorouridine
  modified_base 35: mod_base = OTHER; note = Uridine phosphorothiorate
  modified_base 37: mod_base = OTHER; note = Adenosine phosphorothiorate
  modified_base 38: mod_base = OTHER; note = Adenosine phosphorothiorate
  modified_base 41: mod_base = OTHER; note = 2'-fluorocytosine
  modified_base 42: mod_base = OTHER; note = Adenosine phosphorothiorate
  modified_base 43: mod_base = OTHER; note = 2'-Omethylguanosine
  modified_base 44: mod_base = OTHER; note = 2'-fluorocytosine
  modified_base 46: mod_base = OTHER; note = Adenosine phosphorothiorate
  modified_base 49: mod_base = OTHER; note = 2'-Omethylcytosine
  modified_base 51: mod_base = OTHER; note = 2'-Omethyladenosine
  modified_base 53: mod_base = OTHER; note = Uridine phosphorothiorate
  modified_base 54: mod_base = OTHER; note = Uridine phosphorothiorate
  modified_base 55: mod_base = OTHER; note = 2'-Omethylcytosine
  modified_base 56: mod_base = OTHER; note = Guanosine phosphorothiorate
  modified_base 57: mod_base = OTHER; note = Adenosine phosphorothiorate
  modified_base 61: mod_base = OTHER; note = 2'-Omethyluridine
  modified_base 62: mod_base = OTHER; note = 2'-fluorocytosine
  modified_base 64: mod_base = OTHER; note = 2'-Omethylguanosine
  modified_base 70: mod_base = OTHER; note = 2'-Omethylcytosine
  modified_base 72: mod_base = OTHER; note = 2'-Omethyluridine

SEQ ID NO: 4198 - RNA, 76 nt, synthetic construct; identical to SEQ ID NO: 625
  source 1..76: mol_type = other RNA
  modified_base 3: mod_base = OTHER; note = 2'-Omethylcytosine phosphorothiorate
  modified_base 4: mod_base = OTHER; note = 2'-Omethyluridine
  modified_base 6: mod_base = OTHER; note = 2'-Omethylcytosine
  modified_base 8: mod_base = OTHER; note = Uridine phosphorothiorate
  modified_base 10: mod_base = OTHER; note = 2'-Omethylguanosine phosphorothiorate
  modified_base 11: mod_base = OTHER; note = 2'-Omethylcytosine
  modified_base 12: mod_base = OTHER; note = Guanosine phosphorothiorate
  modified_base 13: mod_base = OTHER; note = 2'-Omethylcytosine
  modified_base 18: mod_base = OTHER; note = 2'-fluoroguanosine
  modified_base 22: mod_base = OTHER; note = 2'-fluoroguanosine
  modified_base 24: mod_base = OTHER; note = Guanosine phosphorothiorate
  modified_base 25: mod_base = OTHER; note = 2'-Omethylcytosine phosphorothiorate
  modified_base 26: mod_base = OTHER; note = 2'-Omethyladenosine
  modified_base 27: mod_base = OTHER; note = Uridine phosphorothiorate
  modified_base 33: mod_base = OTHER; note = Uridine phosphorothiorate
  modified_base 37: mod_base = OTHER; note = Adenosine phosphorothiorate
  modified_base 41: mod_base = OTHER; note = 2'-Omethylcytosine
  modified_base 42: mod_base = OTHER; note = 2'-fluoroadenosine
  modified_base 43: mod_base = OTHER; note = 2'-fluoroadenosine
  modified_base 45: mod_base = OTHER; note = 2'-Omethylguanosine
  modified_base 47: mod_base = OTHER; note = 2'-Omethyluridine
  modified_base 48: mod_base = OTHER; note = 2'-Omethyluridine
  modified_base 49: mod_base = OTHER; note = 2'-Omethylcytosine phosphorothiorate
  modified_base 50: mod_base = OTHER; note = 2'-fluorocytosine
  modified_base 53: mod_base = OTHER; note = 2'-Omethylguanosine
  modified_base 59: mod_base = OTHER; note = 2'-Omethylguanosine
  modified_base 63: mod_base = OTHER; note = 2'-fluorocytosine
  modified_base 66: mod_base = OTHER; note = Cytosine phosphorothiorate
  modified_base 69: mod_base = OTHER; note = Adenosine phosphorothiorate
  modified_base 71: mod_base = OTHER; note = 2'-Omethyluridine
  modified_base 72: mod_base = OTHER; note = 2'-Omethylcytosine phosphorothiorate
  modified_base 73: mod_base = OTHER; note = 2'-Omethylguanosine
  modified_base 76: mod_base = OTHER; note = 2'-fluoroadenosine

SEQ ID NO: 4199 - RNA, 85 nt, synthetic construct; identical to SEQ ID NO: 3286
  source 1..85: mol_type = other RNA
  modified_base 1: mod_base = OTHER; note = 2'-Omethylcytosine phosphorothiorate
  modified_base 2: mod_base = OTHER; note = Cytosine phosphorothiorate
  modified_base 11: mod_base = OTHER; note = Cytosine phosphorothiorate
  modified_base 27: mod_base = OTHER; note = 2'-fluorouridine
  modified_base 34: mod_base = OTHER; note = 2'-fluorouridine
  modified_base 54: mod_base = OTHER; note = 2'-fluorocytosine
  modified_base 64: mod_base = OTHER; note = Uridine phosphorothiorate
  modified_base 76: mod_base = OTHER; note = 2'-fluorocytosine
  modified_base 84: mod_base = OTHER; note = 2'-fluorocytosine

SEQ ID NO: 4200 - RNA, 76 nt, synthetic construct; identical to SEQ ID NO: 3289
  source 1..76: mol_type = other RNA
  modified_base 1: mod_base = OTHER; note = 2'-Omethylguanosine phosphorothiorate
  modified_base 2: mod_base = OTHER; note = 2'-Omethylcytosine phosphorothiorate
  modified_base 75: mod_base = OTHER; note = 2'-Omethylcytosine phosphorothiorate

SEQ ID NO: 4201 - RNA, 86 nt, synthetic construct
  source 1..86: mol_type = other RNA
accaggatggccgagtggttaaggcgttggacttcagatccaatggacgtatgtccgcgtgggttcgaaccccactcctggtacca

SEQ ID NO: 4202 - RNA, 76 nt, synthetic construct
  source 1..76: mol_type = other RNA
gcgcttgtggcctaatggataaggcgtctgacttcaaatcagacgattgtgggttcgagtcccaccaggcgtgcca

SEQ ID NO: 4203 - RNA, 76 nt, synthetic construct; identical to SEQ ID NO: 3295
  source 1..76: mol_type = other RNA
  modified_base 1: mod_base = OTHER; note = 2'-Omethylcytosine phosphorothiorate
  modified_base 2: mod_base = OTHER; note = 2'-Omethylcytosine
  modified_base 3: mod_base = OTHER; note = 2'-Omethyluridine
  modified_base 8: mod_base = OTHER; note = 2'-fluorouridine phosphorothiorate
  modified_base 9: mod_base = OTHER; note = 2'-fluoroadenosine
  modified_base 22: mod_base = OTHER; note = 2'-fluoroguanosine
  modified_base 25: mod_base = OTHER; note = Cytosine phosphorothiorate
  modified_base 26: mod_base = OTHER; note = 2'-fluoroguanosine phosphorothiorate
  modified_base 27: mod_base = OTHER; note = 2'-fluoroguanosine phosphorothiorate
  modified_base 28: mod_base = OTHER; note = Adenosine phosphorothiorate
  modified_base 39: mod_base = OTHER; note = 2'-fluorouridine phosphorothiorate
  modified_base 40: mod_base = OTHER; note = Cytosine phosphorothiorate
  modified_base 51: mod_base = OTHER; note = 2'-fluorouridine phosphorothiorate
  modified_base 53: mod_base = OTHER; note = 2'-Omethylguanosine
  modified_base 57: mod_base = OTHER; note = 2'-fluoroguanosine phosphorothiorate
  modified_base 67: mod_base = OTHER; note = 2'-fluorocytosine
  modified_base 74: mod_base = OTHER; note = Cytosine phosphorothiorate
  modified_base 75: mod_base = OTHER; note = 2'-Omethylcytosine phosphorothiorate

SEQ ID NO: 4204 - RNA, 86 nt, synthetic construct; identical to SEQ ID NO: 3290
  source 1..86: mol_type = other RNA
  modified_base 2: mod_base = OTHER; note = Cytosine phosphorothiorate

SEQ ID NO: 4205 - RNA, 85 nt, synthetic construct; identical to SEQ ID NO: 3310
  source 1..85: mol_type = other RNA
  modified_base 4: mod_base = OTHER; note = Guanosine phosphorothiorate
  modified_base 46: mod_base = OTHER; note = 2'-Omethyladenosine
  modified_base 58: mod_base = OTHER; note = Guanosine phosphorothiorate
  modified_base 59: mod_base = OTHER; note = 2'-fluorouridine
  modified_base 69: mod_base = OTHER; note = Cytosine phosphorothiorate
  modified_base 83: mod_base = OTHER; note = 2'-fluorocytosine phosphorothiorate

SEQ ID NO: 4206 - RNA, 76 nt, synthetic construct; identical to SEQ ID NO: 625
  source 1..76: mol_type = other RNA
  modified_base 1: mod_base = OTHER; note = 2'-Omethylguanosine
  modified_base 3: mod_base = OTHER; note = 2'-fluorocytosine
  modified_base 4: mod_base = OTHER; note = 2'-fluorouridine
  modified_base 5: mod_base = OTHER; note = 2'-fluorocytosine
  modified_base 6: mod_base = OTHER; note = 2'-fluorocytosine phosphorothiorate
  modified_base 12: mod_base = OTHER; note = Guanosine phosphorothiorate
  modified_base 13: mod_base = OTHER; note = 2'-fluorocytosine
  modified_base 14: mod_base = OTHER; note = 2'-fluoroadenosine
  modified_base 20: mod_base = OTHER; note = 2'-Omethyluridine
  modified_base 22: mod_base = OTHER; note = 2'-Omethylguanosine phosphorothiorate
  modified_base 24: mod_base = OTHER; note = Guanosine phosphorothiorate
  modified_base 25: mod_base = OTHER; note = 2'-Omethylcytosine phosphorothiorate
  modified_base 26: mod_base = OTHER; note = 2'-fluoroadenosine
  modified_base 30: mod_base = OTHER; note = 2'-fluoroguanosine
  modified_base 32: mod_base = OTHER; note = 2'-fluorocytosine
  modified_base 33: mod_base = OTHER; note = Uridine phosphorothiorate
  modified_base 34: mod_base = OTHER; note = Uridine phosphorothiorate
  modified_base 39: mod_base = OTHER; note = 2'-Omethyluridine
  modified_base 43: mod_base = OTHER; note = Adenosine phosphorothiorate
  modified_base 44: mod_base = OTHER; note = 2'-fluoroadenosine
  modified_base 47: mod_base = OTHER; note = 2'-Omethyluridine
  modified_base 48: mod_base = OTHER; note = 2'-fluorouridine
  modified_base 51: mod_base = OTHER; note = 2'-Omethylguanosine
  modified_base 52: mod_base = OTHER; note = Guanosine phosphorothiorate
  modified_base 53: mod_base = OTHER; note = 2'-fluoroguanosine
  modified_base 54: mod_base = OTHER; note = Uridine phosphorothiorate
  modified_base 59: mod_base = OTHER; note = 2'-Omethylguanosine
  modified_base 60: mod_base = OTHER; note = 2'-fluorouridine
  modified_base 63: mod_base = OTHER; note = 2'-fluorocytosine
  modified_base 64: mod_base = OTHER; note = 2'-fluoroguanosine
  modified_base 65: mod_base = OTHER; note = Guanosine phosphorothiorate
  modified_base 68: mod_base = OTHER; note = 2'-fluoroguanosine
  modified_base 73: mod_base = OTHER; note = 2'-fluoroguanosine
  modified_base 74: mod_base = OTHER; note = 2'-Omethylcytosine
  modified_base 75: mod_base = OTHER; note = 2'-fluorocytosine

SEQ ID NO: 4207 - RNA, 76 nt, synthetic construct; identical to SEQ ID NO: 625
  source 1..76: mol_type = other RNA
  modified_base 1: mod_base = OTHER; note = 2'-Omethylguanosine phosphorothiorate
  modified_base 2: mod_base = OTHER; note = 2'-Omethylguanosine
  modified_base 22: mod_base = OTHER; note = 2'-Omethylguanosine
  modified_base 52: mod_base = OTHER; note = 2'-Omethylguanosine
  modified_base 73: mod_base = OTHER; note = Guanosine phosphorothiorate
  modified_base 74: mod_base = OTHER; note = Cytosine phosphorothiorate
  modified_base 75: mod_base = OTHER; note = 2'-Omethylcytosine

SEQ ID NO: 4208 - RNA, 85 nt, synthetic construct; identical to SEQ ID NO: 3286
  source 1..85: mol_type = other RNA
  modified_base 1: mod_base = OTHER; note = 2'-Omethylcytosine
  modified_base 11: mod_base = OTHER; note = Cytosine phosphorothiorate
  modified_base 30: mod_base = OTHER; note = 2'-fluoroadenosine
  modified_base 38: mod_base = OTHER; note = Uridine phosphorothiorate
  modified_base 46: mod_base = OTHER; note = Adenosine phosphorothiorate
  modified_base 49: mod_base = OTHER; note = 2'-Omethyluridine
  modified_base 54: mod_base = OTHER; note = 2'-fluorocytosine
  modified_base 73: mod_base = OTHER; note = 2'-fluoroadenosine
  modified_base 77: mod_base = OTHER; note = Cytosine phosphorothiorate
  modified_base 84: mod_base = OTHER; note = 2'-Omethylcytosine

SEQ ID NO: 4209 - RNA, 76 nt, synthetic construct; identical to SEQ ID NO: 3332
  source 1..76: mol_type = other RNA
  modified_base 1: mod_base = OTHER; note = 2'-Omethylguanosine
  modified_base 19: mod_base = OTHER; note = 2'-Omethyladenosine
  modified_base 20: mod_base = OTHER; note = 2'-Omethyluridine
  modified_base 21: mod_base = OTHER; note = 2'-fluoroadenosine
  modified_base 22: mod_base = OTHER; note = 2'-Omethylguanosine
  modified_base 40: mod_base = OTHER; note = 2'-fluorouridine
  modified_base 41: mod_base = OTHER; note = 2'-Omethylcytosine
  modified_base 42: mod_base = OTHER; note = 2'-Omethyladenosine
  modified_base 43: mod_base = OTHER; note = 2'-Omethyladenosine
  modified_base 73: mod_base = OTHER; note = 2'-Omethylguanosine

SEQ ID NO: 4210 - RNA, 75 nt, synthetic construct; identical to SEQ ID NO: 1045
  source 1..75: mol_type = other RNA
  modified_base 1: mod_base = OTHER; note = 2'-Omethylguanosine
  modified_base 17: mod_base = OTHER; note = 2'-Omethylguanosine
  modified_base 18: mod_base = OTHER; note = 2'-Omethylguanosine
  modified_base 33: mod_base = OTHER; note = Uridine phosphorothiorate
  modified_base 34: mod_base = OTHER; note = 2'-Omethyluridine
  modified_base 35: mod_base = OTHER; note = Uridine phosphorothiorate
  modified_base 37: mod_base = OTHER; note = Adenosine phosphorothiorate
  modified_base 38: mod_base = OTHER; note = Adenosine phosphorothiorate
  modified_base 41: mod_base = OTHER; note = 2'-fluorocytosine
  modified_base 42: mod_base = OTHER; note = 2'-Omethyladenosine
  modified_base 43: mod_base = OTHER; note = 2'-Omethylguanosine
  modified_base 44: mod_base = OTHER; note = 2'-fluorocytosine
  modified_base 49: mod_base = OTHER; note = 2'-Omethylcytosine
  modified_base 51: mod_base = OTHER; note = 2'-Omethyladenosine
  modified_base 72: mod_base = OTHER; note = 2'-Omethyluridine

SEQ ID NO: 4211 - RNA, 76 nt, synthetic construct; identical to SEQ ID NO: 625
  source 1..76: mol_type = other RNA
  modified_base 1: mod_base = OTHER; note = Guanosine phosphorothiorate
  modified_base 9: mod_base = OTHER; note = Guanosine phosphorothiorate
  modified_base 10: mod_base = OTHER; note = 2'-fluoroguanosine
  modified_base 20: mod_base = OTHER; note = 2'-Omethyluridine
  modified_base 24: mod_base = OTHER; note = 2'-Omethylguanosine
  modified_base 26: mod_base = OTHER; note = 2'-fluoroadenosine
  modified_base 27: mod_base = OTHER; note = 2'-Omethyluridine phosphorothiorate
  modified_base 33: mod_base = OTHER; note = Uridine phosphorothiorate
  modified_base 40: mod_base = OTHER; note = Uridine phosphorothiorate
  modified_base 41: mod_base = OTHER; note = 2'-Omethylcytosine phosphorothiorate
  modified_base 46: mod_base = OTHER; note = Guanosine phosphorothiorate
  modified_base 47: mod_base = OTHER; note = 2'-fluorouridine phosphorothiorate
  modified_base 48: mod_base = OTHER; note = 2'-fluorouridine
  modified_base 49: mod_base = OTHER; note = 2'-Omethylcytosine phosphorothiorate
  modified_base 50: mod_base = OTHER; note = 2'-fluorocytosine
  modified_base 51: mod_base = OTHER; note = 2'-Omethylguanosine
  modified_base 53: mod_base = OTHER; note = 2'-Omethylguanosine
  modified_base 58: mod_base = OTHER; note = Adenosine phosphorothiorate
  modified_base 59: mod_base = OTHER; note = 2'-Omethylguanosine
  modified_base 60: mod_base = OTHER; note = 2'-Omethyluridine phosphorothiorate
  modified_base 61: mod_base = OTHER; note = 2'-fluorocytosine
  modified_base 62: mod_base = OTHER; note = Cytosine phosphorothiorate
  modified_base 66: mod_base = OTHER; note = 2'-fluorocytosine
  modified_base 67: mod_base = OTHER; note = Guanosine phosphorothiorate
  modified_base 68: mod_base = OTHER; note = Guanosine phosphorothiorate
  modified_base 70: mod_base = OTHER; note = Guanosine phosphorothiorate
  modified_base 72: mod_base = OTHER; note = 2'-Omethylcytosine
  modified_base 73: mod_base = OTHER; note = 2'-Omethylguanosine
  modified_base 74: mod_base = OTHER; note = 2'-Omethylcytosine phosphorothiorate
  modified_base 75: mod_base = OTHER; note = Cytosine phosphorothiorate

SEQ ID NO: 4212 - RNA, 76 nt, synthetic construct; identical to SEQ ID NO: 625
  source 1..76: mol_type = other RNA
  modified_base 3: mod_base = OTHER; note = 2'-Omethylcytosine
  modified_base 9: mod_base = OTHER; note = Guanosine phosphorothiorate
  modified_base 12: mod_base = OTHER; note = 2'-fluoroguanosine
  modified_base 16: mod_base = OTHER; note = 2'-Omethyluridine
  modified_base 20: mod_base = OTHER; note = Uridine phosphorothiorate
  modified_base 21: mod_base = OTHER; note = Adenosine phosphorothiorate
  modified_base 22: mod_base = OTHER; note = 2'-Omethylguanosine phosphorothiorate
  modified_base 25: mod_base = OTHER; note = 2'-Omethylcytosine
  modified_base 26: mod_base = OTHER; note = 2'-fluoroadenosine
  modified_base 28: mod_base = OTHER; note = 2'-Omethyluridine
  modified_base 29: mod_base = OTHER; note = 2'-Omethylguanosine
  modified_base 33: mod_base = OTHER; note = Uridine phosphorothiorate
  modified_base 34: mod_base = OTHER; note = 2'-fluorouridine
  modified_base 41: mod_base = OTHER; note = 2'-Omethylcytosine
  modified_base 42: mod_base = OTHER; note = 2'-fluoroadenosine phosphorothiorate
  modified_base 44: mod_base = OTHER; note = 2'-fluoroadenosine
  modified_base 47: mod_base = OTHER; note = Uridine phosphorothiorate
  modified_base 48: mod_base = OTHER; note = 2'-Omethyluridine
  modified_base 49: mod_base = OTHER; note = 2'-Omethylcytosine
  modified_base 50: mod_base = OTHER; note = Cytosine phosphorothiorate
  modified_base 51: mod_base = OTHER; note = 2'-Omethylguanosine phosphorothiorate
  modified_base 52: mod_base = OTHER; note = Guanosine phosphorothiorate
  modified_base 54: mod_base = OTHER; note = Uridine phosphorothiorate
  modified_base 55: mod_base = OTHER; note = Uridine phosphorothiorate
  modified_base 57: mod_base = OTHER; note = Guanosine phosphorothiorate
  modified_base 58: mod_base = OTHER; note = 2'-fluoroadenosine
  modified_base 61: mod_base = OTHER; note = 2'-fluorocytosine
  modified_base 62: mod_base = OTHER; note = 2'-Omethylcytosine phosphorothiorate
  modified_base 64: mod_base = OTHER; note = 2'-fluoroguanosine
  modified_base 66: mod_base = OTHER; note = 2'-Omethylcytosine
  modified_base 67: mod_base = OTHER; note = Guanosine phosphorothiorate
  modified_base 68: mod_base = OTHER; note = 2'-fluoroguanosine
  modified_base 69: mod_base = OTHER; note = 2'-Omethyladenosine
  modified_base 70: mod_base = OTHER; note = 2'-fluoroguanosine
  modified_base 74: mod_base = OTHER; note = 2'-Omethylcytosine
  modified_base 75: mod_base = OTHER; note = Cytosine phosphorothiorate
  modified_base 76: mod_base = OTHER; note = 2'-fluoroadenosine

SEQ ID NO: 4213 - RNA, 75 nt, synthetic construct; identical to SEQ ID NO: 3311
  source 1..75: mol_type = other RNA
  modified_base 4: mod_base = OTHER; note = 2'-Omethyluridine
  modified_base 9: mod_base = OTHER; note = Guanosine phosphorothiorate
  modified_base 16: mod_base = OTHER; note = 2'-Omethyluridine phosphorothiorate
  modified_base 19: mod_base = OTHER; note = Uridine phosphorothiorate
  modified_base 20: mod_base = OTHER; note = 2'-fluoroadenosine
  modified_base 38: mod_base = OTHER; note = 2'-fluoroadenosine
  modified_base 41: mod_base = OTHER; note = 2'-fluorocytosine
  modified_base 45: mod_base = OTHER; note = 2'-fluoroguanosine
  modified_base 47: mod_base = OTHER; note = 2'-fluorouridine
  modified_base 54: mod_base = OTHER; note = 2'-fluorouridine
  modified_base 59: mod_base = OTHER; note = 2'-Omethyluridine
  modified_base 65: mod_base = OTHER; note = 2'-fluorouridine
  modified_base 72: mod_base = OTHER; note = Uridine phosphorothiorate
  modified_base 73: mod_base = OTHER; note = Cytosine phosphorothiorate
  modified_base 74: mod_base = OTHER; note = 2'-Omethylcytosine

SEQ ID NO: 4214 - RNA, 76 nt, synthetic construct; identical to SEQ ID NO: 625
  source 1..76: mol_type = other RNA
  modified_base 1: mod_base = OTHER; note = 2'-Omethylguanosine phosphorothiorate
  modified_base 2: mod_base = OTHER; note = 2'-Omethylguanosine
  modified_base 3: mod_base = OTHER; note = 2'-Omethylcytosine
  modified_base 4: mod_base = OTHER; note = 2'-Omethyluridine
  modified_base 5: mod_base = OTHER; note = 2'-Omethylcytosine
  modified_base 6: mod_base = OTHER; note = 2'-Omethylcytosine
  modified_base 10: mod_base = OTHER; note = 2'-Omethylguanosine
  modified_base 11: mod_base = OTHER; note = 2'-Omethylcytosine
  modified_base 12: mod_base = OTHER; note = 2'-Omethylguanosine
  modified_base 13: mod_base = OTHER; note = 2'-Omethylcytosine
  modified_base 16: mod_base = OTHER; note = 2'-Omethyluridine
  modified_base 17: mod_base = OTHER; note = 2'-Omethylguanosine
  modified_base 18: mod_base = OTHER; note = 2'-Omethylguanosine
  modified_base 22: mod_base = OTHER; note = 2'-Omethylguanosine
  modified_base 23: mod_base = OTHER; note = 2'-Omethylcytosine
  modified_base 24: mod_base = OTHER; note = 2'-Omethylguanosine
  modified_base 25: mod_base = OTHER; note = 2'-Omethylcytosine
  modified_base 40: mod_base = OTHER; note = 2'-fluorouridine
  modified_base 41: mod_base = OTHER; note = 2'-fluorocytosine
  modified_base 42: mod_base = OTHER; note = 2'-fluoroadenosine
  modified_base 43: mod_base = OTHER; note = 2'-fluoroadenosine
  modified_base 54: mod_base = OTHER; note = 2'-Omethyluridine phosphorothiorate
  modified_base 56: mod_base = OTHER; note = 2'-Omethylcytosine
  modified_base 57: mod_base = OTHER; note = 2'-fluoroguanosine
  modified_base 59: mod_base = OTHER; note = 2'-Omethylguanosine
  modified_base 73: mod_base = OTHER; note = 2'-Omethylguanosine

SEQ ID NO: 4215 - RNA, 75 nt, synthetic construct; identical to SEQ ID NO: 1045
  source 1..75: mol_type = other RNA
  modified_base 1: mod_base = OTHER; note = 2'-Omethylguanosine phosphorothiorate
  modified_base 2: mod_base = OTHER; note = 2'-Omethylguanosine phosphorothiorate
  modified_base 3: mod_base = OTHER; note = 2'-Omethyluridine
  modified_base 4: mod_base = OTHER; note = 2'-Omethyluridine
  modified_base 5: mod_base = OTHER; note = 2'-Omethylcytosine
  modified_base 6: mod_base = OTHER; note = 2'-Omethylcytosine
  modified_base 16: mod_base = OTHER; note = 2'-Omethyluridine
  modified_base 17: mod_base = OTHER; note = 2'-Omethylguanosine
  modified_base 18: mod_base = OTHER; note = 2'-Omethylguanosine
  modified_base 20: mod_base = OTHER; note = 2'-Omethyladenosine
  modified_base 25: mod_base = OTHER; note = 2'-Omethylcytosine
  modified_base 33: mod_base = OTHER; note = 2'-fluorouridine
  modified_base 35: mod_base = OTHER; note = Uridine phosphorothiorate
  modified_base 37: mod_base = OTHER; note = Adenosine phosphorothiorate
  modified_base 38: mod_base = OTHER; note = Adenosine phosphorothiorate
  modified_base 41: mod_base = OTHER; note = 2'-Omethylcytosine
  modified_base 44: mod_base = OTHER; note = 2'-Omethylcytosine
  modified_base 45: mod_base = OTHER; note = 2'-Omethylguanosine
  modified_base 46: mod_base = OTHER; note = 2'-fluoroadenosine
  modified_base 47: mod_base = OTHER; note = 2'-fluorouridine
  modified_base 48: mod_base = OTHER; note = 2'-Omethylcytosine
  modified_base 49: mod_base = OTHER; note = 2'-Omethylcytosine
  modified_base 50: mod_base = OTHER; note = 2'-Omethylguanosine
  modified_base 51: mod_base = OTHER; note = 2'-Omethyladenosine
  modified_base 52: mod_base = OTHER; note = 2'-Omethylguanosine
  modified_base 53: mod_base = OTHER; note = 2'-Omethyluridine
  modified_base 55: mod_base = OTHER; note = 2'-Omethylcytosine
  modified_base 58: mod_base = OTHER; note = 2'-Omethylguanosine
  modified_base 72: mod_base = OTHER; note = 2'-Omethyluridine

SEQ ID NO: 4216 - RNA, 76 nt, synthetic construct; identical to SEQ ID NO: 3289
  source 1..76: mol_type = other RNA
  modified_base 1: mod_base = OTHER; note = 2'-Omethylguanosine
  modified_base 2: mod_base = OTHER; note = 2'-Omethylcytosine
  modified_base 3: mod_base = OTHER; note = 2'-Omethylcytosine
  modified_base 4: mod_base = OTHER; note = 2'-Omethyluridine
  modified_base 5: mod_base = OTHER; note = 2'-Omethylguanosine
  modified_base 6: mod_base = OTHER; note = 2'-Omethylguanosine
  modified_base 14: mod_base = OTHER; note = 2'-Omethyladenosine
  modified_base 15: mod_base = OTHER; note = 2'-Omethylguanosine
  modified_base 16: mod_base = OTHER; note = 2'-Omethyluridine
  modified_base 18: mod_base = OTHER; note = 2'-Omethylguanosine
  modified_base 19: mod_base = OTHER; note = 2'-Omethylguanosine
  modified_base 25: mod_base = OTHER; note = 2'-Omethylcytosine
  modified_base 33: mod_base = OTHER; note = 2'-fluorouridine
  modified_base 35: mod_base = OTHER; note = Uridine phosphorothiorate
  modified_base 37: mod_base = OTHER; note = Adenosine phosphorothiorate
  modified_base 38: mod_base = OTHER; note = Adenosine phosphorothiorate
  modified_base 41: mod_base = OTHER; note = 2'-Omethyluridine
  modified_base 42: mod_base = OTHER; note = 2'-Omethylguanosine
  modified_base 43: mod_base = OTHER; note = 2'-Omethyladenosine
  modified_base 44: mod_base = OTHER; note = 2'-fluoroguanosine
  modified_base 49: mod_base = OTHER; note = 2'-Omethylcytosine
  modified_base 50: mod_base = OTHER; note = 2'-Omethyladenosine
  modified_base 52: mod_base = OTHER; note = 2'-Omethylguanosine
  modified_base 54: mod_base = OTHER; note = 2'-Omethyluridine
  modified_base 55: mod_base = OTHER; note = Uridine phosphorothiorate
  modified_base 56: mod_base = OTHER; note = 2'-Omethylcytosine
  modified_base 57: mod_base = OTHER; note = 2'-fluoroadenosine
  modified_base 59: mod_base = OTHER; note = 2'-Omethylguanosine
  modified_base 61: mod_base = OTHER; note = 2'-Omethylcytosine
  modified_base 65: mod_base = OTHER; note = 2'-Omethylguanosine
  modified_base 73: mod_base = OTHER; note = 2'-Omethylguanosine

SEQ ID NO: 4217 - RNA, 76 nt, synthetic construct; identical to SEQ ID NO: 625
  source 1..76: mol_type = other RNA
  modified_base 2: mod_base = OTHER; note = 2'-fluoroguanosine
  modified_base 3: mod_base = OTHER; note = Cytosine phosphorothiorate
  modified_base 4: mod_base = OTHER; note = 2'-fluorouridine
  modified_base 5: mod_base = OTHER; note = 2'-Omethylcytosine
  modified_base 6: mod_base = OTHER; note = 2'-Omethylcytosine
  modified_base 13: mod_base = OTHER; note = 2'-Omethylcytosine
  modified_base 16: mod_base = OTHER; note = 2'-Omethyluridine
  modified_base 22: mod_base = OTHER; note = 2'-fluoroguanosine phosphorothiorate
  modified_base 28: mod_base = OTHER; note = 2'-Omethyluridine
  modified_base 29: mod_base = OTHER; note = 2'-Omethylguanosine
  modified_base 33: mod_base = OTHER; note = 2'-fluorouridine
  modified_base 36: mod_base = OTHER; note = Adenosine phosphorothiorate
  modified_base 37: mod_base = OTHER; note = Adenosine phosphorothiorate
  modified_base 39: mod_base = OTHER; note = 2'-fluorouridine phosphorothiorate
  modified_base 40: mod_base = OTHER; note = 2'-Omethyluridine
  modified_base 42: mod_base = OTHER; note = 2'-Omethyladenosine phosphorothiorate
  modified_base 43: mod_base = OTHER; note = 2'-fluoroadenosine
  modified_base 47: mod_base = OTHER; note = 2'-Omethyluridine
  modified_base 49: mod_base = OTHER; note = 2'-Omethylcytosine
  modified_base 50: mod_base = OTHER; note = 2'-Omethylcytosine
  modified_base 51: mod_base = OTHER; note = Guanosine phosphorothiorate
  modified_base 53: mod_base = OTHER; note = 2'-fluoroguanosine
  modified_base 54: mod_base = OTHER; note = Uridine phosphorothiorate
  modified_base 59: mod_base = OTHER; note = 2'-Omethylguanosine
  modified_base 60: mod_base = OTHER; note = 2'-Omethyluridine
  modified_base 61: mod_base = OTHER; note = 2'-fluorocytosine
  modified_base 62: mod_base = OTHER; note = Cytosine phosphorothiorate
  modified_base 66: mod_base = OTHER; note = 2'-Omethylcytosine phosphorothiorate
  modified_base 72: mod_base = OTHER; note = Cytosine phosphorothiorate
  modified_base 73: mod_base = OTHER; note = 2'-Omethylguanosine
  modified_base 74: mod_base = OTHER; note = 2'-Omethylcytosine
  modified_base 76: mod_base = OTHER; note = 2'-Omethyladenosine

SEQ ID NO: 4218 - RNA, 75 nt, synthetic construct; identical to SEQ ID NO: 3299
  source 1..75: mol_type = other RNA
  modified_base 1: mod_base = OTHER; note = 2'-Omethylcytosine phosphorothiorate
  modified_base 3: mod_base = OTHER; note = Uridine phosphorothiorate
  modified_base 6: mod_base = OTHER; note = 2'-Omethylguanosine phosphorothiorate
  modified_base 10: mod_base = OTHER; note = 2'-Omethylcytosine phosphorothiorate
  modified_base 20: mod_base = OTHER; note = 2'-fluoroadenosine
  modified_base 21: mod_base = OTHER; note = 2'-fluoroguanosine
  modified_base 26: mod_base = OTHER; note = Uridine phosphorothiorate
  modified_base 27: mod_base = OTHER; note = 2'-Omethylcytosine phosphorothiorate
  modified_base 35: mod_base = OTHER; note = 2'-fluoroadenosine
  modified_base 39: mod_base = OTHER; note = 2'-fluorocytosine phosphorothiorate
  modified_base 40: mod_base = OTHER; note = Uridine phosphorothiorate
  modified_base 48: mod_base = OTHER; note = 2'-fluorocytosine
  modified_base 49: mod_base = OTHER; note = 2'-fluoroadenosine
  modified_base 50: mod_base = OTHER; note = 2'-Omethylguanosine phosphorothiorate
  modified_base 60: mod_base = OTHER; note = 2'-Omethylcytosine phosphorothiorate
  modified_base 62: mod_base = OTHER; note = 2'-fluorocytosine
  modified_base 63: mod_base = OTHER; note = 2'-Omethyluridine phosphorothiorate
  modified_base 69: mod_base = OTHER; note = Guanosine phosphorothiorate
  modified_base 73: mod_base = OTHER; note = Cytosine phosphorothiorate
  modified_base 74: mod_base = OTHER; note = Cytosine phosphorothiorate

SEQ ID NO: 4219 - RNA, 75 nt, synthetic construct; identical to SEQ ID NO: 3336
  source 1..75: mol_type = other RNA
  modified_base 1: mod_base = OTHER; note = 2'-Omethylcytosine
  modified_base 2: mod_base = OTHER; note = 2'-Omethylcytosine
  modified_base 7: mod_base = OTHER; note = 2'-fluorouridine
  modified_base 10: mod_base = OTHER; note = 2'-Omethylcytosine phosphorothiorate
  modified_base 14: mod_base = OTHER; note = Guanosine phosphorothiorate
  modified_base 17: mod_base = OTHER; note = 2'-fluoroguanosine
  modified_base 20: mod_base = OTHER; note = 2'-Omethyladenosine phosphorothiorate
  modified_base 23: mod_base = OTHER; note = 2'-fluoroguanosine
  modified_base 25: mod_base = OTHER; note = 2'-fluoroadenosine
  modified_base 36: mod_base = OTHER; note = 2'-fluoroadenosine
  modified_base 39: mod_base = OTHER; note = 2'-fluorocytosine
  modified_base 46: mod_base = OTHER; note = 2'-fluorouridine
  modified_base 47: mod_base = OTHER; note = 2'-Omethylcytosine phosphorothiorate
  modified_base 48: mod_base = OTHER; note = Cytosine phosphorothiorate
  modified_base 49: mod_base = OTHER; note = 2'-fluoroadenosine
  modified_base 56: mod_base = OTHER; note = 2'-fluoroadenosine
  modified_base 61: mod_base = OTHER; note = 2'-fluorocytosine
  modified_base 62: mod_base = OTHER; note = 2'-fluorocytosine
  modified_base 63: mod_base = OTHER; note = 2'-Omethyluridine phosphorothiorate
  modified_base 68: mod_base = OTHER; note = 2'-Omethyladenosine
  modified_base 72: mod_base = OTHER; note = Guanosine phosphorothiorate
  modified_base 73: mod_base = OTHER; note = Cytosine phosphorothiorate
  modified_base 74: mod_base = OTHER; note = 2'-Omethylcytosine

SEQ ID NO: 4220 - RNA, 76 nt, synthetic construct; identical to SEQ ID NO: 625
  source 1..76: mol_type = other RNA
  modified_base 1: mod_base = OTHER; note = 2'-Omethylguanosine phosphorothiorate
  modified_base 2: mod_base = OTHER; note = 2'-Omethylguanosine phosphorothiorate
  modified_base 3: mod_base = OTHER; note = 2'-Omethylcytosine
  modified_base 4: mod_base = OTHER; note = 2'-Omethyluridine
  modified_base 5: mod_base = OTHER; note = 2'-Omethylcytosine
  modified_base 6: mod_base = OTHER; note = 2'-Omethylcytosine
  modified_base 14: mod_base = OTHER; note = 2'-Omethyladenosine
  modified_base 15: mod_base = OTHER; note = 2'-Omethyladenosine
  modified_base 16: mod_base = OTHER; note = 2'-Omethyluridine
  modified_base 17: mod_base = OTHER; note = 2'-Omethylguanosine
  modified_base 18: mod_base = OTHER; note = 2'-Omethylguanosine
  modified_base 20: mod_base = OTHER; note = 2'-Omethyluridine
  modified_base 25: mod_base = OTHER; note = 2'-Omethylcytosine
  modified_base 33: mod_base = OTHER; note = 2'-fluorouridine
  modified_base 35: mod_base = OTHER; note = Cytosine phosphorothiorate
  modified_base 37: mod_base = OTHER; note = Adenosine phosphorothiorate
  modified_base 38: mod_base = OTHER; note = Adenosine phosphorothiorate
  modified_base 41: mod_base = OTHER; note = 2'-fluorocytosine
  modified_base 42: mod_base = OTHER; note = 2'-Omethyladenosine
  modified_base 43: mod_base = OTHER; note = 2'-Omethyladenosine
  modified_base 44: mod_base = OTHER; note = 2'-fluoroadenosine
  modified_base 49: mod_base = OTHER; note = 2'-Omethylcytosine
  modified_base 50: mod_base = OTHER; note = 2'-Omethylcytosine
  modified_base 52: mod_base = OTHER; note = 2'-Omethylguanosine
  modified_base 54: mod_base = OTHER; note = 2'-Omethyluridine
  modified_base 55: mod_base = OTHER; note = Uridine phosphorothiorate
  modified_base 56: mod_base = OTHER; note = 2'-Omethylcytosine
  modified_base 57: mod_base = OTHER; note = 2'-fluoroguanosine
  modified_base 59: mod_base = OTHER; note = 2'-Omethylguanosine
  modified_base 61: mod_base = OTHER; note = 2'-Omethylcytosine
  modified_base 62: mod_base = OTHER; note = 2'-Omethylcytosine
  modified_base 63: mod_base = OTHER; note = 2'-fluorocytosine
  modified_base 64: mod_base = OTHER; note = 2'-Omethylguanosine
  modified_base 65: mod_base = OTHER; note = 2'-Omethylguanosine
  modified_base 74: mod_base = OTHER; note = Cytosine phosphorothiorate
  modified_base 75: mod_base = OTHER; note = 2'-Omethylcytosine phosphorothiorate
  modified_base 76: mod_base = OTHER; note = 2'-Omethyladenosine

SEQ ID NO: 4221 - RNA, 75 nt, synthetic construct; identical to SEQ ID NO: 3336
  source 1..75: mol_type = other RNA
  modified_base 1: mod_base = OTHER; note = 2'-Omethylcytosine
  modified_base 3: mod_base = OTHER; note = Uridine phosphorothiorate
  modified_base 6: mod_base = OTHER; note = 2'-Omethylguanosine phosphorothiorate
  modified_base 10: mod_base = OTHER; note = 2'-fluorocytosine phosphorothiorate
  modified_base 13: mod_base = OTHER; note = 2'-fluoroadenosine
  modified_base 18: mod_base = OTHER; note = 2'-fluoroguanosine
  modified_base 21: mod_base = OTHER; note = 2'-fluoroguanosine phosphorothiorate
  modified_base 26: mod_base = OTHER; note = Uridine phosphorothiorate
  modified_base 28: mod_base = OTHER; note = 2'-fluoroadenosine
  modified_base 39: mod_base = OTHER; note = 2'-fluorocytosine
  modified_base 40: mod_base = OTHER; note = 2'-fluorouridine
  modified_base 41: mod_base = OTHER; note = 2'-fluoroguanosine
  modified_base 47: mod_base = OTHER; note = 2'-fluorocytosine
  modified_base 48: mod_base = OTHER; note = 2'-Omethylcytosine phosphorothiorate
  modified_base 50: mod_base = OTHER; note = 2'-fluoroguanosine
  modified_base 55: mod_base = OTHER; note = 2'-Omethylcytosine phosphorothiorate
  modified_base 60: mod_base = OTHER; note = 2'-Omethylcytosine
  modified_base 61: mod_base = OTHER; note = Cytosine phosphorothiorate
  modified_base 68: mod_base = OTHER; note = 2'-Omethyladenosine phosphorothiorate
  modified_base 72: mod_base = OTHER; note = 2'-Omethylguanosine
  modified_base 74: mod_base = OTHER; note = Cytosine phosphorothiorate

SEQ ID NO: 4222 - RNA, 76 nt, synthetic construct; identical to SEQ ID NO: 625
  source 1..76: mol_type = other RNA
  modified_base 3: mod_base = OTHER; note = 2'-fluorocytosine
  modified_base 5: mod_base = OTHER; note = Cytosine phosphorothiorate
  modified_base 6: mod_base = OTHER; note = 2'-Omethylcytosine phosphorothiorate
  modified_base 10: mod_base = OTHER; note = 2'-Omethylguanosine
  modified_base 14: mod_base = OTHER; note = Adenosine phosphorothiorate
  modified_base 15: mod_base = OTHER; note = 2'-fluoroadenosine
  modified_base 17: mod_base = OTHER; note = Guanosine phosphorothiorate
  modified_base 24: mod_base = OTHER; note = 2'-fluoroguanosine phosphorothiorate
  modified_base 25: mod_base = OTHER; note = 2'-fluorocytosine
  modified_base 28: mod_base = OTHER; note = 2'-Omethyluridine
  modified_base 31: mod_base = OTHER; note = 2'-fluoroadenosine
  modified_base 34: mod_base = OTHER; note = 2'-Omethyluridine
  modified_base 36: mod_base = OTHER; note = Adenosine phosphorothiorate
  modified_base 37: mod_base = OTHER; note = Adenosine phosphorothiorate
  modified_base 38: mod_base = OTHER; note = 2'-Omethyladenosine
  modified_base 40: mod_base = OTHER; note = 2'-fluorouridine
  modified_base 42: mod_base = OTHER; note = 2'-Omethyladenosine phosphorothiorate
  modified_base 43: mod_base = OTHER; note = 2'-fluoroadenosine
  modified_base 44: mod_base = OTHER; note = Adenosine phosphorothiorate
  modified_base 45: mod_base = OTHER; note = 2'-Omethylguanosine
  modified_base 54: mod_base = OTHER; note = Uridine phosphorothiorate
  modified_base 55: mod_base = OTHER; note = Uridine phosphorothiorate
  modified_base 56: mod_base = OTHER; note = 2'-fluorocytosine
  modified_base 57: mod_base = OTHER; note = 2'-fluoroguanosine phosphorothiorate
  modified_base 58: mod_base = OTHER; note = 2'-fluoroadenosine
  modified_base 61: mod_base = OTHER; note = 2'-Omethylcytosine
  modified_base 62: mod_base = OTHER; note = 2'-Omethylcytosine
  modified_base 63: mod_base = OTHER; note = 2'-fluorocytosine
  modified_base 65: mod_base = OTHER; note = 2'-fluoroguanosine
  modified_base 66: mod_base = OTHER; note = Cytosine phosphorothiorate
  modified_base 67: mod_base = OTHER; note = 2'-fluoroguanosine
  modified_base 69: mod_base = OTHER; note = 2'-fluoroadenosine
  modified_base 70: mod_base = OTHER; note = 2'-fluoroguanosine
  modified_base 71: mod_base = OTHER; note = 2'-fluorouridine
  modified_base 73: mod_base = OTHER; note = 2'-fluoroguanosine
  modified_base 74: mod_base = OTHER; note = 2'-Omethylcytosine
  modified_base 75: mod_base = OTHER; note = Cytosine phosphorothiorate

SEQ ID NO: 4223 - RNA, 76 nt, synthetic construct; identical to SEQ ID NO: 625
  source 1..76: mol_type = other RNA
  modified_base 1: mod_base = OTHER; note = 2'-Omethylguanosine phosphorothiorate
  modified_base 2: mod_base = OTHER; note = 2'-Omethylguanosine
  modified_base 3: mod_base = OTHER; note = 2'-Omethylcytosine
  modified_base 4: mod_base = OTHER; note = 2'-Omethyluridine
  modified_base 5: mod_base = OTHER; note = 2'-Omethylcytosine
  modified_base 6: mod_base = OTHER; note = 2'-Omethylcytosine
  modified_base 10: mod_base = OTHER; note = 2'-Omethylguanosine
  modified_base 11: mod_base = OTHER; note = 2'-Omethylcytosine
  modified_base 12: mod_base = OTHER; note = 2'-Omethylguanosine
  modified_base 13: mod_base = OTHER; note = 2'-Omethylcytosine
  modified_base 14: mod_base = OTHER; note = 2'-Omethyladenosine
  modified_base 15: mod_base = OTHER; note = 2'-Omethyladenosine
  modified_base 16: mod_base = OTHER; note = 2'-Omethyluridine
  modified_base 17: mod_base = OTHER; note = 2'-Omethylguanosine
  modified_base 18: mod_base = OTHER; note = 2'-Omethylguanosine
  modified_base 20: mod_base = OTHER; note = 2'-Omethyluridine
  modified_base 22: mod_base = OTHER; note = 2'-Omethylguanosine
  modified_base 23: mod_base = OTHER; note = 2'-Omethylcytosine
  modified_base 24: mod_base = OTHER; note = 2'-Omethylguanosine
  modified_base 25: mod_base = OTHER; note = 2'-Omethylcytosine
  modified_base 33: mod_base = OTHER; note = 2'-fluorouridine
  modified_base 35: mod_base = OTHER; note = Cytosine phosphorothiorate
  modified_base 37: mod_base = OTHER; note = Adenosine phosphorothiorate
  modified_base 38: mod_base = OTHER; note = Adenosine phosphorothiorate
  modified_base 41: mod_base = OTHER; note = 2'-fluorocytosine
  modified_base 42: mod_base = OTHER; note = 2'-Omethyladenosine
  modified_base 43: mod_base = OTHER; note = 2'-Omethyladenosine
  modified_base 44: mod_base = OTHER; note = 2'-fluoroadenosine
  modified_base 49: mod_base = OTHER; note = 2'-Omethylcytosine
  modified_base 50: mod_base = OTHER; note = 2'-Omethylcytosine
  modified_base 52: mod_base = OTHER; note = 2'-Omethylguanosine
  modified_base 54: mod_base = OTHER; note = 2'-Omethyluridine
  modified_base 55: mod_base = OTHER; note = Uridine phosphorothiorate
  modified_base 56: mod_base = OTHER; note = 2'-Omethylcytosine
  modified_base 57: mod_base = OTHER; note = 2'-fluoroguanosine
  modified_base 59: mod_base = OTHER; note = 2'-Omethylguanosine
  modified_base 61: mod_base = OTHER; note = 2'-Omethylcytosine
  modified_base 65: mod_base = OTHER; note = 2'-Omethylguanosine
  modified_base 73: mod_base = OTHER; note = 2'-Omethylguanosine

SEQ ID NO: 4224 - RNA, 74 nt, synthetic construct; identical to SEQ ID NO: 3293
  source 1..74: mol_type = other RNA
  modified_base 1: mod_base = OTHER; note = 2'-fluoroadenosine phosphorothiorate
  modified_base 3: mod_base = OTHER; note = 2'-fluorocytosine
  modified_base 7: mod_base = OTHER; note = 2'-Omethyluridine
  modified_base 11: mod_base = OTHER; note = Guanosine phosphorothiorate
  modified_base 15: mod_base = OTHER; note = Cytosine phosphorothiorate
  modified_base 26: mod_base = OTHER; note = 2'-fluorocytosine
  modified_base 42: mod_base = OTHER; note = Adenosine phosphorothiorate
  modified_base 73: mod_base = OTHER; note = 2'-Omethylcytosine phosphorothiorate
  modified_base 74: mod_base = OTHER; note = 2'-Omethyladenosine

SEQ ID NO: 4225 - RNA, 85 nt, synthetic construct; identical to SEQ ID NO: 3288
  source 1..85: mol_type = other RNA
  modified_base 1: mod_base = OTHER; note = 2'-Omethylcytosine
  modified_base 11: mod_base = OTHER; note = Cytosine phosphorothiorate
  modified_base 17: mod_base = OTHER; note = 2'-Omethylguanosine
  modified_base 28: mod_base = OTHER; note = 2'-fluoroguanosine
  modified_base 30: mod_base = OTHER; note = 2'-fluoroadenosine
  modified_base 51: mod_base = OTHER; note = 2'-fluorouridine
  modified_base 53: mod_base = OTHER; note = 2'-fluorouridine
  modified_base 60: mod_base = OTHER; note = 2'-Omethylguanosine
  modified_base 84: mod_base = OTHER; note = Cytosine phosphorothiorate

SEQ ID NO: 4226 - RNA, 86 nt, synthetic construct; identical to SEQ ID NO: 3290
  source 1..86: mol_type = other RNA
  modified_base 1: mod_base = OTHER; note = 2'-Omethyladenosine phosphorothiorate
  modified_base 2: mod_base = OTHER; note = 2'-Omethylcytosine phosphorothiorate
  modified_base 84: mod_base = OTHER; note = Cytosine phosphorothiorate
  modified_base 85: mod_base = OTHER; note = 2'-Omethylcytosine phosphorothiorate
  modified_base 86: mod_base = OTHER; note = 2'-Omethyladenosine

SEQ ID NO: 4227 - RNA, 85 nt, synthetic construct; identical to SEQ ID NO: 3297
  source 1..85: mol_type = other RNA
  modified_base 27: mod_base = OTHER; note = 2'-Omethyluridine
  modified_base 28: mod_base = OTHER; note = 2'-Omethyluridine
  modified_base 29: mod_base = OTHER; note = 2'-Omethylguanosine
  modified_base 30: mod_base = OTHER; note = 2'-Omethylguanosine
  modified_base 31: mod_base = OTHER; note = 2'-Omethyladenosine

SEQ ID NO: 4228 - RNA, 85 nt, synthetic construct; identical to SEQ ID NO: 3297
  source 1..85: mol_type = other RNA
  modified_base 1: mod_base = OTHER; note = 2'-Omethylguanosine
  modified_base 2: mod_base = OTHER; note = 2'-Omethylcytosine
  modified_base 3: mod_base = OTHER; note = 2'-Omethyluridine
  modified_base 4: mod_base = OTHER; note = 2'-Omethylguanosine
  modified_base 5: mod_base = OTHER; note = 2'-Omethyluridine
  modified_base 6: mod_base = OTHER; note = 2'-Omethylguanosine
  modified_base 13: mod_base = OTHER; note = 2'-Omethylguanosine
  modified_base 14: mod_base = OTHER; note = 2'-Omethyladenosine
  modified_base 15: mod_base = OTHER; note = 2'-Omethylguanosine
  modified_base 16: mod_base = OTHER; note = 2'-Omethyluridine
  modified_base 17: mod_base = OTHER; note = 2'-Omethylguanosine
  modified_base 18: mod_base = OTHER; note = 2'-Omethylguanosine
  modified_base 19: mod_base = OTHER; note = Uridine phosphorothiorate
  modified_base 20: mod_base = OTHER; note = 2'-Omethyluridine
  modified_base 21: mod_base = OTHER; note = Adenosine phosphorothiorate
  modified_base 25: mod_base = OTHER; note = 2'-Omethylcytosine
  modified_base 33: mod_base = OTHER; note = Uridine phosphorothiorate
  modified_base 34: mod_base = OTHER; note = 2'-Omethyluridine
  modified_base 35: mod_base = OTHER; note = Cytosine phosphorothiorate
  modified_base 37: mod_base = OTHER; note = Adenosine phosphorothiorate
  modified_base 38: mod_base = OTHER; note = Adenosine phosphorothiorate
  modified_base 58: mod_base = OTHER; note = 2'-Omethylguanosine
  modified_base 59: mod_base = OTHER; note = 2'-Omethylcytosine
  modified_base 61: mod_base = OTHER; note = 2'-Omethylguanosine
  modified_base 63: mod_base = OTHER; note = Uridine phosphorothiorate
  modified_base 64: mod_base = OTHER; note = Uridine phosphorothiorate
  modified_base 70: mod_base = OTHER; note = 2'-Omethylcytosine
  modified_base 74: mod_base = OTHER; note = 2'-Omethylcytosine
  modified_base 82: mod_base = OTHER; note = 2'-Omethylguanosine

SEQ ID NO: 4229 - RNA, 76 nt, synthetic construct; identical to SEQ ID NO: 625
  source 1..76: mol_type = other RNA
  modified_base 1: mod_base = OTHER; note = 2'-Omethylguanosine
  modified_base 17: mod_base = OTHER; note = Guanosine phosphorothiorate
  modified_base 18: mod_base = OTHER; note = 2'-Omethylguanosine
  modified_base 19: mod_base = OTHER; note = Adenosine phosphorothiorate
  modified_base 20: mod_base = OTHER; note = 2'-Omethyluridine
  modified_base 25: mod_base = OTHER; note = 2'-Omethylcytosine
  modified_base 29: mod_base = OTHER; note = 2'-Omethylguanosine
  modified_base 33: mod_base = OTHER; note = 2'-fluorouridine
  modified_base 35: mod_base = OTHER; note = Cytosine phosphorothiorate
  modified_base 37: mod_base = OTHER; note = Adenosine phosphorothiorate
  modified_base 38: mod_base = OTHER; note = Adenosine phosphorothiorate
  modified_base 41: mod_base = OTHER; note = 2'-fluorocytosine phosphorothiorate
  modified_base 43: mod_base = OTHER; note = 2'-Omethyladenosine
  modified_base 44: mod_base = OTHER; note = 2'-fluoroadenosine
  modified_base 46: mod_base = OTHER; note = Guanosine phosphorothiorate
  modified_base 50: mod_base = OTHER; note = 2'-Omethylcytosine
  modified_base 52: mod_base = OTHER; note = 2'-Omethylguanosine
  modified_base 54: mod_base = OTHER; note = Uridine phosphorothiorate
  modified_base 55: mod_base = OTHER; note = Uridine phosphorothiorate
  modified_base 56: mod_base = OTHER; note = 2'-Omethylcytosine
  modified_base 57: mod_base = OTHER; note = Guanosine phosphorothiorate
  modified_base 62: mod_base = OTHER; note = 2'-Omethylcytosine
  modified_base 63: mod_base = OTHER; note = 2'-fluorocytosine
  modified_base 65: mod_base = OTHER; note = 2'-Omethylguanosine
  modified_base 71: mod_base = OTHER; note = 2'-Omethyluridine
  modified_base 73: mod_base = OTHER; note = 2'-Omethylguanosine

SEQ ID NO: 4230 - RNA, 86 nt, synthetic construct; identical to SEQ ID NO: 3290
  source 1..86: mol_type = other RNA
  modified_base 28: mod_base = OTHER; note = Uridine phosphorothiorate

SEQ ID NO: 4231 - RNA, 75 nt, synthetic construct; identical to SEQ ID NO: 1045
  source 1..75: mol_type = other RNA
  modified_base 60: mod_base = OTHER; note = 2'-Omethylcytosine
  modified_base 61: mod_base = OTHER; note = 2'-Omethyluridine
  modified_base 62: mod_base = OTHER; note = 2'-Omethylcytosine
  modified_base 63: mod_base = OTHER; note = 2'-Omethylguanosine
  modified_base 64: mod_base = OTHER; note = 2'-Omethylguanosine

SEQ ID NO: 4232 - RNA, 76 nt, synthetic construct; identical to SEQ ID NO: 3318
  source 1..76: mol_type = other RNA
  modified_base 1: mod_base = OTHER; note = 2'-Omethylcytosine
  modified_base 13: mod_base = OTHER; note = 2'-Omethylcytosine
  modified_base 14: mod_base = OTHER; note = 2'-Omethyladenosine
  modified_base 15: mod_base = OTHER; note = 2'-Omethylguanosine
  modified_base 16: mod_base = OTHER; note = 2'-Omethyluridine
  modified_base 18: mod_base = OTHER; note = 2'-Omethylguanosine
  modified_base 19: mod_base = OTHER; note = 2'-Omethylguanosine
  modified_base 20: mod_base = OTHER; note = Uridine phosphorothiorate
  modified_base 21: mod_base = OTHER; note = Adenosine phosphorothiorate
  modified_base 22: mod_base = OTHER; note = 2'-Omethylguanosine
  modified_base 23: mod_base = OTHER; note = 2'-Omethyladenosine
  modified_base 24: mod_base = OTHER; note = 2'-Omethylguanosine
  modified_base 25: mod_base = OTHER; note = 2'-Omethylcytosine
  modified_base 33: mod_base = OTHER; note = 2'-fluorouridine
  modified_base 34: mod_base = OTHER; note = 2'-Omethylcytosine
  modified_base 35: mod_base = OTHER; note = Uridine phosphorothiorate
  modified_base 37: mod_base = OTHER; note = Guanosine phosphorothiorate
  modified_base 38: mod_base = OTHER; note = Adenosine phosphorothiorate
  modified_base 49: mod_base = OTHER; note = 2'-Omethylguanosine
  modified_base 50: mod_base = OTHER; note = 2'-Omethylcytosine
  modified_base 52: mod_base = OTHER; note = 2'-Omethylguanosine
  modified_base 54: mod_base = OTHER; note = Uridine phosphorothiorate
  modified_base 55: mod_base = OTHER; note = Uridine phosphorothiorate
  modified_base 61: mod_base = OTHER; note = 2'-Omethylcytosine
  modified_base 65: mod_base = OTHER; note = 2'-Omethylcytosine
  modified_base 73: mod_base = OTHER; note = 2'-Omethyladenosine

SEQ ID NO: 4233 - RNA, 76 nt, synthetic construct; identical to SEQ ID NO: 625
  source 1..76: mol_type = other RNA
  modified_base 1: mod_base = OTHER; note = 2'-Omethylguanosine
  modified_base 10: mod_base = OTHER; note = 2'-Omethylguanosine
  modified_base 13: mod_base = OTHER; note = 2'-Omethylcytosine
  modified_base 18: mod_base = OTHER; note = 2'-Omethylguanosine
  modified_base 19: mod_base = OTHER; note = Adenosine phosphorothiorate
  modified_base 20: mod_base = OTHER; note = 2'-Omethyluridine
  modified_base 25: mod_base = OTHER; note = 2'-Omethylcytosine
  modified_base 29: mod_base = OTHER; note = 2'-Omethylguanosine
  modified_base 33: mod_base = OTHER; note = 2'-fluorouridine
  modified_base 35: mod_base = OTHER; note = Cytosine phosphorothiorate
  modified_base 37: mod_base = OTHER; note = Adenosine phosphorothiorate
  modified_base 38: mod_base = OTHER; note = Adenosine phosphorothiorate
  modified_base 43: mod_base = OTHER; note = 2'-Omethyladenosine
  modified_base 44: mod_base = OTHER; note = 2'-fluoroadenosine
  modified_base 46: mod_base = OTHER; note = Guanosine phosphorothiorate
  modified_base 50: mod_base = OTHER; note = 2'-Omethylcytosine
  modified_base 52: mod_base = OTHER; note = 2'-Omethylguanosine
  modified_base 54: mod_base = OTHER; note = Uridine phosphorothiorate
  modified_base 55: mod_base = OTHER; note = Uridine phosphorothiorate
  modified_base 56: mod_base = OTHER; note = 2'-Omethylcytosine
  modified_base 57: mod_base = OTHER; note = Guanosine phosphorothiorate
  modified_base 62: mod_base = OTHER; note = 2'-Omethylcytosine
  modified_base 63: mod_base = OTHER; note = 2'-fluorocytosine
  modified_base 65: mod_base = OTHER; note = 2'-Omethylguanosine
  modified_base 71: mod_base = OTHER; note = 2'-Omethyluridine
  modified_base 73: mod_base = OTHER; note = 2'-Omethylguanosine

SEQ ID NO: 4234 - RNA, 86 nt, synthetic construct; identical to SEQ ID NO: 3290
  source 1..86: mol_type = other RNA
  modified_base 46: mod_base = OTHER; note = Guanosine phosphorothiorate

SEQ ID NO: 4235 - RNA, 75 nt, synthetic construct; identical to SEQ ID NO: 3306
  source 1..75: mol_type = other RNA
  modified_base 1: mod_base = OTHER; note = 2'-Omethylguanosine
  modified_base 32: mod_base = OTHER; note = 2'-fluorouridine
  modified_base 34: mod_base = OTHER; note = Uridine phosphorothiorate
  modified_base 36: mod_base = OTHER; note = Guanosine phosphorothiorate
  modified_base 37: mod_base = OTHER; note = Adenosine phosphorothiorate
  modified_base 72: mod_base = OTHER; note = 2'-Omethyladenosine

SEQ ID NO: 4236 - RNA, 76 nt, synthetic construct; identical to SEQ ID NO: 3318
  source 1..76: mol_type = other RNA
  modified_base 1: mod_base = OTHER; note = 2'-Omethylcytosine
  modified_base 18: mod_base = OTHER; note = 2'-Omethylguanosine
  modified_base 19: mod_base = OTHER; note = 2'-Omethylguanosine
  modified_base 33: mod_base = OTHER; note = Uridine phosphorothiorate
  modified_base 34: mod_base = OTHER; note = 2'-Omethylcytosine
  modified_base 35: mod_base = OTHER; note = Uridine phosphorothiorate
  modified_base 37: mod_base = OTHER; note = Guanosine phosphorothiorate
  modified_base 38: mod_base = OTHER; note = Adenosine phosphorothiorate
  modified_base 41: mod_base = OTHER; note = 2'-Omethylcytosine
  modified_base 42: mod_base = OTHER; note = 2'-Omethyluridine
  modified_base 43: mod_base = OTHER; note = 2'-Omethyluridine
  modified_base 44: mod_base = OTHER; note = 2'-Omethyladenosine
  modified_base 50: mod_base = OTHER; note = 2'-Omethylcytosine
  modified_base 52: mod_base = OTHER; note = 2'-Omethylguanosine
  modified_base 73: mod_base = OTHER; note = 2'-Omethyladenosine

SEQ ID NO: 4237 - RNA, 85 nt, synthetic construct; identical to SEQ ID NO: 3301
  source 1..85: mol_type = other RNA
  modified_base 1: mod_base = OTHER; note = 2'-Omethylguanosine phosphorothiorate
  modified_base 2: mod_base = OTHER; note = 2'-Omethylcytosine
  modified_base 3: mod_base = OTHER; note = Uridine phosphorothiorate
  modified_base 4: mod_base = OTHER; note = 2'-Omethylguanosine
  modified_base 7: mod_base = OTHER; note = 2'-fluoroadenosine
  modified_base 15: mod_base = OTHER; note = 2'-Omethylguanosine phosphorothiorate
  modified_base 18: mod_base = OTHER; note = 2'-Omethylguanosine phosphorothiorate
  modified_base 24: mod_base = OTHER; note = 2'-fluoroguanosine
  modified_base 29: mod_base = OTHER; note = 2'-fluoroguanosine
  modified_base 34: mod_base = OTHER; note = 2'-fluorouridine phosphorothiorate
  modified_base 36: mod_base = OTHER; note = Adenosine phosphorothiorate
  modified_base 44: mod_base = OTHER; note = 2'-Omethyluridine
  modified_base 46: mod_base = OTHER; note = 2'-Omethylguanosine
  modified_base 53: mod_base = OTHER; note = 2'-fluorocytosine
  modified_base 55: mod_base = OTHER; note = 2'-fluorocytosine
  modified_base 56: mod_base = OTHER; note = 2'-Omethylguanosine
  modified_base 58: mod_base = OTHER; note = 2'-fluoroguanosine phosphorothiorate
  modified_base 60: mod_base = OTHER; note = 2'-Omethyladenosine
  modified_base 64: mod_base = OTHER; note = 2'-Omethyluridine phosphorothiorate
  modified_base 78: mod_base = OTHER; note = 2'-fluorocytosine phosphorothiorate
  modified_base 82: mod_base = OTHER; note = 2'-Omethylguanosine

SEQ ID NO: 4238 - RNA, 75 nt, synthetic construct; identical to SEQ ID NO: 3311
  source 1..75: mol_type = other RNA
  modified_base 1: mod_base = OTHER; note = 2'-Omethylguanosine phosphorothiorate
  modified_base 3: mod_base = OTHER; note = 2'-Omethyluridine phosphorothiorate
  modified_base 13: mod_base = OTHER; note = 2'-fluorouridine phosphorothiorate
  modified_base 14: mod_base = OTHER; note = 2'-fluoroadenosine
  modified_base 21: mod_base = OTHER; note = 2'-fluoroadenosine
  modified_base 24: mod_base = OTHER; note = 2'-fluoroadenosine
  modified_base 33: mod_base = OTHER; note = Uridine phosphorothiorate
  modified_base 43: mod_base = OTHER; note = 2'-fluoroguanosine phosphorothiorate
  modified_base 44: mod_base = OTHER; note = 2'-fluorocytosine
  modified_base 53: mod_base = OTHER; note = 2'-fluorouridine
  modified_base 56: mod_base = OTHER; note = 2'-Omethylguanosine
  modified_base 60: mod_base = OTHER; note = 2'-fluorocytosine
  modified_base 63: mod_base = OTHER; note = Guanosine phosphorothiorate
  modified_base 73: mod_base = OTHER; note = Cytosine phosphorothiorate
  modified_base 74: mod_base = OTHER; note = Cytosine phosphorothiorate

SEQ ID NO: 4239 - RNA, 76 nt, synthetic construct; identical to SEQ ID NO: 625
  source 1..76: mol_type = other RNA
  modified_base 1: mod_base = OTHER; note = 2'-Omethylguanosine phosphorothiorate
  modified_base 2: mod_base = OTHER; note = 2'-Omethylguanosine
  modified_base 13: mod_base = OTHER; note = 2'-Omethylcytosine
  modified_base 17: mod_base = OTHER; note = 2'-Omethylguanosine
  modified_base 33: mod_base = OTHER; note = 2'-fluorouridine
  modified_base 35: mod_base = OTHER; note = Cytosine phosphorothiorate
  modified_base 37: mod_base = OTHER; note = Adenosine phosphorothiorate
  modified_base 38: mod_base = OTHER; note = Adenosine phosphorothiorate
  modified_base 52: mod_base = OTHER; note = 2'-Omethylguanosine
  modified_base 62: mod_base = OTHER; note = 2'-Omethylcytosine
  modified_base 63: mod_base = OTHER; note = 2'-fluorocytosine
  modified_base 68: mod_base = OTHER; note = 2'-Omethylguanosine
  modified_base 73: mod_base = OTHER; note = 2'-Omethylguanosine
  modified_base 75: mod_base = OTHER; note = 2'-fluorocytosine phosphorothiorate
  modified_base 76: mod_base = OTHER; note = 2'-Omethyladenosine

SEQ ID NO: 4240 - RNA, 73 nt, synthetic construct; identical to SEQ ID NO: 935
  source 1..73: mol_type = other RNA
  modified_base 1: mod_base = OTHER; note = 2'-Omethylguanosine phosphorothiorate
  modified_base 2: mod_base = OTHER; note = 2'-Omethylguanosine phosphorothiorate
  modified_base 45: mod_base = OTHER; note = 2'-fluoroguanosine
  modified_base 57: mod_base = OTHER; note = 2'-fluoroguanosine
  modified_base 68: mod_base = OTHER; note = 2'-fluoroguanosine
  modified_base 72: mod_base = OTHER; note = Cytosine phosphorothiorate

SEQ ID NO: 4241 - RNA, 76 nt, synthetic construct; identical to SEQ ID NO: 3318
  source 1..76: mol_type = other RNA
  modified_base 62: mod_base = OTHER; note = 2'-Omethylcytosine
  modified_base 63: mod_base = OTHER; note = 2'-Omethylguanosine

SEQ ID NO: 4242 - RNA, 86 nt, synthetic construct; identical to SEQ ID NO: 3290
  source 1..86: mol_type = other RNA
  modified_base 1: mod_base = OTHER; note = 2'-Omethyladenosine
  modified_base 2: mod_base = OTHER; note = 2'-Omethylcytosine
  modified_base 3: mod_base = OTHER; note = 2'-Omethylcytosine
  modified_base 4: mod_base = OTHER; note = 2'-Omethyladenosine
  modified_base 5: mod_base = OTHER; note = 2'-Omethylguanosine
  modified_base 6: mod_base = OTHER; note = 2'-Omethylguanosine
  modified_base 16: mod_base = OTHER; note = 2'-Omethyluridine
  modified_base 17: mod_base = OTHER; note = 2'-Omethylguanosine
  modified_base 18: mod_base = OTHER; note = 2'-Omethylguanosine
  modified_base 20: mod_base = OTHER; note = 2'-Omethyluridine
  modified_base 22: mod_base = OTHER; note = 2'-Omethyladenosine
  modified_base 23: mod_base = OTHER; note = 2'-Omethylguanosine
  modified_base 24: mod_base = OTHER; note = 2'-Omethylguanosine
  modified_base 25: mod_base = OTHER; note = 2'-Omethylcytosine
  modified_base 33: mod_base = OTHER; note = 2'-fluorouridine
  modified_base 35: mod_base = OTHER; note = Cytosine phosphorothiorate
  modified_base 37: mod_base = OTHER; note = Guanosine phosphorothiorate
  modified_base 38: mod_base = OTHER; note = Adenosine phosphorothiorate
  modified_base 41: mod_base = OTHER; note = 2'-Omethylcytosine
  modified_base 42: mod_base = OTHER; note = 2'-Omethyladenosine
  modified_base 43: mod_base = OTHER; note = 2'-Omethyladenosine
  modified_base 44: mod_base = OTHER; note = 2'-Omethyluridine
  modified_base 57: mod_base = OTHER; note = 2'-fluoroguanosine
  modified_base 58: mod_base = OTHER; note = 2'-fluorocytosine
  modified_base 59: mod_base = OTHER; note = 2'-Omethylguanosine
  modified_base 60: mod_base = OTHER; note = 2'-Omethyluridine
  modified_base 62: mod_base = OTHER; note = 2'-Omethylguanosine
  modified_base 64: mod_base = OTHER; note = 2'-Omethyluridine
  modified_base 65: mod_base = OTHER; note = Uridine phosphorothiorate
  modified_base 66: mod_base = OTHER; note = 2'-Omethylcytosine
  modified_base 67: mod_base = OTHER; note = 2'-fluoroguanosine
  modified_base 69: mod_base = OTHER; note = 2'-Omethyladenosine
  modified_base 71: mod_base = OTHER; note = 2'-Omethylcytosine
  modified_base 75: mod_base = OTHER; note = 2'-Omethylcytosine
  modified_base 83: mod_base = OTHER; note = 2'-Omethyladenosine

SEQ ID NO: 4243 - RNA, 76 nt, synthetic construct; identical to SEQ ID NO: 625
  source 1..76: mol_type = other RNA
  modified_base 2: mod_base = OTHER; note = 2'-fluoroguanosine
  modified_base 6: mod_base = OTHER; note = 2'-Omethylcytosine
  modified_base 10: mod_base = OTHER; note = 2'-fluoroguanosine phosphorothiorate
  modified_base 11: mod_base = OTHER; note = 2'-fluorocytosine
  modified_base 17: mod_base = OTHER; note = Guanosine phosphorothiorate
  modified_base 18: mod_base = OTHER; note = 2'-Omethylguanosine
  modified_base 20: mod_base = OTHER; note = 2'-Omethyluridine
  modified_base 22: mod_base = OTHER; note = Guanosine phosphorothiorate
  modified_base 23: mod_base = OTHER; note = 2'-Omethylcytosine phosphorothiorate
  modified_base 24: mod_base = OTHER; note = 2'-Omethylguanosine
  modified_base 27: mod_base = OTHER; note = 2'-fluorouridine
  modified_base 28: mod_base = OTHER; note = Uridine phosphorothiorate
  modified_base 29: mod_base = OTHER; note = 2'-Omethylguanosine
  modified_base 30: mod_base = OTHER; note = 2'-fluoroguanosine
  modified_base 34: mod_base = OTHER; note = 2'-fluorouridine
  modified_base 38: mod_base = OTHER; note = 2'-fluoroadenosine phosphorothiorate
  modified_base 39: mod_base = OTHER; note = 2'-fluorouridine
  modified_base 40: mod_base = OTHER; note = 2'-fluorouridine
  modified_base 42: mod_base = OTHER; note = 2'-fluoroadenosine
  modified_base 44: mod_base = OTHER; note = Adenosine phosphorothiorate
  modified_base 45: mod_base = OTHER; note = Guanosine phosphorothiorate
  modified_base 46: mod_base = OTHER; note = 2'-fluoroguanosine
  modified_base 47: mod_base = OTHER; note = 2'-fluorouridine phosphorothiorate
  modified_base 50: mod_base = OTHER; note = 2'-Omethylcytosine
  modified_base 52: mod_base = OTHER; note = 2'-fluoroguanosine
  modified_base 54: mod_base = OTHER; note = 2'-Omethyluridine
  modified_base 59: mod_base = OTHER; note = 2'-Omethylguanosine
  modified_base 64: mod_base = OTHER; note = 2'-fluoroguanosine
  modified_base 67: mod_base = OTHER; note = 2'-fluoroguanosine
  modified_base 68: mod_base = OTHER; note = 2'-fluoroguanosine
  modified_base 69: mod_base = OTHER; note = 2'-fluoroadenosine phosphorothiorate
  modified_base 70: mod_base = OTHER; note = 2'-fluoroguanosine
  modified_base 71: mod_base = OTHER; note = 2'-Omethyluridine
  modified_base 72: mod_base = OTHER; note = 2'-Omethylcytosine
  modified_base 74: mod_base = OTHER; note = 2'-fluorocytosine
  modified_base 75: mod_base = OTHER; note = 2'-Omethylcytosine

SEQ ID NO: 4244 - RNA, 76 nt, synthetic construct; identical to SEQ ID NO: 625
  source 1..76: mol_type = other RNA
  modified_base 4: mod_base = OTHER; note = Thymine
  modified_base 47: mod_base = OTHER; note = Thymine
  modified_base 48: mod_base = OTHER; note = Thymine
  modified_base 71: mod_base = OTHER; note = Thymine

SEQ ID NO: 4245 - RNA, 75 nt, synthetic construct; identical to SEQ ID NO: 3311
  source 1..75: mol_type = other RNA
  modified_base 1: mod_base = OTHER; note = 2'-Omethylguanosine phosphorothiorate
  modified_base 21: mod_base = OTHER; note = 2'-Omethyladenosine phosphorothiorate
  modified_base 24: mod_base = OTHER; note = Adenosine phosphorothiorate
  modified_base 25: mod_base = OTHER; note = 2'-fluorocytosine
  modified_base 48: mod_base = OTHER; note = 2'-fluorocytosine
  modified_base 57: mod_base = OTHER; note = 2'-fluoroadenosine phosphorothiorate
  modified_base 73: mod_base = OTHER; note = Cytosine phosphorothiorate

SEQ ID NO: 4246 - RNA, 85 nt, synthetic construct; identical to SEQ ID NO: 3297
  source 1..85: mol_type = other RNA
  modified_base 1: mod_base = OTHER; note = 2'-Omethylguanosine phosphorothiorate
  modified_base 2: mod_base = OTHER; note = 2'-Omethylcytosine phosphorothiorate
  modified_base 14: mod_base = OTHER; note = 2'-Omethyladenosine
  modified_base 17: mod_base = OTHER; note = 2'-Omethylguanosine
  modified_base 18: mod_base = OTHER; note = 2'-Omethylguanosine
  modified_base 20: mod_base = OTHER; note = 2'-Omethyluridine
  modified_base 22: mod_base = OTHER; note = 2'-Omethyladenosine
  modified_base 25: mod_base = OTHER; note = 2'-Omethylcytosine
  modified_base 27: mod_base = OTHER; note = 2'-Omethyluridine
  modified_base 33: mod_base = OTHER; note = 2'-fluorouridine
  modified_base 41: mod_base = OTHER; note = 2'-Omethylcytosine
  modified_base 44: mod_base = OTHER; note = 2'-Omethyluridine
  modified_base 56: mod_base = OTHER; note = 2'-fluoroguanosine
  modified_base 57: mod_base = OTHER; note = 2'-fluorocytosine
  modified_base 61: mod_base = OTHER; note = 2'-Omethylguanosine
  modified_base 64: mod_base = OTHER; note = Uridine phosphorothiorate
  modified_base 80: mod_base = OTHER; note = 2'-Omethylguanosine
  modified_base 82: mod_base = OTHER; note = 2'-Omethylguanosine

SEQ ID NO: 4247 - RNA, 76 nt, synthetic construct; identical to SEQ ID NO: 3329
  source 1..76: mol_type = other RNA
  modified_base 1: mod_base = OTHER; note = 2'-Omethylguanosine
  modified_base 2: mod_base = OTHER; note = 2'-Omethylguanosine
  modified_base 3: mod_base = OTHER; note = 2'-Omethylcytosine
  modified_base 4: mod_base = OTHER; note = 2'-Omethylcytosine
  modified_base 5: mod_base = OTHER; note = 2'-Omethylcytosine
  modified_base 6: mod_base = OTHER; note = 2'-Omethylcytosine
  modified_base 10: mod_base = OTHER; note = 2'-Omethylguanosine
  modified_base 11: mod_base = OTHER; note = 2'-Omethylcytosine
  modified_base 12: mod_base = OTHER; note = 2'-Omethylguanosine
  modified_base 13: mod_base = OTHER; note = 2'-Omethylcytosine
  modified_base 14: mod_base = OTHER; note = 2'-Omethyladenosine
  modified_base 15: mod_base = OTHER; note = 2'-fluoroadenosine
  modified_base 16: mod_base = OTHER; note = 2'-Omethyluridine
  modified_base 17: mod_base = OTHER; note = 2'-Omethylguanosine
  modified_base 18: mod_base = OTHER; note = 2'-Omethylguanosine
  modified_base 19: mod_base = OTHER; note = 2'-fluoroadenosine
  modified_base 20: mod_base = OTHER; note = 2'-Omethyluridine
  modified_base 25: mod_base = OTHER; note = 2'-Omethylcytosine
  modified_base 33: mod_base = OTHER; note = 2'-fluorouridine
  modified_base 35: mod_base = OTHER; note = Cytosine phosphorothiorate
  modified_base 37: mod_base = OTHER; note = Adenosine phosphorothiorate
  modified_base 38: mod_base = OTHER; note = Adenosine phosphorothiorate
  modified_base 41: mod_base = OTHER; note = 2'-Omethylcytosine
  modified_base 42: mod_base = OTHER; note = 2'-Omethyladenosine
  modified_base 43: mod_base = OTHER; note = 2'-Omethyladenosine
  modified_base 44: mod_base = OTHER; note = 2'-Omethyladenosine
  modified_base 49: mod_base = OTHER; note = 2'-Omethylcytosine
  modified_base 50: mod_base = OTHER; note = 2'-Omethylcytosine
  modified_base 52: mod_base = OTHER; note = 2'-Omethylguanosine
  modified_base 54: mod_base = OTHER; note = 2'-Omethyluridine
  modified_base 55: mod_base = OTHER; note = Uridine phosphorothiorate
  modified_base 56: mod_base = OTHER; note = 2'-Omethylcytosine
  modified_base 57: mod_base = OTHER; note = 2'-fluoroguanosine
  modified_base 59: mod_base = OTHER; note = 2'-Omethylguanosine
  modified_base 61: mod_base = OTHER; note = 2'-Omethylcytosine
  modified_base 65: mod_base = OTHER; note = 2'-Omethylguanosine
  modified_base 73: mod_base = OTHER; note = 2'-Omethylguanosine

SEQ ID NO: 4248 - RNA, 76 nt, synthetic construct; identical to SEQ ID NO: 3490
  source 1..76: mol_type = other RNA
  modified_base 1: mod_base = OTHER; note = 2'-Omethylguanosine phosphorothiorate
  modified_base 2: mod_base = OTHER; note = 2'-Omethylguanosine phosphorothiorate
  modified_base 52: mod_base = OTHER; note = Guanosine phosphorothiorate
  modified_base 74: mod_base = OTHER; note = Cytosine phosphorothiorate
  modified_base 75: mod_base = OTHER; note = 2'-Omethylcytosine

SEQ ID NO: 4249 - RNA, 85 nt, synthetic construct; identical to SEQ ID NO: 3301
  source 1..85: mol_type = other RNA

SEQ ID NO: 4250 - RNA, 75 nt, synthetic construct; identical to SEQ ID NO: 3336
  source 1..75: mol_type = other RNA
  modified_base 15: mod_base = OTHER; note = 2'-Omethyluridine
  modified_base 18: mod_base = OTHER; note = 2'-fluoroguanosine phosphorothiorate
  modified_base 20: mod_base = OTHER; note = 2'-fluoroadenosine
  modified_base 42: mod_base = OTHER; note = 2'-fluoroadenosine
  modified_base 45: mod_base = OTHER; note = 2'-fluoroguanosine
  modified_base 46: mod_base = OTHER; note = 2'-fluorouridine
  modified_base 52: mod_base = OTHER; note = 2'-fluoroguanosine phosphorothiorate
  modified_base 53: mod_base = OTHER; note = 2'-fluorouridine
  modified_base 73: mod_base = OTHER; note = Cytosine phosphorothiorate
  modified_base 74: mod_base = OTHER; note = 2'-Omethylcytosine

SEQ ID NO: 4251 - RNA, 85 nt, synthetic construct; identical to SEQ ID NO: 3297
  source 1..85: mol_type = other RNA
  modified_base 10: mod_base = OTHER; note = 2'-Omethylguanosine
  modified_base 11: mod_base = OTHER; note = 2'-Omethylcytosine
  modified_base 12: mod_base = OTHER; note = 2'-Omethylcytosine
  modified_base 13: mod_base = OTHER; note = 2'-Omethylguanosine
  modified_base 58: mod_base = OTHER; note = 2'-Omethylguanosine
  modified_base 59: mod_base = OTHER; note = 2'-Omethylcytosine
  modified_base 60: mod_base = OTHER; note = 2'-Omethyladenosine
  modified_base 61: mod_base = OTHER; note = 2'-Omethylguanosine
  modified_base 62: mod_base = OTHER; note = 2'-Omethylguanosine
  modified_base 82: mod_base = OTHER; note = 2'-Omethylguanosine

SEQ ID NO: 4252 - RNA, 76 nt, synthetic construct; identical to SEQ ID NO: 625
  source 1..76: mol_type = other RNA
  modified_base 6: mod_base = OTHER; note = 2'-fluorocytosine
  modified_base 7: mod_base = OTHER; note = Guanosine phosphorothiorate
  modified_base 9: mod_base = OTHER; note = Guanosine phosphorothiorate
  modified_base 10: mod_base = OTHER; note = 2'-Omethylguanosine
  modified_base 14: mod_base = OTHER; note = 2'-Omethyladenosine
  modified_base 17: mod_base = OTHER; note = 2'-Omethylguanosine
  modified_base 20: mod_base = OTHER; note = 2'-Omethyluridine
  modified_base 22: mod_base = OTHER; note = 2'-fluoroguanosine
  modified_base 24: mod_base = OTHER; note = 2'-Omethylguanosine
  modified_base 30: mod_base = OTHER; note = 2'-fluoroguanosine
  modified_base 33: mod_base = OTHER; note = 2'-fluorouridine
  modified_base 34: mod_base = OTHER; note = Uridine phosphorothiorate
  modified_base 36: mod_base = OTHER; note = Adenosine phosphorothiorate
  modified_base 37: mod_base = OTHER; note = Adenosine phosphorothiorate
  modified_base 38: mod_base = OTHER; note = 2'-fluoroadenosine
  modified_base 41: mod_base = OTHER; note = 2'-fluorocytosine
  modified_base 43: mod_base = OTHER; note = 2'-fluoroadenosine
  modified_base 44: mod_base = OTHER; note = 2'-fluoroadenosine
  modified_base 45: mod_base = OTHER; note = 2'-fluoroguanosine
  modified_base 46: mod_base = OTHER; note = 2'-fluoroguanosine
  modified_base 49: mod_base = OTHER; note = 2'-fluorocytosine
  modified_base 50: mod_base = OTHER; note = 2'-fluorocytosine
  modified_base 54: mod_base = OTHER; note = 2'-Omethyluridine
  modified_base 56: mod_base = OTHER; note = Cytosine phosphorothiorate
  modified_base 58: mod_base = OTHER; note = Adenosine phosphorothiorate
  modified_base 59: mod_base = OTHER; note = 2'-fluoroguanosine
  modified_base 61: mod_base = OTHER; note = 2'-Omethylcytosine
  modified_base 66: mod_base = OTHER; note = 2'-fluorocytosine
  modified_base 67: mod_base = OTHER; note = 2'-Omethylguanosine
  modified_base 69: mod_base = OTHER; note = 2'-Omethyladenosine phosphorothiorate
  modified_base 72: mod_base = OTHER; note = Cytosine phosphorothiorate
  modified_base 73: mod_base = OTHER; note = 2'-fluoroguanosine
  modified_base 74: mod_base = OTHER; note = 2'-fluorocytosine
  modified_base 76: mod_base = OTHER; note = 2'-fluoroadenosine

SEQ ID NO: 4253 - RNA, 75 nt, synthetic construct; identical to SEQ ID NO: 1045
  source 1..75: mol_type = other RNA
  modified_base 1: mod_base = OTHER; note = 2'-Omethylguanosine phosphorothiorate
  modified_base 2: mod_base = OTHER; note = 2'-Omethylguanosine
  modified_base 3: mod_base = OTHER; note = 2'-Omethyluridine
  modified_base 4: mod_base = OTHER; note = 2'-Omethyluridine
  modified_base 5: mod_base = OTHER; note = 2'-Omethylcytosine
  modified_base 6: mod_base = OTHER; note = 2'-Omethylcytosine
  modified_base 16: mod_base = OTHER; note = 2'-Omethyluridine
  modified_base 17: mod_base = OTHER; note = 2'-Omethylguanosine
  modified_base 18: mod_base = OTHER; note = 2'-Omethylguanosine
  modified_base 33: mod_base = OTHER; note = 2'-fluorouridine
  modified_base 35: mod_base = OTHER; note = Uridine phosphorothiorate
  modified_base 37: mod_base = OTHER; note = Adenosine phosphorothiorate
  modified_base 38: mod_base = OTHER; note = Adenosine phosphorothiorate
  modified_base 44: mod_base = OTHER; note = 2'-Omethylcytosine
  modified_base 45: mod_base = OTHER; note = 2'-Omethylguanosine
  modified_base 46: mod_base = OTHER; note = 2'-fluoroadenosine
  modified_base 47: mod_base = OTHER; note = 2'-fluorouridine
  modified_base 48: mod_base = OTHER; note = 2'-Omethylcytosine
  modified_base 49: mod_base = OTHER; note = 2'-Omethylcytosine
  modified_base 50: mod_base = OTHER; note = 2'-Omethylguanosine
  modified_base 51: mod_base = OTHER; note = 2'-Omethyladenosine
  modified_base 52: mod_base = OTHER; note = 2'-Omethylguanosine
  modified_base 53: mod_base = OTHER; note = 2'-Omethyluridine
  modified_base 55: mod_base = OTHER; note = 2'-Omethylcytosine
  modified_base 58: mod_base = OTHER; note = 2'-Omethylguanosine
  modified_base 60: mod_base = OTHER; note = 2'-Omethylcytosine
  modified_base 61: mod_base = OTHER; note = 2'-Omethyluridine
  modified_base 62: mod_base = OTHER; note = 2'-fluorocytosine
  modified_base 63: mod_base = OTHER; note = 2'-Omethylguanosine
  modified_base 64: mod_base = OTHER; note = 2'-Omethylguanosine
  modified_base 65: mod_base = OTHER; note = 2'-Omethyluridine
  modified_base 66: mod_base = OTHER; note = 2'-Omethylguanosine
  modified_base 67: mod_base = OTHER; note = 2'-Omethylguanosine
  modified_base 72: mod_base = OTHER; note = 2'-Omethyluridine

SEQ ID NO: 4254 - RNA, 76 nt, synthetic construct; identical to SEQ ID NO: 625
  source 1..76: mol_type = other RNA
  modified_base 3: mod_base = OTHER; note = Cytosine phosphorothiorate
  modified_base 4: mod_base = OTHER; note = 2'-Omethyluridine
  modified_base 5: mod_base = OTHER; note = 2'-fluorocytosine
  modified_base 8: mod_base = OTHER; note = Uridine phosphorothiorate
  modified_base 10: mod_base = OTHER; note = 2'-Omethylguanosine
  modified_base 12: mod_base = OTHER; note = 2'-Omethylguanosine
  modified_base 13: mod_base = OTHER; note = Cytosine phosphorothiorate
  modified_base 15: mod_base = OTHER; note = 2'-Omethyladenosine
  modified_base 16: mod_base = OTHER; note = Uridine phosphorothiorate
  modified_base 17: mod_base = OTHER; note = 2'-Omethylguanosine
  modified_base 18: mod_base = OTHER; note = 2'-Omethylguanosine
  modified_base 21: mod_base = OTHER; note = Adenosine phosphorothiorate
  modified_base 23: mod_base = OTHER; note = 2'-Omethylcytosine
  modified_base 24: mod_base = OTHER; note = 2'-fluoroguanosine
  modified_base 27: mod_base = OTHER; note = 2'-fluorouridine
  modified_base 28: mod_base = OTHER; note = 2'-fluorouridine
  modified_base 29: mod_base = OTHER; note = 2'-fluoroguanosine
  modified_base 30: mod_base = OTHER; note = Guanosine phosphorothiorate
  modified_base 31: mod_base = OTHER; note = 2'-fluoroadenosine
  modified_base 36: mod_base = OTHER; note = Adenosine phosphorothiorate
  modified_base 40: mod_base = OTHER; note = Uridine phosphorothiorate
  modified_base 45: mod_base = OTHER; note = 2'-fluoroguanosine
  modified_base 46: mod_base = OTHER; note = 2'-fluoroguanosine
  modified_base 48: mod_base = OTHER; note = Uridine phosphorothiorate
  modified_base 49: mod_base = OTHER; note = Cytosine phosphorothiorate
  modified_base 50: mod_base = OTHER; note = 2'-fluorocytosine
  modified_base 52: mod_base = OTHER; note = 2'-Omethylguanosine phosphorothiorate
  modified_base 55: mod_base = OTHER; note = Uridine phosphorothiorate
  modified_base 56: mod_base = OTHER; note = 2'-fluorocytosine
  modified_base 57: mod_base = OTHER; note = 2'-fluoroguanosine
  modified_base 59: mod_base = OTHER; note = 2'-fluoroguanosine
  modified_base 66: mod_base = OTHER; note = Cytosine phosphorothiorate
  modified_base 67: mod_base = OTHER; note = Guanosine phosphorothiorate
  modified_base 68: mod_base = OTHER; note = 2'-Omethylguanosine
  modified_base 74: mod_base = OTHER; note = 2'-fluorocytosine
  modified_base 75: mod_base = OTHER; note = Cytosine phosphorothiorate
  modified_base 76: mod_base = OTHER; note = 2'-Omethyladenosine

SEQ ID NO: 4255 - RNA, 76 nt, synthetic construct; identical to SEQ ID NO: 3318
  source 1..76: mol_type = other RNA
  modified_base 1: mod_base = OTHER; note = 2'-Omethylcytosine
  modified_base 2: mod_base = OTHER; note = 2'-Omethylcytosine
  modified_base 3: mod_base = OTHER; note = 2'-Omethyluridine
  modified_base 4: mod_base = OTHER; note = 2'-Omethyluridine
  modified_base 5: mod_base = OTHER; note = 2'-Omethylcytosine
  modified_base 6: mod_base = OTHER; note = 2'-Omethylguanosine
  modified_base 16: mod_base = OTHER; note = 2'-Omethyluridine
  modified_base 18: mod_base = OTHER; note = 2'-Omethylguanosine
  modified_base 19: mod_base = OTHER; note = 2'-Omethylguanosine
  modified_base 25: mod_base = OTHER; note = 2'-Omethylcytosine
  modified_base 33: mod_base = OTHER; note = 2'-fluorouridine
  modified_base 35: mod_base = OTHER; note = Uridine phosphorothiorate
  modified_base 37: mod_base = OTHER; note = Guanosine phosphorothiorate
  modified_base 38: mod_base = OTHER; note = Adenosine phosphorothiorate
  modified_base 41: mod_base = OTHER; note = 2'-Omethylcytosine
  modified_base 44: mod_base = OTHER; note = 2'-Omethyladenosine
  modified_base 45: mod_base = OTHER; note = 2'-Omethylguanosine
  modified_base 46: mod_base = OTHER; note = 2'-fluoroguanosine
  modified_base 47: mod_base = OTHER; note = 2'-fluorouridine
  modified_base 48: mod_base = OTHER; note = 2'-fluorocytosine
  modified_base 49: mod_base = OTHER; note = 2'-Omethylguanosine
  modified_base 50: mod_base = OTHER; note = 2'-Omethylcytosine
  modified_base 51: mod_base = OTHER; note = 2'-Omethyluridine
  modified_base 52: mod_base = OTHER; note = 2'-Omethylguanosine
  modified_base 53: mod_base = OTHER; note = 2'-Omethylguanosine
  modified_base 54: mod_base = OTHER; note = 2'-Omethyluridine
  modified_base 56: mod_base = OTHER; note = 2'-Omethylcytosine
  modified_base 59: mod_base = OTHER; note = 2'-Omethyladenosine
  modified_base 73: mod_base = OTHER; note = 2'-Omethyladenosine

SEQ ID NO: 4256 - RNA, 76 nt, synthetic construct; identical to SEQ ID NO: 3318
  source 1..76: mol_type = other RNA
  modified_base 43: mod_base = OTHER; note = 2'-Omethyluridine
  modified_base 73: mod_base = OTHER; note = 2'-Omethyladenosine

SEQ ID NO: 4257 - RNA, 75 nt, synthetic construct; identical to SEQ ID NO: 1045
  source 1..75: mol_type = other RNA
  modified_base 1: mod_base = OTHER; note = 2'-Omethylguanosine
  modified_base 10: mod_base = OTHER; note = 2'-Omethylguanosine
  modified_base 11: mod_base = OTHER; note = 2'-Omethyluridine
  modified_base 12: mod_base = OTHER; note = 2'-Omethylguanosine
  modified_base 13: mod_base = OTHER; note = 2'-Omethyluridine
  modified_base 17: mod_base = OTHER; note = 2'-Omethylguanosine
  modified_base 18: mod_base = OTHER; note = 2'-Omethylguanosine
  modified_base 25: mod_base = OTHER; note = 2'-Omethylcytosine
  modified_base 33: mod_base = OTHER; note = Uridine phosphorothiorate
  modified_base 34: mod_base = OTHER; note = 2'-Omethyluridine
  modified_base 35: mod_base = OTHER; note = Uridine phosphorothiorate
  modified_base 37: mod_base = OTHER; note = Adenosine phosphorothiorate
  modified_base 38: mod_base = OTHER; note = Adenosine phosphorothiorate
  modified_base 41: mod_base = OTHER; note = 2'-Omethylcytosine
  modified_base 42: mod_base = OTHER; note = 2'-Omethyladenosine
  modified_base 43: mod_base = OTHER; note = 2'-Omethylguanosine
  modified_base 44: mod_base = OTHER; note = 2'-Omethylcytosine
  modified_base 48: mod_base = OTHER; note = 2'-Omethylcytosine
  modified_base 49: mod_base = OTHER; note = 2'-Omethylcytosine
  modified_base 51: mod_base = OTHER; note = 2'-Omethyladenosine
  modified_base 53: mod_base = OTHER; note = Uridine phosphorothiorate
  modified_base 54: mod_base = OTHER; note = Uridine phosphorothiorate
  modified_base 60: mod_base = OTHER; note = 2'-Omethylcytosine
  modified_base 64: mod_base = OTHER; note = 2'-Omethylguanosine
  modified_base 72: mod_base = OTHER; note = 2'-Omethyluridine

SEQ ID NO: 4258 - RNA, 85 nt, synthetic construct; identical to SEQ ID NO: 3286
  source 1..85: mol_type = other RNA
  modified_base 1: mod_base = OTHER; note = 2'-Omethylcytosine
  modified_base 3: mod_base = OTHER; note = Adenosine phosphorothiorate
  modified_base 17: mod_base = OTHER; note = 2'-fluoroguanosine
  modified_base 19: mod_base = OTHER; note = Uridine phosphorothiorate
  modified_base 25: mod_base = OTHER; note = 2'-fluoroguanosine
  modified_base 26: mod_base = OTHER; note = Uridine phosphorothiorate
  modified_base 29: mod_base = OTHER; note = 2'-Omethylguanosine
  modified_base 30: mod_base = OTHER; note = 2'-fluoroadenosine
  modified_base 33: mod_base = OTHER; note = 2'-fluorouridine
  modified_base 34: mod_base = OTHER; note = 2'-fluorouridine
  modified_base 38: mod_base = OTHER; note = 2'-Omethyluridine
  modified_base 39: mod_base = OTHER; note = Cytosine phosphorothiorate
  modified_base 43: mod_base = OTHER; note = Uridine phosphorothiorate
  modified_base 46: mod_base = OTHER; note = 2'-Omethyladenosine
  modified_base 51: mod_base = OTHER; note = 2'-Omethyluridine
  modified_base 54: mod_base = OTHER; note = 2'-Omethylcytosine
  modified_base 56: mod_base = OTHER; note = 2'-fluoroguanosine
  modified_base 57: mod_base = OTHER; note = 2'-Omethylcytosine
  modified_base 58: mod_base = OTHER; note = 2'-Omethylguanosine
  modified_base 64: mod_base = OTHER; note = 2'-fluorouridine
  modified_base 68: mod_base = OTHER; note = Adenosine phosphorothiorate
  modified_base 75: mod_base = OTHER; note = 2'-fluorouridine
  modified_base 76: mod_base = OTHER; note = Cytosine phosphorothiorate
  modified_base 83: mod_base = OTHER; note = 2'-fluorocytosine
  modified_base 84: mod_base = OTHER; note = Cytosine phosphorothiorate

SEQ ID NO: 4259 - RNA, 76 nt, synthetic construct; identical to SEQ ID NO: 3289
  source 1..76: mol_type = other RNA
  modified_base 1: mod_base = OTHER; note = 2'-Omethylguanosine
  modified_base 2: mod_base = OTHER; note = 2'-Omethylcytosine
  modified_base 3: mod_base = OTHER; note = 2'-Omethylcytosine
  modified_base 4: mod_base = OTHER; note = 2'-Omethyluridine
  modified_base 5: mod_base = OTHER; note = 2'-Omethylguanosine
  modified_base 6: mod_base = OTHER; note = 2'-Omethylguanosine
  modified_base 10: mod_base = OTHER; note = 2'-Omethylguanosine
  modified_base 11: mod_base = OTHER; note = 2'-Omethylcytosine
  modified_base 12: mod_base = OTHER; note = 2'-Omethyluridine
  modified_base 13: mod_base = OTHER; note = 2'-Omethylcytosine
  modified_base 14: mod_base = OTHER; note = 2'-Omethyladenosine
  modified_base 15: mod_base = OTHER; note = 2'-fluoroguanosine
  modified_base 16: mod_base = OTHER; note = 2'-Omethyluridine
  modified_base 18: mod_base = OTHER; note = 2'-Omethylguanosine
  modified_base 19: mod_base = OTHER; note = 2'-Omethylguanosine
  modified_base 20: mod_base = OTHER; note = 2'-fluorouridine
  modified_base 25: mod_base = OTHER; note = 2'-Omethylcytosine
  modified_base 33: mod_base = OTHER; note = 2'-fluorouridine
  modified_base 35: mod_base = OTHER; note = Uridine phosphorothiorate
  modified_base 37: mod_base = OTHER; note = Adenosine phosphorothiorate
  modified_base 38: mod_base = OTHER; note = Adenosine phosphorothiorate
  modified_base 41: mod_base = OTHER; note = 2'-Omethyluridine
  modified_base 42: mod_base = OTHER; note = 2'-Omethylguanosine
  modified_base 43: mod_base = OTHER; note = 2'-Omethyladenosine
  modified_base 44: mod_base = OTHER; note = 2'-Omethylguanosine
  modified_base 49: mod_base = OTHER; note = 2'-Omethylcytosine
  modified_base 50: mod_base = OTHER; note = 2'-Omethyladenosine
  modified_base 52: mod_base = OTHER; note = 2'-Omethylguanosine
  modified_base 54: mod_base = OTHER; note = 2'-Omethyluridine
  modified_base 55: mod_base = OTHER; note = Uridine phosphorothiorate
  modified_base 56: mod_base = OTHER; note = 2'-Omethylcytosine
  modified_base 57: mod_base = OTHER; note = 2'-fluoroadenosine
  modified_base 59: mod_base = OTHER; note = 2'-Omethylguanosine
  modified_base 61: mod_base = OTHER; note = 2'-Omethylcytosine
  modified_base 65: mod_base = OTHER; note = 2'-Omethylguanosine
  modified_base 73: mod_base = OTHER; note = 2'-Omethylguanosine

SEQ ID NO: 4260 - RNA, 75 nt, synthetic construct; identical to SEQ ID NO: 1045
  source 1..75: mol_type = other RNA
  modified_base 1: mod_base = OTHER; note = 2'-Omethylguanosine phosphorothiorate
  modified_base 2: mod_base = OTHER; note = 2'-Omethylguanosine
  modified_base 6: mod_base = OTHER; note = 2'-fluorocytosine
  modified_base 12: mod_base = OTHER; note = 2'-fluoroguanosine
  modified_base 14: mod_base = OTHER; note = Adenosine phosphorothiorate
  modified_base 16: mod_base = OTHER; note = 2'-fluorouridine phosphorothiorate
  modified_base 18: mod_base = OTHER; note = 2'-fluoroguanosine
  modified_base 21: mod_base = OTHER; note = 2'-fluoroadenosine
  modified_base 26: mod_base = OTHER; note = 2'-Omethyluridine phosphorothiorate
  modified_base 36: mod_base = OTHER; note = 2'-fluoroadenosine
  modified_base 41: mod_base = OTHER; note = 2'-fluorocytosine
  modified_base 42: mod_base = OTHER; note = 2'-fluoroadenosine
  modified_base 43: mod_base = OTHER; note = Guanosine phosphorothiorate
  modified_base 57: mod_base = OTHER; note = 2'-Omethyladenosine
  modified_base 61: mod_base = OTHER; note = Uridine phosphorothiorate
  modified_base 62: mod_base = OTHER; note = Cytosine phosphorothiorate
  modified_base 67: mod_base = OTHER; note = Guanosine phosphorothiorate
  modified_base 68: mod_base = OTHER; note = Adenosine phosphorothiorate
  modified_base 69: mod_base = OTHER; note = 2'-fluoroadenosine
  modified_base 73: mod_base = OTHER; note = Cytosine phosphorothiorate
  modified_base 74: mod_base = OTHER; note = 2'-fluorocytosine phosphorothiorate

SEQ ID NO: 4261 - RNA, 85 nt, synthetic construct; identical to SEQ ID NO: 3301
  source 1..85: mol_type = other RNA
  modified_base 1: mod_base = OTHER; note = 2'-Omethylguanosine phosphorothiorate
  modified_base 2: mod_base = OTHER; note = 2'-Omethylcytosine
  modified_base 3: mod_base = OTHER; note = 2'-fluorouridine phosphorothiorate
  modified_base 5: mod_base = OTHER; note = 2'-Omethyluridine phosphorothiorate
  modified_base 13: mod_base = OTHER; note = 2'-fluoroguanosine
  modified_base 14: mod_base = OTHER; note = 2'-fluoroadenosine
  modified_base 18: mod_base = OTHER; note = 2'-Omethylguanosine
  modified_base 23: mod_base = OTHER; note = 2'-Omethylguanosine phosphorothiorate
  modified_base 25: mod_base = OTHER; note = 2'-Omethylcytosine phosphorothiorate
  modified_base 27: mod_base = OTHER; note = 2'-Omethyluridine
  modified_base 34: mod_base = OTHER; note = 2'-fluorouridine
  modified_base 35: mod_base = OTHER; note = 2'-fluorouridine
  modified_base 42: mod_base = OTHER; note = 2'-fluoroadenosine
  modified_base 44: mod_base = OTHER; note = 2'-fluorouridine phosphorothiorate
  modified_base 51: mod_base = OTHER; note = 2'-fluorouridine
  modified_base 54: mod_base = OTHER; note = 2'-Omethylcytosine
  modified_base 56: mod_base = OTHER; note = 2'-Omethylguanosine
  modified_base 59: mod_base = OTHER; note = 2'-fluorocytosine
  modified_base 60: mod_base = OTHER; note = 2'-Omethyladenosine
  modified_base 62: mod_base = OTHER; note = Guanosine phosphorothiorate
  modified_base 64: mod_base = OTHER; note = Uridine phosphorothiorate
  modified_base 73: mod_base = OTHER; note = Guanosine phosphorothiorate
  modified_base 74: mod_base = OTHER; note = 2'-fluorocytosine phosphorothiorate
  modified_base 82: mod_base = OTHER; note = 2'-Omethylguanosine
  modified_base 83: mod_base = OTHER; note = Cytosine phosphorothiorate

SEQ ID NO: 4262 - RNA, 75 nt, synthetic construct; identical to SEQ ID NO: 1045
  source 1..75: mol_type = other RNA
  modified_base 1: mod_base = OTHER; note = 2'-Omethylguanosine phosphorothiorate
  modified_base 2: mod_base = OTHER; note = 2'-Omethylguanosine
  modified_base 3: mod_base = OTHER; note = 2'-Omethyluridine
  modified_base 17: mod_base = OTHER; note = Guanosine phosphorothiorate
  modified_base 18: mod_base = OTHER; note = 2'-Omethylguanosine
  modified_base 19: mod_base = OTHER; note = Uridine phosphorothiorate
  modified_base 20: mod_base = OTHER; note = 2'-Omethyladenosine phosphorothiorate
  modified_base 25: mod_base = OTHER; note = 2'-Omethylcytosine
  modified_base 29: mod_base = OTHER; note = 2'-Omethylguanosine
  modified_base 35: mod_base = OTHER; note = Uridine phosphorothiorate
  modified_base 37: mod_base = OTHER; note = Adenosine phosphorothiorate
  modified_base 38: mod_base = OTHER; note = Adenosine phosphorothiorate
  modified_base 46: mod_base = OTHER; note = Adenosine phosphorothiorate
  modified_base 49: mod_base = OTHER; note = 2'-Omethylcytosine
  modified_base 51: mod_base = OTHER; note = 2'-Omethyladenosine
  modified_base 53: mod_base = OTHER; note = Uridine phosphorothiorate
  modified_base 54: mod_base = OTHER; note = Uridine phosphorothiorate
  modified_base 55: mod_base = OTHER; note = 2'-Omethylcytosine
  modified_base 56: mod_base = OTHER; note = Guanosine phosphorothiorate
  modified_base 64: mod_base = OTHER; note = 2'-Omethylguanosine
  modified_base 70: mod_base = OTHER; note = 2'-Omethylcytosine
  modified_base 72: mod_base = OTHER; note = 2'-Omethyluridine

SEQ ID NO: 4263 - RNA, 75 nt, synthetic construct; identical to SEQ ID NO: 1045
  source 1..75: mol_type = other RNA
  modified_base 2: mod_base = OTHER; note = 2'-Omethylguanosine phosphorothiorate
  modified_base 3: mod_base = OTHER; note = 2'-Omethyluridine phosphorothiorate
  modified_base 6: mod_base = OTHER; note = 2'-Omethylcytosine
  modified_base 11: mod_base = OTHER; note = 2'-fluorouridine
  modified_base 16: mod_base = OTHER; note = Uridine phosphorothiorate
  modified_base 23: mod_base = OTHER; note = 2'-Omethylcytosine
  modified_base 27: mod_base = OTHER; note = 2'-Omethylcytosine
  modified_base 30: mod_base = OTHER; note = 2'-Omethylguanosine phosphorothiorate
  modified_base 31: mod_base = OTHER; note = 2'-Omethyladenosine phosphorothiorate
  modified_base 33: mod_base = OTHER; note = 2'-Omethyluridine phosphorothiorate
  modified_base 43: mod_base = OTHER; note = 2'-Omethylguanosine
  modified_base 50: mod_base = OTHER; note = 2'-Omethylguanosine
  modified_base 53: mod_base = OTHER; note = 2'-Omethyluridine phosphorothiorate
  modified_base 58: mod_base = OTHER; note = Guanosine phosphorothiorate
  modified_base 72: mod_base = OTHER; note = 2'-Omethyluridine
  modified_base 74: mod_base = OTHER; note = 2'-Omethylcytosine phosphorothiorate

SEQ ID NO: 4264 - RNA, 74 nt, synthetic construct; identical to SEQ ID NO: 766
  source 1..74: mol_type = other RNA
  modified_base 1: mod_base = OTHER; note = 2'-Omethylguanosine phosphorothiorate
  modified_base 2: mod_base = OTHER; note = 2'-Omethylguanosine phosphorothiorate
  modified_base 73: mod_base = OTHER; note = 2'-Omethylguanosine

SEQ ID NO: 4265 - RNA, 76 nt, synthetic construct; identical to SEQ ID NO: 625
  source 1..76: mol_type = other RNA
  modified_base 1: mod_base = OTHER; note = 2'-Omethylguanosine
  modified_base 2: mod_base = OTHER; note = 2'-Omethylguanosine
  modified_base 3: mod_base = OTHER; note = 2'-Omethylcytosine
  modified_base 4: mod_base = OTHER; note = 2'-Omethyluridine
  modified_base 5: mod_base = OTHER; note = 2'-Omethylcytosine
  modified_base 6: mod_base = OTHER; note = 2'-Omethylcytosine
  modified_base 10: mod_base = OTHER; note = 2'-Omethylguanosine
  modified_base 11: mod_base = OTHER; note = 2'-Omethylcytosine
  modified_base 12: mod_base = OTHER; note = 2'-Omethylguanosine
  modified_base 13: mod_base = OTHER; note = 2'-Omethylcytosine
  modified_base 14: mod_base = OTHER; note = 2'-Omethyladenosine
  modified_base 15: mod_base = OTHER; note = 2'-fluoroadenosine
  modified_base 16: mod_base = OTHER; note = 2'-Omethyluridine
  modified_base 17: mod_base = OTHER; note = 2'-Omethylguanosine
  modified_base 18: mod_base = OTHER; note = 2'-Omethylguanosine
  modified_base 19: mod_base = OTHER; note = 2'-fluoroadenosine
  modified_base 20: mod_base = OTHER; note = 2'-Omethyluridine
  modified_base 21: mod_base = OTHER; note = 2'-fluoroadenosine
  modified_base 22: mod_base = OTHER; note = 2'-Omethylguanosine
  modified_base 23: mod_base = OTHER; note = 2'-Omethylcytosine
  modified_base 24: mod_base = OTHER; note = 2'-Omethylguanosine
  modified_base 25: mod_base = OTHER; note = 2'-Omethylcytosine
  modified_base 38: mod_base = OTHER; note = Adenosine phosphorothiorate
  modified_base 39: mod_base = OTHER; note = Uridine phosphorothiorate
  modified_base 40: mod_base = OTHER; note = 2'-fluorouridine
  modified_base 43: mod_base = OTHER; note = 2'-Omethyladenosine
  modified_base 44: mod_base = OTHER; note = 2'-Omethyladenosine
  modified_base 45: mod_base = OTHER; note = 2'-Omethylguanosine
  modified_base 46: mod_base = OTHER; note = 2'-fluoroguanosine
  modified_base 48: mod_base = OTHER; note = 2'-fluorouridine
  modified_base 49: mod_base = OTHER; note = 2'-Omethylcytosine
  modified_base 50: mod_base = OTHER; note = 2'-Omethylcytosine
  modified_base 54: mod_base = OTHER; note = 2'-Omethyluridine phosphorothiorate
  modified_base 55: mod_base = OTHER; note = Uridine phosphorothiorate
  modified_base 56: mod_base = OTHER; note = 2'-Omethylcytosine
  modified_base 57: mod_base = OTHER; note = 2'-fluoroguanosine
  modified_base 61: mod_base = OTHER; note = 2'-Omethylcytosine
  modified_base 62: mod_base = OTHER; note = 2'-Omethylcytosine
  modified_base 63: mod_base = OTHER; note = 2'-fluorocytosine
  modified_base 64: mod_base = OTHER; note = 2'-Omethylguanosine
  modified_base 65: mod_base = OTHER; note = 2'-Omethylguanosine
  modified_base 66: mod_base = OTHER; note = 2'-Omethylcytosine
  modified_base 67: mod_base = OTHER; note = 2'-Omethylguanosine
  modified_base 68: mod_base = OTHER; note = 2'-Omethylguanosine
  modified_base 69: mod_base = OTHER; note = 2'-fluoroadenosine

SEQ ID NO: 4266 - RNA, 85 nt, synthetic construct; identical to SEQ ID NO: 3317
  source 1..85: mol_type = other RNA
  modified_base 1: mod_base = OTHER; note = 2'-Omethylguanosine phosphorothiorate
  modified_base 2: mod_base = OTHER; note = 2'-Omethylcytosine phosphorothiorate
  modified_base 3: mod_base = OTHER; note = 2'-Omethyluridine phosphorothiorate
  modified_base 4: mod_base = OTHER; note = Guanosine phosphorothiorate
  modified_base 7: mod_base = OTHER; note = 2'-fluoroadenosine
  modified_base 14: mod_base = OTHER; note = 2'-Omethyladenosine
  modified_base 18: mod_base = OTHER; note = 2'-Omethylguanosine phosphorothiorate
  modified_base 22: mod_base = OTHER; note = 2'-Omethyladenosine
  modified_base 24: mod_base = OTHER; note = 2'-Omethylguanosine
  modified_base 25: mod_base = OTHER; note = 2'-Omethylcytosine phosphorothiorate
  modified_base 27: mod_base = OTHER; note = 2'-fluorouridine
  modified_base 34: mod_base = OTHER; note = 2'-fluorocytosine phosphorothiorate
  modified_base 35: mod_base = OTHER; note = 2'-fluorouridine
  modified_base 44: mod_base = OTHER; note = 2'-Omethyluridine
  modified_base 46: mod_base = OTHER; note = 2'-Omethylguanosine
  modified_base 53: mod_base = OTHER; note = 2'-fluorocytosine
  modified_base 56: mod_base = OTHER; note = Guanosine phosphorothiorate
  modified_base 57: mod_base = OTHER; note = 2'-Omethylcytosine
  modified_base 59: mod_base = OTHER; note = 2'-Omethylcytosine phosphorothiorate
  modified_base 61: mod_base = OTHER; note = 2'-Omethylguanosine
  modified_base 63: mod_base = OTHER; note = 2'-fluorouridine
  modified_base 71: mod_base = OTHER; note = Cytosine phosphorothiorate
  modified_base 72: mod_base = OTHER; note = 2'-fluorouridine
  modified_base 73: mod_base = OTHER; note = 2'-fluoroguanosine
  modified_base 81: mod_base = OTHER; note = Cytosine phosphorothiorate
  modified_base 82: mod_base = OTHER; note = 2'-Omethylguanosine

SEQ ID NO: 4267 - RNA, 85 nt, synthetic construct; identical to SEQ ID NO: 3288
  source 1..85: mol_type = other RNA
  modified_base 1: mod_base = OTHER; note = 2'-Omethylcytosine phosphorothiorate
  modified_base 11: mod_base = OTHER; note = Cytosine phosphorothiorate
  modified_base 25: mod_base = OTHER; note = Guanosine phosphorothiorate
  modified_base 26: mod_base = OTHER; note = 2'-fluorouridine
  modified_base 30: mod_base = OTHER; note = 2'-fluoroadenosine
  modified_base 45: mod_base = OTHER; note = Guanosine phosphorothiorate
  modified_base 51: mod_base = OTHER; note = 2'-Omethyluridine
  modified_base 57: mod_base = OTHER; note = 2'-Omethylcytosine
  modified_base 67: mod_base = OTHER; note = Adenosine phosphorothiorate
  modified_base 84: mod_base = OTHER; note = 2'-fluorocytosine phosphorothiorate

SEQ ID NO: 4268 - RNA, 86 nt, synthetic construct; identical to SEQ ID NO: 3290
  source 1..86: mol_type = other RNA
  modified_base 1: mod_base = OTHER; note = 2'-Omethyladenosine phosphorothiorate
  modified_base 2: mod_base = OTHER; note = 2'-Omethylcytosine
  modified_base 3: mod_base = OTHER; note = 2'-Omethylcytosine
  modified_base 4: mod_base = OTHER; note = 2'-Omethyladenosine
  modified_base 5: mod_base = OTHER; note = 2'-Omethylguanosine
  modified_base 6: mod_base = OTHER; note = 2'-Omethylguanosine
  modified_base 59: mod_base = OTHER; note = 2'-Omethylguanosine
  modified_base 60: mod_base = OTHER; note = 2'-Omethyluridine
  modified_base 61: mod_base = OTHER; note = 2'-Omethylguanosine
  modified_base 62: mod_base = OTHER; note = 2'-Omethylguanosine
  modified_base 63: mod_base = OTHER; note = 2'-Omethylguanosine
  modified_base 71: mod_base = OTHER; note = 2'-Omethylcytosine
  modified_base 72: mod_base = OTHER; note = 2'-Omethylcytosine
  modified_base 73: mod_base = OTHER; note = 2'-fluorocytosine
  modified_base 74: mod_base = OTHER; note = 2'-Omethyladenosine
  modified_base 75: mod_base = OTHER; note = 2'-Omethylcytosine
  modified_base 76: mod_base = OTHER; note = 2'-Omethyluridine
  modified_base 77: mod_base = OTHER; note = 2'-Omethylcytosine
  modified_base 78: mod_base = OTHER; note = 2'-Omethylcytosine
  modified_base 79: mod_base = OTHER; note = 2'-Omethyluridine
  modified_base 81: mod_base = OTHER; note = 2'-Omethylguanosine
  modified_base 82: mod_base = OTHER; note = 2'-Omethyluridine

SEQ ID NO: 4269 - RNA, 76 nt, synthetic construct; identical to SEQ ID NO: 625
  source 1..76: mol_type = other RNA
  modified_base 3: mod_base = OTHER; note = 2'-fluorocytosine
  modified_base 5: mod_base = OTHER; note = 2'-fluorocytosine
  modified_base 7: mod_base = OTHER; note = Guanosine phosphorothiorate
  modified_base 10: mod_base = OTHER; note = 2'-fluoroguanosine
  modified_base 11: mod_base = OTHER; note = 2'-fluorocytosine
  modified_base 14: mod_base = OTHER; note = 2'-fluoroadenosine
  modified_base 16: mod_base = OTHER; note = 2'-fluorouridine
  modified_base 18: mod_base = OTHER; note = Guanosine phosphorothiorate
  modified_base 19: mod_base = OTHER; note = Adenosine phosphorothiorate
  modified_base 20: mod_base = OTHER; note = 2'-fluorouridine
  modified_base 23: mod_base = OTHER; note = 2'-Omethylcytosine
  modified_base 25: mod_base = OTHER; note = 2'-fluorocytosine
  modified_base 29: mod_base = OTHER; note = 2'-Omethylguanosine
  modified_base 30: mod_base = OTHER; note = 2'-fluoroguanosine
  modified_base 31: mod_base = OTHER; note = 2'-Omethyladenosine
  modified_base 34: mod_base = OTHER; note = 2'-fluorouridine
  modified_base 38: mod_base = OTHER; note = 2'-fluoroadenosine
  modified_base 41: mod_base = OTHER; note = 2'-fluorocytosine
  modified_base 42: mod_base = OTHER; note = 2'-Omethyladenosine
  modified_base 50: mod_base = OTHER; note = 2'-Omethylcytosine
  modified_base 51: mod_base = OTHER; note = 2'-Omethylguanosine
  modified_base 52: mod_base = OTHER; note = 2'-fluoroguanosine
  modified_base 53: mod_base = OTHER; note = 2'-fluoroguanosine
  modified_base 54: mod_base = OTHER; note = 2'-Omethyluridine
  modified_base 57: mod_base = OTHER; note = 2'-fluoroguanosine
  modified_base 60: mod_base = OTHER; note = 2'-Omethyluridine phosphorothiorate
  modified_base 61: mod_base = OTHER; note = 2'-Omethylcytosine
  modified_base 63: mod_base = OTHER; note = 2'-fluorocytosine
  modified_base 65: mod_base = OTHER; note = Guanosine phosphorothiorate
  modified_base 68: mod_base = OTHER; note = 2'-fluoroguanosine
  modified_base 69: mod_base = OTHER; note = 2'-Omethyladenosine
  modified_base 70: mod_base = OTHER; note = 2'-fluoroguanosine
  modified_base 72: mod_base = OTHER; note = 2'-Omethylcytosine
  modified_base 73: mod_base = OTHER; note = 2'-Omethylguanosine
  modified_base 74: mod_base = OTHER; note = 2'-fluorocytosine
  modified_base 76: mod_base = OTHER; note = 2'-Omethyladenosine

SEQ ID NO: 4270 - RNA, 76 nt, synthetic construct; identical to SEQ ID NO: 3329
  source 1..76: mol_type = other RNA
  modified_base 1: mod_base = OTHER; note = 2'-Omethylguanosine phosphorothiorate
  modified_base 2: mod_base = OTHER; note = 2'-Omethylguanosine phosphorothiorate
  modified_base 3: mod_base = OTHER; note = 2'-Omethylcytosine
  modified_base 4: mod_base = OTHER; note = 2'-Omethylcytosine
  modified_base 5: mod_base = OTHER; note = 2'-Omethylcytosine
  modified_base 6: mod_base = OTHER; note = 2'-Omethylcytosine
  modified_base 10: mod_base = OTHER; note = 2'-Omethylguanosine
  modified_base 11: mod_base = OTHER; note = 2'-Omethylcytosine
  modified_base 12: mod_base = OTHER; note = 2'-Omethylguanosine
  modified_base 13: mod_base = OTHER; note = 2'-Omethylcytosine
  modified_base 14: mod_base = OTHER; note = 2'-Omethyladenosine
  modified_base 15: mod_base = OTHER; note = 2'-fluoroadenosine
  modified_base 16: mod_base = OTHER; note = 2'-Omethyluridine
  modified_base 17: mod_base = OTHER; note = 2'-Omethylguanosine
  modified_base 18: mod_base = OTHER; note = 2'-Omethylguanosine
  modified_base 19: mod_base = OTHER; note = 2'-fluoroadenosine
  modified_base 20: mod_base = OTHER; note = 2'-Omethyluridine
  modified_base 22: mod_base = OTHER; note = 2'-Omethylguanosine
  modified_base 23: mod_base = OTHER; note = 2'-Omethylcytosine
  modified_base 24: mod_base = OTHER; note = 2'-Omethylguanosine
  modified_base 25: mod_base = OTHER; note = 2'-Omethylcytosine
  modified_base 33: mod_base = OTHER; note = 2'-fluorouridine
  modified_base 35: mod_base = OTHER; note = Cytosine phosphorothiorate
  modified_base 37: mod_base = OTHER; note = Adenosine phosphorothiorate
  modified_base 38: mod_base = OTHER; note = Adenosine phosphorothiorate
  modified_base 44: mod_base = OTHER; note = 2'-Omethyladenosine
  modified_base 45: mod_base = OTHER; note = 2'-Omethylguanosine
  modified_base 46: mod_base = OTHER; note = 2'-fluoroguanosine
  modified_base 47: mod_base = OTHER; note = 2'-fluorouridine
  modified_base 48: mod_base = OTHER; note = 2'-fluorouridine
  modified_base 56: mod_base = OTHER; note = 2'-Omethylcytosine
  modified_base 59: mod_base = OTHER; note = 2'-Omethylguanosine
  modified_base 61: mod_base = OTHER; note = 2'-Omethylcytosine
  modified_base 62: mod_base = OTHER; note = 2'-Omethylcytosine
  modified_base 63: mod_base = OTHER; note = 2'-fluorocytosine
  modified_base 64: mod_base = OTHER; note = 2'-Omethylguanosine
  modified_base 65: mod_base = OTHER; note = 2'-Omethylguanosine
  modified_base 66: mod_base = OTHER; note = 2'-Omethyluridine
  modified_base 67: mod_base = OTHER; note = 2'-Omethylguanosine
  modified_base 68: mod_base = OTHER; note = 2'-Omethylguanosine
  modified_base 73: mod_base = OTHER; note = 2'-Omethylguanosine

SEQ ID NO: 4271 - RNA, 75 nt, synthetic construct; identical to SEQ ID NO: 3336
  source 1..75: mol_type = other RNA
  modified_base 7: mod_base = OTHER; note = 2'-fluorouridine phosphorothiorate
  modified_base 16: mod_base = OTHER; note = 2'-Omethylcytosine phosphorothiorate
  modified_base 19: mod_base = OTHER; note = Uridine phosphorothiorate
  modified_base 25: mod_base = OTHER; note = 2'-fluoroadenosine
  modified_base 26: mod_base = OTHER; note = 2'-fluorouridine
  modified_base 51: mod_base = OTHER; note = 2'-fluoroguanosine phosphorothiorate
  modified_base 74: mod_base = OTHER; note = Cytosine phosphorothiorate

SEQ ID NO: 4272 - RNA, 76 nt, synthetic construct; identical to SEQ ID NO: 625
  source 1..76: mol_type = other RNA
  modified_base 1: mod_base = OTHER; note = 2'-Omethylguanosine
  modified_base 2: mod_base = OTHER; note = 2'-Omethylguanosine
  modified_base 3: mod_base = OTHER; note = Cytosine phosphorothiorate
  modified_base 4: mod_base = OTHER; note = 2'-fluorouridine
  modified_base 5: mod_base = OTHER; note = 2'-fluorocytosine
  modified_base 11: mod_base = OTHER; note = 2'-fluorocytosine
  modified_base 14: mod_base = OTHER; note = 2'-Omethyladenosine
  modified_base 18: mod_base = OTHER; note = 2'-fluoroguanosine
  modified_base 20: mod_base = OTHER; note = 2'-Omethyluridine
  modified_base 22: mod_base = OTHER; note = Guanosine phosphorothiorate
  modified_base 23: mod_base = OTHER; note = 2'-Omethylcytosine
  modified_base 26: mod_base = OTHER; note = 2'-Omethyladenosine phosphorothiorate
  modified_base 27: mod_base = OTHER; note = 2'-Omethyluridine
  modified_base 28: mod_base = OTHER; note = 2'-fluorouridine
  modified_base 31: mod_base = OTHER; note = 2'-Omethyladenosine
  modified_base 37: mod_base = OTHER; note = Adenosine phosphorothiorate
  modified_base 38: mod_base = OTHER; note = 2'-fluoroadenosine
  modified_base 41: mod_base = OTHER; note = Cytosine phosphorothiorate
  modified_base 47: mod_base = OTHER; note = 2'-fluorouridine
  modified_base 50: mod_base = OTHER; note = Cytosine phosphorothiorate
  modified_base 52: mod_base = OTHER; note = 2'-fluoroguanosine
  modified_base 55: mod_base = OTHER; note = Uridine phosphorothiorate
  modified_base 57: mod_base = OTHER; note = 2'-fluoroguanosine
  modified_base 59: mod_base = OTHER; note = 2'-fluoroguanosine
  modified_base 60: mod_base = OTHER; note = 2'-fluorouridine
  modified_base 61: mod_base = OTHER; note = 2'-Omethylcytosine
  modified_base 62: mod_base = OTHER; note = 2'-fluorocytosine
  modified_base 63: mod_base = OTHER; note = 2'-Omethylcytosine
  modified_base 64: mod_base = OTHER; note = Guanosine phosphorothiorate
  modified_base 65: mod_base = OTHER; note = 2'-Omethylguanosine
  modified_base 66: mod_base = OTHER; note = Cytosine phosphorothiorate
  modified_base 67: mod_base = OTHER; note = 2'-Omethylguanosine
  modified_base 69: mod_base = OTHER; note = 2'-fluoroadenosine
  modified_base 70: mod_base = OTHER; note = 2'-Omethylguanosine
  modified_base 72: mod_base = OTHER; note = 2'-Omethylcytosine
  modified_base 73: mod_base = OTHER; note = Guanosine phosphorothiorate
  modified_base 75: mod_base = OTHER; note = 2'-Omethylcytosine phosphorothiorate
  modified_base 76: mod_base = OTHER; note = 2'-Omethyladenosine

SEQ ID NO: 4273 - RNA, 76 nt, synthetic construct; identical to SEQ ID NO: 625
  source 1..76: mol_type = other RNA
  modified_base 1: mod_base = OTHER; note = 2'-Omethylguanosine phosphorothiorate
  modified_base 2: mod_base = OTHER; note = 2'-Omethylguanosine phosphorothiorate
  modified_base 3: mod_base = OTHER; note = 2'-Omethylcytosine
  modified_base 4: mod_base = OTHER; note = 2'-Omethyluridine
  modified_base 5: mod_base = OTHER; note = 2'-Omethylcytosine
  modified_base 6: mod_base = OTHER; note = 2'-Omethylcytosine
  modified_base 16: mod_base = OTHER; note = 2'-Omethyluridine
  modified_base 17: mod_base = OTHER; note = 2'-Omethylguanosine
  modified_base 18: mod_base = OTHER; note = 2'-Omethylguanosine
  modified_base 20: mod_base = OTHER; note = 2'-Omethyluridine
  modified_base 25: mod_base = OTHER; note = 2'-Omethylcytosine
  modified_base 33: mod_base = OTHER; note = 2'-fluorouridine
  modified_base 35: mod_base = OTHER; note = Cytosine phosphorothiorate
  modified_base 37: mod_base = OTHER; note = Adenosine phosphorothiorate
  modified_base 38: mod_base = OTHER; note = Adenosine phosphorothiorate
  modified_base 41: mod_base = OTHER; note = 2'-fluorocytosine
  modified_base 42: mod_base = OTHER; note = 2'-Omethyladenosine
  modified_base 43: mod_base = OTHER; note = 2'-Omethyladenosine
  modified_base 44: mod_base = OTHER; note = 2'-fluoroadenosine
  modified_base 49: mod_base = OTHER; note = 2'-Omethylcytosine
  modified_base 50: mod_base = OTHER; note = 2'-Omethylcytosine
  modified_base 52: mod_base = OTHER; note = 2'-Omethylguanosine
  modified_base 54: mod_base = OTHER; note = 2'-Omethyluridine
  modified_base 55: mod_base = OTHER; note = Uridine phosphorothiorate
  modified_base 56: mod_base = OTHER; note = 2'-Omethylcytosine
  modified_base 57: mod_base = OTHER; note = 2'-fluoroguanosine
  modified_base 59: mod_base = OTHER; note = 2'-Omethylguanosine
  modified_base 61: mod_base = OTHER; note = 2'-Omethylcytosine
  modified_base 62: mod_base = OTHER; note = 2'-Omethylcytosine
  modified_base 63: mod_base = OTHER; note = 2'-fluorocytosine
  modified_base 64: mod_base = OTHER; note = 2'-Omethylguanosine
  modified_base 65: mod_base = OTHER; note = 2'-Omethylguanosine
  modified_base 73: mod_base = OTHER; note = 2'-Omethylguanosine

SEQ ID NO: 4274 - RNA, 75 nt, synthetic construct; identical to SEQ ID NO: 1045
  source 1..75: mol_type = other RNA
  modified_base 2: mod_base = OTHER; note = Guanosine phosphorothiorate
  modified_base 4: mod_base = OTHER; note = 2'-fluorouridine
  modified_base 10: mod_base = OTHER; note = Guanosine phosphorothiorate
  modified_base 11: mod_base = OTHER; note = 2'-Omethyluridine
  modified_base 12: mod_base = OTHER; note = 2'-fluoroguanosine
  modified_base 13: mod_base = OTHER; note = 2'-Omethyluridine
  modified_base 25: mod_base = OTHER; note = 2'-fluorocytosine
  modified_base 30: mod_base = OTHER; note = 2'-fluoroguanosine
  modified_base 52: mod_base = OTHER; note = 2'-fluoroguanosine phosphorothiorate
  modified_base 59: mod_base = OTHER; note = Uridine phosphorothiorate
  modified_base 61: mod_base = OTHER; note = 2'-fluorouridine
  modified_base 62: mod_base = OTHER; note = Cytosine phosphorothiorate
  modified_base 64: mod_base = OTHER; note = 2'-fluoroguanosine
  modified_base 67: mod_base = OTHER; note = Guanosine phosphorothiorate
  modified_base 68: mod_base = OTHER; note = Adenosine phosphorothiorate
  modified_base 72: mod_base = OTHER; note = Uridine phosphorothiorate
  modified_base 73: mod_base = OTHER; note = Cytosine phosphorothiorate
  modified_base 74: mod_base = OTHER; note = 2'-fluorocytosine phosphorothiorate

SEQ ID NO: 4275 - RNA, 86 nt, synthetic construct; identical to SEQ ID NO: 3290
  source 1..86: mol_type = other RNA
  modified_base 27: mod_base = OTHER; note = 2'-Omethyluridine

SEQ ID NO: 4276 - RNA, 75 nt, synthetic construct; identical to SEQ ID NO: 3311
  source 1..75: mol_type = other RNA
  modified_base 1: mod_base = OTHER; note = 2'-Omethylguanosine phosphorothiorate
  modified_base 2: mod_base = OTHER; note = 2'-Omethylguanosine phosphorothiorate
  modified_base 11: mod_base = OTHER; note = Uridine phosphorothiorate
  modified_base 12: mod_base = OTHER; note = Guanosine phosphorothiorate
  modified_base 18: mod_base = OTHER; note = Guanosine phosphorothiorate
  modified_base 19: mod_base = OTHER; note = 2'-fluorouridine
  modified_base 22: mod_base = OTHER; note = 2'-fluoroguanosine phosphorothiorate
  modified_base 34: mod_base = OTHER; note = 2'-fluorocytosine
  modified_base 35: mod_base = OTHER; note = 2'-fluorouridine phosphorothiorate
  modified_base 36: mod_base = OTHER; note = 2'-fluoroadenosine
  modified_base 55: mod_base = OTHER; note = 2'-Omethylcytosine
  modified_base 66: mod_base = OTHER; note = 2'-fluoroguanosine
  modified_base 69: mod_base = OTHER; note = 2'-fluoroadenosine
  modified_base 73: mod_base = OTHER; note = Cytosine phosphorothiorate
  modified_base 74: mod_base = OTHER; note = 2'-fluorocytosine phosphorothiorate

SEQ ID NO: 4277 - RNA, 76 nt, synthetic construct
  source 1..76: mol_type = other RNA
ttcaccgtggcgcaatggatagcgcattggacttcaaattcaaaggttccgggttcgagtcccggcggtgaaacca

SEQ ID NO: 4278 - RNA, 76 nt, synthetic construct; identical to SEQ ID NO: 625
  source 1..76: mol_type = other RNA
  modified_base 1: mod_base = OTHER; note = 2'-Omethylguanosine phosphorothiorate
  modified_base 2: mod_base = OTHER; note = 2'-Omethylguanosine
  modified_base 3: mod_base = OTHER; note = 2'-Omethylcytosine
  modified_base 4: mod_base = OTHER; note = 2'-Omethyluridine
  modified_base 5: mod_base = OTHER; note = 2'-Omethylcytosine
  modified_base 6: mod_base = OTHER; note = 2'-Omethylcytosine
  modified_base 10: mod_base = OTHER; note = 2'-Omethylguanosine
  modified_base 11: mod_base = OTHER; note = 2'-Omethylcytosine
  modified_base 12: mod_base = OTHER; note = 2'-Omethylguanosine
  modified_base 13: mod_base = OTHER; note = 2'-Omethylcytosine
  modified_base 16: mod_base = OTHER; note = 2'-Omethyluridine
  modified_base 17: mod_base = OTHER; note = 2'-Omethylguanosine
  modified_base 18: mod_base = OTHER; note = 2'-Omethylguanosine
  modified_base 22: mod_base = OTHER; note = 2'-Omethylguanosine
  modified_base 23: mod_base = OTHER; note = 2'-Omethylcytosine
  modified_base 24: mod_base = OTHER; note = 2'-Omethylguanosine
  modified_base 25: mod_base = OTHER; note = 2'-Omethylcytosine
  modified_base 40: mod_base = OTHER; note = 2'-fluorouridine
  modified_base 41: mod_base = OTHER; note = 2'-fluorocytosine
  modified_base 42: mod_base = OTHER; note = 2'-fluoroadenosine
  modified_base 43: mod_base = OTHER; note = 2'-fluoroadenosine
  modified_base 49: mod_base = OTHER; note = 2'-Omethylcytosine
  modified_base 50: mod_base = OTHER; note = 2'-Omethylcytosine
  modified_base 51: mod_base = OTHER; note = 2'-Omethylguanosine
  modified_base 52: mod_base = OTHER; note = 2'-Omethylguanosine
  modified_base 53: mod_base = OTHER; note = 2'-Omethylguanosine
  modified_base 54: mod_base = OTHER; note = 2'-Omethyluridine phosphorothiorate
  modified_base 56: mod_base = OTHER; note = 2'-Omethylcytosine
  modified_base 57: mod_base = OTHER; note = 2'-fluoroguanosine
  modified_base 59: mod_base = OTHER; note = 2'-Omethylguanosine
  modified_base 61: mod_base = OTHER; note = 2'-Omethylcytosine
  modified_base 62: mod_base = OTHER; note = 2'-Omethylcytosine
  modified_base 63: mod_base = OTHER; note = 2'-Omethylcytosine
  modified_base 64: mod_base = OTHER; note = 2'-Omethylguanosine
  modified_base 65: mod_base = OTHER; note = 2'-Omethylguanosine
  modified_base 66: mod_base = OTHER; note = 2'-Omethylcytosine
  modified_base 67: mod_base = OTHER; note = 2'-Omethylguanosine
  modified_base 68: mod_base = OTHER; note = 2'-Omethylguanosine
  modified_base 69: mod_base = OTHER; note = 2'-Omethyladenosine
  modified_base 73: mod_base = OTHER; note = 2'-Omethylguanosine

SEQ ID NO: 4279 - RNA, 76 nt, synthetic construct; identical to SEQ ID NO: 625
  source 1..76: mol_type = other RNA
  modified_base 1: mod_base = OTHER; note = 2'-Omethylguanosine phosphorothiorate
  modified_base 2: mod_base = OTHER; note = 2'-Omethylguanosine phosphorothiorate
  modified_base 3: mod_base = OTHER; note = 2'-Omethylcytosine
  modified_base 4: mod_base = OTHER; note = 2'-Omethyluridine
  modified_base 5: mod_base = OTHER; note = 2'-Omethylcytosine
  modified_base 6: mod_base = OTHER; note = 2'-Omethylcytosine
  modified_base 14: mod_base = OTHER; note = 2'-Omethyladenosine
  modified_base 15: mod_base = OTHER; note = 2'-Omethyladenosine
  modified_base 16: mod_base = OTHER; note = 2'-Omethyluridine
  modified_base 17: mod_base = OTHER; note = 2'-Omethylguanosine
  modified_base 18: mod_base = OTHER; note = 2'-Omethylguanosine
  modified_base 20: mod_base = OTHER; note = 2'-Omethyluridine
  modified_base 25: mod_base = OTHER; note = 2'-Omethylcytosine
  modified_base 33: mod_base = OTHER; note = 2'-fluorouridine
  modified_base 35: mod_base = OTHER; note = Cytosine phosphorothiorate
  modified_base 37: mod_base = OTHER; note = Adenosine phosphorothiorate
  modified_base 38: mod_base = OTHER; note = Adenosine phosphorothiorate
  modified_base 41: mod_base = OTHER; note = 2'-fluorocytosine
  modified_base 42: mod_base = OTHER; note = 2'-Omethyladenosine
  modified_base 43: mod_base = OTHER; note = 2'-Omethyladenosine
  modified_base 44: mod_base = OTHER; note = 2'-fluoroadenosine
  modified_base 49: mod_base = OTHER; note = 2'-Omethylcytosine
  modified_base 50: mod_base = OTHER; note = 2'-Omethylcytosine
  modified_base 52: mod_base = OTHER; note = 2'-Omethylguanosine
  modified_base 54: mod_base = OTHER; note = 2'-Omethyluridine
  modified_base 55: mod_base = OTHER; note = Uridine phosphorothiorate
  modified_base 56: mod_base = OTHER; note = 2'-Omethylcytosine
  modified_base 57: mod_base = OTHER; note = 2'-fluoroguanosine
  modified_base 59: mod_base = OTHER; note = 2'-Omethylguanosine
  modified_base 61: mod_base = OTHER; note = 2'-Omethylcytosine
  modified_base 62: mod_base = OTHER; note = 2'-Omethylcytosine
  modified_base 63: mod_base = OTHER; note = 2'-fluorocytosine
  modified_base 64: mod_base = OTHER; note = 2'-Omethylguanosine
  modified_base 65: mod_base = OTHER; note = 2'-Omethylguanosine
  modified_base 74: mod_base = OTHER; note = Cytosine phosphorothiorate
  modified_base 75: mod_base = OTHER; note = 2'-Omethylcytosine

SEQ ID NO: 4280 - RNA, 76 nt, synthetic construct; identical to SEQ ID NO: 3318
  source 1..76: mol_type = other RNA
  modified_base 1: mod_base = OTHER; note = 2'-Omethylcytosine
  modified_base 20: mod_base = OTHER; note = 2'-fluorouridine
  modified_base 21: mod_base = OTHER; note = 2'-Omethyladenosine
  modified_base 22: mod_base = OTHER; note = 2'-Omethylguanosine
  modified_base 40: mod_base = OTHER; note = 2'-fluorocytosine
  modified_base 41: mod_base = OTHER; note = 2'-Omethylcytosine
  modified_base 42: mod_base = OTHER; note = 2'-Omethyluridine
  modified_base 43: mod_base = OTHER; note = 2'-Omethyluridine
  modified_base 73: mod_base = OTHER; note = 2'-Omethyladenosine

SEQ ID NO: 4281 - RNA, 85 nt, synthetic construct; identical to SEQ ID NO: 3286
  source 1..85: mol_type = other RNA
  modified_base 1: mod_base = OTHER; note = 2'-Omethylcytosine phosphorothiorate
  modified_base 25: mod_base = OTHER; note = 2'-fluoroguanosine
  modified_base 44: mod_base = OTHER; note = Guanosine phosphorothiorate
  modified_base 51: mod_base = OTHER; note = 2'-Omethyluridine
  modified_base 58: mod_base = OTHER; note = 2'-Omethylguanosine
  modified_base 83: mod_base = OTHER; note = 2'-fluorocytosine

SEQ ID NO: 4282 - RNA, 75 nt, synthetic construct; identical to SEQ ID NO: 3311
  source 1..75: mol_type = other RNA
  modified_base 11: mod_base = OTHER; note = 2'-fluorouridine
  modified_base 12: mod_base = OTHER; note = 2'-Omethylguanosine
  modified_base 16: mod_base = OTHER; note = Uridine phosphorothiorate
  modified_base 22: mod_base = OTHER; note = 2'-fluoroguanosine
  modified_base 28: mod_base = OTHER; note = Uridine phosphorothiorate
  modified_base 41: mod_base = OTHER; note = 2'-fluorocytosine
  modified_base 60: mod_base = OTHER; note = 2'-fluorocytosine
  modified_base 65: mod_base = OTHER; note = Uridine phosphorothiorate
  modified_base 74: mod_base = OTHER; note = Cytosine phosphorothiorate

SEQ ID NO: 4283 - RNA, 75 nt, synthetic construct; identical to SEQ ID NO: 3336
  source 1..75: mol_type = other RNA
  modified_base 1: mod_base = OTHER; note = 2'-Omethylcytosine phosphorothiorate
  modified_base 9: mod_base = OTHER; note = Guanosine phosphorothiorate
  modified_base 19: mod_base = OTHER; note = 2'-fluorouridine
  modified_base 26: mod_base = OTHER; note = 2'-Omethyluridine
  modified_base 40: mod_base = OTHER; note = Uridine phosphorothiorate
  modified_base 48: mod_base = OTHER; note = Cytosine phosphorothiorate
  modified_base 72: mod_base = OTHER; note = 2'-Omethylguanosine

SEQ ID NO: 4284 - RNA, 75 nt, synthetic construct; identical to SEQ ID NO: 1045
  source 1..75: mol_type = other RNA
  modified_base 1: mod_base = OTHER; note = 2'-Omethylguanosine
  modified_base 28: mod_base = OTHER; note = 2'-Omethyluridine
  modified_base 29: mod_base = OTHER; note = 2'-Omethylguanosine
  modified_base 30: mod_base = OTHER; note = 2'-Omethylguanosine
  modified_base 40: mod_base = OTHER; note = 2'-fluorocytosine
  modified_base 41: mod_base = OTHER; note = 2'-fluorocytosine
  modified_base 42: mod_base = OTHER; note = 2'-Omethyladenosine phosphorothiorate
  modified_base 43: mod_base = OTHER; note = 2'-Omethylguanosine
  modified_base 72: mod_base = OTHER; note = 2'-Omethyluridine

SEQ ID NO: 4285 - RNA, 75 nt, synthetic construct; identical to SEQ ID NO: 3336
  source 1..75: mol_type = other RNA
  modified_base 3: mod_base = OTHER; note = Uridine phosphorothiorate
  modified_base 8: mod_base = OTHER; note = 2'-fluoroadenosine phosphorothiorate
  modified_base 10: mod_base = OTHER; note = 2'-fluorocytosine
  modified_base 15: mod_base = OTHER; note = 2'-fluorouridine phosphorothiorate
  modified_base 21: mod_base = OTHER; note = Guanosine phosphorothiorate
  modified_base 26: mod_base = OTHER; note = 2'-fluorouridine
  modified_base 28: mod_base = OTHER; note = 2'-fluoroadenosine
  modified_base 37: mod_base = OTHER; note = 2'-fluoroadenosine
  modified_base 38: mod_base = OTHER; note = 2'-fluorouridine
  modified_base 39: mod_base = OTHER; note = 2'-Omethylcytosine phosphorothiorate
  modified_base 46: mod_base = OTHER; note = 2'-Omethyluridine phosphorothiorate
  modified_base 47: mod_base = OTHER; note = 2'-fluorocytosine
  modified_base 49: mod_base = OTHER; note = 2'-Omethyladenosine
  modified_base 50: mod_base = OTHER; note = 2'-Omethylguanosine phosphorothiorate
  modified_base 58: mod_base = OTHER; note = Guanosine phosphorothiorate
  modified_base 68: mod_base = OTHER; note = 2'-fluoroadenosine phosphorothiorate
  modified_base 69: mod_base = OTHER; note = Guanosine phosphorothiorate
  modified_base 73: mod_base = OTHER; note = Cytosine phosphorothiorate
  modified_base 74: mod_base = OTHER; note = Cytosine phosphorothiorate

SEQ ID NO: 4286 - RNA, 75 nt, synthetic construct; identical to SEQ ID NO: 3306
  source 1..75: mol_type = other RNA
  modified_base 1: mod_base = OTHER; note = 2'-Omethylguanosine
  modified_base 17: mod_base = OTHER; note = 2'-Omethylguanosine
  modified_base 18: mod_base = OTHER; note = 2'-Omethylguanosine
  modified_base 32: mod_base = OTHER; note = Uridine phosphorothiorate
  modified_base 33: mod_base = OTHER; note = 2'-Omethylcytosine
  modified_base 34: mod_base = OTHER; note = Uridine phosphorothiorate
  modified_base 36: mod_base = OTHER; note = Guanosine phosphorothiorate
  modified_base 37: mod_base = OTHER; note = Adenosine phosphorothiorate
  modified_base 40: mod_base = OTHER; note = 2'-Omethyladenosine
  modified_base 41: mod_base = OTHER; note = 2'-Omethylguanosine
  modified_base 42: mod_base = OTHER; note = 2'-Omethyladenosine
  modified_base 43: mod_base = OTHER; note = 2'-Omethyladenosine
  modified_base 49: mod_base = OTHER; note = 2'-Omethylcytosine
  modified_base 51: mod_base = OTHER; note = 2'-Omethyluridine
  modified_base 72: mod_base = OTHER; note = 2'-Omethyladenosine

SEQ ID NO: 4287 - RNA, 76 nt, synthetic construct; identical to SEQ ID NO: 625
  source 1..76: mol_type = other RNA
  modified_base 1: mod_base = OTHER; note = 2'-Omethylguanosine
  modified_base 2: mod_base = OTHER; note = 2'-Omethylguanosine
  modified_base 3: mod_base = OTHER; note = 2'-Omethylcytosine
  modified_base 5: mod_base = OTHER; note = 2'-Omethylcytosine
  modified_base 10: mod_base = OTHER; note = 2'-Omethylguanosine
  modified_base 13: mod_base = OTHER; note = 2'-Omethylcytosine
  modified_base 17: mod_base = OTHER; note = Guanosine phosphorothiorate
  modified_base 18: mod_base = OTHER; note = 2'-Omethylguanosine
  modified_base 19: mod_base = OTHER; note = Adenosine phosphorothiorate
  modified_base 20: mod_base = OTHER; note = 2'-Omethyluridine
  modified_base 25: mod_base = OTHER; note = 2'-Omethylcytosine
  modified_base 29: mod_base = OTHER; note = 2'-Omethylguanosine
  modified_base 33: mod_base = OTHER; note = 2'-fluorouridine
  modified_base 35: mod_base = OTHER; note = Cytosine phosphorothiorate
  modified_base 37: mod_base = OTHER; note = Adenosine phosphorothiorate
  modified_base 38: mod_base = OTHER; note = Adenosine phosphorothiorate
  modified_base 41: mod_base = OTHER; note = 2'-fluorocytosine phosphorothiorate
  modified_base 43: mod_base = OTHER; note = 2'-Omethyladenosine
  modified_base 44: mod_base = OTHER; note = 2'-fluoroadenosine
  modified_base 46: mod_base = OTHER; note = Guanosine phosphorothiorate
  modified_base 50: mod_base = OTHER; note = 2'-Omethylcytosine
  modified_base 52: mod_base = OTHER; note = 2'-Omethylguanosine
  modified_base 54: mod_base = OTHER; note = Uridine phosphorothiorate
  modified_base 55: mod_base = OTHER; note = Uridine phosphorothiorate
  modified_base 56: mod_base = OTHER; note = 2'-Omethylcytosine
  modified_base 57: mod_base = OTHER; note = Guanosine phosphorothiorate
  modified_base 62: mod_base = OTHER; note = 2'-Omethylcytosine
  modified_base 63: mod_base = OTHER; note = 2'-fluorocytosine
  modified_base 65: mod_base = OTHER; note = 2'-Omethylguanosine
  modified_base 71: mod_base = OTHER; note = 2'-Omethyluridine
  modified_base 73: mod_base = OTHER; note = 2'-Omethylguanosine

SEQ ID NO: 4288 - RNA, 86 nt, synthetic construct; identical to SEQ ID NO: 3290
  source 1..86: mol_type = other RNA
  modified_base 85: mod_base = OTHER; note = Cytosine phosphorothiorate

SEQ ID NO: 4289 - RNA, 74 nt, synthetic construct; identical to SEQ ID NO: 3293
  source 1..74: mol_type = other RNA
  modified_base 1: mod_base = OTHER; note = 2'-Omethyladenosine
  modified_base 3: mod_base = OTHER; note = 2'-Omethylcytosine phosphorothiorate
  modified_base 8: mod_base = OTHER; note = 2'-fluoroguanosine
  modified_base 15: mod_base = OTHER; note = Cytosine phosphorothiorate
  modified_base 27: mod_base = OTHER; note = 2'-Omethyluridine
  modified_base 44: mod_base = OTHER; note = 2'-fluoroguanosine
  modified_base 50: mod_base = OTHER; note = Uridine phosphorothiorate
  modified_base 64: mod_base = OTHER; note = Cytosine phosphorothiorate
  modified_base 73: mod_base = OTHER; note = 2'-Omethylcytosine phosphorothiorate

SEQ ID NO: 4290 - RNA, 85 nt, synthetic construct; identical to SEQ ID NO: 3301
  source 1..85: mol_type = other RNA
  modified_base 1: mod_base = OTHER; note = 2'-Omethylguanosine phosphorothiorate
  modified_base 2: mod_base = OTHER; note = 2'-Omethylcytosine phosphorothiorate
  modified_base 4: mod_base = OTHER; note = 2'-Omethylguanosine phosphorothiorate
  modified_base 11: mod_base = OTHER; note = 2'-fluorocytosine
  modified_base 18: mod_base = OTHER; note = 2'-fluoroguanosine
  modified_base 19: mod_base = OTHER; note = 2'-Omethyluridine
  modified_base 22: mod_base = OTHER; note = 2'-fluoroadenosine
  modified_base 27: mod_base = OTHER; note = 2'-fluorouridine phosphorothiorate
  modified_base 34: mod_base = OTHER; note = 2'-fluorouridine
  modified_base 39: mod_base = OTHER; note = Uridine phosphorothiorate
  modified_base 44: mod_base = OTHER; note = 2'-Omethyluridine
  modified_base 46: mod_base = OTHER; note = 2'-Omethylguanosine
  modified_base 56: mod_base = OTHER; note = Guanosine phosphorothiorate
  modified_base 57: mod_base = OTHER; note = 2'-Omethylcytosine
  modified_base 59: mod_base = OTHER; note = Cytosine phosphorothiorate
  modified_base 70: mod_base = OTHER; note = 2'-Omethylcytosine phosphorothiorate
  modified_base 73: mod_base = OTHER; note = 2'-fluoroguanosine
  modified_base 82: mod_base = OTHER; note = Guanosine phosphorothiorate

SEQ ID NO: 4291 - RNA, 76 nt, synthetic construct; identical to SEQ ID NO: 625
  source 1..76: mol_type = other RNA
  modified_base 1: mod_base = OTHER; note = 2'-Omethylguanosine phosphorothiorate
  modified_base 2: mod_base = OTHER; note = 2'-Omethylguanosine
  modified_base 13: mod_base = OTHER; note = 2'-Omethylcytosine
  modified_base 33: mod_base = OTHER; note = 2'-fluorouridine
  modified_base 35: mod_base = OTHER; note = Cytosine phosphorothiorate
  modified_base 37: mod_base = OTHER; note = Adenosine phosphorothiorate
  modified_base 38: mod_base = OTHER; note = Adenosine phosphorothiorate
  modified_base 52: mod_base = OTHER; note = 2'-Omethylguanosine
  modified_base 56: mod_base = OTHER; note = 2'-Omethylcytosine
  modified_base 62: mod_base = OTHER; note = 2'-Omethylcytosine
  modified_base 65: mod_base = OTHER; note = 2'-Omethylguanosine
  modified_base 73: mod_base = OTHER; note = 2'-Omethylguanosine
  modified_base 75: mod_base = OTHER; note = 2'-fluorocytosine phosphorothiorate

SEQ ID NO: 4292 - RNA, 76 nt, synthetic construct; identical to SEQ ID NO: 625
  source 1..76: mol_type = other RNA
  modified_base 54: mod_base = OTHER; note = Thymine
  modified_base 55: mod_base = OTHER; note = Thymine

SEQ ID NO: 4293 - RNA, 75 nt, synthetic construct; identical to SEQ ID NO: 1045
  source 1..75: mol_type = other RNA
  modified_base 1: mod_base = OTHER; note = 2'-Omethylguanosine phosphorothiorate
  modified_base 2: mod_base = OTHER; note = 2'-Omethylguanosine phosphorothiorate
  modified_base 11: mod_base = OTHER; note = Uridine phosphorothiorate
  modified_base 12: mod_base = OTHER; note = Guanosine phosphorothiorate
  modified_base 18: mod_base = OTHER; note = Guanosine phosphorothiorate
  modified_base 19: mod_base = OTHER; note = 2'-fluorouridine
  modified_base 22: mod_base = OTHER; note = 2'-fluoroguanosine phosphorothiorate
  modified_base 34: mod_base = OTHER; note = 2'-fluorouridine
  modified_base 35: mod_base = OTHER; note = 2'-fluorouridine phosphorothiorate
  modified_base 36: mod_base = OTHER; note = 2'-fluoroadenosine
  modified_base 55: mod_base = OTHER; note = 2'-Omethylcytosine
  modified_base 66: mod_base = OTHER; note = 2'-fluoroguanosine
  modified_base 69: mod_base = OTHER; note = 2'-fluoroadenosine
  modified_base 73: mod_base = OTHER; note = Cytosine phosphorothiorate
  modified_base 74: mod_base = OTHER; note = 2'-fluorocytosine phosphorothiorate

SEQ ID NO: 4294 - RNA, 75 nt, synthetic construct; identical to SEQ ID NO: 3311
  source 1..75: mol_type = other RNA
  modified_base 1: mod_base = OTHER; note = Guanosine phosphorothiorate
  modified_base 2: mod_base = OTHER; note = 2'-Omethylguanosine phosphorothiorate
  modified_base 15: mod_base = OTHER; note = 2'-fluoroadenosine
  modified_base 16: mod_base = OTHER; note = 2'-fluorouridine phosphorothiorate
  modified_base 17: mod_base = OTHER; note = Guanosine phosphorothiorate
  modified_base 27: mod_base = OTHER; note = Cytosine phosphorothiorate
  modified_base 28: mod_base = OTHER; note = 2'-fluorouridine
  modified_base 29: mod_base = OTHER; note = 2'-Omethylguanosine
  modified_base 39: mod_base = OTHER; note = Uridine phosphorothiorate
  modified_base 40: mod_base = OTHER; note = 2'-fluorocytosine
  modified_base 44: mod_base = OTHER; note = 2'-fluorocytosine phosphorothiorate
  modified_base 45: mod_base = OTHER; note = 2'-fluoroguanosine
  modified_base 51: mod_base = OTHER; note = 2'-fluoroadenosine phosphorothiorate
  modified_base 56: mod_base = OTHER; note = 2'-Omethylguanosine
  modified_base 60: mod_base = OTHER; note = 2'-fluorocytosine
  modified_base 64: mod_base = OTHER; note = 2'-fluoroguanosine
  modified_base 67: mod_base = OTHER; note = 2'-fluoroguanosine
  modified_base 71: mod_base = OTHER; note = 2'-fluorocytosine phosphorothiorate
  modified_base 74: mod_base = OTHER; note = Cytosine phosphorothiorate

SEQ ID NO: 4295 - RNA, 76 nt, synthetic construct; identical to SEQ ID NO: 625
  source 1..76: mol_type = other RNA
  modified_base 1: mod_base = OTHER; note = 2'-Omethylguanosine
  modified_base 17: mod_base = OTHER; note = 2'-Omethylguanosine
  modified_base 18: mod_base = OTHER; note = 2'-Omethylguanosine
  modified_base 50: mod_base = OTHER; note = 2'-Omethylcytosine
  modified_base 52: mod_base = OTHER; note = 2'-Omethylguanosine
  modified_base 54: mod_base = OTHER; note = Thymine
  modified_base 73: mod_base = OTHER; note = 2'-Omethylguanosine

SEQ ID NO: 4296 - RNA, 76 nt, synthetic construct; identical to SEQ ID NO: 3615
  source 1..76: mol_type = other RNA
  modified_base 1: mod_base = OTHER; note = 2'-Omethylguanosine phosphorothiorate
  modified_base 2: mod_base = OTHER; note = 2'-Omethylguanosine phosphorothiorate
  modified_base 74: mod_base = OTHER; note = Cytosine phosphorothiorate
  modified_base 75: mod_base = OTHER; note = 2'-Omethylcytosine

SEQ ID NO: 4297 - RNA, 75 nt, synthetic construct; identical to SEQ ID NO: 3311
  source 1..75: mol_type = other RNA
  modified_base 1: mod_base = OTHER; note = 2'-fluoroguanosine phosphorothiorate
  modified_base 2: mod_base = OTHER; note = 2'-Omethylguanosine phosphorothiorate
  modified_base 11: mod_base = OTHER; note = Uridine phosphorothiorate
  modified_base 12: mod_base = OTHER; note = Guanosine phosphorothiorate
  modified_base 26: mod_base = OTHER; note = 2'-fluorouridine phosphorothiorate
  modified_base 37: mod_base = OTHER; note = 2'-fluoroadenosine
  modified_base 40: mod_base = OTHER; note = 2'-Omethylcytosine
  modified_base 51: mod_base = OTHER; note = 2'-fluoroadenosine phosphorothiorate
  modified_base 66: mod_base = OTHER; note = Guanosine phosphorothiorate
  modified_base 67: mod_base = OTHER; note = 2'-fluoroguanosine
  modified_base 72: mod_base = OTHER; note = Uridine phosphorothiorate
  modified_base 73: mod_base = OTHER; note = 2'-fluorocytosine phosphorothiorate

SEQ ID NO: 4298 - RNA, 86 nt, synthetic construct; identical to SEQ ID NO: 3290
  source 1..86: mol_type = other RNA
  modified_base 27: mod_base = OTHER; note = Uridine phosphorothiorate

SEQ ID NO: 4299 - DNA, 76 bp, synthetic construct; identical to SEQ ID NO: 1924
  source 1..76: mol_type = other DNA
  misc_feature 1..9: note = RNA
  misc_feature 10..13: note = DNA
  misc_feature 14..76: note = RNA

SEQ ID NO: 4300 - RNA, 76 nt, synthetic construct; identical to SEQ ID NO: 625
  source 1..76: mol_type = other RNA
  modified_base 1: mod_base = OTHER; note = 2'-Omethylguanosine
  modified_base 4: mod_base = OTHER; note = 2'-fluorouridine
  modified_base 6: mod_base = OTHER; note = 2'-fluorocytosine
  modified_base 10: mod_base = OTHER; note = 2'-Omethylguanosine
  modified_base 12: mod_base = OTHER; note = 2'-fluoroguanosine
  modified_base 13: mod_base = OTHER; note = Cytosine phosphorothiorate
  modified_base 19: mod_base = OTHER; note = Adenosine phosphorothiorate
  modified_base 24: mod_base = OTHER; note = Guanosine phosphorothiorate
  modified_base 25: mod_base = OTHER; note = 2'-fluorocytosine
  modified_base 27: mod_base = OTHER; note = 2'-fluorouridine phosphorothiorate
  modified_base 28: mod_base = OTHER; note = 2'-fluorouridine
  modified_base 30: mod_base = OTHER; note = Guanosine phosphorothiorate
  modified_base 31: mod_base = OTHER; note = 2'-fluoroadenosine
  modified_base 34: mod_base = OTHER; note = 2'-Omethyluridine phosphorothiorate
  modified_base 36: mod_base = OTHER; note = Adenosine phosphorothiorate
  modified_base 38: mod_base = OTHER; note = Adenosine phosphorothiorate
  modified_base 39: mod_base = OTHER; note = Uridine phosphorothiorate
  modified_base 40: mod_base = OTHER; note = 2'-Omethyluridine
  modified_base 41: mod_base = OTHER; note = 2'-Omethylcytosine
  modified_base 47: mod_base = OTHER; note = 2'-Omethyluridine
  modified_base 48: mod_base = OTHER; note = 2'-Omethyluridine phosphorothiorate
  modified_base 50: mod_base = OTHER; note = 2'-Omethylcytosine
  modified_base 51: mod_base = OTHER; note = 2'-Omethylguanosine
  modified_base 52: mod_base = OTHER; note = 2'-fluoroguanosine
  modified_base 54: mod_base = OTHER; note = Uridine phosphorothiorate
  modified_base 59: mod_base = OTHER; note = 2'-Omethylguanosine
  modified_base 61: mod_base = OTHER; note = 2'-fluorocytosine
  modified_base 63: mod_base = OTHER; note = 2'-fluorocytosine
  modified_base 70: mod_base = OTHER; note = 2'-fluoroguanosine
  modified_base 71: mod_base = OTHER; note = 2'-Omethyluridine
  modified_base 73: mod_base = OTHER; note = 2'-fluoroguanosine
  modified_base 74: mod_base = OTHER; note = 2'-fluorocytosine phosphorothiorate
  modified_base 76: mod_base = OTHER; note = 2'-fluoroadenosine

SEQ ID NO: 4301 - RNA, 76 nt, synthetic construct; identical to SEQ ID NO: 625
  source 1..76: mol_type = other RNA
  modified_base 1: mod_base = OTHER; note = 2'-Omethylguanosine
  modified_base 2: mod_base = OTHER; note = 2'-Omethylguanosine
  modified_base 3: mod_base = OTHER; note = 2'-Omethylcytosine
  modified_base 4: mod_base = OTHER; note = 2'-Omethyluridine
  modified_base 5: mod_base = OTHER; note = 2'-Omethylcytosine
  modified_base 6: mod_base = OTHER; note = 2'-Omethylcytosine
  modified_base 10: mod_base = OTHER; note = 2'-Omethylguanosine
  modified_base 11: mod_base = OTHER; note = 2'-Omethylcytosine
  modified_base 12: mod_base = OTHER; note = 2'-Omethylguanosine
  modified_base 13: mod_base = OTHER; note = 2'-Omethylcytosine
  modified_base 14: mod_base = OTHER; note = 2'-Omethyladenosine
  modified_base 15: mod_base = OTHER; note = 2'-fluoroadenosine
  modified_base 16: mod_base = OTHER; note = 2'-Omethyluridine
  modified_base 17: mod_base = OTHER; note = 2'-Omethylguanosine
  modified_base 18: mod_base = OTHER; note = 2'-Omethylguanosine
  modified_base 19: mod_base = OTHER; note = 2'-fluoroadenosine
  modified_base 20: mod_base = OTHER; note = 2'-Omethyluridine
  modified_base 22: mod_base = OTHER; note = 2'-Omethylguanosine
  modified_base 23: mod_base = OTHER; note = 2'-Omethylcytosine
  modified_base 24: mod_base = OTHER; note = 2'-Omethylguanosine
  modified_base 25: mod_base = OTHER; note = 2'-Omethylcytosine
  modified_base 38: mod_base = OTHER; note = Adenosine phosphorothiorate
  modified_base 39: mod_base = OTHER; note = Uridine phosphorothiorate
  modified_base 40: mod_base = OTHER; note = 2'-fluorouridine
  modified_base 43: mod_base = OTHER; note = 2'-Omethyladenosine
  modified_base 44: mod_base = OTHER; note = 2'-Omethyladenosine
  modified_base 45: mod_base = OTHER; note = 2'-Omethylguanosine
  modified_base 46: mod_base = OTHER; note = 2'-fluoroguanosine
  modified_base 48: mod_base = OTHER; note = 2'-fluorouridine
  modified_base 49: mod_base = OTHER; note = 2'-Omethylcytosine
  modified_base 50: mod_base = OTHER; note = 2'-Omethylcytosine
  modified_base 51: mod_base = OTHER; note = 2'-Omethylguanosine
  modified_base 52: mod_base = OTHER; note = 2'-Omethylguanosine
  modified_base 53: mod_base = OTHER; note = 2'-Omethylguanosine
  modified_base 54: mod_base = OTHER; note = 2'-Omethyluridine
  modified_base 61: mod_base = OTHER; note = 2'-Omethylcytosine
  modified_base 62: mod_base = OTHER; note = 2'-Omethylcytosine
  modified_base 63: mod_base = OTHER; note = 2'-fluorocytosine
  modified_base 64: mod_base = OTHER; note = 2'-Omethylguanosine
  modified_base 65: mod_base = OTHER; note = 2'-Omethylguanosine
  modified_base 66: mod_base = OTHER; note = 2'-Omethylcytosine
  modified_base 67: mod_base = OTHER; note = 2'-Omethylguanosine
  modified_base 68: mod_base = OTHER; note = 2'-Omethylguanosine
  modified_base 69: mod_base = OTHER; note = 2'-fluoroadenosine

SEQ ID NO: 4302 - RNA, 84 nt, synthetic construct
  source 1..84: mol_type = other RNA
gctgtgatggccgagtggttaaggcgttggacttcaaatccaatggggtctcccgcgcaggttcaaatcctgctcacagcgcca

SEQ ID NO: 4303 - RNA, 76 nt, synthetic construct; identical to SEQ ID NO: 3795
  source 1..76: mol_type = other RNA
  modified_base 1: mod_base = OTHER; note = 2'-Omethylguanosine phosphorothiorate
  modified_base 2: mod_base = OTHER; note = 2'-Omethylcytosine phosphorothiorate
  modified_base 3: mod_base = OTHER; note = 2'-Omethylcytosine
  modified_base 4: mod_base = OTHER; note = 2'-Omethyluridine
  modified_base 5: mod_base = OTHER; note = 2'-Omethylcytosine
  modified_base 6: mod_base = OTHER; note = 2'-Omethylcytosine
  modified_base 10: mod_base = OTHER; note = 2'-Omethylguanosine
  modified_base 11: mod_base = OTHER; note = 2'-Omethylcytosine
  modified_base 12: mod_base = OTHER; note = 2'-Omethylcytosine
  modified_base 13: mod_base = OTHER; note = 2'-Omethyluridine
  modified_base 22: mod_base = OTHER; note = 2'-Omethyladenosine
  modified_base 23: mod_base = OTHER; note = 2'-Omethylguanosine
  modified_base 24: mod_base = OTHER; note = 2'-Omethylguanosine
  modified_base 25: mod_base = OTHER; note = 2'-Omethylcytosine
  modified_base 49: mod_base = OTHER; note = 2'-Omethylguanosine
  modified_base 50: mod_base = OTHER; note = 2'-Omethylcytosine
  modified_base 51: mod_base = OTHER; note = 2'-Omethylguanosine
  modified_base 52: mod_base = OTHER; note = 2'-Omethylguanosine
  modified_base 53: mod_base = OTHER; note = 2'-Omethylguanosine
  modified_base 54: mod_base = OTHER; note = 2'-Omethyluridine
  modified_base 61: mod_base = OTHER; note = 2'-Omethylcytosine
  modified_base 62: mod_base = OTHER; note = 2'-Omethylcytosine
  modified_base 63: mod_base = OTHER; note = 2'-fluorocytosine
  modified_base 64: mod_base = OTHER; note = 2'-Omethylguanosine
  modified_base 65: mod_base = OTHER; note = 2'-Omethyluridine
  modified_base 66: mod_base = OTHER; note = 2'-Omethylcytosine
  modified_base 67: mod_base = OTHER; note = 2'-Omethylguanosine
  modified_base 68: mod_base = OTHER; note = 2'-Omethylguanosine
  modified_base 73: mod_base = OTHER; note = 2'-Omethylguanosine

SEQ ID NO: 4304 - RNA, 85 nt, synthetic construct; identical to SEQ ID NO: 3286
  source 1..85: mol_type = other RNA
  modified_base 1: mod_base = OTHER; note = 2'-Omethylcytosine
  modified_base 19: mod_base = OTHER; note = 2'-Omethyluridine
  modified_base 25: mod_base = OTHER; note = Guanosine phosphorothiorate
  modified_base 26: mod_base = OTHER; note = 2'-fluorouridine
  modified_base 30: mod_base = OTHER; note = 2'-Omethyladenosine phosphorothiorate
  modified_base 33: mod_base = OTHER; note = 2'-fluorouridine
  modified_base 34: mod_base = OTHER; note = Uridine phosphorothiorate
  modified_base 38: mod_base = OTHER; note = Uridine phosphorothiorate
  modified_base 44: mod_base = OTHER; note = 2'-Omethylguanosine
  modified_base 49: mod_base = OTHER; note = 2'-Omethyluridine
  modified_base 51: mod_base = OTHER; note = Uridine phosphorothiorate
  modified_base 56: mod_base = OTHER; note = 2'-fluoroguanosine phosphorothiorate
  modified_base 57: mod_base = OTHER; note = 2'-Omethylcytosine
  modified_base 59: mod_base = OTHER; note = Uridine phosphorothiorate
  modified_base 67: mod_base = OTHER; note = 2'-fluoroadenosine phosphorothiorate
  modified_base 84: mod_base = OTHER; note = Cytosine phosphorothiorate

SEQ ID NO: 4305 - RNA, 75 nt, synthetic construct; identical to SEQ ID NO: 3306
  source 1..75: mol_type = other RNA
  modified_base 1: mod_base = OTHER; note = 2'-Omethylguanosine
  modified_base 2: mod_base = OTHER; note = 2'-Omethyladenosine
  modified_base 3: mod_base = OTHER; note = 2'-Omethylcytosine
  modified_base 4: mod_base = OTHER; note = 2'-Omethylcytosine
  modified_base 5: mod_base = OTHER; note = 2'-Omethyluridine
  modified_base 6: mod_base = OTHER; note = 2'-Omethylcytosine
  modified_base 10: mod_base = OTHER; note = 2'-Omethylguanosine
  modified_base 11: mod_base = OTHER; note = 2'-Omethylcytosine
  modified_base 12: mod_base = OTHER; note = 2'-Omethylguanosine
  modified_base 13: mod_base = OTHER; note = 2'-Omethylcytosine
  modified_base 48: mod_base = OTHER; note = 2'-Omethylguanosine
  modified_base 49: mod_base = OTHER; note = 2'-Omethylcytosine
  modified_base 50: mod_base = OTHER; note = 2'-Omethylguanosine
  modified_base 51: mod_base = OTHER; note = 2'-Omethyluridine
  modified_base 52: mod_base = OTHER; note = 2'-Omethylguanosine

SEQ ID NO: 4306 - RNA, 75 nt, synthetic construct; identical to SEQ ID NO: 3299
  source 1..75: mol_type = other RNA
  modified_base 19: mod_base = OTHER; note = 2'-fluorouridine
  modified_base 20: mod_base = OTHER; note = 2'-fluoroadenosine
  modified_base 27: mod_base = OTHER; note = 2'-fluorocytosine
  modified_base 38: mod_base = OTHER; note = Uridine phosphorothiorate
  modified_base 47: mod_base = OTHER; note = Cytosine phosphorothiorate
  modified_base 51: mod_base = OTHER; note = Guanosine phosphorothiorate
  modified_base 53: mod_base = OTHER; note = 2'-fluorouridine
  modified_base 59: mod_base = OTHER; note = 2'-Omethyluridine phosphorothiorate
  modified_base 73: mod_base = OTHER; note = Cytosine phosphorothiorate
  modified_base 74: mod_base = OTHER; note = Cytosine phosphorothiorate

SEQ ID NO: 4307 - RNA, 76 nt, synthetic construct; identical to SEQ ID NO: 3325
  source 1..76: mol_type = other RNA
  modified_base 1: mod_base = OTHER; note = 2'-Omethyluridine
  modified_base 2: mod_base = OTHER; note = 2'-Omethyladenosine
  modified_base 3: mod_base = OTHER; note = 2'-Omethylcytosine
  modified_base 4: mod_base = OTHER; note = 2'-Omethyladenosine
  modified_base 5: mod_base = OTHER; note = 2'-Omethylcytosine
  modified_base 6: mod_base = OTHER; note = 2'-Omethylcytosine
  modified_base 10: mod_base = OTHER; note = 2'-Omethylguanosine
  modified_base 11: mod_base = OTHER; note = 2'-Omethylcytosine
  modified_base 12: mod_base = OTHER; note = 2'-Omethylguanosine
  modified_base 13: mod_base = OTHER; note = 2'-Omethylcytosine
  modified_base 16: mod_base = OTHER; note = 2'-Omethyluridine
  modified_base 17: mod_base = OTHER; note = 2'-Omethylguanosine
  modified_base 18: mod_base = OTHER; note = 2'-Omethylguanosine
  modified_base 20: mod_base = OTHER; note = 2'-Omethyluridine
  modified_base 25: mod_base = OTHER; note = 2'-Omethylcytosine
  modified_base 33: mod_base = OTHER; note = 2'-fluorouridine
  modified_base 35: mod_base = OTHER; note = Cytosine phosphorothiorate
  modified_base 37: mod_base = OTHER; note = Adenosine phosphorothiorate
  modified_base 38: mod_base = OTHER; note = Adenosine phosphorothiorate
  modified_base 41: mod_base = OTHER; note = 2'-fluorocytosine
  modified_base 42: mod_base = OTHER; note = 2'-Omethyladenosine
  modified_base 43: mod_base = OTHER; note = 2'-Omethyladenosine
  modified_base 44: mod_base = OTHER; note = 2'-fluoroadenosine
  modified_base 49: mod_base = OTHER; note = 2'-Omethylcytosine
  modified_base 50: mod_base = OTHER; note = 2'-Omethylcytosine
  modified_base 52: mod_base = OTHER; note = 2'-Omethylguanosine
  modified_base 54: mod_base = OTHER; note = 2'-Omethyluridine
  modified_base 55: mod_base = OTHER; note = Uridine phosphorothiorate
  modified_base 56: mod_base = OTHER; note = 2'-Omethylcytosine
  modified_base 57: mod_base = OTHER; note = 2'-fluoroguanosine
  modified_base 59: mod_base = OTHER; note = 2'-Omethylguanosine
  modified_base 61: mod_base = OTHER; note = 2'-Omethylcytosine
  modified_base 65: mod_base = OTHER; note = 2'-Omethylguanosine
  modified_base 73: mod_base = OTHER; note = 2'-Omethylguanosine

SEQ ID NO: 4308 - RNA, 74 nt, synthetic construct; identical to SEQ ID NO: 3293
  source 1..74: mol_type = other RNA
  modified_base 2: mod_base = OTHER; note = 2'-Omethylcytosine
  modified_base 4: mod_base = OTHER; note = Uridine phosphorothiorate
  modified_base 8: mod_base = OTHER; note = Guanosine phosphorothiorate
  modified_base 10: mod_base = OTHER; note = Cytosine phosphorothiorate
  modified_base 11: mod_base = OTHER; note = 2'-Omethylguanosine phosphorothiorate
  modified_base 36: mod_base = OTHER; note = 2'-fluoroadenosine
  modified_base 46: mod_base = OTHER; note = Uridine phosphorothiorate
  modified_base 48: mod_base = OTHER; note = Cytosine phosphorothiorate
  modified_base 73: mod_base = OTHER; note = 2'-Omethylcytosine phosphorothiorate

SEQ ID NO: 4309 - RNA, 76 nt, synthetic construct; identical to SEQ ID NO: 3318
  source 1..76: mol_type = other RNA
  modified_base 1: mod_base = OTHER; note = 2'-Omethylcytosine
  modified_base 10: mod_base = OTHER; note = 2'-Omethylguanosine
  modified_base 11: mod_base = OTHER; note = 2'-Omethylcytosine
  modified_base 12: mod_base = OTHER; note = 2'-Omethyluridine
  modified_base 13: mod_base = OTHER; note = 2'-Omethylcytosine
  modified_base 18: mod_base = OTHER; note = 2'-Omethylguanosine
  modified_base 19: mod_base = OTHER; note = 2'-Omethylguanosine
  modified_base 25: mod_base = OTHER; note = 2'-Omethylcytosine
  modified_base 33: mod_base = OTHER; note = Uridine phosphorothiorate
  modified_base 34: mod_base = OTHER; note = 2'-Omethylcytosine
  modified_base 35: mod_base = OTHER; note = Uridine phosphorothiorate
  modified_base 37: mod_base = OTHER; note = Guanosine phosphorothiorate
  modified_base 38: mod_base = OTHER; note = Adenosine phosphorothiorate
  modified_base 41: mod_base = OTHER; note = 2'-fluorocytosine
  modified_base 42: mod_base = OTHER; note = 2'-Omethyluridine
  modified_base 43: mod_base = OTHER; note = 2'-Omethyluridine
  modified_base 44: mod_base = OTHER; note = 2'-fluoroadenosine
  modified_base 49: mod_base = OTHER; note = 2'-Omethylguanosine
  modified_base 50: mod_base = OTHER; note = 2'-Omethylcytosine
  modified_base 52: mod_base = OTHER; note = 2'-Omethylguanosine
  modified_base 54: mod_base = OTHER; note = Uridine phosphorothiorate
  modified_base 55: mod_base = OTHER; note = Uridine phosphorothiorate
  modified_base 61: mod_base = OTHER; note = 2'-Omethylcytosine
  modified_base 65: mod_base = OTHER; note = 2'-Omethylcytosine
  modified_base 73: mod_base = OTHER; note = 2'-Omethyladenosine

SEQ ID NO: 4310 - RNA, 85 nt, synthetic construct; identical to SEQ ID NO: 3317
  source 1..85: mol_type = other RNA
  modified_base 1: mod_base = OTHER; note = 2'-Omethylguanosine phosphorothiorate
  modified_base 4: mod_base = OTHER; note = Guanosine phosphorothiorate
  modified_base 6: mod_base = OTHER; note = 2'-fluoroguanosine
  modified_base 10: mod_base = OTHER; note = 2'-Omethylguanosine phosphorothiorate
  modified_base 16: mod_base = OTHER; note = 2'-Omethyluridine phosphorothiorate
  modified_base 25: mod_base = OTHER; note = 2'-fluorocytosine
  modified_base 28: mod_base = OTHER; note = 2'-fluorouridine
  modified_base 29: mod_base = OTHER; note = 2'-fluoroguanosine
  modified_base 36: mod_base = OTHER; note = 2'-fluoroadenosine
  modified_base 46: mod_base = OTHER; note = Guanosine phosphorothiorate
  modified_base 48: mod_base = OTHER; note = 2'-Omethylguanosine phosphorothiorate
  modified_base 61: mod_base = OTHER; note = Guanosine phosphorothiorate
  modified_base 63: mod_base = OTHER; note = Uridine phosphorothiorate
  modified_base 81: mod_base = OTHER; note = Cytosine phosphorothiorate

SEQ ID NO: 4311 - RNA, 86 nt, synthetic construct; identical to SEQ ID NO: 3290
  source 1..86: mol_type = other RNA
  modified_base 60: mod_base = OTHER; note = 2'-Omethyluridine
  modified_base 83: mod_base = OTHER; note = 2'-Omethyladenosine

SEQ ID NO: 4312 - RNA, 76 nt, synthetic construct; identical to SEQ ID NO: 625
  source 1..76: mol_type = other RNA
  modified_base 1: mod_base = OTHER; note = 2'-Omethylguanosine
  modified_base 2: mod_base = OTHER; note = 2'-Omethylguanosine
  modified_base 3: mod_base = OTHER; note = 2'-Omethylcytosine
  modified_base 4: mod_base = OTHER; note = 2'-Omethyluridine
  modified_base 5: mod_base = OTHER; note = 2'-Omethylcytosine
  modified_base 6: mod_base = OTHER; note = 2'-Omethylcytosine
  modified_base 10: mod_base = OTHER; note = 2'-Omethylguanosine
  modified_base 11: mod_base = OTHER; note = 2'-Omethylcytosine
  modified_base 12: mod_base = OTHER; note = 2'-Omethylguanosine
  modified_base 13: mod_base = OTHER; note = 2'-Omethylcytosine
  modified_base 14: mod_base = OTHER; note = 2'-Omethyladenosine
  modified_base 15: mod_base = OTHER; note = 2'-fluoroadenosine
  modified_base 16: mod_base = OTHER; note = 2'-Omethyluridine
  modified_base 17: mod_base = OTHER; note = 2'-Omethylguanosine
  modified_base 18: mod_base = OTHER; note = 2'-Omethylguanosine
  modified_base 19: mod_base = OTHER; note = 2'-fluoroadenosine
  modified_base 20: mod_base = OTHER; note = 2'-Omethyluridine
  modified_base 21: mod_base = OTHER; note = 2'-fluoroadenosine
  modified_base 40: mod_base = OTHER; note = 2'-fluorouridine
  modified_base 41: mod_base = OTHER; note = 2'-fluorocytosine
  modified_base 42: mod_base = OTHER; note = 2'-fluoroadenosine
  modified_base 43: mod_base = OTHER; note = 2'-fluoroadenosine
  modified_base 49: mod_base = OTHER; note = 2'-Omethylcytosine
  modified_base 50: mod_base = OTHER; note = 2'-Omethylcytosine
  modified_base 51: mod_base = OTHER; note = 2'-Omethylguanosine
  modified_base 52: mod_base = OTHER; note = 2'-Omethylguanosine
  modified_base 53: mod_base = OTHER; note = 2'-Omethylguanosine
  modified_base 54: mod_base = OTHER; note = Uridine phosphorothiorate
  modified_base 55: mod_base = OTHER; note = Uridine phosphorothiorate
  modified_base 56: mod_base = OTHER; note = Cytosine phosphorothiorate
  modified_base 57: mod_base = OTHER; note = Guanosine phosphorothiorate
  modified_base 73: mod_base = OTHER; note = 2'-Omethylguanosine

SEQ ID NO: 4313 - DNA, 76 bp, synthetic construct; identical to SEQ ID NO: 1924
  source 1..76: mol_type = other DNA
  modified_base 1: mod_base = OTHER; note = 2'-Omethylguanosine phosphorothiorate
  modified_base 2: mod_base = OTHER; note = 2'-Omethylguanosine
  modified_base 3: mod_base = OTHER; note = 2'-Omethylcytosine
  modified_base 4: mod_base = OTHER; note = 2'-Omethyluridine
  modified_base 5: mod_base = OTHER; note = 2'-Omethylcytosine
  modified_base 6: mod_base = OTHER; note = 2'-Omethylcytosine
  modified_base 13: mod_base = OTHER; note = 2'-Omethylcytosine
  modified_base 14: mod_base = OTHER; note = 2'-Omethyladenosine
  modified_base 15: mod_base = OTHER; note = 2'-fluoroadenosine
  modified_base 16: mod_base = OTHER; note = 2'-fluorouridine
  modified_base 17: mod_base = OTHER; note = 2'-Omethylguanosine
  modified_base 18: mod_base = OTHER; note = 2'-Omethylguanosine
  modified_base 19: mod_base = OTHER; note = 2'-fluoroadenosine
  modified_base 20: mod_base = OTHER; note = 2'-Omethyluridine
  modified_base 21: mod_base = OTHER; note = Adenosine phosphorothiorate
  modified_base 25: mod_base = OTHER; note = 2'-Omethylcytosine
  modified_base 29: mod_base = OTHER; note = 2'-Omethylguanosine
  modified_base 33: mod_base = OTHER; note = 2'-fluorouridine
  modified_base 35: mod_base = OTHER; note = Cytosine phosphorothiorate
  modified_base 37: mod_base = OTHER; note = Adenosine phosphorothiorate
  modified_base 38: mod_base = OTHER; note = Adenosine phosphorothiorate
  modified_base 41: mod_base = OTHER; note = 2'-fluorocytosine phosphorothiorate
  modified_base 43: mod_base = OTHER; note = 2'-Omethyladenosine
  modified_base 44: mod_base = OTHER; note = Adenosine phosphorothiorate
  modified_base 45: mod_base = OTHER; note = 2'-fluoroguanosine
  modified_base 46: mod_base = OTHER; note = Guanosine phosphorothiorate
  modified_base 49: mod_base = OTHER; note = 2'-Omethylcytosine
  modified_base 50: mod_base = OTHER; note = 2'-Omethylcytosine
  modified_base 51: mod_base = OTHER; note = 2'-Omethylguanosine
  modified_base 52: mod_base = OTHER; note = 2'-Omethylguanosine
  modified_base 53: mod_base = OTHER; note = 2'-Omethylguanosine
  modified_base 54: mod_base = OTHER; note = 2'-Omethyluridine
  modified_base 55: mod_base = OTHER; note = Uridine phosphorothiorate
  modified_base 56: mod_base = OTHER; note = 2'-Omethylcytosine
  modified_base 57: mod_base = OTHER; note = 2'-fluoroguanosine
  modified_base 59: mod_base = OTHER; note = 2'-Omethylguanosine
  modified_base 61: mod_base = OTHER; note = 2'-Omethylcytosine
  modified_base 62: mod_base = OTHER; note = 2'-Omethylcytosine
  modified_base 63: mod_base = OTHER; note = 2'-fluorocytosine
  modified_base 64: mod_base = OTHER; note = 2'-Omethylguanosine
  modified_base 65: mod_base = OTHER; note = 2'-Omethylguanosine
  modified_base 66: mod_base = OTHER; note = 2'-Omethylcytosine
  modified_base 67: mod_base = OTHER; note = 2'-Omethylguanosine
  modified_base 68: mod_base = OTHER; note = 2'-Omethylguanosine
  modified_base 69: mod_base = OTHER; note = 2'-fluoroadenosine
  modified_base 71: mod_base = OTHER; note = 2'-Omethyluridine
  modified_base 73: mod_base = OTHER; note = 2'-Omethylguanosine
  modified_base 74: mod_base = OTHER; note = 2'-fluorocytosine phosphorothiorate
  modified_base 75: mod_base = OTHER; note = 2'-Omethylcytosine
  misc_feature 1..21: note = RNA
  misc_feature 22: note = DNA
  misc_feature 23..76: note = RNA

SEQ ID NO: 4314 - RNA, 75 nt, synthetic construct; identical to SEQ ID NO: 1045
  source 1..75: mol_type = other RNA
  modified_base 1: mod_base = OTHER; note = 2'-Omethylguanosine phosphorothiorate
  modified_base 2: mod_base = OTHER; note = 2'-Omethylguanosine
  modified_base 6: mod_base = OTHER; note = 2'-fluorocytosine phosphorothiorate
  modified_base 16: mod_base = OTHER; note = 2'-fluorouridine
  modified_base 18: mod_base = OTHER; note = 2'-fluoroguanosine
  modified_base 19: mod_base = OTHER; note = Uridine phosphorothiorate
  modified_base 21: mod_base = OTHER; note = 2'-Omethyladenosine
  modified_base 22: mod_base = OTHER; note = Guanosine phosphorothiorate
  modified_base 23: mod_base = OTHER; note = 2'-fluorocytosine
  modified_base 25: mod_base = OTHER; note = 2'-fluorocytosine phosphorothiorate
  modified_base 29: mod_base = OTHER; note = 2'-fluoroguanosine
  modified_base 30: mod_base = OTHER; note = 2'-fluoroguanosine
  modified_base 38: mod_base = OTHER; note = 2'-fluoroadenosine
  modified_base 44: mod_base = OTHER; note = 2'-fluorocytosine
  modified_base 50: mod_base = OTHER; note = 2'-fluoroguanosine
  modified_base 61: mod_base = OTHER; note = Uridine phosphorothiorate
  modified_base 63: mod_base = OTHER; note = 2'-fluoroguanosine
  modified_base 65: mod_base = OTHER; note = Uridine phosphorothiorate
  modified_base 66: mod_base = OTHER; note = 2'-fluoroguanosine
  modified_base 67: mod_base = OTHER; note = Guanosine phosphorothiorate
  modified_base 69: mod_base = OTHER; note = Adenosine phosphorothiorate
  modified_base 73: mod_base = OTHER; note = Cytosine phosphorothiorate

SEQ ID NO: 4315 - RNA, 75 nt, synthetic construct; identical to SEQ ID NO: 3306
  source 1..75: mol_type = other RNA
  modified_base 1: mod_base = OTHER; note = 2'-Omethylguanosine
  modified_base 10: mod_base = OTHER; note = 2'-Omethylguanosine
  modified_base 11: mod_base = OTHER; note = 2'-Omethylcytosine
  modified_base 12: mod_base = OTHER; note = 2'-Omethylguanosine
  modified_base 13: mod_base = OTHER; note = 2'-Omethylcytosine
  modified_base 14: mod_base = OTHER; note = 2'-Omethyladenosine
  modified_base 15: mod_base = OTHER; note = 2'-Omethyladenosine
  modified_base 16: mod_base = OTHER; note = 2'-Omethylcytosine
  modified_base 17: mod_base = OTHER; note = 2'-Omethylguanosine
  modified_base 18: mod_base = OTHER; note = 2'-Omethylguanosine
  modified_base 19: mod_base = OTHER; note = Uridine phosphorothiorate
  modified_base 20: mod_base = OTHER; note = Adenosine phosphorothiorate
  modified_base 21: mod_base = OTHER; note = 2'-Omethylguanosine
  modified_base 22: mod_base = OTHER; note = 2'-Omethylcytosine
  modified_base 23: mod_base = OTHER; note = 2'-Omethylguanosine
  modified_base 24: mod_base = OTHER; note = 2'-Omethylcytosine
  modified_base 40: mod_base = OTHER; note = 2'-Omethyladenosine
  modified_base 41: mod_base = OTHER; note = 2'-Omethylguanosine
  modified_base 42: mod_base = OTHER; note = 2'-Omethyladenosine
  modified_base 43: mod_base = OTHER; note = 2'-Omethyladenosine
  modified_base 48: mod_base = OTHER; note = 2'-Omethylguanosine
  modified_base 49: mod_base = OTHER; note = 2'-Omethylcytosine
  modified_base 51: mod_base = OTHER; note = 2'-Omethyluridine
  modified_base 53: mod_base = OTHER; note = Uridine phosphorothiorate
  modified_base 54: mod_base = OTHER; note = Uridine phosphorothiorate
  modified_base 60: mod_base = OTHER; note = 2'-Omethylcytosine
  modified_base 64: mod_base = OTHER; note = 2'-Omethyluridine
  modified_base 72: mod_base = OTHER; note = 2'-Omethyladenosine

SEQ ID NO: 4316 - RNA, 86 nt, synthetic construct; identical to SEQ ID NO: 3290
  source 1..86: mol_type = other RNA
  modified_base 1: mod_base = OTHER; note = 2'-Omethyladenosine
  modified_base 2: mod_base = OTHER; note = 2'-Omethylcytosine
  modified_base 3: mod_base = OTHER; note = 2'-Omethylcytosine
  modified_base 4: mod_base = OTHER; note = 2'-Omethyladenosine
  modified_base 5: mod_base = OTHER; note = 2'-Omethylguanosine
  modified_base 6: mod_base = OTHER; note = 2'-Omethylguanosine
  modified_base 59: mod_base = OTHER; note = 2'-Omethylguanosine
  modified_base 60: mod_base = OTHER; note = 2'-Omethyluridine
  modified_base 61: mod_base = OTHER; note = 2'-Omethylguanosine
  modified_base 62: mod_base = OTHER; note = 2'-Omethylguanosine
  modified_base 63: mod_base = OTHER; note = 2'-Omethylguanosine
  modified_base 64: mod_base = OTHER; note = 2'-Omethyluridine
  modified_base 71: mod_base = OTHER; note = 2'-Omethylcytosine
  modified_base 72: mod_base = OTHER; note = 2'-Omethylcytosine
  modified_base 73: mod_base = OTHER; note = 2'-fluorocytosine
  modified_base 74: mod_base = OTHER; note = 2'-Omethyladenosine
  modified_base 75: mod_base = OTHER; note = 2'-Omethylcytosine
  modified_base 76: mod_base = OTHER; note = 2'-Omethyluridine
  modified_base 77: mod_base = OTHER; note = 2'-Omethylcytosine
  modified_base 78: mod_base = OTHER; note = 2'-Omethylcytosine
  modified_base 83: mod_base = OTHER; note = 2'-Omethyladenosine

SEQ ID NO: 4317 - RNA, 75 nt, synthetic construct; identical to SEQ ID NO: 3336
  source 1..75: mol_type = other RNA
  modified_base 14: mod_base = OTHER; note = 2'-fluoroguanosine
  modified_base 19: mod_base = OTHER; note = 2'-Omethyluridine phosphorothiorate
  modified_base 25: mod_base = OTHER; note = Adenosine phosphorothiorate
  modified_base 27: mod_base = OTHER; note = Cytosine phosphorothiorate
  modified_base 39: mod_base = OTHER; note = Cytosine phosphorothiorate
  modified_base 45: mod_base = OTHER; note = 2'-fluoroguanosine
  modified_base 56: mod_base = OTHER; note = 2'-Omethyladenosine phosphorothiorate
  modified_base 68: mod_base = OTHER; note = Adenosine phosphorothiorate
  modified_base 74: mod_base = OTHER; note = 2'-Omethylcytosine

SEQ ID NO: 4318 - RNA, 75 nt, synthetic construct; identical to SEQ ID NO: 3336
  source 1..75: mol_type = other RNA
  modified_base 14: mod_base = OTHER; note = 2'-fluoroguanosine
  modified_base 21: mod_base = OTHER; note = 2'-fluoroguanosine
  modified_base 27: mod_base = OTHER; note = Cytosine phosphorothiorate
  modified_base 38: mod_base = OTHER; note = 2'-fluorouridine
  modified_base 50: mod_base = OTHER; note = 2'-fluoroguanosine
  modified_base 56: mod_base = OTHER; note = 2'-fluoroadenosine phosphorothiorate
  modified_base 70: mod_base = OTHER; note = Guanosine phosphorothiorate
  modified_base 74: mod_base = OTHER; note = Cytosine phosphorothiorate

SEQ ID NO: 4319 - RNA, 76 nt, synthetic construct; identical to SEQ ID NO: 3289
  source 1..76: mol_type = other RNA
  modified_base 1: mod_base = OTHER; note = 2'-Omethylguanosine
  modified_base 20: mod_base = OTHER; note = 2'-fluorouridine
  modified_base 21: mod_base = OTHER; note = 2'-fluoroadenosine
  modified_base 22: mod_base = OTHER; note = 2'-Omethylguanosine
  modified_base 40: mod_base = OTHER; note = 2'-fluorocytosine
  modified_base 41: mod_base = OTHER; note = 2'-Omethyluridine
  modified_base 42: mod_base = OTHER; note = 2'-Omethylguanosine
  modified_base 43: mod_base = OTHER; note = 2'-Omethyladenosine
  modified_base 73: mod_base = OTHER; note = 2'-Omethylguanosine

SEQ ID NO: 4320 - RNA, 74 nt, synthetic construct; identical to SEQ ID NO: 766
  source 1..74: mol_type = other RNA
  modified_base 1: mod_base = OTHER; note = 2'-Omethylguanosine phosphorothiorate
  modified_base 2: mod_base = OTHER; note = 2'-Omethylguanosine
  modified_base 3: mod_base = OTHER; note = 2'-Omethylcytosine
  modified_base 4: mod_base = OTHER; note = 2'-Omethyluridine
  modified_base 5: mod_base = OTHER; note = 2'-Omethylcytosine
  modified_base 6: mod_base = OTHER; note = 2'-Omethylcytosine
  modified_base 14: mod_base = OTHER; note = 2'-Omethyladenosine
  modified_base 15: mod_base = OTHER; note = 2'-fluoroadenosine
  modified_base 16: mod_base = OTHER; note = 2'-Omethyluridine
  modified_base 17: mod_base = OTHER; note = 2'-Omethylguanosine
  modified_base 18: mod_base = OTHER; note = 2'-Omethylguanosine
  modified_base 19: mod_base = OTHER; note = 2'-fluoroadenosine
  modified_base 20: mod_base = OTHER; note = 2'-Omethyluridine
  modified_base 54: mod_base = OTHER; note = 2'-Omethyluridine
  modified_base 56: mod_base = OTHER; note = 2'-Omethylcytosine
  modified_base 57: mod_base = OTHER; note = 2'-fluoroguanosine
  modified_base 59: mod_base = OTHER; note = 2'-Omethylguanosine
  modified_base 73: mod_base = OTHER; note = 2'-Omethylguanosine

SEQ ID NO: 4321 - RNA, 76 nt, synthetic construct; identical to SEQ ID NO: 625
  source 1..76: mol_type = other RNA
  modified_base 2: mod_base = OTHER; note = 2'-Omethylguanosine
  modified_base 5: mod_base = OTHER; note = Cytosine phosphorothiorate
  modified_base 6: mod_base = OTHER; note = 2'-Omethylcytosine
  modified_base 8: mod_base = OTHER; note = Uridine phosphorothiorate
  modified_base 11: mod_base = OTHER; note = Cytosine phosphorothiorate
  modified_base 12: mod_base = OTHER; note = 2'-fluoroguanosine
  modified_base 15: mod_base = OTHER; note = Adenosine phosphorothiorate
  modified_base 18: mod_base = OTHER; note = 2'-Omethylguanosine
  modified_base 23: mod_base = OTHER; note = 2'-fluorocytosine
  modified_base 24: mod_base = OTHER; note = 2'-Omethylguanosine
  modified_base 25: mod_base = OTHER; note = 2'-fluorocytosine
  modified_base 26: mod_base = OTHER; note = 2'-fluoroadenosine
  modified_base 27: mod_base = OTHER; note = 2'-fluorouridine
  modified_base 29: mod_base = OTHER; note = 2'-fluoroguanosine
  modified_base 33: mod_base = OTHER; note = 2'-fluorouridine
  modified_base 37: mod_base = OTHER; note = Adenosine phosphorothiorate
  modified_base 38: mod_base = OTHER; note = 2'-Omethyladenosine
  modified_base 42: mod_base = OTHER; note = 2'-Omethyladenosine phosphorothiorate
  modified_base 43: mod_base = OTHER; note = Adenosine phosphorothiorate
  modified_base 44: mod_base = OTHER; note = 2'-fluoroadenosine
  modified_base 45: mod_base = OTHER; note = 2'-fluoroguanosine
  modified_base 48: mod_base = OTHER; note = 2'-fluorouridine phosphorothiorate
  modified_base 49: mod_base = OTHER; note = 2'-fluorocytosine phosphorothiorate
  modified_base 50: mod_base = OTHER; note = 2'-fluorocytosine
  modified_base 53: mod_base = OTHER; note = Guanosine phosphorothiorate
  modified_base 54: mod_base = OTHER; note = 2'-Omethyluridine
  modified_base 55: mod_base = OTHER; note = Uridine phosphorothiorate
  modified_base 56: mod_base = OTHER; note = 2'-Omethylcytosine
  modified_base 57: mod_base = OTHER; note = Guanosine phosphorothiorate
  modified_base 58: mod_base = OTHER; note = Adenosine phosphorothiorate
  modified_base 62: mod_base = OTHER; note = 2'-Omethylcytosine
  modified_base 66: mod_base = OTHER; note = 2'-Omethylcytosine
  modified_base 67: mod_base = OTHER; note = 2'-fluoroguanosine
  modified_base 68: mod_base = OTHER; note = 2'-Omethylguanosine
  modified_base 71: mod_base = OTHER; note = Uridine phosphorothiorate
  modified_base 72: mod_base = OTHER; note = 2'-fluorocytosine phosphorothiorate
  modified_base 74: mod_base = OTHER; note = 2'-fluorocytosine

SEQ ID NO: 4322 - RNA, 76 nt, synthetic construct; identical to SEQ ID NO: 625
  source 1..76: mol_type = other RNA
  modified_base 1: mod_base = OTHER; note = 2'-Omethylguanosine phosphorothiorate
  modified_base 2: mod_base = OTHER; note = 2'-Omethylguanosine
  modified_base 3: mod_base = OTHER; note = 2'-Omethylcytosine
  modified_base 4: mod_base = OTHER; note = 2'-Omethyluridine
  modified_base 5: mod_base = OTHER; note = 2'-Omethylcytosine
  modified_base 6: mod_base = OTHER; note = 2'-Omethylcytosine
  modified_base 10: mod_base = OTHER; note = 2'-Omethylguanosine
  modified_base 11: mod_base = OTHER; note = 2'-Omethylcytosine
  modified_base 12: mod_base = OTHER; note = 2'-Omethylguanosine
  modified_base 13: mod_base = OTHER; note = 2'-Omethylcytosine
  modified_base 14: mod_base = OTHER; note = 2'-Omethyladenosine
  modified_base 15: mod_base = OTHER; note = 2'-fluoroadenosine
  modified_base 16: mod_base = OTHER; note = 2'-Omethyluridine
  modified_base 17: mod_base = OTHER; note = 2'-Omethylguanosine
  modified_base 18: mod_base = OTHER; note = 2'-Omethylguanosine
  modified_base 19: mod_base = OTHER; note = 2'-fluoroadenosine
  modified_base 20: mod_base = OTHER; note = 2'-Omethyluridine
  modified_base 22: mod_base = OTHER; note = 2'-Omethylguanosine
  modified_base 23: mod_base = OTHER; note = 2'-Omethylcytosine
  modified_base 24: mod_base = OTHER; note = 2'-Omethylguanosine
  modified_base 25: mod_base = OTHER; note = 2'-Omethylcytosine
  modified_base 40: mod_base = OTHER; note = 2'-fluorouridine
  modified_base 41: mod_base = OTHER; note = 2'-fluorocytosine
  modified_base 42: mod_base = OTHER; note = 2'-fluoroadenosine
  modified_base 43: mod_base = OTHER; note = 2'-fluoroadenosine
  modified_base 49: mod_base = OTHER; note = 2'-Omethylcytosine
  modified_base 50: mod_base = OTHER; note = 2'-Omethylcytosine
  modified_base 51: mod_base = OTHER; note = 2'-Omethylguanosine
  modified_base 52: mod_base = OTHER; note = 2'-Omethylguanosine
  modified_base 53: mod_base = OTHER; note = 2'-Omethylguanosine
  modified_base 54: mod_base = OTHER; note = 2'-Omethyluridine
  modified_base 56: mod_base = OTHER; note = 2'-Omethylcytosine
  modified_base 57: mod_base = OTHER; note = 2'-fluoroguanosine
  modified_base 59: mod_base = OTHER; note = 2'-Omethylguanosine
  modified_base 73: mod_base = OTHER; note = 2'-Omethylguanosine

SEQ ID NO: 4323 - RNA, 76 nt, synthetic construct; identical to SEQ ID NO: 3295
  source 1..76: mol_type = other RNA
  modified_base 1: mod_base = OTHER; note = 2'-Omethylcytosine
  modified_base 2: mod_base = OTHER; note = 2'-fluorocytosine
  modified_base 13: mod_base = OTHER; note = Cytosine phosphorothiorate
  modified_base 14: mod_base = OTHER; note = 2'-fluoroadenosine phosphorothiorate
  modified_base 20: mod_base = OTHER; note = 2'-Omethyluridine
  modified_base 43: mod_base = OTHER; note = 2'-Omethyluridine
  modified_base 48: mod_base = OTHER; note = 2'-fluorocytosine phosphorothiorate
  modified_base 52: mod_base = OTHER; note = 2'-fluoroguanosine phosphorothiorate
  modified_base 53: mod_base = OTHER; note = Guanosine phosphorothiorate
  modified_base 69: mod_base = OTHER; note = 2'-fluoroadenosine
  modified_base 75: mod_base = OTHER; note = 2'-fluorocytosine

SEQ ID NO: 4324 - RNA, 85 nt, synthetic construct; identical to SEQ ID NO: 3297
  source 1..85: mol_type = other RNA
  modified_base 2: mod_base = OTHER; note = 2'-Omethylcytosine phosphorothiorate
  modified_base 6: mod_base = OTHER; note = 2'-fluoroguanosine
  modified_base 27: mod_base = OTHER; note = 2'-Omethyluridine
  modified_base 52: mod_base = OTHER; note = 2'-Omethylcytosine phosphorothiorate
  modified_base 55: mod_base = OTHER; note = 2'-fluorocytosine
  modified_base 82: mod_base = OTHER; note = 2'-Omethylguanosine

SEQ ID NO: 4325 - RNA, 76 nt, synthetic construct; identical to SEQ ID NO: 625
  source 1..76: mol_type = other RNA
  modified_base 1: mod_base = OTHER; note = 2'-Omethylguanosine phosphorothiorate
  modified_base 2: mod_base = OTHER; note = 2'-Omethylguanosine
  modified_base 3: mod_base = OTHER; note = 2'-Omethylcytosine
  modified_base 4: mod_base = OTHER; note = 2'-Omethyluridine
  modified_base 5: mod_base = OTHER; note = 2'-Omethylcytosine
  modified_base 6: mod_base = OTHER; note = 2'-Omethylcytosine
  modified_base 13: mod_base = OTHER; note = 2'-Omethylcytosine
  modified_base 14: mod_base = OTHER; note = 2'-Omethyladenosine
  modified_base 15: mod_base = OTHER; note = 2'-fluoroadenosine
  modified_base 16: mod_base = OTHER; note = 2'-Omethyluridine
  modified_base 17: mod_base = OTHER; note = 2'-Omethylguanosine
  modified_base 18: mod_base = OTHER; note = 2'-Omethylguanosine
  modified_base 19: mod_base = OTHER; note = 2'-fluoroadenosine
  modified_base 20: mod_base = OTHER; note = 2'-Omethyluridine
  modified_base 21: mod_base = OTHER; note = 2'-fluoroadenosine
  modified_base 33: mod_base = OTHER; note = 2'-fluorouridine
  modified_base 35: mod_base = OTHER; note = Cytosine phosphorothiorate
  modified_base 37: mod_base = OTHER; note = Adenosine phosphorothiorate
  modified_base 38: mod_base = OTHER; note = Adenosine phosphorothiorate
  modified_base 49: mod_base = OTHER; note = 2'-Omethylcytosine
  modified_base 50: mod_base = OTHER; note = 2'-Omethylcytosine
  modified_base 51: mod_base = OTHER; note = 2'-Omethylguanosine
  modified_base 52: mod_base = OTHER; note = 2'-fluoroguanosine
  modified_base 53: mod_base = OTHER; note = 2'-Omethylguanosine
  modified_base 56: mod_base = OTHER; note = 2'-Omethylcytosine
  modified_base 61: mod_base = OTHER; note = 2'-Omethylcytosine
  modified_base 62: mod_base = OTHER; note = 2'-Omethylcytosine
  modified_base 63: mod_base = OTHER; note = 2'-fluorocytosine
  modified_base 64: mod_base = OTHER; note = 2'-Omethylguanosine
  modified_base 65: mod_base = OTHER; note = 2'-Omethylguanosine
  modified_base 66: mod_base = OTHER; note = 2'-Omethylcytosine
  modified_base 67: mod_base = OTHER; note = 2'-Omethylguanosine
  modified_base 68: mod_base = OTHER; note = 2'-Omethylguanosine
  modified_base 69: mod_base = OTHER; note = 2'-Omethyladenosine
  modified_base 73: mod_base = OTHER; note = 2'-Omethylguanosine
  modified_base 75: mod_base = OTHER; note = 2'-fluorocytosine phosphorothiorate

SEQ ID NO: 4326 - DNA, 76 bp, synthetic construct; identical to SEQ ID NO: 1924
  source 1..76: mol_type = other DNA
  modified_base 1: mod_base = OTHER; note = 2'-Omethylguanosine phosphorothiorate
  modified_base 2: mod_base = OTHER; note = 2'-Omethylguanosine phosphorothiorate
  modified_base 40: mod_base = OTHER; note = Uridine phosphorothiorate
  modified_base 41: mod_base = OTHER; note = 2'-O-(2-Methoxyethyl) 5-methylcytosine
  modified_base 52: mod_base = OTHER; note = Guanosine phosphorothiorate
  modified_base 63: mod_base = OTHER; note = 2'-fluorocytosine
  modified_base 74: mod_base = OTHER; note = Cytosine phosphorothiorate
  modified_base 75: mod_base = OTHER; note = 2'-Omethylcytosine phosphorothiorate
  modified_base 76: mod_base = OTHER; note = 2'-Omethyladenosine
  misc_feature 1..52: note = RNA
  misc_feature 53: note = DNA
  misc_feature 54..76: note = RNA

SEQ ID NO: 4327 - RNA, 74 nt, synthetic construct; identical to SEQ ID NO: 3293
  source 1..74: mol_type = other RNA
  modified_base 1: mod_base = OTHER; note = 2'-fluoroadenosine phosphorothiorate
  modified_base 2: mod_base = OTHER; note = 2'-fluorocytosine
  modified_base 4: mod_base = OTHER; note = Uridine phosphorothiorate
  modified_base 8: mod_base = OTHER; note = Guanosine phosphorothiorate
  modified_base 9: mod_base = OTHER; note = 2'-fluoroguanosine
  modified_base 12: mod_base = OTHER; note = 2'-Omethylcytosine
  modified_base 19: mod_base = OTHER; note = 2'-fluoroadenosine
  modified_base 25: mod_base = OTHER; note = 2'-Omethyluridine phosphorothiorate
  modified_base 26: mod_base = OTHER; note = 2'-fluorocytosine
  modified_base 40: mod_base = OTHER; note = 2'-fluoroguanosine
  modified_base 42: mod_base = OTHER; note = Adenosine phosphorothiorate
  modified_base 48: mod_base = OTHER; note = 2'-fluorocytosine
  modified_base 50: mod_base = OTHER; note = Uridine phosphorothiorate
  modified_base 51: mod_base = OTHER; note = 2'-fluoroguanosine
  modified_base 62: mod_base = OTHER; note = Guanosine phosphorothiorate
  modified_base 73: mod_base = OTHER; note = 2'-Omethylcytosine

SEQ ID NO: 4328 - RNA, 86 nt, synthetic construct
  source 1..86: mol_type = other RNA
accaggatggccgagtggttaaggcgttggacttcagatccaatggacgatagtcctcgtgggttcgaaccccactcctggtacca

SEQ ID NO: 4329 - RNA, 74 nt, synthetic construct; identical to SEQ ID NO: 766
  source 1..74: mol_type = other RNA
  modified_base 1: mod_base = OTHER; note = 2'-Omethylguanosine phosphorothiorate
  modified_base 2: mod_base = OTHER; note = 2'-Omethylguanosine
  modified_base 3: mod_base = OTHER; note = 2'-Omethylcytosine
  modified_base 4: mod_base = OTHER; note = 2'-Omethyluridine
  modified_base 5: mod_base = OTHER; note = 2'-Omethylcytosine
  modified_base 6: mod_base = OTHER; note = 2'-Omethylcytosine
  modified_base 43: mod_base = OTHER; note = 2'-Omethyladenosine
  modified_base 44: mod_base = OTHER; note = 2'-Omethyladenosine
  modified_base 45: mod_base = OTHER; note = 2'-Omethylguanosine
  modified_base 46: mod_base = OTHER; note = 2'-fluoroguanosine
  modified_base 48: mod_base = OTHER; note = 2'-fluorouridine
  modified_base 49: mod_base = OTHER; note = 2'-Omethylcytosine
  modified_base 73: mod_base = OTHER; note = 2'-Omethylguanosine phosphorothiorate

SEQ ID NO: 4330 - RNA, 86 nt, synthetic construct; identical to SEQ ID NO: 3290
  source 1..86: mol_type = other RNA
  modified_base 8: mod_base = OTHER; note = Uridine phosphorothiorate

SEQ ID NO: 4331 - RNA, 86 nt, synthetic construct; identical to SEQ ID NO: 3290
  source 1..86: mol_type = other RNA
  modified_base 52: mod_base = OTHER; note = Uridine phosphorothiorate

SEQ ID NO: 4332 - RNA, 76 nt, synthetic construct; identical to SEQ ID NO: 625
  source 1..76: mol_type = other RNA
  modified_base 2: mod_base = OTHER; note = 2'-Omethylguanosine
  modified_base 3: mod_base = OTHER; note = Cytosine phosphorothiorate
  modified_base 4: mod_base = OTHER; note = 2'-fluorouridine
  modified_base 5: mod_base = OTHER; note = 2'-Omethylcytosine
  modified_base 6: mod_base = OTHER; note = 2'-Omethylcytosine
  modified_base 13: mod_base = OTHER; note = 2'-Omethylcytosine
  modified_base 15: mod_base = OTHER; note = 2'-fluoroadenosine
  modified_base 18: mod_base = OTHER; note = 2'-fluoroguanosine
  modified_base 20: mod_base = OTHER; note = 2'-fluorouridine
  modified_base 22: mod_base = OTHER; note = 2'-Omethylguanosine
  modified_base 23: mod_base = OTHER; note = Cytosine phosphorothiorate
  modified_base 24: mod_base = OTHER; note = 2'-fluoroguanosine
  modified_base 25: mod_base = OTHER; note = 2'-Omethylcytosine
  modified_base 29: mod_base = OTHER; note = 2'-Omethylguanosine phosphorothiorate
  modified_base 30: mod_base = OTHER; note = 2'-fluoroguanosine
  modified_base 32: mod_base = OTHER; note = 2'-fluorocytosine
  modified_base 36: mod_base = OTHER; note = Adenosine phosphorothiorate
  modified_base 40: mod_base = OTHER; note = 2'-fluorouridine
  modified_base 42: mod_base = OTHER; note = 2'-fluoroadenosine phosphorothiorate
  modified_base 46: mod_base = OTHER; note = 2'-fluoroguanosine
  modified_base 47: mod_base = OTHER; note = 2'-fluorouridine
  modified_base 53: mod_base = OTHER; note = 2'-fluoroguanosine
  modified_base 55: mod_base = OTHER; note = Uridine phosphorothiorate
  modified_base 56: mod_base = OTHER; note = 2'-fluorocytosine
  modified_base 60: mod_base = OTHER; note = 2'-Omethyluridine phosphorothiorate
  modified_base 61: mod_base = OTHER; note = 2'-Omethylcytosine phosphorothiorate
  modified_base 62: mod_base = OTHER; note = 2'-Omethylcytosine
  modified_base 64: mod_base = OTHER; note = 2'-Omethylguanosine
  modified_base 65: mod_base = OTHER; note = 2'-fluoroguanosine phosphorothiorate
  modified_base 67: mod_base = OTHER; note = Guanosine phosphorothiorate
  modified_base 68: mod_base = OTHER; note = 2'-fluoroguanosine
  modified_base 72: mod_base = OTHER; note = Cytosine phosphorothiorate
  modified_base 73: mod_base = OTHER; note = 2'-fluoroguanosine
  modified_base 76: mod_base = OTHER; note = 2'-fluoroadenosine

SEQ ID NO: 4333 - RNA, 76 nt, synthetic construct; identical to SEQ ID NO: 625
  source 1..76: mol_type = other RNA
  modified_base 1: mod_base = OTHER; note = 2'-Omethylguanosine
  modified_base 2: mod_base = OTHER; note = 2'-Omethylguanosine
  modified_base 3: mod_base = OTHER; note = 2'-Omethylcytosine
  modified_base 4: mod_base = OTHER; note = 2'-Omethyluridine
  modified_base 5: mod_base = OTHER; note = 2'-Omethylcytosine
  modified_base 6: mod_base = OTHER; note = 2'-Omethylcytosine
  modified_base 10: mod_base = OTHER; note = 2'-Omethylguanosine
  modified_base 11: mod_base = OTHER; note = 2'-Omethylcytosine
  modified_base 12: mod_base = OTHER; note = 2'-Omethylguanosine
  modified_base 13: mod_base = OTHER; note = 2'-Omethylcytosine
  modified_base 14: mod_base = OTHER; note = 2'-Omethyladenosine
  modified_base 15: mod_base = OTHER; note = 2'-Omethyladenosine
  modified_base 16: mod_base = OTHER; note = 2'-Omethyluridine
  modified_base 17: mod_base = OTHER; note = 2'-Omethylguanosine
  modified_base 18: mod_base = OTHER; note = 2'-Omethylguanosine
  modified_base 19: mod_base = OTHER; note = 2'-Omethyladenosine
  modified_base 20: mod_base = OTHER; note = 2'-Omethyluridine
  modified_base 22: mod_base = OTHER; note = 2'-Omethylguanosine
  modified_base 23: mod_base = OTHER; note = 2'-Omethylcytosine
  modified_base 24: mod_base = OTHER; note = 2'-Omethylguanosine
  modified_base 25: mod_base = OTHER; note = 2'-Omethylcytosine
  modified_base 40: mod_base = OTHER; note = 2'-fluorouridine
  modified_base 41: mod_base = OTHER; note = 2'-fluorocytosine
  modified_base 42: mod_base = OTHER; note = 2'-fluoroadenosine
  modified_base 43: mod_base = OTHER; note = 2'-fluoroadenosine
  modified_base 44: mod_base = OTHER; note = 2'-Omethyladenosine
  modified_base 45: mod_base = OTHER; note = 2'-Omethylguanosine
  modified_base 46: mod_base = OTHER; note = 2'-Omethylguanosine
  modified_base 49: mod_base = OTHER; note = 2'-Omethylcytosine
  modified_base 50: mod_base = OTHER; note = 2'-Omethylcytosine
  modified_base 51: mod_base = OTHER; note = 2'-Omethylguanosine
  modified_base 52: mod_base = OTHER; note = 2'-Omethylguanosine
  modified_base 53: mod_base = OTHER; note = 2'-Omethylguanosine
  modified_base 54: mod_base = OTHER; note = Uridine phosphorothiorate
  modified_base 55: mod_base = OTHER; note = Uridine phosphorothiorate
  modified_base 56: mod_base = OTHER; note = Cytosine phosphorothiorate
  modified_base 57: mod_base = OTHER; note = Guanosine phosphorothiorate
  modified_base 61: mod_base = OTHER; note = 2'-Omethylcytosine
  modified_base 62: mod_base = OTHER; note = 2'-Omethylcytosine
  modified_base 63: mod_base = OTHER; note = 2'-Omethylcytosine
  modified_base 64: mod_base = OTHER; note = 2'-Omethylguanosine
  modified_base 65: mod_base = OTHER; note = 2'-Omethylguanosine
  modified_base 66: mod_base = OTHER; note = 2'-Omethylcytosine
  modified_base 67: mod_base = OTHER; note = 2'-Omethylguanosine
  modified_base 68: mod_base = OTHER; note = 2'-Omethylguanosine
  modified_base 69: mod_base = OTHER; note = 2'-Omethyladenosine

SEQ ID NO: 4334 - RNA, 76 nt, synthetic construct; identical to SEQ ID NO: 3675
  source 1..76: mol_type = other RNA
  modified_base 1: mod_base = OTHER; note = 2'-Omethylguanosine
  modified_base 2: mod_base = OTHER; note = 2'-Omethylcytosine
  modified_base 3: mod_base = OTHER; note = 2'-Omethylcytosine
  modified_base 4: mod_base = OTHER; note = 2'-Omethyluridine
  modified_base 5: mod_base = OTHER; note = 2'-Omethylcytosine
  modified_base 6: mod_base = OTHER; note = 2'-Omethylcytosine
  modified_base 10: mod_base = OTHER; note = 2'-Omethylguanosine
  modified_base 11: mod_base = OTHER; note = 2'-Omethylcytosine
  modified_base 12: mod_base = OTHER; note = 2'-Omethylguanosine
  modified_base 13: mod_base = OTHER; note = 2'-Omethylcytosine
  modified_base 14: mod_base = OTHER; note = 2'-Omethyladenosine
  modified_base 15: mod_base = OTHER; note = 2'-fluoroadenosine
  modified_base 16: mod_base = OTHER; note = 2'-Omethyluridine
  modified_base 17: mod_base = OTHER; note = 2'-Omethylguanosine
  modified_base 18: mod_base = OTHER; note = 2'-Omethylguanosine
  modified_base 19: mod_base = OTHER; note = 2'-fluoroadenosine
  modified_base 20: mod_base = OTHER; note = 2'-Omethyluridine
  modified_base 25: mod_base = OTHER; note = 2'-Omethylcytosine
  modified_base 33: mod_base = OTHER; note = 2'-fluorouridine
  modified_base 35: mod_base = OTHER; note = Cytosine phosphorothiorate
  modified_base 37: mod_base = OTHER; note = Adenosine phosphorothiorate
  modified_base 38: mod_base = OTHER; note = Adenosine phosphorothiorate
  modified_base 41: mod_base = OTHER; note = 2'-Omethylcytosine
  modified_base 42: mod_base = OTHER; note = 2'-Omethyladenosine
  modified_base 43: mod_base = OTHER; note = 2'-Omethylcytosine
  modified_base 44: mod_base = OTHER; note = 2'-Omethyladenosine
  modified_base 49: mod_base = OTHER; note = 2'-Omethylcytosine
  modified_base 50: mod_base = OTHER; note = 2'-Omethylcytosine
  modified_base 52: mod_base = OTHER; note = 2'-Omethylguanosine
  modified_base 54: mod_base = OTHER; note = 2'-Omethyluridine
  modified_base 55: mod_base = OTHER; note = Uridine phosphorothiorate
  modified_base 56: mod_base = OTHER; note = 2'-Omethylcytosine
  modified_base 57: mod_base = OTHER; note = 2'-fluoroguanosine
  modified_base 59: mod_base = OTHER; note = 2'-Omethylguanosine
  modified_base 61: mod_base = OTHER; note = 2'-Omethylcytosine
  modified_base 65: mod_base = OTHER; note = 2'-Omethylguanosine
  modified_base 73: mod_base = OTHER; note = 2'-Omethylguanosine

SEQ ID NO: 4335 - RNA, 76 nt, synthetic construct; identical to SEQ ID NO: 625
  source 1..76: mol_type = other RNA
  modified_base 2: mod_base = OTHER; note = 2'-fluoroguanosine
  modified_base 4: mod_base = OTHER; note = Uridine phosphorothiorate
  modified_base 10: mod_base = OTHER; note = 2'-Omethylguanosine
  modified_base 11: mod_base = OTHER; note = 2'-Omethylcytosine
  modified_base 12: mod_base = OTHER; note = 2'-Omethylguanosine
  modified_base 13: mod_base = OTHER; note = 2'-Omethylcytosine phosphorothiorate
  modified_base 14: mod_base = OTHER; note = 2'-fluoroadenosine
  modified_base 16: mod_base = OTHER; note = 2'-Omethyluridine phosphorothiorate
  modified_base 17: mod_base = OTHER; note = 2'-Omethylguanosine
  modified_base 20: mod_base = OTHER; note = 2'-Omethyluridine phosphorothiorate
  modified_base 22: mod_base = OTHER; note = 2'-Omethylguanosine
  modified_base 24: mod_base = OTHER; note = 2'-fluoroguanosine
  modified_base 26: mod_base = OTHER; note = 2'-Omethyladenosine phosphorothiorate
  modified_base 27: mod_base = OTHER; note = 2'-Omethyluridine
  modified_base 28: mod_base = OTHER; note = 2'-Omethyluridine
  modified_base 29: mod_base = OTHER; note = 2'-fluoroguanosine phosphorothiorate
  modified_base 30: mod_base = OTHER; note = 2'-Omethylguanosine
  modified_base 31: mod_base = OTHER; note = 2'-fluoroadenosine
  modified_base 33: mod_base = OTHER; note = 2'-fluorouridine
  modified_base 34: mod_base = OTHER; note = 2'-fluorouridine
  modified_base 38: mod_base = OTHER; note = 2'-fluoroadenosine
  modified_base 40: mod_base = OTHER; note = Uridine phosphorothiorate
  modified_base 43: mod_base = OTHER; note = 2'-fluoroadenosine phosphorothiorate
  modified_base 45: mod_base = OTHER; note = 2'-Omethylguanosine
  modified_base 47: mod_base = OTHER; note = 2'-fluorouridine
  modified_base 53: mod_base = OTHER; note = 2'-fluoroguanosine
  modified_base 54: mod_base = OTHER; note = 2'-fluorouridine
  modified_base 61: mod_base = OTHER; note = 2'-Omethylcytosine
  modified_base 63: mod_base = OTHER; note = Cytosine phosphorothiorate
  modified_base 64: mod_base = OTHER; note = 2'-Omethylguanosine
  modified_base 65: mod_base = OTHER; note = Guanosine phosphorothiorate
  modified_base 67: mod_base = OTHER; note = 2'-fluoroguanosine
  modified_base 73: mod_base = OTHER; note = 2'-Omethylguanosine

SEQ ID NO: 4336 - RNA, 75 nt, synthetic construct; identical to SEQ ID NO: 3306
  source 1..75: mol_type = other RNA
  modified_base 17: mod_base = OTHER; note = 2'-Omethylguanosine
  modified_base 72: mod_base = OTHER; note = 2'-Omethyladenosine

SEQ ID NO: 4337 - RNA, 76 nt, synthetic construct; identical to SEQ ID NO: 3289
  source 1..76: mol_type = other RNA
  modified_base 1: mod_base = OTHER; note = 2'-Omethylguanosine
  modified_base 13: mod_base = OTHER; note = 2'-Omethylcytosine
  modified_base 18: mod_base = OTHER; note = 2'-Omethylguanosine
  modified_base 19: mod_base = OTHER; note = 2'-Omethylguanosine
  modified_base 25: mod_base = OTHER; note = 2'-Omethylcytosine
  modified_base 33: mod_base = OTHER; note = Uridine phosphorothiorate
  modified_base 34: mod_base = OTHER; note = 2'-Omethyluridine
  modified_base 35: mod_base = OTHER; note = Uridine phosphorothiorate
  modified_base 37: mod_base = OTHER; note = Adenosine phosphorothiorate
  modified_base 38: mod_base = OTHER; note = Adenosine phosphorothiorate
  modified_base 41: mod_base = OTHER; note = 2'-fluorouridine
  modified_base 42: mod_base = OTHER; note = 2'-Omethylguanosine
  modified_base 43: mod_base = OTHER; note = 2'-Omethyladenosine
  modified_base 44: mod_base = OTHER; note = 2'-fluoroguanosine
  modified_base 49: mod_base = OTHER; note = 2'-Omethylcytosine
  modified_base 50: mod_base = OTHER; note = 2'-Omethyladenosine
  modified_base 52: mod_base = OTHER; note = 2'-Omethylguanosine
  modified_base 54: mod_base = OTHER; note = Uridine phosphorothiorate
  modified_base 55: mod_base = OTHER; note = Uridine phosphorothiorate
  modified_base 56: mod_base = OTHER; note = 2'-Omethylcytosine
  modified_base 57: mod_base = OTHER; note = Adenosine phosphorothiorate
  modified_base 58: mod_base = OTHER; note = Adenosine phosphorothiorate
  modified_base 59: mod_base = OTHER; note = 2'-Omethylguanosine
  modified_base 61: mod_base = OTHER; note = 2'-Omethylcytosine
  modified_base 65: mod_base = OTHER; note = 2'-Omethylguanosine
  modified_base 73: mod_base = OTHER; note = 2'-Omethylguanosine

SEQ ID NO: 4338 - RNA, 76 nt, synthetic construct; identical to SEQ ID NO: 3295
  source 1..76: mol_type = other RNA
  modified_base 1: mod_base = OTHER; note = 2'-Omethylcytosine phosphorothiorate
  modified_base 2: mod_base = OTHER; note = 2'-Omethylcytosine
  modified_base 9: mod_base = OTHER; note = 2'-fluoroadenosine
  modified_base 20: mod_base = OTHER; note = 2'-fluorouridine phosphorothiorate
  modified_base 26: mod_base = OTHER; note = Guanosine phosphorothiorate
  modified_base 48: mod_base = OTHER; note = 2'-Omethylcytosine
  modified_base 53: mod_base = OTHER; note = Guanosine phosphorothiorate
  modified_base 59: mod_base = OTHER; note = 2'-Omethyladenosine phosphorothiorate
  modified_base 75: mod_base = OTHER; note = 2'-Omethylcytosine phosphorothiorate

SEQ ID NO: 4339 - RNA, 76 nt, synthetic construct; identical to SEQ ID NO: 3615
  source 1..76: mol_type = other RNA
  modified_base 1: mod_base = OTHER; note = 2'-Omethylguanosine
  modified_base 2: mod_base = OTHER; note = 2'-Omethylguanosine
  modified_base 3: mod_base = OTHER; note = 2'-Omethylcytosine
  modified_base 4: mod_base = OTHER; note = 2'-Omethyluridine
  modified_base 5: mod_base = OTHER; note = 2'-Omethylcytosine
  modified_base 6: mod_base = OTHER; note = 2'-Omethylcytosine
  modified_base 16: mod_base = OTHER; note = 2'-Omethyluridine
  modified_base 17: mod_base = OTHER; note = 2'-Omethylguanosine
  modified_base 18: mod_base = OTHER; note = 2'-Omethylguanosine
  modified_base 33: mod_base = OTHER; note = 2'-fluorouridine
  modified_base 35: mod_base = OTHER; note = Cytosine phosphorothiorate
  modified_base 37: mod_base = OTHER; note = Adenosine phosphorothiorate
  modified_base 38: mod_base = OTHER; note = Adenosine phosphorothiorate
  modified_base 44: mod_base = OTHER; note = 2'-Omethylguanosine
  modified_base 45: mod_base = OTHER; note = 2'-Omethylguanosine
  modified_base 46: mod_base = OTHER; note = 2'-fluoroguanosine
  modified_base 47: mod_base = OTHER; note = 2'-fluorouridine
  modified_base 48: mod_base = OTHER; note = 2'-fluorouridine
  modified_base 56: mod_base = OTHER; note = 2'-Omethylcytosine
  modified_base 59: mod_base = OTHER; note = 2'-Omethylguanosine
  modified_base 61: mod_base = OTHER; note = 2'-Omethylcytosine
  modified_base 62: mod_base = OTHER; note = 2'-Omethylcytosine
  modified_base 63: mod_base = OTHER; note = 2'-fluorocytosine
  modified_base 64: mod_base = OTHER; note = 2'-Omethylguanosine
  modified_base 65: mod_base = OTHER; note = 2'-Omethylguanosine
  modified_base 66: mod_base = OTHER; note = 2'-Omethylcytosine
  modified_base 67: mod_base = OTHER; note = 2'-Omethylguanosine
  modified_base 68: mod_base = OTHER; note = 2'-Omethylguanosine
  modified_base 73: mod_base = OTHER; note = 2'-Omethylguanosine

SEQ ID NO: 4340 - RNA, 76 nt, synthetic construct; identical to SEQ ID NO: 625
  source 1..76: mol_type = other RNA
  modified_base 5: mod_base = OTHER; note = Cytosine phosphorothiorate
  modified_base 6: mod_base = OTHER; note = 2'-fluorocytosine phosphorothiorate
  modified_base 10: mod_base = OTHER; note = 2'-Omethylguanosine
  modified_base 13: mod_base = OTHER; note = 2'-Omethylcytosine
  modified_base 15: mod_base = OTHER; note = 2'-fluoroadenosine
  modified_base 16: mod_base = OTHER; note = 2'-Omethyluridine
  modified_base 17: mod_base = OTHER; note = 2'-Omethylguanosine
  modified_base 21: mod_base = OTHER; note = Adenosine phosphorothiorate
  modified_base 22: mod_base = OTHER; note = 2'-fluoroguanosine
  modified_base 23: mod_base = OTHER; note = 2'-fluorocytosine
  modified_base 25: mod_base = OTHER; note = Cytosine phosphorothiorate
  modified_base 27: mod_base = OTHER; note = 2'-fluorouridine
  modified_base 34: mod_base = OTHER; note = Uridine phosphorothiorate
  modified_base 36: mod_base = OTHER; note = Adenosine phosphorothiorate
  modified_base 37: mod_base = OTHER; note = Adenosine phosphorothiorate
  modified_base 38: mod_base = OTHER; note = 2'-Omethyladenosine
  modified_base 43: mod_base = OTHER; note = 2'-fluoroadenosine
  modified_base 44: mod_base = OTHER; note = Adenosine phosphorothiorate
  modified_base 45: mod_base = OTHER; note = 2'-Omethylguanosine
  modified_base 48: mod_base = OTHER; note = Uridine phosphorothiorate
  modified_base 49: mod_base = OTHER; note = 2'-fluorocytosine
  modified_base 50: mod_base = OTHER; note = 2'-Omethylcytosine
  modified_base 51: mod_base = OTHER; note = Guanosine phosphorothiorate
  modified_base 52: mod_base = OTHER; note = 2'-Omethylguanosine
  modified_base 53: mod_base = OTHER; note = 2'-Omethylguanosine
  modified_base 54: mod_base = OTHER; note = Uridine phosphorothiorate
  modified_base 56: mod_base = OTHER; note = 2'-fluorocytosine
  modified_base 58: mod_base = OTHER; note = 2'-fluoroadenosine
  modified_base 62: mod_base = OTHER; note = 2'-Omethylcytosine
  modified_base 63: mod_base = OTHER; note = 2'-fluorocytosine
  modified_base 64: mod_base = OTHER; note = 2'-fluoroguanosine phosphorothiorate
  modified_base 65: mod_base = OTHER; note = 2'-Omethylguanosine phosphorothiorate
  modified_base 66: mod_base = OTHER; note = 2'-fluorocytosine
  modified_base 71: mod_base = OTHER; note = 2'-fluorouridine
  modified_base 72: mod_base = OTHER; note = 2'-fluorocytosine
  modified_base 74: mod_base = OTHER; note = 2'-Omethylcytosine
  modified_base 75: mod_base = OTHER; note = 2'-fluorocytosine

SEQ ID NO: 4341 - RNA, 74 nt, synthetic construct; identical to SEQ ID NO: 3293
  source 1..74: mol_type = other RNA
  modified_base 1: mod_base = OTHER; note = Adenosine phosphorothiorate
  modified_base 2: mod_base = OTHER; note = 2'-Omethylcytosine phosphorothiorate
  modified_base 3: mod_base = OTHER; note = 2'-fluorocytosine
  modified_base 4: mod_base = OTHER; note = 2'-fluorouridine
  modified_base 7: mod_base = OTHER; note = Uridine phosphorothiorate
  modified_base 10: mod_base = OTHER; note = 2'-Omethylcytosine phosphorothiorate
  modified_base 17: mod_base = OTHER; note = 2'-fluoroguanosine phosphorothiorate
  modified_base 29: mod_base = OTHER; note = 2'-fluoroadenosine phosphorothiorate
  modified_base 39: mod_base = OTHER; note = Adenosine phosphorothiorate
  modified_base 43: mod_base = OTHER; note = Guanosine phosphorothiorate
  modified_base 51: mod_base = OTHER; note = Guanosine phosphorothiorate
  modified_base 57: mod_base = OTHER; note = Adenosine phosphorothiorate
  modified_base 73: mod_base = OTHER; note = 2'-Omethylcytosine

SEQ ID NO: 4342 - RNA, 86 nt, synthetic construct; identical to SEQ ID NO: 3290
  source 1..86: mol_type = other RNA
  modified_base 10: mod_base = OTHER; note = 2'-Omethylguanosine
  modified_base 11: mod_base = OTHER; note = 2'-Omethylcytosine
  modified_base 12: mod_base = OTHER; note = 2'-Omethylcytosine
  modified_base 13: mod_base = OTHER; note = 2'-Omethylguanosine
  modified_base 22: mod_base = OTHER; note = 2'-Omethyladenosine
  modified_base 23: mod_base = OTHER; note = 2'-Omethylguanosine
  modified_base 24: mod_base = OTHER; note = 2'-Omethylguanosine
  modified_base 25: mod_base = OTHER; note = 2'-Omethylcytosine
  modified_base 59: mod_base = OTHER; note = 2'-Omethylguanosine
  modified_base 60: mod_base = OTHER; note = 2'-Omethyluridine
  modified_base 61: mod_base = OTHER; note = 2'-Omethylguanosine
  modified_base 62: mod_base = OTHER; note = 2'-Omethylguanosine
  modified_base 63: mod_base = OTHER; note = 2'-Omethylguanosine
  modified_base 83: mod_base = OTHER; note = 2'-Omethyladenosine

SEQ ID NO: 4343 - RNA, 76 nt, synthetic construct; identical to SEQ ID NO: 625
  source 1..76: mol_type = other RNA
  modified_base 1: mod_base = OTHER; note = 2'-Omethylguanosine phosphorothiorate
  modified_base 2: mod_base = OTHER; note = 2'-Omethylguanosine
  modified_base 3: mod_base = OTHER; note = 2'-Omethylcytosine
  modified_base 4: mod_base = OTHER; note = 2'-Omethyluridine
  modified_base 5: mod_base = OTHER; note = 2'-Omethylcytosine
  modified_base 6: mod_base = OTHER; note = 2'-Omethylcytosine
  modified_base 10: mod_base = OTHER; note = 2'-Omethylguanosine
  modified_base 11: mod_base = OTHER; note = 2'-Omethylcytosine
  modified_base 12: mod_base = OTHER; note = 2'-Omethylguanosine
  modified_base 13: mod_base = OTHER; note = 2'-Omethylcytosine
  modified_base 14: mod_base = OTHER; note = 2'-Omethyladenosine
  modified_base 15: mod_base = OTHER; note = 2'-fluoroadenosine
  modified_base 16: mod_base = OTHER; note = 2'-Omethyluridine
  modified_base 17: mod_base = OTHER; note = 2'-Omethylguanosine
  modified_base 18: mod_base = OTHER; note = 2'-Omethylguanosine
  modified_base 19: mod_base = OTHER; note = 2'-fluoroadenosine
  modified_base 20: mod_base = OTHER; note = 2'-Omethyluridine
  modified_base 22: mod_base = OTHER; note = 2'-Omethylguanosine
  modified_base 23: mod_base = OTHER; note = 2'-Omethylcytosine
  modified_base 24: mod_base = OTHER; note = 2'-Omethylguanosine
  modified_base 25: mod_base = OTHER; note = 2'-Omethylcytosine
  modified_base 38: mod_base = OTHER; note = Adenosine phosphorothiorate
  modified_base 39: mod_base = OTHER; note = Uridine phosphorothiorate
  modified_base 40: mod_base = OTHER; note = 2'-fluorouridine
  modified_base 43: mod_base = OTHER; note = 2'-Omethyladenosine
  modified_base 44: mod_base = OTHER; note = 2'-Omethyladenosine
  modified_base 45: mod_base = OTHER; note = 2'-Omethylguanosine
  modified_base 46: mod_base = OTHER; note = 2'-fluoroguanosine
  modified_base 48: mod_base = OTHER; note = 2'-fluorouridine
  modified_base 49: mod_base = OTHER; note = 2'-Omethylcytosine
  modified_base 50: mod_base = OTHER; note = 2'-Omethylcytosine
  modified_base 54: mod_base = OTHER; note = 2'-Omethyluridine phosphorothiorate
  modified_base 55: mod_base = OTHER; note = Uridine phosphorothiorate
  modified_base 56: mod_base = OTHER; note = 2'-Omethylcytosine
  modified_base 57: mod_base = OTHER; note = 2'-fluoroguanosine
  modified_base 61: mod_base = OTHER; note = 2'-Omethylcytosine
  modified_base 62: mod_base = OTHER; note = 2'-Omethylcytosine
  modified_base 63: mod_base = OTHER; note = 2'-fluorocytosine
  modified_base 64: mod_base = OTHER; note = 2'-Omethylguanosine
  modified_base 65: mod_base = OTHER; note = 2'-Omethylguanosine
  modified_base 66: mod_base = OTHER; note = 2'-Omethylcytosine
  modified_base 67: mod_base = OTHER; note = 2'-Omethylguanosine
  modified_base 68: mod_base = OTHER; note = 2'-Omethylguanosine
  modified_base 69: mod_base = OTHER; note = 2'-Omethyladenosine
  modified_base 70: mod_base = OTHER; note = 2'-fluoroguanosine

SEQ ID NO: 4344 - RNA, 76 nt, synthetic construct; identical to SEQ ID NO: 625
  source 1..76: mol_type = other RNA
  modified_base 1: mod_base = OTHER; note = 2'-Omethylguanosine
  modified_base 10: mod_base = OTHER; note = 2'-Omethylguanosine
  modified_base 17: mod_base = OTHER; note = Guanosine phosphorothiorate
  modified_base 18: mod_base = OTHER; note = 2'-Omethylguanosine
  modified_base 19: mod_base = OTHER; note = Adenosine phosphorothiorate
  modified_base 20: mod_base = OTHER; note = 2'-Omethyluridine
  modified_base 25: mod_base = OTHER; note = 2'-Omethylcytosine
  modified_base 29: mod_base = OTHER; note = 2'-Omethylguanosine
  modified_base 33: mod_base = OTHER; note = 2'-fluorouridine
  modified_base 35: mod_base = OTHER; note = Cytosine phosphorothiorate
  modified_base 37: mod_base = OTHER; note = Adenosine phosphorothiorate
  modified_base 38: mod_base = OTHER; note = Adenosine phosphorothiorate
  modified_base 41: mod_base = OTHER; note = 2'-fluorocytosine phosphorothiorate
  modified_base 43: mod_base = OTHER; note = 2'-Omethyladenosine
  modified_base 44: mod_base = OTHER; note = 2'-fluoroadenosine
  modified_base 50: mod_base = OTHER; note = 2'-Omethylcytosine
  modified_base 52: mod_base = OTHER; note = 2'-Omethylguanosine
  modified_base 54: mod_base = OTHER; note = Uridine phosphorothiorate
  modified_base 55: mod_base = OTHER; note = Uridine phosphorothiorate
  modified_base 56: mod_base = OTHER; note = 2'-Omethylcytosine
  modified_base 57: mod_base = OTHER; note = Guanosine phosphorothiorate
  modified_base 62: mod_base = OTHER; note = 2'-Omethylcytosine
  modified_base 63: mod_base = OTHER; note = 2'-fluorocytosine
  modified_base 65: mod_base = OTHER; note = 2'-Omethylguanosine
  modified_base 71: mod_base = OTHER; note = 2'-Omethyluridine
  modified_base 73: mod_base = OTHER; note = 2'-Omethylguanosine

SEQ ID NO: 4345 - RNA, 75 nt, synthetic construct; identical to SEQ ID NO: 1045
  source 1..75: mol_type = other RNA
  modified_base 1: mod_base = OTHER; note = 2'-Omethylguanosine phosphorothiorate
  modified_base 2: mod_base = OTHER; note = 2'-Omethylguanosine phosphorothiorate
  modified_base 15: mod_base = OTHER; note = 2'-Omethyladenosine
  modified_base 16: mod_base = OTHER; note = 2'-Omethyluridine phosphorothiorate
  modified_base 18: mod_base = OTHER; note = 2'-Omethylguanosine phosphorothiorate
  modified_base 19: mod_base = OTHER; note = 2'-Omethyluridine phosphorothiorate
  modified_base 20: mod_base = OTHER; note = Adenosine phosphorothiorate
  modified_base 22: mod_base = OTHER; note = 2'-Omethylguanosine
  modified_base 23: mod_base = OTHER; note = 2'-Omethylcytosine
  modified_base 29: mod_base = OTHER; note = 2'-Omethylguanosine
  modified_base 30: mod_base = OTHER; note = 2'-Omethylguanosine phosphorothiorate
  modified_base 62: mod_base = OTHER; note = 2'-fluorocytosine phosphorothiorate
  modified_base 64: mod_base = OTHER; note = 2'-Omethylguanosine
  modified_base 67: mod_base = OTHER; note = 2'-Omethylguanosine
  modified_base 72: mod_base = OTHER; note = 2'-Omethyluridine
  modified_base 74: mod_base = OTHER; note = 2'-Omethylcytosine phosphorothiorate

SEQ ID NO: 4346 - RNA, 75 nt, synthetic construct; identical to SEQ ID NO: 1045
  source 1..75: mol_type = other RNA
  modified_base 1: mod_base = OTHER; note = Guanosine phosphorothiorate
  modified_base 2: mod_base = OTHER; note = 2'-fluoroguanosine
  modified_base 3: mod_base = OTHER; note = 2'-fluorouridine
  modified_base 15: mod_base = OTHER; note = 2'-fluoroadenosine
  modified_base 40: mod_base = OTHER; note = 2'-fluorocytosine
  modified_base 50: mod_base = OTHER; note = Guanosine phosphorothiorate
  modified_base 64: mod_base = OTHER; note = Guanosine phosphorothiorate
  modified_base 73: mod_base = OTHER; note = Cytosine phosphorothiorate

SEQ ID NO: 4347 - RNA, 76 nt, synthetic construct; identical to SEQ ID NO: 3316
  source 1..76: mol_type = other RNA
  modified_base 1: mod_base = OTHER; note = 2'-Omethyladenosine phosphorothiorate
  modified_base 2: mod_base = OTHER; note = 2'-Omethylcytosine phosphorothiorate
  modified_base 13: mod_base = OTHER; note = 2'-fluorocytosine
  modified_base 14: mod_base = OTHER; note = 2'-fluoroadenosine
  modified_base 54: mod_base = OTHER; note = 2'-fluorouridine
  modified_base 59: mod_base = OTHER; note = 2'-Omethylguanosine
  modified_base 75: mod_base = OTHER; note = Cytosine phosphorothiorate
  modified_base 76: mod_base = OTHER; note = 2'-Omethyladenosine

SEQ ID NO: 4348 - RNA, 74 nt, synthetic construct; identical to SEQ ID NO: 766
  source 1..74: mol_type = other RNA
  modified_base 1: mod_base = OTHER; note = 2'-Omethylguanosine phosphorothiorate
  modified_base 2: mod_base = OTHER; note = 2'-Omethylguanosine phosphorothiorate
  modified_base 3: mod_base = OTHER; note = 2'-Omethylcytosine
  modified_base 4: mod_base = OTHER; note = 2'-Omethyluridine
  modified_base 5: mod_base = OTHER; note = 2'-Omethylcytosine
  modified_base 6: mod_base = OTHER; note = 2'-Omethylcytosine
  modified_base 16: mod_base = OTHER; note = 2'-Omethyluridine
  modified_base 17: mod_base = OTHER; note = 2'-Omethylguanosine
  modified_base 18: mod_base = OTHER; note = 2'-Omethylguanosine
  modified_base 20: mod_base = OTHER; note = 2'-Omethyluridine
  modified_base 25: mod_base = OTHER; note = 2'-Omethylcytosine
  modified_base 33: mod_base = OTHER; note = 2'-fluorouridine
  modified_base 35: mod_base = OTHER; note = Cytosine phosphorothiorate
  modified_base 37: mod_base = OTHER; note = Adenosine phosphorothiorate
  modified_base 38: mod_base = OTHER; note = Adenosine phosphorothiorate
  modified_base 41: mod_base = OTHER; note = 2'-fluorocytosine
  modified_base 42: mod_base = OTHER; note = 2'-Omethyladenosine
  modified_base 43: mod_base = OTHER; note = 2'-Omethyladenosine
  modified_base 44: mod_base = OTHER; note = 2'-fluoroadenosine
  modified_base 49: mod_base = OTHER; note = 2'-Omethylcytosine
  modified_base 50: mod_base = OTHER; note = 2'-Omethylcytosine
  modified_base 52: mod_base = OTHER; note = 2'-Omethylguanosine
  modified_base 54: mod_base = OTHER; note = 2'-Omethyluridine
  modified_base 55: mod_base = OTHER; note = Uridine phosphorothiorate
  modified_base 56: mod_base = OTHER; note = 2'-Omethylcytosine
  modified_base 57: mod_base = OTHER; note = 2'-fluoroguanosine
  modified_base 59: mod_base = OTHER; note = 2'-Omethylguanosine
  modified_base 61: mod_base = OTHER; note = 2'-Omethylcytosine
  modified_base 62: mod_base = OTHER; note = 2'-Omethylcytosine
  modified_base 63: mod_base = OTHER; note = 2'-fluorocytosine
  modified_base 64: mod_base = OTHER; note = 2'-Omethylguanosine
  modified_base 65: mod_base = OTHER; note = 2'-Omethylguanosine
  modified_base 72: mod_base = OTHER; note = 2'-Omethylcytosine phosphorothiorate
  modified_base 73: mod_base = OTHER; note = 2'-Omethylguanosine

SEQ ID NO: 4349 - RNA, 86 nt, synthetic construct; identical to SEQ ID NO: 3290
  source 1..86: mol_type = other RNA
  modified_base 20: mod_base = OTHER; note = Uridine phosphorothiorate

SEQ ID NO: 4350 - RNA, 76 nt, synthetic construct
  source 1..76: mol_type = other RNA
ggctccgtgtagcaatggatagctattaggacttcaaattctaaggttccgggttcgagtcccggcggagtcgcca

SEQ ID NO: 4351 - RNA, 76 nt, synthetic construct; identical to SEQ ID NO: 3342
  source 1..76: mol_type = other RNA
  modified_base 1: mod_base = OTHER; note = 2'-Omethylguanosine
  modified_base 19: mod_base = OTHER; note = 2'-Omethyladenosine
  modified_base 20: mod_base = OTHER; note = 2'-Omethyluridine
  modified_base 21: mod_base = OTHER; note = 2'-fluoroadenosine
  modified_base 22: mod_base = OTHER; note = 2'-Omethylguanosine
  modified_base 40: mod_base = OTHER; note = 2'-fluorouridine
  modified_base 41: mod_base = OTHER; note = 2'-Omethylcytosine
  modified_base 42: mod_base = OTHER; note = 2'-Omethylguanosine
  modified_base 43: mod_base = OTHER; note = 2'-Omethyladenosine
  modified_base 73: mod_base = OTHER; note = 2'-Omethylguanosine

SEQ ID NO: 4352 - RNA, 76 nt, synthetic construct; identical to SEQ ID NO: 625
  source 1..76: mol_type = other RNA
  modified_base 1: mod_base = OTHER; note = 2'-Omethylguanosine
  modified_base 10: mod_base = OTHER; note = 2'-Omethylguanosine
  modified_base 13: mod_base = OTHER; note = 2'-Omethylcytosine
  modified_base 17: mod_base = OTHER; note = 2'-Omethylguanosine phosphorothiorate
  modified_base 18: mod_base = OTHER; note = 2'-Omethylguanosine
  modified_base 19: mod_base = OTHER; note = Adenosine phosphorothiorate
  modified_base 20: mod_base = OTHER; note = 2'-Omethyluridine
  modified_base 25: mod_base = OTHER; note = 2'-Omethylcytosine
  modified_base 29: mod_base = OTHER; note = 2'-Omethylguanosine
  modified_base 33: mod_base = OTHER; note = 2'-fluorouridine
  modified_base 35: mod_base = OTHER; note = Cytosine phosphorothiorate
  modified_base 37: mod_base = OTHER; note = Adenosine phosphorothiorate
  modified_base 38: mod_base = OTHER; note = Adenosine phosphorothiorate
  modified_base 43: mod_base = OTHER; note = 2'-Omethyladenosine
  modified_base 44: mod_base = OTHER; note = 2'-fluoroadenosine
  modified_base 46: mod_base = OTHER; note = Guanosine phosphorothiorate
  modified_base 50: mod_base = OTHER; note = 2'-Omethylcytosine
  modified_base 52: mod_base = OTHER; note = 2'-Omethylguanosine
  modified_base 54: mod_base = OTHER; note = Uridine phosphorothiorate
  modified_base 55: mod_base = OTHER; note = Uridine phosphorothiorate
  modified_base 56: mod_base = OTHER; note = 2'-Omethylcytosine
  modified_base 57: mod_base = OTHER; note = Guanosine phosphorothiorate
  modified_base 62: mod_base = OTHER; note = 2'-Omethylcytosine
  modified_base 63: mod_base = OTHER; note = 2'-fluorocytosine
  modified_base 65: mod_base = OTHER; note = 2'-Omethylguanosine
  modified_base 71: mod_base = OTHER; note = 2'-Omethyluridine
  modified_base 73: mod_base = OTHER; note = 2'-Omethylguanosine

SEQ ID NO: 4353 - RNA, 76 nt, synthetic construct; identical to SEQ ID NO: 625
  source 1..76: mol_type = other RNA
  modified_base 1: mod_base = OTHER; note = 2'-Omethylguanosine
  modified_base 10: mod_base = OTHER; note = 2'-Omethylguanosine
  modified_base 13: mod_base = OTHER; note = 2'-Omethylcytosine
  modified_base 17: mod_base = OTHER; note = Guanosine phosphorothiorate
  modified_base 18: mod_base = OTHER; note = 2'-Omethylguanosine
  modified_base 19: mod_base = OTHER; note = Adenosine phosphorothiorate
  modified_base 20: mod_base = OTHER; note = 2'-Omethyluridine
  modified_base 25: mod_base = OTHER; note = 2'-Omethylcytosine
  modified_base 29: mod_base = OTHER; note = 2'-Omethylguanosine
  modified_base 33: mod_base = OTHER; note = 2'-fluorouridine
  modified_base 35: mod_base = OTHER; note = Cytosine phosphorothiorate
  modified_base 37: mod_base = OTHER; note = Adenosine phosphorothiorate
  modified_base 38: mod_base = OTHER; note = Adenosine phosphorothiorate
  modified_base 41: mod_base = OTHER; note = 2'-Omethylcytosine
  modified_base 43: mod_base = OTHER; note = 2'-Omethyladenosine
  modified_base 44: mod_base = OTHER; note = 2'-fluoroadenosine
  modified_base 46: mod_base = OTHER; note = Guanosine phosphorothiorate
  modified_base 50: mod_base = OTHER; note = 2'-Omethylcytosine
  modified_base 52: mod_base = OTHER; note = 2'-Omethylguanosine
  modified_base 54: mod_base = OTHER; note = Uridine phosphorothiorate
  modified_base 55: mod_base = OTHER; note = Uridine phosphorothiorate
  modified_base 56: mod_base = OTHER; note = 2'-Omethylcytosine
  modified_base 62: mod_base = OTHER; note = 2'-Omethylcytosine
  modified_base 63: mod_base = OTHER; note = 2'-fluorocytosine
  modified_base 65: mod_base = OTHER; note = 2'-Omethylguanosine
  modified_base 71: mod_base = OTHER; note = 2'-Omethyluridine
  modified_base 73: mod_base = OTHER; note = 2'-Omethylguanosine

SEQ ID NO: 4354 - RNA, 82 nt, synthetic construct
  source 1..82: mol_type = other RNA
  modified_base 64: mod_base = OTHER; note = Uridine phosphorothiorate
gctgtgatggccgagtggttaaggcgttggacttcaaatccaatggggtctccccgcgcaggttcgaatcctgctcacagcg

SEQ ID NO: 4355 - RNA, 76 nt, synthetic construct; identical to SEQ ID NO: 625
  source 1..76: mol_type = other RNA
  modified_base 1: mod_base = OTHER; note = 2'-Omethylguanosine
  modified_base 2: mod_base = OTHER; note = 2'-Omethylguanosine
  modified_base 3: mod_base = OTHER; note = 2'-Omethylcytosine phosphorothiorate
  modified_base 13: mod_base = OTHER; note = 2'-Omethylcytosine
  modified_base 33: mod_base = OTHER; note = 2'-fluorouridine
  modified_base 35: mod_base = OTHER; note = Cytosine phosphorothiorate
  modified_base 37: mod_base = OTHER; note = Adenosine phosphorothiorate
  modified_base 38: mod_base = OTHER; note = Adenosine phosphorothiorate
  modified_base 52: mod_base = OTHER; note = 2'-Omethylguanosine
  modified_base 57: mod_base = OTHER; note = 2'-Omethylguanosine
  modified_base 62: mod_base = OTHER; note = 2'-Omethylcytosine
  modified_base 73: mod_base = OTHER; note = 2'-Omethylguanosine
  modified_base 75: mod_base = OTHER; note = 2'-fluorocytosine phosphorothiorate

SEQ ID NO: 4356 - RNA, 85 nt, synthetic construct; identical to SEQ ID NO: 3317
  source 1..85: mol_type = other RNA
  modified_base 1: mod_base = OTHER; note = 2'-Omethylguanosine phosphorothiorate
  modified_base 2: mod_base = OTHER; note = 2'-Omethylcytosine
  modified_base 5: mod_base = OTHER; note = 2'-Omethyluridine phosphorothiorate
  modified_base 10: mod_base = OTHER; note = 2'-fluoroguanosine
  modified_base 19: mod_base = OTHER; note = Uridine phosphorothiorate
  modified_base 22: mod_base = OTHER; note = 2'-fluoroadenosine
  modified_base 31: mod_base = OTHER; note = 2'-Omethyladenosine phosphorothiorate
  modified_base 36: mod_base = OTHER; note = 2'-fluoroadenosine
  modified_base 41: mod_base = OTHER; note = Cytosine phosphorothiorate
  modified_base 48: mod_base = OTHER; note = 2'-Omethylguanosine
  modified_base 50: mod_base = OTHER; note = 2'-Omethylcytosine
  modified_base 57: mod_base = OTHER; note = 2'-fluorocytosine phosphorothiorate
  modified_base 59: mod_base = OTHER; note = 2'-fluorocytosine
  modified_base 60: mod_base = OTHER; note = 2'-Omethyladenosine
  modified_base 62: mod_base = OTHER; note = 2'-Omethylguanosine phosphorothiorate
  modified_base 72: mod_base = OTHER; note = 2'-fluorouridine
  modified_base 78: mod_base = OTHER; note = Cytosine phosphorothiorate
  modified_base 82: mod_base = OTHER; note = 2'-Omethylguanosine
  modified_base 84: mod_base = OTHER; note = 2'-Omethylcytosine phosphorothiorate

SEQ ID NO: 4357 - RNA, 85 nt, synthetic construct
  source 1..85: mol_type = other RNA
  modified_base 1: mod_base = OTHER; note = 2'-Omethyladenosine
  modified_base 17: mod_base = OTHER; note = 2'-Omethylguanosine
  modified_base 18: mod_base = OTHER; note = 2'-Omethylguanosine
  modified_base 60: mod_base = OTHER; note = 2'-Omethyluridine
  modified_base 62: mod_base = OTHER; note = 2'-Omethylguanosine
  modified_base 83: mod_base = OTHER; note = 2'-Omethyladenosine
accaggatggccgagtggttaaggcgttggacttcagatccaatggacatatgtccgcgtgggttcgaaccccactcctggtacc

SEQ ID NO: 4358 - RNA, 76 nt, synthetic construct; identical to SEQ ID NO: 625
  source 1..76: mol_type = other RNA
  modified_base 1: mod_base = OTHER; note = 2'-Omethylguanosine phosphorothiorate
  modified_base 2: mod_base = OTHER; note = 2'-Omethylguanosine
  modified_base 3: mod_base = OTHER; note = 2'-Omethylcytosine
  modified_base 4: mod_base = OTHER; note = 2'-Omethyluridine
  modified_base 5: mod_base = OTHER; note = 2'-Omethylcytosine
  modified_base 6: mod_base = OTHER; note = 2'-Omethylcytosine
  modified_base 10: mod_base = OTHER; note = 2'-Omethylguanosine
  modified_base 11: mod_base = OTHER; note = 2'-Omethylcytosine
  modified_base 12: mod_base = OTHER; note = 2'-Omethylguanosine
  modified_base 13: mod_base = OTHER; note = 2'-Omethylcytosine
  modified_base 14: mod_base = OTHER; note = 2'-fluoroadenosine
  modified_base 16: mod_base = OTHER; note = 2'-Omethyluridine
  modified_base 17: mod_base = OTHER; note = 2'-Omethylguanosine
  modified_base 18: mod_base = OTHER; note = 2'-fluoroguanosine
  modified_base 22: mod_base = OTHER; note = 2'-Omethylguanosine
  modified_base 23: mod_base = OTHER; note = 2'-Omethylcytosine
  modified_base 24: mod_base = OTHER; note = 2'-Omethylguanosine
  modified_base 25: mod_base = OTHER; note = 2'-Omethylcytosine
  modified_base 30: mod_base = OTHER; note = 2'-Omethylguanosine
  modified_base 33: mod_base = OTHER; note = 2'-fluorouridine
  modified_base 35: mod_base = OTHER; note = Cytosine phosphorothiorate
  modified_base 37: mod_base = OTHER; note = Adenosine phosphorothiorate
  modified_base 38: mod_base = OTHER; note = Adenosine phosphorothiorate
  modified_base 41: mod_base = OTHER; note = 2'-Omethylcytosine
  modified_base 43: mod_base = OTHER; note = 2'-Omethyladenosine
  modified_base 44: mod_base = OTHER; note = 2'-Omethyladenosine
  modified_base 49: mod_base = OTHER; note = 2'-Omethylcytosine
  modified_base 50: mod_base = OTHER; note = 2'-Omethylcytosine
  modified_base 51: mod_base = OTHER; note = 2'-Omethylguanosine
  modified_base 52: mod_base = OTHER; note = 2'-Omethylguanosine
  modified_base 53: mod_base = OTHER; note = 2'-fluoroguanosine
  modified_base 54: mod_base = OTHER; note = 2'-Omethyluridine
  modified_base 55: mod_base = OTHER; note = Uridine phosphorothiorate
  modified_base 56: mod_base = OTHER; note = 2'-Omethylcytosine
  modified_base 57: mod_base = OTHER; note = 2'-Omethylguanosine
  modified_base 59: mod_base = OTHER; note = 2'-Omethylguanosine
  modified_base 61: mod_base = OTHER; note = 2'-Omethylcytosine
  modified_base 62: mod_base = OTHER; note = 2'-Omethylcytosine
  modified_base 63: mod_base = OTHER; note = 2'-fluorocytosine
  modified_base 64: mod_base = OTHER; note = 2'-Omethylguanosine
  modified_base 65: mod_base = OTHER; note = 2'-Omethylguanosine
  modified_base 66: mod_base = OTHER; note = 2'-Omethylcytosine
  modified_base 67: mod_base = OTHER; note = 2'-Omethylguanosine
  modified_base 68: mod_base = OTHER; note = 2'-Omethylguanosine
  modified_base 72: mod_base = OTHER; note = 2'-Omethylcytosine
  modified_base 73: mod_base = OTHER; note = 2'-Omethylguanosine
  modified_base 74: mod_base = OTHER; note = 2'-fluorocytosine phosphorothiorate
  modified_base 75: mod_base = OTHER; note = 2'-fluorocytosine phosphorothiorate

SEQ ID NO: 4359 - RNA, 76 nt, synthetic construct; identical to SEQ ID NO: 3295
  source 1..76: mol_type = other RNA
  modified_base 1: mod_base = OTHER; note = Cytosine phosphorothiorate
  modified_base 2: mod_base = OTHER; note = 2'-fluorocytosine
  modified_base 6: mod_base = OTHER; note = 2'-fluoroguanosine
  modified_base 11: mod_base = OTHER; note = 2'-Omethylcytosine phosphorothiorate
  modified_base 16: mod_base = OTHER; note = 2'-fluorouridine phosphorothiorate
  modified_base 20: mod_base = OTHER; note = 2'-Omethyluridine
  modified_base 29: mod_base = OTHER; note = Guanosine phosphorothiorate
  modified_base 42: mod_base = OTHER; note = Uridine phosphorothiorate
  modified_base 50: mod_base = OTHER; note = 2'-fluorocytosine phosphorothiorate
  modified_base 51: mod_base = OTHER; note = Uridine phosphorothiorate
  modified_base 75: mod_base = OTHER; note = 2'-Omethylcytosine phosphorothiorate

SEQ ID NO: 4360 - RNA, 76 nt, synthetic construct; identical to SEQ ID NO: 625
  source 1..76: mol_type = other RNA
  modified_base 1: mod_base = OTHER; note = 2'-Omethylguanosine
  modified_base 2: mod_base = OTHER; note = 2'-Omethylguanosine
  modified_base 3: mod_base = OTHER; note = 2'-Omethylcytosine
  modified_base 4: mod_base = OTHER; note = 2'-Omethyluridine
  modified_base 5: mod_base = OTHER; note = 2'-Omethylcytosine
  modified_base 6: mod_base = OTHER; note = 2'-Omethylcytosine
  modified_base 14: mod_base = OTHER; note = 2'-Omethyladenosine
  modified_base 15: mod_base = OTHER; note = 2'-Omethyladenosine
  modified_base 16: mod_base = OTHER; note = 2'-fluorouridine
  modified_base 17: mod_base = OTHER; note = 2'-Omethylguanosine
  modified_base 18: mod_base = OTHER; note = 2'-Omethylguanosine
  modified_base 19: mod_base = OTHER; note = 2'-fluoroadenosine phosphorothiorate
  modified_base 21: mod_base = OTHER; note = 2'-fluoroadenosine phosphorothiorate
  modified_base 22: mod_base = OTHER; note = Guanosine phosphorothiorate
  modified_base 23: mod_base = OTHER; note = 2'-Omethylcytosine
  modified_base 24: mod_base = OTHER; note = 2'-Omethylguanosine
  modified_base 25: mod_base = OTHER; note = 2'-Omethylcytosine
  modified_base 26: mod_base = OTHER; note = 2'-Omethyladenosine phosphorothiorate
  modified_base 28: mod_base = OTHER; note = 2'-Omethyluridine
  modified_base 29: mod_base = OTHER; note = Guanosine phosphorothiorate
  modified_base 30: mod_base = OTHER; note = 2'-Omethylguanosine phosphorothiorate
  modified_base 31: mod_base = OTHER; note = 2'-Omethyladenosine phosphorothiorate
  modified_base 32: mod_base = OTHER; note = 2'-Omethylcytosine phosphorothiorate
  modified_base 33: mod_base = OTHER; note = 2'-fluorouridine
  modified_base 35: mod_base = OTHER; note = Cytosine phosphorothiorate
  modified_base 37: mod_base = OTHER; note = Adenosine phosphorothiorate
  modified_base 38: mod_base = OTHER; note = Adenosine phosphorothiorate
  modified_base 39: mod_base = OTHER; note = 2'-Omethyluridine phosphorothiorate
  modified_base 40: mod_base = OTHER; note = 2'-Omethyluridine
  modified_base 41: mod_base = OTHER; note = 2'-fluorocytosine
  modified_base 43: mod_base = OTHER; note = 2'-Omethyladenosine
  modified_base 44: mod_base = OTHER; note = 2'-Omethyladenosine
  modified_base 49: mod_base = OTHER; note = 2'-Omethylcytosine
  modified_base 50: mod_base = OTHER; note = 2'-Omethylcytosine
  modified_base 52: mod_base = OTHER; note = 2'-Omethylguanosine phosphorothiorate
  modified_base 53: mod_base = OTHER; note = 2'-fluoroguanosine
  modified_base 54: mod_base = OTHER; note = 2'-Omethyluridine phosphorothiorate
  modified_base 55: mod_base = OTHER; note = Uridine phosphorothiorate
  modified_base 59: mod_base = OTHER; note = 2'-Omethylguanosine
  modified_base 61: mod_base = OTHER; note = 2'-Omethylcytosine
  modified_base 62: mod_base = OTHER; note = 2'-Omethylcytosine phosphorothiorate
  modified_base 63: mod_base = OTHER; note = 2'-fluorocytosine
  modified_base 64: mod_base = OTHER; note = 2'-Omethylguanosine phosphorothiorate
  modified_base 65: mod_base = OTHER; note = 2'-Omethylguanosine
  modified_base 66: mod_base = OTHER; note = 2'-Omethylcytosine phosphorothiorate
  modified_base 67: mod_base = OTHER; note = 2'-fluoroguanosine
  modified_base 68: mod_base = OTHER; note = 2'-Omethylguanosine phosphorothiorate
  modified_base 69: mod_base = OTHER; note = 2'-fluoroadenosine
  modified_base 72: mod_base = OTHER; note = Cytosine phosphorothiorate
  modified_base 73: mod_base = OTHER; note = 2'-Omethylguanosine
  modified_base 74: mod_base = OTHER; note = 2'-fluorocytosine phosphorothiorate
  modified_base 75: mod_base = OTHER; note = Cytosine phosphorothiorate
  modified_base 76: mod_base = OTHER; note = 2'-Omethyladenosine

SEQ ID NO: 4361 - RNA, 76 nt, synthetic construct; identical to SEQ ID NO: 625
  source 1..76: mol_type = other RNA
  modified_base 22: mod_base = OTHER; note = 2'-Omethylguanosine
  modified_base 23: mod_base = OTHER; note = 2'-Omethylcytosine
  modified_base 24: mod_base = OTHER; note = 2'-Omethylguanosine
  modified_base 25: mod_base = OTHER; note = 2'-Omethylcytosine
  modified_base 44: mod_base = OTHER; note = 2'-Omethyladenosine
  modified_base 45: mod_base = OTHER; note = 2'-Omethylguanosine
  modified_base 46: mod_base = OTHER; note = 2'-Omethylguanosine
  modified_base 49: mod_base = OTHER; note = 2'-Omethylcytosine
  modified_base 50: mod_base = OTHER; note = 2'-Omethylcytosine
  modified_base 51: mod_base = OTHER; note = 2'-Omethylguanosine
  modified_base 52: mod_base = OTHER; note = 2'-Omethylguanosine
  modified_base 53: mod_base = OTHER; note = 2'-Omethylguanosine
  modified_base 61: mod_base = OTHER; note = 2'-Omethylcytosine
  modified_base 62: mod_base = OTHER; note = 2'-Omethylcytosine
  modified_base 63: mod_base = OTHER; note = 2'-Omethylcytosine
  modified_base 64: mod_base = OTHER; note = 2'-Omethylguanosine
  modified_base 65: mod_base = OTHER; note = 2'-Omethylguanosine
  modified_base 66: mod_base = OTHER; note = 2'-Omethylcytosine
  modified_base 67: mod_base = OTHER; note = 2'-Omethylguanosine
  modified_base 68: mod_base = OTHER; note = 2'-Omethylguanosine
  modified_base 69: mod_base = OTHER; note = 2'-Omethyladenosine

SEQ ID NO: 4362 - RNA, 85 nt, synthetic construct; identical to SEQ ID NO: 3297
  source 1..85: mol_type = other RNA
  modified_base 1: mod_base = OTHER; note = 2'-Omethylguanosine
  modified_base 10: mod_base = OTHER; note = 2'-Omethylguanosine
  modified_base 11: mod_base = OTHER; note = 2'-Omethylcytosine
  modified_base 12: mod_base = OTHER; note = 2'-Omethylcytosine
  modified_base 13: mod_base = OTHER; note = 2'-Omethylguanosine
  modified_base 17: mod_base = OTHER; note = 2'-Omethylguanosine
  modified_base 18: mod_base = OTHER; note = 2'-Omethylguanosine
  modified_base 25: mod_base = OTHER; note = 2'-Omethylcytosine
  modified_base 33: mod_base = OTHER; note = 2'-fluorouridine
  modified_base 34: mod_base = OTHER; note = 2'-Omethyluridine
  modified_base 35: mod_base = OTHER; note = Cytosine phosphorothiorate
  modified_base 37: mod_base = OTHER; note = Adenosine phosphorothiorate
  modified_base 38: mod_base = OTHER; note = Adenosine phosphorothiorate
  modified_base 41: mod_base = OTHER; note = 2'-Omethylcytosine
  modified_base 42: mod_base = OTHER; note = 2'-Omethyladenosine
  modified_base 43: mod_base = OTHER; note = 2'-Omethyladenosine
  modified_base 44: mod_base = OTHER; note = 2'-Omethyluridine
  modified_base 58: mod_base = OTHER; note = 2'-Omethylguanosine
  modified_base 59: mod_base = OTHER; note = 2'-Omethylcytosine
  modified_base 61: mod_base = OTHER; note = 2'-Omethylguanosine
  modified_base 63: mod_base = OTHER; note = Uridine phosphorothiorate
  modified_base 64: mod_base = OTHER; note = Uridine phosphorothiorate
  modified_base 70: mod_base = OTHER; note = 2'-Omethylcytosine
  modified_base 74: mod_base = OTHER; note = 2'-Omethylcytosine
  modified_base 82: mod_base = OTHER; note = 2'-Omethylguanosine

SEQ ID NO: 4363 - RNA, 76 nt, synthetic construct; identical to SEQ ID NO: 3289
  source 1..76: mol_type = other RNA
  modified_base 1: mod_base = OTHER; note = 2'-Omethylguanosine
  modified_base 10: mod_base = OTHER; note = 2'-Omethylguanosine
  modified_base 13: mod_base = OTHER; note = 2'-Omethylcytosine
  modified_base 16: mod_base = OTHER; note = Uridine phosphorothiorate
  modified_base 18: mod_base = OTHER; note = Guanosine phosphorothiorate
  modified_base 19: mod_base = OTHER; note = 2'-Omethylguanosine phosphorothiorate
  modified_base 20: mod_base = OTHER; note = Uridine phosphorothiorate
  modified_base 25: mod_base = OTHER; note = 2'-Omethylcytosine
  modified_base 29: mod_base = OTHER; note = 2'-Omethyladenosine
  modified_base 33: mod_base = OTHER; note = 2'-fluorouridine
  modified_base 35: mod_base = OTHER; note = Uridine phosphorothiorate
  modified_base 37: mod_base = OTHER; note = Adenosine phosphorothiorate
  modified_base 38: mod_base = OTHER; note = Adenosine phosphorothiorate
  modified_base 41: mod_base = OTHER; note = 2'-fluorouridine
  modified_base 42: mod_base = OTHER; note = Guanosine phosphorothiorate
  modified_base 43: mod_base = OTHER; note = 2'-Omethyladenosine
  modified_base 44: mod_base = OTHER; note = 2'-fluoroguanosine
  modified_base 46: mod_base = OTHER; note = Guanosine phosphorothiorate
  modified_base 50: mod_base = OTHER; note = 2'-Omethyladenosine
  modified_base 52: mod_base = OTHER; note = 2'-Omethylguanosine
  modified_base 54: mod_base = OTHER; note = Uridine phosphorothiorate
  modified_base 55: mod_base = OTHER; note = Uridine phosphorothiorate
  modified_base 56: mod_base = OTHER; note = 2'-Omethylcytosine
  modified_base 57: mod_base = OTHER; note = Adenosine phosphorothiorate
  modified_base 58: mod_base = OTHER; note = Adenosine phosphorothiorate
  modified_base 62: mod_base = OTHER; note = 2'-Omethylcytosine
  modified_base 63: mod_base = OTHER; note = 2'-fluorocytosine
  modified_base 65: mod_base = OTHER; note = 2'-Omethylguanosine
  modified_base 71: mod_base = OTHER; note = 2'-Omethylguanosine
  modified_base 73: mod_base = OTHER; note = 2'-Omethylguanosine

SEQ ID NO: 4364 - RNA, 75 nt, synthetic construct; identical to SEQ ID NO: 3299
  source 1..75: mol_type = other RNA
  modified_base 6: mod_base = OTHER; note = 2'-Omethylguanosine
  modified_base 11: mod_base = OTHER; note = 2'-fluorouridine phosphorothiorate
  modified_base 22: mod_base = OTHER; note = 2'-fluoroadenosine
  modified_base 25: mod_base = OTHER; note = 2'-fluoroadenosine
  modified_base 26: mod_base = OTHER; note = 2'-fluorouridine
  modified_base 61: mod_base = OTHER; note = Cytosine phosphorothiorate
  modified_base 73: mod_base = OTHER; note = Cytosine phosphorothiorate

SEQ ID NO: 4365 - RNA, 75 nt, synthetic construct; identical to SEQ ID NO: 1045
  source 1..75: mol_type = other RNA
  modified_base 1: mod_base = OTHER; note = 2'-fluoroguanosine phosphorothiorate
  modified_base 2: mod_base = OTHER; note = 2'-Omethylguanosine phosphorothiorate
  modified_base 22: mod_base = OTHER; note = 2'-fluoroguanosine
  modified_base 40: mod_base = OTHER; note = 2'-fluorocytosine
  modified_base 43: mod_base = OTHER; note = 2'-fluoroguanosine
  modified_base 58: mod_base = OTHER; note = 2'-Omethylguanosine
  modified_base 59: mod_base = OTHER; note = 2'-fluorouridine
  modified_base 60: mod_base = OTHER; note = Cytosine phosphorothiorate
  modified_base 68: mod_base = OTHER; note = 2'-fluoroadenosine
  modified_base 72: mod_base = OTHER; note = Uridine phosphorothiorate

SEQ ID NO: 4366 - RNA, 76 nt, synthetic construct; identical to SEQ ID NO: 3295
  source 1..76: mol_type = other RNA
  modified_base 1: mod_base = OTHER; note = 2'-fluorocytosine
  modified_base 2: mod_base = OTHER; note = 2'-fluorocytosine phosphorothiorate
  modified_base 3: mod_base = OTHER; note = 2'-Omethyluridine
  modified_base 9: mod_base = OTHER; note = 2'-fluoroadenosine phosphorothiorate
  modified_base 14: mod_base = OTHER; note = 2'-fluoroadenosine phosphorothiorate
  modified_base 16: mod_base = OTHER; note = 2'-fluorouridine
  modified_base 25: mod_base = OTHER; note = 2'-fluorocytosine phosphorothiorate
  modified_base 49: mod_base = OTHER; note = 2'-Omethylguanosine
  modified_base 75: mod_base = OTHER; note = 2'-Omethylcytosine phosphorothiorate
  modified_base 76: mod_base = OTHER; note = 2'-Omethyladenosine

SEQ ID NO: 4367 - RNA, 76 nt, synthetic construct; identical to SEQ ID NO: 625
  source 1..76: mol_type = other RNA
  modified_base 1: mod_base = OTHER; note = 2'-Omethylguanosine phosphorothiorate
  modified_base 2: mod_base = OTHER; note = 2'-Omethylguanosine phosphorothiorate
  modified_base 3: mod_base = OTHER; note = 2'-Omethylcytosine phosphorothiorate
  modified_base 4: mod_base = OTHER; note = 2'-Omethyluridine phosphorothiorate
  modified_base 5: mod_base = OTHER; note = 2'-Omethylcytosine phosphorothiorate
  modified_base 6: mod_base = OTHER; note = 2'-Omethylcytosine phosphorothiorate
  modified_base 22: mod_base = OTHER; note = 2'-Omethylguanosine
  modified_base 23: mod_base = OTHER; note = 2'-Omethylcytosine
  modified_base 24: mod_base = OTHER; note = 2'-Omethylguanosine
  modified_base 25: mod_base = OTHER; note = 2'-Omethylcytosine
  modified_base 54: mod_base = OTHER; note = Uridine phosphorothiorate
  modified_base 55: mod_base = OTHER; note = Uridine phosphorothiorate
  modified_base 56: mod_base = OTHER; note = Cytosine phosphorothiorate
  modified_base 57: mod_base = OTHER; note = Guanosine phosphorothiorate
  modified_base 61: mod_base = OTHER; note = 2'-Omethylcytosine
  modified_base 62: mod_base = OTHER; note = 2'-Omethylcytosine
  modified_base 63: mod_base = OTHER; note = 2'-Omethylcytosine
  modified_base 64: mod_base = OTHER; note = 2'-Omethylguanosine
  modified_base 65: mod_base = OTHER; note = 2'-Omethylguanosine
  modified_base 66: mod_base = OTHER; note = 2'-Omethylcytosine
  modified_base 67: mod_base = OTHER; note = 2'-Omethylguanosine
  modified_base 68: mod_base = OTHER; note = 2'-Omethylguanosine
  modified_base 69: mod_base = OTHER; note = 2'-Omethyladenosine

SEQ ID NO: 4368 - RNA, 75 nt, synthetic construct; identical to SEQ ID NO: 1045
  source 1..75: mol_type = other RNA
  modified_base 2: mod_base = OTHER; note = 2'-Omethylguanosine phosphorothiorate
  modified_base 3: mod_base = OTHER; note = 2'-Omethyluridine phosphorothiorate
  modified_base 15: mod_base = OTHER; note = 2'-Omethyladenosine
  modified_base 16: mod_base = OTHER; note = 2'-Omethyluridine phosphorothiorate
  modified_base 17: mod_base = OTHER; note = 2'-Omethylguanosine phosphorothiorate
  modified_base 18: mod_base = OTHER; note = 2'-Omethylguanosine
  modified_base 38: mod_base = OTHER; note = 2'-Omethyladenosine
  modified_base 39: mod_base = OTHER; note = 2'-fluorouridine phosphorothiorate
  modified_base 49: mod_base = OTHER; note = 2'-fluorocytosine
  modified_base 50: mod_base = OTHER; note = 2'-Omethylguanosine
  modified_base 53: mod_base = OTHER; note = 2'-Omethyluridine
  modified_base 55: mod_base = OTHER; note = 2'-Omethylcytosine
  modified_base 62: mod_base = OTHER; note = Cytosine phosphorothiorate
  modified_base 66: mod_base = OTHER; note = 2'-Omethylguanosine
  modified_base 67: mod_base = OTHER; note = 2'-Omethylguanosine
  modified_base 69: mod_base = OTHER; note = 2'-fluoroadenosine
  modified_base 72: mod_base = OTHER; note = 2'-Omethyluridine
  modified_base 73: mod_base = OTHER; note = Cytosine phosphorothiorate
  modified_base 74: mod_base = OTHER; note = 2'-Omethylcytosine phosphorothiorate
  modified_base 75: mod_base = OTHER; note = 2'-Omethyladenosine

SEQ ID NO: 4369 - RNA, 76 nt, synthetic construct; identical to SEQ ID NO: 625
  source 1..76: mol_type = other RNA
  modified_base 1: mod_base = OTHER; note = 2'-Omethylguanosine
  modified_base 33: mod_base = OTHER; note = 2'-O-(2-Methoxyethyl) thymine
  modified_base 40: mod_base = OTHER; note = 2'-fluorouridine
  modified_base 41: mod_base = OTHER; note = 2'-fluorocytosine
  modified_base 42: mod_base = OTHER; note = 2'-Omethyladenosine
  modified_base 43: mod_base = OTHER; note = 2'-Omethyladenosine
  modified_base 73: mod_base = OTHER; note = 2'-Omethylguanosine

SEQ ID NO: 4370 - RNA, 76 nt, synthetic construct; identical to SEQ ID NO: 625
  source 1..76: mol_type = other RNA
  modified_base 1: mod_base = OTHER; note = 2'-Omethylguanosine
  modified_base 10: mod_base = OTHER; note = 2'-Omethylguanosine
  modified_base 13: mod_base = OTHER; note = 2'-Omethylcytosine
  modified_base 17: mod_base = OTHER; note = Guanosine phosphorothiorate
  modified_base 18: mod_base = OTHER; note = 2'-Omethylguanosine
  modified_base 19: mod_base = OTHER; note = Adenosine phosphorothiorate
  modified_base 20: mod_base = OTHER; note = 2'-Omethyluridine
  modified_base 25: mod_base = OTHER; note = 2'-Omethylcytosine
  modified_base 29: mod_base = OTHER; note = 2'-Omethylguanosine
  modified_base 33: mod_base = OTHER; note = 2'-fluorouridine
  modified_base 35: mod_base = OTHER; note = Cytosine phosphorothiorate
  modified_base 37: mod_base = OTHER; note = Adenosine phosphorothiorate
  modified_base 38: mod_base = OTHER; note = Adenosine phosphorothiorate
  modified_base 41: mod_base = OTHER; note = 2'-fluorocytosine phosphorothiorate
  modified_base 43: mod_base = OTHER; note = 2'-Omethyladenosine
  modified_base 44: mod_base = OTHER; note = 2'-fluoroadenosine
  modified_base 50: mod_base = OTHER; note = 2'-Omethylcytosine
  modified_base 52: mod_base = OTHER; note = 2'-Omethylguanosine
  modified_base 54: mod_base = OTHER; note = Uridine phosphorothiorate
  modified_base 55: mod_base = OTHER; note = Uridine phosphorothiorate
  modified_base 56: mod_base = OTHER; note = 2'-Omethylcytosine
  modified_base 57: mod_base = OTHER; note = Guanosine phosphorothiorate
  modified_base 62: mod_base = OTHER; note = 2'-Omethylcytosine
  modified_base 63: mod_base = OTHER; note = 2'-fluorocytosine
  modified_base 71: mod_base = OTHER; note = 2'-Omethyluridine
  modified_base 73: mod_base = OTHER; note = 2'-Omethylguanosine

SEQ ID NO: 4371 - RNA, 75 nt, synthetic construct; identical to SEQ ID NO: 3336
  source 1..75: mol_type = other RNA
  modified_base 10: mod_base = OTHER; note = Cytosine phosphorothiorate
  modified_base 17: mod_base = OTHER; note = 2'-fluoroguanosine
  modified_base 27: mod_base = OTHER; note = 2'-fluorocytosine
  modified_base 38: mod_base = OTHER; note = 2'-fluorouridine
  modified_base 42: mod_base = OTHER; note = 2'-fluoroadenosine
  modified_base 49: mod_base = OTHER; note = 2'-fluoroadenosine
  modified_base 68: mod_base = OTHER; note = 2'-fluoroadenosine phosphorothiorate

SEQ ID NO: 4372 - RNA, 76 nt, synthetic construct; identical to SEQ ID NO: 625
  source 1..76: mol_type = other RNA
  modified_base 6: mod_base = OTHER; note = 2'-O-(2-Methoxyethyl) 5-methylcytosine

SEQ ID NO: 4373 - RNA, 75 nt, synthetic construct; identical to SEQ ID NO: 1045
  source 1..75: mol_type = other RNA
  modified_base 1: mod_base = OTHER; note = 2'-Omethylguanosine
  modified_base 60: mod_base = OTHER; note = 2'-Omethylcytosine
  modified_base 61: mod_base = OTHER; note = 2'-Omethyluridine
  modified_base 62: mod_base = OTHER; note = 2'-fluorocytosine
  modified_base 63: mod_base = OTHER; note = 2'-Omethylguanosine
  modified_base 64: mod_base = OTHER; note = 2'-Omethylguanosine
  modified_base 65: mod_base = OTHER; note = 2'-Omethyluridine
  modified_base 66: mod_base = OTHER; note = 2'-Omethylguanosine
  modified_base 67: mod_base = OTHER; note = 2'-Omethylguanosine
  modified_base 68: mod_base = OTHER; note = 2'-Omethyladenosine
  modified_base 69: mod_base = OTHER; note = 2'-fluoroadenosine
  modified_base 70: mod_base = OTHER; note = 2'-Omethylcytosine
  modified_base 71: mod_base = OTHER; note = 2'-Omethylcytosine
  modified_base 72: mod_base = OTHER; note = 2'-Omethyluridine

SEQ ID NO: 4374 - RNA, 85 nt, synthetic construct; identical to SEQ ID NO: 3297
  source 1..85: mol_type = other RNA
  modified_base 1: mod_base = OTHER; note = 2'-Omethylguanosine
  modified_base 19: mod_base = OTHER; note = 2'-Omethyluridine
  modified_base 20: mod_base = OTHER; note = 2'-Omethyluridine
  modified_base 21: mod_base = OTHER; note = 2'-fluoroadenosine
  modified_base 22: mod_base = OTHER; note = 2'-Omethyladenosine
  modified_base 40: mod_base = OTHER; note = 2'-fluorocytosine
  modified_base 41: mod_base = OTHER; note = 2'-Omethylcytosine
  modified_base 42: mod_base = OTHER; note = 2'-Omethyladenosine
  modified_base 43: mod_base = OTHER; note = 2'-Omethyladenosine
  modified_base 82: mod_base = OTHER; note = 2'-Omethylguanosine

SEQ ID NO: 4375 - RNA, 74 nt, synthetic construct; identical to SEQ ID NO: 766
  source 1..74: mol_type = other RNA
  modified_base 1: mod_base = OTHER; note = 2'-Omethylguanosine phosphorothiorate
  modified_base 2: mod_base = OTHER; note = 2'-Omethylguanosine phosphorothiorate
  modified_base 3: mod_base = OTHER; note = 2'-Omethylcytosine
  modified_base 4: mod_base = OTHER; note = 2'-Omethyluridine
  modified_base 5: mod_base = OTHER; note = 2'-Omethylcytosine
  modified_base 6: mod_base = OTHER; note = 2'-Omethylcytosine
  modified_base 10: mod_base = OTHER; note = 2'-Omethylguanosine
  modified_base 11: mod_base = OTHER; note = 2'-Omethylcytosine
  modified_base 12: mod_base = OTHER; note = 2'-Omethylguanosine
  modified_base 13: mod_base = OTHER; note = 2'-Omethylcytosine
  modified_base 14: mod_base = OTHER; note = 2'-Omethyladenosine
  modified_base 15: mod_base = OTHER; note = 2'-Omethyladenosine
  modified_base 16: mod_base = OTHER; note = 2'-Omethyluridine
  modified_base 17: mod_base = OTHER; note = 2'-Omethylguanosine
  modified_base 18: mod_base = OTHER; note = 2'-Omethylguanosine
  modified_base 20: mod_base = OTHER; note = 2'-Omethyluridine
  modified_base 22: mod_base = OTHER; note = 2'-Omethylguanosine
  modified_base 23: mod_base = OTHER; note = 2'-Omethylcytosine
  modified_base 24: mod_base = OTHER; note = 2'-Omethylguanosine
  modified_base 25: mod_base = OTHER; note = 2'-Omethylcytosine
  modified_base 33: mod_base = OTHER; note = 2'-fluorouridine
  modified_base 35: mod_base = OTHER; note = Cytosine phosphorothiorate
  modified_base 37: mod_base = OTHER; note = Adenosine phosphorothiorate
  modified_base 38: mod_base = OTHER; note = Adenosine phosphorothiorate
  modified_base 41: mod_base = OTHER; note = 2'-fluorocytosine
  modified_base 42: mod_base = OTHER; note = 2'-Omethyladenosine
  modified_base 43: mod_base = OTHER; note = 2'-Omethyladenosine
  modified_base 44: mod_base = OTHER; note = 2'-fluoroadenosine
  modified_base 49: mod_base = OTHER; note = 2'-Omethylcytosine
  modified_base 50: mod_base = OTHER; note = 2'-Omethylcytosine
  modified_base 52: mod_base = OTHER; note = 2'-Omethylguanosine
  modified_base 54: mod_base = OTHER; note = 2'-Omethyluridine
  modified_base 55: mod_base = OTHER; note = Uridine phosphorothiorate
  modified_base 56: mod_base = OTHER; note = 2'-Omethylcytosine
  modified_base 57: mod_base = OTHER; note = 2'-fluoroguanosine
  modified_base 59: mod_base = OTHER; note = 2'-Omethylguanosine
  modified_base 61: mod_base = OTHER; note = 2'-Omethylcytosine
  modified_base 65: mod_base = OTHER; note = 2'-Omethylguanosine
  modified_base 73: mod_base = OTHER; note = 2'-Omethylguanosine

SEQ ID NO: 4376 - RNA, 76 nt, synthetic construct; identical to SEQ ID NO: 625
  source 1..76: mol_type = other RNA
  modified_base 1: mod_base = OTHER; note = 2'-fluoroguanosine
  modified_base 2: mod_base = OTHER; note = 2'-fluoroguanosine phosphorothiorate
  modified_base 4: mod_base = OTHER; note = Uridine phosphorothiorate
  modified_base 15: mod_base = OTHER; note = 2'-Omethyladenosine
  modified_base 18: mod_base = OTHER; note = 2'-Omethylguanosine
  modified_base 21: mod_base = OTHER; note = Adenosine phosphorothiorate
  modified_base 23: mod_base = OTHER; note = Cytosine phosphorothiorate
  modified_base 24: mod_base = OTHER; note = 2'-fluoroguanosine
  modified_base 26: mod_base = OTHER; note = 2'-Omethyladenosine phosphorothiorate
  modified_base 27: mod_base = OTHER; note = Uridine phosphorothiorate
  modified_base 28: mod_base = OTHER; note = 2'-fluorouridine
  modified_base 29: mod_base = OTHER; note = 2'-fluoroguanosine
  modified_base 31: mod_base = OTHER; note = 2'-Omethyladenosine
  modified_base 39: mod_base = OTHER; note = 2'-fluorouridine
  modified_base 40: mod_base = OTHER; note = 2'-fluorouridine
  modified_base 41: mod_base = OTHER; note = 2'-Omethylcytosine
  modified_base 45: mod_base = OTHER; note = 2'-Omethylguanosine
  modified_base 46: mod_base = OTHER; note = 2'-fluoroguanosine
  modified_base 50: mod_base = OTHER; note = Cytosine phosphorothiorate
  modified_base 51: mod_base = OTHER; note = Guanosine phosphorothiorate
  modified_base 52: mod_base = OTHER; note = 2'-Omethylguanosine
  modified_base 53: mod_base = OTHER; note = 2'-fluoroguanosine
  modified_base 56: mod_base = OTHER; note = 2'-fluorocytosine
  modified_base 57: mod_base = OTHER; note = 2'-fluoroguanosine phosphorothiorate
  modified_base 58: mod_base = OTHER; note = Adenosine phosphorothiorate
  modified_base 59: mod_base = OTHER; note = 2'-fluoroguanosine
  modified_base 63: mod_base = OTHER; note = 2'-Omethylcytosine
  modified_base 64: mod_base = OTHER; note = Guanosine phosphorothiorate
  modified_base 66: mod_base = OTHER; note = 2'-Omethylcytosine phosphorothiorate
  modified_base 67: mod_base = OTHER; note = 2'-fluoroguanosine
  modified_base 68: mod_base = OTHER; note = 2'-Omethylguanosine phosphorothiorate
  modified_base 69: mod_base = OTHER; note = 2'-fluoroadenosine
  modified_base 72: mod_base = OTHER; note = 2'-fluorocytosine
  modified_base 73: mod_base = OTHER; note = Guanosine phosphorothiorate
  modified_base 74: mod_base = OTHER; note = 2'-fluorocytosine

SEQ ID NO: 4377 - RNA, 73 nt, synthetic construct; identical to SEQ ID NO: 935
  source 1..73: mol_type = other RNA
  modified_base 1: mod_base = OTHER; note = 2'-Omethylguanosine
  modified_base 14: mod_base = OTHER; note = 2'-Omethyladenosine
  modified_base 16: mod_base = OTHER; note = 2'-Omethyluridine
  modified_base 17: mod_base = OTHER; note = 2'-Omethylguanosine
  modified_base 18: mod_base = OTHER; note = 2'-Omethylguanosine
  modified_base 19: mod_base = OTHER; note = 2'-fluoroadenosine
  modified_base 20: mod_base = OTHER; note = 2'-Omethyluridine
  modified_base 72: mod_base = OTHER; note = 2'-Omethylcytosine

SEQ ID NO: 4378 - RNA, 75 nt, synthetic construct; identical to SEQ ID NO: 1045
  source 1..75: mol_type = other RNA
  modified_base 1: mod_base = OTHER; note = 2'-Omethylguanosine phosphorothiorate
  modified_base 2: mod_base = OTHER; note = 2'-Omethylguanosine
  modified_base 13: mod_base = OTHER; note = Uridine phosphorothiorate
  modified_base 14: mod_base = OTHER; note = 2'-Omethyladenosine
  modified_base 54: mod_base = OTHER; note = Uridine phosphorothiorate
  modified_base 73: mod_base = OTHER; note = Cytosine phosphorothiorate
  modified_base 74: mod_base = OTHER; note = 2'-Omethylcytosine

SEQ ID NO: 4379 - RNA, 85 nt, synthetic construct; identical to SEQ ID NO: 3317
  source 1..85: mol_type = other RNA
  modified_base 1: mod_base = OTHER; note = 2'-Omethylguanosine phosphorothiorate
  modified_base 11: mod_base = OTHER; note = 2'-Omethylcytosine
  modified_base 19: mod_base = OTHER; note = Uridine phosphorothiorate
  modified_base 28: mod_base = OTHER; note = 2'-fluorouridine
  modified_base 47: mod_base = OTHER; note = Guanosine phosphorothiorate
  modified_base 82: mod_base = OTHER; note = 2'-Omethylguanosine phosphorothiorate

SEQ ID NO: 4380 - RNA, 76 nt, synthetic construct; identical to SEQ ID NO: 625
  source 1..76: mol_type = other RNA
  modified_base 2: mod_base = OTHER; note = 2'-fluoroguanosine
  modified_base 3: mod_base = OTHER; note = Cytosine phosphorothiorate
  modified_base 4: mod_base = OTHER; note = Uridine phosphorothiorate
  modified_base 6: mod_base = OTHER; note = Cytosine phosphorothiorate
  modified_base 7: mod_base = OTHER; note = Guanosine phosphorothiorate
  modified_base 10: mod_base = OTHER; note = 2'-Omethylguanosine
  modified_base 16: mod_base = OTHER; note = Uridine phosphorothiorate
  modified_base 17: mod_base = OTHER; note = Guanosine phosphorothiorate
  modified_base 18: mod_base = OTHER; note = 2'-fluoroguanosine
  modified_base 19: mod_base = OTHER; note = Adenosine phosphorothiorate
  modified_base 21: mod_base = OTHER; note = Adenosine phosphorothiorate
  modified_base 22: mod_base = OTHER; note = 2'-fluoroguanosine
  modified_base 24: mod_base = OTHER; note = 2'-Omethylguanosine
  modified_base 27: mod_base = OTHER; note = 2'-Omethyluridine phosphorothiorate
  modified_base 28: mod_base = OTHER; note = 2'-fluorouridine
  modified_base 30: mod_base = OTHER; note = Guanosine phosphorothiorate
  modified_base 31: mod_base = OTHER; note = 2'-Omethyladenosine
  modified_base 33: mod_base = OTHER; note = Uridine phosphorothiorate
  modified_base 34: mod_base = OTHER; note = 2'-Omethyluridine
  modified_base 36: mod_base = OTHER; note = Adenosine phosphorothiorate
  modified_base 38: mod_base = OTHER; note = 2'-Omethyladenosine phosphorothiorate
  modified_base 41: mod_base = OTHER; note = 2'-Omethylcytosine
  modified_base 44: mod_base = OTHER; note = 2'-Omethyladenosine
  modified_base 46: mod_base = OTHER; note = 2'-Omethylguanosine phosphorothiorate
  modified_base 47: mod_base = OTHER; note = 2'-Omethyluridine
  modified_base 48: mod_base = OTHER; note = 2'-Omethyluridine
  modified_base 53: mod_base = OTHER; note = 2'-fluoroguanosine phosphorothiorate
  modified_base 54: mod_base = OTHER; note = Uridine phosphorothiorate
  modified_base 56: mod_base = OTHER; note = 2'-Omethylcytosine
  modified_base 57: mod_base = OTHER; note = 2'-fluoroguanosine
  modified_base 60: mod_base = OTHER; note = Uridine phosphorothiorate
  modified_base 61: mod_base = OTHER; note = 2'-fluorocytosine
  modified_base 67: mod_base = OTHER; note = 2'-Omethylguanosine
  modified_base 68: mod_base = OTHER; note = Guanosine phosphorothiorate
  modified_base 72: mod_base = OTHER; note = 2'-fluorocytosine

SEQ ID NO: 4381 - DNA, 74 bp, synthetic construct; identical to SEQ ID NO: 3384
  source 1..74: mol_type = other DNA
  modified_base 1: mod_base = OTHER; note = 2'-Omethylguanosine phosphorothiorate
  modified_base 2: mod_base = OTHER; note = 2'-Omethylguanosine phosphorothiorate
  modified_base 45: mod_base = OTHER; note = Guanosine phosphorothiorate
  modified_base 65: mod_base = OTHER; note = 2'-Omethylguanosine
  modified_base 72: mod_base = OTHER; note = 2'-Omethylcytosine
  modified_base 73: mod_base = OTHER; note = 2'-Omethylguanosine
  misc_feature 1..45: note = RNA
  misc_feature 46: note = DNA
  misc_feature 47..74: note = RNA

SEQ ID NO: 4382 - RNA, 75 nt, synthetic construct; identical to SEQ ID NO: 3306
  source 1..75: mol_type = other RNA
  modified_base 1: mod_base = OTHER; note = 2'-Omethylguanosine phosphorothiorate
  modified_base 2: mod_base = OTHER; note = Adenosine phosphorothiorate
  modified_base 74: mod_base = OTHER; note = 2'-Omethylcytosine phosphorothiorate

SEQ ID NO: 4383 - RNA, 76 nt, synthetic construct; identical to SEQ ID NO: 625
  source 1..76: mol_type = other RNA
  modified_base 1: mod_base = OTHER; note = 2'-Omethylguanosine phosphorothiorate
  modified_base 2: mod_base = OTHER; note = 2'-Omethylguanosine
  modified_base 17: mod_base = OTHER; note = 2'-Omethylguanosine
  modified_base 33: mod_base = OTHER; note = 2'-fluorouridine
  modified_base 35: mod_base = OTHER; note = Cytosine phosphorothiorate
  modified_base 37: mod_base = OTHER; note = Adenosine phosphorothiorate
  modified_base 38: mod_base = OTHER; note = Adenosine phosphorothiorate
  modified_base 52: mod_base = OTHER; note = 2'-Omethylguanosine
  modified_base 56: mod_base = OTHER; note = 2'-Omethylcytosine
  modified_base 62: mod_base = OTHER; note = 2'-Omethylcytosine
  modified_base 73: mod_base = OTHER; note = 2'-Omethylguanosine
  modified_base 75: mod_base = OTHER; note = 2'-fluorocytosine phosphorothiorate

SEQ ID NO: 4384 - RNA, 76 nt, synthetic construct; identical to SEQ ID NO: 3447
  source 1..76: mol_type = other RNA
  modified_base 1: mod_base = OTHER; note = 2'-Omethylguanosine phosphorothiorate
  modified_base 2: mod_base = OTHER; note = 2'-Omethylcytosine phosphorothiorate
  modified_base 3: mod_base = OTHER; note = 2'-Omethylcytosine
  modified_base 4: mod_base = OTHER; note = 2'-Omethylcytosine
  modified_base 5: mod_base = OTHER; note = 2'-Omethylguanosine
  modified_base 6: mod_base = OTHER; note = 2'-Omethyladenosine
  modified_base 16: mod_base = OTHER; note = 2'-Omethyluridine
  modified_base 17: mod_base = OTHER; note = 2'-Omethylguanosine
  modified_base 18: mod_base = OTHER; note = 2'-Omethylguanosine
  modified_base 20: mod_base = OTHER; note = 2'-Omethyluridine
  modified_base 25: mod_base = OTHER; note = 2'-Omethylcytosine
  modified_base 33: mod_base = OTHER; note = 2'-fluorouridine
  modified_base 35: mod_base = OTHER; note = Cytosine phosphorothiorate
  modified_base 37: mod_base = OTHER; note = Adenosine phosphorothiorate
  modified_base 38: mod_base = OTHER; note = Adenosine phosphorothiorate
  modified_base 41: mod_base = OTHER; note = 2'-Omethylcytosine
  modified_base 44: mod_base = OTHER; note = 2'-Omethyladenosine
  modified_base 45: mod_base = OTHER; note = 2'-Omethylguanosine
  modified_base 46: mod_base = OTHER; note = 2'-fluoroguanosine
  modified_base 47: mod_base = OTHER; note = 2'-fluorouridine
  modified_base 48: mod_base = OTHER; note = 2'-fluorouridine
  modified_base 56: mod_base = OTHER; note = 2'-Omethylcytosine
  modified_base 59: mod_base = OTHER; note = 2'-Omethylguanosine
  modified_base 73: mod_base = OTHER; note = 2'-Omethylguanosine

SEQ ID NO: 4385 - RNA, 75 nt, synthetic construct; identical to SEQ ID NO: 1045
  source 1..75: mol_type = other RNA
  modified_base 1: mod_base = OTHER; note = 2'-Omethylguanosine phosphorothiorate
  modified_base 3: mod_base = OTHER; note = 2'-fluorouridine phosphorothiorate
  modified_base 11: mod_base = OTHER; note = 2'-Omethyluridine
  modified_base 12: mod_base = OTHER; note = 2'-fluoroguanosine
  modified_base 20: mod_base = OTHER; note = Adenosine phosphorothiorate
  modified_base 22: mod_base = OTHER; note = 2'-fluoroguanosine
  modified_base 30: mod_base = OTHER; note = 2'-fluoroguanosine
  modified_base 40: mod_base = OTHER; note = 2'-Omethylcytosine
  modified_base 43: mod_base = OTHER; note = Guanosine phosphorothiorate
  modified_base 49: mod_base = OTHER; note = Cytosine phosphorothiorate
  modified_base 50: mod_base = OTHER; note = 2'-fluoroguanosine
  modified_base 58: mod_base = OTHER; note = 2'-Omethylguanosine
  modified_base 62: mod_base = OTHER; note = Cytosine phosphorothiorate
  modified_base 68: mod_base = OTHER; note = 2'-fluoroadenosine
  modified_base 70: mod_base = OTHER; note = Cytosine phosphorothiorate
  modified_base 71: mod_base = OTHER; note = Cytosine phosphorothiorate
  modified_base 72: mod_base = OTHER; note = Uridine phosphorothiorate
  modified_base 74: mod_base = OTHER; note = Cytosine phosphorothiorate

SEQ ID NO: 4386 - RNA, 76 nt, synthetic construct; identical to SEQ ID NO: 3295
  source 1..76: mol_type = other RNA

SEQ ID NO: 4387 - RNA, 76 nt, synthetic construct; identical to SEQ ID NO: 3295
  source 1..76: mol_type = other RNA
  modified_base 1: mod_base = OTHER; note = 2'-Omethylcytosine phosphorothiorate
  modified_base 2: mod_base = OTHER; note = 2'-Omethylcytosine
  modified_base 3: mod_base = OTHER; note = 2'-Omethyluridine phosphorothiorate
  modified_base 5: mod_base = OTHER; note = 2'-fluorocytosine
  modified_base 6: mod_base = OTHER; note = 2'-Omethylguanosine phosphorothiorate
  modified_base 7: mod_base = OTHER; note = 2'-Omethyladenosine phosphorothiorate
  modified_base 10: mod_base = OTHER; note = 2'-fluoroguanosine
  modified_base 12: mod_base = OTHER; note = 2'-fluorouridine
  modified_base 17: mod_base = OTHER; note = 2'-Omethyluridine
  modified_base 20: mod_base = OTHER; note = 2'-Omethyluridine
  modified_base 25: mod_base = OTHER; note = 2'-Omethylcytosine
  modified_base 26: mod_base = OTHER; note = 2'-fluoroguanosine phosphorothiorate
  modified_base 27: mod_base = OTHER; note = 2'-fluoroguanosine
  modified_base 34: mod_base = OTHER; note = 2'-fluorouridine
  modified_base 38: mod_base = OTHER; note = 2'-Omethyladenosine
  modified_base 46: mod_base = OTHER; note = 2'-fluoroguanosine phosphorothiorate
  modified_base 52: mod_base = OTHER; note = 2'-fluoroguanosine phosphorothiorate
  modified_base 53: mod_base = OTHER; note = 2'-Omethylguanosine
  modified_base 55: mod_base = OTHER; note = 2'-fluorouridine
  modified_base 74: mod_base = OTHER; note = 2'-Omethylcytosine phosphorothiorate
  modified_base 75: mod_base = OTHER; note = Cytosine phosphorothiorate

SEQ ID NO: 4388 - RNA, 76 nt, synthetic construct; identical to SEQ ID NO: 3295
  source 1..76: mol_type = other RNA
  modified_base 1: mod_base = OTHER; note = 2'-Omethylcytosine phosphorothiorate
  modified_base 2: mod_base = OTHER; note = 2'-fluorocytosine
  modified_base 9: mod_base = OTHER; note = 2'-Omethyladenosine
  modified_base 27: mod_base = OTHER; note = 2'-fluoroguanosine
  modified_base 46: mod_base = OTHER; note = 2'-Omethylguanosine
  modified_base 52: mod_base = OTHER; note = 2'-Omethylguanosine
  modified_base 56: mod_base = OTHER; note = 2'-fluorocytosine
  modified_base 66: mod_base = OTHER; note = 2'-fluorouridine
  modified_base 74: mod_base = OTHER; note = Cytosine phosphorothiorate
  modified_base 76: mod_base = OTHER; note = 2'-Omethyladenosine

SEQ ID NO: 4389 - RNA, 75 nt, synthetic construct; identical to SEQ ID NO: 1045
  source 1..75: mol_type = other RNA
  modified_base 1: mod_base = OTHER; note = 2'-Omethylguanosine phosphorothiorate
  modified_base 2: mod_base = OTHER; note = 2'-Omethylguanosine
  modified_base 3: mod_base = OTHER; note = 2'-Omethyluridine
  modified_base 4: mod_base = OTHER; note = 2'-Omethyluridine
  modified_base 5: mod_base = OTHER; note = 2'-Omethylcytosine
  modified_base 6: mod_base = OTHER; note = 2'-Omethylcytosine
  modified_base 44: mod_base = OTHER; note = 2'-Omethylcytosine
  modified_base 45: mod_base = OTHER; note = 2'-Omethylguanosine
  modified_base 46: mod_base = OTHER; note = 2'-fluoroadenosine
  modified_base 47: mod_base = OTHER; note = 2'-Omethyluridine
  modified_base 48: mod_base = OTHER; note = 2'-Omethylcytosine
  modified_base 72: mod_base = OTHER; note = 2'-Omethyluridine

SEQ ID NO: 4390 - RNA, 76 nt, synthetic construct; identical to SEQ ID NO: 625
  source 1..76: mol_type = other RNA
  modified_base 1: mod_base = OTHER; note = 2'-Omethylguanosine
  modified_base 10: mod_base = OTHER; note = 2'-Omethylguanosine
  modified_base 13: mod_base = OTHER; note = 2'-Omethylcytosine
  modified_base 17: mod_base = OTHER; note = Guanosine phosphorothiorate
  modified_base 18: mod_base = OTHER; note = 2'-Omethylguanosine
  modified_base 19: mod_base = OTHER; note = Adenosine phosphorothiorate
  modified_base 20: mod_base = OTHER; note = 2'-Omethyluridine
  modified_base 25: mod_base = OTHER; note = 2'-Omethylcytosine
  modified_base 29: mod_base = OTHER; note = 2'-Omethylguanosine
  modified_base 33: mod_base = OTHER; note = 2'-fluorouridine
  modified_base 35: mod_base = OTHER; note = Cytosine phosphorothiorate
  modified_base 37: mod_base = OTHER; note = Adenosine phosphorothiorate
  modified_base 38: mod_base = OTHER; note = Adenosine phosphorothiorate
  modified_base 41: mod_base = OTHER; note = 2'-fluorocytosine phosphorothiorate
  modified_base 43: mod_base = OTHER; note = 2'-Omethyladenosine
  modified_base 44: mod_base = OTHER; note = 2'-fluoroadenosine
  modified_base 50: mod_base = OTHER; note = 2'-Omethylcytosine
  modified_base 52: mod_base = OTHER; note = 2'-Omethylguanosine
  modified_base 54: mod_base = OTHER; note = Uridine phosphorothiorate
  modified_base 55: mod_base = OTHER; note = Uridine phosphorothiorate
  modified_base 57: mod_base = OTHER; note = Guanosine phosphorothiorate
  modified_base 62: mod_base = OTHER; note = 2'-Omethylcytosine
  modified_base 63: mod_base = OTHER; note = 2'-fluorocytosine
  modified_base 65: mod_base = OTHER; note = 2'-Omethylguanosine
  modified_base 71: mod_base = OTHER; note = 2'-Omethyluridine
  modified_base 73: mod_base = OTHER; note = 2'-Omethylguanosine

SEQ ID NO: 4391 - RNA, 76 nt, synthetic construct; identical to SEQ ID NO: 625
  source 1..76: mol_type = other RNA
  modified_base 1: mod_base = OTHER; note = 2'-Omethylguanosine phosphorothiorate
  modified_base 2: mod_base = OTHER; note = 2'-Omethylguanosine
  modified_base 3: mod_base = OTHER; note = 2'-Omethylcytosine
  modified_base 4: mod_base = OTHER; note = 2'-Omethyluridine
  modified_base 5: mod_base = OTHER; note = 2'-Omethylcytosine
  modified_base 6: mod_base = OTHER; note = 2'-Omethylcytosine
  modified_base 10: mod_base = OTHER; note = 2'-Omethylguanosine
  modified_base 11: mod_base = OTHER; note = 2'-Omethylcytosine
  modified_base 12: mod_base = OTHER; note = 2'-Omethylguanosine
  modified_base 13: mod_base = OTHER; note = 2'-Omethylcytosine
  modified_base 14: mod_base = OTHER; note = 2'-Omethyladenosine
  modified_base 15: mod_base = OTHER; note = 2'-fluoroadenosine
  modified_base 16: mod_base = OTHER; note = 2'-Omethyluridine
  modified_base 17: mod_base = OTHER; note = 2'-Omethylguanosine
  modified_base 18: mod_base = OTHER; note = 2'-Omethylguanosine
  modified_base 19: mod_base = OTHER; note = 2'-fluoroadenosine
  modified_base 20: mod_base = OTHER; note = 2'-Omethyluridine
  modified_base 21: mod_base = OTHER; note = 2'-fluoroadenosine
  modified_base 22: mod_base = OTHER; note = 2'-Omethylguanosine
  modified_base 23: mod_base = OTHER; note = 2'-Omethylcytosine
  modified_base 24: mod_base = OTHER; note = 2'-Omethylguanosine
  modified_base 25: mod_base = OTHER; note = 2'-Omethylcytosine
  modified_base 38: mod_base = OTHER; note = Adenosine phosphorothiorate
  modified_base 39: mod_base = OTHER; note = Uridine phosphorothiorate
  modified_base 40: mod_base = OTHER; note = 2'-fluorouridine
  modified_base 43: mod_base = OTHER; note = 2'-Omethyladenosine
  modified_base 44: mod_base = OTHER; note = 2'-Omethyladenosine
  modified_base 45: mod_base = OTHER; note = 2'-Omethylguanosine
  modified_base 46: mod_base = OTHER; note = 2'-fluoroguanosine
  modified_base 48: mod_base = OTHER; note = 2'-fluorouridine
  modified_base 49: mod_base = OTHER; note = 2'-Omethylcytosine
  modified_base 50: mod_base = OTHER; note = 2'-Omethylcytosine
  modified_base 51: mod_base = OTHER; note = 2'-Omethylguanosine
  modified_base 52: mod_base = OTHER; note = 2'-Omethylguanosine
  modified_base 53: mod_base = OTHER; note = 2'-Omethylguanosine
  modified_base 54: mod_base = OTHER; note = 2'-Omethyluridine
  modified_base 61: mod_base = OTHER; note = 2'-Omethylcytosine
  modified_base 62: mod_base = OTHER; note = 2'-Omethylcytosine
  modified_base 63: mod_base = OTHER; note = 2'-fluorocytosine
  modified_base 64: mod_base = OTHER; note = 2'-Omethylguanosine
  modified_base 65: mod_base = OTHER; note = 2'-Omethylguanosine
  modified_base 66: mod_base = OTHER; note = 2'-Omethylcytosine
  modified_base 67: mod_base = OTHER; note = 2'-Omethylguanosine
  modified_base 68: mod_base = OTHER; note = 2'-Omethylguanosine
  modified_base 69: mod_base = OTHER; note = 2'-fluoroadenosine

SEQ ID NO: 4392 - RNA, 74 nt, synthetic construct; identical to SEQ ID NO: 766
  source 1..74: mol_type = other RNA
  modified_base 1: mod_base = OTHER; note = 2'-Omethylguanosine phosphorothiorate
  modified_base 2: mod_base = OTHER; note = 2'-Omethylguanosine
  modified_base 20: mod_base = OTHER; note = Uridine phosphorothiorate
  modified_base 21: mod_base = OTHER; note = 2'-fluoroadenosine
  modified_base 33: mod_base = OTHER; note = 2'-fluorouridine
  modified_base 54: mod_base = OTHER; note = 2'-Omethyluridine
  modified_base 68: mod_base = OTHER; note = 2'-fluoroguanosine
  modified_base 73: mod_base = OTHER; note = 2'-Omethylguanosine

SEQ ID NO: 4393 - RNA, 76 nt, synthetic construct
  source 1..76: mol_type = other RNA
ggcgccatggcgcaatggatagcgcattggacttcaaattcaaaggttccgggttcgagtcccggtggcgtcgcca

SEQ ID NO: 4394 - RNA, 76 nt, synthetic construct; identical to SEQ ID NO: 3318
  source 1..76: mol_type = other RNA
  modified_base 39: mod_base = OTHER; note = 2'-Omethyluridine
  modified_base 40: mod_base = OTHER; note = 2'-Omethylcytosine
  modified_base 41: mod_base = OTHER; note = 2'-Omethylcytosine
  modified_base 42: mod_base = OTHER; note = 2'-Omethyluridine
  modified_base 43: mod_base = OTHER; note = 2'-Omethyluridine

SEQ ID NO: 4395 - RNA, 73 nt, synthetic construct; identical to SEQ ID NO: 935
  source 1..73: mol_type = other RNA
  modified_base 55: mod_base = OTHER; note = Uridine phosphorothiorate
  modified_base 73: mod_base = OTHER; note = 2'-Omethylguanosine

SEQ ID NO: 4396 - RNA, 76 nt, synthetic construct; identical to SEQ ID NO: 3447
  source 1..76: mol_type = other RNA
  modified_base 1: mod_base = OTHER; note = 2'-Omethylguanosine
  modified_base 61: mod_base = OTHER; note = 2'-Omethylcytosine
  modified_base 62: mod_base = OTHER; note = 2'-Omethylcytosine
  modified_base 64: mod_base = OTHER; note = 2'-Omethylguanosine
  modified_base 65: mod_base = OTHER; note = 2'-Omethylguanosine
  modified_base 66: mod_base = OTHER; note = 2'-Omethylcytosine
  modified_base 67: mod_base = OTHER; note = 2'-Omethyluridine
  modified_base 68: mod_base = OTHER; note = 2'-Omethylcytosine
  modified_base 69: mod_base = OTHER; note = 2'-Omethylguanosine
  modified_base 70: mod_base = OTHER; note = 2'-fluoroguanosine
  modified_base 71: mod_base = OTHER; note = 2'-Omethylguanosine
  modified_base 72: mod_base = OTHER; note = 2'-Omethylcytosine
  modified_base 73: mod_base = OTHER; note = 2'-Omethylguanosine

SEQ ID NO: 4397 - RNA, 76 nt, synthetic construct; identical to SEQ ID NO: 625
  source 1..76: mol_type = other RNA
  modified_base 54: mod_base = OTHER; note = 2'-Omethylthymine

SEQ ID NO: 4398 - RNA, 85 nt, synthetic construct; identical to SEQ ID NO: 3286
  source 1..85: mol_type = other RNA
  modified_base 1: mod_base = OTHER; note = 2'-Omethylcytosine
  modified_base 2: mod_base = OTHER; note = 2'-Omethylcytosine phosphorothiorate
  modified_base 3: mod_base = OTHER; note = 2'-Omethyladenosine
  modified_base 13: mod_base = OTHER; note = Adenosine phosphorothiorate
  modified_base 25: mod_base = OTHER; note = Guanosine phosphorothiorate
  modified_base 26: mod_base = OTHER; note = 2'-fluorouridine
  modified_base 27: mod_base = OTHER; note = 2'-fluorouridine
  modified_base 30: mod_base = OTHER; note = 2'-fluoroadenosine
  modified_base 34: mod_base = OTHER; note = 2'-fluorouridine
  modified_base 38: mod_base = OTHER; note = Uridine phosphorothiorate
  modified_base 39: mod_base = OTHER; note = Cytosine phosphorothiorate
  modified_base 43: mod_base = OTHER; note = 2'-Omethyluridine
  modified_base 45: mod_base = OTHER; note = Guanosine phosphorothiorate
  modified_base 48: mod_base = OTHER; note = 2'-Omethyladenosine
  modified_base 51: mod_base = OTHER; note = 2'-fluorouridine
  modified_base 55: mod_base = OTHER; note = Cytosine phosphorothiorate
  modified_base 57: mod_base = OTHER; note = 2'-Omethylcytosine
  modified_base 59: mod_base = OTHER; note = 2'-fluorouridine phosphorothiorate
  modified_base 74: mod_base = OTHER; note = Cytosine phosphorothiorate
  modified_base 79: mod_base = OTHER; note = 2'-Omethylguanosine
  modified_base 83: mod_base = OTHER; note = Cytosine phosphorothiorate
  modified_base 84: mod_base = OTHER; note = Cytosine phosphorothiorate

SEQ ID NO: 4399 - RNA, 76 nt, synthetic construct; identical to SEQ ID NO: 625
  source 1..76: mol_type = other RNA
  modified_base 2: mod_base = OTHER; note = 2'-fluoroguanosine
  modified_base 3: mod_base = OTHER; note = 2'-Omethylcytosine
  modified_base 6: mod_base = OTHER; note = 2'-fluorocytosine phosphorothiorate
  modified_base 9: mod_base = OTHER; note = Guanosine phosphorothiorate
  modified_base 10: mod_base = OTHER; note = 2'-fluoroguanosine
  modified_base 13: mod_base = OTHER; note = 2'-fluorocytosine
  modified_base 14: mod_base = OTHER; note = 2'-Omethyladenosine
  modified_base 15: mod_base = OTHER; note = 2'-Omethyladenosine
  modified_base 16: mod_base = OTHER; note = 2'-Omethyluridine
  modified_base 18: mod_base = OTHER; note = 2'-Omethylguanosine
  modified_base 22: mod_base = OTHER; note = 2'-fluoroguanosine phosphorothiorate
  modified_base 23: mod_base = OTHER; note = 2'-Omethylcytosine
  modified_base 30: mod_base = OTHER; note = 2'-Omethylguanosine
  modified_base 39: mod_base = OTHER; note = 2'-Omethyluridine
  modified_base 40: mod_base = OTHER; note = 2'-fluorouridine
  modified_base 41: mod_base = OTHER; note = Cytosine phosphorothiorate
  modified_base 42: mod_base = OTHER; note = 2'-fluoroadenosine
  modified_base 45: mod_base = OTHER; note = 2'-Omethylguanosine
  modified_base 46: mod_base = OTHER; note = Guanosine phosphorothiorate
  modified_base 47: mod_base = OTHER; note = 2'-Omethyluridine
  modified_base 48: mod_base = OTHER; note = 2'-Omethyluridine
  modified_base 49: mod_base = OTHER; note = 2'-Omethylcytosine
  modified_base 58: mod_base = OTHER; note = 2'-fluoroadenosine
  modified_base 59: mod_base = OTHER; note = 2'-fluoroguanosine
  modified_base 60: mod_base = OTHER; note = 2'-fluorouridine
  modified_base 62: mod_base = OTHER; note = 2'-fluorocytosine
  modified_base 63: mod_base = OTHER; note = 2'-Omethylcytosine
  modified_base 64: mod_base = OTHER; note = 2'-fluoroguanosine
  modified_base 66: mod_base = OTHER; note = 2'-fluorocytosine
  modified_base 68: mod_base = OTHER; note = 2'-fluoroguanosine
  modified_base 70: mod_base = OTHER; note = 2'-fluoroguanosine
  modified_base 72: mod_base = OTHER; note = Cytosine phosphorothiorate
  modified_base 73: mod_base = OTHER; note = 2'-fluoroguanosine phosphorothiorate
  modified_base 74: mod_base = OTHER; note = 2'-Omethylcytosine
  modified_base 75: mod_base = OTHER; note = 2'-fluorocytosine

SEQ ID NO: 4400 - RNA, 76 nt, synthetic construct; identical to SEQ ID NO: 3329
  source 1..76: mol_type = other RNA
  modified_base 1: mod_base = OTHER; note = 2'-Omethylguanosine
  modified_base 2: mod_base = OTHER; note = 2'-Omethylguanosine
  modified_base 3: mod_base = OTHER; note = 2'-Omethylcytosine
  modified_base 4: mod_base = OTHER; note = 2'-Omethylcytosine
  modified_base 5: mod_base = OTHER; note = 2'-Omethylcytosine
  modified_base 6: mod_base = OTHER; note = 2'-Omethylcytosine
  modified_base 16: mod_base = OTHER; note = 2'-Omethyluridine
  modified_base 17: mod_base = OTHER; note = 2'-Omethylguanosine
  modified_base 18: mod_base = OTHER; note = 2'-Omethylguanosine
  modified_base 20: mod_base = OTHER; note = 2'-Omethyluridine
  modified_base 25: mod_base = OTHER; note = 2'-Omethylcytosine
  modified_base 33: mod_base = OTHER; note = 2'-fluorouridine
  modified_base 35: mod_base = OTHER; note = Cytosine phosphorothiorate
  modified_base 37: mod_base = OTHER; note = Adenosine phosphorothiorate
  modified_base 38: mod_base = OTHER; note = Adenosine phosphorothiorate
  modified_base 41: mod_base = OTHER; note = 2'-fluorocytosine
  modified_base 42: mod_base = OTHER; note = 2'-Omethyladenosine
  modified_base 43: mod_base = OTHER; note = 2'-Omethyladenosine
  modified_base 44: mod_base = OTHER; note = 2'-fluoroadenosine
  modified_base 49: mod_base = OTHER; note = 2'-Omethylcytosine
  modified_base 50: mod_base = OTHER; note = 2'-Omethylcytosine
  modified_base 52: mod_base = OTHER; note = 2'-Omethylguanosine
  modified_base 54: mod_base = OTHER; note = 2'-Omethyluridine
  modified_base 55: mod_base = OTHER; note = Uridine phosphorothiorate
  modified_base 56: mod_base = OTHER; note = 2'-Omethylcytosine
  modified_base 57: mod_base = OTHER; note = 2'-fluoroguanosine
  modified_base 59: mod_base = OTHER; note = 2'-Omethylguanosine
  modified_base 61: mod_base = OTHER; note = 2'-Omethylcytosine
  modified_base 62: mod_base = OTHER; note = 2'-Omethylcytosine
  modified_base 63: mod_base = OTHER; note = 2'-fluorocytosine
  modified_base 64: mod_base = OTHER; note = 2'-Omethylguanosine
  modified_base 65: mod_base = OTHER; note = 2'-Omethylguanosine
  modified_base 73: mod_base = OTHER; note = 2'-Omethylguanosine

SEQ ID NO: 4401 - RNA, 76 nt, synthetic construct; identical to SEQ ID NO: 625
  source 1..76: mol_type = other RNA
  modified_base 16: mod_base = OTHER; note = Thymine
  modified_base 20: mod_base = OTHER; note = Thymine
  modified_base 47: mod_base = OTHER; note = Thymine
  modified_base 48: mod_base = OTHER; note = Thymine

SEQ ID NO: 4402 - DNA, 76 bp, synthetic construct; identical to SEQ ID NO: 1924
  source 1..76: mol_type = other DNA
  modified_base 1: mod_base = OTHER; note = 2'-Omethylguanosine phosphorothiorate
  modified_base 2: mod_base = OTHER; note = 2'-O-(2-Methoxyethyl) guanosine phosphorothiorate
  modified_base 3: mod_base = OTHER; note = deoxycytosine phosphorothiorate
  modified_base 4: mod_base = OTHER; note = 2'-O-(2-Methoxyethyl) thymine
  modified_base 5: mod_base = OTHER; note = Cytosine phosphorothiorate
  modified_base 9: mod_base = OTHER; note = Guanosine phosphorothiorate
  modified_base 15: mod_base = OTHER; note = Adenosine phosphorothiorate
  modified_base 16: mod_base = OTHER; note = 2'-O-(2-Methoxyethyl) thymine
  modified_base 20: mod_base = OTHER; note = 2'-fluorouridine phosphorothiorate
  modified_base 21: mod_base = OTHER; note = 2'-fluoroadenosine
  modified_base 22: mod_base = OTHER; note = Guanosine phosphorothiorate
  modified_base 24: mod_base = OTHER; note = 2'-fluoroguanosine
  modified_base 27: mod_base = OTHER; note = 2'-O-(2-Methoxyethyl) thymine phosphorothiorate
  modified_base 28: mod_base = OTHER; note = 2'-O-(2-Methoxyethyl) thymine
  modified_base 29: mod_base = OTHER; note = 2'-fluoroguanosine phosphorothiorate
  modified_base 30: mod_base = OTHER; note = 2'-Omethylguanosine
  modified_base 31: mod_base = OTHER; note = 2'-Omethyladenosine phosphorothiorate
  modified_base 33: mod_base = OTHER; note = 2'-fluorouridine
  modified_base 39: mod_base = OTHER; note = Uridine phosphorothiorate
  modified_base 46: mod_base = OTHER; note = Guanosine phosphorothiorate
  modified_base 47: mod_base = OTHER; note = 2'-Omethyluridine
  modified_base 50: mod_base = OTHER; note = Cytosine phosphorothiorate
  modified_base 51: mod_base = OTHER; note = 2'-O-(2-Methoxyethyl) guanosine
  modified_base 52: mod_base = OTHER; note = 2'-fluoroguanosine
  modified_base 57: mod_base = OTHER; note = 2'-O-(2-Methoxyethyl) guanosine
  modified_base 58: mod_base = OTHER; note = Adenosine phosphorothiorate
  modified_base 59: mod_base = OTHER; note = Guanosine phosphorothiorate
  modified_base 60: mod_base = OTHER; note = 2'-fluorouridine
  modified_base 61: mod_base = OTHER; note = 2'-O-(2-Methoxyethyl) 5-methylcytosine
  modified_base 62: mod_base = OTHER; note = 2'-Omethylcytosine
  modified_base 63: mod_base = OTHER; note = Cytosine phosphorothiorate
  modified_base 65: mod_base = OTHER; note = Guanosine phosphorothiorate
  modified_base 66: mod_base = OTHER; note = 2'-Omethylcytosine phosphorothiorate
  modified_base 67: mod_base = OTHER; note = 2'-fluoroguanosine phosphorothiorate
  modified_base 73: mod_base = OTHER; note = Guanosine phosphorothiorate
  modified_base 74: mod_base = OTHER; note = 2'-Omethylcytosine phosphorothiorate
  misc_feature 1..2: note = RNA
  misc_feature 3: note = DNA
  misc_feature 4..22: note = RNA
  misc_feature 23: note = DNA
  misc_feature 24..67: note = RNA
  misc_feature 68: note = DNA
  misc_feature 69..74: note = RNA
  misc_feature 75: note = DNA
  misc_feature 76: note = RNA

SEQ ID NO: 4403 - RNA, 75 nt, synthetic construct; identical to SEQ ID NO: 1045
  source 1..75: mol_type = other RNA
  modified_base 2: mod_base = OTHER; note = 2'-Omethylguanosine phosphorothiorate
  modified_base 20: mod_base = OTHER; note = Adenosine phosphorothiorate
  modified_base 21: mod_base = OTHER; note = 2'-fluoroadenosine
  modified_base 40: mod_base = OTHER; note = Cytosine phosphorothiorate
  modified_base 41: mod_base = OTHER; note = 2'-fluorocytosine
  modified_base 43: mod_base = OTHER; note = 2'-fluoroguanosine
  modified_base 44: mod_base = OTHER; note = 2'-fluorocytosine
  modified_base 51: mod_base = OTHER; note = Adenosine phosphorothiorate
  modified_base 57: mod_base = OTHER; note = 2'-fluoroadenosine
  modified_base 60: mod_base = OTHER; note = 2'-fluorocytosine
  modified_base 61: mod_base = OTHER; note = 2'-fluorouridine
  modified_base 74: mod_base = OTHER; note = Cytosine phosphorothiorate
  modified_base 75: mod_base = OTHER; note = 2'-Omethyladenosine

SEQ ID NO: 4404 - RNA, 76 nt, synthetic construct
  source 1..76: mol_type = other RNA
ggctcactggcgcaatggatagcgcattggacttcaaattcaaaggttagtggttcgagtccactgtgagtcgcca

SEQ ID NO: 4405 - RNA, 76 nt, synthetic construct; identical to SEQ ID NO: 625
  source 1..76: mol_type = other RNA
  modified_base 1: mod_base = OTHER; note = 2'-Omethylguanosine phosphorothiorate
  modified_base 2: mod_base = OTHER; note = 2'-Omethylguanosine
  modified_base 3: mod_base = OTHER; note = 2'-Omethylcytosine
  modified_base 4: mod_base = OTHER; note = 2'-Omethyluridine
  modified_base 5: mod_base = OTHER; note = 2'-Omethylcytosine
  modified_base 6: mod_base = OTHER; note = 2'-Omethylcytosine
  modified_base 22: mod_base = OTHER; note = 2'-Omethylguanosine
  modified_base 23: mod_base = OTHER; note = 2'-Omethylcytosine
  modified_base 24: mod_base = OTHER; note = 2'-Omethylguanosine
  modified_base 25: mod_base = OTHER; note = 2'-Omethylcytosine
  modified_base 40: mod_base = OTHER; note = 2'-fluorouridine
  modified_base 41: mod_base = OTHER; note = 2'-fluorocytosine
  modified_base 42: mod_base = OTHER; note = 2'-fluoroadenosine
  modified_base 43: mod_base = OTHER; note = 2'-fluoroadenosine
  modified_base 44: mod_base = OTHER; note = 2'-Omethyladenosine
  modified_base 45: mod_base = OTHER; note = 2'-Omethylguanosine
  modified_base 46: mod_base = OTHER; note = 2'-Omethylguanosine
  modified_base 49: mod_base = OTHER; note = 2'-Omethylcytosine
  modified_base 50: mod_base = OTHER; note = 2'-Omethylcytosine
  modified_base 51: mod_base = OTHER; note = 2'-Omethylguanosine
  modified_base 52: mod_base = OTHER; note = 2'-Omethylguanosine
  modified_base 53: mod_base = OTHER; note = 2'-Omethylguanosine
  modified_base 54: mod_base = OTHER; note = Uridine phosphorothiorate
  modified_base 55: mod_base = OTHER; note = Uridine phosphorothiorate
  modified_base 56: mod_base = OTHER; note = Cytosine phosphorothiorate
  modified_base 57: mod_base = OTHER; note = Guanosine phosphorothiorate
  modified_base 61: mod_base = OTHER; note = 2'-Omethylcytosine
  modified_base 62: mod_base = OTHER; note = 2'-Omethylcytosine
  modified_base 63: mod_base = OTHER; note = 2'-fluorocytosine
  modified_base 64: mod_base = OTHER; note = 2'-Omethylguanosine
  modified_base 65: mod_base = OTHER; note = 2'-Omethylguanosine
  modified_base 66: mod_base = OTHER; note = 2'-Omethylcytosine
  modified_base 67: mod_base = OTHER; note = 2'-Omethylguanosine
  modified_base 68: mod_base = OTHER; note = 2'-Omethylguanosine
  modified_base 69: mod_base = OTHER; note = 2'-Omethyladenosine

SEQ ID NO: 4406 - RNA, 75 nt, synthetic construct; identical to SEQ ID NO: 3336
  source 1..75: mol_type = other RNA
  modified_base 1: mod_base = OTHER; note = 2'-Omethylcytosine
  modified_base 3: mod_base = OTHER; note = 2'-Omethyluridine
  modified_base 11: mod_base = OTHER; note = Uridine phosphorothiorate
  modified_base 13: mod_base = OTHER; note = 2'-fluoroadenosine
  modified_base 19: mod_base = OTHER; note = 2'-fluorouridine
  modified_base 20: mod_base = OTHER; note = 2'-fluoroadenosine
  modified_base 21: mod_base = OTHER; note = Guanosine phosphorothiorate
  modified_base 23: mod_base = OTHER; note = Guanosine phosphorothiorate
  modified_base 28: mod_base = OTHER; note = 2'-Omethyladenosine phosphorothiorate
  modified_base 36: mod_base = OTHER; note = 2'-fluoroadenosine
  modified_base 37: mod_base = OTHER; note = 2'-fluoroadenosine phosphorothiorate
  modified_base 39: mod_base = OTHER; note = 2'-Omethylcytosine phosphorothiorate
  modified_base 46: mod_base = OTHER; note = 2'-fluorouridine
  modified_base 48: mod_base = OTHER; note = 2'-fluorocytosine
  modified_base 49: mod_base = OTHER; note = Adenosine phosphorothiorate
  modified_base 52: mod_base = OTHER; note = 2'-fluoroguanosine phosphorothiorate
  modified_base 56: mod_base = OTHER; note = 2'-Omethyladenosine phosphorothiorate
  modified_base 61: mod_base = OTHER; note = 2'-fluorocytosine
  modified_base 74: mod_base = OTHER; note = Cytosine phosphorothiorate

SEQ ID NO: 4407 - RNA, 75 nt, synthetic construct; identical to SEQ ID NO: 3306
  source 1..75: mol_type = other RNA
  modified_base 61: mod_base = OTHER; note = 2'-Omethyladenosine
  modified_base 62: mod_base = OTHER; note = 2'-Omethylcytosine

SEQ ID NO: 4408 - RNA, 76 nt, synthetic construct; identical to SEQ ID NO: 3342
  source 1..76: mol_type = other RNA
  modified_base 1: mod_base = OTHER; note = 2'-Omethylguanosine
  modified_base 2: mod_base = OTHER; note = 2'-Omethylguanosine
  modified_base 3: mod_base = OTHER; note = 2'-Omethylcytosine
  modified_base 4: mod_base = OTHER; note = 2'-Omethyluridine
  modified_base 5: mod_base = OTHER; note = 2'-Omethylcytosine
  modified_base 6: mod_base = OTHER; note = 2'-Omethylcytosine
  modified_base 14: mod_base = OTHER; note = 2'-Omethyladenosine
  modified_base 15: mod_base = OTHER; note = 2'-Omethyladenosine
  modified_base 16: mod_base = OTHER; note = 2'-Omethyluridine
  modified_base 17: mod_base = OTHER; note = 2'-Omethylguanosine
  modified_base 18: mod_base = OTHER; note = 2'-Omethylguanosine
  modified_base 20: mod_base = OTHER; note = 2'-Omethyluridine
  modified_base 25: mod_base = OTHER; note = 2'-Omethylcytosine
  modified_base 33: mod_base = OTHER; note = 2'-fluorouridine
  modified_base 35: mod_base = OTHER; note = Cytosine phosphorothiorate
  modified_base 37: mod_base = OTHER; note = Adenosine phosphorothiorate
  modified_base 38: mod_base = OTHER; note = Adenosine phosphorothiorate
  modified_base 41: mod_base = OTHER; note = 2'-fluorocytosine
  modified_base 42: mod_base = OTHER; note = 2'-Omethylguanosine
  modified_base 43: mod_base = OTHER; note = 2'-Omethyladenosine
  modified_base 44: mod_base = OTHER; note = 2'-fluoroadenosine
  modified_base 49: mod_base = OTHER; note = 2'-Omethylcytosine
  modified_base 50: mod_base = OTHER; note = 2'-Omethylcytosine
  modified_base 52: mod_base = OTHER; note = 2'-Omethylguanosine
  modified_base 54: mod_base = OTHER; note = 2'-Omethyluridine
  modified_base 55: mod_base = OTHER; note = Uridine phosphorothiorate
  modified_base 56: mod_base = OTHER; note = 2'-Omethylcytosine
  modified_base 57: mod_base = OTHER; note = 2'-fluoroguanosine
  modified_base 59: mod_base = OTHER; note = 2'-Omethylguanosine
  modified_base 61: mod_base = OTHER; note = 2'-Omethylcytosine
  modified_base 62: mod_base = OTHER; note = 2'-Omethylcytosine
  modified_base 63: mod_base = OTHER; note = 2'-fluorocytosine
  modified_base 64: mod_base = OTHER; note = 2'-Omethylguanosine
  modified_base 65: mod_base = OTHER; note = 2'-Omethylguanosine
  modified_base 73: mod_base = OTHER; note = 2'-Omethylguanosine

SEQ ID NO: 4409 - RNA, 74 nt, synthetic construct; identical to SEQ ID NO: 3293
  source 1..74: mol_type = other RNA
  modified_base 1: mod_base = OTHER; note = 2'-Omethyladenosine
  modified_base 3: mod_base = OTHER; note = Cytosine phosphorothiorate
  modified_base 12: mod_base = OTHER; note = Cytosine phosphorothiorate
  modified_base 35: mod_base = OTHER; note = 2'-fluoroguanosine
  modified_base 46: mod_base = OTHER; note = 2'-fluorouridine
  modified_base 48: mod_base = OTHER; note = 2'-fluorocytosine
  modified_base 58: mod_base = OTHER; note = Uridine phosphorothiorate
  modified_base 73: mod_base = OTHER; note = 2'-Omethylcytosine phosphorothiorate
  modified_base 74: mod_base = OTHER; note = 2'-fluoroadenosine

SEQ ID NO: 4410 - RNA, 74 nt, synthetic construct; identical to SEQ ID NO: 3293
  source 1..74: mol_type = other RNA
  modified_base 3: mod_base = OTHER; note = 2'-fluorocytosine
  modified_base 5: mod_base = OTHER; note = 2'-Omethylcytosine
  modified_base 27: mod_base = OTHER; note = 2'-Omethyluridine phosphorothiorate
  modified_base 44: mod_base = OTHER; note = Guanosine phosphorothiorate
  modified_base 46: mod_base = OTHER; note = Uridine phosphorothiorate
  modified_base 50: mod_base = OTHER; note = Uridine phosphorothiorate
  modified_base 73: mod_base = OTHER; note = 2'-Omethylcytosine phosphorothiorate

SEQ ID NO: 4411 - RNA, 85 nt, synthetic construct; identical to SEQ ID NO: 3297
  source 1..85: mol_type = other RNA
  modified_base 1: mod_base = OTHER; note = 2'-Omethylguanosine
  modified_base 10: mod_base = OTHER; note = 2'-Omethylguanosine
  modified_base 11: mod_base = OTHER; note = 2'-Omethylcytosine
  modified_base 12: mod_base = OTHER; note = 2'-Omethylcytosine
  modified_base 13: mod_base = OTHER; note = 2'-Omethylguanosine
  modified_base 14: mod_base = OTHER; note = 2'-Omethyladenosine
  modified_base 15: mod_base = OTHER; note = 2'-Omethylguanosine
  modified_base 16: mod_base = OTHER; note = 2'-Omethyluridine
  modified_base 17: mod_base = OTHER; note = 2'-Omethylguanosine
  modified_base 18: mod_base = OTHER; note = 2'-Omethylguanosine
  modified_base 19: mod_base = OTHER; note = Uridine phosphorothiorate
  modified_base 20: mod_base = OTHER; note = 2'-Omethyluridine
  modified_base 21: mod_base = OTHER; note = Adenosine phosphorothiorate
  modified_base 22: mod_base = OTHER; note = 2'-Omethyladenosine
  modified_base 23: mod_base = OTHER; note = 2'-Omethylguanosine
  modified_base 24: mod_base = OTHER; note = 2'-Omethylguanosine
  modified_base 25: mod_base = OTHER; note = 2'-Omethylcytosine
  modified_base 33: mod_base = OTHER; note = Uridine phosphorothiorate
  modified_base 34: mod_base = OTHER; note = 2'-Omethyluridine
  modified_base 35: mod_base = OTHER; note = Cytosine phosphorothiorate
  modified_base 37: mod_base = OTHER; note = Adenosine phosphorothiorate
  modified_base 38: mod_base = OTHER; note = Adenosine phosphorothiorate
  modified_base 58: mod_base = OTHER; note = 2'-Omethylguanosine
  modified_base 59: mod_base = OTHER; note = 2'-Omethylcytosine
  modified_base 61: mod_base = OTHER; note = 2'-Omethylguanosine
  modified_base 63: mod_base = OTHER; note = Uridine phosphorothiorate
  modified_base 64: mod_base = OTHER; note = Uridine phosphorothiorate
  modified_base 70: mod_base = OTHER; note = 2'-Omethylcytosine
  modified_base 74: mod_base = OTHER; note = 2'-Omethylcytosine
  modified_base 82: mod_base = OTHER; note = 2'-Omethylguanosine

SEQ ID NO: 4412 - RNA, 76 nt, synthetic construct; identical to SEQ ID NO: 3289
  source 1..76: mol_type = other RNA
  modified_base 1: mod_base = OTHER; note = 2'-Omethylguanosine
  modified_base 73: mod_base = OTHER; note = 2'-Omethylguanosine

SEQ ID NO: 4413 - RNA, 85 nt, synthetic construct; identical to SEQ ID NO: 3317
  source 1..85: mol_type = other RNA
  modified_base 1: mod_base = OTHER; note = 2'-Omethylguanosine phosphorothiorate
  modified_base 2: mod_base = OTHER; note = Cytosine phosphorothiorate
  modified_base 29: mod_base = OTHER; note = Guanosine phosphorothiorate
  modified_base 46: mod_base = OTHER; note = 2'-Omethylguanosine phosphorothiorate
  modified_base 54: mod_base = OTHER; note = 2'-fluorocytosine phosphorothiorate
  modified_base 55: mod_base = OTHER; note = 2'-fluorocytosine
  modified_base 61: mod_base = OTHER; note = 2'-Omethylguanosine

SEQ ID NO: 4414 - RNA, 85 nt, synthetic construct; identical to SEQ ID NO: 3288
  source 1..85: mol_type = other RNA
  modified_base 2: mod_base = OTHER; note = 2'-fluorocytosine
  modified_base 12: mod_base = OTHER; note = Guanosine phosphorothiorate
  modified_base 23: mod_base = OTHER; note = Guanosine phosphorothiorate
  modified_base 27: mod_base = OTHER; note = 2'-fluorouridine
  modified_base 28: mod_base = OTHER; note = 2'-Omethylguanosine
  modified_base 34: mod_base = OTHER; note = 2'-fluorocytosine
  modified_base 40: mod_base = OTHER; note = 2'-Omethylcytosine
  modified_base 43: mod_base = OTHER; note = Uridine phosphorothiorate
  modified_base 51: mod_base = OTHER; note = 2'-Omethyluridine
  modified_base 65: mod_base = OTHER; note = Cytosine phosphorothiorate
  modified_base 75: mod_base = OTHER; note = Uridine phosphorothiorate
  modified_base 77: mod_base = OTHER; note = 2'-fluorocytosine

SEQ ID NO: 4415 - RNA, 85 nt, synthetic construct; identical to SEQ ID NO: 3288
  source 1..85: mol_type = other RNA
  modified_base 4: mod_base = OTHER; note = Guanosine phosphorothiorate
  modified_base 46: mod_base = OTHER; note = 2'-Omethyladenosine
  modified_base 58: mod_base = OTHER; note = Guanosine phosphorothiorate
  modified_base 59: mod_base = OTHER; note = 2'-fluorouridine
  modified_base 69: mod_base = OTHER; note = Cytosine phosphorothiorate
  modified_base 83: mod_base = OTHER; note = 2'-fluorocytosine phosphorothiorate

SEQ ID NO: 4416 - RNA, 74 nt, synthetic construct; identical to SEQ ID NO: 3293
  source 1..74: mol_type = other RNA
  modified_base 2: mod_base = OTHER; note = 2'-fluorocytosine phosphorothiorate
  modified_base 3: mod_base = OTHER; note = 2'-Omethylcytosine
  modified_base 6: mod_base = OTHER; note = 2'-fluoroguanosine
  modified_base 10: mod_base = OTHER; note = 2'-fluorocytosine
  modified_base 35: mod_base = OTHER; note = 2'-Omethylguanosine phosphorothiorate
  modified_base 49: mod_base = OTHER; note = Guanosine phosphorothiorate
  modified_base 73: mod_base = OTHER; note = 2'-Omethylcytosine phosphorothiorate

SEQ ID NO: 4417 - RNA, 76 nt, synthetic construct; identical to SEQ ID NO: 625
  source 1..76: mol_type = other RNA
  modified_base 1: mod_base = OTHER; note = 2'-Omethylguanosine phosphorothiorate
  modified_base 2: mod_base = OTHER; note = 2'-Omethylguanosine phosphorothiorate
  modified_base 3: mod_base = OTHER; note = 2'-Omethylcytosine
  modified_base 4: mod_base = OTHER; note = 2'-Omethyluridine
  modified_base 5: mod_base = OTHER; note = 2'-Omethylcytosine
  modified_base 6: mod_base = OTHER; note = 2'-Omethylcytosine
  modified_base 10: mod_base = OTHER; note = 2'-Omethylguanosine
  modified_base 11: mod_base = OTHER; note = 2'-Omethylcytosine
  modified_base 12: mod_base = OTHER; note = 2'-Omethylguanosine
  modified_base 13: mod_base = OTHER; note = 2'-Omethylcytosine
  modified_base 14: mod_base = OTHER; note = 2'-Omethyladenosine
  modified_base 15: mod_base = OTHER; note = 2'-Omethyladenosine
  modified_base 16: mod_base = OTHER; note = 2'-Omethyluridine
  modified_base 17: mod_base = OTHER; note = 2'-Omethylguanosine
  modified_base 18: mod_base = OTHER; note = 2'-Omethylguanosine
  modified_base 20: mod_base = OTHER; note = 2'-Omethyluridine
  modified_base 22: mod_base = OTHER; note = 2'-Omethylguanosine
  modified_base 23: mod_base = OTHER; note = 2'-Omethylcytosine
  modified_base 24: mod_base = OTHER; note = 2'-Omethylguanosine
  modified_base 25: mod_base = OTHER; note = 2'-Omethylcytosine
  modified_base 33: mod_base = OTHER; note = 2'-fluorouridine
  modified_base 35: mod_base = OTHER; note = Cytosine phosphorothiorate
  modified_base 37: mod_base = OTHER; note = Adenosine phosphorothiorate
  modified_base 38: mod_base = OTHER; note = Adenosine phosphorothiorate
  modified_base 41: mod_base = OTHER; note = 2'-fluorocytosine
  modified_base 42: mod_base = OTHER; note = 2'-Omethyladenosine
  modified_base 43: mod_base = OTHER; note = 2'-Omethyladenosine
  modified_base 44: mod_base = OTHER; note = 2'-fluoroadenosine
  modified_base 49: mod_base = OTHER; note = 2'-Omethylcytosine
  modified_base 50: mod_base = OTHER; note = 2'-Omethylcytosine
  modified_base 52: mod_base = OTHER; note = 2'-Omethylguanosine
  modified_base 54: mod_base = OTHER; note = 2'-Omethyluridine
  modified_base 55: mod_base = OTHER; note = Uridine phosphorothiorate
  modified_base 56: mod_base = OTHER; note = 2'-Omethylcytosine
  modified_base 57: mod_base = OTHER; note = 2'-fluoroguanosine
  modified_base 59: mod_base = OTHER; note = 2'-Omethylguanosine
  modified_base 61: mod_base = OTHER; note = 2'-Omethylcytosine
  modified_base 65: mod_base = OTHER; note = 2'-Omethylguanosine
  modified_base 74: mod_base = OTHER; note = Cytosine phosphorothiorate
  modified_base 75: mod_base = OTHER; note = 2'-Omethylcytosine

SEQ ID NO: 4418 - RNA, 76 nt, synthetic construct; identical to SEQ ID NO: 625
  source 1..76: mol_type = other RNA
  modified_base 1: mod_base = OTHER; note = 2'-Omethylguanosine phosphorothiorate
  modified_base 2: mod_base = OTHER; note = 2'-Omethylguanosine phosphorothiorate
  modified_base 9: mod_base = OTHER; note = Guanosine phosphorothiorate
  modified_base 10: mod_base = OTHER; note = 2'-Omethylguanosine
  modified_base 18: mod_base = OTHER; note = Guanosine phosphorothiorate
  modified_base 19: mod_base = OTHER; note = 2'-fluoroadenosine
  modified_base 24: mod_base = OTHER; note = Guanosine phosphorothiorate
  modified_base 25: mod_base = OTHER; note = 2'-O-(2-Methoxyethyl) 5-methylcytosine
  modified_base 39: mod_base = OTHER; note = Uridine phosphorothiorate
  modified_base 40: mod_base = OTHER; note = 2'-fluorouridine
  modified_base 56: mod_base = OTHER; note = Cytosine phosphorothiorate
  modified_base 65: mod_base = OTHER; note = Guanosine phosphorothiorate
  modified_base 66: mod_base = OTHER; note = 2'-Omethylcytosine
  modified_base 74: mod_base = OTHER; note = Cytosine phosphorothiorate
  modified_base 75: mod_base = OTHER; note = 2'-Omethylcytosine phosphorothiorate
  modified_base 76: mod_base = OTHER; note = 2'-Omethyladenosine

SEQ ID NO: 4419 - RNA, 76 nt, synthetic construct; identical to SEQ ID NO: 625
  source 1..76: mol_type = other RNA
  modified_base 1: mod_base = OTHER; note = 2'-Omethylguanosine phosphorothiorate
  modified_base 2: mod_base = OTHER; note = 2'-Omethylguanosine
  modified_base 33: mod_base = OTHER; note = 2'-fluorouridine
  modified_base 35: mod_base = OTHER; note = Cytosine phosphorothiorate
  modified_base 37: mod_base = OTHER; note = Adenosine phosphorothiorate
  modified_base 38: mod_base = OTHER; note = Adenosine phosphorothiorate
  modified_base 52: mod_base = OTHER; note = 2'-Omethylguanosine
  modified_base 56: mod_base = OTHER; note = 2'-Omethylcytosine
  modified_base 62: mod_base = OTHER; note = 2'-Omethylcytosine
  modified_base 65: mod_base = OTHER; note = 2'-Omethylguanosine
  modified_base 73: mod_base = OTHER; note = 2'-Omethylguanosine
  modified_base 75: mod_base = OTHER; note = 2'-fluorocytosine phosphorothiorate

SEQ ID NO: 4420 - RNA, 76 nt, synthetic construct; identical to SEQ ID NO: 625
  source 1..76: mol_type = other RNA
  modified_base 1: mod_base = OTHER; note = 2'-Omethylguanosine phosphorothiorate
  modified_base 2: mod_base = OTHER; note = 2'-Omethylguanosine phosphorothiorate
  modified_base 17: mod_base = OTHER; note = Guanosine phosphorothiorate
  modified_base 25: mod_base = OTHER; note = 2'-fluorocytosine
  modified_base 33: mod_base = OTHER; note = 2'-O-(2-Methoxyethyl) thymine
  modified_base 57: mod_base = OTHER; note = 2'-O-(2-Methoxyethyl) guanosine
  modified_base 74: mod_base = OTHER; note = Cytosine phosphorothiorate
  modified_base 75: mod_base = OTHER; note = 2'-Omethylcytosine

SEQ ID NO: 4421 - DNA, 76 bp, synthetic construct; identical to SEQ ID NO: 1924
  source 1..76: mol_type = other DNA
  modified_base 1: mod_base = OTHER; note = 2'-Omethylguanosine phosphorothiorate
  modified_base 2: mod_base = OTHER; note = 2'-Omethylguanosine phosphorothiorate
  modified_base 6: mod_base = OTHER; note = 2'-O-(2-Methoxyethyl) 5-methylcytosine
  modified_base 7: mod_base = OTHER; note = Guanosine phosphorothiorate
  modified_base 8: mod_base = OTHER; note = 2'-Omethyluridine
  modified_base 11: mod_base = OTHER; note = deoxycytosine phosphorothiorate
  modified_base 12: mod_base = OTHER; note = 2'-fluoroguanosine phosphorothiorate
  modified_base 13: mod_base = OTHER; note = deoxycytosine phosphorothiorate
  modified_base 14: mod_base = OTHER; note = 2'-fluoroadenosine phosphorothiorate
  modified_base 15: mod_base = OTHER; note = 2'-O-(2-Methoxyethyl) adenosine
  modified_base 17: mod_base = OTHER; note = 2'-Omethylguanosine
  modified_base 22: mod_base = OTHER; note = Guanosine phosphorothiorate
  modified_base 23: mod_base = OTHER; note = 2'-O-(2-Methoxyethyl) 5-methylcytosine
  modified_base 24: mod_base = OTHER; note = Guanosine phosphorothiorate
  modified_base 25: mod_base = OTHER; note = deoxycytosine phosphorothiorate
  modified_base 27: mod_base = OTHER; note = Uridine phosphorothiorate
  modified_base 28: mod_base = OTHER; note = 2'-O-(2-Methoxyethyl) thymine
  modified_base 29: mod_base = OTHER; note = Guanosine phosphorothiorate
  modified_base 31: mod_base = OTHER; note = Adenosine phosphorothiorate
  modified_base 32: mod_base = OTHER; note = 2'-Omethylcytosine
  modified_base 39: mod_base = OTHER; note = 2'-O-(2-Methoxyethyl) thymine
  modified_base 43: mod_base = OTHER; note = 2'-O-(2-Methoxyethyl) adenosine
  modified_base 45: mod_base = OTHER; note = Guanosine phosphorothiorate
  modified_base 46: mod_base = OTHER; note = Guanosine phosphorothiorate
  modified_base 47: mod_base = OTHER; note = 2'-fluorouridine phosphorothiorate
  modified_base 48: mod_base = OTHER; note = 2'-O-(2-Methoxyethyl) thymine
  modified_base 56: mod_base = OTHER; note = 2'-fluorocytosine
  modified_base 57: mod_base = OTHER; note = 2'-fluoroguanosine
  modified_base 58: mod_base = OTHER; note = Adenosine phosphorothiorate
  modified_base 59: mod_base = OTHER; note = 2'-fluoroguanosine
  modified_base 60: mod_base = OTHER; note = 2'-O-(2-Methoxyethyl) thymine
  modified_base 61: mod_base = OTHER; note = 2'-Omethylcytosine phosphorothiorate
  modified_base 62: mod_base = OTHER; note = Cytosine phosphorothiorate
  modified_base 63: mod_base = OTHER; note = 2'-Omethylcytosine
  modified_base 69: mod_base = OTHER; note = 2'-Omethyladenosine
  modified_base 71: mod_base = OTHER; note = 2'-O-(2-Methoxyethyl) thymine
  modified_base 72: mod_base = OTHER; note = 2'-fluorocytosine
  modified_base 73: mod_base = OTHER; note = Guanosine phosphorothiorate
  modified_base 74: mod_base = OTHER; note = 2'-Omethylcytosine phosphorothiorate
  modified_base 75: mod_base = OTHER; note = 2'-O-(2-Methoxyethyl) 5-methylcytosine phosphorothiorate
  misc_feature 1..2: note = RNA
  misc_feature 3: note = DNA
  misc_feature 4..10: note = RNA
  misc_feature 11: note = DNA
  misc_feature 12: note = RNA
  misc_feature 13: note = DNA
  misc_feature 14..20: note = RNA
  misc_feature 21: note = DNA
  misc_feature 22..24: note = RNA
  misc_feature 25: note = DNA
  misc_feature 26..39: note = RNA
  misc_feature 40: note = DNA
  misc_feature 41..76: note = RNA

SEQ ID NO: 4422 - RNA, 76 nt, synthetic construct; identical to SEQ ID NO: 625
  source 1..76: mol_type = other RNA
  modified_base 6: mod_base = OTHER; note = Cytosine phosphorothiorate
  modified_base 10: mod_base = OTHER; note = 2'-fluoroguanosine
  modified_base 11: mod_base = OTHER; note = 2'-Omethylcytosine
  modified_base 12: mod_base = OTHER; note = Guanosine phosphorothiorate
  modified_base 13: mod_base = OTHER; note = 2'-fluorocytosine
  modified_base 14: mod_base = OTHER; note = 2'-fluoroadenosine
  modified_base 15: mod_base = OTHER; note = 2'-fluoroadenosine
  modified_base 17: mod_base = OTHER; note = 2'-Omethylguanosine
  modified_base 20: mod_base = OTHER; note = 2'-fluorouridine phosphorothiorate
  modified_base 25: mod_base = OTHER; note = 2'-fluorocytosine
  modified_base 26: mod_base = OTHER; note = 2'-fluoroadenosine
  modified_base 28: mod_base = OTHER; note = 2'-fluorouridine
  modified_base 30: mod_base = OTHER; note = 2'-fluoroguanosine
  modified_base 34: mod_base = OTHER; note = 2'-fluorouridine
  modified_base 36: mod_base = OTHER; note = Adenosine phosphorothiorate
  modified_base 38: mod_base = OTHER; note = 2'-Omethyladenosine
  modified_base 39: mod_base = OTHER; note = 2'-Omethyluridine phosphorothiorate
  modified_base 40: mod_base = OTHER; note = 2'-Omethyluridine
  modified_base 43: mod_base = OTHER; note = 2'-Omethyladenosine phosphorothiorate
  modified_base 45: mod_base = OTHER; note = 2'-fluoroguanosine
  modified_base 46: mod_base = OTHER; note = 2'-Omethylguanosine
  modified_base 47: mod_base = OTHER; note = 2'-Omethyluridine
  modified_base 49: mod_base = OTHER; note = Cytosine phosphorothiorate
  modified_base 50: mod_base = OTHER; note = 2'-Omethylcytosine
  modified_base 53: mod_base = OTHER; note = 2'-Omethylguanosine
  modified_base 56: mod_base = OTHER; note = 2'-fluorocytosine
  modified_base 58: mod_base = OTHER; note = Adenosine phosphorothiorate
  modified_base 59: mod_base = OTHER; note = 2'-fluoroguanosine
  modified_base 61: mod_base = OTHER; note = 2'-Omethylcytosine
  modified_base 63: mod_base = OTHER; note = 2'-Omethylcytosine
  modified_base 70: mod_base = OTHER; note = 2'-Omethylguanosine
  modified_base 73: mod_base = OTHER; note = 2'-Omethylguanosine
  modified_base 74: mod_base = OTHER; note = 2'-fluorocytosine

SEQ ID NO: 4423 - RNA, 76 nt, synthetic construct; identical to SEQ ID NO: 625
  source 1..76: mol_type = other RNA
  modified_base 1: mod_base = OTHER; note = 2'-fluoroguanosine
  modified_base 2: mod_base = OTHER; note = 2'-Omethylguanosine
  modified_base 3: mod_base = OTHER; note = Cytosine phosphorothiorate
  modified_base 4: mod_base = OTHER; note = 2'-fluorouridine
  modified_base 12: mod_base = OTHER; note = 2'-fluoroguanosine
  modified_base 13: mod_base = OTHER; note = 2'-Omethylcytosine
  modified_base 14: mod_base = OTHER; note = Adenosine phosphorothiorate
  modified_base 16: mod_base = OTHER; note = 2'-fluorouridine
  modified_base 17: mod_base = OTHER; note = Guanosine phosphorothiorate
  modified_base 21: mod_base = OTHER; note = Adenosine phosphorothiorate
  modified_base 27: mod_base = OTHER; note = Uridine phosphorothiorate
  modified_base 28: mod_base = OTHER; note = 2'-fluorouridine
  modified_base 31: mod_base = OTHER; note = 2'-fluoroadenosine
  modified_base 34: mod_base = OTHER; note = Uridine phosphorothiorate
  modified_base 38: mod_base = OTHER; note = 2'-fluoroadenosine
  modified_base 39: mod_base = OTHER; note = 2'-fluorouridine
  modified_base 40: mod_base = OTHER; note = 2'-Omethyluridine
  modified_base 41: mod_base = OTHER; note = 2'-Omethylcytosine
  modified_base 43: mod_base = OTHER; note = 2'-Omethyladenosine
  modified_base 44: mod_base = OTHER; note = 2'-Omethyladenosine
  modified_base 45: mod_base = OTHER; note = 2'-Omethylguanosine
  modified_base 46: mod_base = OTHER; note = 2'-fluoroguanosine
  modified_base 51: mod_base = OTHER; note = 2'-Omethylguanosine
  modified_base 55: mod_base = OTHER; note = Uridine phosphorothiorate
  modified_base 57: mod_base = OTHER; note = Guanosine phosphorothiorate
  modified_base 58: mod_base = OTHER; note = 2'-fluoroadenosine
  modified_base 60: mod_base = OTHER; note = 2'-Omethyluridine
  modified_base 61: mod_base = OTHER; note = 2'-fluorocytosine
  modified_base 62: mod_base = OTHER; note = 2'-Omethylcytosine
  modified_base 63: mod_base = OTHER; note = 2'-fluorocytosine
  modified_base 64: mod_base = OTHER; note = Guanosine phosphorothiorate
  modified_base 65: mod_base = OTHER; note = 2'-fluoroguanosine
  modified_base 67: mod_base = OTHER; note = 2'-fluoroguanosine
  modified_base 68: mod_base = OTHER; note = 2'-fluoroguanosine
  modified_base 70: mod_base = OTHER; note = 2'-fluoroguanosine
  modified_base 74: mod_base = OTHER; note = 2'-fluorocytosine

SEQ ID NO: 4424 - RNA, 75 nt, synthetic construct; identical to SEQ ID NO: 3311
  source 1..75: mol_type = other RNA
  modified_base 1: mod_base = OTHER; note = 2'-Omethylguanosine phosphorothiorate
  modified_base 2: mod_base = OTHER; note = 2'-Omethylguanosine
  modified_base 10: mod_base = OTHER; note = 2'-Omethylguanosine
  modified_base 14: mod_base = OTHER; note = 2'-fluoroadenosine
  modified_base 19: mod_base = OTHER; note = 2'-fluorouridine
  modified_base 20: mod_base = OTHER; note = 2'-Omethyladenosine phosphorothiorate
  modified_base 21: mod_base = OTHER; note = 2'-fluoroadenosine
  modified_base 22: mod_base = OTHER; note = 2'-fluoroguanosine
  modified_base 23: mod_base = OTHER; note = Cytosine phosphorothiorate
  modified_base 28: mod_base = OTHER; note = Uridine phosphorothiorate
  modified_base 29: mod_base = OTHER; note = 2'-fluoroguanosine
  modified_base 32: mod_base = OTHER; note = 2'-fluorocytosine
  modified_base 36: mod_base = OTHER; note = 2'-fluoroadenosine phosphorothiorate
  modified_base 41: mod_base = OTHER; note = Cytosine phosphorothiorate
  modified_base 42: mod_base = OTHER; note = 2'-fluoroadenosine
  modified_base 44: mod_base = OTHER; note = 2'-fluorocytosine
  modified_base 50: mod_base = OTHER; note = Guanosine phosphorothiorate
  modified_base 62: mod_base = OTHER; note = Cytosine phosphorothiorate
  modified_base 64: mod_base = OTHER; note = Guanosine phosphorothiorate
  modified_base 66: mod_base = OTHER; note = 2'-fluoroguanosine
  modified_base 68: mod_base = OTHER; note = Adenosine phosphorothiorate
  modified_base 69: mod_base = OTHER; note = 2'-fluoroadenosine
  modified_base 73: mod_base = OTHER; note = Cytosine phosphorothiorate
  modified_base 74: mod_base = OTHER; note = 2'-Omethylcytosine
  modified_base 75: mod_base = OTHER; note = 2'-Omethyladenosine

SEQ ID NO: 4425 - RNA, 86 nt, synthetic construct; identical to SEQ ID NO: 3290
  source 1..86: mol_type = other RNA
  modified_base 22: mod_base = OTHER; note = 2'-Omethyladenosine
  modified_base 23: mod_base = OTHER; note = 2'-Omethylguanosine
  modified_base 24: mod_base = OTHER; note = 2'-Omethylguanosine
  modified_base 25: mod_base = OTHER; note = 2'-Omethylcytosine
  modified_base 59: mod_base = OTHER; note = 2'-Omethylguanosine
  modified_base 60: mod_base = OTHER; note = 2'-Omethyluridine
  modified_base 61: mod_base = OTHER; note = 2'-Omethylguanosine
  modified_base 62: mod_base = OTHER; note = 2'-Omethylguanosine
  modified_base 63: mod_base = OTHER; note = 2'-Omethylguanosine
  modified_base 83: mod_base = OTHER; note = 2'-Omethyladenosine

SEQ ID NO: 4426 - RNA, 76 nt, synthetic construct; identical to SEQ ID NO: 625
  source 1..76: mol_type = other RNA
  modified_base 1: mod_base = OTHER; note = 2'-Omethylguanosine
  modified_base 2: mod_base = OTHER; note = 2'-Omethylguanosine
  modified_base 3: mod_base = OTHER; note = 2'-Omethylcytosine
  modified_base 4: mod_base = OTHER; note = 2'-Omethyluridine
  modified_base 5: mod_base = OTHER; note = 2'-Omethylcytosine
  modified_base 6: mod_base = OTHER; note = 2'-Omethylcytosine
  modified_base 10: mod_base = OTHER; note = 2'-Omethylguanosine
  modified_base 11: mod_base = OTHER; note = 2'-Omethylcytosine
  modified_base 12: mod_base = OTHER; note = 2'-Omethylguanosine
  modified_base 13: mod_base = OTHER; note = 2'-Omethylcytosine
  modified_base 14: mod_base = OTHER; note = 2'-Omethyladenosine
  modified_base 15: mod_base = OTHER; note = 2'-fluoroadenosine
  modified_base 16: mod_base = OTHER; note = 2'-Omethyluridine
  modified_base 17: mod_base = OTHER; note = 2'-Omethylguanosine
  modified_base 18: mod_base = OTHER; note = 2'-Omethylguanosine
  modified_base 19: mod_base = OTHER; note = 2'-fluoroadenosine
  modified_base 20: mod_base = OTHER; note = 2'-Omethyluridine
  modified_base 21: mod_base = OTHER; note = 2'-fluoroadenosine
  modified_base 22: mod_base = OTHER; note = 2'-Omethylguanosine
  modified_base 23: mod_base = OTHER; note = 2'-Omethylcytosine
  modified_base 24: mod_base = OTHER; note = 2'-Omethylguanosine
  modified_base 25: mod_base = OTHER; note = 2'-Omethylcytosine
  modified_base 38: mod_base = OTHER; note = Adenosine phosphorothiorate
  modified_base 39: mod_base = OTHER; note = Uridine phosphorothiorate
  modified_base 40: mod_base = OTHER; note = 2'-fluorouridine
  modified_base 43: mod_base = OTHER; note = 2'-Omethyladenosine
  modified_base 44: mod_base = OTHER; note = 2'-Omethyladenosine
  modified_base 45: mod_base = OTHER; note = 2'-Omethylguanosine
  modified_base 46: mod_base = OTHER; note = 2'-fluoroguanosine
  modified_base 48: mod_base = OTHER; note = 2'-fluorouridine
  modified_base 49: mod_base = OTHER; note = 2'-Omethylcytosine
  modified_base 50: mod_base = OTHER; note = 2'-Omethylcytosine
  modified_base 54: mod_base = OTHER; note = Uridine phosphorothiorate
  modified_base 55: mod_base = OTHER; note = Uridine phosphorothiorate
  modified_base 56: mod_base = OTHER; note = 2'-Omethylcytosine
  modified_base 57: mod_base = OTHER; note = Guanosine phosphorothiorate
  modified_base 61: mod_base = OTHER; note = 2'-Omethylcytosine
  modified_base 62: mod_base = OTHER; note = 2'-Omethylcytosine
  modified_base 63: mod_base = OTHER; note = 2'-fluorocytosine
  modified_base 64: mod_base = OTHER; note = 2'-Omethylguanosine
  modified_base 65: mod_base = OTHER; note = 2'-Omethylguanosine
  modified_base 66: mod_base = OTHER; note = 2'-Omethylcytosine
  modified_base 67: mod_base = OTHER; note = 2'-Omethylguanosine
  modified_base 68: mod_base = OTHER; note = 2'-Omethylguanosine
  modified_base 69: mod_base = OTHER; note = 2'-Omethyladenosine
  modified_base 70: mod_base = OTHER; note = 2'-fluoroguanosine

SEQ ID NO: 4427 - RNA, 75 nt, synthetic construct; identical to SEQ ID NO: 3306
  source 1..75: mol_type = other RNA
  modified_base 1: mod_base = OTHER; note = 2'-Omethylguanosine phosphorothiorate
  modified_base 2: mod_base = OTHER; note = 2'-Omethyladenosine phosphorothiorate
  modified_base 3: mod_base = OTHER; note = 2'-Omethylcytosine
  modified_base 4: mod_base = OTHER; note = 2'-Omethylcytosine
  modified_base 5: mod_base = OTHER; note = 2'-Omethyluridine
  modified_base 6: mod_base = OTHER; note = 2'-Omethylcytosine
  modified_base 16: mod_base = OTHER; note = 2'-Omethylcytosine
  modified_base 17: mod_base = OTHER; note = 2'-Omethylguanosine
  modified_base 18: mod_base = OTHER; note = 2'-Omethylguanosine
  modified_base 21: mod_base = OTHER; note = 2'-Omethylguanosine
  modified_base 23: mod_base = OTHER; note = 2'-Omethylguanosine
  modified_base 24: mod_base = OTHER; note = 2'-Omethylcytosine
  modified_base 32: mod_base = OTHER; note = 2'-fluorouridine
  modified_base 34: mod_base = OTHER; note = Uridine phosphorothiorate
  modified_base 36: mod_base = OTHER; note = Guanosine phosphorothiorate
  modified_base 37: mod_base = OTHER; note = Adenosine phosphorothiorate
  modified_base 43: mod_base = OTHER; note = 2'-Omethyladenosine
  modified_base 44: mod_base = OTHER; note = 2'-Omethylguanosine
  modified_base 45: mod_base = OTHER; note = 2'-fluoroguanosine
  modified_base 46: mod_base = OTHER; note = 2'-fluorouridine
  modified_base 47: mod_base = OTHER; note = 2'-fluorouridine
  modified_base 48: mod_base = OTHER; note = 2'-Omethylguanosine
  modified_base 49: mod_base = OTHER; note = 2'-Omethylcytosine
  modified_base 50: mod_base = OTHER; note = 2'-Omethylguanosine
  modified_base 51: mod_base = OTHER; note = 2'-Omethyluridine
  modified_base 52: mod_base = OTHER; note = 2'-Omethylguanosine
  modified_base 53: mod_base = OTHER; note = 2'-Omethyluridine
  modified_base 55: mod_base = OTHER; note = 2'-Omethylcytosine
  modified_base 58: mod_base = OTHER; note = 2'-Omethyladenosine
  modified_base 60: mod_base = OTHER; note = 2'-Omethylcytosine
  modified_base 61: mod_base = OTHER; note = 2'-Omethyladenosine
  modified_base 62: mod_base = OTHER; note = 2'-fluorocytosine
  modified_base 63: mod_base = OTHER; note = 2'-Omethylguanosine
  modified_base 64: mod_base = OTHER; note = 2'-Omethyluridine
  modified_base 65: mod_base = OTHER; note = 2'-Omethylcytosine
  modified_base 66: mod_base = OTHER; note = 2'-Omethylguanosine
  modified_base 67: mod_base = OTHER; note = 2'-Omethylguanosine
  modified_base 72: mod_base = OTHER; note = 2'-Omethyladenosine

SEQ ID NO: 4428 - RNA, 76 nt, synthetic construct; identical to SEQ ID NO: 3675
  source 1..76: mol_type = other RNA
  modified_base 1: mod_base = OTHER; note = 2'-Omethylguanosine
  modified_base 2: mod_base = OTHER; note = 2'-Omethylcytosine
  modified_base 3: mod_base = OTHER; note = 2'-Omethylcytosine
  modified_base 4: mod_base = OTHER; note = 2'-Omethyluridine
  modified_base 5: mod_base = OTHER; note = 2'-Omethylcytosine
  modified_base 6: mod_base = OTHER; note = 2'-Omethylcytosine
  modified_base 16: mod_base = OTHER; note = 2'-Omethyluridine
  modified_base 17: mod_base = OTHER; note = 2'-Omethylguanosine
  modified_base 18: mod_base = OTHER; note = 2'-Omethylguanosine
  modified_base 20: mod_base = OTHER; note = 2'-Omethyluridine
  modified_base 25: mod_base = OTHER; note = 2'-Omethylcytosine
  modified_base 33: mod_base = OTHER; note = 2'-fluorouridine
  modified_base 35: mod_base = OTHER; note = Cytosine phosphorothiorate
  modified_base 37: mod_base = OTHER; note = Adenosine phosphorothiorate
  modified_base 38: mod_base = OTHER; note = Adenosine phosphorothiorate
  modified_base 41: mod_base = OTHER; note = 2'-fluorocytosine
  modified_base 42: mod_base = OTHER; note = 2'-Omethyladenosine
  modified_base 43: mod_base = OTHER; note = 2'-Omethylcytosine
  modified_base 44: mod_base = OTHER; note = 2'-fluoroadenosine
  modified_base 49: mod_base = OTHER; note = 2'-Omethylcytosine
  modified_base 50: mod_base = OTHER; note = 2'-Omethylcytosine
  modified_base 52: mod_base = OTHER; note = 2'-Omethylguanosine
  modified_base 54: mod_base = OTHER; note = 2'-Omethyluridine
  modified_base 55: mod_base = OTHER; note = Uridine phosphorothiorate
  modified_base 56: mod_base = OTHER; note = 2'-Omethylcytosine
  modified_base 57: mod_base = OTHER; note = 2'-fluoroguanosine
  modified_base 59: mod_base = OTHER; note = 2'-Omethylguanosine
  modified_base 61: mod_base = OTHER; note = 2'-Omethylcytosine
  modified_base 62: mod_base = OTHER; note = 2'-Omethylcytosine
  modified_base 63: mod_base = OTHER; note = 2'-fluorocytosine
  modified_base 64: mod_base = OTHER; note = 2'-Omethylguanosine
  modified_base 65: mod_base = OTHER; note = 2'-Omethylguanosine
  modified_base 73: mod_base = OTHER; note = 2'-Omethylguanosine

SEQ ID NO: 4429 - RNA, 76 nt, synthetic construct; identical to SEQ ID NO: 625
  source 1..76: mol_type = other RNA
  modified_base 1: mod_base = OTHER; note = 2'-Omethylguanosine phosphorothiorate
  modified_base 2: mod_base = OTHER; note = 2'-Omethylguanosine
  modified_base 3: mod_base = OTHER; note = 2'-Omethylcytosine
  modified_base 4: mod_base = OTHER; note = 2'-Omethyluridine
  modified_base 5: mod_base = OTHER; note = 2'-Omethylcytosine
  modified_base 6: mod_base = OTHER; note = 2'-Omethylcytosine
  modified_base 10: mod_base = OTHER; note = 2'-Omethylguanosine
  modified_base 11: mod_base = OTHER; note = 2'-Omethylcytosine
  modified_base 12: mod_base = OTHER; note = 2'-Omethylguanosine
  modified_base 13: mod_base = OTHER; note = 2'-Omethylcytosine
  modified_base 22: mod_base = OTHER; note = 2'-Omethylguanosine
  modified_base 23: mod_base = OTHER; note = 2'-Omethylcytosine
  modified_base 24: mod_base = OTHER; note = 2'-Omethylguanosine
  modified_base 25: mod_base = OTHER; note = 2'-Omethylcytosine
  modified_base 49: mod_base = OTHER; note = 2'-Omethylcytosine
  modified_base 50: mod_base = OTHER; note = 2'-Omethylcytosine
  modified_base 51: mod_base = OTHER; note = 2'-Omethylguanosine
  modified_base 52: mod_base = OTHER; note = 2'-Omethylguanosine
  modified_base 53: mod_base = OTHER; note = 2'-Omethylguanosine
  modified_base 61: mod_base = OTHER; note = 2'-Omethylcytosine
  modified_base 62: mod_base = OTHER; note = 2'-Omethylcytosine
  modified_base 63: mod_base = OTHER; note = 2'-fluorocytosine
  modified_base 64: mod_base = OTHER; note = 2'-Omethylguanosine
  modified_base 65: mod_base = OTHER; note = 2'-Omethylguanosine
  modified_base 66: mod_base = OTHER; note = 2'-Omethylcytosine
  modified_base 67: mod_base = OTHER; note = 2'-Omethylguanosine
  modified_base 68: mod_base = OTHER; note = 2'-Omethylguanosine
  modified_base 69: mod_base = OTHER; note = 2'-Omethyladenosine

SEQ ID NO: 4430 - RNA, 76 nt, synthetic construct; identical to SEQ ID NO: 3318
  source 1..76: mol_type = other RNA
  modified_base 1: mod_base = OTHER; note = 2'-Omethylcytosine
  modified_base 14: mod_base = OTHER; note = 2'-Omethyladenosine phosphorothiorate
  modified_base 15: mod_base = OTHER; note = 2'-Omethylguanosine phosphorothiorate
  modified_base 16: mod_base = OTHER; note = 2'-Omethyluridine phosphorothiorate
  modified_base 18: mod_base = OTHER; note = 2'-Omethylguanosine phosphorothiorate
  modified_base 19: mod_base = OTHER; note = 2'-Omethylguanosine phosphorothiorate
  modified_base 20: mod_base = OTHER; note = 2'-fluorouridine phosphorothiorate
  modified_base 21: mod_base = OTHER; note = 2'-fluoroadenosine phosphorothiorate
  modified_base 50: mod_base = OTHER; note = 2'-Omethylcytosine
  modified_base 52: mod_base = OTHER; note = 2'-Omethylguanosine
  modified_base 73: mod_base = OTHER; note = 2'-Omethyladenosine

SEQ ID NO: 4431 - RNA, 76 nt, synthetic construct
  source 1..76: mol_type = other RNA
ggctccgtggcgcaatggatagcggattggacttcaaattcaaagtttccgggttcgagtcccggcggagtcgcca

SEQ ID NO: 4432 - RNA, 76 nt, synthetic construct; identical to SEQ ID NO: 625
  source 1..76: mol_type = other RNA
  modified_base 1: mod_base = OTHER; note = 2'-Omethylguanosine
  modified_base 2: mod_base = OTHER; note = 2'-fluoroguanosine
  modified_base 5: mod_base = OTHER; note = 2'-fluorocytosine
  modified_base 7: mod_base = OTHER; note = Guanosine phosphorothiorate
  modified_base 9: mod_base = OTHER; note = Guanosine phosphorothiorate
  modified_base 10: mod_base = OTHER; note = 2'-fluoroguanosine
  modified_base 15: mod_base = OTHER; note = 2'-fluoroadenosine
  modified_base 18: mod_base = OTHER; note = 2'-fluoroguanosine
  modified_base 23: mod_base = OTHER; note = 2'-fluorocytosine
  modified_base 24: mod_base = OTHER; note = 2'-Omethylguanosine
  modified_base 25: mod_base = OTHER; note = Cytosine phosphorothiorate
  modified_base 26: mod_base = OTHER; note = 2'-Omethyladenosine
  modified_base 29: mod_base = OTHER; note = Guanosine phosphorothiorate
  modified_base 31: mod_base = OTHER; note = 2'-fluoroadenosine
  modified_base 33: mod_base = OTHER; note = Uridine phosphorothiorate
  modified_base 38: mod_base = OTHER; note = 2'-fluoroadenosine phosphorothiorate
  modified_base 42: mod_base = OTHER; note = 2'-Omethyladenosine
  modified_base 44: mod_base = OTHER; note = Adenosine phosphorothiorate
  modified_base 45: mod_base = OTHER; note = 2'-fluoroguanosine
  modified_base 46: mod_base = OTHER; note = 2'-fluoroguanosine
  modified_base 47: mod_base = OTHER; note = Uridine phosphorothiorate
  modified_base 48: mod_base = OTHER; note = Uridine phosphorothiorate
  modified_base 49: mod_base = OTHER; note = 2'-fluorocytosine
  modified_base 50: mod_base = OTHER; note = 2'-Omethylcytosine
  modified_base 52: mod_base = OTHER; note = 2'-Omethylguanosine
  modified_base 53: mod_base = OTHER; note = 2'-Omethylguanosine phosphorothiorate
  modified_base 57: mod_base = OTHER; note = Guanosine phosphorothiorate
  modified_base 58: mod_base = OTHER; note = 2'-fluoroadenosine
  modified_base 59: mod_base = OTHER; note = 2'-Omethylguanosine
  modified_base 62: mod_base = OTHER; note = 2'-Omethylcytosine
  modified_base 67: mod_base = OTHER; note = 2'-Omethylguanosine
  modified_base 70: mod_base = OTHER; note = 2'-fluoroguanosine
  modified_base 73: mod_base = OTHER; note = 2'-fluoroguanosine
  modified_base 75: mod_base = OTHER; note = 2'-Omethylcytosine

SEQ ID NO: 4433 - RNA, 76 nt, synthetic construct; identical to SEQ ID NO: 625
  source 1..76: mol_type = other RNA
  modified_base 3: mod_base = OTHER; note = Cytosine phosphorothiorate
  modified_base 4: mod_base = OTHER; note = 2'-fluorouridine
  modified_base 5: mod_base = OTHER; note = 2'-fluorocytosine phosphorothiorate
  modified_base 6: mod_base = OTHER; note = 2'-Omethylcytosine phosphorothiorate
  modified_base 8: mod_base = OTHER; note = Uridine phosphorothiorate
  modified_base 13: mod_base = OTHER; note = 2'-Omethylcytosine
  modified_base 14: mod_base = OTHER; note = 2'-fluoroadenosine phosphorothiorate
  modified_base 15: mod_base = OTHER; note = 2'-Omethyladenosine
  modified_base 16: mod_base = OTHER; note = Uridine phosphorothiorate
  modified_base 18: mod_base = OTHER; note = 2'-Omethylguanosine phosphorothiorate
  modified_base 21: mod_base = OTHER; note = Adenosine phosphorothiorate
  modified_base 22: mod_base = OTHER; note = 2'-Omethylguanosine
  modified_base 23: mod_base = OTHER; note = Cytosine phosphorothiorate
  modified_base 26: mod_base = OTHER; note = 2'-Omethyladenosine
  modified_base 27: mod_base = OTHER; note = Uridine phosphorothiorate
  modified_base 29: mod_base = OTHER; note = 2'-Omethylguanosine
  modified_base 33: mod_base = OTHER; note = Uridine phosphorothiorate
  modified_base 40: mod_base = OTHER; note = 2'-Omethyluridine phosphorothiorate
  modified_base 41: mod_base = OTHER; note = 2'-fluorocytosine
  modified_base 42: mod_base = OTHER; note = Adenosine phosphorothiorate
  modified_base 43: mod_base = OTHER; note = Adenosine phosphorothiorate
  modified_base 44: mod_base = OTHER; note = 2'-Omethyladenosine
  modified_base 45: mod_base = OTHER; note = 2'-fluoroguanosine
  modified_base 48: mod_base = OTHER; note = 2'-Omethyluridine phosphorothiorate
  modified_base 49: mod_base = OTHER; note = 2'-fluorocytosine
  modified_base 50: mod_base = OTHER; note = 2'-fluorocytosine
  modified_base 52: mod_base = OTHER; note = 2'-Omethylguanosine
  modified_base 57: mod_base = OTHER; note = 2'-Omethylguanosine
  modified_base 59: mod_base = OTHER; note = 2'-Omethylguanosine
  modified_base 62: mod_base = OTHER; note = 2'-fluorocytosine
  modified_base 63: mod_base = OTHER; note = 2'-Omethylcytosine
  modified_base 64: mod_base = OTHER; note = 2'-fluoroguanosine
  modified_base 65: mod_base = OTHER; note = 2'-fluoroguanosine
  modified_base 71: mod_base = OTHER; note = 2'-fluorouridine
  modified_base 75: mod_base = OTHER; note = 2'-Omethylcytosine

SEQ ID NO: 4434 - RNA, 76 nt, synthetic construct; identical to SEQ ID NO: 3289
  source 1..76: mol_type = other RNA
  modified_base 1: mod_base = OTHER; note = 2'-Omethylguanosine
  modified_base 9: mod_base = OTHER; note = Adenosine phosphorothiorate
  modified_base 10: mod_base = OTHER; note = 2'-Omethylguanosine
  modified_base 13: mod_base = OTHER; note = 2'-Omethylcytosine
  modified_base 18: mod_base = OTHER; note = Guanosine phosphorothiorate
  modified_base 19: mod_base = OTHER; note = 2'-Omethylguanosine
  modified_base 20: mod_base = OTHER; note = Uridine phosphorothiorate
  modified_base 25: mod_base = OTHER; note = 2'-Omethylcytosine
  modified_base 29: mod_base = OTHER; note = 2'-Omethyladenosine
  modified_base 33: mod_base = OTHER; note = 2'-fluorouridine
  modified_base 35: mod_base = OTHER; note = Uridine phosphorothiorate
  modified_base 37: mod_base = OTHER; note = Adenosine phosphorothiorate
  modified_base 38: mod_base = OTHER; note = Adenosine phosphorothiorate
  modified_base 41: mod_base = OTHER; note = 2'-fluorouridine
  modified_base 43: mod_base = OTHER; note = 2'-Omethyladenosine
  modified_base 44: mod_base = OTHER; note = 2'-fluoroguanosine
  modified_base 46: mod_base = OTHER; note = Guanosine phosphorothiorate
  modified_base 50: mod_base = OTHER; note = 2'-Omethyladenosine
  modified_base 52: mod_base = OTHER; note = 2'-Omethylguanosine
  modified_base 54: mod_base = OTHER; note = Uridine phosphorothiorate
  modified_base 55: mod_base = OTHER; note = Uridine phosphorothiorate
  modified_base 56: mod_base = OTHER; note = 2'-Omethylcytosine
  modified_base 57: mod_base = OTHER; note = Adenosine phosphorothiorate
  modified_base 62: mod_base = OTHER; note = 2'-Omethylcytosine
  modified_base 63: mod_base = OTHER; note = 2'-fluorocytosine
  modified_base 65: mod_base = OTHER; note = 2'-Omethylguanosine
  modified_base 71: mod_base = OTHER; note = 2'-Omethylguanosine
  modified_base 73: mod_base = OTHER; note = 2'-Omethylguanosine

SEQ ID NO: 4435 - RNA, 86 nt, synthetic construct; identical to SEQ ID NO: 3290
  source 1..86: mol_type = other RNA
  modified_base 2: mod_base = OTHER; note = 2'-Omethylcytosine

SEQ ID NO: 4436 - RNA, 76 nt, synthetic construct; identical to SEQ ID NO: 625
  source 1..76: mol_type = other RNA
  modified_base 1: mod_base = OTHER; note = 2'-Omethylguanosine phosphorothiorate
  modified_base 2: mod_base = OTHER; note = 2'-Omethylguanosine phosphorothiorate
  modified_base 9: mod_base = OTHER; note = Guanosine phosphorothiorate
  modified_base 10: mod_base = OTHER; note = 2'-O-(2-Methoxyethyl) guanosine
  modified_base 40: mod_base = OTHER; note = Uridine phosphorothiorate
  modified_base 41: mod_base = OTHER; note = 2'-Omethylcytosine
  modified_base 61: mod_base = OTHER; note = Cytosine phosphorothiorate
  modified_base 62: mod_base = OTHER; note = 2'-O-(2-Methoxyethyl) 5-methylcytosine
  modified_base 65: mod_base = OTHER; note = Guanosine phosphorothiorate
  modified_base 66: mod_base = OTHER; note = 2'-fluorocytosine
  modified_base 75: mod_base = OTHER; note = 2'-O-(2-Methoxyethyl) 5-methylcytosine

SEQ ID NO: 4437 - RNA, 75 nt, synthetic construct; identical to SEQ ID NO: 3306
  source 1..75: mol_type = other RNA
  modified_base 1: mod_base = OTHER; note = 2'-Omethylguanosine
  modified_base 10: mod_base = OTHER; note = 2'-Omethylguanosine
  modified_base 11: mod_base = OTHER; note = 2'-Omethylcytosine
  modified_base 12: mod_base = OTHER; note = 2'-Omethylguanosine
  modified_base 13: mod_base = OTHER; note = 2'-Omethylcytosine
  modified_base 17: mod_base = OTHER; note = 2'-Omethylguanosine
  modified_base 18: mod_base = OTHER; note = 2'-Omethylguanosine
  modified_base 24: mod_base = OTHER; note = 2'-Omethylcytosine
  modified_base 32: mod_base = OTHER; note = Uridine phosphorothiorate
  modified_base 33: mod_base = OTHER; note = 2'-Omethylcytosine
  modified_base 34: mod_base = OTHER; note = Uridine phosphorothiorate
  modified_base 36: mod_base = OTHER; note = Guanosine phosphorothiorate
  modified_base 37: mod_base = OTHER; note = Adenosine phosphorothiorate
  modified_base 40: mod_base = OTHER; note = 2'-fluoroadenosine
  modified_base 41: mod_base = OTHER; note = 2'-Omethylguanosine
  modified_base 42: mod_base = OTHER; note = 2'-Omethyladenosine
  modified_base 43: mod_base = OTHER; note = 2'-fluoroadenosine
  modified_base 48: mod_base = OTHER; note = 2'-Omethylguanosine
  modified_base 49: mod_base = OTHER; note = 2'-Omethylcytosine
  modified_base 51: mod_base = OTHER; note = 2'-Omethyluridine
  modified_base 53: mod_base = OTHER; note = Uridine phosphorothiorate
  modified_base 54: mod_base = OTHER; note = Uridine phosphorothiorate
  modified_base 60: mod_base = OTHER; note = 2'-Omethylcytosine
  modified_base 64: mod_base = OTHER; note = 2'-Omethyluridine
  modified_base 72: mod_base = OTHER; note = 2'-Omethyladenosine

SEQ ID NO: 4438 - RNA, 76 nt, synthetic construct; identical to SEQ ID NO: 625
  source 1..76: mol_type = other RNA
  modified_base 1: mod_base = OTHER; note = 2'-Omethylguanosine
  modified_base 2: mod_base = OTHER; note = 2'-Omethylguanosine
  modified_base 3: mod_base = OTHER; note = 2'-Omethylcytosine
  modified_base 4: mod_base = OTHER; note = 2'-Omethyluridine
  modified_base 5: mod_base = OTHER; note = 2'-Omethylcytosine
  modified_base 6: mod_base = OTHER; note = 2'-Omethylcytosine
  modified_base 10: mod_base = OTHER; note = 2'-Omethylguanosine
  modified_base 11: mod_base = OTHER; note = 2'-Omethylcytosine
  modified_base 12: mod_base = OTHER; note = 2'-Omethylguanosine
  modified_base 13: mod_base = OTHER; note = 2'-Omethylcytosine
  modified_base 14: mod_base = OTHER; note = Adenosine phosphorothiorate
  modified_base 16: mod_base = OTHER; note = 2'-Omethyluridine
  modified_base 17: mod_base = OTHER; note = 2'-Omethylguanosine phosphorothiorate
  modified_base 18: mod_base = OTHER; note = 2'-Omethylguanosine
  modified_base 23: mod_base = OTHER; note = 2'-Omethylcytosine
  modified_base 24: mod_base = OTHER; note = 2'-Omethylguanosine
  modified_base 26: mod_base = OTHER; note = Adenosine phosphorothiorate
  modified_base 29: mod_base = OTHER; note = 2'-Omethylguanosine phosphorothiorate
  modified_base 30: mod_base = OTHER; note = 2'-Omethylguanosine
  modified_base 33: mod_base = OTHER; note = 2'-fluorouridine
  modified_base 35: mod_base = OTHER; note = Cytosine phosphorothiorate
  modified_base 37: mod_base = OTHER; note = Adenosine phosphorothiorate
  modified_base 38: mod_base = OTHER; note = Adenosine phosphorothiorate
  modified_base 40: mod_base = OTHER; note = Uridine phosphorothiorate
  modified_base 47: mod_base = OTHER; note = 2'-Omethyluridine
  modified_base 48: mod_base = OTHER; note = 2'-Omethyluridine
  modified_base 50: mod_base = OTHER; note = 2'-Omethylcytosine
  modified_base 51: mod_base = OTHER; note = Guanosine phosphorothiorate
  modified_base 52: mod_base = OTHER; note = 2'-Omethylguanosine
  modified_base 53: mod_base = OTHER; note = 2'-Omethylguanosine phosphorothiorate
  modified_base 55: mod_base = OTHER; note = Uridine phosphorothiorate
  modified_base 57: mod_base = OTHER; note = 2'-Omethylguanosine phosphorothiorate
  modified_base 59: mod_base = OTHER; note = 2'-Omethylguanosine
  modified_base 60: mod_base = OTHER; note = 2'-Omethyluridine
  modified_base 61: mod_base = OTHER; note = 2'-Omethylcytosine phosphorothiorate
  modified_base 62: mod_base = OTHER; note = 2'-Omethylcytosine
  modified_base 63: mod_base = OTHER; note = 2'-fluorocytosine
  modified_base 64: mod_base = OTHER; note = 2'-Omethylguanosine
  modified_base 65: mod_base = OTHER; note = 2'-Omethylguanosine
  modified_base 66: mod_base = OTHER; note = 2'-Omethylcytosine
  modified_base 67: mod_base = OTHER; note = 2'-Omethylguanosine phosphorothiorate
  modified_base 68: mod_base = OTHER; note = 2'-Omethylguanosine
  modified_base 69: mod_base = OTHER; note = 2'-fluoroadenosine
  modified_base 72: mod_base = OTHER; note = 2'-Omethylcytosine
  modified_base 73: mod_base = OTHER; note = 2'-fluoroguanosine phosphorothiorate
  modified_base 74: mod_base = OTHER; note = Cytosine phosphorothiorate
  modified_base 75: mod_base = OTHER; note = 2'-fluorocytosine phosphorothiorate
  modified_base 76: mod_base = OTHER; note = 2'-Omethyladenosine

SEQ ID NO: 4439 - RNA, 85 nt, synthetic construct; identical to SEQ ID NO: 3288
  source 1..85: mol_type = other RNA
  modified_base 10: mod_base = OTHER; note = Cytosine phosphorothiorate
  modified_base 30: mod_base = OTHER; note = 2'-fluoroadenosine
  modified_base 54: mod_base = OTHER; note = 2'-Omethylcytosine
  modified_base 64: mod_base = OTHER; note = 2'-fluorouridine
  modified_base 85: mod_base = OTHER; note = 2'-fluoroadenosine

SEQ ID NO: 4440 - RNA, 75 nt, synthetic construct; identical to SEQ ID NO: 1045
  source 1..75: mol_type = other RNA
  modified_base 1: mod_base = OTHER; note = 2'-Omethylguanosine
  modified_base 13: mod_base = OTHER; note = 2'-Omethyluridine
  modified_base 17: mod_base = OTHER; note = 2'-Omethylguanosine
  modified_base 18: mod_base = OTHER; note = 2'-Omethylguanosine
  modified_base 25: mod_base = OTHER; note = 2'-Omethylcytosine
  modified_base 33: mod_base = OTHER; note = Uridine phosphorothiorate
  modified_base 34: mod_base = OTHER; note = 2'-Omethyluridine
  modified_base 35: mod_base = OTHER; note = Uridine phosphorothiorate
  modified_base 37: mod_base = OTHER; note = Adenosine phosphorothiorate
  modified_base 38: mod_base = OTHER; note = Adenosine phosphorothiorate
  modified_base 41: mod_base = OTHER; note = 2'-Omethylcytosine
  modified_base 42: mod_base = OTHER; note = 2'-Omethyladenosine
  modified_base 43: mod_base = OTHER; note = 2'-Omethylguanosine
  modified_base 44: mod_base = OTHER; note = 2'-Omethylcytosine
  modified_base 48: mod_base = OTHER; note = 2'-Omethylcytosine
  modified_base 49: mod_base = OTHER; note = 2'-Omethylcytosine
  modified_base 51: mod_base = OTHER; note = 2'-Omethyladenosine
  modified_base 53: mod_base = OTHER; note = Uridine phosphorothiorate
  modified_base 54: mod_base = OTHER; note = Uridine phosphorothiorate
  modified_base 55: mod_base = OTHER; note = 2'-Omethylcytosine
  modified_base 56: mod_base = OTHER; note = Guanosine phosphorothiorate
  modified_base 57: mod_base = OTHER; note = Adenosine phosphorothiorate
  modified_base 58: mod_base = OTHER; note = 2'-Omethylguanosine
  modified_base 60: mod_base = OTHER; note = 2'-Omethylcytosine
  modified_base 64: mod_base = OTHER; note = 2'-Omethylguanosine
  modified_base 72: mod_base = OTHER; note = 2'-Omethyluridine

SEQ ID NO: 4441 - RNA, 76 nt, synthetic construct; identical to SEQ ID NO: 625
  source 1..76: mol_type = other RNA
  modified_base 1: mod_base = OTHER; note = 2'-Omethylguanosine
  modified_base 2: mod_base = OTHER; note = 2'-Omethylguanosine
  modified_base 10: mod_base = OTHER; note = 2'-Omethylguanosine
  modified_base 13: mod_base = OTHER; note = 2'-Omethylcytosine
  modified_base 17: mod_base = OTHER; note = Guanosine phosphorothiorate
  modified_base 18: mod_base = OTHER; note = 2'-Omethylguanosine
  modified_base 19: mod_base = OTHER; note = Adenosine phosphorothiorate
  modified_base 20: mod_base = OTHER; note = 2'-Omethyluridine
  modified_base 25: mod_base = OTHER; note = 2'-Omethylcytosine
  modified_base 29: mod_base = OTHER; note = 2'-Omethylguanosine
  modified_base 33: mod_base = OTHER; note = 2'-fluorouridine
  modified_base 35: mod_base = OTHER; note = Cytosine phosphorothiorate
  modified_base 37: mod_base = OTHER; note = Adenosine phosphorothiorate
  modified_base 38: mod_base = OTHER; note = Adenosine phosphorothiorate
  modified_base 41: mod_base = OTHER; note = 2'-fluorocytosine phosphorothiorate
  modified_base 43: mod_base = OTHER; note = 2'-Omethyladenosine
  modified_base 44: mod_base = OTHER; note = 2'-fluoroadenosine
  modified_base 50: mod_base = OTHER; note = 2'-Omethylcytosine
  modified_base 52: mod_base = OTHER; note = 2'-Omethylguanosine
  modified_base 54: mod_base = OTHER; note = Uridine phosphorothiorate
  modified_base 55: mod_base = OTHER; note = Uridine phosphorothiorate
  modified_base 56: mod_base = OTHER; note = 2'-Omethylcytosine
  modified_base 57: mod_base = OTHER; note = Guanosine phosphorothiorate
  modified_base 62: mod_base = OTHER; note = 2'-Omethylcytosine
  modified_base 63: mod_base = OTHER; note = 2'-fluorocytosine
  modified_base 65: mod_base = OTHER; note = 2'-Omethylguanosine
  modified_base 71: mod_base = OTHER; note = 2'-Omethyluridine
  modified_base 73: mod_base = OTHER; note = 2'-Omethylguanosine

SEQ ID NO: 4442 - RNA, 76 nt, synthetic construct
  source 1..76: mol_type = other RNA
ggctccgtggcgcaatggatagcgcggtggacttcaaattcaaaggttccgggttcgagtcccggcggagtcgcca

SEQ ID NO: 4443 - RNA, 85 nt, synthetic construct; identical to SEQ ID NO: 3297
  source 1..85: mol_type = other RNA
  modified_base 1: mod_base = OTHER; note = 2'-Omethylguanosine
  modified_base 18: mod_base = OTHER; note = 2'-Omethylguanosine
  modified_base 59: mod_base = OTHER; note = 2'-Omethylcytosine
  modified_base 61: mod_base = OTHER; note = 2'-Omethylguanosine
  modified_base 82: mod_base = OTHER; note = 2'-Omethylguanosine

SEQ ID NO: 4444 - RNA, 76 nt, synthetic construct; identical to SEQ ID NO: 625
  source 1..76: mol_type = other RNA
  modified_base 1: mod_base = OTHER; note = 2'-Omethylguanosine phosphorothiorate
  modified_base 2: mod_base = OTHER; note = 2'-Omethylguanosine phosphorothiorate
  modified_base 3: mod_base = OTHER; note = 2'-Omethylcytosine phosphorothiorate
  modified_base 4: mod_base = OTHER; note = 2'-Omethyluridine phosphorothiorate
  modified_base 5: mod_base = OTHER; note = 2'-Omethylcytosine phosphorothiorate
  modified_base 6: mod_base = OTHER; note = 2'-Omethylcytosine phosphorothiorate
  modified_base 49: mod_base = OTHER; note = 2'-Omethylcytosine
  modified_base 50: mod_base = OTHER; note = 2'-Omethylcytosine
  modified_base 51: mod_base = OTHER; note = 2'-Omethylguanosine
  modified_base 52: mod_base = OTHER; note = 2'-Omethylguanosine
  modified_base 53: mod_base = OTHER; note = 2'-Omethylguanosine
  modified_base 61: mod_base = OTHER; note = 2'-Omethylcytosine
  modified_base 62: mod_base = OTHER; note = 2'-Omethylcytosine
  modified_base 63: mod_base = OTHER; note = 2'-Omethylcytosine
  modified_base 64: mod_base = OTHER; note = 2'-Omethylguanosine
  modified_base 65: mod_base = OTHER; note = 2'-Omethylguanosine
  modified_base 66: mod_base = OTHER; note = 2'-Omethylcytosine
  modified_base 67: mod_base = OTHER; note = 2'-Omethylguanosine
  modified_base 68: mod_base = OTHER; note = 2'-Omethylguanosine
  modified_base 69: mod_base = OTHER; note = 2'-Omethyladenosine

SEQ ID NO: 4445 - RNA, 76 nt, synthetic construct; identical to SEQ ID NO: 625
  source 1..76: mol_type = other RNA
  modified_base 1: mod_base = OTHER; note = 2'-Omethylguanosine
  modified_base 2: mod_base = OTHER; note = 2'-Omethylguanosine
  modified_base 3: mod_base = OTHER; note = 2'-Omethylcytosine
  modified_base 4: mod_base = OTHER; note = 2'-Omethyluridine
  modified_base 5: mod_base = OTHER; note = 2'-Omethylcytosine
  modified_base 6: mod_base = OTHER; note = 2'-Omethylcytosine
  modified_base 10: mod_base = OTHER; note = 2'-Omethylguanosine
  modified_base 11: mod_base = OTHER; note = 2'-Omethylcytosine
  modified_base 12: mod_base = OTHER; note = 2'-Omethylguanosine
  modified_base 13: mod_base = OTHER; note = 2'-Omethylcytosine
  modified_base 14: mod_base = OTHER; note = 2'-Omethyladenosine
  modified_base 15: mod_base = OTHER; note = 2'-fluoroadenosine
  modified_base 16: mod_base = OTHER; note = 2'-Omethyluridine
  modified_base 17: mod_base = OTHER; note = 2'-Omethylguanosine
  modified_base 18: mod_base = OTHER; note = 2'-Omethylguanosine
  modified_base 19: mod_base = OTHER; note = 2'-fluoroadenosine
  modified_base 20: mod_base = OTHER; note = 2'-Omethyluridine
  modified_base 21: mod_base = OTHER; note = 2'-fluoroadenosine
  modified_base 22: mod_base = OTHER; note = 2'-Omethylguanosine
  modified_base 23: mod_base = OTHER; note = 2'-Omethylcytosine
  modified_base 24: mod_base = OTHER; note = 2'-Omethylguanosine
  modified_base 25: mod_base = OTHER; note = 2'-Omethylcytosine
  modified_base 40: mod_base = OTHER; note = 2'-fluorouridine
  modified_base 41: mod_base = OTHER; note = 2'-fluorocytosine
  modified_base 42: mod_base = OTHER; note = 2'-fluoroadenosine
  modified_base 43: mod_base = OTHER; note = 2'-fluoroadenosine
  modified_base 44: mod_base = OTHER; note = 2'-Omethyladenosine
  modified_base 45: mod_base = OTHER; note = 2'-Omethylguanosine
  modified_base 46: mod_base = OTHER; note = 2'-Omethylguanosine
  modified_base 49: mod_base = OTHER; note = 2'-Omethylcytosine
  modified_base 50: mod_base = OTHER; note = 2'-Omethylcytosine
  modified_base 51: mod_base = OTHER; note = 2'-Omethylguanosine
  modified_base 52: mod_base = OTHER; note = 2'-Omethylguanosine
  modified_base 53: mod_base = OTHER; note = 2'-Omethylguanosine
  modified_base 54: mod_base = OTHER; note = Uridine phosphorothiorate
  modified_base 55: mod_base = OTHER; note = Uridine phosphorothiorate
  modified_base 56: mod_base = OTHER; note = Cytosine phosphorothiorate
  modified_base 57: mod_base = OTHER; note = Guanosine phosphorothiorate
  modified_base 61: mod_base = OTHER; note = 2'-Omethylcytosine
  modified_base 62: mod_base = OTHER; note = 2'-Omethylcytosine
  modified_base 63: mod_base = OTHER; note = 2'-Omethylcytosine
  modified_base 64: mod_base = OTHER; note = 2'-Omethylguanosine
  modified_base 65: mod_base = OTHER; note = 2'-Omethylguanosine
  modified_base 66: mod_base = OTHER; note = 2'-Omethylcytosine
  modified_base 67: mod_base = OTHER; note = 2'-Omethylguanosine
  modified_base 68: mod_base = OTHER; note = 2'-Omethylguanosine
  modified_base 69: mod_base = OTHER; note = 2'-Omethyladenosine
  modified_base 73: mod_base = OTHER; note = 2'-Omethylguanosine

SEQ ID NO: 4446 - RNA, 76 nt, synthetic construct; identical to SEQ ID NO: 3289
  source 1..76: mol_type = other RNA
  modified_base 1: mod_base = OTHER; note = 2'-Omethylguanosine phosphorothiorate
  modified_base 2: mod_base = OTHER; note = 2'-Omethylcytosine phosphorothiorate
  modified_base 26: mod_base = OTHER; note = 2'-Omethyladenosine
  modified_base 42: mod_base = OTHER; note = Guanosine phosphorothiorate
  modified_base 43: mod_base = OTHER; note = 2'-fluoroadenosine
  modified_base 66: mod_base = OTHER; note = Uridine phosphorothiorate
  modified_base 67: mod_base = OTHER; note = 2'-fluorocytosine
  modified_base 70: mod_base = OTHER; note = 2'-fluoroguanosine
  modified_base 74: mod_base = OTHER; note = Cytosine phosphorothiorate
  modified_base 75: mod_base = OTHER; note = 2'-Omethylcytosine phosphorothiorate
  modified_base 76: mod_base = OTHER; note = 2'-Omethyladenosine

SEQ ID NO: 4447 - RNA, 75 nt, synthetic construct; identical to SEQ ID NO: 3311
  source 1..75: mol_type = other RNA
  modified_base 2: mod_base = OTHER; note = 2'-Omethylguanosine phosphorothiorate
  modified_base 18: mod_base = OTHER; note = 2'-fluoroguanosine
  modified_base 19: mod_base = OTHER; note = 2'-fluorouridine
  modified_base 28: mod_base = OTHER; note = 2'-fluorouridine
  modified_base 41: mod_base = OTHER; note = 2'-fluorocytosine
  modified_base 42: mod_base = OTHER; note = 2'-fluoroadenosine
  modified_base 60: mod_base = OTHER; note = 2'-fluorocytosine
  modified_base 66: mod_base = OTHER; note = 2'-fluoroguanosine
  modified_base 67: mod_base = OTHER; note = Guanosine phosphorothiorate
  modified_base 73: mod_base = OTHER; note = Cytosine phosphorothiorate

SEQ ID NO: 4448 - RNA, 76 nt, synthetic construct; identical to SEQ ID NO: 625
  source 1..76: mol_type = other RNA
  modified_base 1: mod_base = OTHER; note = 2'-Omethylguanosine phosphorothiorate
  modified_base 2: mod_base = OTHER; note = 2'-Omethylguanosine
  modified_base 17: mod_base = OTHER; note = 2'-Omethylguanosine
  modified_base 25: mod_base = OTHER; note = 2'-Omethylcytosine
  modified_base 33: mod_base = OTHER; note = 2'-fluorouridine
  modified_base 35: mod_base = OTHER; note = Cytosine phosphorothiorate
  modified_base 37: mod_base = OTHER; note = Adenosine phosphorothiorate
  modified_base 38: mod_base = OTHER; note = Adenosine phosphorothiorate
  modified_base 52: mod_base = OTHER; note = 2'-fluoroguanosine
  modified_base 56: mod_base = OTHER; note = 2'-Omethylcytosine
  modified_base 68: mod_base = OTHER; note = 2'-Omethylguanosine
  modified_base 73: mod_base = OTHER; note = 2'-Omethylguanosine
  modified_base 75: mod_base = OTHER; note = 2'-fluorocytosine phosphorothiorate

SEQ ID NO: 4449 - RNA, 84 nt, synthetic construct
  source 1..84: mol_type = other RNA
gtcagcgtggccgagtggttaaggcgtttgacttcaaatcaaatgggttcgcccgcacaggttcgaatcctgtcgctgacgcca

SEQ ID NO: 4450 - RNA, 85 nt, synthetic construct; identical to SEQ ID NO: 3317
  source 1..85: mol_type = other RNA
  modified_base 1: mod_base = OTHER; note = 2'-Omethylguanosine phosphorothiorate
  modified_base 2: mod_base = OTHER; note = 2'-Omethylcytosine
  modified_base 27: mod_base = OTHER; note = 2'-fluorouridine
  modified_base 36: mod_base = OTHER; note = 2'-fluoroadenosine
  modified_base 37: mod_base = OTHER; note = 2'-fluoroadenosine
  modified_base 47: mod_base = OTHER; note = 2'-Omethylguanosine phosphorothiorate
  modified_base 53: mod_base = OTHER; note = Cytosine phosphorothiorate
  modified_base 59: mod_base = OTHER; note = 2'-Omethylcytosine
  modified_base 73: mod_base = OTHER; note = Guanosine phosphorothiorate

SEQ ID NO: 4451 - RNA, 74 nt, synthetic construct; identical to SEQ ID NO: 766
  source 1..74: mol_type = other RNA
  modified_base 1: mod_base = OTHER; note = 2'-Omethylguanosine phosphorothiorate
  modified_base 2: mod_base = OTHER; note = 2'-Omethylguanosine phosphorothiorate
  modified_base 5: mod_base = OTHER; note = 2'-Omethylcytosine
  modified_base 61: mod_base = OTHER; note = 2'-fluorocytosine
  modified_base 73: mod_base = OTHER; note = 2'-Omethylguanosine phosphorothiorate

SEQ ID NO: 4452 - RNA, 76 nt, synthetic construct; identical to SEQ ID NO: 625
  source 1..76: mol_type = other RNA
  modified_base 1: mod_base = OTHER; note = 2'-Omethylguanosine phosphorothiorate
  modified_base 2: mod_base = OTHER; note = 2'-Omethylguanosine
  modified_base 17: mod_base = OTHER; note = 2'-Omethylguanosine
  modified_base 33: mod_base = OTHER; note = 2'-fluorouridine
  modified_base 35: mod_base = OTHER; note = Cytosine phosphorothiorate
  modified_base 37: mod_base = OTHER; note = Adenosine phosphorothiorate
  modified_base 52: mod_base = OTHER; note = 2'-Omethylguanosine
  modified_base 62: mod_base = OTHER; note = 2'-Omethylcytosine
  modified_base 73: mod_base = OTHER; note = 2'-Omethylguanosine
  modified_base 75: mod_base = OTHER; note = 2'-fluorocytosine phosphorothiorate

SEQ ID NO: 4453 - RNA, 85 nt, synthetic construct; identical to SEQ ID NO: 3286
  source 1..85: mol_type = other RNA
  modified_base 1: mod_base = OTHER; note = 2'-Omethylcytosine
  modified_base 11: mod_base = OTHER; note = Cytosine phosphorothiorate
  modified_base 18: mod_base = OTHER; note = 2'-fluorouridine phosphorothiorate
  modified_base 20: mod_base = OTHER; note = Adenosine phosphorothiorate
  modified_base 25: mod_base = OTHER; note = 2'-Omethylguanosine
  modified_base 27: mod_base = OTHER; note = 2'-fluorouridine
  modified_base 29: mod_base = OTHER; note = 2'-fluoroguanosine
  modified_base 33: mod_base = OTHER; note = 2'-fluorouridine
  modified_base 34: mod_base = OTHER; note = Uridine phosphorothiorate
  modified_base 37: mod_base = OTHER; note = 2'-fluoroadenosine phosphorothiorate
  modified_base 43: mod_base = OTHER; note = Uridine phosphorothiorate
  modified_base 52: mod_base = OTHER; note = Guanosine phosphorothiorate
  modified_base 57: mod_base = OTHER; note = 2'-Omethylcytosine
  modified_base 59: mod_base = OTHER; note = 2'-Omethyluridine
  modified_base 73: mod_base = OTHER; note = 2'-fluoroadenosine phosphorothiorate
  modified_base 83: mod_base = OTHER; note = Cytosine phosphorothiorate
  modified_base 85: mod_base = OTHER; note = 2'-fluoroadenosine

SEQ ID NO: 4454 - RNA, 86 nt, synthetic construct; identical to SEQ ID NO: 3290
  source 1..86: mol_type = other RNA
  modified_base 76: mod_base = OTHER; note = 2'-Omethyluridine

SEQ ID NO: 4455 - RNA, 76 nt, synthetic construct; identical to SEQ ID NO: 625
  source 1..76: mol_type = other RNA
  modified_base 1: mod_base = OTHER; note = 2'-fluoroguanosine
  modified_base 11: mod_base = OTHER; note = 2'-fluorocytosine
  modified_base 18: mod_base = OTHER; note = 2'-Omethylguanosine
  modified_base 23: mod_base = OTHER; note = 2'-Omethylcytosine
  modified_base 26: mod_base = OTHER; note = 2'-Omethyladenosine
  modified_base 30: mod_base = OTHER; note = 2'-Omethylguanosine
  modified_base 38: mod_base = OTHER; note = 2'-fluoroadenosine
  modified_base 40: mod_base = OTHER; note = 2'-fluorouridine
  modified_base 41: mod_base = OTHER; note = 2'-Omethylcytosine
  modified_base 42: mod_base = OTHER; note = Adenosine phosphorothiorate
  modified_base 43: mod_base = OTHER; note = 2'-fluoroadenosine phosphorothiorate
  modified_base 44: mod_base = OTHER; note = 2'-fluoroadenosine
  modified_base 46: mod_base = OTHER; note = 2'-fluoroguanosine
  modified_base 47: mod_base = OTHER; note = 2'-fluorouridine
  modified_base 48: mod_base = OTHER; note = 2'-Omethyluridine
  modified_base 49: mod_base = OTHER; note = 2'-fluorocytosine
  modified_base 51: mod_base = OTHER; note = 2'-Omethylguanosine
  modified_base 52: mod_base = OTHER; note = 2'-Omethylguanosine
  modified_base 53: mod_base = OTHER; note = 2'-Omethylguanosine
  modified_base 54: mod_base = OTHER; note = 2'-Omethyluridine
  modified_base 55: mod_base = OTHER; note = Uridine phosphorothiorate
  modified_base 56: mod_base = OTHER; note = 2'-Omethylcytosine
  modified_base 57: mod_base = OTHER; note = Guanosine phosphorothiorate
  modified_base 60: mod_base = OTHER; note = 2'-Omethyluridine
  modified_base 62: mod_base = OTHER; note = 2'-fluorocytosine phosphorothiorate
  modified_base 63: mod_base = OTHER; note = 2'-Omethylcytosine
  modified_base 64: mod_base = OTHER; note = 2'-fluoroguanosine
  modified_base 65: mod_base = OTHER; note = 2'-fluoroguanosine phosphorothiorate
  modified_base 66: mod_base = OTHER; note = 2'-fluorocytosine
  modified_base 67: mod_base = OTHER; note = 2'-Omethylguanosine
  modified_base 70: mod_base = OTHER; note = 2'-fluoroguanosine phosphorothiorate
  modified_base 71: mod_base = OTHER; note = 2'-fluorouridine
  modified_base 73: mod_base = OTHER; note = 2'-Omethylguanosine
  modified_base 75: mod_base = OTHER; note = 2'-fluorocytosine
  modified_base 76: mod_base = OTHER; note = 2'-Omethyladenosine

SEQ ID NO: 4456 - RNA, 76 nt, synthetic construct; identical to SEQ ID NO: 625
  source 1..76: mol_type = other RNA
  modified_base 1: mod_base = OTHER; note = 2'-Omethylguanosine phosphorothiorate
  modified_base 5: mod_base = OTHER; note = 2'-fluorocytosine
  modified_base 8: mod_base = OTHER; note = Uridine phosphorothiorate
  modified_base 10: mod_base = OTHER; note = 2'-fluoroguanosine
  modified_base 11: mod_base = OTHER; note = Cytosine phosphorothiorate
  modified_base 12: mod_base = OTHER; note = 2'-fluoroguanosine
  modified_base 15: mod_base = OTHER; note = 2'-fluoroadenosine
  modified_base 17: mod_base = OTHER; note = 2'-Omethylguanosine
  modified_base 18: mod_base = OTHER; note = 2'-Omethylguanosine
  modified_base 20: mod_base = OTHER; note = Uridine phosphorothiorate
  modified_base 21: mod_base = OTHER; note = Adenosine phosphorothiorate
  modified_base 22: mod_base = OTHER; note = 2'-Omethylguanosine
  modified_base 23: mod_base = OTHER; note = 2'-Omethylcytosine
  modified_base 28: mod_base = OTHER; note = 2'-fluorouridine
  modified_base 29: mod_base = OTHER; note = 2'-fluoroguanosine phosphorothiorate
  modified_base 30: mod_base = OTHER; note = 2'-fluoroguanosine
  modified_base 31: mod_base = OTHER; note = 2'-Omethyladenosine
  modified_base 32: mod_base = OTHER; note = 2'-fluorocytosine
  modified_base 37: mod_base = OTHER; note = Adenosine phosphorothiorate
  modified_base 38: mod_base = OTHER; note = 2'-Omethyladenosine
  modified_base 39: mod_base = OTHER; note = 2'-Omethyluridine
  modified_base 43: mod_base = OTHER; note = 2'-fluoroadenosine
  modified_base 44: mod_base = OTHER; note = 2'-fluoroadenosine
  modified_base 45: mod_base = OTHER; note = 2'-Omethylguanosine
  modified_base 46: mod_base = OTHER; note = 2'-Omethylguanosine
  modified_base 48: mod_base = OTHER; note = Uridine phosphorothiorate
  modified_base 49: mod_base = OTHER; note = 2'-fluorocytosine phosphorothiorate
  modified_base 52: mod_base = OTHER; note = 2'-fluoroguanosine
  modified_base 59: mod_base = OTHER; note = 2'-Omethylguanosine
  modified_base 60: mod_base = OTHER; note = Uridine phosphorothiorate
  modified_base 61: mod_base = OTHER; note = 2'-Omethylcytosine
  modified_base 62: mod_base = OTHER; note = Cytosine phosphorothiorate
  modified_base 63: mod_base = OTHER; note = 2'-Omethylcytosine
  modified_base 68: mod_base = OTHER; note = 2'-Omethylguanosine
  modified_base 69: mod_base = OTHER; note = 2'-Omethyladenosine
  modified_base 74: mod_base = OTHER; note = Cytosine phosphorothiorate
  modified_base 76: mod_base = OTHER; note = 2'-Omethyladenosine

SEQ ID NO: 4457 - RNA, 75 nt, synthetic construct; identical to SEQ ID NO: 1045
  source 1..75: mol_type = other RNA
  modified_base 61: mod_base = OTHER; note = 2'-Omethyluridine
  modified_base 62: mod_base = OTHER; note = 2'-Omethylcytosine

SEQ ID NO: 4458 - RNA, 76 nt, synthetic construct; identical to SEQ ID NO: 625
  source 1..76: mol_type = other RNA
  modified_base 2: mod_base = OTHER; note = 2'-Omethylguanosine
  modified_base 4: mod_base = OTHER; note = 2'-Omethyluridine phosphorothiorate
  modified_base 5: mod_base = OTHER; note = 2'-fluorocytosine phosphorothiorate
  modified_base 11: mod_base = OTHER; note = 2'-fluorocytosine
  modified_base 13: mod_base = OTHER; note = 2'-Omethylcytosine
  modified_base 16: mod_base = OTHER; note = 2'-fluorouridine
  modified_base 17: mod_base = OTHER; note = 2'-Omethylguanosine
  modified_base 20: mod_base = OTHER; note = 2'-Omethyluridine
  modified_base 22: mod_base = OTHER; note = 2'-Omethylguanosine phosphorothiorate
  modified_base 23: mod_base = OTHER; note = 2'-fluorocytosine
  modified_base 24: mod_base = OTHER; note = 2'-fluoroguanosine
  modified_base 25: mod_base = OTHER; note = 2'-fluorocytosine
  modified_base 26: mod_base = OTHER; note = 2'-Omethyladenosine phosphorothiorate
  modified_base 27: mod_base = OTHER; note = 2'-fluorouridine
  modified_base 30: mod_base = OTHER; note = 2'-fluoroguanosine
  modified_base 33: mod_base = OTHER; note = 2'-fluorouridine
  modified_base 34: mod_base = OTHER; note = 2'-Omethyluridine
  modified_base 39: mod_base = OTHER; note = 2'-fluorouridine
  modified_base 42: mod_base = OTHER; note = Adenosine phosphorothiorate
  modified_base 44: mod_base = OTHER; note = Adenosine phosphorothiorate
  modified_base 45: mod_base = OTHER; note = 2'-fluoroguanosine
  modified_base 48: mod_base = OTHER; note = 2'-Omethyluridine
  modified_base 49: mod_base = OTHER; note = Cytosine phosphorothiorate
  modified_base 50: mod_base = OTHER; note = 2'-fluorocytosine phosphorothiorate
  modified_base 59: mod_base = OTHER; note = 2'-Omethylguanosine
  modified_base 68: mod_base = OTHER; note = Guanosine phosphorothiorate
  modified_base 69: mod_base = OTHER; note = 2'-fluoroadenosine
  modified_base 70: mod_base = OTHER; note = 2'-fluoroguanosine
  modified_base 71: mod_base = OTHER; note = 2'-Omethyluridine
  modified_base 72: mod_base = OTHER; note = Cytosine phosphorothiorate
  modified_base 73: mod_base = OTHER; note = 2'-fluoroguanosine
  modified_base 74: mod_base = OTHER; note = Cytosine phosphorothiorate
  modified_base 75: mod_base = OTHER; note = Cytosine phosphorothiorate

SEQ ID NO: 4459 - RNA, 75 nt, synthetic construct; identical to SEQ ID NO: 3299
  source 1..75: mol_type = other RNA
  modified_base 19: mod_base = OTHER; note = 2'-fluorouridine
  modified_base 21: mod_base = OTHER; note = 2'-fluoroguanosine
  modified_base 37: mod_base = OTHER; note = 2'-fluoroadenosine
  modified_base 42: mod_base = OTHER; note = 2'-fluoroadenosine
  modified_base 49: mod_base = OTHER; note = Adenosine phosphorothiorate
  modified_base 56: mod_base = OTHER; note = 2'-Omethyladenosine phosphorothiorate
  modified_base 60: mod_base = OTHER; note = Cytosine phosphorothiorate
  modified_base 71: mod_base = OTHER; note = Cytosine phosphorothiorate
  modified_base 73: mod_base = OTHER; note = 2'-Omethylcytosine

SEQ ID NO: 4460 - RNA, 86 nt, synthetic construct; identical to SEQ ID NO: 3290
  source 1..86: mol_type = other RNA
  modified_base 30: mod_base = OTHER; note = 2'-Omethylguanosine

SEQ ID NO: 4461 - RNA, 74 nt, synthetic construct; identical to SEQ ID NO: 3293
  source 1..74: mol_type = other RNA
  modified_base 1: mod_base = OTHER; note = 2'-fluoroadenosine
  modified_base 2: mod_base = OTHER; note = 2'-Omethylcytosine
  modified_base 3: mod_base = OTHER; note = Cytosine phosphorothiorate
  modified_base 4: mod_base = OTHER; note = Uridine phosphorothiorate
  modified_base 6: mod_base = OTHER; note = 2'-fluoroguanosine
  modified_base 8: mod_base = OTHER; note = Guanosine phosphorothiorate
  modified_base 9: mod_base = OTHER; note = 2'-fluoroguanosine
  modified_base 11: mod_base = OTHER; note = 2'-fluoroguanosine
  modified_base 24: mod_base = OTHER; note = 2'-fluoroguanosine
  modified_base 25: mod_base = OTHER; note = 2'-fluorouridine phosphorothiorate
  modified_base 27: mod_base = OTHER; note = 2'-fluorouridine
  modified_base 32: mod_base = OTHER; note = 2'-fluorocytosine
  modified_base 40: mod_base = OTHER; note = Guanosine phosphorothiorate
  modified_base 42: mod_base = OTHER; note = Adenosine phosphorothiorate
  modified_base 46: mod_base = OTHER; note = Uridine phosphorothiorate
  modified_base 50: mod_base = OTHER; note = Uridine phosphorothiorate
  modified_base 62: mod_base = OTHER; note = 2'-fluoroguanosine
  modified_base 73: mod_base = OTHER; note = 2'-Omethylcytosine phosphorothiorate
  modified_base 74: mod_base = OTHER; note = 2'-Omethyladenosine

SEQ ID NO: 4462 - DNA, 76 bp, synthetic construct; identical to SEQ ID NO: 1924
  source 1..76: mol_type = other DNA
  modified_base 1: mod_base = OTHER; note = 2'-Omethylguanosine phosphorothiorate
  modified_base 2: mod_base = OTHER; note = 2'-Omethylguanosine phosphorothiorate
  modified_base 3: mod_base = OTHER; note = 2'-Omethylcytosine
  modified_base 4: mod_base = OTHER; note = 2'-Omethyluridine
  modified_base 5: mod_base = OTHER; note = 2'-Omethylcytosine
  modified_base 6: mod_base = OTHER; note = 2'-Omethylcytosine
  modified_base 9: mod_base = OTHER; note = Guanosine phosphorothiorate
  modified_base 12: mod_base = OTHER; note = 2'-Omethylguanosine
  modified_base 13: mod_base = OTHER; note = 2'-Omethylcytosine
  modified_base 14: mod_base = OTHER; note = 2'-Omethyladenosine
  modified_base 15: mod_base = OTHER; note = 2'-fluoroadenosine
  modified_base 16: mod_base = OTHER; note = 2'-Omethyluridine
  modified_base 17: mod_base = OTHER; note = 2'-Omethylguanosine
  modified_base 18: mod_base = OTHER; note = 2'-Omethylguanosine
  modified_base 19: mod_base = OTHER; note = 2'-fluoroadenosine
  modified_base 20: mod_base = OTHER; note = 2'-Omethyluridine
  modified_base 21: mod_base = OTHER; note = 2'-fluoroadenosine
  modified_base 25: mod_base = OTHER; note = 2'-Omethylcytosine
  modified_base 29: mod_base = OTHER; note = 2'-Omethylguanosine
  modified_base 33: mod_base = OTHER; note = 2'-fluorouridine
  modified_base 35: mod_base = OTHER; note = Cytosine phosphorothiorate
  modified_base 37: mod_base = OTHER; note = Adenosine phosphorothiorate
  modified_base 38: mod_base = OTHER; note = Adenosine phosphorothiorate
  modified_base 40: mod_base = OTHER; note = 2'-fluorouridine
  modified_base 41: mod_base = OTHER; note = 2'-Omethylcytosine
  modified_base 42: mod_base = OTHER; note = 2'-Omethyladenosine
  modified_base 43: mod_base = OTHER; note = 2'-Omethyladenosine
  modified_base 44: mod_base = OTHER; note = 2'-fluoroadenosine
  modified_base 46: mod_base = OTHER; note = Guanosine phosphorothiorate
  modified_base 50: mod_base = OTHER; note = 2'-Omethylcytosine
  modified_base 52: mod_base = OTHER; note = 2'-Omethylguanosine
  modified_base 54: mod_base = OTHER; note = Uridine phosphorothiorate
  modified_base 55: mod_base = OTHER; note = Uridine phosphorothiorate
  modified_base 56: mod_base = OTHER; note = 2'-Omethylcytosine
  modified_base 57: mod_base = OTHER; note = Guanosine phosphorothiorate
  modified_base 59: mod_base = OTHER; note = 2'-O-(2-Methoxyethyl) guanosine
  modified_base 62: mod_base = OTHER; note = 2'-Omethylcytosine
  modified_base 63: mod_base = OTHER; note = 2'-fluorocytosine
  modified_base 65: mod_base = OTHER; note = 2'-Omethylguanosine phosphorothiorate
  modified_base 68: mod_base = OTHER; note = 2'-Omethylguanosine
  modified_base 71: mod_base = OTHER; note = 2'-Omethyluridine
  modified_base 73: mod_base = OTHER; note = 2'-Omethylguanosine
  modified_base 74: mod_base = OTHER; note = Cytosine phosphorothiorate
  modified_base 75: mod_base = OTHER; note = 2'-Omethylcytosine
  misc_feature 1..9: note = RNA
  misc_feature 10: note = DNA
  misc_feature 11..76: note = RNA

SEQ ID NO: 4463 - RNA, 76 nt, synthetic construct; identical to SEQ ID NO: 3318
  source 1..76: mol_type = other RNA
  modified_base 1: mod_base = OTHER; note = 2'-Omethylcytosine
  modified_base 18: mod_base = OTHER; note = 2'-Omethylguanosine

SEQ ID NO: 4464 - RNA, 74 nt, synthetic construct; identical to SEQ ID NO: 3293
  source 1..74: mol_type = other RNA
  modified_base 1: mod_base = OTHER; note = 2'-fluoroadenosine phosphorothiorate
  modified_base 3: mod_base = OTHER; note = 2'-Omethylcytosine
  modified_base 8: mod_base = OTHER; note = 2'-fluoroguanosine
  modified_base 34: mod_base = OTHER; note = Adenosine phosphorothiorate
  modified_base 43: mod_base = OTHER; note = Guanosine phosphorothiorate
  modified_base 51: mod_base = OTHER; note = 2'-Omethylguanosine phosphorothiorate
  modified_base 62: mod_base = OTHER; note = Guanosine phosphorothiorate
  modified_base 73: mod_base = OTHER; note = 2'-Omethylcytosine phosphorothiorate

SEQ ID NO: 4465 - RNA, 76 nt, synthetic construct; identical to SEQ ID NO: 625
  source 1..76: mol_type = other RNA
  modified_base 1: mod_base = OTHER; note = 2'-Omethylguanosine phosphorothiorate
  modified_base 2: mod_base = OTHER; note = 2'-Omethylguanosine phosphorothiorate
  modified_base 3: mod_base = OTHER; note = 2'-Omethylcytosine
  modified_base 4: mod_base = OTHER; note = 2'-Omethyluridine
  modified_base 5: mod_base = OTHER; note = 2'-Omethylcytosine
  modified_base 6: mod_base = OTHER; note = 2'-Omethylcytosine
  modified_base 10: mod_base = OTHER; note = 2'-Omethylguanosine
  modified_base 11: mod_base = OTHER; note = 2'-Omethylcytosine
  modified_base 12: mod_base = OTHER; note = 2'-Omethylguanosine
  modified_base 13: mod_base = OTHER; note = 2'-Omethylcytosine
  modified_base 14: mod_base = OTHER; note = 2'-Omethyladenosine
  modified_base 15: mod_base = OTHER; note = 2'-fluoroadenosine
  modified_base 16: mod_base = OTHER; note = 2'-Omethyluridine
  modified_base 17: mod_base = OTHER; note = 2'-Omethylguanosine
  modified_base 18: mod_base = OTHER; note = 2'-Omethylguanosine
  modified_base 19: mod_base = OTHER; note = 2'-fluoroadenosine
  modified_base 20: mod_base = OTHER; note = 2'-Omethyluridine
  modified_base 22: mod_base = OTHER; note = 2'-Omethylguanosine
  modified_base 23: mod_base = OTHER; note = 2'-Omethylcytosine
  modified_base 24: mod_base = OTHER; note = 2'-Omethylguanosine
  modified_base 25: mod_base = OTHER; note = 2'-Omethylcytosine
  modified_base 38: mod_base = OTHER; note = Adenosine phosphorothiorate
  modified_base 39: mod_base = OTHER; note = Uridine phosphorothiorate
  modified_base 40: mod_base = OTHER; note = 2'-fluorouridine
  modified_base 43: mod_base = OTHER; note = 2'-Omethyladenosine
  modified_base 44: mod_base = OTHER; note = 2'-Omethyladenosine
  modified_base 45: mod_base = OTHER; note = 2'-Omethylguanosine
  modified_base 46: mod_base = OTHER; note = 2'-fluoroguanosine
  modified_base 48: mod_base = OTHER; note = 2'-fluorouridine
  modified_base 49: mod_base = OTHER; note = 2'-Omethylcytosine
  modified_base 50: mod_base = OTHER; note = 2'-Omethylcytosine
  modified_base 54: mod_base = OTHER; note = Uridine phosphorothiorate
  modified_base 55: mod_base = OTHER; note = Uridine phosphorothiorate
  modified_base 56: mod_base = OTHER; note = 2'-Omethylcytosine
  modified_base 57: mod_base = OTHER; note = Guanosine phosphorothiorate
  modified_base 61: mod_base = OTHER; note = 2'-Omethylcytosine
  modified_base 62: mod_base = OTHER; note = 2'-Omethylcytosine
  modified_base 63: mod_base = OTHER; note = 2'-fluorocytosine
  modified_base 64: mod_base = OTHER; note = 2'-Omethylguanosine
  modified_base 65: mod_base = OTHER; note = 2'-Omethylguanosine
  modified_base 66: mod_base = OTHER; note = 2'-Omethylcytosine
  modified_base 67: mod_base = OTHER; note = 2'-Omethylguanosine
  modified_base 68: mod_base = OTHER; note = 2'-Omethylguanosine
  modified_base 69: mod_base = OTHER; note = 2'-Omethyladenosine

SEQ ID NO: 4466 - RNA, 75 nt, synthetic construct; identical to SEQ ID NO: 3306
  source 1..75: mol_type = other RNA
  modified_base 1: mod_base = OTHER; note = 2'-Omethylguanosine
  modified_base 2: mod_base = OTHER; note = 2'-Omethyladenosine
  modified_base 3: mod_base = OTHER; note = 2'-Omethylcytosine
  modified_base 4: mod_base = OTHER; note = 2'-Omethylcytosine
  modified_base 5: mod_base = OTHER; note = 2'-Omethyluridine
  modified_base 6: mod_base = OTHER; note = 2'-Omethylcytosine
  modified_base 16: mod_base = OTHER; note = 2'-Omethylcytosine
  modified_base 17: mod_base = OTHER; note = 2'-Omethylguanosine
  modified_base 18: mod_base = OTHER; note = 2'-Omethylguanosine
  modified_base 24: mod_base = OTHER; note = 2'-Omethylcytosine
  modified_base 32: mod_base = OTHER; note = 2'-fluorouridine
  modified_base 34: mod_base = OTHER; note = Uridine phosphorothiorate
  modified_base 36: mod_base = OTHER; note = Guanosine phosphorothiorate
  modified_base 37: mod_base = OTHER; note = Adenosine phosphorothiorate
  modified_base 40: mod_base = OTHER; note = 2'-Omethyladenosine
  modified_base 43: mod_base = OTHER; note = 2'-Omethyladenosine
  modified_base 44: mod_base = OTHER; note = 2'-Omethylguanosine
  modified_base 45: mod_base = OTHER; note = 2'-fluoroguanosine
  modified_base 46: mod_base = OTHER; note = 2'-fluorouridine
  modified_base 47: mod_base = OTHER; note = 2'-fluorouridine
  modified_base 48: mod_base = OTHER; note = 2'-Omethylguanosine
  modified_base 49: mod_base = OTHER; note = 2'-Omethylcytosine
  modified_base 50: mod_base = OTHER; note = 2'-Omethylguanosine
  modified_base 51: mod_base = OTHER; note = 2'-Omethyluridine
  modified_base 52: mod_base = OTHER; note = 2'-Omethylguanosine
  modified_base 53: mod_base = OTHER; note = 2'-Omethyluridine
  modified_base 55: mod_base = OTHER; note = 2'-Omethylcytosine
  modified_base 58: mod_base = OTHER; note = 2'-Omethyladenosine
  modified_base 72: mod_base = OTHER; note = 2'-Omethyladenosine

SEQ ID NO: 4467 - RNA, 76 nt, synthetic construct; identical to SEQ ID NO: 625
  source 1..76: mol_type = other RNA
  modified_base 1: mod_base = OTHER; note = 2'-Omethylguanosine phosphorothiorate
  modified_base 2: mod_base = OTHER; note = 2'-Omethylguanosine
  modified_base 10: mod_base = OTHER; note = 2'-Omethylguanosine
  modified_base 11: mod_base = OTHER; note = 2'-Omethylcytosine
  modified_base 12: mod_base = OTHER; note = 2'-Omethylguanosine
  modified_base 13: mod_base = OTHER; note = 2'-Omethylcytosine
  modified_base 17: mod_base = OTHER; note = 2'-Omethylguanosine
  modified_base 33: mod_base = OTHER; note = 2'-fluorouridine
  modified_base 35: mod_base = OTHER; note = Cytosine phosphorothiorate
  modified_base 37: mod_base = OTHER; note = Adenosine phosphorothiorate
  modified_base 38: mod_base = OTHER; note = Adenosine phosphorothiorate
  modified_base 52: mod_base = OTHER; note = 2'-Omethylguanosine
  modified_base 54: mod_base = OTHER; note = Uridine phosphorothiorate
  modified_base 55: mod_base = OTHER; note = Uridine phosphorothiorate
  modified_base 56: mod_base = OTHER; note = Cytosine phosphorothiorate
  modified_base 57: mod_base = OTHER; note = Guanosine phosphorothiorate
  modified_base 62: mod_base = OTHER; note = 2'-Omethylcytosine
  modified_base 63: mod_base = OTHER; note = 2'-fluorocytosine
  modified_base 65: mod_base = OTHER; note = 2'-Omethylguanosine
  modified_base 68: mod_base = OTHER; note = 2'-Omethylguanosine
  modified_base 73: mod_base = OTHER; note = 2'-Omethylguanosine
  modified_base 75: mod_base = OTHER; note = 2'-fluorocytosine phosphorothiorate

SEQ ID NO: 4468 - RNA, 75 nt, synthetic construct; identical to SEQ ID NO: 3336
  source 1..75: mol_type = other RNA
  modified_base 1: mod_base = OTHER; note = 2'-Omethylcytosine phosphorothiorate
  modified_base 7: mod_base = OTHER; note = 2'-fluorouridine phosphorothiorate
  modified_base 12: mod_base = OTHER; note = 2'-fluorocytosine
  modified_base 21: mod_base = OTHER; note = 2'-fluoroguanosine
  modified_base 23: mod_base = OTHER; note = 2'-fluoroguanosine
  modified_base 24: mod_base = OTHER; note = 2'-Omethylcytosine phosphorothiorate
  modified_base 27: mod_base = OTHER; note = Cytosine phosphorothiorate
  modified_base 39: mod_base = OTHER; note = 2'-Omethylcytosine phosphorothiorate
  modified_base 49: mod_base = OTHER; note = Adenosine phosphorothiorate
  modified_base 51: mod_base = OTHER; note = Guanosine phosphorothiorate
  modified_base 54: mod_base = OTHER; note = Uridine phosphorothiorate
  modified_base 64: mod_base = OTHER; note = Guanosine phosphorothiorate
  modified_base 71: mod_base = OTHER; note = 2'-Omethylcytosine phosphorothiorate
  modified_base 72: mod_base = OTHER; note = Guanosine phosphorothiorate

SEQ ID NO: 4469 - RNA, 76 nt, synthetic construct; identical to SEQ ID NO: 625
  source 1..76: mol_type = other RNA
  modified_base 3: mod_base = OTHER; note = 2'-fluorocytosine
  modified_base 5: mod_base = OTHER; note = 2'-fluorocytosine
  modified_base 6: mod_base = OTHER; note = 2'-fluorocytosine phosphorothiorate
  modified_base 8: mod_base = OTHER; note = Uridine phosphorothiorate
  modified_base 10: mod_base = OTHER; note = Guanosine phosphorothiorate
  modified_base 11: mod_base = OTHER; note = 2'-Omethylcytosine
  modified_base 17: mod_base = OTHER; note = 2'-Omethylguanosine
  modified_base 18: mod_base = OTHER; note = Guanosine phosphorothiorate
  modified_base 20: mod_base = OTHER; note = 2'-Omethyluridine phosphorothiorate
  modified_base 21: mod_base = OTHER; note = Adenosine phosphorothiorate
  modified_base 22: mod_base = OTHER; note = 2'-fluoroguanosine
  modified_base 25: mod_base = OTHER; note = 2'-fluorocytosine
  modified_base 27: mod_base = OTHER; note = 2'-fluorouridine
  modified_base 28: mod_base = OTHER; note = 2'-fluorouridine
  modified_base 29: mod_base = OTHER; note = 2'-Omethylguanosine
  modified_base 31: mod_base = OTHER; note = 2'-fluoroadenosine
  modified_base 40: mod_base = OTHER; note = 2'-Omethyluridine phosphorothiorate
  modified_base 41: mod_base = OTHER; note = 2'-Omethylcytosine
  modified_base 42: mod_base = OTHER; note = 2'-fluoroadenosine
  modified_base 48: mod_base = OTHER; note = 2'-Omethyluridine phosphorothiorate
  modified_base 51: mod_base = OTHER; note = 2'-Omethylguanosine
  modified_base 53: mod_base = OTHER; note = 2'-fluoroguanosine
  modified_base 59: mod_base = OTHER; note = 2'-Omethylguanosine phosphorothiorate
  modified_base 60: mod_base = OTHER; note = Uridine phosphorothiorate
  modified_base 63: mod_base = OTHER; note = Cytosine phosphorothiorate
  modified_base 64: mod_base = OTHER; note = 2'-fluoroguanosine
  modified_base 70: mod_base = OTHER; note = 2'-fluoroguanosine
  modified_base 72: mod_base = OTHER; note = Cytosine phosphorothiorate
  modified_base 73: mod_base = OTHER; note = 2'-fluoroguanosine
  modified_base 74: mod_base = OTHER; note = 2'-Omethylcytosine phosphorothiorate
  modified_base 75: mod_base = OTHER; note = 2'-Omethylcytosine phosphorothiorate

SEQ ID NO: 4470 - RNA, 85 nt, synthetic construct; identical to SEQ ID NO: 3297
  source 1..85: mol_type = other RNA
  modified_base 1: mod_base = OTHER; note = 2'-Omethylguanosine phosphorothiorate
  modified_base 2: mod_base = OTHER; note = 2'-Omethylcytosine
  modified_base 42: mod_base = OTHER; note = 2'-fluoroadenosine
  modified_base 56: mod_base = OTHER; note = 2'-fluoroguanosine
  modified_base 61: mod_base = OTHER; note = Guanosine phosphorothiorate
  modified_base 83: mod_base = OTHER; note = Cytosine phosphorothiorate
  modified_base 84: mod_base = OTHER; note = 2'-Omethylcytosine

SEQ ID NO: 4471 - RNA, 86 nt, synthetic construct; identical to SEQ ID NO: 3290
  source 1..86: mol_type = other RNA
  modified_base 51: mod_base = OTHER; note = Adenosine phosphorothiorate

SEQ ID NO: 4472 - RNA, 76 nt, synthetic construct; identical to SEQ ID NO: 625
  source 1..76: mol_type = other RNA
  modified_base 1: mod_base = OTHER; note = Guanosine phosphorothiorate
  modified_base 3: mod_base = OTHER; note = 2'-Omethylcytosine
  modified_base 4: mod_base = OTHER; note = Uridine phosphorothiorate
  modified_base 10: mod_base = OTHER; note = 2'-fluoroguanosine
  modified_base 20: mod_base = OTHER; note = 2'-fluorouridine
  modified_base 21: mod_base = OTHER; note = Adenosine phosphorothiorate
  modified_base 22: mod_base = OTHER; note = 2'-fluoroguanosine
  modified_base 23: mod_base = OTHER; note = 2'-Omethylcytosine
  modified_base 25: mod_base = OTHER; note = 2'-fluorocytosine
  modified_base 26: mod_base = OTHER; note = 2'-Omethyladenosine phosphorothiorate
  modified_base 28: mod_base = OTHER; note = 2'-Omethyluridine
  modified_base 29: mod_base = OTHER; note = 2'-fluoroguanosine
  modified_base 30: mod_base = OTHER; note = 2'-Omethylguanosine phosphorothiorate
  modified_base 31: mod_base = OTHER; note = 2'-Omethyladenosine
  modified_base 40: mod_base = OTHER; note = 2'-fluorouridine phosphorothiorate
  modified_base 41: mod_base = OTHER; note = 2'-fluorocytosine phosphorothiorate
  modified_base 42: mod_base = OTHER; note = 2'-fluoroadenosine
  modified_base 44: mod_base = OTHER; note = 2'-fluoroadenosine
  modified_base 46: mod_base = OTHER; note = 2'-Omethylguanosine phosphorothiorate
  modified_base 47: mod_base = OTHER; note = 2'-Omethyluridine
  modified_base 48: mod_base = OTHER; note = 2'-Omethyluridine phosphorothiorate
  modified_base 49: mod_base = OTHER; note = 2'-fluorocytosine
  modified_base 53: mod_base = OTHER; note = 2'-Omethylguanosine
  modified_base 56: mod_base = OTHER; note = 2'-Omethylcytosine
  modified_base 59: mod_base = OTHER; note = 2'-Omethylguanosine
  modified_base 60: mod_base = OTHER; note = Uridine phosphorothiorate
  modified_base 61: mod_base = OTHER; note = Cytosine phosphorothiorate
  modified_base 62: mod_base = OTHER; note = 2'-fluorocytosine
  modified_base 63: mod_base = OTHER; note = 2'-fluorocytosine
  modified_base 65: mod_base = OTHER; note = Guanosine phosphorothiorate
  modified_base 66: mod_base = OTHER; note = 2'-fluorocytosine
  modified_base 67: mod_base = OTHER; note = 2'-Omethylguanosine
  modified_base 71: mod_base = OTHER; note = Uridine phosphorothiorate
  modified_base 72: mod_base = OTHER; note = 2'-Omethylcytosine
  modified_base 73: mod_base = OTHER; note = 2'-Omethylguanosine
  modified_base 74: mod_base = OTHER; note = 2'-fluorocytosine

SEQ ID NO: 4473 - RNA, 75 nt, synthetic construct; identical to SEQ ID NO: 3306
  source 1..75: mol_type = other RNA
  modified_base 1: mod_base = OTHER; note = 2'-Omethylguanosine phosphorothiorate
  modified_base 2: mod_base = OTHER; note = 2'-Omethyladenosine phosphorothiorate
  modified_base 3: mod_base = OTHER; note = 2'-Omethylcytosine
  modified_base 4: mod_base = OTHER; note = 2'-Omethylcytosine
  modified_base 5: mod_base = OTHER; note = 2'-Omethyluridine
  modified_base 6: mod_base = OTHER; note = 2'-Omethylcytosine
  modified_base 16: mod_base = OTHER; note = 2'-Omethylcytosine
  modified_base 17: mod_base = OTHER; note = 2'-Omethylguanosine
  modified_base 18: mod_base = OTHER; note = 2'-Omethylguanosine
  modified_base 32: mod_base = OTHER; note = 2'-fluorouridine
  modified_base 34: mod_base = OTHER; note = Uridine phosphorothiorate
  modified_base 36: mod_base = OTHER; note = Guanosine phosphorothiorate
  modified_base 37: mod_base = OTHER; note = Adenosine phosphorothiorate
  modified_base 43: mod_base = OTHER; note = 2'-Omethyladenosine
  modified_base 44: mod_base = OTHER; note = 2'-Omethylguanosine
  modified_base 45: mod_base = OTHER; note = 2'-fluoroguanosine
  modified_base 46: mod_base = OTHER; note = 2'-fluorouridine
  modified_base 47: mod_base = OTHER; note = 2'-fluorouridine
  modified_base 48: mod_base = OTHER; note = 2'-Omethylguanosine
  modified_base 49: mod_base = OTHER; note = 2'-Omethylcytosine
  modified_base 50: mod_base = OTHER; note = 2'-Omethylguanosine
  modified_base 53: mod_base = OTHER; note = 2'-Omethyluridine
  modified_base 55: mod_base = OTHER; note = 2'-Omethylcytosine
  modified_base 58: mod_base = OTHER; note = 2'-Omethyladenosine
  modified_base 60: mod_base = OTHER; note = 2'-Omethylcytosine
  modified_base 61: mod_base = OTHER; note = 2'-Omethyladenosine
  modified_base 62: mod_base = OTHER; note = 2'-fluorocytosine
  modified_base 63: mod_base = OTHER; note = 2'-Omethylguanosine
  modified_base 64: mod_base = OTHER; note = 2'-Omethyluridine
  modified_base 65: mod_base = OTHER; note = 2'-Omethylcytosine
  modified_base 66: mod_base = OTHER; note = 2'-Omethylguanosine
  modified_base 67: mod_base = OTHER; note = 2'-Omethylguanosine
  modified_base 72: mod_base = OTHER; note = 2'-Omethyladenosine

SEQ ID NO: 4474 - RNA, 75 nt, synthetic construct; identical to SEQ ID NO: 1045
  source 1..75: mol_type = other RNA
  modified_base 2: mod_base = OTHER; note = 2'-Omethylguanosine phosphorothiorate
  modified_base 5: mod_base = OTHER; note = 2'-fluorocytosine phosphorothiorate
  modified_base 6: mod_base = OTHER; note = 2'-Omethylcytosine
  modified_base 13: mod_base = OTHER; note = Uridine phosphorothiorate
  modified_base 23: mod_base = OTHER; note = 2'-fluorocytosine
  modified_base 40: mod_base = OTHER; note = 2'-fluorocytosine
  modified_base 48: mod_base = OTHER; note = 2'-fluorocytosine
  modified_base 59: mod_base = OTHER; note = 2'-fluorouridine
  modified_base 64: mod_base = OTHER; note = 2'-fluoroguanosine
  modified_base 69: mod_base = OTHER; note = 2'-fluoroadenosine
  modified_base 73: mod_base = OTHER; note = Cytosine phosphorothiorate

SEQ ID NO: 4475 - RNA, 76 nt, synthetic construct
  source 1..76: mol_type = other RNA
cgcgccgtggcgcaatggatagcgcattggacttcaaattcaaaggttccgggttcgagtcccggcggcgtggcca

SEQ ID NO: 4476 - RNA, 76 nt, synthetic construct; identical to SEQ ID NO: 625
  source 1..76: mol_type = other RNA
  modified_base 1: mod_base = OTHER; note = 2'-Omethylguanosine
  modified_base 10: mod_base = OTHER; note = 2'-Omethylguanosine
  modified_base 13: mod_base = OTHER; note = 2'-Omethylcytosine
  modified_base 17: mod_base = OTHER; note = Guanosine phosphorothiorate
  modified_base 18: mod_base = OTHER; note = 2'-Omethylguanosine
  modified_base 19: mod_base = OTHER; note = Adenosine phosphorothiorate
  modified_base 20: mod_base = OTHER; note = 2'-Omethyluridine
  modified_base 25: mod_base = OTHER; note = 2'-Omethylcytosine
  modified_base 29: mod_base = OTHER; note = 2'-Omethylguanosine
  modified_base 33: mod_base = OTHER; note = 2'-fluorouridine
  modified_base 35: mod_base = OTHER; note = Cytosine phosphorothiorate
  modified_base 38: mod_base = OTHER; note = Adenosine phosphorothiorate
  modified_base 43: mod_base = OTHER; note = 2'-Omethyladenosine
  modified_base 44: mod_base = OTHER; note = 2'-fluoroadenosine
  modified_base 46: mod_base = OTHER; note = Guanosine phosphorothiorate
  modified_base 50: mod_base = OTHER; note = 2'-Omethylcytosine
  modified_base 52: mod_base = OTHER; note = 2'-Omethylguanosine
  modified_base 54: mod_base = OTHER; note = Uridine phosphorothiorate
  modified_base 55: mod_base = OTHER; note = Uridine phosphorothiorate
  modified_base 56: mod_base = OTHER; note = 2'-Omethylcytosine
  modified_base 57: mod_base = OTHER; note = Guanosine phosphorothiorate
  modified_base 62: mod_base = OTHER; note = 2'-Omethylcytosine
  modified_base 63: mod_base = OTHER; note = 2'-fluorocytosine
  modified_base 65: mod_base = OTHER; note = 2'-Omethylguanosine
  modified_base 71: mod_base = OTHER; note = 2'-Omethyluridine
  modified_base 73: mod_base = OTHER; note = 2'-Omethylguanosine

SEQ ID NO: 4477 - RNA, 76 nt, synthetic construct; identical to SEQ ID NO: 625
  source 1..76: mol_type = other RNA
  modified_base 1: mod_base = OTHER; note = 2'-Omethylguanosine
  modified_base 10: mod_base = OTHER; note = 2'-Omethylguanosine
  modified_base 13: mod_base = OTHER; note = 2'-Omethylcytosine
  modified_base 17: mod_base = OTHER; note = Guanosine phosphorothiorate
  modified_base 18: mod_base = OTHER; note = 2'-Omethylguanosine
  modified_base 19: mod_base = OTHER; note = Adenosine phosphorothiorate
  modified_base 20: mod_base = OTHER; note = 2'-Omethyluridine
  modified_base 25: mod_base = OTHER; note = 2'-Omethylcytosine
  modified_base 29: mod_base = OTHER; note = 2'-Omethylguanosine
  modified_base 33: mod_base = OTHER; note = 2'-fluorouridine
  modified_base 35: mod_base = OTHER; note = Cytosine phosphorothiorate
  modified_base 37: mod_base = OTHER; note = Adenosine phosphorothiorate
  modified_base 38: mod_base = OTHER; note = Adenosine phosphorothiorate
  modified_base 43: mod_base = OTHER; note = 2'-Omethyladenosine
  modified_base 44: mod_base = OTHER; note = 2'-fluoroadenosine
  modified_base 46: mod_base = OTHER; note = Guanosine phosphorothiorate
  modified_base 50: mod_base = OTHER; note = 2'-Omethylcytosine
  modified_base 52: mod_base = OTHER; note = 2'-Omethylguanosine
  modified_base 54: mod_base = OTHER; note = Uridine phosphorothiorate
  modified_base 55: mod_base = OTHER; note = Uridine phosphorothiorate
  modified_base 56: mod_base = OTHER; note = 2'-Omethylcytosine
  modified_base 57: mod_base = OTHER; note = Guanosine phosphorothiorate
  modified_base 62: mod_base = OTHER; note = 2'-Omethylcytosine
  modified_base 63: mod_base = OTHER; note = 2'-fluorocytosine
  modified_base 65: mod_base = OTHER; note = 2'-Omethylguanosine
  modified_base 71: mod_base = OTHER; note = 2'-Omethyluridine
  modified_base 73: mod_base = OTHER; note = 2'-Omethylguanosine

SEQ ID NO: 4478 - RNA, 74 nt, synthetic construct
  source 1..74: mol_type = other RNA
gacctcgtggcgcaacggtagcgcgtctgactctagatcagaaggttgcggttcaaatcacgtcggggtcacca

SEQ ID NO: 4479 - RNA, 76 nt, synthetic construct; identical to SEQ ID NO: 625
  source 1..76: mol_type = other RNA
  modified_base 1: mod_base = OTHER; note = 2'-Omethylguanosine phosphorothiorate
  modified_base 2: mod_base = OTHER; note = 2'-Omethylguanosine
  modified_base 3: mod_base = OTHER; note = 2'-Omethylcytosine
  modified_base 4: mod_base = OTHER; note = 2'-Omethyluridine
  modified_base 5: mod_base = OTHER; note = 2'-Omethylcytosine
  modified_base 6: mod_base = OTHER; note = 2'-Omethylcytosine
  modified_base 10: mod_base = OTHER; note = 2'-Omethylguanosine
  modified_base 11: mod_base = OTHER; note = 2'-Omethylcytosine
  modified_base 12: mod_base = OTHER; note = 2'-Omethylguanosine
  modified_base 13: mod_base = OTHER; note = 2'-Omethylcytosine
  modified_base 17: mod_base = OTHER; note = 2'-Omethylguanosine
  modified_base 18: mod_base = OTHER; note = 2'-Omethylguanosine
  modified_base 20: mod_base = OTHER; note = 2'-Omethyluridine
  modified_base 22: mod_base = OTHER; note = 2'-Omethylguanosine
  modified_base 23: mod_base = OTHER; note = 2'-Omethylcytosine
  modified_base 24: mod_base = OTHER; note = 2'-Omethylguanosine
  modified_base 25: mod_base = OTHER; note = 2'-Omethylcytosine
  modified_base 33: mod_base = OTHER; note = 2'-fluorouridine
  modified_base 35: mod_base = OTHER; note = Cytosine phosphorothiorate
  modified_base 37: mod_base = OTHER; note = Adenosine phosphorothiorate
  modified_base 38: mod_base = OTHER; note = Adenosine phosphorothiorate
  modified_base 43: mod_base = OTHER; note = 2'-Omethyladenosine
  modified_base 44: mod_base = OTHER; note = 2'-Omethyladenosine
  modified_base 45: mod_base = OTHER; note = 2'-Omethylguanosine
  modified_base 46: mod_base = OTHER; note = 2'-fluoroguanosine
  modified_base 48: mod_base = OTHER; note = 2'-fluorouridine
  modified_base 50: mod_base = OTHER; note = 2'-Omethylcytosine
  modified_base 52: mod_base = OTHER; note = 2'-fluoroguanosine
  modified_base 54: mod_base = OTHER; note = 2'-Omethyluridine
  modified_base 56: mod_base = OTHER; note = 2'-Omethylcytosine
  modified_base 57: mod_base = OTHER; note = 2'-fluoroguanosine
  modified_base 59: mod_base = OTHER; note = 2'-Omethylguanosine
  modified_base 62: mod_base = OTHER; note = 2'-Omethylcytosine
  modified_base 63: mod_base = OTHER; note = 2'-fluorocytosine
  modified_base 73: mod_base = OTHER; note = 2'-Omethylguanosine
  modified_base 75: mod_base = OTHER; note = 2'-fluorocytosine phosphorothiorate

SEQ ID NO: 4480 - RNA, 86 nt, synthetic construct; identical to SEQ ID NO: 3290
  source 1..86: mol_type = other RNA
  modified_base 18: mod_base = OTHER; note = 2'-fluoroguanosine

SEQ ID NO: 4481 - RNA, 76 nt, synthetic construct; identical to SEQ ID NO: 3289
  source 1..76: mol_type = other RNA
  modified_base 1: mod_base = OTHER; note = 2'-Omethylguanosine
  modified_base 2: mod_base = OTHER; note = 2'-Omethylcytosine
  modified_base 3: mod_base = OTHER; note = 2'-Omethylcytosine
  modified_base 4: mod_base = OTHER; note = 2'-Omethyluridine
  modified_base 5: mod_base = OTHER; note = 2'-Omethylguanosine
  modified_base 6: mod_base = OTHER; note = 2'-Omethylguanosine
  modified_base 10: mod_base = OTHER; note = 2'-Omethylguanosine
  modified_base 11: mod_base = OTHER; note = 2'-Omethylcytosine
  modified_base 12: mod_base = OTHER; note = 2'-Omethyluridine
  modified_base 13: mod_base = OTHER; note = 2'-Omethylcytosine
  modified_base 22: mod_base = OTHER; note = 2'-Omethylguanosine
  modified_base 23: mod_base = OTHER; note = 2'-Omethyladenosine
  modified_base 24: mod_base = OTHER; note = 2'-Omethylguanosine
  modified_base 25: mod_base = OTHER; note = 2'-Omethylcytosine
  modified_base 49: mod_base = OTHER; note = 2'-Omethylcytosine
  modified_base 50: mod_base = OTHER; note = 2'-Omethyladenosine
  modified_base 51: mod_base = OTHER; note = 2'-Omethylguanosine
  modified_base 52: mod_base = OTHER; note = 2'-Omethylguanosine
  modified_base 53: mod_base = OTHER; note = 2'-Omethylguanosine
  modified_base 61: mod_base = OTHER; note = 2'-Omethylcytosine
  modified_base 62: mod_base = OTHER; note = 2'-Omethylcytosine
  modified_base 63: mod_base = OTHER; note = 2'-fluorocytosine
  modified_base 64: mod_base = OTHER; note = 2'-Omethyluridine
  modified_base 65: mod_base = OTHER; note = 2'-Omethylguanosine
  modified_base 66: mod_base = OTHER; note = 2'-Omethyluridine
  modified_base 67: mod_base = OTHER; note = 2'-Omethylcytosine
  modified_base 68: mod_base = OTHER; note = 2'-Omethylcytosine
  modified_base 73: mod_base = OTHER; note = 2'-Omethylguanosine

SEQ ID NO: 4482 - RNA, 85 nt, synthetic construct; identical to SEQ ID NO: 3317
  source 1..85: mol_type = other RNA
  modified_base 1: mod_base = OTHER; note = 2'-Omethylguanosine phosphorothiorate
  modified_base 16: mod_base = OTHER; note = 2'-Omethyluridine phosphorothiorate
  modified_base 24: mod_base = OTHER; note = Guanosine phosphorothiorate
  modified_base 26: mod_base = OTHER; note = 2'-Omethylguanosine
  modified_base 35: mod_base = OTHER; note = 2'-fluorouridine
  modified_base 47: mod_base = OTHER; note = 2'-Omethylguanosine
  modified_base 80: mod_base = OTHER; note = 2'-fluoroguanosine
  modified_base 81: mod_base = OTHER; note = 2'-fluorocytosine phosphorothiorate

SEQ ID NO: 4483 - RNA, 76 nt, synthetic construct; identical to SEQ ID NO: 625
  source 1..76: mol_type = other RNA
  modified_base 1: mod_base = OTHER; note = 2'-Omethylguanosine phosphorothiorate
  modified_base 2: mod_base = OTHER; note = 2'-Omethylguanosine
  modified_base 17: mod_base = OTHER; note = 2'-Omethylguanosine
  modified_base 33: mod_base = OTHER; note = 2'-fluorouridine
  modified_base 35: mod_base = OTHER; note = Cytosine phosphorothiorate
  modified_base 37: mod_base = OTHER; note = Adenosine phosphorothiorate
  modified_base 38: mod_base = OTHER; note = Adenosine phosphorothiorate
  modified_base 52: mod_base = OTHER; note = 2'-Omethylguanosine
  modified_base 62: mod_base = OTHER; note = 2'-Omethylcytosine
  modified_base 63: mod_base = OTHER; note = 2'-fluorocytosine
  modified_base 73: mod_base = OTHER; note = 2'-Omethylguanosine
  modified_base 75: mod_base = OTHER; note = 2'-fluorocytosine phosphorothiorate
  modified_base 76: mod_base = OTHER; note = 2'-Omethyladenosine

SEQ ID NO: 4484 - RNA, 76 nt, synthetic construct; identical to SEQ ID NO: 625
  source 1..76: mol_type = other RNA
  modified_base 1: mod_base = OTHER; note = 2'-Omethylguanosine phosphorothiorate
  modified_base 2: mod_base = OTHER; note = 2'-Omethylguanosine
  modified_base 17: mod_base = OTHER; note = 2'-Omethylguanosine
  modified_base 33: mod_base = OTHER; note = 2'-fluorouridine
  modified_base 35: mod_base = OTHER; note = Cytosine phosphorothiorate
  modified_base 37: mod_base = OTHER; note = Adenosine phosphorothiorate
  modified_base 52: mod_base = OTHER; note = 2'-fluoroguanosine
  modified_base 57: mod_base = OTHER; note = 2'-Omethylguanosine
  modified_base 62: mod_base = OTHER; note = 2'-Omethylcytosine
  modified_base 73: mod_base = OTHER; note = 2'-Omethylguanosine
  modified_base 75: mod_base = OTHER; note = 2'-fluorocytosine phosphorothiorate

SEQ ID NO: 4485 - RNA, 74 nt, synthetic construct; identical to SEQ ID NO: 3293
  source 1..74: mol_type = other RNA
  modified_base 1: mod_base = OTHER; note = Adenosine phosphorothiorate
  modified_base 2: mod_base = OTHER; note = 2'-Omethylcytosine
  modified_base 3: mod_base = OTHER; note = 2'-Omethylcytosine
  modified_base 4: mod_base = OTHER; note = Uridine phosphorothiorate
  modified_base 10: mod_base = OTHER; note = 2'-Omethylcytosine
  modified_base 26: mod_base = OTHER; note = Cytosine phosphorothiorate
  modified_base 35: mod_base = OTHER; note = 2'-fluoroguanosine phosphorothiorate
  modified_base 37: mod_base = OTHER; note = 2'-fluorouridine
  modified_base 39: mod_base = OTHER; note = 2'-fluoroadenosine
  modified_base 43: mod_base = OTHER; note = Guanosine phosphorothiorate
  modified_base 44: mod_base = OTHER; note = Guanosine phosphorothiorate
  modified_base 50: mod_base = OTHER; note = Uridine phosphorothiorate
  modified_base 58: mod_base = OTHER; note = 2'-fluorouridine phosphorothiorate
  modified_base 62: mod_base = OTHER; note = Guanosine phosphorothiorate
  modified_base 67: mod_base = OTHER; note = Guanosine phosphorothiorate
  modified_base 73: mod_base = OTHER; note = 2'-Omethylcytosine phosphorothiorate

SEQ ID NO: 4486 - RNA, 85 nt, synthetic construct; identical to SEQ ID NO: 3288
  source 1..85: mol_type = other RNA
  modified_base 1: mod_base = OTHER; note = 2'-fluorocytosine
  modified_base 12: mod_base = OTHER; note = Guanosine phosphorothiorate
  modified_base 30: mod_base = OTHER; note = 2'-fluoroadenosine
  modified_base 34: mod_base = OTHER; note = Cytosine phosphorothiorate
  modified_base 44: mod_base = OTHER; note = 2'-Omethylguanosine
  modified_base 54: mod_base = OTHER; note = 2'-fluorocytosine
  modified_base 56: mod_base = OTHER; note = Guanosine phosphorothiorate
  modified_base 58: mod_base = OTHER; note = 2'-Omethylguanosine
  modified_base 76: mod_base = OTHER; note = 2'-fluorocytosine
  modified_base 84: mod_base = OTHER; note = Cytosine phosphorothiorate
  modified_base 85: mod_base = OTHER; note = 2'-Omethyladenosine

SEQ ID NO: 4487 - RNA, 76 nt, synthetic construct; identical to SEQ ID NO: 625
  source 1..76: mol_type = other RNA
  modified_base 1: mod_base = OTHER; note = Guanosine phosphorothiorate
  modified_base 4: mod_base = OTHER; note = Uridine phosphorothiorate
  modified_base 5: mod_base = OTHER; note = 2'-fluorocytosine
  modified_base 6: mod_base = OTHER; note = 2'-Omethylcytosine
  modified_base 11: mod_base = OTHER; note = 2'-fluorocytosine
  modified_base 12: mod_base = OTHER; note = 2'-fluoroguanosine
  modified_base 15: mod_base = OTHER; note = 2'-fluoroadenosine
  modified_base 18: mod_base = OTHER; note = Guanosine phosphorothiorate
  modified_base 20: mod_base = OTHER; note = Uridine phosphorothiorate
  modified_base 22: mod_base = OTHER; note = Guanosine phosphorothiorate
  modified_base 23: mod_base = OTHER; note = 2'-Omethylcytosine
  modified_base 25: mod_base = OTHER; note = 2'-fluorocytosine
  modified_base 26: mod_base = OTHER; note = 2'-Omethyladenosine
  modified_base 27: mod_base = OTHER; note = 2'-fluorouridine
  modified_base 28: mod_base = OTHER; note = 2'-fluorouridine
  modified_base 29: mod_base = OTHER; note = 2'-fluoroguanosine phosphorothiorate
  modified_base 33: mod_base = OTHER; note = 2'-fluorouridine
  modified_base 34: mod_base = OTHER; note = 2'-Omethyluridine
  modified_base 36: mod_base = OTHER; note = Adenosine phosphorothiorate
  modified_base 40: mod_base = OTHER; note = 2'-Omethyluridine
  modified_base 42: mod_base = OTHER; note = 2'-fluoroadenosine phosphorothiorate
  modified_base 43: mod_base = OTHER; note = 2'-fluoroadenosine
  modified_base 44: mod_base = OTHER; note = 2'-Omethyladenosine
  modified_base 46: mod_base = OTHER; note = 2'-fluoroguanosine
  modified_base 48: mod_base = OTHER; note = Uridine phosphorothiorate
  modified_base 49: mod_base = OTHER; note = 2'-Omethylcytosine
  modified_base 52: mod_base = OTHER; note = 2'-Omethylguanosine
  modified_base 57: mod_base = OTHER; note = 2'-fluoroguanosine phosphorothiorate
  modified_base 58: mod_base = OTHER; note = 2'-fluoroadenosine
  modified_base 63: mod_base = OTHER; note = 2'-Omethylcytosine phosphorothiorate
  modified_base 64: mod_base = OTHER; note = 2'-fluoroguanosine
  modified_base 65: mod_base = OTHER; note = 2'-Omethylguanosine
  modified_base 66: mod_base = OTHER; note = 2'-Omethylcytosine
  modified_base 67: mod_base = OTHER; note = 2'-fluoroguanosine
  modified_base 70: mod_base = OTHER; note = 2'-Omethylguanosine
  modified_base 72: mod_base = OTHER; note = 2'-fluorocytosine
  modified_base 73: mod_base = OTHER; note = 2'-fluoroguanosine

SEQ ID NO: 4488 - RNA, 76 nt, synthetic construct; identical to SEQ ID NO: 625
  source 1..76: mol_type = other RNA
  modified_base 10: mod_base = OTHER; note = Guanosine phosphorothiorate
  modified_base 14: mod_base = OTHER; note = 2'-Omethyladenosine
  modified_base 15: mod_base = OTHER; note = Adenosine phosphorothiorate
  modified_base 16: mod_base = OTHER; note = 2'-fluorouridine
  modified_base 17: mod_base = OTHER; note = 2'-Omethylguanosine
  modified_base 20: mod_base = OTHER; note = 2'-fluorouridine
  modified_base 21: mod_base = OTHER; note = Adenosine phosphorothiorate
  modified_base 22: mod_base = OTHER; note = 2'-Omethylguanosine
  modified_base 24: mod_base = OTHER; note = 2'-Omethylguanosine
  modified_base 25: mod_base = OTHER; note = 2'-Omethylcytosine
  modified_base 27: mod_base = OTHER; note = 2'-fluorouridine
  modified_base 30: mod_base = OTHER; note = 2'-Omethylguanosine
  modified_base 31: mod_base = OTHER; note = 2'-fluoroadenosine
  modified_base 32: mod_base = OTHER; note = 2'-fluorocytosine
  modified_base 34: mod_base = OTHER; note = Uridine phosphorothiorate
  modified_base 37: mod_base = OTHER; note = Adenosine phosphorothiorate
  modified_base 38: mod_base = OTHER; note = 2'-fluoroadenosine
  modified_base 41: mod_base = OTHER; note = 2'-fluorocytosine
  modified_base 43: mod_base = OTHER; note = Adenosine phosphorothiorate
  modified_base 44: mod_base = OTHER; note = 2'-fluoroadenosine phosphorothiorate
  modified_base 45: mod_base = OTHER; note = 2'-Omethylguanosine
  modified_base 48: mod_base = OTHER; note = 2'-Omethyluridine phosphorothiorate
  modified_base 49: mod_base = OTHER; note = 2'-fluorocytosine
  modified_base 51: mod_base = OTHER; note = 2'-Omethylguanosine
  modified_base 52: mod_base = OTHER; note = 2'-Omethylguanosine
  modified_base 53: mod_base = OTHER; note = 2'-fluoroguanosine
  modified_base 54: mod_base = OTHER; note = Uridine phosphorothiorate
  modified_base 57: mod_base = OTHER; note = 2'-fluoroguanosine phosphorothiorate
  modified_base 59: mod_base = OTHER; note = Guanosine phosphorothiorate
  modified_base 60: mod_base = OTHER; note = 2'-Omethyluridine
  modified_base 63: mod_base = OTHER; note = 2'-fluorocytosine
  modified_base 64: mod_base = OTHER; note = 2'-fluoroguanosine
  modified_base 67: mod_base = OTHER; note = 2'-fluoroguanosine
  modified_base 68: mod_base = OTHER; note = Guanosine phosphorothiorate
  modified_base 69: mod_base = OTHER; note = 2'-Omethyladenosine
  modified_base 70: mod_base = OTHER; note = 2'-fluoroguanosine
  modified_base 72: mod_base = OTHER; note = 2'-Omethylcytosine phosphorothiorate

SEQ ID NO: 4489 - RNA, 85 nt, synthetic construct; identical to SEQ ID NO: 3288
  source 1..85: mol_type = other RNA
  modified_base 13: mod_base = OTHER; note = 2'-Omethyladenosine
  modified_base 28: mod_base = OTHER; note = 2'-fluoroguanosine
  modified_base 49: mod_base = OTHER; note = 2'-Omethyluridine
  modified_base 52: mod_base = OTHER; note = Guanosine phosphorothiorate
  modified_base 67: mod_base = OTHER; note = 2'-fluoroadenosine
  modified_base 84: mod_base = OTHER; note = 2'-fluorocytosine
  modified_base 85: mod_base = OTHER; note = 2'-fluoroadenosine

SEQ ID NO: 4490 - RNA, 76 nt, synthetic construct; identical to SEQ ID NO: 625
  source 1..76: mol_type = other RNA
  modified_base 4: mod_base = OTHER; note = Uridine phosphorothiorate
  modified_base 5: mod_base = OTHER; note = Cytosine phosphorothiorate
  modified_base 8: mod_base = OTHER; note = Uridine phosphorothiorate
  modified_base 10: mod_base = OTHER; note = Guanosine phosphorothiorate
  modified_base 12: mod_base = OTHER; note = Guanosine phosphorothiorate
  modified_base 13: mod_base = OTHER; note = 2'-Omethylcytosine phosphorothiorate
  modified_base 14: mod_base = OTHER; note = 2'-fluoroadenosine
  modified_base 15: mod_base = OTHER; note = 2'-Omethyladenosine
  modified_base 16: mod_base = OTHER; note = 2'-Omethyluridine
  modified_base 20: mod_base = OTHER; note = 2'-Omethyluridine
  modified_base 24: mod_base = OTHER; note = 2'-fluoroguanosine phosphorothiorate
  modified_base 27: mod_base = OTHER; note = 2'-Omethyluridine
  modified_base 28: mod_base = OTHER; note = Uridine phosphorothiorate
  modified_base 29: mod_base = OTHER; note = 2'-fluoroguanosine
  modified_base 30: mod_base = OTHER; note = 2'-Omethylguanosine
  modified_base 38: mod_base = OTHER; note = 2'-fluoroadenosine
  modified_base 39: mod_base = OTHER; note = 2'-Omethyluridine
  modified_base 41: mod_base = OTHER; note = 2'-Omethylcytosine
  modified_base 44: mod_base = OTHER; note = 2'-Omethyladenosine
  modified_base 46: mod_base = OTHER; note = 2'-Omethylguanosine
  modified_base 47: mod_base = OTHER; note = 2'-Omethyluridine phosphorothiorate
  modified_base 48: mod_base = OTHER; note = 2'-Omethyluridine
  modified_base 49: mod_base = OTHER; note = 2'-Omethylcytosine
  modified_base 52: mod_base = OTHER; note = Guanosine phosphorothiorate
  modified_base 53: mod_base = OTHER; note = 2'-Omethylguanosine
  modified_base 54: mod_base = OTHER; note = Uridine phosphorothiorate
  modified_base 57: mod_base = OTHER; note = Guanosine phosphorothiorate
  modified_base 60: mod_base = OTHER; note = 2'-Omethyluridine
  modified_base 64: mod_base = OTHER; note = 2'-Omethylguanosine
  modified_base 68: mod_base = OTHER; note = 2'-fluoroguanosine
  modified_base 69: mod_base = OTHER; note = 2'-Omethyladenosine
  modified_base 70: mod_base = OTHER; note = 2'-Omethylguanosine phosphorothiorate
  modified_base 71: mod_base = OTHER; note = 2'-fluorouridine phosphorothiorate
  modified_base 72: mod_base = OTHER; note = 2'-fluorocytosine

SEQ ID NO: 4491 - RNA, 74 nt, synthetic construct; identical to SEQ ID NO: 3293
  source 1..74: mol_type = other RNA
  modified_base 1: mod_base = OTHER; note = 2'-fluoroadenosine phosphorothiorate
  modified_base 4: mod_base = OTHER; note = 2'-Omethyluridine
  modified_base 11: mod_base = OTHER; note = Guanosine phosphorothiorate
  modified_base 24: mod_base = OTHER; note = Guanosine phosphorothiorate
  modified_base 26: mod_base = OTHER; note = 2'-Omethylcytosine phosphorothiorate
  modified_base 43: mod_base = OTHER; note = Guanosine phosphorothiorate
  modified_base 46: mod_base = OTHER; note = 2'-fluorouridine
  modified_base 50: mod_base = OTHER; note = 2'-fluorouridine
  modified_base 62: mod_base = OTHER; note = 2'-fluoroguanosine
  modified_base 73: mod_base = OTHER; note = 2'-Omethylcytosine phosphorothiorate

SEQ ID NO: 4492 - RNA, 76 nt, synthetic construct; identical to SEQ ID NO: 3318
  source 1..76: mol_type = other RNA
  modified_base 74: mod_base = OTHER; note = 2'-Omethylcytosine
  modified_base 75: mod_base = OTHER; note = 2'-Omethylcytosine

SEQ ID NO: 4493 - RNA, 76 nt, synthetic construct; identical to SEQ ID NO: 625
  source 1..76: mol_type = other RNA
  modified_base 1: mod_base = OTHER; note = 2'-Omethylguanosine phosphorothiorate
  modified_base 2: mod_base = OTHER; note = 2'-Omethylguanosine phosphorothiorate
  modified_base 3: mod_base = OTHER; note = 2'-Omethylcytosine phosphorothiorate
  modified_base 4: mod_base = OTHER; note = 2'-Omethyluridine phosphorothiorate
  modified_base 5: mod_base = OTHER; note = 2'-Omethylcytosine phosphorothiorate
  modified_base 6: mod_base = OTHER; note = 2'-Omethylcytosine phosphorothiorate
  modified_base 22: mod_base = OTHER; note = 2'-Omethylguanosine
  modified_base 23: mod_base = OTHER; note = 2'-Omethylcytosine
  modified_base 24: mod_base = OTHER; note = 2'-Omethylguanosine
  modified_base 25: mod_base = OTHER; note = 2'-Omethylcytosine
  modified_base 49: mod_base = OTHER; note = 2'-Omethylcytosine
  modified_base 50: mod_base = OTHER; note = 2'-Omethylcytosine
  modified_base 51: mod_base = OTHER; note = 2'-Omethylguanosine
  modified_base 52: mod_base = OTHER; note = 2'-Omethylguanosine
  modified_base 53: mod_base = OTHER; note = 2'-Omethylguanosine
  modified_base 61: mod_base = OTHER; note = 2'-Omethylcytosine
  modified_base 62: mod_base = OTHER; note = 2'-Omethylcytosine
  modified_base 63: mod_base = OTHER; note = 2'-Omethylcytosine
  modified_base 64: mod_base = OTHER; note = 2'-Omethylguanosine
  modified_base 65: mod_base = OTHER; note = 2'-Omethylguanosine
  modified_base 66: mod_base = OTHER; note = 2'-Omethylcytosine
  modified_base 67: mod_base = OTHER; note = 2'-Omethylguanosine
  modified_base 68: mod_base = OTHER; note = 2'-Omethylguanosine
  modified_base 69: mod_base = OTHER; note = 2'-Omethyladenosine

SEQ ID NO: 4494 - RNA, 76 nt, synthetic construct; identical to SEQ ID NO: 625
  source 1..76: mol_type = other RNA
  modified_base 1: mod_base = OTHER; note = Guanosine phosphorothiorate
  modified_base 3: mod_base = OTHER; note = 2'-fluorocytosine
  modified_base 5: mod_base = OTHER; note = 2'-Omethylcytosine
  modified_base 6: mod_base = OTHER; note = 2'-fluorocytosine
  modified_base 8: mod_base = OTHER; note = Uridine phosphorothiorate
  modified_base 12: mod_base = OTHER; note = 2'-Omethylguanosine
  modified_base 15: mod_base = OTHER; note = 2'-fluoroadenosine
  modified_base 16: mod_base = OTHER; note = 2'-Omethyluridine
  modified_base 17: mod_base = OTHER; note = 2'-Omethylguanosine
  modified_base 18: mod_base = OTHER; note = 2'-Omethylguanosine phosphorothiorate
  modified_base 20: mod_base = OTHER; note = 2'-Omethyluridine
  modified_base 21: mod_base = OTHER; note = Adenosine phosphorothiorate
  modified_base 22: mod_base = OTHER; note = 2'-fluoroguanosine
  modified_base 27: mod_base = OTHER; note = 2'-Omethyluridine phosphorothiorate
  modified_base 28: mod_base = OTHER; note = 2'-Omethyluridine
  modified_base 30: mod_base = OTHER; note = 2'-fluoroguanosine
  modified_base 31: mod_base = OTHER; note = 2'-fluoroadenosine
  modified_base 33: mod_base = OTHER; note = 2'-fluorouridine
  modified_base 38: mod_base = OTHER; note = 2'-Omethyladenosine
  modified_base 42: mod_base = OTHER; note = 2'-fluoroadenosine
  modified_base 45: mod_base = OTHER; note = 2'-fluoroguanosine
  modified_base 52: mod_base = OTHER; note = Guanosine phosphorothiorate
  modified_base 53: mod_base = OTHER; note = 2'-Omethylguanosine
  modified_base 54: mod_base = OTHER; note = Uridine phosphorothiorate
  modified_base 56: mod_base = OTHER; note = 2'-fluorocytosine
  modified_base 59: mod_base = OTHER; note = Guanosine phosphorothiorate
  modified_base 60: mod_base = OTHER; note = 2'-fluorouridine
  modified_base 61: mod_base = OTHER; note = Cytosine phosphorothiorate
  modified_base 62: mod_base = OTHER; note = 2'-Omethylcytosine
  modified_base 64: mod_base = OTHER; note = 2'-fluoroguanosine
  modified_base 67: mod_base = OTHER; note = 2'-fluoroguanosine phosphorothiorate
  modified_base 68: mod_base = OTHER; note = 2'-fluoroguanosine phosphorothiorate
  modified_base 69: mod_base = OTHER; note = 2'-fluoroadenosine phosphorothiorate
  modified_base 70: mod_base = OTHER; note = 2'-fluoroguanosine
  modified_base 71: mod_base = OTHER; note = 2'-fluorouridine
  modified_base 73: mod_base = OTHER; note = 2'-Omethylguanosine
  modified_base 75: mod_base = OTHER; note = Cytosine phosphorothiorate

SEQ ID NO: 4495 - RNA, 85 nt, synthetic construct; identical to SEQ ID NO: 3297
  source 1..85: mol_type = other RNA
  modified_base 1: mod_base = OTHER; note = 2'-Omethylguanosine
  modified_base 14: mod_base = OTHER; note = 2'-Omethyladenosine
  modified_base 15: mod_base = OTHER; note = 2'-Omethylguanosine
  modified_base 16: mod_base = OTHER; note = 2'-Omethyluridine
  modified_base 17: mod_base = OTHER; note = 2'-Omethylguanosine
  modified_base 18: mod_base = OTHER; note = 2'-Omethylguanosine
  modified_base 19: mod_base = OTHER; note = Uridine phosphorothiorate
  modified_base 20: mod_base = OTHER; note = 2'-Omethyluridine
  modified_base 21: mod_base = OTHER; note = Adenosine phosphorothiorate
  modified_base 33: mod_base = OTHER; note = Uridine phosphorothiorate
  modified_base 34: mod_base = OTHER; note = 2'-Omethyluridine
  modified_base 35: mod_base = OTHER; note = Cytosine phosphorothiorate
  modified_base 37: mod_base = OTHER; note = Adenosine phosphorothiorate
  modified_base 38: mod_base = OTHER; note = Adenosine phosphorothiorate
  modified_base 41: mod_base = OTHER; note = 2'-fluorocytosine
  modified_base 42: mod_base = OTHER; note = 2'-Omethyladenosine
  modified_base 43: mod_base = OTHER; note = 2'-Omethyladenosine
  modified_base 44: mod_base = OTHER; note = 2'-fluorouridine
  modified_base 59: mod_base = OTHER; note = 2'-Omethylcytosine
  modified_base 61: mod_base = OTHER; note = 2'-Omethylguanosine
  modified_base 82: mod_base = OTHER; note = 2'-Omethylguanosine

SEQ ID NO: 4496 - RNA, 75 nt, synthetic construct; identical to SEQ ID NO: 3299
  source 1..75: mol_type = other RNA
  modified_base 1: mod_base = OTHER; note = 2'-Omethylcytosine
  modified_base 3: mod_base = OTHER; note = 2'-fluorouridine phosphorothiorate
  modified_base 10: mod_base = OTHER; note = 2'-Omethylcytosine phosphorothiorate
  modified_base 11: mod_base = OTHER; note = Uridine phosphorothiorate
  modified_base 17: mod_base = OTHER; note = 2'-fluoroguanosine
  modified_base 21: mod_base = OTHER; note = 2'-fluoroguanosine
  modified_base 22: mod_base = OTHER; note = Adenosine phosphorothiorate
  modified_base 25: mod_base = OTHER; note = Adenosine phosphorothiorate
  modified_base 28: mod_base = OTHER; note = 2'-fluoroadenosine
  modified_base 33: mod_base = OTHER; note = Uridine phosphorothiorate
  modified_base 37: mod_base = OTHER; note = 2'-fluoroadenosine
  modified_base 39: mod_base = OTHER; note = 2'-Omethylcytosine phosphorothiorate
  modified_base 49: mod_base = OTHER; note = Adenosine phosphorothiorate
  modified_base 51: mod_base = OTHER; note = 2'-fluoroguanosine phosphorothiorate
  modified_base 55: mod_base = OTHER; note = 2'-Omethylcytosine phosphorothiorate
  modified_base 58: mod_base = OTHER; note = Guanosine phosphorothiorate
  modified_base 72: mod_base = OTHER; note = Guanosine phosphorothiorate
  modified_base 74: mod_base = OTHER; note = 2'-Omethylcytosine

SEQ ID NO: 4497 - RNA, 75 nt, synthetic construct; identical to SEQ ID NO: 1045
  source 1..75: mol_type = other RNA
  modified_base 2: mod_base = OTHER; note = 2'-Omethylguanosine phosphorothiorate
  modified_base 3: mod_base = OTHER; note = 2'-Omethyluridine phosphorothiorate
  modified_base 5: mod_base = OTHER; note = 2'-Omethylcytosine
  modified_base 6: mod_base = OTHER; note = 2'-Omethylcytosine phosphorothiorate
  modified_base 14: mod_base = OTHER; note = 2'-Omethyladenosine
  modified_base 15: mod_base = OTHER; note = 2'-fluoroadenosine
  modified_base 16: mod_base = OTHER; note = 2'-Omethyluridine
  modified_base 17: mod_base = OTHER; note = 2'-Omethylguanosine phosphorothiorate
  modified_base 18: mod_base = OTHER; note = 2'-Omethylguanosine phosphorothiorate
  modified_base 26: mod_base = OTHER; note = Uridine phosphorothiorate
  modified_base 39: mod_base = OTHER; note = 2'-Omethyluridine
  modified_base 40: mod_base = OTHER; note = 2'-fluorocytosine phosphorothiorate
  modified_base 45: mod_base = OTHER; note = 2'-Omethylguanosine
  modified_base 49: mod_base = OTHER; note = 2'-Omethylcytosine
  modified_base 60: mod_base = OTHER; note = 2'-Omethylcytosine
  modified_base 66: mod_base = OTHER; note = 2'-Omethylguanosine
  modified_base 67: mod_base = OTHER; note = 2'-Omethylguanosine
  modified_base 72: mod_base = OTHER; note = 2'-Omethyluridine
  modified_base 73: mod_base = OTHER; note = Cytosine phosphorothiorate
  modified_base 74: mod_base = OTHER; note = 2'-Omethylcytosine phosphorothiorate

SEQ ID NO: 4498 - RNA, 86 nt, synthetic construct; identical to SEQ ID NO: 3290
  source 1..86: mol_type = other RNA
  modified_base 16: mod_base = OTHER; note = 2'-fluorouridine

SEQ ID NO: 4499 - RNA, 76 nt, synthetic construct; identical to SEQ ID NO: 625
  source 1..76: mol_type = other RNA
  modified_base 1: mod_base = OTHER; note = 2'-Omethylguanosine
  modified_base 2: mod_base = OTHER; note = 2'-Omethylguanosine
  modified_base 18: mod_base = OTHER; note = 2'-Omethylguanosine
  modified_base 33: mod_base = OTHER; note = 2'-fluorouridine
  modified_base 35: mod_base = OTHER; note = Cytosine phosphorothiorate
  modified_base 37: mod_base = OTHER; note = Adenosine phosphorothiorate
  modified_base 38: mod_base = OTHER; note = Adenosine phosphorothiorate
  modified_base 52: mod_base = OTHER; note = 2'-Omethylguanosine
  modified_base 62: mod_base = OTHER; note = 2'-Omethylcytosine
  modified_base 73: mod_base = OTHER; note = 2'-Omethylguanosine
  modified_base 75: mod_base = OTHER; note = 2'-fluorocytosine phosphorothiorate

SEQ ID NO: 4500 - RNA, 86 nt, synthetic construct; identical to SEQ ID NO: 3290
  source 1..86: mol_type = other RNA
  modified_base 31: mod_base = OTHER; note = Adenosine phosphorothiorate

SEQ ID NO: 4501 - RNA, 75 nt, synthetic construct; identical to SEQ ID NO: 3299
  source 1..75: mol_type = other RNA
  modified_base 4: mod_base = OTHER; note = 2'-Omethylguanosine
  modified_base 10: mod_base = OTHER; note = 2'-fluorocytosine
  modified_base 11: mod_base = OTHER; note = 2'-fluorouridine phosphorothiorate
  modified_base 18: mod_base = OTHER; note = 2'-fluoroguanosine
  modified_base 23: mod_base = OTHER; note = 2'-fluoroguanosine
  modified_base 26: mod_base = OTHER; note = 2'-Omethyluridine phosphorothiorate
  modified_base 28: mod_base = OTHER; note = 2'-fluoroadenosine
  modified_base 35: mod_base = OTHER; note = 2'-Omethyladenosine phosphorothiorate
  modified_base 38: mod_base = OTHER; note = Uridine phosphorothiorate
  modified_base 39: mod_base = OTHER; note = 2'-Omethylcytosine phosphorothiorate
  modified_base 40: mod_base = OTHER; note = 2'-fluorouridine
  modified_base 41: mod_base = OTHER; note = 2'-Omethylguanosine phosphorothiorate
  modified_base 47: mod_base = OTHER; note = 2'-fluorocytosine phosphorothiorate
  modified_base 53: mod_base = OTHER; note = 2'-Omethyluridine phosphorothiorate
  modified_base 62: mod_base = OTHER; note = 2'-fluorocytosine phosphorothiorate
  modified_base 72: mod_base = OTHER; note = Guanosine phosphorothiorate
  modified_base 73: mod_base = OTHER; note = Cytosine phosphorothiorate
  modified_base 75: mod_base = OTHER; note = 2'-fluoroadenosine

SEQ ID NO: 4502 - RNA, 76 nt, synthetic construct; identical to SEQ ID NO: 3318
  source 1..76: mol_type = other RNA
  modified_base 1: mod_base = OTHER; note = 2'-Omethylcytosine phosphorothiorate
  modified_base 2: mod_base = OTHER; note = 2'-Omethylcytosine phosphorothiorate
  modified_base 3: mod_base = OTHER; note = 2'-Omethyluridine
  modified_base 4: mod_base = OTHER; note = 2'-Omethyluridine
  modified_base 5: mod_base = OTHER; note = 2'-Omethylcytosine
  modified_base 6: mod_base = OTHER; note = 2'-Omethylguanosine
  modified_base 16: mod_base = OTHER; note = 2'-Omethyluridine
  modified_base 18: mod_base = OTHER; note = 2'-Omethylguanosine
  modified_base 19: mod_base = OTHER; note = 2'-Omethylguanosine
  modified_base 25: mod_base = OTHER; note = 2'-Omethylcytosine
  modified_base 33: mod_base = OTHER; note = 2'-fluorouridine
  modified_base 35: mod_base = OTHER; note = Uridine phosphorothiorate
  modified_base 37: mod_base = OTHER; note = Guanosine phosphorothiorate
  modified_base 38: mod_base = OTHER; note = Adenosine phosphorothiorate
  modified_base 41: mod_base = OTHER; note = 2'-fluorocytosine phosphorothiorate
  modified_base 42: mod_base = OTHER; note = 2'-Omethyluridine
  modified_base 43: mod_base = OTHER; note = 2'-Omethyluridine
  modified_base 44: mod_base = OTHER; note = 2'-Omethyladenosine
  modified_base 45: mod_base = OTHER; note = 2'-Omethylguanosine
  modified_base 46: mod_base = OTHER; note = 2'-fluoroguanosine
  modified_base 47: mod_base = OTHER; note = 2'-fluorouridine
  modified_base 48: mod_base = OTHER; note = 2'-fluorocytosine
  modified_base 56: mod_base = OTHER; note = 2'-Omethylcytosine
  modified_base 59: mod_base = OTHER; note = 2'-Omethyladenosine
  modified_base 61: mod_base = OTHER; note = 2'-Omethylcytosine
  modified_base 62: mod_base = OTHER; note = 2'-Omethylcytosine
  modified_base 63: mod_base = OTHER; note = 2'-fluoroguanosine
  modified_base 64: mod_base = OTHER; note = 2'-Omethylguanosine
  modified_base 65: mod_base = OTHER; note = 2'-Omethylcytosine
  modified_base 66: mod_base = OTHER; note = 2'-Omethyluridine
  modified_base 67: mod_base = OTHER; note = 2'-Omethylcytosine
  modified_base 68: mod_base = OTHER; note = 2'-Omethylguanosine
  modified_base 73: mod_base = OTHER; note = 2'-Omethyladenosine

SEQ ID NO: 4503 - RNA, 76 nt, synthetic construct; identical to SEQ ID NO: 3289
  source 1..76: mol_type = other RNA
  modified_base 10: mod_base = OTHER; note = 2'-Omethylguanosine
  modified_base 11: mod_base = OTHER; note = 2'-Omethylcytosine
  modified_base 12: mod_base = OTHER; note = 2'-Omethyluridine
  modified_base 13: mod_base = OTHER; note = 2'-Omethylcytosine
  modified_base 73: mod_base = OTHER; note = 2'-Omethylguanosine

SEQ ID NO: 4504 - RNA, 76 nt, synthetic construct; identical to SEQ ID NO: 625
  source 1..76: mol_type = other RNA
  modified_base 1: mod_base = OTHER; note = Guanosine phosphorothiorate
  modified_base 2: mod_base = OTHER; note = 2'-fluoroguanosine
  modified_base 5: mod_base = OTHER; note = 2'-fluorocytosine
  modified_base 6: mod_base = OTHER; note = 2'-Omethylcytosine
  modified_base 10: mod_base = OTHER; note = 2'-Omethylguanosine
  modified_base 12: mod_base = OTHER; note = 2'-fluoroguanosine
  modified_base 13: mod_base = OTHER; note = 2'-fluorocytosine
  modified_base 14: mod_base = OTHER; note = Adenosine phosphorothiorate
  modified_base 17: mod_base = OTHER; note = 2'-Omethylguanosine
  modified_base 18: mod_base = OTHER; note = Guanosine phosphorothiorate
  modified_base 23: mod_base = OTHER; note = 2'-fluorocytosine
  modified_base 24: mod_base = OTHER; note = 2'-fluoroguanosine
  modified_base 25: mod_base = OTHER; note = 2'-Omethylcytosine
  modified_base 32: mod_base = OTHER; note = 2'-fluorocytosine
  modified_base 34: mod_base = OTHER; note = Uridine phosphorothiorate
  modified_base 37: mod_base = OTHER; note = Adenosine phosphorothiorate
  modified_base 38: mod_base = OTHER; note = 2'-Omethyladenosine
  modified_base 41: mod_base = OTHER; note = Cytosine phosphorothiorate
  modified_base 42: mod_base = OTHER; note = Adenosine phosphorothiorate
  modified_base 46: mod_base = OTHER; note = 2'-Omethylguanosine
  modified_base 47: mod_base = OTHER; note = Uridine phosphorothiorate
  modified_base 48: mod_base = OTHER; note = 2'-fluorouridine phosphorothiorate
  modified_base 50: mod_base = OTHER; note = 2'-Omethylcytosine
  modified_base 51: mod_base = OTHER; note = Guanosine phosphorothiorate
  modified_base 53: mod_base = OTHER; note = Guanosine phosphorothiorate
  modified_base 54: mod_base = OTHER; note = 2'-fluorouridine
  modified_base 60: mod_base = OTHER; note = 2'-fluorouridine phosphorothiorate
  modified_base 61: mod_base = OTHER; note = 2'-fluorocytosine
  modified_base 64: mod_base = OTHER; note = 2'-fluoroguanosine
  modified_base 65: mod_base = OTHER; note = 2'-fluoroguanosine
  modified_base 66: mod_base = OTHER; note = Cytosine phosphorothiorate
  modified_base 67: mod_base = OTHER; note = 2'-fluoroguanosine phosphorothiorate
  modified_base 68: mod_base = OTHER; note = 2'-fluoroguanosine
  modified_base 69: mod_base = OTHER; note = 2'-Omethyladenosine
  modified_base 76: mod_base = OTHER; note = 2'-Omethyladenosine

SEQ ID NO: 4505 - RNA, 86 nt, synthetic construct; identical to SEQ ID NO: 3290
  source 1..86: mol_type = other RNA
  modified_base 45: mod_base = OTHER; note = 2'-Omethylguanosine

SEQ ID NO: 4506 - RNA, 86 nt, synthetic construct; identical to SEQ ID NO: 3290
  source 1..86: mol_type = other RNA
  modified_base 1: mod_base = OTHER; note = 2'-Omethyladenosine
  modified_base 16: mod_base = OTHER; note = 2'-Omethyluridine
  modified_base 17: mod_base = OTHER; note = 2'-Omethylguanosine
  modified_base 18: mod_base = OTHER; note = 2'-Omethylguanosine
  modified_base 64: mod_base = OTHER; note = 2'-Omethyluridine
  modified_base 65: mod_base = OTHER; note = Uridine phosphorothiorate
  modified_base 66: mod_base = OTHER; note = 2'-Omethylcytosine
  modified_base 69: mod_base = OTHER; note = 2'-Omethyladenosine
  modified_base 83: mod_base = OTHER; note = 2'-Omethyladenosine

SEQ ID NO: 4507 - RNA, 85 nt, synthetic construct; identical to SEQ ID NO: 3297
  source 1..85: mol_type = other RNA
  modified_base 1: mod_base = OTHER; note = 2'-Omethylguanosine
  modified_base 10: mod_base = OTHER; note = 2'-Omethylguanosine
  modified_base 11: mod_base = OTHER; note = 2'-Omethylcytosine
  modified_base 12: mod_base = OTHER; note = 2'-Omethylcytosine
  modified_base 13: mod_base = OTHER; note = 2'-Omethylguanosine
  modified_base 17: mod_base = OTHER; note = 2'-Omethylguanosine
  modified_base 18: mod_base = OTHER; note = 2'-Omethylguanosine
  modified_base 25: mod_base = OTHER; note = 2'-Omethylcytosine
  modified_base 33: mod_base = OTHER; note = Uridine phosphorothiorate
  modified_base 34: mod_base = OTHER; note = 2'-Omethyluridine
  modified_base 35: mod_base = OTHER; note = Cytosine phosphorothiorate
  modified_base 37: mod_base = OTHER; note = Adenosine phosphorothiorate
  modified_base 38: mod_base = OTHER; note = Adenosine phosphorothiorate
  modified_base 41: mod_base = OTHER; note = 2'-fluorocytosine
  modified_base 42: mod_base = OTHER; note = 2'-Omethyladenosine
  modified_base 43: mod_base = OTHER; note = 2'-Omethyladenosine
  modified_base 44: mod_base = OTHER; note = 2'-fluorouridine
  modified_base 58: mod_base = OTHER; note = 2'-Omethylguanosine
  modified_base 59: mod_base = OTHER; note = 2'-Omethylcytosine
  modified_base 61: mod_base = OTHER; note = 2'-Omethylguanosine
  modified_base 63: mod_base = OTHER; note = Uridine phosphorothiorate
  modified_base 64: mod_base = OTHER; note = Uridine phosphorothiorate
  modified_base 70: mod_base = OTHER; note = 2'-Omethylcytosine
  modified_base 74: mod_base = OTHER; note = 2'-Omethylcytosine
  modified_base 82: mod_base = OTHER; note = 2'-Omethylguanosine

SEQ ID NO: 4508 - RNA, 85 nt, synthetic construct; identical to SEQ ID NO: 3286
  source 1..85: mol_type = other RNA
  modified_base 1: mod_base = OTHER; note = 2'-fluorocytosine
  modified_base 3: mod_base = OTHER; note = 2'-fluoroadenosine
  modified_base 25: mod_base = OTHER; note = Guanosine phosphorothiorate
  modified_base 26: mod_base = OTHER; note = 2'-fluorouridine
  modified_base 33: mod_base = OTHER; note = 2'-fluorouridine
  modified_base 43: mod_base = OTHER; note = 2'-Omethyluridine
  modified_base 46: mod_base = OTHER; note = Adenosine phosphorothiorate
  modified_base 47: mod_base = OTHER; note = 2'-fluorocytosine
  modified_base 50: mod_base = OTHER; note = 2'-Omethyladenosine
  modified_base 53: mod_base = OTHER; note = 2'-Omethyluridine
  modified_base 56: mod_base = OTHER; note = 2'-fluoroguanosine
  modified_base 57: mod_base = OTHER; note = 2'-Omethylcytosine
  modified_base 61: mod_base = OTHER; note = Guanosine phosphorothiorate
  modified_base 66: mod_base = OTHER; note = Guanosine phosphorothiorate
  modified_base 73: mod_base = OTHER; note = 2'-fluoroadenosine
  modified_base 77: mod_base = OTHER; note = 2'-Omethylcytosine phosphorothiorate
  modified_base 85: mod_base = OTHER; note = 2'-fluoroadenosine

SEQ ID NO: 4509 - RNA, 85 nt, synthetic construct; identical to SEQ ID NO: 3297
  source 1..85: mol_type = other RNA
  modified_base 1: mod_base = OTHER; note = 2'-Omethylguanosine
  modified_base 2: mod_base = OTHER; note = 2'-Omethylcytosine
  modified_base 3: mod_base = OTHER; note = 2'-Omethyluridine
  modified_base 4: mod_base = OTHER; note = 2'-Omethylguanosine
  modified_base 5: mod_base = OTHER; note = 2'-Omethyluridine
  modified_base 6: mod_base = OTHER; note = 2'-Omethylguanosine
  modified_base 58: mod_base = OTHER; note = 2'-Omethylguanosine
  modified_base 59: mod_base = OTHER; note = 2'-Omethylcytosine
  modified_base 60: mod_base = OTHER; note = 2'-Omethyladenosine
  modified_base 61: mod_base = OTHER; note = 2'-Omethylguanosine
  modified_base 62: mod_base = OTHER; note = 2'-Omethylguanosine
  modified_base 82: mod_base = OTHER; note = 2'-Omethylguanosine

SEQ ID NO: 4510 - RNA, 76 nt, synthetic construct; identical to SEQ ID NO: 3675
  source 1..76: mol_type = other RNA
  modified_base 1: mod_base = OTHER; note = 2'-Omethylguanosine
  modified_base 13: mod_base = OTHER; note = 2'-Omethylcytosine
  modified_base 14: mod_base = OTHER; note = 2'-Omethyladenosine
  modified_base 15: mod_base = OTHER; note = 2'-Omethyladenosine
  modified_base 16: mod_base = OTHER; note = 2'-Omethyluridine
  modified_base 17: mod_base = OTHER; note = 2'-Omethylguanosine
  modified_base 18: mod_base = OTHER; note = 2'-Omethylguanosine
  modified_base 19: mod_base = OTHER; note = Adenosine phosphorothiorate
  modified_base 20: mod_base = OTHER; note = 2'-Omethyluridine
  modified_base 21: mod_base = OTHER; note = Adenosine phosphorothiorate
  modified_base 25: mod_base = OTHER; note = 2'-Omethylcytosine
  modified_base 41: mod_base = OTHER; note = 2'-fluorocytosine
  modified_base 42: mod_base = OTHER; note = 2'-Omethyladenosine
  modified_base 43: mod_base = OTHER; note = 2'-Omethylcytosine
  modified_base 44: mod_base = OTHER; note = 2'-fluoroadenosine
  modified_base 49: mod_base = OTHER; note = 2'-Omethylcytosine
  modified_base 50: mod_base = OTHER; note = 2'-Omethylcytosine
  modified_base 51: mod_base = OTHER; note = 2'-Omethylguanosine
  modified_base 52: mod_base = OTHER; note = 2'-Omethylguanosine
  modified_base 53: mod_base = OTHER; note = 2'-Omethylguanosine
  modified_base 54: mod_base = OTHER; note = Uridine phosphorothiorate
  modified_base 55: mod_base = OTHER; note = Uridine phosphorothiorate
  modified_base 61: mod_base = OTHER; note = 2'-Omethylcytosine
  modified_base 65: mod_base = OTHER; note = 2'-Omethylguanosine
  modified_base 73: mod_base = OTHER; note = 2'-Omethylguanosine

SEQ ID NO: 4511 - RNA, 76 nt, synthetic construct; identical to SEQ ID NO: 3325
  source 1..76: mol_type = other RNA
  modified_base 1: mod_base = OTHER; note = 2'-Omethyluridine
  modified_base 13: mod_base = OTHER; note = 2'-Omethylcytosine
  modified_base 17: mod_base = OTHER; note = 2'-Omethylguanosine
  modified_base 18: mod_base = OTHER; note = 2'-Omethylguanosine
  modified_base 25: mod_base = OTHER; note = 2'-Omethylcytosine
  modified_base 33: mod_base = OTHER; note = Uridine phosphorothiorate
  modified_base 34: mod_base = OTHER; note = 2'-Omethyluridine
  modified_base 35: mod_base = OTHER; note = Cytosine phosphorothiorate
  modified_base 37: mod_base = OTHER; note = Adenosine phosphorothiorate
  modified_base 38: mod_base = OTHER; note = Adenosine phosphorothiorate
  modified_base 41: mod_base = OTHER; note = 2'-fluorocytosine
  modified_base 42: mod_base = OTHER; note = 2'-Omethyladenosine
  modified_base 43: mod_base = OTHER; note = 2'-Omethyladenosine
  modified_base 44: mod_base = OTHER; note = 2'-fluoroadenosine
  modified_base 49: mod_base = OTHER; note = 2'-Omethylcytosine
  modified_base 50: mod_base = OTHER; note = 2'-Omethylcytosine
  modified_base 52: mod_base = OTHER; note = 2'-Omethylguanosine
  modified_base 54: mod_base = OTHER; note = Uridine phosphorothiorate
  modified_base 55: mod_base = OTHER; note = Uridine phosphorothiorate
  modified_base 56: mod_base = OTHER; note = 2'-Omethylcytosine
  modified_base 57: mod_base = OTHER; note = Guanosine phosphorothiorate
  modified_base 58: mod_base = OTHER; note = Adenosine phosphorothiorate
  modified_base 59: mod_base = OTHER; note = 2'-Omethylguanosine
  modified_base 61: mod_base = OTHER; note = 2'-Omethylcytosine
  modified_base 65: mod_base = OTHER; note = 2'-Omethylguanosine
  modified_base 73: mod_base = OTHER; note = 2'-Omethylguanosine

SEQ ID NO: 4512 - RNA, 75 nt, synthetic construct; identical to SEQ ID NO: 3306
  source 1..75: mol_type = other RNA
  modified_base 1: mod_base = OTHER; note = 2'-Omethylguanosine
  modified_base 14: mod_base = OTHER; note = 2'-Omethyladenosine
  modified_base 16: mod_base = OTHER; note = 2'-Omethylcytosine
  modified_base 72: mod_base = OTHER; note = 2'-Omethyladenosine

SEQ ID NO: 4513 - RNA, 76 nt, synthetic construct; identical to SEQ ID NO: 625
  source 1..76: mol_type = other RNA
  modified_base 1: mod_base = OTHER; note = 2'-Omethylguanosine
  modified_base 2: mod_base = OTHER; note = 2'-Omethylguanosine
  modified_base 3: mod_base = OTHER; note = 2'-Omethylcytosine
  modified_base 4: mod_base = OTHER; note = 2'-Omethyluridine
  modified_base 5: mod_base = OTHER; note = 2'-Omethylcytosine
  modified_base 6: mod_base = OTHER; note = 2'-Omethylcytosine
  modified_base 10: mod_base = OTHER; note = 2'-Omethylguanosine
  modified_base 11: mod_base = OTHER; note = 2'-Omethylcytosine
  modified_base 12: mod_base = OTHER; note = Guanosine phosphorothiorate
  modified_base 13: mod_base = OTHER; note = 2'-fluorocytosine
  modified_base 14: mod_base = OTHER; note = 2'-Omethyladenosine
  modified_base 15: mod_base = OTHER; note = 2'-fluoroadenosine
  modified_base 16: mod_base = OTHER; note = 2'-Omethyluridine
  modified_base 17: mod_base = OTHER; note = 2'-Omethylguanosine
  modified_base 18: mod_base = OTHER; note = 2'-Omethylguanosine
  modified_base 19: mod_base = OTHER; note = 2'-fluoroadenosine
  modified_base 20: mod_base = OTHER; note = 2'-Omethyluridine
  modified_base 21: mod_base = OTHER; note = 2'-fluoroadenosine
  modified_base 22: mod_base = OTHER; note = 2'-Omethylguanosine
  modified_base 23: mod_base = OTHER; note = 2'-Omethylcytosine
  modified_base 24: mod_base = OTHER; note = 2'-Omethylguanosine
  modified_base 25: mod_base = OTHER; note = Cytosine phosphorothiorate
  modified_base 29: mod_base = OTHER; note = 2'-Omethylguanosine
  modified_base 33: mod_base = OTHER; note = 2'-fluorouridine
  modified_base 35: mod_base = OTHER; note = Cytosine phosphorothiorate
  modified_base 37: mod_base = OTHER; note = Adenosine phosphorothiorate
  modified_base 38: mod_base = OTHER; note = Adenosine phosphorothiorate
  modified_base 40: mod_base = OTHER; note = 2'-fluorouridine
  modified_base 41: mod_base = OTHER; note = 2'-Omethylcytosine
  modified_base 42: mod_base = OTHER; note = 2'-Omethyladenosine
  modified_base 43: mod_base = OTHER; note = 2'-Omethyladenosine
  modified_base 44: mod_base = OTHER; note = Adenosine phosphorothiorate
  modified_base 45: mod_base = OTHER; note = 2'-O-(2-Methoxyethyl) guanosine
  modified_base 46: mod_base = OTHER; note = Guanosine phosphorothiorate
  modified_base 48: mod_base = OTHER; note = 2'-fluorouridine
  modified_base 49: mod_base = OTHER; note = 2'-Omethylcytosine
  modified_base 50: mod_base = OTHER; note = 2'-Omethylcytosine
  modified_base 51: mod_base = OTHER; note = Guanosine phosphorothiorate
  modified_base 52: mod_base = OTHER; note = 2'-Omethylguanosine
  modified_base 53: mod_base = OTHER; note = 2'-Omethylguanosine
  modified_base 54: mod_base = OTHER; note = 2'-Omethyluridine
  modified_base 55: mod_base = OTHER; note = Uridine phosphorothiorate
  modified_base 56: mod_base = OTHER; note = 2'-Omethylcytosine
  modified_base 57: mod_base = OTHER; note = 2'-Omethylguanosine
  modified_base 59: mod_base = OTHER; note = 2'-Omethylguanosine
  modified_base 61: mod_base = OTHER; note = 2'-Omethylcytosine
  modified_base 62: mod_base = OTHER; note = 2'-Omethylcytosine
  modified_base 63: mod_base = OTHER; note = 2'-fluorocytosine
  modified_base 64: mod_base = OTHER; note = 2'-Omethylguanosine
  modified_base 65: mod_base = OTHER; note = 2'-Omethylguanosine
  modified_base 66: mod_base = OTHER; note = 2'-Omethylcytosine
  modified_base 67: mod_base = OTHER; note = 2'-Omethylguanosine
  modified_base 68: mod_base = OTHER; note = 2'-Omethylguanosine
  modified_base 69: mod_base = OTHER; note = 2'-fluoroadenosine
  modified_base 70: mod_base = OTHER; note = 2'-fluoroguanosine
  modified_base 71: mod_base = OTHER; note = 2'-Omethyluridine
  modified_base 73: mod_base = OTHER; note = 2'-Omethylguanosine
  modified_base 74: mod_base = OTHER; note = 2'-Omethylcytosine phosphorothiorate
  modified_base 75: mod_base = OTHER; note = 2'-fluorocytosine phosphorothiorate

SEQ ID NO: 4514 - RNA, 76 nt, synthetic construct; identical to SEQ ID NO: 625
  source 1..76: mol_type = other RNA
  modified_base 1: mod_base = OTHER; note = 2'-Omethylguanosine
  modified_base 2: mod_base = OTHER; note = 2'-Omethylguanosine
  modified_base 3: mod_base = OTHER; note = 2'-Omethylcytosine
  modified_base 4: mod_base = OTHER; note = 2'-Omethyluridine
  modified_base 5: mod_base = OTHER; note = 2'-Omethylcytosine
  modified_base 6: mod_base = OTHER; note = 2'-Omethylcytosine
  modified_base 10: mod_base = OTHER; note = 2'-Omethylguanosine
  modified_base 12: mod_base = OTHER; note = 2'-Omethylguanosine phosphorothiorate
  modified_base 13: mod_base = OTHER; note = 2'-Omethylcytosine
  modified_base 14: mod_base = OTHER; note = 2'-Omethyladenosine
  modified_base 15: mod_base = OTHER; note = 2'-Omethyladenosine
  modified_base 16: mod_base = OTHER; note = 2'-fluorouridine
  modified_base 17: mod_base = OTHER; note = 2'-Omethylguanosine
  modified_base 18: mod_base = OTHER; note = 2'-Omethylguanosine
  modified_base 19: mod_base = OTHER; note = 2'-fluoroadenosine phosphorothiorate
  modified_base 20: mod_base = OTHER; note = 2'-fluorouridine phosphorothiorate
  modified_base 21: mod_base = OTHER; note = 2'-fluoroadenosine phosphorothiorate
  modified_base 22: mod_base = OTHER; note = 2'-fluoroguanosine phosphorothiorate
  modified_base 23: mod_base = OTHER; note = 2'-Omethylcytosine
  modified_base 24: mod_base = OTHER; note = 2'-Omethylguanosine phosphorothiorate
  modified_base 25: mod_base = OTHER; note = 2'-Omethylcytosine
  modified_base 28: mod_base = OTHER; note = 2'-Omethyluridine phosphorothiorate
  modified_base 29: mod_base = OTHER; note = 2'-fluoroguanosine phosphorothiorate
  modified_base 30: mod_base = OTHER; note = 2'-Omethylguanosine phosphorothiorate
  modified_base 31: mod_base = OTHER; note = 2'-fluoroadenosine
  modified_base 33: mod_base = OTHER; note = 2'-fluorouridine
  modified_base 35: mod_base = OTHER; note = Cytosine phosphorothiorate
  modified_base 36: mod_base = OTHER; note = 2'-Omethyladenosine phosphorothiorate
  modified_base 37: mod_base = OTHER; note = Adenosine phosphorothiorate
  modified_base 38: mod_base = OTHER; note = Adenosine phosphorothiorate
  modified_base 40: mod_base = OTHER; note = 2'-Omethyluridine
  modified_base 41: mod_base = OTHER; note = 2'-fluorocytosine
  modified_base 44: mod_base = OTHER; note = 2'-Omethyladenosine
  modified_base 45: mod_base = OTHER; note = 2'-fluoroguanosine
  modified_base 46: mod_base = OTHER; note = 2'-Omethylguanosine phosphorothiorate
  modified_base 48: mod_base = OTHER; note = 2'-fluorouridine
  modified_base 49: mod_base = OTHER; note = 2'-Omethylcytosine
  modified_base 52: mod_base = OTHER; note = 2'-Omethylguanosine
  modified_base 53: mod_base = OTHER; note = 2'-fluoroguanosine
  modified_base 54: mod_base = OTHER; note = Uridine phosphorothiorate
  modified_base 55: mod_base = OTHER; note = Uridine phosphorothiorate
  modified_base 59: mod_base = OTHER; note = 2'-Omethylguanosine
  modified_base 62: mod_base = OTHER; note = 2'-Omethylcytosine phosphorothiorate
  modified_base 63: mod_base = OTHER; note = 2'-fluorocytosine
  modified_base 64: mod_base = OTHER; note = 2'-Omethylguanosine phosphorothiorate
  modified_base 65: mod_base = OTHER; note = 2'-Omethylguanosine phosphorothiorate
  modified_base 66: mod_base = OTHER; note = 2'-Omethylcytosine phosphorothiorate
  modified_base 67: mod_base = OTHER; note = 2'-fluoroguanosine
  modified_base 68: mod_base = OTHER; note = 2'-Omethylguanosine
  modified_base 69: mod_base = OTHER; note = 2'-fluoroadenosine
  modified_base 72: mod_base = OTHER; note = 2'-fluorocytosine phosphorothiorate
  modified_base 73: mod_base = OTHER; note = 2'-Omethylguanosine
  modified_base 74: mod_base = OTHER; note = 2'-fluorocytosine phosphorothiorate
  modified_base 76: mod_base = OTHER; note = 2'-fluoroadenosine

SEQ ID NO: 4515 - RNA, 76 nt, synthetic construct; identical to SEQ ID NO: 3318
  source 1..76: mol_type = other RNA
  modified_base 1: mod_base = OTHER; note = 2'-Omethylcytosine phosphorothiorate
  modified_base 2: mod_base = OTHER; note = 2'-Omethylcytosine phosphorothiorate
  modified_base 12: mod_base = OTHER; note = Uridine phosphorothiorate
  modified_base 22: mod_base = OTHER; note = 2'-fluoroguanosine
  modified_base 26: mod_base = OTHER; note = Guanosine phosphorothiorate
  modified_base 27: mod_base = OTHER; note = Guanosine phosphorothiorate
  modified_base 45: mod_base = OTHER; note = Guanosine phosphorothiorate
  modified_base 63: mod_base = OTHER; note = 2'-fluoroguanosine
  modified_base 74: mod_base = OTHER; note = Cytosine phosphorothiorate
  modified_base 75: mod_base = OTHER; note = 2'-Omethylcytosine phosphorothiorate
  modified_base 76: mod_base = OTHER; note = 2'-Omethyladenosine

SEQ ID NO: 4516 - RNA, 76 nt, synthetic construct; identical to SEQ ID NO: 3318
  source 1..76: mol_type = other RNA
  modified_base 49: mod_base = OTHER; note = 2'-Omethylguanosine
  modified_base 50: mod_base = OTHER; note = 2'-Omethylcytosine
  modified_base 51: mod_base = OTHER; note = 2'-Omethyluridine
  modified_base 52: mod_base = OTHER; note = 2'-Omethylguanosine
  modified_base 53: mod_base = OTHER; note = 2'-Omethylguanosine
  modified_base 61: mod_base = OTHER; note = 2'-Omethylcytosine
  modified_base 62: mod_base = OTHER; note = 2'-Omethylcytosine
  modified_base 63: mod_base = OTHER; note = 2'-Omethylguanosine
  modified_base 64: mod_base = OTHER; note = 2'-Omethylguanosine
  modified_base 65: mod_base = OTHER; note = 2'-Omethylcytosine

SEQ ID NO: 4517 - RNA, 75 nt, synthetic construct; identical to SEQ ID NO: 3336
  source 1..75: mol_type = other RNA
  modified_base 1: mod_base = OTHER; note = 2'-Omethylcytosine
  modified_base 3: mod_base = OTHER; note = 2'-Omethyluridine
  modified_base 10: mod_base = OTHER; note = 2'-Omethylcytosine
  modified_base 16: mod_base = OTHER; note = 2'-fluorocytosine
  modified_base 17: mod_base = OTHER; note = 2'-fluoroguanosine
  modified_base 19: mod_base = OTHER; note = 2'-fluorouridine
  modified_base 21: mod_base = OTHER; note = 2'-Omethylguanosine
  modified_base 25: mod_base = OTHER; note = Adenosine phosphorothiorate
  modified_base 26: mod_base = OTHER; note = Uridine phosphorothiorate
  modified_base 28: mod_base = OTHER; note = 2'-fluoroadenosine phosphorothiorate
  modified_base 36: mod_base = OTHER; note = 2'-fluoroadenosine phosphorothiorate
  modified_base 40: mod_base = OTHER; note = Uridine phosphorothiorate
  modified_base 46: mod_base = OTHER; note = 2'-fluorouridine
  modified_base 47: mod_base = OTHER; note = 2'-fluorocytosine
  modified_base 48: mod_base = OTHER; note = 2'-Omethylcytosine
  modified_base 53: mod_base = OTHER; note = Uridine phosphorothiorate
  modified_base 55: mod_base = OTHER; note = Cytosine phosphorothiorate
  modified_base 56: mod_base = OTHER; note = 2'-Omethyladenosine phosphorothiorate
  modified_base 67: mod_base = OTHER; note = Cytosine phosphorothiorate
  modified_base 73: mod_base = OTHER; note = Cytosine phosphorothiorate
  modified_base 74: mod_base = OTHER; note = 2'-Omethylcytosine

SEQ ID NO: 4518 - RNA, 85 nt, synthetic construct; identical to SEQ ID NO: 3310
  source 1..85: mol_type = other RNA
  modified_base 1: mod_base = OTHER; note = 2'-fluorocytosine
  modified_base 34: mod_base = OTHER; note = Uridine phosphorothiorate
  modified_base 36: mod_base = OTHER; note = 2'-fluoroguanosine
  modified_base 45: mod_base = OTHER; note = 2'-Omethylguanosine
  modified_base 57: mod_base = OTHER; note = 2'-fluorocytosine
  modified_base 59: mod_base = OTHER; note = 2'-Omethyluridine
  modified_base 71: mod_base = OTHER; note = 2'-fluorocytosine
  modified_base 75: mod_base = OTHER; note = Uridine phosphorothiorate

SEQ ID NO: 4519 - RNA, 86 nt, synthetic construct; identical to SEQ ID NO: 3290
  source 1..86: mol_type = other RNA
  modified_base 1: mod_base = OTHER; note = 2'-Omethyladenosine phosphorothiorate
  modified_base 2: mod_base = OTHER; note = 2'-Omethylcytosine phosphorothiorate
  modified_base 10: mod_base = OTHER; note = 2'-Omethylguanosine
  modified_base 13: mod_base = OTHER; note = 2'-Omethylguanosine
  modified_base 16: mod_base = OTHER; note = Uridine phosphorothiorate
  modified_base 17: mod_base = OTHER; note = Guanosine phosphorothiorate
  modified_base 18: mod_base = OTHER; note = 2'-Omethylguanosine phosphorothiorate
  modified_base 19: mod_base = OTHER; note = Uridine phosphorothiorate
  modified_base 20: mod_base = OTHER; note = 2'-Omethyluridine phosphorothiorate
  modified_base 25: mod_base = OTHER; note = 2'-Omethylcytosine
  modified_base 29: mod_base = OTHER; note = 2'-Omethylguanosine
  modified_base 33: mod_base = OTHER; note = 2'-fluorouridine
  modified_base 35: mod_base = OTHER; note = Cytosine phosphorothiorate
  modified_base 37: mod_base = OTHER; note = Guanosine phosphorothiorate
  modified_base 38: mod_base = OTHER; note = Adenosine phosphorothiorate
  modified_base 41: mod_base = OTHER; note = 2'-fluorocytosine
  modified_base 42: mod_base = OTHER; note = Adenosine phosphorothiorate
  modified_base 43: mod_base = OTHER; note = 2'-Omethyladenosine
  modified_base 44: mod_base = OTHER; note = 2'-fluorouridine
  modified_base 57: mod_base = OTHER; note = Guanosine phosphorothiorate
  modified_base 60: mod_base = OTHER; note = 2'-Omethyluridine
  modified_base 62: mod_base = OTHER; note = 2'-Omethylguanosine
  modified_base 64: mod_base = OTHER; note = Uridine phosphorothiorate
  modified_base 65: mod_base = OTHER; note = Uridine phosphorothiorate
  modified_base 66: mod_base = OTHER; note = 2'-Omethylcytosine
  modified_base 67: mod_base = OTHER; note = Guanosine phosphorothiorate
  modified_base 72: mod_base = OTHER; note = 2'-Omethylcytosine
  modified_base 73: mod_base = OTHER; note = 2'-fluorocytosine
  modified_base 75: mod_base = OTHER; note = 2'-Omethylcytosine
  modified_base 81: mod_base = OTHER; note = 2'-Omethylguanosine
  modified_base 83: mod_base = OTHER; note = 2'-Omethyladenosine

SEQ ID NO: 4520 - RNA, 75 nt, synthetic construct; identical to SEQ ID NO: 3306
  source 1..75: mol_type = other RNA
  modified_base 1: mod_base = OTHER; note = 2'-Omethylguanosine
  modified_base 2: mod_base = OTHER; note = 2'-Omethyladenosine
  modified_base 3: mod_base = OTHER; note = 2'-Omethylcytosine
  modified_base 4: mod_base = OTHER; note = 2'-Omethylcytosine
  modified_base 5: mod_base = OTHER; note = 2'-Omethyluridine
  modified_base 6: mod_base = OTHER; note = 2'-Omethylcytosine
  modified_base 10: mod_base = OTHER; note = 2'-Omethylguanosine
  modified_base 11: mod_base = OTHER; note = 2'-Omethylcytosine
  modified_base 12: mod_base = OTHER; note = 2'-Omethylguanosine
  modified_base 13: mod_base = OTHER; note = 2'-Omethylcytosine
  modified_base 14: mod_base = OTHER; note = 2'-Omethyladenosine
  modified_base 15: mod_base = OTHER; note = 2'-Omethyladenosine
  modified_base 16: mod_base = OTHER; note = 2'-Omethylcytosine
  modified_base 17: mod_base = OTHER; note = 2'-Omethylguanosine
  modified_base 18: mod_base = OTHER; note = 2'-Omethylguanosine
  modified_base 21: mod_base = OTHER; note = 2'-Omethylguanosine
  modified_base 22: mod_base = OTHER; note = 2'-Omethylcytosine
  modified_base 23: mod_base = OTHER; note = 2'-Omethylguanosine
  modified_base 24: mod_base = OTHER; note = 2'-Omethylcytosine
  modified_base 40: mod_base = OTHER; note = 2'-Omethyladenosine
  modified_base 41: mod_base = OTHER; note = 2'-Omethylguanosine
  modified_base 42: mod_base = OTHER; note = 2'-Omethyladenosine
  modified_base 43: mod_base = OTHER; note = 2'-Omethyladenosine
  modified_base 48: mod_base = OTHER; note = 2'-Omethylguanosine
  modified_base 49: mod_base = OTHER; note = 2'-Omethylcytosine
  modified_base 51: mod_base = OTHER; note = 2'-Omethyluridine
  modified_base 53: mod_base = OTHER; note = 2'-Omethyluridine
  modified_base 54: mod_base = OTHER; note = Uridine phosphorothiorate
  modified_base 55: mod_base = OTHER; note = 2'-Omethylcytosine
  modified_base 56: mod_base = OTHER; note = 2'-fluoroadenosine
  modified_base 58: mod_base = OTHER; note = 2'-Omethyladenosine
  modified_base 60: mod_base = OTHER; note = 2'-Omethylcytosine
  modified_base 64: mod_base = OTHER; note = 2'-Omethyluridine
  modified_base 72: mod_base = OTHER; note = 2'-Omethyladenosine

SEQ ID NO: 4521 - RNA, 76 nt, synthetic construct; identical to SEQ ID NO: 625
  source 1..76: mol_type = other RNA
  modified_base 1: mod_base = OTHER; note = 2'-Omethylguanosine
  modified_base 40: mod_base = OTHER; note = 2'-fluorouridine
  modified_base 41: mod_base = OTHER; note = 2'-O-(2-Methoxyethyl) 5-methylcytosine
  modified_base 42: mod_base = OTHER; note = 2'-Omethyladenosine
  modified_base 43: mod_base = OTHER; note = 2'-Omethyladenosine phosphorothiorate
  modified_base 73: mod_base = OTHER; note = 2'-Omethylguanosine

SEQ ID NO: 4522 - RNA, 75 nt, synthetic construct; identical to SEQ ID NO: 3306
  source 1..75: mol_type = other RNA
  modified_base 1: mod_base = OTHER; note = 2'-Omethylguanosine phosphorothiorate
  modified_base 2: mod_base = OTHER; note = 2'-Omethyladenosine phosphorothiorate
  modified_base 74: mod_base = OTHER; note = 2'-Omethylcytosine phosphorothiorate
  modified_base 75: mod_base = OTHER; note = 2'-Omethyladenosine

SEQ ID NO: 4523 - RNA, 85 nt, synthetic construct; identical to SEQ ID NO: 3310
  source 1..85: mol_type = other RNA
  modified_base 1: mod_base = OTHER; note = 2'-Omethylcytosine
  modified_base 11: mod_base = OTHER; note = Cytosine phosphorothiorate
  modified_base 26: mod_base = OTHER; note = 2'-fluorouridine
  modified_base 30: mod_base = OTHER; note = 2'-fluoroadenosine
  modified_base 36: mod_base = OTHER; note = Guanosine phosphorothiorate
  modified_base 44: mod_base = OTHER; note = Guanosine phosphorothiorate
  modified_base 46: mod_base = OTHER; note = 2'-Omethyladenosine
  modified_base 55: mod_base = OTHER; note = 2'-Omethylcytosine
  modified_base 58: mod_base = OTHER; note = Guanosine phosphorothiorate
  modified_base 76: mod_base = OTHER; note = 2'-fluorocytosine
  modified_base 84: mod_base = OTHER; note = 2'-Omethylcytosine
  modified_base 85: mod_base = OTHER; note = 2'-Omethyladenosine

SEQ ID NO: 4524 - RNA, 76 nt, synthetic construct; identical to SEQ ID NO: 625
  source 1..76: mol_type = other RNA
  modified_base 1: mod_base = OTHER; note = 2'-Omethylguanosine phosphorothiorate
  modified_base 3: mod_base = OTHER; note = 2'-fluorocytosine
  modified_base 5: mod_base = OTHER; note = 2'-fluorocytosine
  modified_base 6: mod_base = OTHER; note = 2'-Omethylcytosine
  modified_base 10: mod_base = OTHER; note = 2'-Omethylguanosine
  modified_base 13: mod_base = OTHER; note = Cytosine phosphorothiorate
  modified_base 14: mod_base = OTHER; note = 2'-Omethyladenosine
  modified_base 15: mod_base = OTHER; note = 2'-Omethyladenosine
  modified_base 16: mod_base = OTHER; note = Uridine phosphorothiorate
  modified_base 17: mod_base = OTHER; note = 2'-Omethylguanosine
  modified_base 23: mod_base = OTHER; note = 2'-Omethylcytosine
  modified_base 24: mod_base = OTHER; note = 2'-fluoroguanosine
  modified_base 25: mod_base = OTHER; note = 2'-fluorocytosine
  modified_base 27: mod_base = OTHER; note = 2'-Omethyluridine
  modified_base 29: mod_base = OTHER; note = 2'-fluoroguanosine phosphorothiorate
  modified_base 31: mod_base = OTHER; note = 2'-Omethyladenosine
  modified_base 33: mod_base = OTHER; note = 2'-fluorouridine
  modified_base 38: mod_base = OTHER; note = 2'-Omethyladenosine
  modified_base 40: mod_base = OTHER; note = Uridine phosphorothiorate
  modified_base 41: mod_base = OTHER; note = 2'-fluorocytosine
  modified_base 43: mod_base = OTHER; note = 2'-fluoroadenosine
  modified_base 47: mod_base = OTHER; note = 2'-Omethyluridine
  modified_base 52: mod_base = OTHER; note = 2'-fluoroguanosine
  modified_base 53: mod_base = OTHER; note = 2'-Omethylguanosine
  modified_base 59: mod_base = OTHER; note = Guanosine phosphorothiorate
  modified_base 62: mod_base = OTHER; note = Cytosine phosphorothiorate
  modified_base 64: mod_base = OTHER; note = Guanosine phosphorothiorate
  modified_base 65: mod_base = OTHER; note = 2'-fluoroguanosine
  modified_base 67: mod_base = OTHER; note = 2'-fluoroguanosine
  modified_base 68: mod_base = OTHER; note = 2'-fluoroguanosine
  modified_base 69: mod_base = OTHER; note = 2'-fluoroadenosine
  modified_base 70: mod_base = OTHER; note = 2'-fluoroguanosine
  modified_base 73: mod_base = OTHER; note = 2'-fluoroguanosine
  modified_base 74: mod_base = OTHER; note = 2'-fluorocytosine
  modified_base 75: mod_base = OTHER; note = Cytosine phosphorothiorate

SEQ ID NO: 4525 - RNA, 76 nt, synthetic construct; identical to SEQ ID NO: 3295
  source 1..76: mol_type = other RNA
  modified_base 1: mod_base = OTHER; note = 2'-Omethylcytosine phosphorothiorate
  modified_base 2: mod_base = OTHER; note = 2'-Omethylcytosine
  modified_base 11: mod_base = OTHER; note = 2'-fluorocytosine
  modified_base 23: mod_base = OTHER; note = 2'-fluoroadenosine
  modified_base 52: mod_base = OTHER; note = 2'-fluoroguanosine phosphorothiorate
  modified_base 54: mod_base = OTHER; note = 2'-fluorouridine phosphorothiorate
  modified_base 74: mod_base = OTHER; note = Cytosine phosphorothiorate
  modified_base 76: mod_base = OTHER; note = 2'-fluoroadenosine

SEQ ID NO: 4526 - RNA, 76 nt, synthetic construct; identical to SEQ ID NO: 625
  source 1..76: mol_type = other RNA
  modified_base 1: mod_base = OTHER; note = 2'-Omethylguanosine
  modified_base 10: mod_base = OTHER; note = 2'-Omethylguanosine
  modified_base 13: mod_base = OTHER; note = 2'-Omethylcytosine
  modified_base 17: mod_base = OTHER; note = Guanosine phosphorothiorate
  modified_base 18: mod_base = OTHER; note = 2'-Omethylguanosine
  modified_base 19: mod_base = OTHER; note = Adenosine phosphorothiorate
  modified_base 20: mod_base = OTHER; note = 2'-Omethyluridine
  modified_base 25: mod_base = OTHER; note = 2'-Omethylcytosine
  modified_base 29: mod_base = OTHER; note = 2'-Omethylguanosine
  modified_base 33: mod_base = OTHER; note = 2'-fluorouridine
  modified_base 35: mod_base = OTHER; note = Cytosine phosphorothiorate
  modified_base 37: mod_base = OTHER; note = Adenosine phosphorothiorate
  modified_base 38: mod_base = OTHER; note = Adenosine phosphorothiorate
  modified_base 43: mod_base = OTHER; note = 2'-Omethyladenosine
  modified_base 44: mod_base = OTHER; note = 2'-fluoroadenosine
  modified_base 46: mod_base = OTHER; note = Guanosine phosphorothiorate
  modified_base 50: mod_base = OTHER; note = 2'-Omethylcytosine
  modified_base 52: mod_base = OTHER; note = 2'-Omethylguanosine
  modified_base 54: mod_base = OTHER; note = Uridine phosphorothiorate
  modified_base 55: mod_base = OTHER; note = Uridine phosphorothiorate
  modified_base 56: mod_base = OTHER; note = 2'-Omethylcytosine
  modified_base 57: mod_base = OTHER; note = Guanosine phosphorothiorate
  modified_base 62: mod_base = OTHER; note = 2'-Omethylcytosine
  modified_base 63: mod_base = OTHER; note = 2'-fluorocytosine
  modified_base 65: mod_base = OTHER; note = 2'-Omethylguanosine
  modified_base 71: mod_base = OTHER; note = 2'-Omethyluridine phosphorothiorate
  modified_base 73: mod_base = OTHER; note = 2'-Omethylguanosine

SEQ ID NO: 4527 - RNA, 76 nt, synthetic construct; identical to SEQ ID NO: 625
  source 1..76: mol_type = other RNA
  modified_base 1: mod_base = OTHER; note = 2'-Omethylguanosine phosphorothiorate
  modified_base 2: mod_base = OTHER; note = 2'-Omethylguanosine
  modified_base 3: mod_base = OTHER; note = 2'-Omethylcytosine
  modified_base 4: mod_base = OTHER; note = 2'-Omethyluridine
  modified_base 5: mod_base = OTHER; note = 2'-Omethylcytosine
  modified_base 6: mod_base = OTHER; note = 2'-Omethylcytosine
  modified_base 14: mod_base = OTHER; note = 2'-Omethyladenosine
  modified_base 15: mod_base = OTHER; note = 2'-fluoroadenosine
  modified_base 16: mod_base = OTHER; note = 2'-Omethyluridine
  modified_base 17: mod_base = OTHER; note = 2'-Omethylguanosine
  modified_base 18: mod_base = OTHER; note = 2'-Omethylguanosine
  modified_base 19: mod_base = OTHER; note = 2'-fluoroadenosine
  modified_base 20: mod_base = OTHER; note = 2'-Omethyluridine
  modified_base 40: mod_base = OTHER; note = 2'-fluorouridine
  modified_base 41: mod_base = OTHER; note = 2'-fluorocytosine
  modified_base 42: mod_base = OTHER; note = 2'-fluoroadenosine
  modified_base 43: mod_base = OTHER; note = 2'-fluoroadenosine
  modified_base 54: mod_base = OTHER; note = 2'-Omethyluridine
  modified_base 56: mod_base = OTHER; note = 2'-Omethylcytosine
  modified_base 57: mod_base = OTHER; note = 2'-fluoroguanosine
  modified_base 59: mod_base = OTHER; note = 2'-Omethylguanosine
  modified_base 73: mod_base = OTHER; note = 2'-Omethylguanosine

SEQ ID NO: 4528 - RNA, 76 nt, synthetic construct; identical to SEQ ID NO: 625
  source 1..76: mol_type = other RNA
  modified_base 1: mod_base = OTHER; note = Guanosine phosphorothiorate
  modified_base 2: mod_base = OTHER; note = 2'-fluoroguanosine
  modified_base 3: mod_base = OTHER; note = 2'-Omethylcytosine phosphorothiorate
  modified_base 10: mod_base = OTHER; note = Guanosine phosphorothiorate
  modified_base 11: mod_base = OTHER; note = 2'-fluorocytosine
  modified_base 14: mod_base = OTHER; note = 2'-Omethyladenosine
  modified_base 15: mod_base = OTHER; note = 2'-Omethyladenosine
  modified_base 19: mod_base = OTHER; note = Adenosine phosphorothiorate
  modified_base 20: mod_base = OTHER; note = 2'-fluorouridine
  modified_base 23: mod_base = OTHER; note = Cytosine phosphorothiorate
  modified_base 25: mod_base = OTHER; note = 2'-Omethylcytosine
  modified_base 26: mod_base = OTHER; note = 2'-fluoroadenosine
  modified_base 27: mod_base = OTHER; note = 2'-Omethyluridine phosphorothiorate
  modified_base 28: mod_base = OTHER; note = 2'-fluorouridine
  modified_base 29: mod_base = OTHER; note = 2'-Omethylguanosine
  modified_base 31: mod_base = OTHER; note = 2'-fluoroadenosine
  modified_base 32: mod_base = OTHER; note = 2'-fluorocytosine
  modified_base 33: mod_base = OTHER; note = Uridine phosphorothiorate
  modified_base 34: mod_base = OTHER; note = 2'-Omethyluridine
  modified_base 36: mod_base = OTHER; note = Adenosine phosphorothiorate
  modified_base 38: mod_base = OTHER; note = 2'-fluoroadenosine
  modified_base 48: mod_base = OTHER; note = 2'-Omethyluridine
  modified_base 50: mod_base = OTHER; note = 2'-Omethylcytosine
  modified_base 52: mod_base = OTHER; note = 2'-Omethylguanosine
  modified_base 53: mod_base = OTHER; note = Guanosine phosphorothiorate
  modified_base 54: mod_base = OTHER; note = 2'-Omethyluridine
  modified_base 56: mod_base = OTHER; note = 2'-fluorocytosine
  modified_base 57: mod_base = OTHER; note = 2'-Omethylguanosine
  modified_base 61: mod_base = OTHER; note = Cytosine phosphorothiorate
  modified_base 65: mod_base = OTHER; note = 2'-fluoroguanosine
  modified_base 67: mod_base = OTHER; note = Guanosine phosphorothiorate
  modified_base 70: mod_base = OTHER; note = 2'-Omethylguanosine
  modified_base 72: mod_base = OTHER; note = 2'-fluorocytosine
  modified_base 73: mod_base = OTHER; note = 2'-fluoroguanosine
  modified_base 75: mod_base = OTHER; note = 2'-fluorocytosine
  modified_base 76: mod_base = OTHER; note = 2'-Omethyladenosine

SEQ ID NO: 4529 - RNA, 76 nt, synthetic construct; identical to SEQ ID NO: 625
  source 1..76: mol_type = other RNA
  modified_base 1: mod_base = OTHER; note = Guanosine phosphorothiorate
  modified_base 2: mod_base = OTHER; note = 2'-Omethylguanosine
  modified_base 3: mod_base = OTHER; note = Cytosine phosphorothiorate
  modified_base 10: mod_base = OTHER; note = 2'-Omethylguanosine
  modified_base 11: mod_base = OTHER; note = 2'-Omethylcytosine
  modified_base 14: mod_base = OTHER; note = 2'-Omethyladenosine
  modified_base 15: mod_base = OTHER; note = 2'-Omethyladenosine
  modified_base 17: mod_base = OTHER; note = 2'-Omethylguanosine phosphorothiorate
  modified_base 18: mod_base = OTHER; note = Guanosine phosphorothiorate
  modified_base 21: mod_base = OTHER; note = Adenosine phosphorothiorate
  modified_base 22: mod_base = OTHER; note = 2'-Omethylguanosine
  modified_base 23: mod_base = OTHER; note = Cytosine phosphorothiorate
  modified_base 24: mod_base = OTHER; note = 2'-fluoroguanosine
  modified_base 26: mod_base = OTHER; note = 2'-Omethyladenosine
  modified_base 27: mod_base = OTHER; note = 2'-Omethyluridine
  modified_base 30: mod_base = OTHER; note = 2'-fluoroguanosine phosphorothiorate
  modified_base 32: mod_base = OTHER; note = 2'-fluorocytosine
  modified_base 33: mod_base = OTHER; note = 2'-fluorouridine
  modified_base 39: mod_base = OTHER; note = 2'-fluorouridine
  modified_base 42: mod_base = OTHER; note = 2'-fluoroadenosine
  modified_base 43: mod_base = OTHER; note = 2'-fluoroadenosine
  modified_base 46: mod_base = OTHER; note = 2'-Omethylguanosine
  modified_base 49: mod_base = OTHER; note = 2'-fluorocytosine
  modified_base 53: mod_base = OTHER; note = 2'-fluoroguanosine phosphorothiorate
  modified_base 54: mod_base = OTHER; note = 2'-fluorouridine
  modified_base 55: mod_base = OTHER; note = Uridine phosphorothiorate
  modified_base 56: mod_base = OTHER; note = 2'-fluorocytosine
  modified_base 59: mod_base = OTHER; note = 2'-Omethylguanosine
  modified_base 61: mod_base = OTHER; note = 2'-fluorocytosine
  modified_base 64: mod_base = OTHER; note = 2'-fluoroguanosine phosphorothiorate
  modified_base 65: mod_base = OTHER; note = 2'-fluoroguanosine phosphorothiorate
  modified_base 66: mod_base = OTHER; note = 2'-fluorocytosine
  modified_base 67: mod_base = OTHER; note = 2'-Omethylguanosine
  modified_base 69: mod_base = OTHER; note = 2'-fluoroadenosine
  modified_base 71: mod_base = OTHER; note = Uridine phosphorothiorate
  modified_base 73: mod_base = OTHER; note = 2'-fluoroguanosine

SEQ ID NO: 4530 - RNA, 85 nt, synthetic construct; identical to SEQ ID NO: 3297
  source 1..85: mol_type = other RNA
  modified_base 1: mod_base = OTHER; note = 2'-Omethylguanosine
  modified_base 2: mod_base = OTHER; note = 2'-Omethylcytosine
  modified_base 3: mod_base = OTHER; note = 2'-Omethyluridine
  modified_base 4: mod_base = OTHER; note = 2'-Omethylguanosine
  modified_base 5: mod_base = OTHER; note = 2'-Omethyluridine
  modified_base 6: mod_base = OTHER; note = 2'-Omethylguanosine
  modified_base 14: mod_base = OTHER; note = 2'-Omethyladenosine
  modified_base 15: mod_base = OTHER; note = 2'-Omethylguanosine
  modified_base 16: mod_base = OTHER; note = 2'-Omethyluridine
  modified_base 17: mod_base = OTHER; note = 2'-Omethylguanosine
  modified_base 18: mod_base = OTHER; note = 2'-Omethylguanosine
  modified_base 20: mod_base = OTHER; note = 2'-Omethyluridine
  modified_base 25: mod_base = OTHER; note = 2'-Omethylcytosine
  modified_base 33: mod_base = OTHER; note = 2'-fluorouridine
  modified_base 35: mod_base = OTHER; note = Cytosine phosphorothiorate
  modified_base 37: mod_base = OTHER; note = Adenosine phosphorothiorate
  modified_base 38: mod_base = OTHER; note = Adenosine phosphorothiorate
  modified_base 41: mod_base = OTHER; note = 2'-Omethylcytosine
  modified_base 42: mod_base = OTHER; note = 2'-Omethyladenosine
  modified_base 43: mod_base = OTHER; note = 2'-Omethyladenosine
  modified_base 44: mod_base = OTHER; note = 2'-fluorouridine
  modified_base 58: mod_base = OTHER; note = 2'-Omethylguanosine
  modified_base 59: mod_base = OTHER; note = 2'-Omethylcytosine
  modified_base 61: mod_base = OTHER; note = 2'-Omethylguanosine
  modified_base 63: mod_base = OTHER; note = 2'-Omethyluridine
  modified_base 64: mod_base = OTHER; note = Uridine phosphorothiorate
  modified_base 65: mod_base = OTHER; note = 2'-Omethylcytosine
  modified_base 66: mod_base = OTHER; note = 2'-fluoroguanosine
  modified_base 68: mod_base = OTHER; note = 2'-Omethyladenosine
  modified_base 70: mod_base = OTHER; note = 2'-Omethylcytosine
  modified_base 74: mod_base = OTHER; note = 2'-Omethylcytosine
  modified_base 82: mod_base = OTHER; note = 2'-Omethylguanosine

SEQ ID NO: 4531 - RNA, 76 nt, synthetic construct; identical to SEQ ID NO: 625
  source 1..76: mol_type = other RNA
  modified_base 1: mod_base = OTHER; note = Guanosine phosphorothiorate
  modified_base 2: mod_base = OTHER; note = 2'-Omethylguanosine phosphorothiorate
  modified_base 3: mod_base = OTHER; note = 2'-Omethylcytosine
  modified_base 4: mod_base = OTHER; note = 2'-fluorouridine
  modified_base 7: mod_base = OTHER; note = Guanosine phosphorothiorate
  modified_base 9: mod_base = OTHER; note = Guanosine phosphorothiorate
  modified_base 10: mod_base = OTHER; note = 2'-Omethylguanosine
  modified_base 12: mod_base = OTHER; note = 2'-Omethylguanosine phosphorothiorate
  modified_base 13: mod_base = OTHER; note = 2'-Omethylcytosine
  modified_base 15: mod_base = OTHER; note = 2'-Omethyladenosine
  modified_base 17: mod_base = OTHER; note = Guanosine phosphorothiorate
  modified_base 18: mod_base = OTHER; note = Guanosine phosphorothiorate
  modified_base 19: mod_base = OTHER; note = Adenosine phosphorothiorate
  modified_base 21: mod_base = OTHER; note = Adenosine phosphorothiorate
  modified_base 22: mod_base = OTHER; note = 2'-fluoroguanosine phosphorothiorate
  modified_base 23: mod_base = OTHER; note = 2'-fluorocytosine
  modified_base 28: mod_base = OTHER; note = 2'-Omethyluridine
  modified_base 30: mod_base = OTHER; note = 2'-fluoroguanosine
  modified_base 40: mod_base = OTHER; note = Uridine phosphorothiorate
  modified_base 42: mod_base = OTHER; note = 2'-fluoroadenosine
  modified_base 44: mod_base = OTHER; note = 2'-fluoroadenosine
  modified_base 45: mod_base = OTHER; note = 2'-Omethylguanosine
  modified_base 47: mod_base = OTHER; note = Uridine phosphorothiorate
  modified_base 48: mod_base = OTHER; note = 2'-Omethyluridine
  modified_base 49: mod_base = OTHER; note = 2'-Omethylcytosine
  modified_base 54: mod_base = OTHER; note = Uridine phosphorothiorate
  modified_base 56: mod_base = OTHER; note = Cytosine phosphorothiorate
  modified_base 58: mod_base = OTHER; note = 2'-fluoroadenosine
  modified_base 63: mod_base = OTHER; note = 2'-fluorocytosine
  modified_base 64: mod_base = OTHER; note = Guanosine phosphorothiorate
  modified_base 66: mod_base = OTHER; note = 2'-fluorocytosine
  modified_base 67: mod_base = OTHER; note = Guanosine phosphorothiorate
  modified_base 71: mod_base = OTHER; note = 2'-fluorouridine phosphorothiorate
  modified_base 72: mod_base = OTHER; note = 2'-fluorocytosine phosphorothiorate
  modified_base 73: mod_base = OTHER; note = 2'-Omethylguanosine

SEQ ID NO: 4532 - RNA, 76 nt, synthetic construct; identical to SEQ ID NO: 625
  source 1..76: mol_type = other RNA
  modified_base 1: mod_base = OTHER; note = 2'-Omethylguanosine phosphorothiorate
  modified_base 2: mod_base = OTHER; note = 2'-Omethylguanosine phosphorothiorate
  modified_base 3: mod_base = OTHER; note = 2'-Omethylcytosine phosphorothiorate
  modified_base 4: mod_base = OTHER; note = 2'-Omethyluridine phosphorothiorate
  modified_base 5: mod_base = OTHER; note = 2'-Omethylcytosine phosphorothiorate
  modified_base 6: mod_base = OTHER; note = 2'-Omethylcytosine phosphorothiorate
  modified_base 22: mod_base = OTHER; note = 2'-Omethylguanosine
  modified_base 23: mod_base = OTHER; note = 2'-Omethylcytosine
  modified_base 24: mod_base = OTHER; note = 2'-Omethylguanosine
  modified_base 25: mod_base = OTHER; note = 2'-Omethylcytosine
  modified_base 49: mod_base = OTHER; note = 2'-Omethylcytosine
  modified_base 50: mod_base = OTHER; note = 2'-Omethylcytosine
  modified_base 51: mod_base = OTHER; note = 2'-Omethylguanosine
  modified_base 52: mod_base = OTHER; note = 2'-Omethylguanosine
  modified_base 53: mod_base = OTHER; note = 2'-Omethylguanosine
  modified_base 54: mod_base = OTHER; note = Uridine phosphorothiorate
  modified_base 55: mod_base = OTHER; note = Uridine phosphorothiorate
  modified_base 56: mod_base = OTHER; note = Cytosine phosphorothiorate
  modified_base 57: mod_base = OTHER; note = Guanosine phosphorothiorate
  modified_base 61: mod_base = OTHER; note = 2'-Omethylcytosine
  modified_base 62: mod_base = OTHER; note = 2'-Omethylcytosine
  modified_base 63: mod_base = OTHER; note = 2'-Omethylcytosine
  modified_base 64: mod_base = OTHER; note = 2'-Omethylguanosine
  modified_base 65: mod_base = OTHER; note = 2'-Omethylguanosine
  modified_base 66: mod_base = OTHER; note = 2'-Omethylcytosine
  modified_base 67: mod_base = OTHER; note = 2'-Omethylguanosine
  modified_base 68: mod_base = OTHER; note = 2'-Omethylguanosine
  modified_base 69: mod_base = OTHER; note = 2'-Omethyladenosine

SEQ ID NO: 4533 - RNA, 76 nt, synthetic construct; identical to SEQ ID NO: 625
  source 1..76: mol_type = other RNA
  modified_base 27: mod_base = OTHER; note = 2'-fluorouridine
  modified_base 28: mod_base = OTHER; note = 2'-fluorouridine
  modified_base 29: mod_base = OTHER; note = 2'-fluoroguanosine
  modified_base 30: mod_base = OTHER; note = 2'-fluoroguanosine
  modified_base 31: mod_base = OTHER; note = 2'-fluoroadenosine

SEQ ID NO: 4534 - RNA, 76 nt, synthetic construct; identical to SEQ ID NO: 625
  source 1..76: mol_type = other RNA
  modified_base 2: mod_base = OTHER; note = 2'-fluoroguanosine
  modified_base 4: mod_base = OTHER; note = Uridine phosphorothiorate
  modified_base 5: mod_base = OTHER; note = Cytosine phosphorothiorate
  modified_base 6: mod_base = OTHER; note = 2'-Omethylcytosine phosphorothiorate
  modified_base 11: mod_base = OTHER; note = 2'-fluorocytosine phosphorothiorate
  modified_base 17: mod_base = OTHER; note = Guanosine phosphorothiorate
  modified_base 18: mod_base = OTHER; note = 2'-Omethylguanosine
  modified_base 20: mod_base = OTHER; note = 2'-Omethyluridine
  modified_base 21: mod_base = OTHER; note = Adenosine phosphorothiorate
  modified_base 23: mod_base = OTHER; note = 2'-Omethylcytosine
  modified_base 26: mod_base = OTHER; note = Adenosine phosphorothiorate
  modified_base 27: mod_base = OTHER; note = 2'-fluorouridine
  modified_base 28: mod_base = OTHER; note = 2'-fluorouridine
  modified_base 29: mod_base = OTHER; note = 2'-fluoroguanosine phosphorothiorate
  modified_base 30: mod_base = OTHER; note = 2'-fluoroguanosine
  modified_base 31: mod_base = OTHER; note = 2'-fluoroadenosine
  modified_base 40: mod_base = OTHER; note = 2'-fluorouridine
  modified_base 44: mod_base = OTHER; note = Adenosine phosphorothiorate
  modified_base 45: mod_base = OTHER; note = 2'-fluoroguanosine
  modified_base 50: mod_base = OTHER; note = 2'-fluorocytosine
  modified_base 52: mod_base = OTHER; note = 2'-Omethylguanosine
  modified_base 55: mod_base = OTHER; note = Uridine phosphorothiorate
  modified_base 57: mod_base = OTHER; note = 2'-Omethylguanosine
  modified_base 58: mod_base = OTHER; note = 2'-fluoroadenosine
  modified_base 60: mod_base = OTHER; note = 2'-Omethyluridine
  modified_base 61: mod_base = OTHER; note = 2'-Omethylcytosine
  modified_base 62: mod_base = OTHER; note = 2'-Omethylcytosine
  modified_base 63: mod_base = OTHER; note = 2'-Omethylcytosine
  modified_base 66: mod_base = OTHER; note = Cytosine phosphorothiorate
  modified_base 69: mod_base = OTHER; note = 2'-Omethyladenosine
  modified_base 72: mod_base = OTHER; note = Cytosine phosphorothiorate
  modified_base 74: mod_base = OTHER; note = 2'-fluorocytosine phosphorothiorate
  modified_base 75: mod_base = OTHER; note = 2'-Omethylcytosine
  modified_base 76: mod_base = OTHER; note = 2'-Omethyladenosine

SEQ ID NO: 4535 - RNA, 85 nt, synthetic construct; identical to SEQ ID NO: 3310
  source 1..85: mol_type = other RNA
  modified_base 1: mod_base = OTHER; note = 2'-Omethylcytosine
  modified_base 26: mod_base = OTHER; note = 2'-fluorouridine
  modified_base 34: mod_base = OTHER; note = 2'-fluorouridine
  modified_base 51: mod_base = OTHER; note = 2'-Omethyluridine
  modified_base 57: mod_base = OTHER; note = 2'-Omethylcytosine
  modified_base 65: mod_base = OTHER; note = Cytosine phosphorothiorate
  modified_base 83: mod_base = OTHER; note = 2'-Omethylcytosine

SEQ ID NO: 4536 - RNA, 76 nt, synthetic construct; identical to SEQ ID NO: 3329
  source 1..76: mol_type = other RNA
  modified_base 1: mod_base = OTHER; note = 2'-Omethylguanosine
  modified_base 10: mod_base = OTHER; note = 2'-Omethylguanosine
  modified_base 13: mod_base = OTHER; note = 2'-Omethylcytosine
  modified_base 17: mod_base = OTHER; note = Guanosine phosphorothiorate
  modified_base 18: mod_base = OTHER; note = 2'-Omethylguanosine
  modified_base 19: mod_base = OTHER; note = Adenosine phosphorothiorate
  modified_base 20: mod_base = OTHER; note = 2'-Omethyluridine
  modified_base 25: mod_base = OTHER; note = 2'-Omethylcytosine
  modified_base 29: mod_base = OTHER; note = 2'-Omethylguanosine
  modified_base 33: mod_base = OTHER; note = 2'-fluorouridine
  modified_base 35: mod_base = OTHER; note = Cytosine phosphorothiorate
  modified_base 37: mod_base = OTHER; note = Adenosine phosphorothiorate
  modified_base 38: mod_base = OTHER; note = Adenosine phosphorothiorate
  modified_base 41: mod_base = OTHER; note = 2'-fluorocytosine phosphorothiorate
  modified_base 43: mod_base = OTHER; note = 2'-Omethyladenosine
  modified_base 44: mod_base = OTHER; note = 2'-fluoroadenosine
  modified_base 46: mod_base = OTHER; note = Guanosine phosphorothiorate
  modified_base 50: mod_base = OTHER; note = 2'-Omethylcytosine
  modified_base 52: mod_base = OTHER; note = 2'-Omethylguanosine
  modified_base 54: mod_base = OTHER; note = Uridine phosphorothiorate
  modified_base 55: mod_base = OTHER; note = Uridine phosphorothiorate
  modified_base 56: mod_base = OTHER; note = 2'-Omethylcytosine
  modified_base 57: mod_base = OTHER; note = Guanosine phosphorothiorate
  modified_base 62: mod_base = OTHER; note = 2'-Omethylcytosine
  modified_base 63: mod_base = OTHER; note = 2'-fluorocytosine
  modified_base 65: mod_base = OTHER; note = 2'-Omethylguanosine
  modified_base 71: mod_base = OTHER; note = 2'-Omethyluridine
  modified_base 73: mod_base = OTHER; note = 2'-Omethylguanosine

SEQ ID NO: 4537 - RNA, 76 nt, synthetic construct; identical to SEQ ID NO: 625
  source 1..76: mol_type = other RNA
  modified_base 1: mod_base = OTHER; note = 2'-Omethylguanosine phosphorothiorate
  modified_base 2: mod_base = OTHER; note = 2'-Omethylguanosine phosphorothiorate
  modified_base 3: mod_base = OTHER; note = 2'-Omethylcytosine phosphorothiorate
  modified_base 4: mod_base = OTHER; note = 2'-Omethyluridine phosphorothiorate
  modified_base 5: mod_base = OTHER; note = 2'-Omethylcytosine phosphorothiorate
  modified_base 6: mod_base = OTHER; note = 2'-Omethylcytosine phosphorothiorate
  modified_base 10: mod_base = OTHER; note = 2'-Omethylguanosine
  modified_base 11: mod_base = OTHER; note = 2'-Omethylcytosine
  modified_base 12: mod_base = OTHER; note = 2'-Omethylguanosine
  modified_base 13: mod_base = OTHER; note = 2'-Omethylcytosine
  modified_base 14: mod_base = OTHER; note = 2'-Omethyladenosine
  modified_base 15: mod_base = OTHER; note = 2'-Omethyladenosine
  modified_base 16: mod_base = OTHER; note = 2'-Omethyluridine
  modified_base 17: mod_base = OTHER; note = 2'-Omethylguanosine
  modified_base 18: mod_base = OTHER; note = 2'-Omethylguanosine
  modified_base 19: mod_base = OTHER; note = 2'-Omethyladenosine
  modified_base 20: mod_base = OTHER; note = 2'-Omethyluridine
  modified_base 22: mod_base = OTHER; note = 2'-Omethylguanosine
  modified_base 23: mod_base = OTHER; note = 2'-Omethylcytosine
  modified_base 24: mod_base = OTHER; note = 2'-Omethylguanosine
  modified_base 25: mod_base = OTHER; note = 2'-Omethylcytosine
  modified_base 40: mod_base = OTHER; note = 2'-fluorouridine
  modified_base 41: mod_base = OTHER; note = 2'-fluorocytosine
  modified_base 42: mod_base = OTHER; note = 2'-fluoroadenosine
  modified_base 43: mod_base = OTHER; note = 2'-fluoroadenosine
  modified_base 49: mod_base = OTHER; note = 2'-Omethylcytosine
  modified_base 50: mod_base = OTHER; note = 2'-Omethylcytosine
  modified_base 51: mod_base = OTHER; note = 2'-Omethylguanosine
  modified_base 52: mod_base = OTHER; note = 2'-Omethylguanosine
  modified_base 53: mod_base = OTHER; note = 2'-Omethylguanosine
  modified_base 54: mod_base = OTHER; note = Uridine phosphorothiorate
  modified_base 55: mod_base = OTHER; note = Uridine phosphorothiorate
  modified_base 56: mod_base = OTHER; note = Cytosine phosphorothiorate
  modified_base 57: mod_base = OTHER; note = Guanosine phosphorothiorate
  modified_base 61: mod_base = OTHER; note = 2'-Omethylcytosine
  modified_base 62: mod_base = OTHER; note = 2'-Omethylcytosine
  modified_base 63: mod_base = OTHER; note = 2'-Omethylcytosine
  modified_base 64: mod_base = OTHER; note = 2'-Omethylguanosine
  modified_base 65: mod_base = OTHER; note = 2'-Omethylguanosine
  modified_base 66: mod_base = OTHER; note = 2'-Omethylcytosine
  modified_base 67: mod_base = OTHER; note = 2'-Omethylguanosine
  modified_base 68: mod_base = OTHER; note = 2'-Omethylguanosine
  modified_base 69: mod_base = OTHER; note = 2'-Omethyladenosine

SEQ ID NO: 4538 - RNA, 76 nt, synthetic construct
  source 1..76: mol_type = other RNA
ggctccgtggcgcaatggagagcgcattggacttcaaattcaaaggttacgggttcgagtcccgtcggagtcgcca

SEQ ID NO: 4539 - RNA, 76 nt, synthetic construct; identical to SEQ ID NO: 3289
  source 1..76: mol_type = other RNA
  modified_base 1: mod_base = OTHER; note = 2'-Omethylguanosine
  modified_base 66: mod_base = OTHER; note = 2'-Omethyluridine
  modified_base 67: mod_base = OTHER; note = 2'-Omethylcytosine
  modified_base 68: mod_base = OTHER; note = 2'-Omethylcytosine
  modified_base 69: mod_base = OTHER; note = 2'-Omethyladenosine
  modified_base 71: mod_base = OTHER; note = 2'-Omethylguanosine
  modified_base 72: mod_base = OTHER; note = 2'-Omethylcytosine
  modified_base 73: mod_base = OTHER; note = 2'-Omethylguanosine

SEQ ID NO: 4540 - RNA, 76 nt, synthetic construct; identical to SEQ ID NO: 625
  source 1..76: mol_type = other RNA
  modified_base 1: mod_base = OTHER; note = 2'-Omethylguanosine
  modified_base 17: mod_base = OTHER; note = 2'-Omethylguanosine
  modified_base 18: mod_base = OTHER; note = 2'-Omethylguanosine
  modified_base 33: mod_base = OTHER; note = 2'-fluorouridine
  modified_base 50: mod_base = OTHER; note = 2'-Omethylcytosine
  modified_base 52: mod_base = OTHER; note = 2'-Omethylguanosine
  modified_base 54: mod_base = OTHER; note = Thymine
  modified_base 55: mod_base = OTHER; note = Uridine phosphorothiorate
  modified_base 73: mod_base = OTHER; note = 2'-Omethylguanosine

SEQ ID NO: 4541 - DNA, 73 bp, synthetic construct; identical to SEQ ID NO: 3380
  source 1..73: mol_type = other DNA
  modified_base 1: mod_base = OTHER; note = 2'-Omethylguanosine phosphorothiorate
  modified_base 2: mod_base = OTHER; note = 2'-Omethylguanosine
  modified_base 13: mod_base = OTHER; note = 2'-fluorocytosine
  modified_base 22: mod_base = OTHER; note = Guanosine phosphorothiorate
  modified_base 68: mod_base = OTHER; note = 2'-fluoroguanosine
  modified_base 72: mod_base = OTHER; note = Cytosine phosphorothiorate
  misc_feature 1..22: note = RNA
  misc_feature 23: note = DNA
  misc_feature 24..73: note = RNA

SEQ ID NO: 4542 - RNA, 85 nt, synthetic construct; identical to SEQ ID NO: 3288
  source 1..85: mol_type = other RNA
  modified_base 1: mod_base = OTHER; note = 2'-Omethylcytosine
  modified_base 13: mod_base = OTHER; note = 2'-Omethyladenosine
  modified_base 35: mod_base = OTHER; note = 2'-fluoroadenosine
  modified_base 36: mod_base = OTHER; note = 2'-fluoroguanosine
  modified_base 40: mod_base = OTHER; note = Cytosine phosphorothiorate
  modified_base 44: mod_base = OTHER; note = 2'-Omethylguanosine
  modified_base 46: mod_base = OTHER; note = 2'-fluoroadenosine phosphorothiorate
  modified_base 48: mod_base = OTHER; note = Adenosine phosphorothiorate
  modified_base 51: mod_base = OTHER; note = 2'-fluorouridine phosphorothiorate
  modified_base 58: mod_base = OTHER; note = 2'-Omethylguanosine
  modified_base 60: mod_base = OTHER; note = 2'-fluoroguanosine phosphorothiorate
  modified_base 75: mod_base = OTHER; note = 2'-fluorouridine phosphorothiorate
  modified_base 83: mod_base = OTHER; note = 2'-Omethylcytosine

SEQ ID NO: 4543 - RNA, 76 nt, synthetic construct; identical to SEQ ID NO: 625
  source 1..76: mol_type = other RNA
  modified_base 2: mod_base = OTHER; note = 2'-fluoroguanosine
  modified_base 7: mod_base = OTHER; note = Guanosine phosphorothiorate
  modified_base 10: mod_base = OTHER; note = 2'-Omethylguanosine
  modified_base 11: mod_base = OTHER; note = 2'-Omethylcytosine
  modified_base 12: mod_base = OTHER; note = Guanosine phosphorothiorate
  modified_base 13: mod_base = OTHER; note = 2'-fluorocytosine
  modified_base 14: mod_base = OTHER; note = 2'-Omethyladenosine
  modified_base 17: mod_base = OTHER; note = Guanosine phosphorothiorate
  modified_base 18: mod_base = OTHER; note = 2'-Omethylguanosine
  modified_base 20: mod_base = OTHER; note = Uridine phosphorothiorate
  modified_base 23: mod_base = OTHER; note = 2'-fluorocytosine phosphorothiorate
  modified_base 24: mod_base = OTHER; note = 2'-fluoroguanosine phosphorothiorate
  modified_base 25: mod_base = OTHER; note = 2'-fluorocytosine
  modified_base 26: mod_base = OTHER; note = Adenosine phosphorothiorate
  modified_base 27: mod_base = OTHER; note = 2'-Omethyluridine
  modified_base 29: mod_base = OTHER; note = Guanosine phosphorothiorate
  modified_base 30: mod_base = OTHER; note = Guanosine phosphorothiorate
  modified_base 31: mod_base = OTHER; note = 2'-Omethyladenosine
  modified_base 32: mod_base = OTHER; note = 2'-fluorocytosine
  modified_base 34: mod_base = OTHER; note = 2'-fluorouridine
  modified_base 36: mod_base = OTHER; note = Adenosine phosphorothiorate
  modified_base 38: mod_base = OTHER; note = Adenosine phosphorothiorate
  modified_base 39: mod_base = OTHER; note = 2'-fluorouridine
  modified_base 43: mod_base = OTHER; note = 2'-Omethyladenosine
  modified_base 44: mod_base = OTHER; note = 2'-Omethyladenosine
  modified_base 46: mod_base = OTHER; note = Guanosine phosphorothiorate
  modified_base 47: mod_base = OTHER; note = 2'-fluorouridine
  modified_base 48: mod_base = OTHER; note = 2'-Omethyluridine
  modified_base 49: mod_base = OTHER; note = 2'-fluorocytosine
  modified_base 57: mod_base = OTHER; note = Guanosine phosphorothiorate
  modified_base 58: mod_base = OTHER; note = 2'-fluoroadenosine phosphorothiorate
  modified_base 59: mod_base = OTHER; note = 2'-fluoroguanosine
  modified_base 61: mod_base = OTHER; note = 2'-Omethylcytosine
  modified_base 63: mod_base = OTHER; note = Cytosine phosphorothiorate
  modified_base 64: mod_base = OTHER; note = 2'-fluoroguanosine
  modified_base 65: mod_base = OTHER; note = 2'-Omethylguanosine
  modified_base 66: mod_base = OTHER; note = 2'-fluorocytosine
  modified_base 68: mod_base = OTHER; note = 2'-Omethylguanosine
  modified_base 70: mod_base = OTHER; note = 2'-fluoroguanosine
  modified_base 71: mod_base = OTHER; note = 2'-Omethyluridine
  modified_base 74: mod_base = OTHER; note = 2'-Omethylcytosine

SEQ ID NO: 4544 - RNA, 86 nt, synthetic construct; identical to SEQ ID NO: 3290
  source 1..86: mol_type = other RNA
  modified_base 1: mod_base = OTHER; note = 2'-Omethyladenosine phosphorothiorate
  modified_base 2: mod_base = OTHER; note = 2'-Omethylcytosine phosphorothiorate
  modified_base 3: mod_base = OTHER; note = 2'-Omethylcytosine
  modified_base 4: mod_base = OTHER; note = 2'-Omethyladenosine
  modified_base 5: mod_base = OTHER; note = 2'-Omethylguanosine
  modified_base 6: mod_base = OTHER; note = 2'-Omethylguanosine
  modified_base 44: mod_base = OTHER; note = 2'-Omethyluridine
  modified_base 59: mod_base = OTHER; note = 2'-Omethylguanosine
  modified_base 60: mod_base = OTHER; note = 2'-Omethyluridine
  modified_base 61: mod_base = OTHER; note = 2'-Omethylguanosine
  modified_base 62: mod_base = OTHER; note = 2'-Omethylguanosine
  modified_base 63: mod_base = OTHER; note = 2'-Omethylguanosine
  modified_base 64: mod_base = OTHER; note = 2'-Omethyluridine
  modified_base 71: mod_base = OTHER; note = 2'-Omethylcytosine
  modified_base 72: mod_base = OTHER; note = 2'-Omethylcytosine
  modified_base 73: mod_base = OTHER; note = 2'-fluorocytosine
  modified_base 74: mod_base = OTHER; note = 2'-Omethyladenosine
  modified_base 75: mod_base = OTHER; note = 2'-Omethylcytosine
  modified_base 76: mod_base = OTHER; note = 2'-Omethyluridine
  modified_base 77: mod_base = OTHER; note = 2'-Omethylcytosine
  modified_base 78: mod_base = OTHER; note = 2'-Omethylcytosine
  modified_base 83: mod_base = OTHER; note = 2'-Omethyladenosine

SEQ ID NO: 4545 - RNA, 76 nt, synthetic construct; identical to SEQ ID NO: 625
  source 1..76: mol_type = other RNA
  modified_base 1: mod_base = OTHER; note = 2'-Omethylguanosine
  modified_base 10: mod_base = OTHER; note = 2'-Omethylguanosine
  modified_base 13: mod_base = OTHER; note = 2'-Omethylcytosine
  modified_base 17: mod_base = OTHER; note = Guanosine phosphorothiorate
  modified_base 18: mod_base = OTHER; note = 2'-Omethylguanosine
  modified_base 19: mod_base = OTHER; note = Adenosine phosphorothiorate
  modified_base 20: mod_base = OTHER; note = 2'-Omethyluridine
  modified_base 25: mod_base = OTHER; note = 2'-fluorocytosine
  modified_base 29: mod_base = OTHER; note = 2'-Omethylguanosine
  modified_base 33: mod_base = OTHER; note = 2'-fluorouridine
  modified_base 35: mod_base = OTHER; note = Cytosine phosphorothiorate
  modified_base 37: mod_base = OTHER; note = Adenosine phosphorothiorate
  modified_base 38: mod_base = OTHER; note = Adenosine phosphorothiorate
  modified_base 43: mod_base = OTHER; note = 2'-Omethyladenosine
  modified_base 44: mod_base = OTHER; note = 2'-fluoroadenosine
  modified_base 46: mod_base = OTHER; note = Guanosine phosphorothiorate
  modified_base 50: mod_base = OTHER; note = 2'-Omethylcytosine
  modified_base 52: mod_base = OTHER; note = 2'-Omethylguanosine
  modified_base 54: mod_base = OTHER; note = Uridine phosphorothiorate
  modified_base 55: mod_base = OTHER; note = Uridine phosphorothiorate
  modified_base 56: mod_base = OTHER; note = 2'-Omethylcytosine
  modified_base 57: mod_base = OTHER; note = Guanosine phosphorothiorate
  modified_base 62: mod_base = OTHER; note = 2'-Omethylcytosine
  modified_base 63: mod_base = OTHER; note = 2'-fluorocytosine
  modified_base 65: mod_base = OTHER; note = 2'-Omethylguanosine
  modified_base 71: mod_base = OTHER; note = 2'-Omethyluridine
  modified_base 73: mod_base = OTHER; note = 2'-Omethylguanosine

SEQ ID NO: 4546 - RNA, 75 nt, synthetic construct; identical to SEQ ID NO: 3311
  source 1..75: mol_type = other RNA
  modified_base 2: mod_base = OTHER; note = 2'-Omethylguanosine phosphorothiorate
  modified_base 12: mod_base = OTHER; note = Guanosine phosphorothiorate
  modified_base 23: mod_base = OTHER; note = 2'-fluorocytosine
  modified_base 30: mod_base = OTHER; note = 2'-Omethylguanosine
  modified_base 31: mod_base = OTHER; note = 2'-Omethyladenosine
  modified_base 40: mod_base = OTHER; note = 2'-Omethylcytosine
  modified_base 46: mod_base = OTHER; note = 2'-fluoroadenosine
  modified_base 52: mod_base = OTHER; note = 2'-fluoroguanosine phosphorothiorate
  modified_base 57: mod_base = OTHER; note = 2'-fluoroadenosine phosphorothiorate
  modified_base 61: mod_base = OTHER; note = 2'-fluorouridine
  modified_base 65: mod_base = OTHER; note = Uridine phosphorothiorate
  modified_base 66: mod_base = OTHER; note = Guanosine phosphorothiorate
  modified_base 73: mod_base = OTHER; note = Cytosine phosphorothiorate
  modified_base 74: mod_base = OTHER; note = Cytosine phosphorothiorate

SEQ ID NO: 4547 - RNA, 85 nt, synthetic construct; identical to SEQ ID NO: 3297
  source 1..85: mol_type = other RNA
  modified_base 1: mod_base = OTHER; note = 2'-Omethylguanosine phosphorothiorate
  modified_base 2: mod_base = OTHER; note = 2'-Omethylcytosine phosphorothiorate
  modified_base 38: mod_base = OTHER; note = Adenosine phosphorothiorate
  modified_base 39: mod_base = OTHER; note = Uridine phosphorothiorate
  modified_base 40: mod_base = OTHER; note = 2'-fluorocytosine
  modified_base 61: mod_base = OTHER; note = 2'-fluoroguanosine
  modified_base 83: mod_base = OTHER; note = Cytosine phosphorothiorate
  modified_base 84: mod_base = OTHER; note = 2'-Omethylcytosine phosphorothiorate
  modified_base 85: mod_base = OTHER; note = 2'-Omethyladenosine

SEQ ID NO: 4548 - RNA, 85 nt, synthetic construct; identical to SEQ ID NO: 3310
  source 1..85: mol_type = other RNA
  modified_base 5: mod_base = OTHER; note = 2'-fluoroguanosine
  modified_base 27: mod_base = OTHER; note = 2'-fluorouridine
  modified_base 50: mod_base = OTHER; note = Adenosine phosphorothiorate
  modified_base 64: mod_base = OTHER; note = Uridine phosphorothiorate
  modified_base 74: mod_base = OTHER; note = 2'-fluorocytosine

SEQ ID NO: 4549 - RNA, 76 nt, synthetic construct; identical to SEQ ID NO: 625
  source 1..76: mol_type = other RNA
  modified_base 1: mod_base = OTHER; note = 2'-Omethylguanosine phosphorothiorate
  modified_base 2: mod_base = OTHER; note = 2'-Omethylguanosine phosphorothiorate
  modified_base 3: mod_base = OTHER; note = 2'-Omethylcytosine
  modified_base 4: mod_base = OTHER; note = 2'-Omethyluridine
  modified_base 5: mod_base = OTHER; note = 2'-Omethylcytosine
  modified_base 6: mod_base = OTHER; note = 2'-Omethylcytosine
  modified_base 10: mod_base = OTHER; note = 2'-Omethylguanosine
  modified_base 11: mod_base = OTHER; note = 2'-Omethylcytosine
  modified_base 12: mod_base = OTHER; note = 2'-Omethylguanosine
  modified_base 13: mod_base = OTHER; note = 2'-Omethylcytosine
  modified_base 14: mod_base = OTHER; note = 2'-Omethyladenosine
  modified_base 15: mod_base = OTHER; note = 2'-fluoroadenosine
  modified_base 16: mod_base = OTHER; note = 2'-Omethyluridine
  modified_base 17: mod_base = OTHER; note = 2'-Omethylguanosine
  modified_base 18: mod_base = OTHER; note = 2'-Omethylguanosine
  modified_base 19: mod_base = OTHER; note = 2'-fluoroadenosine
  modified_base 20: mod_base = OTHER; note = 2'-Omethyluridine
  modified_base 21: mod_base = OTHER; note = 2'-fluoroadenosine
  modified_base 22: mod_base = OTHER; note = 2'-Omethylguanosine
  modified_base 23: mod_base = OTHER; note = 2'-Omethylcytosine
  modified_base 24: mod_base = OTHER; note = 2'-Omethylguanosine
  modified_base 25: mod_base = OTHER; note = 2'-Omethylcytosine
  modified_base 38: mod_base = OTHER; note = Adenosine phosphorothiorate
  modified_base 39: mod_base = OTHER; note = Uridine phosphorothiorate
  modified_base 40: mod_base = OTHER; note = 2'-fluorouridine
  modified_base 43: mod_base = OTHER; note = 2'-Omethyladenosine
  modified_base 44: mod_base = OTHER; note = 2'-Omethyladenosine
  modified_base 45: mod_base = OTHER; note = 2'-Omethylguanosine
  modified_base 46: mod_base = OTHER; note = 2'-fluoroguanosine
  modified_base 48: mod_base = OTHER; note = 2'-fluorouridine
  modified_base 49: mod_base = OTHER; note = 2'-Omethylcytosine
  modified_base 50: mod_base = OTHER; note = 2'-Omethylcytosine
  modified_base 54: mod_base = OTHER; note = 2'-Omethyluridine phosphorothiorate
  modified_base 55: mod_base = OTHER; note = Uridine phosphorothiorate
  modified_base 56: mod_base = OTHER; note = 2'-Omethylcytosine
  modified_base 57: mod_base = OTHER; note = 2'-fluoroguanosine
  modified_base 61: mod_base = OTHER; note = 2'-Omethylcytosine
  modified_base 62: mod_base = OTHER; note = 2'-Omethylcytosine
  modified_base 63: mod_base = OTHER; note = 2'-fluorocytosine
  modified_base 64: mod_base = OTHER; note = 2'-Omethylguanosine
  modified_base 65: mod_base = OTHER; note = 2'-Omethylguanosine
  modified_base 66: mod_base = OTHER; note = 2'-Omethylcytosine
  modified_base 67: mod_base = OTHER; note = 2'-Omethylguanosine
  modified_base 68: mod_base = OTHER; note = 2'-Omethylguanosine
  modified_base 69: mod_base = OTHER; note = 2'-fluoroadenosine

SEQ ID NO: 4550 - RNA, 76 nt, synthetic construct; identical to SEQ ID NO: 3447
  source 1..76: mol_type = other RNA
  modified_base 1: mod_base = OTHER; note = 2'-Omethylguanosine
  modified_base 2: mod_base = OTHER; note = 2'-Omethylcytosine
  modified_base 3: mod_base = OTHER; note = 2'-Omethylcytosine
  modified_base 4: mod_base = OTHER; note = 2'-Omethylcytosine
  modified_base 5: mod_base = OTHER; note = 2'-Omethylguanosine
  modified_base 6: mod_base = OTHER; note = 2'-Omethyladenosine
  modified_base 14: mod_base = OTHER; note = 2'-Omethyladenosine
  modified_base 15: mod_base = OTHER; note = 2'-Omethyladenosine
  modified_base 16: mod_base = OTHER; note = 2'-Omethyluridine
  modified_base 17: mod_base = OTHER; note = 2'-Omethylguanosine
  modified_base 18: mod_base = OTHER; note = 2'-Omethylguanosine
  modified_base 20: mod_base = OTHER; note = 2'-Omethyluridine
  modified_base 25: mod_base = OTHER; note = 2'-Omethylcytosine
  modified_base 41: mod_base = OTHER; note = 2'-Omethylcytosine
  modified_base 42: mod_base = OTHER; note = 2'-Omethyladenosine
  modified_base 43: mod_base = OTHER; note = 2'-Omethyladenosine
  modified_base 44: mod_base = OTHER; note = 2'-Omethyladenosine
  modified_base 49: mod_base = OTHER; note = 2'-Omethylcytosine
  modified_base 50: mod_base = OTHER; note = 2'-Omethylcytosine
  modified_base 52: mod_base = OTHER; note = 2'-Omethylguanosine
  modified_base 54: mod_base = OTHER; note = 2'-Omethyluridine
  modified_base 55: mod_base = OTHER; note = Uridine phosphorothiorate
  modified_base 56: mod_base = OTHER; note = 2'-Omethylcytosine
  modified_base 57: mod_base = OTHER; note = 2'-fluoroguanosine
  modified_base 59: mod_base = OTHER; note = 2'-Omethylguanosine
  modified_base 61: mod_base = OTHER; note = 2'-Omethylcytosine
  modified_base 62: mod_base = OTHER; note = 2'-Omethylcytosine
  modified_base 63: mod_base = OTHER; note = 2'-fluorocytosine
  modified_base 64: mod_base = OTHER; note = 2'-Omethylguanosine
  modified_base 65: mod_base = OTHER; note = 2'-Omethylguanosine
  modified_base 73: mod_base = OTHER; note = 2'-Omethylguanosine

SEQ ID NO: 4551 - RNA, 76 nt, synthetic construct; identical to SEQ ID NO: 3615
  source 1..76: mol_type = other RNA
  modified_base 1: mod_base = OTHER; note = 2'-Omethylguanosine phosphorothiorate
  modified_base 2: mod_base = OTHER; note = 2'-Omethylguanosine
  modified_base 3: mod_base = OTHER; note = 2'-Omethylcytosine
  modified_base 4: mod_base = OTHER; note = 2'-Omethyluridine
  modified_base 5: mod_base = OTHER; note = 2'-Omethylcytosine
  modified_base 6: mod_base = OTHER; note = 2'-Omethylcytosine
  modified_base 44: mod_base = OTHER; note = 2'-Omethylguanosine
  modified_base 45: mod_base = OTHER; note = 2'-Omethylguanosine
  modified_base 46: mod_base = OTHER; note = 2'-fluoroguanosine
  modified_base 47: mod_base = OTHER; note = 2'-fluorouridine
  modified_base 48: mod_base = OTHER; note = 2'-Omethyluridine
  modified_base 49: mod_base = OTHER; note = 2'-Omethylcytosine
  modified_base 73: mod_base = OTHER; note = 2'-Omethylguanosine

SEQ ID NO: 4552 - RNA, 76 nt, synthetic construct; identical to SEQ ID NO: 625
  source 1..76: mol_type = other RNA
  modified_base 11: mod_base = OTHER; note = 2'-O-(2-Methoxyethyl) 5-methylcytosine

SEQ ID NO: 4553 - RNA, 76 nt, synthetic construct; identical to SEQ ID NO: 625
  source 1..76: mol_type = other RNA
  modified_base 2: mod_base = OTHER; note = Guanosine phosphorothiorate
  modified_base 6: mod_base = OTHER; note = 2'-Omethylcytosine
  modified_base 8: mod_base = OTHER; note = Uridine phosphorothiorate
  modified_base 12: mod_base = OTHER; note = Guanosine phosphorothiorate
  modified_base 15: mod_base = OTHER; note = 2'-fluoroadenosine
  modified_base 16: mod_base = OTHER; note = 2'-Omethyluridine
  modified_base 18: mod_base = OTHER; note = 2'-Omethylguanosine phosphorothiorate
  modified_base 20: mod_base = OTHER; note = Uridine phosphorothiorate
  modified_base 21: mod_base = OTHER; note = Adenosine phosphorothiorate
  modified_base 22: mod_base = OTHER; note = 2'-Omethylguanosine
  modified_base 23: mod_base = OTHER; note = 2'-fluorocytosine
  modified_base 27: mod_base = OTHER; note = 2'-fluorouridine
  modified_base 29: mod_base = OTHER; note = Guanosine phosphorothiorate
  modified_base 30: mod_base = OTHER; note = 2'-Omethylguanosine
  modified_base 31: mod_base = OTHER; note = 2'-Omethyladenosine
  modified_base 33: mod_base = OTHER; note = 2'-fluorouridine
  modified_base 34: mod_base = OTHER; note = 2'-Omethyluridine
  modified_base 38: mod_base = OTHER; note = 2'-Omethyladenosine
  modified_base 39: mod_base = OTHER; note = 2'-Omethyluridine phosphorothiorate
  modified_base 40: mod_base = OTHER; note = 2'-Omethyluridine phosphorothiorate
  modified_base 45: mod_base = OTHER; note = Guanosine phosphorothiorate
  modified_base 46: mod_base = OTHER; note = 2'-fluoroguanosine
  modified_base 49: mod_base = OTHER; note = 2'-fluorocytosine
  modified_base 50: mod_base = OTHER; note = 2'-Omethylcytosine
  modified_base 52: mod_base = OTHER; note = 2'-Omethylguanosine
  modified_base 53: mod_base = OTHER; note = 2'-fluoroguanosine phosphorothiorate
  modified_base 55: mod_base = OTHER; note = Uridine phosphorothiorate
  modified_base 56: mod_base = OTHER; note = Cytosine phosphorothiorate
  modified_base 60: mod_base = OTHER; note = 2'-Omethyluridine
  modified_base 61: mod_base = OTHER; note = Cytosine phosphorothiorate
  modified_base 65: mod_base = OTHER; note = 2'-Omethylguanosine
  modified_base 66: mod_base = OTHER; note = 2'-Omethylcytosine
  modified_base 67: mod_base = OTHER; note = 2'-Omethylguanosine
  modified_base 70: mod_base = OTHER; note = 2'-Omethylguanosine
  modified_base 73: mod_base = OTHER; note = 2'-Omethylguanosine
  modified_base 74: mod_base = OTHER; note = 2'-Omethylcytosine
  modified_base 75: mod_base = OTHER; note = 2'-fluorocytosine

SEQ ID NO: 4554 - RNA, 85 nt, synthetic construct; identical to SEQ ID NO: 3286
  source 1..85: mol_type = other RNA
  modified_base 1: mod_base = OTHER; note = 2'-Omethylcytosine phosphorothiorate
  modified_base 11: mod_base = OTHER; note = Cytosine phosphorothiorate
  modified_base 25: mod_base = OTHER; note = Guanosine phosphorothiorate
  modified_base 26: mod_base = OTHER; note = 2'-fluorouridine
  modified_base 30: mod_base = OTHER; note = 2'-fluoroadenosine
  modified_base 45: mod_base = OTHER; note = Guanosine phosphorothiorate
  modified_base 51: mod_base = OTHER; note = 2'-Omethyluridine
  modified_base 57: mod_base = OTHER; note = 2'-Omethylcytosine
  modified_base 67: mod_base = OTHER; note = Adenosine phosphorothiorate
  modified_base 84: mod_base = OTHER; note = 2'-fluorocytosine phosphorothiorate

SEQ ID NO: 4555 - RNA, 76 nt, synthetic construct; identical to SEQ ID NO: 625
  source 1..76: mol_type = other RNA
  modified_base 1: mod_base = OTHER; note = 2'-Omethylguanosine phosphorothiorate
  modified_base 2: mod_base = OTHER; note = 2'-Omethylguanosine phosphorothiorate
  modified_base 3: mod_base = OTHER; note = 2'-Omethylcytosine
  modified_base 4: mod_base = OTHER; note = 2'-Omethyluridine
  modified_base 5: mod_base = OTHER; note = 2'-Omethylcytosine
  modified_base 6: mod_base = OTHER; note = 2'-Omethylcytosine
  modified_base 14: mod_base = OTHER; note = 2'-Omethyladenosine
  modified_base 15: mod_base = OTHER; note = 2'-Omethyladenosine
  modified_base 16: mod_base = OTHER; note = 2'-Omethyluridine
  modified_base 17: mod_base = OTHER; note = 2'-Omethylguanosine
  modified_base 18: mod_base = OTHER; note = 2'-Omethylguanosine
  modified_base 20: mod_base = OTHER; note = 2'-Omethyluridine
  modified_base 25: mod_base = OTHER; note = 2'-Omethylcytosine
  modified_base 33: mod_base = OTHER; note = 2'-fluorouridine
  modified_base 35: mod_base = OTHER; note = Cytosine phosphorothiorate
  modified_base 37: mod_base = OTHER; note = Adenosine phosphorothiorate
  modified_base 38: mod_base = OTHER; note = Adenosine phosphorothiorate
  modified_base 41: mod_base = OTHER; note = 2'-fluorocytosine
  modified_base 42: mod_base = OTHER; note = 2'-Omethyladenosine
  modified_base 43: mod_base = OTHER; note = 2'-Omethyladenosine
  modified_base 44: mod_base = OTHER; note = 2'-fluoroadenosine
  modified_base 49: mod_base = OTHER; note = 2'-Omethylcytosine
  modified_base 50: mod_base = OTHER; note = 2'-Omethylcytosine
  modified_base 52: mod_base = OTHER; note = 2'-Omethylguanosine
  modified_base 54: mod_base = OTHER; note = 2'-Omethyluridine
  modified_base 55: mod_base = OTHER; note = Uridine phosphorothiorate
  modified_base 56: mod_base = OTHER; note = 2'-Omethylcytosine
  modified_base 57: mod_base = OTHER; note = 2'-fluoroguanosine
  modified_base 59: mod_base = OTHER; note = 2'-Omethylguanosine
  modified_base 61: mod_base = OTHER; note = 2'-Omethylcytosine
  modified_base 62: mod_base = OTHER; note = 2'-Omethylcytosine
  modified_base 63: mod_base = OTHER; note = 2'-fluorocytosine
  modified_base 64: mod_base = OTHER; note = 2'-Omethylguanosine
  modified_base 65: mod_base = OTHER; note = 2'-Omethylguanosine
  modified_base 73: mod_base = OTHER; note = 2'-Omethylguanosine

SEQ ID NO: 4556 - RNA, 76 nt, synthetic construct; identical to SEQ ID NO: 625
  source 1..76: mol_type = other RNA
  modified_base 1: mod_base = OTHER; note = 2'-fluoroguanosine
  modified_base 4: mod_base = OTHER; note = 2'-Omethyluridine
  modified_base 10: mod_base = OTHER; note = 2'-fluoroguanosine
  modified_base 11: mod_base = OTHER; note = 2'-fluorocytosine
  modified_base 13: mod_base = OTHER; note = 2'-fluorocytosine
  modified_base 16: mod_base = OTHER; note = 2'-Omethyluridine
  modified_base 17: mod_base = OTHER; note = 2'-Omethylguanosine
  modified_base 20: mod_base = OTHER; note = Uridine phosphorothiorate
  modified_base 21: mod_base = OTHER; note = Adenosine phosphorothiorate
  modified_base 22: mod_base = OTHER; note = Guanosine phosphorothiorate
  modified_base 23: mod_base = OTHER; note = 2'-Omethylcytosine
  modified_base 26: mod_base = OTHER; note = 2'-fluoroadenosine
  modified_base 27: mod_base = OTHER; note = 2'-fluorouridine phosphorothiorate
  modified_base 28: mod_base = OTHER; note = 2'-fluorouridine phosphorothiorate
  modified_base 29: mod_base = OTHER; note = 2'-Omethylguanosine
  modified_base 32: mod_base = OTHER; note = 2'-fluorocytosine
  modified_base 33: mod_base = OTHER; note = 2'-fluorouridine
  modified_base 34: mod_base = OTHER; note = 2'-fluorouridine
  modified_base 40: mod_base = OTHER; note = 2'-Omethyluridine
  modified_base 41: mod_base = OTHER; note = 2'-fluorocytosine phosphorothiorate
  modified_base 42: mod_base = OTHER; note = Adenosine phosphorothiorate
  modified_base 43: mod_base = OTHER; note = 2'-Omethyladenosine phosphorothiorate
  modified_base 44: mod_base = OTHER; note = 2'-Omethyladenosine
  modified_base 50: mod_base = OTHER; note = 2'-fluorocytosine
  modified_base 57: mod_base = OTHER; note = 2'-fluoroguanosine
  modified_base 59: mod_base = OTHER; note = 2'-fluoroguanosine phosphorothiorate
  modified_base 61: mod_base = OTHER; note = 2'-Omethylcytosine
  modified_base 63: mod_base = OTHER; note = 2'-fluorocytosine
  modified_base 64: mod_base = OTHER; note = 2'-Omethylguanosine
  modified_base 65: mod_base = OTHER; note = 2'-Omethylguanosine
  modified_base 67: mod_base = OTHER; note = 2'-fluoroguanosine phosphorothiorate
  modified_base 68: mod_base = OTHER; note = 2'-Omethylguanosine phosphorothiorate
  modified_base 69: mod_base = OTHER; note = Adenosine phosphorothiorate
  modified_base 71: mod_base = OTHER; note = 2'-Omethyluridine
  modified_base 73: mod_base = OTHER; note = 2'-Omethylguanosine

SEQ ID NO: 4557 - RNA, 86 nt, synthetic construct; identical to SEQ ID NO: 3290
  source 1..86: mol_type = other RNA
  modified_base 9: mod_base = OTHER; note = 2'-fluoroguanosine

SEQ ID NO: 4558 - RNA, 75 nt, synthetic construct; identical to SEQ ID NO: 1045
  source 1..75: mol_type = other RNA
  modified_base 1: mod_base = OTHER; note = 2'-Omethylguanosine phosphorothiorate
  modified_base 2: mod_base = OTHER; note = 2'-Omethylguanosine phosphorothiorate
  modified_base 10: mod_base = OTHER; note = 2'-Omethylguanosine
  modified_base 13: mod_base = OTHER; note = 2'-Omethyluridine
  modified_base 16: mod_base = OTHER; note = Uridine phosphorothiorate
  modified_base 17: mod_base = OTHER; note = Guanosine phosphorothiorate
  modified_base 18: mod_base = OTHER; note = 2'-Omethylguanosine phosphorothiorate
  modified_base 19: mod_base = OTHER; note = Uridine phosphorothiorate
  modified_base 20: mod_base = OTHER; note = 2'-Omethyladenosine phosphorothiorate
  modified_base 25: mod_base = OTHER; note = 2'-Omethylcytosine
  modified_base 29: mod_base = OTHER; note = 2'-Omethylguanosine
  modified_base 33: mod_base = OTHER; note = 2'-fluorouridine
  modified_base 35: mod_base = OTHER; note = Uridine phosphorothiorate
  modified_base 37: mod_base = OTHER; note = Adenosine phosphorothiorate
  modified_base 38: mod_base = OTHER; note = Adenosine phosphorothiorate
  modified_base 41: mod_base = OTHER; note = 2'-fluorocytosine
  modified_base 42: mod_base = OTHER; note = Adenosine phosphorothiorate
  modified_base 43: mod_base = OTHER; note = 2'-Omethylguanosine
  modified_base 44: mod_base = OTHER; note = 2'-fluorocytosine
  modified_base 46: mod_base = OTHER; note = Adenosine phosphorothiorate
  modified_base 49: mod_base = OTHER; note = 2'-Omethylcytosine
  modified_base 51: mod_base = OTHER; note = 2'-Omethyladenosine
  modified_base 53: mod_base = OTHER; note = Uridine phosphorothiorate
  modified_base 54: mod_base = OTHER; note = Uridine phosphorothiorate
  modified_base 55: mod_base = OTHER; note = 2'-Omethylcytosine
  modified_base 56: mod_base = OTHER; note = Guanosine phosphorothiorate
  modified_base 61: mod_base = OTHER; note = 2'-Omethyluridine
  modified_base 62: mod_base = OTHER; note = 2'-fluorocytosine
  modified_base 64: mod_base = OTHER; note = 2'-Omethylguanosine
  modified_base 70: mod_base = OTHER; note = 2'-Omethylcytosine
  modified_base 72: mod_base = OTHER; note = 2'-Omethyluridine

SEQ ID NO: 4559 - RNA, 86 nt, synthetic construct; identical to SEQ ID NO: 3290
  source 1..86: mol_type = other RNA
  modified_base 10: mod_base = OTHER; note = 2'-fluoroguanosine

SEQ ID NO: 4560 - RNA, 75 nt, synthetic construct; identical to SEQ ID NO: 3311
  source 1..75: mol_type = other RNA
  modified_base 1: mod_base = OTHER; note = Guanosine phosphorothiorate
  modified_base 5: mod_base = OTHER; note = 2'-Omethylcytosine
  modified_base 17: mod_base = OTHER; note = 2'-fluoroguanosine
  modified_base 18: mod_base = OTHER; note = 2'-fluoroguanosine phosphorothiorate
  modified_base 37: mod_base = OTHER; note = 2'-fluoroadenosine phosphorothiorate
  modified_base 40: mod_base = OTHER; note = 2'-Omethylcytosine
  modified_base 43: mod_base = OTHER; note = 2'-fluoroguanosine
  modified_base 59: mod_base = OTHER; note = 2'-Omethyluridine
  modified_base 73: mod_base = OTHER; note = Cytosine phosphorothiorate
  modified_base 74: mod_base = OTHER; note = 2'-Omethylcytosine

SEQ ID NO: 4561 - RNA, 75 nt, synthetic construct; identical to SEQ ID NO: 3306
  source 1..75: mol_type = other RNA
  modified_base 1: mod_base = OTHER; note = 2'-Omethylguanosine phosphorothiorate
  modified_base 2: mod_base = OTHER; note = 2'-Omethyladenosine phosphorothiorate
  modified_base 23: mod_base = OTHER; note = 2'-Omethylguanosine
  modified_base 37: mod_base = OTHER; note = Adenosine phosphorothiorate
  modified_base 43: mod_base = OTHER; note = 2'-fluoroadenosine phosphorothiorate
  modified_base 44: mod_base = OTHER; note = 2'-fluoroguanosine
  modified_base 55: mod_base = OTHER; note = Cytosine phosphorothiorate
  modified_base 56: mod_base = OTHER; note = 2'-Omethyladenosine
  modified_base 60: mod_base = OTHER; note = 2'-fluorocytosine
  modified_base 73: mod_base = OTHER; note = Cytosine phosphorothiorate
  modified_base 74: mod_base = OTHER; note = 2'-Omethylcytosine

SEQ ID NO: 4562 - RNA, 86 nt, synthetic construct; identical to SEQ ID NO: 3290
  source 1..86: mol_type = other RNA
  modified_base 42: mod_base = OTHER; note = 2'-fluoroadenosine

SEQ ID NO: 4563 - RNA, 86 nt, synthetic construct; identical to SEQ ID NO: 3290
  source 1..86: mol_type = other RNA
  modified_base 1: mod_base = OTHER; note = 2'-Omethyladenosine phosphorothiorate
  modified_base 2: mod_base = OTHER; note = 2'-Omethylcytosine
  modified_base 3: mod_base = OTHER; note = 2'-Omethylcytosine
  modified_base 44: mod_base = OTHER; note = Uridine phosphorothiorate
  modified_base 60: mod_base = OTHER; note = 2'-Omethyluridine
  modified_base 85: mod_base = OTHER; note = Cytosine phosphorothiorate
  modified_base 86: mod_base = OTHER; note = 2'-Omethyladenosine

SEQ ID NO: 4564 - RNA, 75 nt, synthetic construct; identical to SEQ ID NO: 3306
  source 1..75: mol_type = other RNA
  modified_base 1: mod_base = OTHER; note = 2'-Omethylguanosine
  modified_base 53: mod_base = OTHER; note = 2'-Omethyluridine phosphorothiorate
  modified_base 54: mod_base = OTHER; note = Uridine phosphorothiorate
  modified_base 55: mod_base = OTHER; note = 2'-Omethylcytosine
  modified_base 56: mod_base = OTHER; note = 2'-fluoroadenosine
  modified_base 57: mod_base = OTHER; note = 2'-fluoroadenosine phosphorothiorate
  modified_base 58: mod_base = OTHER; note = 2'-Omethyladenosine
  modified_base 59: mod_base = OTHER; note = 2'-fluorouridine
  modified_base 72: mod_base = OTHER; note = 2'-Omethyladenosine

SEQ ID NO: 4565 - RNA, 76 nt, synthetic construct; identical to SEQ ID NO: 625
  source 1..76: mol_type = other RNA
  modified_base 1: mod_base = OTHER; note = 2'-Omethylguanosine
  modified_base 2: mod_base = OTHER; note = 2'-Omethylguanosine
  modified_base 3: mod_base = OTHER; note = 2'-Omethylcytosine
  modified_base 4: mod_base = OTHER; note = 2'-Omethyluridine
  modified_base 5: mod_base = OTHER; note = 2'-Omethylcytosine
  modified_base 6: mod_base = OTHER; note = 2'-Omethylcytosine
  modified_base 10: mod_base = OTHER; note = 2'-Omethylguanosine
  modified_base 11: mod_base = OTHER; note = 2'-Omethylcytosine
  modified_base 12: mod_base = OTHER; note = 2'-Omethylguanosine
  modified_base 13: mod_base = OTHER; note = 2'-Omethylcytosine
  modified_base 14: mod_base = OTHER; note = 2'-Omethyladenosine
  modified_base 15: mod_base = OTHER; note = 2'-fluoroadenosine
  modified_base 16: mod_base = OTHER; note = 2'-Omethyluridine
  modified_base 17: mod_base = OTHER; note = 2'-Omethylguanosine
  modified_base 18: mod_base = OTHER; note = 2'-Omethylguanosine
  modified_base 19: mod_base = OTHER; note = 2'-fluoroadenosine
  modified_base 20: mod_base = OTHER; note = 2'-Omethyluridine
  modified_base 21: mod_base = OTHER; note = 2'-fluoroadenosine
  modified_base 22: mod_base = OTHER; note = 2'-Omethylguanosine
  modified_base 23: mod_base = OTHER; note = 2'-Omethylcytosine
  modified_base 24: mod_base = OTHER; note = 2'-Omethylguanosine
  modified_base 25: mod_base = OTHER; note = 2'-Omethylcytosine
  modified_base 33: mod_base = OTHER; note = 2'-fluorouridine
  modified_base 35: mod_base = OTHER; note = Cytosine phosphorothiorate
  modified_base 37: mod_base = OTHER; note = Adenosine phosphorothiorate
  modified_base 38: mod_base = OTHER; note = Adenosine phosphorothiorate
  modified_base 49: mod_base = OTHER; note = 2'-Omethylcytosine
  modified_base 50: mod_base = OTHER; note = 2'-Omethylcytosine
  modified_base 51: mod_base = OTHER; note = 2'-Omethylguanosine
  modified_base 52: mod_base = OTHER; note = 2'-Omethylguanosine
  modified_base 53: mod_base = OTHER; note = 2'-Omethylguanosine
  modified_base 54: mod_base = OTHER; note = 2'-Omethyluridine
  modified_base 56: mod_base = OTHER; note = 2'-Omethylcytosine
  modified_base 59: mod_base = OTHER; note = 2'-Omethylguanosine
  modified_base 61: mod_base = OTHER; note = 2'-Omethylcytosine
  modified_base 62: mod_base = OTHER; note = 2'-Omethylcytosine
  modified_base 63: mod_base = OTHER; note = 2'-fluorocytosine
  modified_base 64: mod_base = OTHER; note = 2'-Omethylguanosine
  modified_base 65: mod_base = OTHER; note = 2'-Omethylguanosine
  modified_base 66: mod_base = OTHER; note = 2'-Omethylcytosine
  modified_base 67: mod_base = OTHER; note = 2'-Omethylguanosine
  modified_base 68: mod_base = OTHER; note = 2'-Omethylguanosine
  modified_base 69: mod_base = OTHER; note = 2'-Omethyladenosine
  modified_base 70: mod_base = OTHER; note = 2'-fluoroguanosine
  modified_base 73: mod_base = OTHER; note = 2'-Omethylguanosine
  modified_base 75: mod_base = OTHER; note = 2'-fluorocytosine phosphorothiorate

SEQ ID NO: 4566 - DNA, 76 bp, synthetic construct; identical to SEQ ID NO: 1924
  source 1..76: mol_type = other DNA
  modified_base 1: mod_base = OTHER; note = 2'-Omethylguanosine phosphorothiorate
  modified_base 2: mod_base = OTHER; note = 2'-Omethylguanosine phosphorothiorate
  modified_base 3: mod_base = OTHER; note = Cytosine phosphorothiorate
  modified_base 4: mod_base = OTHER; note = 2'-fluorouridine
  modified_base 10: mod_base = OTHER; note = Guanosine phosphorothiorate
  modified_base 13: mod_base = OTHER; note = Cytosine phosphorothiorate
  modified_base 14: mod_base = OTHER; note = deoxyadenosine phosphorothiorate
  modified_base 17: mod_base = OTHER; note = Guanosine phosphorothiorate
  modified_base 18: mod_base = OTHER; note = 2'-O-(2-Methoxyethyl) guanosine phosphorothiorate
  modified_base 19: mod_base = OTHER; note = 2'-fluoroadenosine
  modified_base 20: mod_base = OTHER; note = 2'-Omethyluridine
  modified_base 22: mod_base = OTHER; note = 2'-O-(2-Methoxyethyl) guanosine
  modified_base 23: mod_base = OTHER; note = 2'-fluorocytosine
  modified_base 25: mod_base = OTHER; note = Cytosine phosphorothiorate
  modified_base 26: mod_base = OTHER; note = 2'-fluoroadenosine
  modified_base 28: mod_base = OTHER; note = Uridine phosphorothiorate
  modified_base 31: mod_base = OTHER; note = Adenosine phosphorothiorate
  modified_base 35: mod_base = OTHER; note = Cytosine phosphorothiorate
  modified_base 39: mod_base = OTHER; note = Uridine phosphorothiorate
  modified_base 40: mod_base = OTHER; note = 2'-O-(2-Methoxyethyl) thymine
  modified_base 47: mod_base = OTHER; note = 2'-O-(2-Methoxyethyl) thymine
  modified_base 49: mod_base = OTHER; note = 2'-Omethylcytosine phosphorothiorate
  modified_base 50: mod_base = OTHER; note = Cytosine phosphorothiorate
  modified_base 51: mod_base = OTHER; note = 2'-fluoroguanosine
  modified_base 52: mod_base = OTHER; note = 2'-Omethylguanosine
  modified_base 56: mod_base = OTHER; note = 2'-O-(2-Methoxyethyl) 5-methylcytosine
  modified_base 60: mod_base = OTHER; note = 2'-O-(2-Methoxyethyl) thymine
  modified_base 67: mod_base = OTHER; note = Guanosine phosphorothiorate
  modified_base 69: mod_base = OTHER; note = 2'-Omethyladenosine
  modified_base 72: mod_base = OTHER; note = 2'-Omethylcytosine
  modified_base 74: mod_base = OTHER; note = Cytosine phosphorothiorate
  modified_base 75: mod_base = OTHER; note = 2'-Omethylcytosine
  misc_feature 1..13: note = RNA
  misc_feature 14: note = DNA
  misc_feature 15..23: note = RNA
  misc_feature 24: note = DNA
  misc_feature 25..29: note = RNA
  misc_feature 30: note = DNA
  misc_feature 31..52: note = RNA
  misc_feature 53: note = DNA
  misc_feature 54..76: note = RNA

SEQ ID NO: 4567 - RNA, 75 nt, synthetic construct; identical to SEQ ID NO: 1045
  source 1..75: mol_type = other RNA
  modified_base 1: mod_base = OTHER; note = Guanosine phosphorothiorate
  modified_base 2: mod_base = OTHER; note = 2'-Omethylguanosine phosphorothiorate
  modified_base 12: mod_base = OTHER; note = Guanosine phosphorothiorate
  modified_base 18: mod_base = OTHER; note = 2'-fluoroguanosine phosphorothiorate
  modified_base 19: mod_base = OTHER; note = 2'-fluorouridine
  modified_base 23: mod_base = OTHER; note = Cytosine phosphorothiorate
  modified_base 24: mod_base = OTHER; note = 2'-fluoroadenosine
  modified_base 42: mod_base = OTHER; note = 2'-fluoroadenosine
  modified_base 60: mod_base = OTHER; note = 2'-fluorocytosine
  modified_base 64: mod_base = OTHER; note = 2'-fluoroguanosine phosphorothiorate
  modified_base 65: mod_base = OTHER; note = Uridine phosphorothiorate
  modified_base 66: mod_base = OTHER; note = 2'-fluoroguanosine
  modified_base 73: mod_base = OTHER; note = Cytosine phosphorothiorate
  modified_base 74: mod_base = OTHER; note = Cytosine phosphorothiorate
  modified_base 75: mod_base = OTHER; note = 2'-fluoroadenosine

SEQ ID NO: 4568 - RNA, 85 nt, synthetic construct; identical to SEQ ID NO: 3317
  source 1..85: mol_type = other RNA
  modified_base 1: mod_base = OTHER; note = 2'-Omethylguanosine phosphorothiorate
  modified_base 2: mod_base = OTHER; note = Cytosine phosphorothiorate
  modified_base 3: mod_base = OTHER; note = Uridine phosphorothiorate
  modified_base 4: mod_base = OTHER; note = 2'-Omethylguanosine phosphorothiorate
  modified_base 11: mod_base = OTHER; note = Cytosine phosphorothiorate
  modified_base 14: mod_base = OTHER; note = 2'-Omethyladenosine
  modified_base 23: mod_base = OTHER; note = Guanosine phosphorothiorate
  modified_base 25: mod_base = OTHER; note = 2'-Omethylcytosine phosphorothiorate
  modified_base 29: mod_base = OTHER; note = 2'-fluoroguanosine
  modified_base 34: mod_base = OTHER; note = 2'-fluorocytosine
  modified_base 36: mod_base = OTHER; note = 2'-Omethyladenosine
  modified_base 37: mod_base = OTHER; note = Adenosine phosphorothiorate
  modified_base 38: mod_base = OTHER; note = 2'-fluoroadenosine
  modified_base 45: mod_base = OTHER; note = 2'-Omethylguanosine phosphorothiorate
  modified_base 52: mod_base = OTHER; note = 2'-Omethylcytosine phosphorothiorate
  modified_base 53: mod_base = OTHER; note = 2'-fluorocytosine
  modified_base 55: mod_base = OTHER; note = 2'-Omethylcytosine phosphorothiorate
  modified_base 59: mod_base = OTHER; note = 2'-Omethylcytosine
  modified_base 61: mod_base = OTHER; note = 2'-Omethylguanosine
  modified_base 73: mod_base = OTHER; note = 2'-fluoroguanosine
  modified_base 82: mod_base = OTHER; note = Guanosine phosphorothiorate

SEQ ID NO: 4569 - RNA, 85 nt, synthetic construct; identical to SEQ ID NO: 3286
  source 1..85: mol_type = other RNA
  modified_base 1: mod_base = OTHER; note = 2'-Omethylcytosine
  modified_base 25: mod_base = OTHER; note = 2'-fluoroguanosine
  modified_base 27: mod_base = OTHER; note = 2'-fluorouridine
  modified_base 28: mod_base = OTHER; note = 2'-fluoroguanosine phosphorothiorate
  modified_base 29: mod_base = OTHER; note = 2'-fluoroguanosine
  modified_base 30: mod_base = OTHER; note = 2'-fluoroadenosine
  modified_base 34: mod_base = OTHER; note = 2'-fluorouridine
  modified_base 35: mod_base = OTHER; note = Adenosine phosphorothiorate
  modified_base 39: mod_base = OTHER; note = Cytosine phosphorothiorate
  modified_base 45: mod_base = OTHER; note = Guanosine phosphorothiorate
  modified_base 48: mod_base = OTHER; note = 2'-Omethyladenosine
  modified_base 51: mod_base = OTHER; note = Uridine phosphorothiorate
  modified_base 54: mod_base = OTHER; note = 2'-Omethylcytosine
  modified_base 55: mod_base = OTHER; note = Cytosine phosphorothiorate
  modified_base 57: mod_base = OTHER; note = 2'-Omethylcytosine
  modified_base 58: mod_base = OTHER; note = Guanosine phosphorothiorate
  modified_base 60: mod_base = OTHER; note = 2'-fluoroguanosine phosphorothiorate
  modified_base 71: mod_base = OTHER; note = 2'-Omethylcytosine
  modified_base 73: mod_base = OTHER; note = 2'-fluoroadenosine phosphorothiorate
  modified_base 84: mod_base = OTHER; note = 2'-Omethylcytosine

SEQ ID NO: 4570 - RNA, 76 nt, synthetic construct; identical to SEQ ID NO: 625
  source 1..76: mol_type = other RNA
  modified_base 1: mod_base = OTHER; note = 2'-Omethylguanosine
  modified_base 10: mod_base = OTHER; note = 2'-Omethylguanosine
  modified_base 17: mod_base = OTHER; note = Guanosine phosphorothiorate
  modified_base 18: mod_base = OTHER; note = 2'-Omethylguanosine
  modified_base 19: mod_base = OTHER; note = Adenosine phosphorothiorate
  modified_base 20: mod_base = OTHER; note = 2'-Omethyluridine
  modified_base 25: mod_base = OTHER; note = 2'-Omethylcytosine
  modified_base 29: mod_base = OTHER; note = 2'-Omethylguanosine
  modified_base 33: mod_base = OTHER; note = 2'-fluorouridine
  modified_base 35: mod_base = OTHER; note = Cytosine phosphorothiorate
  modified_base 37: mod_base = OTHER; note = Adenosine phosphorothiorate
  modified_base 38: mod_base = OTHER; note = Adenosine phosphorothiorate
  modified_base 43: mod_base = OTHER; note = 2'-Omethyladenosine
  modified_base 44: mod_base = OTHER; note = 2'-fluoroadenosine
  modified_base 46: mod_base = OTHER; note = Guanosine phosphorothiorate
  modified_base 50: mod_base = OTHER; note = 2'-Omethylcytosine
  modified_base 52: mod_base = OTHER; note = 2'-Omethylguanosine
  modified_base 54: mod_base = OTHER; note = Uridine phosphorothiorate
  modified_base 55: mod_base = OTHER; note = Uridine phosphorothiorate
  modified_base 56: mod_base = OTHER; note = 2'-Omethylcytosine
  modified_base 57: mod_base = OTHER; note = Guanosine phosphorothiorate
  modified_base 62: mod_base = OTHER; note = 2'-Omethylcytosine
  modified_base 63: mod_base = OTHER; note = 2'-fluorocytosine
  modified_base 65: mod_base = OTHER; note = 2'-Omethylguanosine
  modified_base 71: mod_base = OTHER; note = 2'-Omethyluridine
  modified_base 73: mod_base = OTHER; note = 2'-Omethylguanosine

SEQ ID NO: 4571 - RNA, 76 nt, synthetic construct
  source 1..76: mol_type = other RNA
gccccagtggcctaatggataaggcattggccttcaaagccagggattgtgggttcgagtcccatctggggtgcca

SEQ ID NO: 4572 - RNA, 75 nt, synthetic construct; identical to SEQ ID NO: 3311
  source 1..75: mol_type = other RNA
  modified_base 2: mod_base = OTHER; note = 2'-Omethylguanosine phosphorothiorate
  modified_base 12: mod_base = OTHER; note = Guanosine phosphorothiorate
  modified_base 14: mod_base = OTHER; note = 2'-fluoroadenosine
  modified_base 21: mod_base = OTHER; note = 2'-fluoroadenosine
  modified_base 23: mod_base = OTHER; note = 2'-fluorocytosine
  modified_base 29: mod_base = OTHER; note = 2'-fluoroguanosine
  modified_base 42: mod_base = OTHER; note = 2'-fluoroadenosine
  modified_base 51: mod_base = OTHER; note = Adenosine phosphorothiorate
  modified_base 61: mod_base = OTHER; note = 2'-fluorouridine
  modified_base 62: mod_base = OTHER; note = Cytosine phosphorothiorate
  modified_base 66: mod_base = OTHER; note = Guanosine phosphorothiorate
  modified_base 73: mod_base = OTHER; note = Cytosine phosphorothiorate
  modified_base 74: mod_base = OTHER; note = 2'-Omethylcytosine

SEQ ID NO: 4573 - RNA, 75 nt, synthetic construct; identical to SEQ ID NO: 1045
  source 1..75: mol_type = other RNA
  modified_base 1: mod_base = OTHER; note = 2'-Omethylguanosine phosphorothiorate
  modified_base 2: mod_base = OTHER; note = 2'-Omethylguanosine phosphorothiorate
  modified_base 3: mod_base = OTHER; note = 2'-Omethyluridine
  modified_base 4: mod_base = OTHER; note = 2'-Omethyluridine
  modified_base 5: mod_base = OTHER; note = 2'-Omethylcytosine
  modified_base 6: mod_base = OTHER; note = 2'-Omethylcytosine
  modified_base 10: mod_base = OTHER; note = 2'-Omethylguanosine
  modified_base 11: mod_base = OTHER; note = 2'-Omethyluridine
  modified_base 12: mod_base = OTHER; note = 2'-Omethylguanosine
  modified_base 13: mod_base = OTHER; note = 2'-Omethyluridine
  modified_base 14: mod_base = OTHER; note = 2'-Omethyladenosine
  modified_base 15: mod_base = OTHER; note = 2'-fluoroadenosine
  modified_base 16: mod_base = OTHER; note = 2'-Omethyluridine
  modified_base 17: mod_base = OTHER; note = 2'-Omethylguanosine
  modified_base 18: mod_base = OTHER; note = 2'-Omethylguanosine
  modified_base 19: mod_base = OTHER; note = 2'-fluorouridine
  modified_base 20: mod_base = OTHER; note = 2'-Omethyladenosine
  modified_base 22: mod_base = OTHER; note = 2'-Omethylguanosine
  modified_base 23: mod_base = OTHER; note = 2'-Omethylcytosine
  modified_base 24: mod_base = OTHER; note = 2'-Omethyladenosine
  modified_base 25: mod_base = OTHER; note = 2'-Omethylcytosine
  modified_base 33: mod_base = OTHER; note = 2'-fluorouridine
  modified_base 35: mod_base = OTHER; note = Uridine phosphorothiorate
  modified_base 37: mod_base = OTHER; note = Adenosine phosphorothiorate
  modified_base 38: mod_base = OTHER; note = Adenosine phosphorothiorate
  modified_base 48: mod_base = OTHER; note = 2'-Omethylcytosine
  modified_base 49: mod_base = OTHER; note = 2'-Omethylcytosine
  modified_base 50: mod_base = OTHER; note = 2'-Omethylguanosine
  modified_base 51: mod_base = OTHER; note = 2'-Omethyladenosine
  modified_base 52: mod_base = OTHER; note = 2'-Omethylguanosine
  modified_base 53: mod_base = OTHER; note = 2'-Omethyluridine
  modified_base 55: mod_base = OTHER; note = 2'-Omethylcytosine
  modified_base 58: mod_base = OTHER; note = 2'-Omethylguanosine
  modified_base 60: mod_base = OTHER; note = 2'-Omethylcytosine
  modified_base 61: mod_base = OTHER; note = 2'-Omethyluridine
  modified_base 62: mod_base = OTHER; note = 2'-fluorocytosine
  modified_base 63: mod_base = OTHER; note = 2'-Omethylguanosine
  modified_base 64: mod_base = OTHER; note = 2'-Omethylguanosine
  modified_base 65: mod_base = OTHER; note = 2'-Omethyluridine
  modified_base 66: mod_base = OTHER; note = 2'-Omethylguanosine
  modified_base 67: mod_base = OTHER; note = 2'-Omethylguanosine
  modified_base 72: mod_base = OTHER; note = 2'-Omethyluridine

SEQ ID NO: 4574 - RNA, 75 nt, synthetic construct; identical to SEQ ID NO: 1045
  source 1..75: mol_type = other RNA
  modified_base 1: mod_base = OTHER; note = 2'-Omethylguanosine phosphorothiorate
  modified_base 2: mod_base = OTHER; note = 2'-Omethylguanosine phosphorothiorate
  modified_base 14: mod_base = OTHER; note = 2'-Omethyladenosine
  modified_base 17: mod_base = OTHER; note = 2'-fluoroguanosine phosphorothiorate
  modified_base 23: mod_base = OTHER; note = 2'-Omethylcytosine
  modified_base 28: mod_base = OTHER; note = Uridine phosphorothiorate
  modified_base 38: mod_base = OTHER; note = 2'-Omethyladenosine
  modified_base 39: mod_base = OTHER; note = 2'-Omethyluridine
  modified_base 40: mod_base = OTHER; note = 2'-fluorocytosine
  modified_base 53: mod_base = OTHER; note = 2'-Omethyluridine phosphorothiorate
  modified_base 54: mod_base = OTHER; note = 2'-Omethyluridine phosphorothiorate
  modified_base 55: mod_base = OTHER; note = 2'-Omethylcytosine phosphorothiorate
  modified_base 57: mod_base = OTHER; note = 2'-Omethyladenosine phosphorothiorate
  modified_base 58: mod_base = OTHER; note = 2'-Omethylguanosine
  modified_base 60: mod_base = OTHER; note = 2'-Omethylcytosine
  modified_base 66: mod_base = OTHER; note = 2'-Omethylguanosine
  modified_base 72: mod_base = OTHER; note = 2'-Omethyluridine
  modified_base 74: mod_base = OTHER; note = 2'-Omethylcytosine phosphorothiorate
  modified_base 75: mod_base = OTHER; note = 2'-Omethyladenosine

SEQ ID NO: 4575 - RNA, 76 nt, synthetic construct; identical to SEQ ID NO: 3325
  source 1..76: mol_type = other RNA
  modified_base 1: mod_base = OTHER; note = 2'-Omethyluridine
  modified_base 2: mod_base = OTHER; note = 2'-Omethyladenosine
  modified_base 3: mod_base = OTHER; note = 2'-Omethylcytosine
  modified_base 4: mod_base = OTHER; note = 2'-Omethyladenosine
  modified_base 5: mod_base = OTHER; note = 2'-Omethylcytosine
  modified_base 6: mod_base = OTHER; note = 2'-Omethylcytosine
  modified_base 16: mod_base = OTHER; note = 2'-Omethyluridine
  modified_base 17: mod_base = OTHER; note = 2'-Omethylguanosine
  modified_base 18: mod_base = OTHER; note = 2'-Omethylguanosine
  modified_base 33: mod_base = OTHER; note = 2'-fluorouridine
  modified_base 35: mod_base = OTHER; note = Cytosine phosphorothiorate
  modified_base 37: mod_base = OTHER; note = Adenosine phosphorothiorate
  modified_base 38: mod_base = OTHER; note = Adenosine phosphorothiorate
  modified_base 44: mod_base = OTHER; note = 2'-Omethyladenosine
  modified_base 45: mod_base = OTHER; note = 2'-Omethylguanosine
  modified_base 46: mod_base = OTHER; note = 2'-fluoroguanosine
  modified_base 47: mod_base = OTHER; note = 2'-fluorouridine
  modified_base 48: mod_base = OTHER; note = 2'-fluorouridine
  modified_base 56: mod_base = OTHER; note = 2'-Omethylcytosine
  modified_base 59: mod_base = OTHER; note = 2'-Omethylguanosine
  modified_base 61: mod_base = OTHER; note = 2'-Omethylcytosine
  modified_base 62: mod_base = OTHER; note = 2'-Omethylcytosine
  modified_base 63: mod_base = OTHER; note = 2'-fluorocytosine
  modified_base 64: mod_base = OTHER; note = 2'-Omethylguanosine
  modified_base 65: mod_base = OTHER; note = 2'-Omethylguanosine
  modified_base 66: mod_base = OTHER; note = 2'-Omethylcytosine
  modified_base 67: mod_base = OTHER; note = 2'-Omethylguanosine
  modified_base 68: mod_base = OTHER; note = 2'-Omethylguanosine
  modified_base 73: mod_base = OTHER; note = 2'-Omethylguanosine

SEQ ID NO: 4576 - RNA, 85 nt, synthetic construct; identical to SEQ ID NO: 3310
  source 1..85: mol_type = other RNA
  modified_base 1: mod_base = OTHER; note = 2'-Omethylcytosine
  modified_base 30: mod_base = OTHER; note = 2'-fluoroadenosine
  modified_base 34: mod_base = OTHER; note = 2'-fluorouridine
  modified_base 42: mod_base = OTHER; note = Adenosine phosphorothiorate
  modified_base 55: mod_base = OTHER; note = Cytosine phosphorothiorate
  modified_base 58: mod_base = OTHER; note = 2'-fluoroguanosine
  modified_base 59: mod_base = OTHER; note = 2'-Omethyluridine
  modified_base 67: mod_base = OTHER; note = 2'-Omethyladenosine
  modified_base 83: mod_base = OTHER; note = Cytosine phosphorothiorate
  modified_base 84: mod_base = OTHER; note = 2'-Omethylcytosine

SEQ ID NO: 4577 - RNA, 76 nt, synthetic construct; identical to SEQ ID NO: 3318
  source 1..76: mol_type = other RNA
  modified_base 1: mod_base = OTHER; note = 2'-Omethylcytosine
  modified_base 44: mod_base = OTHER; note = 2'-Omethyladenosine
  modified_base 45: mod_base = OTHER; note = 2'-Omethylguanosine
  modified_base 73: mod_base = OTHER; note = 2'-Omethyladenosine

SEQ ID NO: 4578 - DNA, 76 bp, synthetic construct; identical to SEQ ID NO: 1924
  source 1..76: mol_type = other DNA
  modified_base 1: mod_base = OTHER; note = 2'-Omethylguanosine phosphorothiorate
  modified_base 2: mod_base = OTHER; note = Guanosine phosphorothiorate
  modified_base 3: mod_base = OTHER; note = Cytosine phosphorothiorate
  modified_base 4: mod_base = OTHER; note = 2'-O-(2-Methoxyethyl) thymine
  modified_base 10: mod_base = OTHER; note = Guanosine phosphorothiorate
  modified_base 14: mod_base = OTHER; note = 2'-Omethyladenosine
  modified_base 22: mod_base = OTHER; note = 2'-O-(2-Methoxyethyl) guanosine
  modified_base 24: mod_base = OTHER; note = 2'-fluoroguanosine
  modified_base 25: mod_base = OTHER; note = 2'-fluorocytosine
  modified_base 26: mod_base = OTHER; note = Adenosine phosphorothiorate
  modified_base 27: mod_base = OTHER; note = 2'-O-(2-Methoxyethyl) thymine
  modified_base 28: mod_base = OTHER; note = deoxyuridine phosphorothiorate
  modified_base 30: mod_base = OTHER; note = Guanosine phosphorothiorate
  modified_base 31: mod_base = OTHER; note = 2'-fluoroadenosine
  modified_base 33: mod_base = OTHER; note = Uridine phosphorothiorate
  modified_base 36: mod_base = OTHER; note = Adenosine phosphorothiorate
  modified_base 37: mod_base = OTHER; note = deoxyadenosine phosphorothiorate
  modified_base 39: mod_base = OTHER; note = Uridine phosphorothiorate
  modified_base 40: mod_base = OTHER; note = 2'-Omethyluridine
  modified_base 41: mod_base = OTHER; note = 2'-Omethylcytosine phosphorothiorate
  modified_base 43: mod_base = OTHER; note = Adenosine phosphorothiorate
  modified_base 44: mod_base = OTHER; note = 2'-Omethyladenosine
  modified_base 46: mod_base = OTHER; note = Guanosine phosphorothiorate
  modified_base 49: mod_base = OTHER; note = 2'-O-(2-Methoxyethyl) 5-methylcytosine
  modified_base 53: mod_base = OTHER; note = Guanosine phosphorothiorate
  modified_base 55: mod_base = OTHER; note = Uridine phosphorothiorate
  modified_base 56: mod_base = OTHER; note = deoxycytosine phosphorothiorate
  modified_base 57: mod_base = OTHER; note = 2'-Omethylguanosine
  modified_base 58: mod_base = OTHER; note = Adenosine phosphorothiorate
  modified_base 59: mod_base = OTHER; note = 2'-fluoroguanosine
  modified_base 61: mod_base = OTHER; note = Cytosine phosphorothiorate
  modified_base 62: mod_base = OTHER; note = 2'-Omethylcytosine
  modified_base 63: mod_base = OTHER; note = 2'-O-(2-Methoxyethyl) 5-methylcytosine
  modified_base 66: mod_base = OTHER; note = Cytosine phosphorothiorate
  modified_base 69: mod_base = OTHER; note = Adenosine phosphorothiorate
  modified_base 70: mod_base = OTHER; note = 2'-O-(2-Methoxyethyl) guanosine phosphorothiorate
  modified_base 75: mod_base = OTHER; note = 2'-Omethylcytosine phosphorothiorate
  modified_base 76: mod_base = OTHER; note = 2'-Omethyladenosine
  misc_feature 1..10: note = RNA
  misc_feature 11: note = DNA
  misc_feature 12..27: note = RNA
  misc_feature 28: note = DNA
  misc_feature 29..31: note = RNA
  misc_feature 32: note = DNA
  misc_feature 33..36: note = RNA
  misc_feature 37..38: note = DNA
  misc_feature 39..41: note = RNA
  misc_feature 42: note = DNA
  misc_feature 43..53: note = RNA
  misc_feature 54: note = DNA
  misc_feature 55: note = RNA
  misc_feature 56: note = DNA
  misc_feature 57..59: note = RNA
  misc_feature 60: note = DNA
  misc_feature 61..64: note = RNA
  misc_feature 65: note = DNA
  misc_feature 66..76: note = RNA

SEQ ID NO: 4579 - RNA, 76 nt, synthetic construct; identical to SEQ ID NO: 625
  source 1..76: mol_type = other RNA
  modified_base 9: mod_base = OTHER; note = Guanosine phosphorothiorate
  modified_base 10: mod_base = OTHER; note = 2'-Omethylguanosine
  modified_base 12: mod_base = OTHER; note = Guanosine phosphorothiorate
  modified_base 14: mod_base = OTHER; note = 2'-Omethyladenosine
  modified_base 18: mod_base = OTHER; note = 2'-Omethylguanosine
  modified_base 20: mod_base = OTHER; note = 2'-fluorouridine
  modified_base 26: mod_base = OTHER; note = 2'-Omethyladenosine
  modified_base 29: mod_base = OTHER; note = 2'-Omethylguanosine
  modified_base 30: mod_base = OTHER; note = 2'-fluoroguanosine
  modified_base 33: mod_base = OTHER; note = 2'-fluorouridine
  modified_base 34: mod_base = OTHER; note = 2'-fluorouridine
  modified_base 39: mod_base = OTHER; note = 2'-fluorouridine
  modified_base 40: mod_base = OTHER; note = Uridine phosphorothiorate
  modified_base 41: mod_base = OTHER; note = Cytosine phosphorothiorate
  modified_base 42: mod_base = OTHER; note = 2'-fluoroadenosine
  modified_base 43: mod_base = OTHER; note = 2'-Omethyladenosine
  modified_base 45: mod_base = OTHER; note = Guanosine phosphorothiorate
  modified_base 46: mod_base = OTHER; note = 2'-fluoroguanosine
  modified_base 48: mod_base = OTHER; note = Uridine phosphorothiorate
  modified_base 50: mod_base = OTHER; note = 2'-fluorocytosine
  modified_base 51: mod_base = OTHER; note = Guanosine phosphorothiorate
  modified_base 52: mod_base = OTHER; note = 2'-Omethylguanosine phosphorothiorate
  modified_base 54: mod_base = OTHER; note = 2'-fluorouridine
  modified_base 57: mod_base = OTHER; note = 2'-fluoroguanosine
  modified_base 59: mod_base = OTHER; note = Guanosine phosphorothiorate
  modified_base 60: mod_base = OTHER; note = 2'-fluorouridine
  modified_base 62: mod_base = OTHER; note = 2'-fluorocytosine
  modified_base 64: mod_base = OTHER; note = 2'-Omethylguanosine phosphorothiorate
  modified_base 65: mod_base = OTHER; note = Guanosine phosphorothiorate
  modified_base 66: mod_base = OTHER; note = 2'-Omethylcytosine
  modified_base 67: mod_base = OTHER; note = Guanosine phosphorothiorate
  modified_base 68: mod_base = OTHER; note = Guanosine phosphorothiorate
  modified_base 69: mod_base = OTHER; note = 2'-Omethyladenosine phosphorothiorate
  modified_base 71: mod_base = OTHER; note = 2'-Omethyluridine
  modified_base 72: mod_base = OTHER; note = 2'-Omethylcytosine
  modified_base 73: mod_base = OTHER; note = 2'-fluoroguanosine

SEQ ID NO: 4580 - RNA, 76 nt, synthetic construct; identical to SEQ ID NO: 625
  source 1..76: mol_type = other RNA
  modified_base 1: mod_base = OTHER; note = 2'-Omethylguanosine phosphorothiorate
  modified_base 2: mod_base = OTHER; note = 2'-fluoroguanosine
  modified_base 3: mod_base = OTHER; note = Cytosine phosphorothiorate
  modified_base 4: mod_base = OTHER; note = 2'-fluorouridine
  modified_base 6: mod_base = OTHER; note = 2'-fluorocytosine
  modified_base 10: mod_base = OTHER; note = 2'-fluoroguanosine
  modified_base 11: mod_base = OTHER; note = Cytosine phosphorothiorate
  modified_base 13: mod_base = OTHER; note = 2'-fluorocytosine phosphorothiorate
  modified_base 14: mod_base = OTHER; note = 2'-fluoroadenosine
  modified_base 16: mod_base = OTHER; note = 2'-Omethyluridine phosphorothiorate
  modified_base 17: mod_base = OTHER; note = 2'-Omethylguanosine
  modified_base 23: mod_base = OTHER; note = 2'-Omethylcytosine phosphorothiorate
  modified_base 24: mod_base = OTHER; note = Guanosine phosphorothiorate
  modified_base 29: mod_base = OTHER; note = 2'-fluoroguanosine
  modified_base 31: mod_base = OTHER; note = 2'-fluoroadenosine
  modified_base 34: mod_base = OTHER; note = 2'-fluorouridine phosphorothiorate
  modified_base 43: mod_base = OTHER; note = Adenosine phosphorothiorate
  modified_base 44: mod_base = OTHER; note = 2'-fluoroadenosine
  modified_base 47: mod_base = OTHER; note = 2'-fluorouridine
  modified_base 52: mod_base = OTHER; note = 2'-Omethylguanosine
  modified_base 54: mod_base = OTHER; note = 2'-fluorouridine
  modified_base 55: mod_base = OTHER; note = Uridine phosphorothiorate
  modified_base 56: mod_base = OTHER; note = 2'-Omethylcytosine
  modified_base 64: mod_base = OTHER; note = Guanosine phosphorothiorate
  modified_base 65: mod_base = OTHER; note = 2'-Omethylguanosine
  modified_base 66: mod_base = OTHER; note = 2'-fluorocytosine phosphorothiorate
  modified_base 67: mod_base = OTHER; note = 2'-Omethylguanosine phosphorothiorate
  modified_base 68: mod_base = OTHER; note = 2'-Omethylguanosine
  modified_base 70: mod_base = OTHER; note = 2'-fluoroguanosine phosphorothiorate
  modified_base 71: mod_base = OTHER; note = 2'-fluorouridine
  modified_base 74: mod_base = OTHER; note = 2'-fluorocytosine phosphorothiorate
  modified_base 75: mod_base = OTHER; note = 2'-Omethylcytosine
  modified_base 76: mod_base = OTHER; note = 2'-fluoroadenosine

SEQ ID NO: 4581 - RNA, 76 nt, synthetic construct; identical to SEQ ID NO: 625
  source 1..76: mol_type = other RNA
  modified_base 1: mod_base = OTHER; note = 2'-Omethylguanosine
  modified_base 2: mod_base = OTHER; note = 2'-fluoroguanosine
  modified_base 3: mod_base = OTHER; note = 2'-Omethylcytosine phosphorothiorate
  modified_base 4: mod_base = OTHER; note = 2'-fluorouridine
  modified_base 10: mod_base = OTHER; note = Guanosine phosphorothiorate
  modified_base 12: mod_base = OTHER; note = Guanosine phosphorothiorate
  modified_base 14: mod_base = OTHER; note = Adenosine phosphorothiorate
  modified_base 15: mod_base = OTHER; note = 2'-Omethyladenosine phosphorothiorate
  modified_base 16: mod_base = OTHER; note = 2'-Omethyluridine phosphorothiorate
  modified_base 17: mod_base = OTHER; note = 2'-Omethylguanosine phosphorothiorate
  modified_base 18: mod_base = OTHER; note = 2'-fluoroguanosine
  modified_base 22: mod_base = OTHER; note = 2'-fluoroguanosine
  modified_base 25: mod_base = OTHER; note = 2'-fluorocytosine
  modified_base 26: mod_base = OTHER; note = 2'-fluoroadenosine
  modified_base 27: mod_base = OTHER; note = Uridine phosphorothiorate
  modified_base 28: mod_base = OTHER; note = 2'-Omethyluridine phosphorothiorate
  modified_base 29: mod_base = OTHER; note = 2'-fluoroguanosine
  modified_base 34: mod_base = OTHER; note = Uridine phosphorothiorate
  modified_base 37: mod_base = OTHER; note = Adenosine phosphorothiorate
  modified_base 38: mod_base = OTHER; note = 2'-Omethyladenosine
  modified_base 39: mod_base = OTHER; note = 2'-Omethyluridine
  modified_base 40: mod_base = OTHER; note = 2'-fluorouridine
  modified_base 49: mod_base = OTHER; note = Cytosine phosphorothiorate
  modified_base 50: mod_base = OTHER; note = 2'-fluorocytosine
  modified_base 51: mod_base = OTHER; note = 2'-Omethylguanosine
  modified_base 52: mod_base = OTHER; note = 2'-Omethylguanosine phosphorothiorate
  modified_base 53: mod_base = OTHER; note = 2'-Omethylguanosine
  modified_base 57: mod_base = OTHER; note = 2'-Omethylguanosine phosphorothiorate
  modified_base 58: mod_base = OTHER; note = 2'-fluoroadenosine
  modified_base 59: mod_base = OTHER; note = Guanosine phosphorothiorate
  modified_base 60: mod_base = OTHER; note = 2'-Omethyluridine
  modified_base 62: mod_base = OTHER; note = 2'-fluorocytosine
  modified_base 63: mod_base = OTHER; note = 2'-Omethylcytosine
  modified_base 65: mod_base = OTHER; note = 2'-fluoroguanosine
  modified_base 68: mod_base = OTHER; note = Guanosine phosphorothiorate
  modified_base 69: mod_base = OTHER; note = 2'-Omethyladenosine
  modified_base 73: mod_base = OTHER; note = 2'-Omethylguanosine
  modified_base 75: mod_base = OTHER; note = Cytosine phosphorothiorate
  modified_base 76: mod_base = OTHER; note = 2'-Omethyladenosine

SEQ ID NO: 4582 - RNA, 74 nt, synthetic construct; identical to SEQ ID NO: 3293
  source 1..74: mol_type = other RNA
  modified_base 1: mod_base = OTHER; note = 2'-fluoroadenosine
  modified_base 4: mod_base = OTHER; note = 2'-Omethyluridine
  modified_base 10: mod_base = OTHER; note = Cytosine phosphorothiorate
  modified_base 25: mod_base = OTHER; note = 2'-Omethyluridine
  modified_base 43: mod_base = OTHER; note = Guanosine phosphorothiorate
  modified_base 46: mod_base = OTHER; note = 2'-fluorouridine
  modified_base 48: mod_base = OTHER; note = Cytosine phosphorothiorate
  modified_base 64: mod_base = OTHER; note = 2'-Omethylcytosine phosphorothiorate
  modified_base 73: mod_base = OTHER; note = 2'-Omethylcytosine phosphorothiorate
  modified_base 74: mod_base = OTHER; note = 2'-Omethyladenosine

SEQ ID NO: 4583 - RNA, 85 nt, synthetic construct; identical to SEQ ID NO: 3286
  source 1..85: mol_type = other RNA
  modified_base 1: mod_base = OTHER; note = 2'-Omethylcytosine phosphorothiorate
  modified_base 3: mod_base = OTHER; note = 2'-Omethyladenosine
  modified_base 14: mod_base = OTHER; note = Guanosine phosphorothiorate
  modified_base 34: mod_base = OTHER; note = Uridine phosphorothiorate
  modified_base 36: mod_base = OTHER; note = 2'-fluoroguanosine
  modified_base 49: mod_base = OTHER; note = Uridine phosphorothiorate
  modified_base 54: mod_base = OTHER; note = 2'-fluorocytosine
  modified_base 58: mod_base = OTHER; note = 2'-fluoroguanosine
  modified_base 62: mod_base = OTHER; note = Guanosine phosphorothiorate
  modified_base 84: mod_base = OTHER; note = 2'-fluorocytosine

SEQ ID NO: 4584 - RNA, 76 nt, synthetic construct; identical to SEQ ID NO: 3295
  source 1..76: mol_type = other RNA
  modified_base 1: mod_base = OTHER; note = 2'-Omethylcytosine
  modified_base 2: mod_base = OTHER; note = 2'-fluorocytosine
  modified_base 3: mod_base = OTHER; note = 2'-Omethyluridine phosphorothiorate
  modified_base 4: mod_base = OTHER; note = 2'-fluorouridine
  modified_base 8: mod_base = OTHER; note = 2'-fluorouridine
  modified_base 13: mod_base = OTHER; note = 2'-fluorocytosine phosphorothiorate
  modified_base 23: mod_base = OTHER; note = 2'-fluoroadenosine
  modified_base 25: mod_base = OTHER; note = 2'-fluorocytosine phosphorothiorate
  modified_base 26: mod_base = OTHER; note = Guanosine phosphorothiorate
  modified_base 27: mod_base = OTHER; note = 2'-fluoroguanosine phosphorothiorate
  modified_base 38: mod_base = OTHER; note = 2'-fluoroadenosine
  modified_base 40: mod_base = OTHER; note = 2'-fluorocytosine
  modified_base 43: mod_base = OTHER; note = 2'-fluorouridine phosphorothiorate
  modified_base 52: mod_base = OTHER; note = 2'-Omethylguanosine
  modified_base 55: mod_base = OTHER; note = Uridine phosphorothiorate
  modified_base 65: mod_base = OTHER; note = 2'-fluorocytosine
  modified_base 75: mod_base = OTHER; note = 2'-Omethylcytosine phosphorothiorate

SEQ ID NO: 4585 - RNA, 74 nt, synthetic construct; identical to SEQ ID NO: 3293
  source 1..74: mol_type = other RNA
  modified_base 1: mod_base = OTHER; note = 2'-fluoroadenosine
  modified_base 2: mod_base = OTHER; note = 2'-Omethylcytosine
  modified_base 4: mod_base = OTHER; note = 2'-fluorouridine
  modified_base 6: mod_base = OTHER; note = 2'-fluoroguanosine
  modified_base 8: mod_base = OTHER; note = Guanosine phosphorothiorate
  modified_base 9: mod_base = OTHER; note = 2'-fluoroguanosine
  modified_base 12: mod_base = OTHER; note = 2'-Omethylcytosine phosphorothiorate
  modified_base 25: mod_base = OTHER; note = 2'-Omethyluridine
  modified_base 27: mod_base = OTHER; note = 2'-fluorouridine phosphorothiorate
  modified_base 37: mod_base = OTHER; note = 2'-fluorouridine
  modified_base 44: mod_base = OTHER; note = Guanosine phosphorothiorate
  modified_base 48: mod_base = OTHER; note = Cytosine phosphorothiorate
  modified_base 50: mod_base = OTHER; note = Uridine phosphorothiorate
  modified_base 62: mod_base = OTHER; note = 2'-fluoroguanosine phosphorothiorate
  modified_base 67: mod_base = OTHER; note = Guanosine phosphorothiorate
  modified_base 73: mod_base = OTHER; note = 2'-Omethylcytosine phosphorothiorate

SEQ ID NO: 4586 - RNA, 76 nt, synthetic construct; identical to SEQ ID NO: 625
  source 1..76: mol_type = other RNA
  modified_base 2: mod_base = OTHER; note = 2'-fluoroguanosine
  modified_base 3: mod_base = OTHER; note = Cytosine phosphorothiorate
  modified_base 4: mod_base = OTHER; note = 2'-fluorouridine
  modified_base 5: mod_base = OTHER; note = Cytosine phosphorothiorate
  modified_base 6: mod_base = OTHER; note = 2'-Omethylcytosine
  modified_base 9: mod_base = OTHER; note = Guanosine phosphorothiorate
  modified_base 10: mod_base = OTHER; note = 2'-fluoroguanosine
  modified_base 11: mod_base = OTHER; note = Cytosine phosphorothiorate
  modified_base 12: mod_base = OTHER; note = 2'-fluoroguanosine
  modified_base 14: mod_base = OTHER; note = 2'-Omethyladenosine
  modified_base 18: mod_base = OTHER; note = 2'-Omethylguanosine
  modified_base 19: mod_base = OTHER; note = Adenosine phosphorothiorate
  modified_base 20: mod_base = OTHER; note = Uridine phosphorothiorate
  modified_base 22: mod_base = OTHER; note = Guanosine phosphorothiorate
  modified_base 23: mod_base = OTHER; note = 2'-fluorocytosine
  modified_base 25: mod_base = OTHER; note = 2'-Omethylcytosine
  modified_base 26: mod_base = OTHER; note = Adenosine phosphorothiorate
  modified_base 27: mod_base = OTHER; note = Uridine phosphorothiorate
  modified_base 28: mod_base = OTHER; note = 2'-fluorouridine
  modified_base 31: mod_base = OTHER; note = 2'-fluoroadenosine
  modified_base 32: mod_base = OTHER; note = 2'-fluorocytosine
  modified_base 33: mod_base = OTHER; note = 2'-fluorouridine
  modified_base 34: mod_base = OTHER; note = 2'-Omethyluridine
  modified_base 36: mod_base = OTHER; note = Adenosine phosphorothiorate
  modified_base 39: mod_base = OTHER; note = Uridine phosphorothiorate
  modified_base 41: mod_base = OTHER; note = Cytosine phosphorothiorate
  modified_base 43: mod_base = OTHER; note = 2'-Omethyladenosine
  modified_base 44: mod_base = OTHER; note = 2'-fluoroadenosine
  modified_base 54: mod_base = OTHER; note = 2'-Omethyluridine
  modified_base 59: mod_base = OTHER; note = 2'-fluoroguanosine phosphorothiorate
  modified_base 60: mod_base = OTHER; note = 2'-Omethyluridine
  modified_base 63: mod_base = OTHER; note = 2'-fluorocytosine
  modified_base 65: mod_base = OTHER; note = 2'-fluoroguanosine
  modified_base 66: mod_base = OTHER; note = Cytosine phosphorothiorate
  modified_base 67: mod_base = OTHER; note = 2'-fluoroguanosine
  modified_base 74: mod_base = OTHER; note = 2'-Omethylcytosine
  modified_base 76: mod_base = OTHER; note = 2'-fluoroadenosine

SEQ ID NO: 4587 - RNA, 85 nt, synthetic construct; identical to SEQ ID NO: 3297
  source 1..85: mol_type = other RNA
  modified_base 1: mod_base = OTHER; note = 2'-Omethylguanosine
  modified_base 2: mod_base = OTHER; note = 2'-Omethylcytosine
  modified_base 3: mod_base = OTHER; note = 2'-Omethyluridine
  modified_base 4: mod_base = OTHER; note = 2'-Omethylguanosine

SEQ ID NO: 4588 - DNA, 74 bp, synthetic construct; identical to SEQ ID NO: 3384
  source 1..74: mol_type = other DNA
  modified_base 1: mod_base = OTHER; note = 2'-Omethylguanosine phosphorothiorate
  modified_base 2: mod_base = OTHER; note = 2'-Omethylguanosine
  modified_base 25: mod_base = OTHER; note = 2'-fluorocytosine
  modified_base 73: mod_base = OTHER; note = 2'-Omethylguanosine
  misc_feature 1..71: note = RNA
  misc_feature 72: note = DNA
  misc_feature 73..74: note = RNA

SEQ ID NO: 4589 - RNA, 85 nt, synthetic construct; identical to SEQ ID NO: 3288
  source 1..85: mol_type = other RNA
  modified_base 1: mod_base = OTHER; note = 2'-Omethylcytosine
  modified_base 2: mod_base = OTHER; note = 2'-Omethylcytosine
  modified_base 3: mod_base = OTHER; note = 2'-fluoroadenosine phosphorothiorate
  modified_base 6: mod_base = OTHER; note = Adenosine phosphorothiorate
  modified_base 25: mod_base = OTHER; note = Guanosine phosphorothiorate
  modified_base 26: mod_base = OTHER; note = 2'-fluorouridine
  modified_base 28: mod_base = OTHER; note = 2'-Omethylguanosine
  modified_base 30: mod_base = OTHER; note = 2'-fluoroadenosine
  modified_base 34: mod_base = OTHER; note = 2'-fluorocytosine
  modified_base 39: mod_base = OTHER; note = Cytosine phosphorothiorate
  modified_base 45: mod_base = OTHER; note = Guanosine phosphorothiorate
  modified_base 47: mod_base = OTHER; note = Cytosine phosphorothiorate
  modified_base 54: mod_base = OTHER; note = 2'-Omethylcytosine
  modified_base 55: mod_base = OTHER; note = Cytosine phosphorothiorate
  modified_base 57: mod_base = OTHER; note = 2'-Omethylcytosine
  modified_base 58: mod_base = OTHER; note = 2'-Omethylguanosine
  modified_base 75: mod_base = OTHER; note = 2'-fluorouridine
  modified_base 77: mod_base = OTHER; note = Cytosine phosphorothiorate
  modified_base 84: mod_base = OTHER; note = Cytosine phosphorothiorate
  modified_base 85: mod_base = OTHER; note = 2'-Omethyladenosine

SEQ ID NO: 4590 - RNA, 85 nt, synthetic construct; identical to SEQ ID NO: 3297
  source 1..85: mol_type = other RNA
  modified_base 1: mod_base = OTHER; note = 2'-Omethylguanosine phosphorothiorate
  modified_base 2: mod_base = OTHER; note = 2'-Omethylcytosine
  modified_base 14: mod_base = OTHER; note = 2'-Omethyladenosine phosphorothiorate
  modified_base 17: mod_base = OTHER; note = 2'-fluoroguanosine
  modified_base 29: mod_base = OTHER; note = 2'-fluoroguanosine
  modified_base 51: mod_base = OTHER; note = 2'-Omethyluridine phosphorothiorate
  modified_base 62: mod_base = OTHER; note = 2'-fluoroguanosine phosphorothiorate
  modified_base 80: mod_base = OTHER; note = 2'-Omethylguanosine phosphorothiorate

SEQ ID NO: 4591 - RNA, 75 nt, synthetic construct; identical to SEQ ID NO: 3306
  source 1..75: mol_type = other RNA
  modified_base 1: mod_base = OTHER; note = 2'-Omethylguanosine
  modified_base 10: mod_base = OTHER; note = 2'-Omethylguanosine
  modified_base 11: mod_base = OTHER; note = 2'-Omethylcytosine
  modified_base 12: mod_base = OTHER; note = 2'-Omethylguanosine
  modified_base 13: mod_base = OTHER; note = 2'-Omethylcytosine
  modified_base 14: mod_base = OTHER; note = 2'-Omethyladenosine
  modified_base 15: mod_base = OTHER; note = 2'-Omethyladenosine
  modified_base 16: mod_base = OTHER; note = 2'-Omethylcytosine
  modified_base 17: mod_base = OTHER; note = 2'-Omethylguanosine
  modified_base 18: mod_base = OTHER; note = 2'-Omethylguanosine
  modified_base 19: mod_base = OTHER; note = Uridine phosphorothiorate
  modified_base 20: mod_base = OTHER; note = Adenosine phosphorothiorate
  modified_base 21: mod_base = OTHER; note = 2'-Omethylguanosine
  modified_base 22: mod_base = OTHER; note = 2'-Omethylcytosine
  modified_base 23: mod_base = OTHER; note = 2'-Omethylguanosine
  modified_base 24: mod_base = OTHER; note = 2'-Omethylcytosine
  modified_base 32: mod_base = OTHER; note = Uridine phosphorothiorate
  modified_base 33: mod_base = OTHER; note = 2'-Omethylcytosine
  modified_base 34: mod_base = OTHER; note = Uridine phosphorothiorate
  modified_base 36: mod_base = OTHER; note = Guanosine phosphorothiorate
  modified_base 37: mod_base = OTHER; note = Adenosine phosphorothiorate
  modified_base 40: mod_base = OTHER; note = 2'-fluoroadenosine
  modified_base 41: mod_base = OTHER; note = 2'-Omethylguanosine
  modified_base 42: mod_base = OTHER; note = 2'-Omethyladenosine
  modified_base 43: mod_base = OTHER; note = 2'-fluoroadenosine
  modified_base 48: mod_base = OTHER; note = 2'-Omethylguanosine
  modified_base 49: mod_base = OTHER; note = 2'-Omethylcytosine
  modified_base 51: mod_base = OTHER; note = 2'-Omethyluridine
  modified_base 53: mod_base = OTHER; note = Uridine phosphorothiorate
  modified_base 54: mod_base = OTHER; note = Uridine phosphorothiorate
  modified_base 60: mod_base = OTHER; note = 2'-Omethylcytosine
  modified_base 64: mod_base = OTHER; note = 2'-Omethyluridine
  modified_base 72: mod_base = OTHER; note = 2'-Omethyladenosine

SEQ ID NO: 4592 - RNA, 74 nt, synthetic construct; identical to SEQ ID NO: 766
  source 1..74: mol_type = other RNA
  modified_base 1: mod_base = OTHER; note = 2'-Omethylguanosine phosphorothiorate
  modified_base 2: mod_base = OTHER; note = 2'-Omethylguanosine
  modified_base 3: mod_base = OTHER; note = 2'-Omethylcytosine
  modified_base 4: mod_base = OTHER; note = 2'-Omethyluridine
  modified_base 5: mod_base = OTHER; note = 2'-Omethylcytosine
  modified_base 6: mod_base = OTHER; note = 2'-Omethylcytosine
  modified_base 14: mod_base = OTHER; note = 2'-Omethyladenosine
  modified_base 15: mod_base = OTHER; note = 2'-Omethyladenosine
  modified_base 16: mod_base = OTHER; note = 2'-Omethyluridine
  modified_base 17: mod_base = OTHER; note = 2'-Omethylguanosine
  modified_base 18: mod_base = OTHER; note = 2'-Omethylguanosine
  modified_base 20: mod_base = OTHER; note = 2'-Omethyluridine
  modified_base 25: mod_base = OTHER; note = 2'-Omethylcytosine
  modified_base 33: mod_base = OTHER; note = 2'-fluorouridine
  modified_base 35: mod_base = OTHER; note = Cytosine phosphorothiorate
  modified_base 37: mod_base = OTHER; note = Adenosine phosphorothiorate
  modified_base 38: mod_base = OTHER; note = Adenosine phosphorothiorate
  modified_base 49: mod_base = OTHER; note = 2'-Omethylcytosine
  modified_base 50: mod_base = OTHER; note = 2'-Omethylcytosine
  modified_base 52: mod_base = OTHER; note = 2'-Omethylguanosine
  modified_base 54: mod_base = OTHER; note = 2'-Omethyluridine
  modified_base 55: mod_base = OTHER; note = Uridine phosphorothiorate
  modified_base 56: mod_base = OTHER; note = 2'-Omethylcytosine
  modified_base 57: mod_base = OTHER; note = 2'-fluoroguanosine
  modified_base 59: mod_base = OTHER; note = 2'-Omethylguanosine
  modified_base 61: mod_base = OTHER; note = 2'-Omethylcytosine
  modified_base 62: mod_base = OTHER; note = 2'-Omethylcytosine
  modified_base 63: mod_base = OTHER; note = 2'-fluorocytosine
  modified_base 64: mod_base = OTHER; note = 2'-Omethylguanosine
  modified_base 65: mod_base = OTHER; note = 2'-Omethylguanosine
  modified_base 73: mod_base = OTHER; note = 2'-Omethylguanosine

SEQ ID NO: 4593 - DNA, 76 bp, synthetic construct; identical to SEQ ID NO: 1924
  source 1..76: mol_type = other DNA
  modified_base 1: mod_base = OTHER; note = 2'-Omethylguanosine
  modified_base 2: mod_base = OTHER; note = 2'-O-(2-Methoxyethyl) guanosine
  modified_base 3: mod_base = OTHER; note = deoxycytosine phosphorothiorate
  modified_base 4: mod_base = OTHER; note = 2'-fluorouridine
  modified_base 5: mod_base = OTHER; note = Cytosine phosphorothiorate
  modified_base 6: mod_base = OTHER; note = 2'-Omethylcytosine phosphorothiorate
  modified_base 11: mod_base = OTHER; note = Cytosine phosphorothiorate
  modified_base 14: mod_base = OTHER; note = 2'-O-(2-Methoxyethyl) adenosine
  modified_base 15: mod_base = OTHER; note = 2'-fluoroadenosine
  modified_base 17: mod_base = OTHER; note = Guanosine phosphorothiorate
  modified_base 19: mod_base = OTHER; note = Adenosine phosphorothiorate
  modified_base 31: mod_base = OTHER; note = Adenosine phosphorothiorate
  modified_base 32: mod_base = OTHER; note = 2'-O-(2-Methoxyethyl) 5-methylcytosine
  modified_base 36: mod_base = OTHER; note = Adenosine phosphorothiorate
  modified_base 37: mod_base = OTHER; note = Adenosine phosphorothiorate
  modified_base 39: mod_base = OTHER; note = Uridine phosphorothiorate
  modified_base 42: mod_base = OTHER; note = 2'-O-(2-Methoxyethyl) adenosine
  modified_base 43: mod_base = OTHER; note = 2'-fluoroadenosine
  modified_base 47: mod_base = OTHER; note = 2'-O-(2-Methoxyethyl) thymine
  modified_base 50: mod_base = OTHER; note = 2'-Omethylcytosine
  modified_base 63: mod_base = OTHER; note = Cytosine phosphorothiorate
  modified_base 64: mod_base = OTHER; note = deoxyguanosine phosphorothiorate
  modified_base 65: mod_base = OTHER; note = 2'-fluoroguanosine
  modified_base 68: mod_base = OTHER; note = Guanosine phosphorothiorate
  modified_base 69: mod_base = OTHER; note = Adenosine phosphorothiorate
  modified_base 73: mod_base = OTHER; note = 2'-O-(2-Methoxyethyl) guanosine
  misc_feature 1..2: note = RNA
  misc_feature 3: note = DNA
  misc_feature 4..6: note = RNA
  misc_feature 7: note = DNA
  misc_feature 8..15: note = RNA
  misc_feature 16: note = DNA
  misc_feature 17..53: note = RNA
  misc_feature 54: note = DNA
  misc_feature 55..56: note = RNA
  misc_feature 57: note = DNA
  misc_feature 58..63: note = RNA
  misc_feature 64: note = DNA
  misc_feature 65..73: note = RNA
  misc_feature 74: note = DNA
  misc_feature 75..76: note = RNA

SEQ ID NO: 4594 - RNA, 75 nt, synthetic construct; identical to SEQ ID NO: 3306
  source 1..75: mol_type = other RNA
  modified_base 1: mod_base = OTHER; note = 2'-Omethylguanosine
  modified_base 2: mod_base = OTHER; note = 2'-Omethyladenosine
  modified_base 3: mod_base = OTHER; note = 2'-Omethylcytosine
  modified_base 4: mod_base = OTHER; note = 2'-Omethylcytosine
  modified_base 5: mod_base = OTHER; note = 2'-Omethyluridine
  modified_base 6: mod_base = OTHER; note = 2'-Omethylcytosine
  modified_base 13: mod_base = OTHER; note = 2'-Omethylcytosine
  modified_base 14: mod_base = OTHER; note = 2'-Omethyladenosine
  modified_base 15: mod_base = OTHER; note = 2'-Omethyladenosine
  modified_base 16: mod_base = OTHER; note = 2'-Omethylcytosine
  modified_base 17: mod_base = OTHER; note = 2'-Omethylguanosine
  modified_base 18: mod_base = OTHER; note = 2'-Omethylguanosine
  modified_base 19: mod_base = OTHER; note = Uridine phosphorothiorate
  modified_base 20: mod_base = OTHER; note = Adenosine phosphorothiorate
  modified_base 24: mod_base = OTHER; note = 2'-Omethylcytosine
  modified_base 32: mod_base = OTHER; note = Uridine phosphorothiorate
  modified_base 33: mod_base = OTHER; note = 2'-Omethylcytosine
  modified_base 34: mod_base = OTHER; note = Uridine phosphorothiorate
  modified_base 36: mod_base = OTHER; note = Guanosine phosphorothiorate
  modified_base 37: mod_base = OTHER; note = Adenosine phosphorothiorate
  modified_base 48: mod_base = OTHER; note = 2'-Omethylguanosine
  modified_base 49: mod_base = OTHER; note = 2'-Omethylcytosine
  modified_base 50: mod_base = OTHER; note = 2'-Omethylguanosine
  modified_base 51: mod_base = OTHER; note = 2'-Omethyluridine
  modified_base 52: mod_base = OTHER; note = 2'-Omethylguanosine
  modified_base 53: mod_base = OTHER; note = Uridine phosphorothiorate
  modified_base 54: mod_base = OTHER; note = Uridine phosphorothiorate
  modified_base 60: mod_base = OTHER; note = 2'-Omethylcytosine
  modified_base 64: mod_base = OTHER; note = 2'-Omethyluridine
  modified_base 72: mod_base = OTHER; note = 2'-Omethyladenosine

SEQ ID NO: 4595 - RNA, 75 nt, synthetic construct; identical to SEQ ID NO: 3311
  source 1..75: mol_type = other RNA
  modified_base 1: mod_base = OTHER; note = 2'-Omethylguanosine phosphorothiorate
  modified_base 2: mod_base = OTHER; note = 2'-Omethylguanosine phosphorothiorate
  modified_base 9: mod_base = OTHER; note = Guanosine phosphorothiorate
  modified_base 10: mod_base = OTHER; note = Guanosine phosphorothiorate
  modified_base 11: mod_base = OTHER; note = 2'-fluorouridine
  modified_base 17: mod_base = OTHER; note = Guanosine phosphorothiorate
  modified_base 19: mod_base = OTHER; note = 2'-fluorouridine
  modified_base 23: mod_base = OTHER; note = Cytosine phosphorothiorate
  modified_base 37: mod_base = OTHER; note = 2'-fluoroadenosine
  modified_base 56: mod_base = OTHER; note = 2'-fluoroguanosine phosphorothiorate
  modified_base 59: mod_base = OTHER; note = 2'-fluorouridine
  modified_base 67: mod_base = OTHER; note = 2'-fluoroguanosine
  modified_base 73: mod_base = OTHER; note = Cytosine phosphorothiorate

SEQ ID NO: 4596 - RNA, 75 nt, synthetic construct; identical to SEQ ID NO: 3336
  source 1..75: mol_type = other RNA
  modified_base 14: mod_base = OTHER; note = Guanosine phosphorothiorate
  modified_base 18: mod_base = OTHER; note = 2'-fluoroguanosine
  modified_base 24: mod_base = OTHER; note = Cytosine phosphorothiorate
  modified_base 26: mod_base = OTHER; note = Uridine phosphorothiorate
  modified_base 46: mod_base = OTHER; note = 2'-fluorouridine
  modified_base 55: mod_base = OTHER; note = Cytosine phosphorothiorate
  modified_base 73: mod_base = OTHER; note = Cytosine phosphorothiorate
  modified_base 74: mod_base = OTHER; note = 2'-Omethylcytosine

SEQ ID NO: 4597 - RNA, 76 nt, synthetic construct; identical to SEQ ID NO: 625
  source 1..76: mol_type = other RNA
  modified_base 1: mod_base = OTHER; note = Guanosine phosphorothiorate
  modified_base 2: mod_base = OTHER; note = 2'-fluoroguanosine
  modified_base 4: mod_base = OTHER; note = Uridine phosphorothiorate
  modified_base 5: mod_base = OTHER; note = 2'-fluorocytosine
  modified_base 10: mod_base = OTHER; note = 2'-Omethylguanosine
  modified_base 11: mod_base = OTHER; note = 2'-Omethylcytosine
  modified_base 13: mod_base = OTHER; note = 2'-fluorocytosine
  modified_base 16: mod_base = OTHER; note = Uridine phosphorothiorate
  modified_base 17: mod_base = OTHER; note = 2'-Omethylguanosine
  modified_base 20: mod_base = OTHER; note = Uridine phosphorothiorate
  modified_base 24: mod_base = OTHER; note = Guanosine phosphorothiorate
  modified_base 27: mod_base = OTHER; note = 2'-Omethyluridine phosphorothiorate
  modified_base 28: mod_base = OTHER; note = Uridine phosphorothiorate
  modified_base 29: mod_base = OTHER; note = 2'-fluoroguanosine phosphorothiorate
  modified_base 30: mod_base = OTHER; note = 2'-Omethylguanosine
  modified_base 31: mod_base = OTHER; note = 2'-Omethyladenosine
  modified_base 34: mod_base = OTHER; note = Uridine phosphorothiorate
  modified_base 40: mod_base = OTHER; note = 2'-Omethyluridine
  modified_base 45: mod_base = OTHER; note = 2'-fluoroguanosine
  modified_base 46: mod_base = OTHER; note = Guanosine phosphorothiorate
  modified_base 48: mod_base = OTHER; note = 2'-Omethyluridine
  modified_base 49: mod_base = OTHER; note = Cytosine phosphorothiorate
  modified_base 51: mod_base = OTHER; note = 2'-Omethylguanosine
  modified_base 54: mod_base = OTHER; note = 2'-Omethyluridine
  modified_base 57: mod_base = OTHER; note = 2'-fluoroguanosine
  modified_base 60: mod_base = OTHER; note = 2'-Omethyluridine
  modified_base 61: mod_base = OTHER; note = Cytosine phosphorothiorate
  modified_base 62: mod_base = OTHER; note = 2'-Omethylcytosine
  modified_base 63: mod_base = OTHER; note = 2'-fluorocytosine
  modified_base 64: mod_base = OTHER; note = 2'-Omethylguanosine
  modified_base 66: mod_base = OTHER; note = Cytosine phosphorothiorate
  modified_base 67: mod_base = OTHER; note = 2'-Omethylguanosine
  modified_base 68: mod_base = OTHER; note = 2'-fluoroguanosine phosphorothiorate
  modified_base 71: mod_base = OTHER; note = 2'-Omethyluridine
  modified_base 72: mod_base = OTHER; note = 2'-Omethylcytosine
  modified_base 74: mod_base = OTHER; note = Cytosine phosphorothiorate
  modified_base 75: mod_base = OTHER; note = 2'-fluorocytosine

SEQ ID NO: 4598 - RNA, 76 nt, synthetic construct; identical to SEQ ID NO: 625
  source 1..76: mol_type = other RNA
  modified_base 1: mod_base = OTHER; note = 2'-Omethylguanosine phosphorothiorate
  modified_base 2: mod_base = OTHER; note = 2'-Omethylguanosine
  modified_base 4: mod_base = OTHER; note = 2'-Omethyluridine
  modified_base 6: mod_base = OTHER; note = 2'-fluorocytosine
  modified_base 10: mod_base = OTHER; note = 2'-Omethylguanosine
  modified_base 12: mod_base = OTHER; note = 2'-Omethylguanosine
  modified_base 13: mod_base = OTHER; note = 2'-Omethylcytosine
  modified_base 20: mod_base = OTHER; note = 2'-fluorouridine
  modified_base 23: mod_base = OTHER; note = 2'-Omethylcytosine
  modified_base 25: mod_base = OTHER; note = 2'-fluorocytosine phosphorothiorate
  modified_base 28: mod_base = OTHER; note = 2'-Omethyluridine
  modified_base 33: mod_base = OTHER; note = 2'-fluorouridine phosphorothiorate
  modified_base 36: mod_base = OTHER; note = Adenosine phosphorothiorate
  modified_base 38: mod_base = OTHER; note = 2'-Omethyladenosine
  modified_base 39: mod_base = OTHER; note = 2'-Omethyluridine
  modified_base 41: mod_base = OTHER; note = 2'-Omethylcytosine
  modified_base 45: mod_base = OTHER; note = 2'-Omethylguanosine
  modified_base 46: mod_base = OTHER; note = 2'-fluoroguanosine
  modified_base 47: mod_base = OTHER; note = 2'-Omethyluridine
  modified_base 48: mod_base = OTHER; note = Uridine phosphorothiorate
  modified_base 49: mod_base = OTHER; note = 2'-Omethylcytosine
  modified_base 51: mod_base = OTHER; note = 2'-Omethylguanosine
  modified_base 54: mod_base = OTHER; note = 2'-fluorouridine
  modified_base 56: mod_base = OTHER; note = 2'-Omethylcytosine
  modified_base 57: mod_base = OTHER; note = Guanosine phosphorothiorate
  modified_base 61: mod_base = OTHER; note = Cytosine phosphorothiorate
  modified_base 63: mod_base = OTHER; note = Cytosine phosphorothiorate
  modified_base 64: mod_base = OTHER; note = 2'-fluoroguanosine
  modified_base 67: mod_base = OTHER; note = 2'-fluoroguanosine
  modified_base 69: mod_base = OTHER; note = Adenosine phosphorothiorate
  modified_base 70: mod_base = OTHER; note = 2'-fluoroguanosine
  modified_base 71: mod_base = OTHER; note = 2'-Omethyluridine
  modified_base 73: mod_base = OTHER; note = 2'-fluoroguanosine
  modified_base 74: mod_base = OTHER; note = Cytosine phosphorothiorate
  modified_base 75: mod_base = OTHER; note = 2'-fluorocytosine

SEQ ID NO: 4599 - RNA, 76 nt, synthetic construct; identical to SEQ ID NO: 625
  source 1..76: mol_type = other RNA
  modified_base 2: mod_base = OTHER; note = 2'-fluoroguanosine
  modified_base 3: mod_base = OTHER; note = Cytosine phosphorothiorate
  modified_base 4: mod_base = OTHER; note = Uridine phosphorothiorate
  modified_base 7: mod_base = OTHER; note = Guanosine phosphorothiorate
  modified_base 9: mod_base = OTHER; note = Guanosine phosphorothiorate
  modified_base 10: mod_base = OTHER; note = 2'-fluoroguanosine
  modified_base 13: mod_base = OTHER; note = 2'-Omethylcytosine
  modified_base 14: mod_base = OTHER; note = 2'-Omethyladenosine
  modified_base 15: mod_base = OTHER; note = 2'-fluoroadenosine
  modified_base 16: mod_base = OTHER; note = 2'-Omethyluridine
  modified_base 20: mod_base = OTHER; note = 2'-fluorouridine
  modified_base 22: mod_base = OTHER; note = 2'-Omethylguanosine
  modified_base 23: mod_base = OTHER; note = 2'-fluorocytosine
  modified_base 26: mod_base = OTHER; note = 2'-fluoroadenosine phosphorothiorate
  modified_base 27: mod_base = OTHER; note = 2'-fluorouridine
  modified_base 28: mod_base = OTHER; note = Uridine phosphorothiorate
  modified_base 29: mod_base = OTHER; note = 2'-fluoroguanosine phosphorothiorate
  modified_base 30: mod_base = OTHER; note = 2'-Omethylguanosine
  modified_base 31: mod_base = OTHER; note = 2'-Omethyladenosine
  modified_base 41: mod_base = OTHER; note = 2'-fluorocytosine phosphorothiorate
  modified_base 42: mod_base = OTHER; note = 2'-fluoroadenosine
  modified_base 43: mod_base = OTHER; note = 2'-fluoroadenosine
  modified_base 48: mod_base = OTHER; note = 2'-Omethyluridine phosphorothiorate
  modified_base 49: mod_base = OTHER; note = 2'-fluorocytosine
  modified_base 52: mod_base = OTHER; note = Guanosine phosphorothiorate
  modified_base 53: mod_base = OTHER; note = 2'-fluoroguanosine
  modified_base 55: mod_base = OTHER; note = Uridine phosphorothiorate
  modified_base 56: mod_base = OTHER; note = 2'-fluorocytosine
  modified_base 57: mod_base = OTHER; note = 2'-Omethylguanosine
  modified_base 59: mod_base = OTHER; note = 2'-fluoroguanosine
  modified_base 62: mod_base = OTHER; note = 2'-fluorocytosine
  modified_base 63: mod_base = OTHER; note = Cytosine phosphorothiorate
  modified_base 64: mod_base = OTHER; note = 2'-fluoroguanosine
  modified_base 65: mod_base = OTHER; note = 2'-Omethylguanosine
  modified_base 69: mod_base = OTHER; note = 2'-Omethyladenosine
  modified_base 70: mod_base = OTHER; note = Guanosine phosphorothiorate
  modified_base 71: mod_base = OTHER; note = 2'-Omethyluridine
  modified_base 72: mod_base = OTHER; note = 2'-Omethylcytosine
  modified_base 75: mod_base = OTHER; note = 2'-Omethylcytosine

SEQ ID NO: 4600 - RNA, 76 nt, synthetic construct; identical to SEQ ID NO: 625
  source 1..76: mol_type = other RNA
  modified_base 1: mod_base = OTHER; note = 2'-Omethylguanosine
  modified_base 2: mod_base = OTHER; note = 2'-Omethylguanosine
  modified_base 3: mod_base = OTHER; note = 2'-Omethylcytosine
  modified_base 4: mod_base = OTHER; note = 2'-Omethyluridine
  modified_base 5: mod_base = OTHER; note = 2'-Omethylcytosine
  modified_base 6: mod_base = OTHER; note = 2'-Omethylcytosine
  modified_base 10: mod_base = OTHER; note = 2'-Omethylguanosine
  modified_base 13: mod_base = OTHER; note = 2'-Omethylcytosine
  modified_base 14: mod_base = OTHER; note = 2'-Omethyladenosine
  modified_base 16: mod_base = OTHER; note = 2'-Omethyluridine
  modified_base 17: mod_base = OTHER; note = 2'-Omethylguanosine
  modified_base 18: mod_base = OTHER; note = 2'-fluoroguanosine phosphorothiorate
  modified_base 21: mod_base = OTHER; note = 2'-fluoroadenosine phosphorothiorate
  modified_base 22: mod_base = OTHER; note = Guanosine phosphorothiorate
  modified_base 23: mod_base = OTHER; note = 2'-Omethylcytosine
  modified_base 24: mod_base = OTHER; note = 2'-Omethylguanosine
  modified_base 25: mod_base = OTHER; note = Cytosine phosphorothiorate
  modified_base 29: mod_base = OTHER; note = Guanosine phosphorothiorate
  modified_base 30: mod_base = OTHER; note = 2'-fluoroguanosine phosphorothiorate
  modified_base 31: mod_base = OTHER; note = 2'-Omethyladenosine phosphorothiorate
  modified_base 33: mod_base = OTHER; note = 2'-fluorouridine
  modified_base 35: mod_base = OTHER; note = 2'-Omethylcytosine phosphorothiorate
  modified_base 36: mod_base = OTHER; note = 2'-Omethyladenosine phosphorothiorate
  modified_base 40: mod_base = OTHER; note = 2'-Omethyluridine
  modified_base 41: mod_base = OTHER; note = 2'-Omethylcytosine
  modified_base 42: mod_base = OTHER; note = Adenosine phosphorothiorate
  modified_base 43: mod_base = OTHER; note = Adenosine phosphorothiorate
  modified_base 44: mod_base = OTHER; note = 2'-Omethyladenosine
  modified_base 49: mod_base = OTHER; note = 2'-Omethylcytosine
  modified_base 50: mod_base = OTHER; note = 2'-Omethylcytosine
  modified_base 52: mod_base = OTHER; note = 2'-Omethylguanosine
  modified_base 53: mod_base = OTHER; note = 2'-Omethylguanosine
  modified_base 54: mod_base = OTHER; note = Uridine phosphorothiorate
  modified_base 55: mod_base = OTHER; note = Uridine phosphorothiorate
  modified_base 59: mod_base = OTHER; note = 2'-Omethylguanosine
  modified_base 61: mod_base = OTHER; note = Cytosine phosphorothiorate
  modified_base 62: mod_base = OTHER; note = 2'-Omethylcytosine
  modified_base 63: mod_base = OTHER; note = 2'-Omethylcytosine phosphorothiorate
  modified_base 64: mod_base = OTHER; note = 2'-Omethylguanosine phosphorothiorate
  modified_base 65: mod_base = OTHER; note = 2'-Omethylguanosine phosphorothiorate
  modified_base 66: mod_base = OTHER; note = 2'-Omethylcytosine phosphorothiorate
  modified_base 67: mod_base = OTHER; note = 2'-Omethylguanosine
  modified_base 68: mod_base = OTHER; note = 2'-fluoroguanosine
  modified_base 69: mod_base = OTHER; note = 2'-fluoroadenosine
  modified_base 70: mod_base = OTHER; note = 2'-fluoroguanosine phosphorothiorate
  modified_base 71: mod_base = OTHER; note = 2'-Omethyluridine phosphorothiorate
  modified_base 73: mod_base = OTHER; note = 2'-fluoroguanosine phosphorothiorate
  modified_base 74: mod_base = OTHER; note = 2'-fluorocytosine phosphorothiorate
  modified_base 75: mod_base = OTHER; note = Cytosine phosphorothiorate
  modified_base 76: mod_base = OTHER; note = 2'-Omethyladenosine

SEQ ID NO: 4601 - RNA, 76 nt, synthetic construct; identical to SEQ ID NO: 625
  source 1..76: mol_type = other RNA
  modified_base 2: mod_base = OTHER; note = Guanosine phosphorothiorate
  modified_base 3: mod_base = OTHER; note = 2'-Omethylcytosine
  modified_base 4: mod_base = OTHER; note = 2'-fluorouridine
  modified_base 5: mod_base = OTHER; note = 2'-Omethylcytosine
  modified_base 7: mod_base = OTHER; note = Guanosine phosphorothiorate
  modified_base 11: mod_base = OTHER; note = 2'-fluorocytosine phosphorothiorate
  modified_base 12: mod_base = OTHER; note = 2'-fluoroguanosine
  modified_base 13: mod_base = OTHER; note = 2'-fluorocytosine
  modified_base 15: mod_base = OTHER; note = 2'-Omethyladenosine
  modified_base 16: mod_base = OTHER; note = 2'-Omethyluridine
  modified_base 18: mod_base = OTHER; note = 2'-Omethylguanosine
  modified_base 20: mod_base = OTHER; note = 2'-Omethyluridine
  modified_base 21: mod_base = OTHER; note = Adenosine phosphorothiorate
  modified_base 23: mod_base = OTHER; note = 2'-fluorocytosine
  modified_base 24: mod_base = OTHER; note = 2'-Omethylguanosine
  modified_base 25: mod_base = OTHER; note = 2'-fluorocytosine
  modified_base 26: mod_base = OTHER; note = 2'-Omethyladenosine
  modified_base 28: mod_base = OTHER; note = Uridine phosphorothiorate
  modified_base 29: mod_base = OTHER; note = 2'-Omethylguanosine
  modified_base 31: mod_base = OTHER; note = 2'-Omethyladenosine
  modified_base 37: mod_base = OTHER; note = Adenosine phosphorothiorate
  modified_base 38: mod_base = OTHER; note = 2'-Omethyladenosine
  modified_base 40: mod_base = OTHER; note = 2'-fluorouridine
  modified_base 42: mod_base = OTHER; note = 2'-Omethyladenosine
  modified_base 45: mod_base = OTHER; note = Guanosine phosphorothiorate
  modified_base 47: mod_base = OTHER; note = Uridine phosphorothiorate
  modified_base 52: mod_base = OTHER; note = 2'-fluoroguanosine
  modified_base 53: mod_base = OTHER; note = Guanosine phosphorothiorate
  modified_base 55: mod_base = OTHER; note = Uridine phosphorothiorate
  modified_base 56: mod_base = OTHER; note = 2'-fluorocytosine phosphorothiorate
  modified_base 57: mod_base = OTHER; note = 2'-fluoroguanosine
  modified_base 60: mod_base = OTHER; note = 2'-fluorouridine
  modified_base 61: mod_base = OTHER; note = 2'-Omethylcytosine
  modified_base 62: mod_base = OTHER; note = 2'-Omethylcytosine
  modified_base 64: mod_base = OTHER; note = 2'-fluoroguanosine
  modified_base 65: mod_base = OTHER; note = 2'-fluoroguanosine
  modified_base 68: mod_base = OTHER; note = 2'-fluoroguanosine
  modified_base 69: mod_base = OTHER; note = 2'-fluoroadenosine
  modified_base 71: mod_base = OTHER; note = 2'-Omethyluridine

SEQ ID NO: 4602 - RNA, 76 nt, synthetic construct; identical to SEQ ID NO: 625
  source 1..76: mol_type = other RNA
  modified_base 10: mod_base = OTHER; note = 2'-Omethylguanosine
  modified_base 11: mod_base = OTHER; note = 2'-Omethylcytosine
  modified_base 12: mod_base = OTHER; note = 2'-Omethylguanosine
  modified_base 13: mod_base = OTHER; note = 2'-Omethylcytosine
  modified_base 40: mod_base = OTHER; note = 2'-fluorouridine
  modified_base 41: mod_base = OTHER; note = 2'-fluorocytosine
  modified_base 42: mod_base = OTHER; note = 2'-fluoroadenosine
  modified_base 43: mod_base = OTHER; note = 2'-fluoroadenosine

SEQ ID NO: 4603 - RNA, 76 nt, synthetic construct; identical to SEQ ID NO: 3325
  source 1..76: mol_type = other RNA
  modified_base 1: mod_base = OTHER; note = 2'-Omethyluridine
  modified_base 13: mod_base = OTHER; note = 2'-Omethylcytosine
  modified_base 14: mod_base = OTHER; note = 2'-Omethyladenosine
  modified_base 15: mod_base = OTHER; note = 2'-Omethyladenosine
  modified_base 16: mod_base = OTHER; note = 2'-Omethyluridine
  modified_base 17: mod_base = OTHER; note = 2'-Omethylguanosine
  modified_base 18: mod_base = OTHER; note = 2'-Omethylguanosine
  modified_base 19: mod_base = OTHER; note = Adenosine phosphorothiorate
  modified_base 20: mod_base = OTHER; note = 2'-Omethyluridine
  modified_base 21: mod_base = OTHER; note = Adenosine phosphorothiorate
  modified_base 25: mod_base = OTHER; note = 2'-Omethylcytosine
  modified_base 41: mod_base = OTHER; note = 2'-fluorocytosine
  modified_base 42: mod_base = OTHER; note = 2'-Omethyladenosine
  modified_base 43: mod_base = OTHER; note = 2'-Omethyladenosine
  modified_base 44: mod_base = OTHER; note = 2'-fluoroadenosine
  modified_base 49: mod_base = OTHER; note = 2'-Omethylcytosine
  modified_base 50: mod_base = OTHER; note = 2'-Omethylcytosine
  modified_base 51: mod_base = OTHER; note = 2'-Omethylguanosine
  modified_base 52: mod_base = OTHER; note = 2'-Omethylguanosine
  modified_base 53: mod_base = OTHER; note = 2'-Omethylguanosine
  modified_base 54: mod_base = OTHER; note = Uridine phosphorothiorate
  modified_base 55: mod_base = OTHER; note = Uridine phosphorothiorate
  modified_base 61: mod_base = OTHER; note = 2'-Omethylcytosine
  modified_base 65: mod_base = OTHER; note = 2'-Omethylguanosine
  modified_base 73: mod_base = OTHER; note = 2'-Omethylguanosine

SEQ ID NO: 4604 - RNA, 75 nt, synthetic construct; identical to SEQ ID NO: 3299
  source 1..75: mol_type = other RNA
  modified_base 15: mod_base = OTHER; note = 2'-Omethyluridine
  modified_base 18: mod_base = OTHER; note = 2'-fluoroguanosine phosphorothiorate
  modified_base 20: mod_base = OTHER; note = 2'-fluoroadenosine
  modified_base 42: mod_base = OTHER; note = 2'-fluoroadenosine
  modified_base 45: mod_base = OTHER; note = 2'-fluoroguanosine
  modified_base 46: mod_base = OTHER; note = 2'-fluorouridine
  modified_base 52: mod_base = OTHER; note = 2'-fluoroguanosine phosphorothiorate
  modified_base 53: mod_base = OTHER; note = 2'-fluorouridine
  modified_base 73: mod_base = OTHER; note = Cytosine phosphorothiorate
  modified_base 74: mod_base = OTHER; note = 2'-Omethylcytosine

SEQ ID NO: 4605 - RNA, 76 nt, synthetic construct; identical to SEQ ID NO: 3332
  source 1..76: mol_type = other RNA
  modified_base 1: mod_base = OTHER; note = 2'-Omethylguanosine
  modified_base 2: mod_base = OTHER; note = 2'-Omethylguanosine
  modified_base 3: mod_base = OTHER; note = 2'-Omethylcytosine
  modified_base 4: mod_base = OTHER; note = 2'-Omethylcytosine
  modified_base 5: mod_base = OTHER; note = 2'-Omethylcytosine
  modified_base 6: mod_base = OTHER; note = 2'-Omethylcytosine
  modified_base 16: mod_base = OTHER; note = 2'-Omethyluridine
  modified_base 17: mod_base = OTHER; note = 2'-Omethylguanosine
  modified_base 18: mod_base = OTHER; note = 2'-Omethylguanosine
  modified_base 20: mod_base = OTHER; note = 2'-Omethyluridine
  modified_base 25: mod_base = OTHER; note = 2'-Omethylcytosine
  modified_base 33: mod_base = OTHER; note = 2'-fluorouridine
  modified_base 35: mod_base = OTHER; note = Cytosine phosphorothiorate
  modified_base 37: mod_base = OTHER; note = Adenosine phosphorothiorate
  modified_base 38: mod_base = OTHER; note = Adenosine phosphorothiorate
  modified_base 41: mod_base = OTHER; note = 2'-fluorocytosine
  modified_base 42: mod_base = OTHER; note = 2'-Omethyladenosine
  modified_base 43: mod_base = OTHER; note = 2'-Omethyladenosine
  modified_base 44: mod_base = OTHER; note = 2'-fluoroadenosine
  modified_base 49: mod_base = OTHER; note = 2'-Omethylguanosine
  modified_base 50: mod_base = OTHER; note = 2'-Omethylcytosine
  modified_base 52: mod_base = OTHER; note = 2'-Omethylguanosine
  modified_base 54: mod_base = OTHER; note = 2'-Omethyluridine
  modified_base 55: mod_base = OTHER; note = Uridine phosphorothiorate
  modified_base 56: mod_base = OTHER; note = 2'-Omethylcytosine
  modified_base 57: mod_base = OTHER; note = 2'-fluoroguanosine
  modified_base 59: mod_base = OTHER; note = 2'-Omethylguanosine
  modified_base 61: mod_base = OTHER; note = 2'-Omethylcytosine
  modified_base 62: mod_base = OTHER; note = 2'-Omethylcytosine
  modified_base 63: mod_base = OTHER; note = 2'-fluorocytosine
  modified_base 64: mod_base = OTHER; note = 2'-Omethylguanosine
  modified_base 65: mod_base = OTHER; note = 2'-Omethylcytosine
  modified_base 73: mod_base = OTHER; note = 2'-Omethylguanosine

SEQ ID NO: 4606 - RNA, 76 nt, synthetic construct; identical to SEQ ID NO: 3318
  source 1..76: mol_type = other RNA
  modified_base 1: mod_base = OTHER; note = 2'-Omethylcytosine
  modified_base 16: mod_base = OTHER; note = 2'-Omethyluridine
  modified_base 18: mod_base = OTHER; note = 2'-Omethylguanosine
  modified_base 19: mod_base = OTHER; note = 2'-Omethylguanosine
  modified_base 54: mod_base = OTHER; note = 2'-Omethyluridine phosphorothiorate
  modified_base 55: mod_base = OTHER; note = Uridine phosphorothiorate
  modified_base 56: mod_base = OTHER; note = 2'-Omethylcytosine
  modified_base 57: mod_base = OTHER; note = 2'-fluoroguanosine
  modified_base 58: mod_base = OTHER; note = 2'-fluoroadenosine
  modified_base 59: mod_base = OTHER; note = 2'-Omethyladenosine
  modified_base 60: mod_base = OTHER; note = 2'-fluorouridine
  modified_base 73: mod_base = OTHER; note = 2'-Omethyladenosine

SEQ ID NO: 4607 - RNA, 76 nt, synthetic construct; identical to SEQ ID NO: 3295
  source 1..76: mol_type = other RNA
  modified_base 1: mod_base = OTHER; note = 2'-Omethylcytosine
  modified_base 2: mod_base = OTHER; note = 2'-Omethylcytosine
  modified_base 5: mod_base = OTHER; note = 2'-fluorocytosine
  modified_base 6: mod_base = OTHER; note = 2'-fluoroguanosine phosphorothiorate
  modified_base 9: mod_base = OTHER; note = Adenosine phosphorothiorate
  modified_base 12: mod_base = OTHER; note = 2'-Omethyluridine
  modified_base 24: mod_base = OTHER; note = 2'-fluoroguanosine phosphorothiorate
  modified_base 28: mod_base = OTHER; note = 2'-Omethyladenosine
  modified_base 29: mod_base = OTHER; note = 2'-fluoroguanosine phosphorothiorate
  modified_base 35: mod_base = OTHER; note = 2'-Omethyluridine phosphorothiorate
  modified_base 43: mod_base = OTHER; note = 2'-Omethyluridine
  modified_base 48: mod_base = OTHER; note = 2'-fluorocytosine phosphorothiorate
  modified_base 52: mod_base = OTHER; note = Guanosine phosphorothiorate
  modified_base 54: mod_base = OTHER; note = Uridine phosphorothiorate
  modified_base 66: mod_base = OTHER; note = 2'-fluorouridine
  modified_base 75: mod_base = OTHER; note = Cytosine phosphorothiorate

SEQ ID NO: 4608 - RNA, 85 nt, synthetic construct; identical to SEQ ID NO: 3286
  source 1..85: mol_type = other RNA
  modified_base 1: mod_base = OTHER; note = 2'-Omethylcytosine phosphorothiorate
  modified_base 2: mod_base = OTHER; note = 2'-fluorocytosine phosphorothiorate
  modified_base 3: mod_base = OTHER; note = 2'-Omethyladenosine
  modified_base 10: mod_base = OTHER; note = Cytosine phosphorothiorate
  modified_base 30: mod_base = OTHER; note = 2'-fluoroadenosine
  modified_base 52: mod_base = OTHER; note = Guanosine phosphorothiorate
  modified_base 53: mod_base = OTHER; note = Uridine phosphorothiorate
  modified_base 60: mod_base = OTHER; note = 2'-fluoroguanosine
  modified_base 84: mod_base = OTHER; note = 2'-Omethylcytosine

SEQ ID NO: 4609 - RNA, 76 nt, synthetic construct; identical to SEQ ID NO: 3675
  source 1..76: mol_type = other RNA
  modified_base 1: mod_base = OTHER; note = 2'-Omethylguanosine
  modified_base 14: mod_base = OTHER; note = 2'-Omethyladenosine
  modified_base 15: mod_base = OTHER; note = 2'-fluoroadenosine
  modified_base 16: mod_base = OTHER; note = 2'-Omethyluridine
  modified_base 17: mod_base = OTHER; note = 2'-Omethylguanosine
  modified_base 18: mod_base = OTHER; note = 2'-Omethylguanosine
  modified_base 19: mod_base = OTHER; note = 2'-fluoroadenosine
  modified_base 20: mod_base = OTHER; note = 2'-Omethyluridine
  modified_base 33: mod_base = OTHER; note = 2'-fluorouridine
  modified_base 35: mod_base = OTHER; note = Cytosine phosphorothiorate
  modified_base 37: mod_base = OTHER; note = Adenosine phosphorothiorate
  modified_base 38: mod_base = OTHER; note = Adenosine phosphorothiorate
  modified_base 41: mod_base = OTHER; note = 2'-Omethylcytosine
  modified_base 42: mod_base = OTHER; note = 2'-Omethyladenosine
  modified_base 43: mod_base = OTHER; note = 2'-Omethylcytosine
  modified_base 44: mod_base = OTHER; note = 2'-Omethyladenosine
  modified_base 50: mod_base = OTHER; note = 2'-Omethylcytosine
  modified_base 52: mod_base = OTHER; note = 2'-Omethylguanosine
  modified_base 73: mod_base = OTHER; note = 2'-Omethylguanosine

SEQ ID NO: 4610 - RNA, 74 nt, synthetic construct; identical to SEQ ID NO: 766
  source 1..74: mol_type = other RNA
  modified_base 1: mod_base = OTHER; note = 2'-Omethylguanosine phosphorothiorate
  modified_base 2: mod_base = OTHER; note = 2'-Omethylguanosine phosphorothiorate
  modified_base 13: mod_base = OTHER; note = 2'-fluorocytosine
  modified_base 14: mod_base = OTHER; note = 2'-fluoroadenosine
  modified_base 54: mod_base = OTHER; note = 2'-fluorouridine
  modified_base 59: mod_base = OTHER; note = 2'-Omethylguanosine
  modified_base 73: mod_base = OTHER; note = 2'-Omethylguanosine

SEQ ID NO: 4611 - RNA, 75 nt, synthetic construct; identical to SEQ ID NO: 3299
  source 1..75: mol_type = other RNA
  modified_base 1: mod_base = OTHER; note = 2'-Omethylcytosine
  modified_base 12: mod_base = OTHER; note = 2'-fluorocytosine phosphorothiorate
  modified_base 20: mod_base = OTHER; note = 2'-fluoroadenosine
  modified_base 23: mod_base = OTHER; note = 2'-fluoroguanosine
  modified_base 35: mod_base = OTHER; note = 2'-fluoroadenosine phosphorothiorate
  modified_base 47: mod_base = OTHER; note = 2'-fluorocytosine
  modified_base 73: mod_base = OTHER; note = Cytosine phosphorothiorate
  modified_base 74: mod_base = OTHER; note = 2'-Omethylcytosine

SEQ ID NO: 4612 - RNA, 73 nt, synthetic construct
  source 1..73: mol_type = other RNA
  modified_base 1: mod_base = OTHER; note = 2'-Omethylcytosine
  modified_base 18: mod_base = OTHER; note = 2'-Omethylguanosine
  modified_base 19: mod_base = OTHER; note = 2'-Omethylguanosine
  modified_base 50: mod_base = OTHER; note = 2'-Omethylcytosine
  modified_base 52: mod_base = OTHER; note = 2'-Omethylguanosine
ccttcgatagctcagttggtagagcggaggactctagatccttaggtcgctggttcgaatccggctcgaagga

SEQ ID NO: 4613 - RNA, 76 nt, synthetic construct; identical to SEQ ID NO: 625
  source 1..76: mol_type = other RNA
  modified_base 1: mod_base = OTHER; note = 2'-Omethylguanosine
  modified_base 2: mod_base = OTHER; note = 2'-Omethylguanosine
  modified_base 3: mod_base = OTHER; note = 2'-fluorocytosine
  modified_base 4: mod_base = OTHER; note = 2'-Omethyluridine
  modified_base 5: mod_base = OTHER; note = 2'-Omethylcytosine phosphorothiorate
  modified_base 6: mod_base = OTHER; note = 2'-Omethylcytosine
  modified_base 11: mod_base = OTHER; note = 2'-Omethylcytosine phosphorothiorate
  modified_base 12: mod_base = OTHER; note = 2'-Omethylguanosine
  modified_base 16: mod_base = OTHER; note = 2'-Omethyluridine
  modified_base 18: mod_base = OTHER; note = 2'-fluoroguanosine
  modified_base 20: mod_base = OTHER; note = 2'-fluorouridine
  modified_base 22: mod_base = OTHER; note = 2'-Omethylguanosine
  modified_base 25: mod_base = OTHER; note = 2'-Omethylcytosine
  modified_base 26: mod_base = OTHER; note = Adenosine phosphorothiorate
  modified_base 30: mod_base = OTHER; note = Guanosine phosphorothiorate
  modified_base 31: mod_base = OTHER; note = 2'-fluoroadenosine
  modified_base 34: mod_base = OTHER; note = 2'-Omethyluridine
  modified_base 36: mod_base = OTHER; note = Adenosine phosphorothiorate
  modified_base 38: mod_base = OTHER; note = Adenosine phosphorothiorate
  modified_base 39: mod_base = OTHER; note = 2'-fluorouridine
  modified_base 40: mod_base = OTHER; note = 2'-fluorouridine
  modified_base 41: mod_base = OTHER; note = Cytosine phosphorothiorate
  modified_base 42: mod_base = OTHER; note = 2'-Omethyladenosine
  modified_base 45: mod_base = OTHER; note = Guanosine phosphorothiorate
  modified_base 46: mod_base = OTHER; note = Guanosine phosphorothiorate
  modified_base 48: mod_base = OTHER; note = 2'-fluorouridine
  modified_base 52: mod_base = OTHER; note = 2'-Omethylguanosine
  modified_base 56: mod_base = OTHER; note = Cytosine phosphorothiorate
  modified_base 57: mod_base = OTHER; note = 2'-fluoroguanosine
  modified_base 58: mod_base = OTHER; note = Adenosine phosphorothiorate
  modified_base 59: mod_base = OTHER; note = 2'-Omethylguanosine
  modified_base 61: mod_base = OTHER; note = Cytosine phosphorothiorate
  modified_base 62: mod_base = OTHER; note = 2'-fluorocytosine phosphorothiorate
  modified_base 64: mod_base = OTHER; note = 2'-fluoroguanosine
  modified_base 67: mod_base = OTHER; note = 2'-Omethylguanosine
  modified_base 68: mod_base = OTHER; note = 2'-Omethylguanosine phosphorothiorate
  modified_base 69: mod_base = OTHER; note = 2'-fluoroadenosine
  modified_base 70: mod_base = OTHER; note = Guanosine phosphorothiorate
  modified_base 71: mod_base = OTHER; note = 2'-fluorouridine
  modified_base 72: mod_base = OTHER; note = 2'-Omethylcytosine
  modified_base 73: mod_base = OTHER; note = 2'-Omethylguanosine

SEQ ID NO: 4614 - RNA, 85 nt, synthetic construct; identical to SEQ ID NO: 3317
  source 1..85: mol_type = other RNA
  modified_base 1: mod_base = OTHER; note = 2'-Omethylguanosine phosphorothiorate
  modified_base 2: mod_base = OTHER; note = 2'-Omethylcytosine phosphorothiorate
  modified_base 3: mod_base = OTHER; note = 2'-Omethyluridine phosphorothiorate
  modified_base 4: mod_base = OTHER; note = 2'-Omethylguanosine
  modified_base 14: mod_base = OTHER; note = 2'-Omethyladenosine phosphorothiorate
  modified_base 16: mod_base = OTHER; note = 2'-Omethyluridine phosphorothiorate
  modified_base 22: mod_base = OTHER; note = 2'-fluoroadenosine
  modified_base 27: mod_base = OTHER; note = 2'-Omethyluridine
  modified_base 29: mod_base = OTHER; note = 2'-fluoroguanosine
  modified_base 33: mod_base = OTHER; note = 2'-fluorouridine
  modified_base 37: mod_base = OTHER; note = 2'-fluoroadenosine
  modified_base 41: mod_base = OTHER; note = 2'-fluorocytosine
  modified_base 47: mod_base = OTHER; note = 2'-fluoroguanosine
  modified_base 50: mod_base = OTHER; note = 2'-fluorocytosine phosphorothiorate
  modified_base 54: mod_base = OTHER; note = 2'-Omethylcytosine
  modified_base 56: mod_base = OTHER; note = 2'-Omethylguanosine
  modified_base 64: mod_base = OTHER; note = 2'-fluorouridine
  modified_base 65: mod_base = OTHER; note = 2'-fluorocytosine
  modified_base 70: mod_base = OTHER; note = 2'-Omethylcytosine
  modified_base 73: mod_base = OTHER; note = 2'-fluoroguanosine
  modified_base 82: mod_base = OTHER; note = 2'-Omethylguanosine

SEQ ID NO: 4615 - RNA, 76 nt, synthetic construct; identical to SEQ ID NO: 625
  source 1..76: mol_type = other RNA
  modified_base 1: mod_base = OTHER; note = 2'-Omethylguanosine
  modified_base 10: mod_base = OTHER; note = 2'-Omethylguanosine
  modified_base 13: mod_base = OTHER; note = 2'-Omethylcytosine
  modified_base 17: mod_base = OTHER; note = Guanosine phosphorothiorate
  modified_base 18: mod_base = OTHER; note = 2'-Omethylguanosine
  modified_base 19: mod_base = OTHER; note = Adenosine phosphorothiorate
  modified_base 20: mod_base = OTHER; note = 2'-Omethyluridine
  modified_base 25: mod_base = OTHER; note = 2'-Omethylcytosine
  modified_base 29: mod_base = OTHER; note = 2'-Omethylguanosine
  modified_base 30: mod_base = OTHER; note = 2'-Omethylguanosine
  modified_base 33: mod_base = OTHER; note = 2'-fluorouridine
  modified_base 35: mod_base = OTHER; note = Cytosine phosphorothiorate
  modified_base 37: mod_base = OTHER; note = Adenosine phosphorothiorate
  modified_base 38: mod_base = OTHER; note = Adenosine phosphorothiorate
  modified_base 43: mod_base = OTHER; note = 2'-Omethyladenosine
  modified_base 44: mod_base = OTHER; note = 2'-fluoroadenosine
  modified_base 46: mod_base = OTHER; note = Guanosine phosphorothiorate
  modified_base 50: mod_base = OTHER; note = 2'-Omethylcytosine
  modified_base 52: mod_base = OTHER; note = 2'-Omethylguanosine
  modified_base 54: mod_base = OTHER; note = Uridine phosphorothiorate
  modified_base 55: mod_base = OTHER; note = Uridine phosphorothiorate
  modified_base 56: mod_base = OTHER; note = 2'-Omethylcytosine
  modified_base 57: mod_base = OTHER; note = Guanosine phosphorothiorate
  modified_base 62: mod_base = OTHER; note = 2'-Omethylcytosine
  modified_base 63: mod_base = OTHER; note = 2'-fluorocytosine
  modified_base 65: mod_base = OTHER; note = 2'-Omethylguanosine
  modified_base 71: mod_base = OTHER; note = 2'-Omethyluridine
  modified_base 73: mod_base = OTHER; note = 2'-Omethylguanosine

SEQ ID NO: 4616 - RNA, 76 nt, synthetic construct; identical to SEQ ID NO: 3675
  source 1..76: mol_type = other RNA
  modified_base 1: mod_base = OTHER; note = 2'-Omethylguanosine phosphorothiorate
  modified_base 2: mod_base = OTHER; note = 2'-Omethylcytosine
  modified_base 3: mod_base = OTHER; note = 2'-Omethylcytosine
  modified_base 4: mod_base = OTHER; note = 2'-Omethyluridine
  modified_base 5: mod_base = OTHER; note = 2'-Omethylcytosine
  modified_base 6: mod_base = OTHER; note = 2'-Omethylcytosine
  modified_base 27: mod_base = OTHER; note = 2'-Omethylguanosine
  modified_base 28: mod_base = OTHER; note = 2'-Omethyluridine
  modified_base 29: mod_base = OTHER; note = 2'-fluoroguanosine
  modified_base 30: mod_base = OTHER; note = 2'-Omethylguanosine
  modified_base 40: mod_base = OTHER; note = 2'-fluorouridine
  modified_base 41: mod_base = OTHER; note = 2'-Omethylcytosine
  modified_base 42: mod_base = OTHER; note = 2'-Omethyladenosine
  modified_base 43: mod_base = OTHER; note = 2'-Omethylcytosine
  modified_base 73: mod_base = OTHER; note = 2'-Omethylguanosine

SEQ ID NO: 4617 - RNA, 76 nt, synthetic construct; identical to SEQ ID NO: 3295
  source 1..76: mol_type = other RNA
  modified_base 1: mod_base = OTHER; note = 2'-Omethylcytosine phosphorothiorate
  modified_base 2: mod_base = OTHER; note = 2'-fluorocytosine phosphorothiorate
  modified_base 3: mod_base = OTHER; note = 2'-fluorouridine
  modified_base 4: mod_base = OTHER; note = 2'-fluorouridine phosphorothiorate
  modified_base 8: mod_base = OTHER; note = Uridine phosphorothiorate
  modified_base 10: mod_base = OTHER; note = 2'-fluoroguanosine
  modified_base 15: mod_base = OTHER; note = 2'-fluoroguanosine
  modified_base 30: mod_base = OTHER; note = 2'-Omethylguanosine
  modified_base 37: mod_base = OTHER; note = 2'-fluoroguanosine phosphorothiorate
  modified_base 52: mod_base = OTHER; note = 2'-fluoroguanosine phosphorothiorate
  modified_base 75: mod_base = OTHER; note = Cytosine phosphorothiorate

SEQ ID NO: 4618 - RNA, 76 nt, synthetic construct; identical to SEQ ID NO: 625
  source 1..76: mol_type = other RNA
  modified_base 1: mod_base = OTHER; note = 2'-Omethylguanosine phosphorothiorate
  modified_base 2: mod_base = OTHER; note = 2'-Omethylguanosine phosphorothiorate
  modified_base 3: mod_base = OTHER; note = 2'-Omethylcytosine
  modified_base 4: mod_base = OTHER; note = 2'-Omethyluridine
  modified_base 5: mod_base = OTHER; note = 2'-Omethylcytosine
  modified_base 6: mod_base = OTHER; note = 2'-Omethylcytosine
  modified_base 10: mod_base = OTHER; note = 2'-Omethylguanosine
  modified_base 11: mod_base = OTHER; note = 2'-Omethylcytosine
  modified_base 12: mod_base = OTHER; note = 2'-Omethylguanosine
  modified_base 13: mod_base = OTHER; note = 2'-Omethylcytosine
  modified_base 14: mod_base = OTHER; note = 2'-Omethyladenosine
  modified_base 15: mod_base = OTHER; note = 2'-Omethyladenosine
  modified_base 16: mod_base = OTHER; note = 2'-Omethyluridine
  modified_base 17: mod_base = OTHER; note = 2'-Omethylguanosine
  modified_base 18: mod_base = OTHER; note = 2'-Omethylguanosine
  modified_base 20: mod_base = OTHER; note = 2'-Omethyluridine
  modified_base 22: mod_base = OTHER; note = 2'-Omethylguanosine
  modified_base 23: mod_base = OTHER; note = 2'-Omethylcytosine
  modified_base 24: mod_base = OTHER; note = 2'-Omethylguanosine
  modified_base 25: mod_base = OTHER; note = 2'-Omethylcytosine
  modified_base 33: mod_base = OTHER; note = 2'-fluorouridine
  modified_base 35: mod_base = OTHER; note = Cytosine phosphorothiorate
  modified_base 37: mod_base = OTHER; note = Adenosine phosphorothiorate
  modified_base 38: mod_base = OTHER; note = Adenosine phosphorothiorate
  modified_base 49: mod_base = OTHER; note = 2'-Omethylcytosine
  modified_base 50: mod_base = OTHER; note = 2'-Omethylcytosine
  modified_base 52: mod_base = OTHER; note = 2'-Omethylguanosine
  modified_base 54: mod_base = OTHER; note = 2'-Omethyluridine
  modified_base 55: mod_base = OTHER; note = Uridine phosphorothiorate
  modified_base 56: mod_base = OTHER; note = 2'-Omethylcytosine
  modified_base 57: mod_base = OTHER; note = 2'-fluoroguanosine
  modified_base 59: mod_base = OTHER; note = 2'-Omethylguanosine
  modified_base 61: mod_base = OTHER; note = 2'-Omethylcytosine
  modified_base 65: mod_base = OTHER; note = 2'-Omethylguanosine
  modified_base 74: mod_base = OTHER; note = Cytosine phosphorothiorate
  modified_base 75: mod_base = OTHER; note = 2'-Omethylcytosine phosphorothiorate
  modified_base 76: mod_base = OTHER; note = 2'-Omethyladenosine

SEQ ID NO: 4619 - RNA, 85 nt, synthetic construct; identical to SEQ ID NO: 3317
  source 1..85: mol_type = other RNA
  modified_base 1: mod_base = OTHER; note = 2'-Omethylguanosine phosphorothiorate
  modified_base 2: mod_base = OTHER; note = 2'-Omethylcytosine phosphorothiorate
  modified_base 4: mod_base = OTHER; note = 2'-Omethylguanosine phosphorothiorate
  modified_base 11: mod_base = OTHER; note = 2'-fluorocytosine
  modified_base 18: mod_base = OTHER; note = 2'-fluoroguanosine
  modified_base 19: mod_base = OTHER; note = 2'-Omethyluridine
  modified_base 22: mod_base = OTHER; note = 2'-fluoroadenosine
  modified_base 27: mod_base = OTHER; note = 2'-fluorouridine phosphorothiorate
  modified_base 34: mod_base = OTHER; note = 2'-fluorocytosine
  modified_base 39: mod_base = OTHER; note = Uridine phosphorothiorate
  modified_base 44: mod_base = OTHER; note = 2'-Omethyluridine
  modified_base 46: mod_base = OTHER; note = 2'-Omethylguanosine
  modified_base 56: mod_base = OTHER; note = Guanosine phosphorothiorate
  modified_base 57: mod_base = OTHER; note = 2'-Omethylcytosine
  modified_base 59: mod_base = OTHER; note = Cytosine phosphorothiorate
  modified_base 70: mod_base = OTHER; note = 2'-Omethylcytosine phosphorothiorate
  modified_base 73: mod_base = OTHER; note = 2'-fluoroguanosine
  modified_base 82: mod_base = OTHER; note = Guanosine phosphorothiorate

SEQ ID NO: 4620 - RNA, 75 nt, synthetic construct; identical to SEQ ID NO: 3306
  source 1..75: mol_type = other RNA
  modified_base 1: mod_base = OTHER; note = 2'-Omethylguanosine phosphorothiorate
  modified_base 2: mod_base = OTHER; note = 2'-Omethyladenosine phosphorothiorate
  modified_base 73: mod_base = OTHER; note = Cytosine phosphorothiorate
  modified_base 74: mod_base = OTHER; note = 2'-Omethylcytosine phosphorothiorate

SEQ ID NO: 4621 - RNA, 76 nt, synthetic construct; identical to SEQ ID NO: 625
  source 1..76: mol_type = other RNA
  modified_base 1: mod_base = OTHER; note = 2'-Omethylguanosine phosphorothiorate
  modified_base 2: mod_base = OTHER; note = 2'-Omethylguanosine phosphorothiorate
  modified_base 3: mod_base = OTHER; note = 2'-Omethylcytosine
  modified_base 4: mod_base = OTHER; note = 2'-Omethyluridine
  modified_base 5: mod_base = OTHER; note = 2'-Omethylcytosine
  modified_base 6: mod_base = OTHER; note = 2'-Omethylcytosine
  modified_base 10: mod_base = OTHER; note = 2'-Omethylguanosine
  modified_base 11: mod_base = OTHER; note = 2'-Omethylcytosine
  modified_base 12: mod_base = OTHER; note = 2'-Omethylguanosine
  modified_base 13: mod_base = OTHER; note = 2'-Omethylcytosine
  modified_base 14: mod_base = OTHER; note = 2'-Omethyladenosine
  modified_base 15: mod_base = OTHER; note = 2'-fluoroadenosine
  modified_base 16: mod_base = OTHER; note = 2'-Omethyluridine
  modified_base 17: mod_base = OTHER; note = 2'-Omethylguanosine
  modified_base 18: mod_base = OTHER; note = 2'-Omethylguanosine
  modified_base 19: mod_base = OTHER; note = 2'-fluoroadenosine
  modified_base 20: mod_base = OTHER; note = 2'-Omethyluridine
  modified_base 22: mod_base = OTHER; note = 2'-Omethylguanosine
  modified_base 23: mod_base = OTHER; note = 2'-Omethylcytosine
  modified_base 24: mod_base = OTHER; note = 2'-Omethylguanosine
  modified_base 25: mod_base = OTHER; note = 2'-Omethylcytosine
  modified_base 38: mod_base = OTHER; note = Adenosine phosphorothiorate
  modified_base 39: mod_base = OTHER; note = Uridine phosphorothiorate
  modified_base 40: mod_base = OTHER; note = 2'-fluorouridine
  modified_base 43: mod_base = OTHER; note = 2'-Omethyladenosine
  modified_base 44: mod_base = OTHER; note = 2'-Omethyladenosine
  modified_base 45: mod_base = OTHER; note = 2'-Omethylguanosine
  modified_base 46: mod_base = OTHER; note = 2'-fluoroguanosine
  modified_base 48: mod_base = OTHER; note = 2'-fluorouridine
  modified_base 49: mod_base = OTHER; note = 2'-Omethylcytosine
  modified_base 50: mod_base = OTHER; note = 2'-Omethylcytosine
  modified_base 54: mod_base = OTHER; note = 2'-Omethyluridine phosphorothiorate
  modified_base 55: mod_base = OTHER; note = Uridine phosphorothiorate
  modified_base 56: mod_base = OTHER; note = 2'-Omethylcytosine
  modified_base 57: mod_base = OTHER; note = 2'-fluoroguanosine
  modified_base 61: mod_base = OTHER; note = 2'-Omethylcytosine
  modified_base 62: mod_base = OTHER; note = 2'-Omethylcytosine
  modified_base 63: mod_base = OTHER; note = 2'-fluorocytosine
  modified_base 64: mod_base = OTHER; note = 2'-Omethylguanosine
  modified_base 65: mod_base = OTHER; note = 2'-Omethylguanosine
  modified_base 66: mod_base = OTHER; note = 2'-Omethylcytosine
  modified_base 67: mod_base = OTHER; note = 2'-Omethylguanosine
  modified_base 68: mod_base = OTHER; note = 2'-Omethylguanosine

SEQ ID NO: 4622 - RNA, 76 nt, synthetic construct; identical to SEQ ID NO: 3289
  source 1..76: mol_type = other RNA
  modified_base 1: mod_base = OTHER; note = 2'-Omethylguanosine phosphorothiorate
  modified_base 2: mod_base = OTHER; note = 2'-Omethylcytosine
  modified_base 3: mod_base = OTHER; note = 2'-Omethylcytosine
  modified_base 4: mod_base = OTHER; note = 2'-Omethyluridine
  modified_base 5: mod_base = OTHER; note = 2'-Omethylguanosine
  modified_base 6: mod_base = OTHER; note = 2'-Omethylguanosine
  modified_base 16: mod_base = OTHER; note = 2'-Omethyluridine
  modified_base 18: mod_base = OTHER; note = 2'-Omethylguanosine
  modified_base 19: mod_base = OTHER; note = 2'-Omethylguanosine
  modified_base 54: mod_base = OTHER; note = 2'-Omethyluridine phosphorothiorate
  modified_base 55: mod_base = OTHER; note = Uridine phosphorothiorate
  modified_base 56: mod_base = OTHER; note = 2'-Omethylcytosine
  modified_base 57: mod_base = OTHER; note = 2'-fluoroadenosine
  modified_base 59: mod_base = OTHER; note = 2'-Omethylguanosine
  modified_base 73: mod_base = OTHER; note = 2'-Omethylguanosine

SEQ ID NO: 4623 - RNA, 85 nt, synthetic construct; identical to SEQ ID NO: 3288
  source 1..85: mol_type = other RNA
  modified_base 1: mod_base = OTHER; note = 2'-Omethylcytosine
  modified_base 23: mod_base = OTHER; note = 2'-fluoroguanosine
  modified_base 26: mod_base = OTHER; note = 2'-fluorouridine
  modified_base 30: mod_base = OTHER; note = 2'-fluoroadenosine
  modified_base 32: mod_base = OTHER; note = 2'-fluorouridine
  modified_base 33: mod_base = OTHER; note = 2'-fluorouridine phosphorothiorate
  modified_base 34: mod_base = OTHER; note = 2'-fluorocytosine
  modified_base 43: mod_base = OTHER; note = 2'-Omethyluridine
  modified_base 46: mod_base = OTHER; note = Adenosine phosphorothiorate
  modified_base 47: mod_base = OTHER; note = 2'-fluorocytosine
  modified_base 50: mod_base = OTHER; note = Adenosine phosphorothiorate
  modified_base 59: mod_base = OTHER; note = 2'-fluorouridine
  modified_base 67: mod_base = OTHER; note = Adenosine phosphorothiorate
  modified_base 83: mod_base = OTHER; note = Cytosine phosphorothiorate
  modified_base 84: mod_base = OTHER; note = 2'-Omethylcytosine

SEQ ID NO: 4624 - RNA, 76 nt, synthetic construct; identical to SEQ ID NO: 3342
  source 1..76: mol_type = other RNA
  modified_base 1: mod_base = OTHER; note = 2'-Omethylguanosine
  modified_base 10: mod_base = OTHER; note = 2'-Omethylguanosine
  modified_base 13: mod_base = OTHER; note = 2'-Omethylcytosine
  modified_base 17: mod_base = OTHER; note = Guanosine phosphorothiorate
  modified_base 18: mod_base = OTHER; note = 2'-Omethylguanosine
  modified_base 19: mod_base = OTHER; note = Adenosine phosphorothiorate
  modified_base 20: mod_base = OTHER; note = 2'-Omethyluridine
  modified_base 25: mod_base = OTHER; note = 2'-Omethylcytosine
  modified_base 29: mod_base = OTHER; note = 2'-Omethylguanosine
  modified_base 33: mod_base = OTHER; note = 2'-fluorouridine
  modified_base 35: mod_base = OTHER; note = Cytosine phosphorothiorate
  modified_base 37: mod_base = OTHER; note = Adenosine phosphorothiorate
  modified_base 38: mod_base = OTHER; note = Adenosine phosphorothiorate
  modified_base 41: mod_base = OTHER; note = 2'-fluorocytosine phosphorothiorate
  modified_base 43: mod_base = OTHER; note = 2'-Omethyladenosine
  modified_base 44: mod_base = OTHER; note = 2'-fluoroadenosine
  modified_base 46: mod_base = OTHER; note = Guanosine phosphorothiorate
  modified_base 50: mod_base = OTHER; note = 2'-Omethylcytosine
  modified_base 52: mod_base = OTHER; note = 2'-Omethylguanosine
  modified_base 54: mod_base = OTHER; note = Uridine phosphorothiorate
  modified_base 55: mod_base = OTHER; note = Uridine phosphorothiorate
  modified_base 56: mod_base = OTHER; note = 2'-Omethylcytosine
  modified_base 57: mod_base = OTHER; note = Guanosine phosphorothiorate
  modified_base 62: mod_base = OTHER; note = 2'-Omethylcytosine
  modified_base 63: mod_base = OTHER; note = 2'-fluorocytosine
  modified_base 65: mod_base = OTHER; note = 2'-Omethylguanosine
  modified_base 71: mod_base = OTHER; note = 2'-Omethyluridine
  modified_base 73: mod_base = OTHER; note = 2'-Omethylguanosine

SEQ ID NO: 4625 - RNA, 76 nt, synthetic construct
  source 1..76: mol_type = other RNA
ggctccgtggcgcaatggatagcgcattggacttcagattcaaaggttccgggttcgattcccggcggagtcgcca

SEQ ID NO: 4626 - RNA, 85 nt, synthetic construct; identical to SEQ ID NO: 3288
  source 1..85: mol_type = other RNA
  modified_base 1: mod_base = OTHER; note = 2'-fluorocytosine
  modified_base 2: mod_base = OTHER; note = 2'-fluorocytosine
  modified_base 8: mod_base = OTHER; note = Guanosine phosphorothiorate
  modified_base 11: mod_base = OTHER; note = Cytosine phosphorothiorate
  modified_base 14: mod_base = OTHER; note = Guanosine phosphorothiorate
  modified_base 25: mod_base = OTHER; note = 2'-fluoroguanosine phosphorothiorate
  modified_base 34: mod_base = OTHER; note = Cytosine phosphorothiorate
  modified_base 41: mod_base = OTHER; note = Adenosine phosphorothiorate
  modified_base 45: mod_base = OTHER; note = 2'-Omethylguanosine
  modified_base 51: mod_base = OTHER; note = Uridine phosphorothiorate
  modified_base 53: mod_base = OTHER; note = 2'-fluorouridine
  modified_base 62: mod_base = OTHER; note = 2'-fluoroguanosine
  modified_base 64: mod_base = OTHER; note = Uridine phosphorothiorate
  modified_base 84: mod_base = OTHER; note = 2'-fluorocytosine phosphorothiorate
  modified_base 85: mod_base = OTHER; note = 2'-Omethyladenosine

SEQ ID NO: 4627 - RNA, 76 nt, synthetic construct; identical to SEQ ID NO: 625
  source 1..76: mol_type = other RNA
  modified_base 1: mod_base = OTHER; note = 2'-Omethylguanosine phosphorothiorate
  modified_base 2: mod_base = OTHER; note = 2'-Omethylguanosine
  modified_base 3: mod_base = OTHER; note = 2'-Omethylcytosine
  modified_base 4: mod_base = OTHER; note = 2'-Omethyluridine
  modified_base 5: mod_base = OTHER; note = 2'-Omethylcytosine
  modified_base 6: mod_base = OTHER; note = 2'-Omethylcytosine
  modified_base 10: mod_base = OTHER; note = 2'-Omethylguanosine
  modified_base 11: mod_base = OTHER; note = 2'-Omethylcytosine
  modified_base 12: mod_base = OTHER; note = 2'-Omethylguanosine
  modified_base 13: mod_base = OTHER; note = 2'-Omethylcytosine
  modified_base 14: mod_base = OTHER; note = 2'-Omethyladenosine
  modified_base 15: mod_base = OTHER; note = 2'-fluoroadenosine
  modified_base 16: mod_base = OTHER; note = 2'-Omethyluridine
  modified_base 17: mod_base = OTHER; note = 2'-Omethylguanosine
  modified_base 18: mod_base = OTHER; note = 2'-Omethylguanosine
  modified_base 19: mod_base = OTHER; note = 2'-fluoroadenosine
  modified_base 20: mod_base = OTHER; note = 2'-Omethyluridine
  modified_base 22: mod_base = OTHER; note = 2'-Omethylguanosine
  modified_base 23: mod_base = OTHER; note = 2'-Omethylcytosine
  modified_base 24: mod_base = OTHER; note = 2'-Omethylguanosine
  modified_base 25: mod_base = OTHER; note = 2'-Omethylcytosine
  modified_base 54: mod_base = OTHER; note = 2'-Omethyluridine
  modified_base 56: mod_base = OTHER; note = 2'-Omethylcytosine
  modified_base 57: mod_base = OTHER; note = 2'-fluoroguanosine
  modified_base 59: mod_base = OTHER; note = 2'-Omethylguanosine
  modified_base 61: mod_base = OTHER; note = 2'-Omethylcytosine
  modified_base 62: mod_base = OTHER; note = 2'-Omethylcytosine
  modified_base 63: mod_base = OTHER; note = 2'-Omethylcytosine
  modified_base 64: mod_base = OTHER; note = 2'-Omethylguanosine
  modified_base 65: mod_base = OTHER; note = 2'-Omethylguanosine
  modified_base 66: mod_base = OTHER; note = 2'-Omethylcytosine
  modified_base 67: mod_base = OTHER; note = 2'-Omethylguanosine
  modified_base 68: mod_base = OTHER; note = 2'-Omethylguanosine
  modified_base 69: mod_base = OTHER; note = 2'-Omethyladenosine
  modified_base 73: mod_base = OTHER; note = 2'-Omethylguanosine

SEQ ID NO: 4628 - RNA, 85 nt, synthetic construct; identical to SEQ ID NO: 3317
  source 1..85: mol_type = other RNA
  modified_base 1: mod_base = OTHER; note = 2'-Omethylguanosine phosphorothiorate
  modified_base 2: mod_base = OTHER; note = 2'-Omethylcytosine phosphorothiorate
  modified_base 14: mod_base = OTHER; note = 2'-Omethyladenosine
  modified_base 20: mod_base = OTHER; note = Uridine phosphorothiorate
  modified_base 23: mod_base = OTHER; note = 2'-Omethylguanosine
  modified_base 30: mod_base = OTHER; note = Guanosine phosphorothiorate
  modified_base 35: mod_base = OTHER; note = 2'-Omethyluridine phosphorothiorate
  modified_base 38: mod_base = OTHER; note = 2'-Omethyladenosine phosphorothiorate
  modified_base 45: mod_base = OTHER; note = 2'-fluoroguanosine phosphorothiorate
  modified_base 53: mod_base = OTHER; note = 2'-fluorocytosine
  modified_base 54: mod_base = OTHER; note = 2'-fluorocytosine
  modified_base 56: mod_base = OTHER; note = 2'-fluoroguanosine phosphorothiorate
  modified_base 59: mod_base = OTHER; note = 2'-Omethylcytosine
  modified_base 62: mod_base = OTHER; note = 2'-Omethylguanosine phosphorothiorate
  modified_base 71: mod_base = OTHER; note = 2'-fluorocytosine
  modified_base 78: mod_base = OTHER; note = Cytosine phosphorothiorate
  modified_base 83: mod_base = OTHER; note = Cytosine phosphorothiorate

SEQ ID NO: 4629 - RNA, 76 nt, synthetic construct; identical to SEQ ID NO: 625
  source 1..76: mol_type = other RNA
  modified_base 3: mod_base = OTHER; note = 2'-O-(2-Methoxyethyl) 5-methylcytosine

SEQ ID NO: 4630 - RNA, 76 nt, synthetic construct; identical to SEQ ID NO: 3318
  source 1..76: mol_type = other RNA
  modified_base 1: mod_base = OTHER; note = 2'-Omethylcytosine
  modified_base 10: mod_base = OTHER; note = 2'-Omethylguanosine
  modified_base 11: mod_base = OTHER; note = 2'-Omethylcytosine
  modified_base 12: mod_base = OTHER; note = 2'-Omethyluridine
  modified_base 13: mod_base = OTHER; note = 2'-Omethylcytosine
  modified_base 14: mod_base = OTHER; note = 2'-Omethyladenosine
  modified_base 15: mod_base = OTHER; note = 2'-Omethylguanosine
  modified_base 16: mod_base = OTHER; note = 2'-Omethyluridine
  modified_base 18: mod_base = OTHER; note = 2'-Omethylguanosine
  modified_base 19: mod_base = OTHER; note = 2'-Omethylguanosine
  modified_base 20: mod_base = OTHER; note = Uridine phosphorothiorate
  modified_base 21: mod_base = OTHER; note = Adenosine phosphorothiorate
  modified_base 22: mod_base = OTHER; note = 2'-Omethylguanosine
  modified_base 23: mod_base = OTHER; note = 2'-Omethyladenosine
  modified_base 24: mod_base = OTHER; note = 2'-Omethylguanosine
  modified_base 25: mod_base = OTHER; note = 2'-Omethylcytosine
  modified_base 41: mod_base = OTHER; note = 2'-Omethylcytosine
  modified_base 42: mod_base = OTHER; note = 2'-Omethyluridine
  modified_base 43: mod_base = OTHER; note = 2'-Omethyluridine
  modified_base 44: mod_base = OTHER; note = 2'-Omethyladenosine
  modified_base 49: mod_base = OTHER; note = 2'-Omethylguanosine
  modified_base 50: mod_base = OTHER; note = 2'-Omethylcytosine
  modified_base 52: mod_base = OTHER; note = 2'-Omethylguanosine
  modified_base 54: mod_base = OTHER; note = Uridine phosphorothiorate
  modified_base 55: mod_base = OTHER; note = Uridine phosphorothiorate
  modified_base 61: mod_base = OTHER; note = 2'-Omethylcytosine
  modified_base 65: mod_base = OTHER; note = 2'-Omethylcytosine
  modified_base 73: mod_base = OTHER; note = 2'-Omethyladenosine

SEQ ID NO: 4631 - RNA, 75 nt, synthetic construct; identical to SEQ ID NO: 3336
  source 1..75: mol_type = other RNA
  modified_base 11: mod_base = OTHER; note = Uridine phosphorothiorate
  modified_base 14: mod_base = OTHER; note = 2'-fluoroguanosine
  modified_base 19: mod_base = OTHER; note = 2'-Omethyluridine phosphorothiorate
  modified_base 21: mod_base = OTHER; note = 2'-fluoroguanosine
  modified_base 23: mod_base = OTHER; note = 2'-fluoroguanosine
  modified_base 25: mod_base = OTHER; note = 2'-fluoroadenosine
  modified_base 27: mod_base = OTHER; note = 2'-fluorocytosine phosphorothiorate
  modified_base 35: mod_base = OTHER; note = 2'-fluoroadenosine
  modified_base 36: mod_base = OTHER; note = 2'-fluoroadenosine phosphorothiorate
  modified_base 41: mod_base = OTHER; note = 2'-Omethylguanosine phosphorothiorate
  modified_base 46: mod_base = OTHER; note = 2'-fluorouridine
  modified_base 47: mod_base = OTHER; note = 2'-fluorocytosine
  modified_base 51: mod_base = OTHER; note = 2'-fluoroguanosine
  modified_base 55: mod_base = OTHER; note = 2'-fluorocytosine phosphorothiorate
  modified_base 63: mod_base = OTHER; note = 2'-fluorouridine phosphorothiorate
  modified_base 64: mod_base = OTHER; note = 2'-fluoroguanosine
  modified_base 72: mod_base = OTHER; note = Guanosine phosphorothiorate
  modified_base 73: mod_base = OTHER; note = Cytosine phosphorothiorate
  modified_base 74: mod_base = OTHER; note = Cytosine phosphorothiorate

SEQ ID NO: 4632 - RNA, 85 nt, synthetic construct; identical to SEQ ID NO: 3297
  source 1..85: mol_type = other RNA
  modified_base 58: mod_base = OTHER; note = 2'-Omethylguanosine
  modified_base 82: mod_base = OTHER; note = 2'-Omethylguanosine

SEQ ID NO: 4633 - RNA, 76 nt, synthetic construct; identical to SEQ ID NO: 625
  source 1..76: mol_type = other RNA
  modified_base 3: mod_base = OTHER; note = 2'-Omethylcytosine
  modified_base 5: mod_base = OTHER; note = 2'-Omethylcytosine
  modified_base 6: mod_base = OTHER; note = 2'-Omethylcytosine phosphorothiorate
  modified_base 9: mod_base = OTHER; note = Guanosine phosphorothiorate
  modified_base 14: mod_base = OTHER; note = 2'-fluoroadenosine
  modified_base 16: mod_base = OTHER; note = 2'-Omethyluridine
  modified_base 17: mod_base = OTHER; note = 2'-Omethylguanosine
  modified_base 20: mod_base = OTHER; note = 2'-Omethyluridine
  modified_base 21: mod_base = OTHER; note = Adenosine phosphorothiorate
  modified_base 22: mod_base = OTHER; note = 2'-fluoroguanosine
  modified_base 23: mod_base = OTHER; note = Cytosine phosphorothiorate
  modified_base 24: mod_base = OTHER; note = 2'-fluoroguanosine
  modified_base 25: mod_base = OTHER; note = 2'-Omethylcytosine
  modified_base 26: mod_base = OTHER; note = 2'-Omethyladenosine
  modified_base 29: mod_base = OTHER; note = Guanosine phosphorothiorate
  modified_base 31: mod_base = OTHER; note = 2'-Omethyladenosine
  modified_base 33: mod_base = OTHER; note = Uridine phosphorothiorate
  modified_base 34: mod_base = OTHER; note = 2'-Omethyluridine
  modified_base 44: mod_base = OTHER; note = 2'-fluoroadenosine
  modified_base 45: mod_base = OTHER; note = 2'-fluoroguanosine
  modified_base 46: mod_base = OTHER; note = Guanosine phosphorothiorate
  modified_base 47: mod_base = OTHER; note = 2'-fluorouridine phosphorothiorate
  modified_base 49: mod_base = OTHER; note = 2'-Omethylcytosine phosphorothiorate
  modified_base 50: mod_base = OTHER; note = 2'-fluorocytosine
  modified_base 51: mod_base = OTHER; note = Guanosine phosphorothiorate
  modified_base 56: mod_base = OTHER; note = Cytosine phosphorothiorate
  modified_base 58: mod_base = OTHER; note = 2'-fluoroadenosine
  modified_base 60: mod_base = OTHER; note = 2'-fluorouridine
  modified_base 62: mod_base = OTHER; note = 2'-Omethylcytosine
  modified_base 66: mod_base = OTHER; note = 2'-fluorocytosine
  modified_base 67: mod_base = OTHER; note = 2'-Omethylguanosine phosphorothiorate
  modified_base 68: mod_base = OTHER; note = 2'-Omethylguanosine
  modified_base 69: mod_base = OTHER; note = 2'-Omethyladenosine
  modified_base 72: mod_base = OTHER; note = Cytosine phosphorothiorate
  modified_base 74: mod_base = OTHER; note = 2'-Omethylcytosine
  modified_base 75: mod_base = OTHER; note = Cytosine phosphorothiorate
  modified_base 76: mod_base = OTHER; note = 2'-Omethyladenosine

SEQ ID NO: 4634 - RNA, 76 nt, synthetic construct; identical to SEQ ID NO: 625
  source 1..76: mol_type = other RNA
  modified_base 1: mod_base = OTHER; note = 2'-Omethylguanosine phosphorothiorate
  modified_base 2: mod_base = OTHER; note = 2'-Omethylguanosine
  modified_base 3: mod_base = OTHER; note = 2'-Omethylcytosine
  modified_base 4: mod_base = OTHER; note = 2'-Omethyluridine
  modified_base 5: mod_base = OTHER; note = 2'-Omethylcytosine
  modified_base 6: mod_base = OTHER; note = 2'-Omethylcytosine
  modified_base 10: mod_base = OTHER; note = 2'-Omethylguanosine
  modified_base 11: mod_base = OTHER; note = 2'-Omethylcytosine
  modified_base 12: mod_base = OTHER; note = 2'-Omethylguanosine
  modified_base 13: mod_base = OTHER; note = 2'-Omethylcytosine
  modified_base 16: mod_base = OTHER; note = 2'-Omethyluridine
  modified_base 17: mod_base = OTHER; note = 2'-Omethylguanosine
  modified_base 18: mod_base = OTHER; note = 2'-Omethylguanosine
  modified_base 22: mod_base = OTHER; note = 2'-Omethylguanosine
  modified_base 23: mod_base = OTHER; note = 2'-Omethylcytosine
  modified_base 24: mod_base = OTHER; note = 2'-Omethylguanosine
  modified_base 25: mod_base = OTHER; note = 2'-Omethylcytosine
  modified_base 54: mod_base = OTHER; note = 2'-Omethyluridine phosphorothiorate
  modified_base 56: mod_base = OTHER; note = 2'-Omethylcytosine
  modified_base 57: mod_base = OTHER; note = 2'-fluoroguanosine
  modified_base 59: mod_base = OTHER; note = 2'-Omethylguanosine
  modified_base 61: mod_base = OTHER; note = 2'-Omethylcytosine
  modified_base 62: mod_base = OTHER; note = 2'-Omethylcytosine
  modified_base 63: mod_base = OTHER; note = 2'-Omethylcytosine
  modified_base 64: mod_base = OTHER; note = 2'-Omethylguanosine
  modified_base 65: mod_base = OTHER; note = 2'-Omethylguanosine
  modified_base 66: mod_base = OTHER; note = 2'-Omethylcytosine
  modified_base 67: mod_base = OTHER; note = 2'-Omethylguanosine
  modified_base 68: mod_base = OTHER; note = 2'-Omethylguanosine
  modified_base 69: mod_base = OTHER; note = 2'-Omethyladenosine
  modified_base 73: mod_base = OTHER; note = 2'-Omethylguanosine

SEQ ID NO: 4635 - RNA, 86 nt, synthetic construct; identical to SEQ ID NO: 3290
  source 1..86: mol_type = other RNA
  modified_base 63: mod_base = OTHER; note = 2'-Omethylguanosine

SEQ ID NO: 4636 - RNA, 76 nt, synthetic construct; identical to SEQ ID NO: 625
  source 1..76: mol_type = other RNA
  modified_base 18: mod_base = OTHER; note = 2'-Omethylguanosine
  modified_base 33: mod_base = OTHER; note = 2'-O-(2-Methoxyethyl) thymine
  modified_base 49: mod_base = OTHER; note = 2'-Omethylcytosine

SEQ ID NO: 4637 - RNA, 75 nt, synthetic construct; identical to SEQ ID NO: 3336
  source 1..75: mol_type = other RNA
  modified_base 3: mod_base = OTHER; note = Uridine phosphorothiorate
  modified_base 10: mod_base = OTHER; note = 2'-Omethylcytosine phosphorothiorate
  modified_base 20: mod_base = OTHER; note = 2'-fluoroadenosine
  modified_base 21: mod_base = OTHER; note = 2'-fluoroguanosine
  modified_base 27: mod_base = OTHER; note = 2'-Omethylcytosine phosphorothiorate
  modified_base 28: mod_base = OTHER; note = 2'-Omethyladenosine phosphorothiorate
  modified_base 37: mod_base = OTHER; note = 2'-fluoroadenosine phosphorothiorate
  modified_base 38: mod_base = OTHER; note = 2'-fluorouridine phosphorothiorate
  modified_base 45: mod_base = OTHER; note = 2'-fluoroguanosine
  modified_base 47: mod_base = OTHER; note = Cytosine phosphorothiorate
  modified_base 50: mod_base = OTHER; note = Guanosine phosphorothiorate
  modified_base 54: mod_base = OTHER; note = 2'-Omethyluridine phosphorothiorate
  modified_base 60: mod_base = OTHER; note = Cytosine phosphorothiorate
  modified_base 62: mod_base = OTHER; note = Cytosine phosphorothiorate
  modified_base 64: mod_base = OTHER; note = Guanosine phosphorothiorate
  modified_base 70: mod_base = OTHER; note = Guanosine phosphorothiorate
  modified_base 72: mod_base = OTHER; note = Guanosine phosphorothiorate
  modified_base 74: mod_base = OTHER; note = Cytosine phosphorothiorate

SEQ ID NO: 4638 - RNA, 74 nt, synthetic construct; identical to SEQ ID NO: 766
  source 1..74: mol_type = other RNA
  modified_base 1: mod_base = OTHER; note = 2'-Omethylguanosine phosphorothiorate
  modified_base 2: mod_base = OTHER; note = 2'-Omethylguanosine
  modified_base 13: mod_base = OTHER; note = 2'-fluorocytosine
  modified_base 73: mod_base = OTHER; note = 2'-Omethylguanosine phosphorothiorate

SEQ ID NO: 4639 - RNA, 86 nt, synthetic construct; identical to SEQ ID NO: 3290
  source 1..86: mol_type = other RNA
  modified_base 1: mod_base = OTHER; note = 2'-Omethyladenosine phosphorothiorate
  modified_base 2: mod_base = OTHER; note = 2'-Omethylcytosine
  modified_base 3: mod_base = OTHER; note = 2'-Omethylcytosine
  modified_base 4: mod_base = OTHER; note = 2'-Omethyladenosine
  modified_base 5: mod_base = OTHER; note = 2'-Omethylguanosine
  modified_base 6: mod_base = OTHER; note = 2'-Omethylguanosine
  modified_base 27: mod_base = OTHER; note = 2'-Omethyluridine
  modified_base 28: mod_base = OTHER; note = 2'-Omethyluridine
  modified_base 29: mod_base = OTHER; note = 2'-Omethylguanosine
  modified_base 30: mod_base = OTHER; note = 2'-fluoroguanosine
  modified_base 40: mod_base = OTHER; note = 2'-fluorocytosine
  modified_base 41: mod_base = OTHER; note = 2'-Omethylcytosine
  modified_base 42: mod_base = OTHER; note = 2'-Omethyladenosine
  modified_base 43: mod_base = OTHER; note = 2'-Omethyladenosine
  modified_base 83: mod_base = OTHER; note = 2'-Omethyladenosine

SEQ ID NO: 4640 - RNA, 76 nt, synthetic construct
  source 1..76: mol_type = other RNA
ggctccgtggcgcaatggatagcgcattggacttcaaattcaagggatccgggttcgagtcccggcggagtcgcca

SEQ ID NO: 4641 - RNA, 86 nt, synthetic construct
  source 1..86: mol_type = other RNA
gcaggtttgcccgagaggttaagggggaagacttcagatcttctgcacataagtgcgcgtgggttcgaaccccacagcctgcacca

SEQ ID NO: 4642 - RNA, 76 nt, synthetic construct; identical to SEQ ID NO: 625
  source 1..76: mol_type = other RNA
  modified_base 47: mod_base = OTHER; note = Thymine
  modified_base 48: mod_base = OTHER; note = Thymine
  modified_base 54: mod_base = OTHER; note = Thymine
  modified_base 55: mod_base = OTHER; note = Thymine

SEQ ID NO: 4643 - RNA, 76 nt, synthetic construct; identical to SEQ ID NO: 625
  source 1..76: mol_type = other RNA
  modified_base 1: mod_base = OTHER; note = 2'-Omethylguanosine phosphorothiorate
  modified_base 2: mod_base = OTHER; note = 2'-Omethylguanosine
  modified_base 18: mod_base = OTHER; note = 2'-Omethylguanosine
  modified_base 33: mod_base = OTHER; note = 2'-fluorouridine
  modified_base 35: mod_base = OTHER; note = Cytosine phosphorothiorate
  modified_base 37: mod_base = OTHER; note = Adenosine phosphorothiorate
  modified_base 38: mod_base = OTHER; note = Adenosine phosphorothiorate
  modified_base 52: mod_base = OTHER; note = 2'-Omethylguanosine
  modified_base 57: mod_base = OTHER; note = 2'-Omethylguanosine
  modified_base 62: mod_base = OTHER; note = 2'-Omethylcytosine
  modified_base 73: mod_base = OTHER; note = 2'-Omethylguanosine
  modified_base 75: mod_base = OTHER; note = 2'-fluorocytosine phosphorothiorate
  modified_base 76: mod_base = OTHER; note = 2'-Omethyladenosine

SEQ ID NO: 4644 - RNA, 76 nt, synthetic construct; identical to SEQ ID NO: 3419
  source 1..76: mol_type = other RNA
  modified_base 1: mod_base = OTHER; note = 2'-Omethylguanosine phosphorothiorate
  modified_base 2: mod_base = OTHER; note = 2'-Omethylguanosine phosphorothiorate
  modified_base 3: mod_base = OTHER; note = 2'-Omethylcytosine
  modified_base 4: mod_base = OTHER; note = 2'-Omethyluridine
  modified_base 5: mod_base = OTHER; note = 2'-Omethylcytosine
  modified_base 6: mod_base = OTHER; note = 2'-Omethylcytosine
  modified_base 16: mod_base = OTHER; note = 2'-Omethyluridine
  modified_base 17: mod_base = OTHER; note = 2'-Omethylguanosine
  modified_base 18: mod_base = OTHER; note = 2'-Omethylguanosine
  modified_base 20: mod_base = OTHER; note = 2'-Omethyluridine
  modified_base 25: mod_base = OTHER; note = 2'-Omethylcytosine
  modified_base 33: mod_base = OTHER; note = 2'-fluorouridine
  modified_base 35: mod_base = OTHER; note = Cytosine phosphorothiorate
  modified_base 37: mod_base = OTHER; note = Adenosine phosphorothiorate
  modified_base 38: mod_base = OTHER; note = Adenosine phosphorothiorate
  modified_base 41: mod_base = OTHER; note = 2'-Omethylguanosine
  modified_base 44: mod_base = OTHER; note = 2'-Omethyladenosine
  modified_base 45: mod_base = OTHER; note = 2'-Omethylguanosine
  modified_base 46: mod_base = OTHER; note = 2'-fluoroguanosine
  modified_base 47: mod_base = OTHER; note = 2'-fluorouridine
  modified_base 48: mod_base = OTHER; note = 2'-fluorouridine
  modified_base 49: mod_base = OTHER; note = 2'-Omethylcytosine
  modified_base 50: mod_base = OTHER; note = 2'-Omethylcytosine
  modified_base 51: mod_base = OTHER; note = 2'-Omethylguanosine
  modified_base 52: mod_base = OTHER; note = 2'-Omethylguanosine
  modified_base 53: mod_base = OTHER; note = 2'-Omethylguanosine
  modified_base 54: mod_base = OTHER; note = 2'-Omethyluridine
  modified_base 56: mod_base = OTHER; note = 2'-Omethylcytosine
  modified_base 59: mod_base = OTHER; note = 2'-Omethylguanosine
  modified_base 73: mod_base = OTHER; note = 2'-Omethylguanosine

SEQ ID NO: 4645 - RNA, 76 nt, synthetic construct; identical to SEQ ID NO: 625
  source 1..76: mol_type = other RNA
  modified_base 1: mod_base = OTHER; note = 2'-Omethylguanosine phosphorothiorate
  modified_base 2: mod_base = OTHER; note = 2'-Omethylguanosine
  modified_base 13: mod_base = OTHER; note = 2'-Omethylcytosine
  modified_base 33: mod_base = OTHER; note = 2'-fluorouridine
  modified_base 35: mod_base = OTHER; note = Cytosine phosphorothiorate
  modified_base 37: mod_base = OTHER; note = Adenosine phosphorothiorate
  modified_base 38: mod_base = OTHER; note = Adenosine phosphorothiorate
  modified_base 52: mod_base = OTHER; note = 2'-Omethylguanosine
  modified_base 56: mod_base = OTHER; note = 2'-Omethylcytosine
  modified_base 62: mod_base = OTHER; note = 2'-Omethylcytosine
  modified_base 65: mod_base = OTHER; note = 2'-Omethylguanosine
  modified_base 68: mod_base = OTHER; note = 2'-Omethylguanosine
  modified_base 73: mod_base = OTHER; note = 2'-Omethylguanosine
  modified_base 75: mod_base = OTHER; note = 2'-fluorocytosine phosphorothiorate

SEQ ID NO: 4646 - RNA, 86 nt, synthetic construct; identical to SEQ ID NO: 3290
  source 1..86: mol_type = other RNA
  modified_base 8: mod_base = OTHER; note = 2'-Omethyluridine

SEQ ID NO: 4647 - RNA, 84 nt, synthetic construct
  source 1..84: mol_type = other RNA
  modified_base 1: mod_base = OTHER; note = 2'-Omethyladenosine
  modified_base 17: mod_base = OTHER; note = 2'-Omethylguanosine
  modified_base 18: mod_base = OTHER; note = 2'-Omethylguanosine
  modified_base 60: mod_base = OTHER; note = 2'-Omethyluridine
  modified_base 62: mod_base = OTHER; note = 2'-Omethylguanosine
  modified_base 83: mod_base = OTHER; note = 2'-Omethyladenosine
accaggatggccgagtggttaaggcgttggacttcagatccaatggacatatgtccgcgtgggttcgaaccccactcctggtac

SEQ ID NO: 4648 - RNA, 75 nt, synthetic construct; identical to SEQ ID NO: 1045
  source 1..75: mol_type = other RNA
  modified_base 1: mod_base = OTHER; note = 2'-Omethylguanosine phosphorothiorate
  modified_base 2: mod_base = OTHER; note = 2'-Omethylguanosine
  modified_base 13: mod_base = OTHER; note = 2'-Omethyluridine
  modified_base 19: mod_base = OTHER; note = 2'-Omethyluridine
  modified_base 23: mod_base = OTHER; note = 2'-fluorocytosine
  modified_base 24: mod_base = OTHER; note = 2'-fluoroadenosine
  modified_base 29: mod_base = OTHER; note = 2'-Omethylguanosine
  modified_base 30: mod_base = OTHER; note = 2'-Omethylguanosine
  modified_base 34: mod_base = OTHER; note = Uridine phosphorothiorate
  modified_base 38: mod_base = OTHER; note = 2'-fluoroadenosine phosphorothiorate
  modified_base 39: mod_base = OTHER; note = 2'-fluorouridine
  modified_base 54: mod_base = OTHER; note = Uridine phosphorothiorate
  modified_base 58: mod_base = OTHER; note = 2'-Omethylguanosine
  modified_base 63: mod_base = OTHER; note = 2'-fluoroguanosine
  modified_base 64: mod_base = OTHER; note = Guanosine phosphorothiorate
  modified_base 65: mod_base = OTHER; note = 2'-fluorouridine
  modified_base 72: mod_base = OTHER; note = Uridine phosphorothiorate

SEQ ID NO: 4649 - RNA, 76 nt, synthetic construct; identical to SEQ ID NO: 625
  source 1..76: mol_type = other RNA
  modified_base 1: mod_base = OTHER; note = 2'-Omethylguanosine phosphorothiorate
  modified_base 2: mod_base = OTHER; note = 2'-Omethylguanosine phosphorothiorate
  modified_base 3: mod_base = OTHER; note = 2'-fluorocytosine
  modified_base 4: mod_base = OTHER; note = Uridine phosphorothiorate
  modified_base 5: mod_base = OTHER; note = 2'-fluorocytosine phosphorothiorate
  modified_base 6: mod_base = OTHER; note = 2'-Omethylcytosine
  modified_base 8: mod_base = OTHER; note = Uridine phosphorothiorate
  modified_base 10: mod_base = OTHER; note = Guanosine phosphorothiorate
  modified_base 11: mod_base = OTHER; note = 2'-Omethylcytosine
  modified_base 13: mod_base = OTHER; note = 2'-fluorocytosine
  modified_base 15: mod_base = OTHER; note = 2'-Omethyladenosine
  modified_base 19: mod_base = OTHER; note = Adenosine phosphorothiorate
  modified_base 21: mod_base = OTHER; note = Adenosine phosphorothiorate
  modified_base 25: mod_base = OTHER; note = 2'-fluorocytosine
  modified_base 26: mod_base = OTHER; note = 2'-fluoroadenosine
  modified_base 27: mod_base = OTHER; note = 2'-fluorouridine
  modified_base 36: mod_base = OTHER; note = Adenosine phosphorothiorate
  modified_base 39: mod_base = OTHER; note = Uridine phosphorothiorate
  modified_base 43: mod_base = OTHER; note = Adenosine phosphorothiorate
  modified_base 44: mod_base = OTHER; note = 2'-fluoroadenosine
  modified_base 47: mod_base = OTHER; note = 2'-fluorouridine
  modified_base 48: mod_base = OTHER; note = 2'-fluorouridine
  modified_base 51: mod_base = OTHER; note = Guanosine phosphorothiorate
  modified_base 52: mod_base = OTHER; note = 2'-fluoroguanosine
  modified_base 53: mod_base = OTHER; note = 2'-Omethylguanosine
  modified_base 58: mod_base = OTHER; note = 2'-fluoroadenosine
  modified_base 60: mod_base = OTHER; note = 2'-fluorouridine phosphorothiorate
  modified_base 61: mod_base = OTHER; note = 2'-Omethylcytosine
  modified_base 62: mod_base = OTHER; note = 2'-Omethylcytosine
  modified_base 63: mod_base = OTHER; note = 2'-fluorocytosine
  modified_base 65: mod_base = OTHER; note = 2'-Omethylguanosine
  modified_base 67: mod_base = OTHER; note = 2'-fluoroguanosine phosphorothiorate
  modified_base 68: mod_base = OTHER; note = 2'-Omethylguanosine phosphorothiorate
  modified_base 72: mod_base = OTHER; note = 2'-Omethylcytosine phosphorothiorate
  modified_base 73: mod_base = OTHER; note = 2'-fluoroguanosine

SEQ ID NO: 4650 - RNA, 75 nt, synthetic construct; identical to SEQ ID NO: 3299
  source 1..75: mol_type = other RNA
  modified_base 3: mod_base = OTHER; note = 2'-Omethyluridine phosphorothiorate
  modified_base 13: mod_base = OTHER; note = 2'-fluoroadenosine
  modified_base 16: mod_base = OTHER; note = Cytosine phosphorothiorate
  modified_base 22: mod_base = OTHER; note = 2'-Omethyladenosine
  modified_base 26: mod_base = OTHER; note = Uridine phosphorothiorate
  modified_base 27: mod_base = OTHER; note = 2'-fluorocytosine
  modified_base 28: mod_base = OTHER; note = 2'-fluoroadenosine
  modified_base 35: mod_base = OTHER; note = 2'-fluoroadenosine phosphorothiorate
  modified_base 40: mod_base = OTHER; note = 2'-fluorouridine
  modified_base 41: mod_base = OTHER; note = 2'-fluoroguanosine
  modified_base 46: mod_base = OTHER; note = 2'-fluorouridine
  modified_base 47: mod_base = OTHER; note = 2'-fluorocytosine
  modified_base 53: mod_base = OTHER; note = 2'-fluorouridine phosphorothiorate
  modified_base 57: mod_base = OTHER; note = 2'-fluoroadenosine phosphorothiorate
  modified_base 59: mod_base = OTHER; note = 2'-fluorouridine phosphorothiorate
  modified_base 64: mod_base = OTHER; note = 2'-fluoroguanosine phosphorothiorate
  modified_base 72: mod_base = OTHER; note = 2'-Omethylguanosine
  modified_base 74: mod_base = OTHER; note = Cytosine phosphorothiorate
  modified_base 75: mod_base = OTHER; note = 2'-fluoroadenosine

SEQ ID NO: 4651 - RNA, 76 nt, synthetic construct; identical to SEQ ID NO: 625
  source 1..76: mol_type = other RNA
  modified_base 1: mod_base = OTHER; note = 2'-Omethylguanosine phosphorothiorate
  modified_base 2: mod_base = OTHER; note = 2'-Omethylguanosine
  modified_base 3: mod_base = OTHER; note = 2'-Omethylcytosine
  modified_base 4: mod_base = OTHER; note = 2'-Omethyluridine
  modified_base 5: mod_base = OTHER; note = 2'-Omethylcytosine
  modified_base 6: mod_base = OTHER; note = 2'-Omethylcytosine
  modified_base 10: mod_base = OTHER; note = 2'-Omethylguanosine
  modified_base 11: mod_base = OTHER; note = 2'-Omethylcytosine
  modified_base 12: mod_base = OTHER; note = 2'-Omethylguanosine
  modified_base 13: mod_base = OTHER; note = 2'-Omethylcytosine
  modified_base 14: mod_base = OTHER; note = 2'-Omethyladenosine
  modified_base 15: mod_base = OTHER; note = 2'-fluoroadenosine
  modified_base 16: mod_base = OTHER; note = 2'-Omethyluridine
  modified_base 17: mod_base = OTHER; note = 2'-Omethylguanosine
  modified_base 18: mod_base = OTHER; note = 2'-Omethylguanosine
  modified_base 19: mod_base = OTHER; note = 2'-fluoroadenosine
  modified_base 20: mod_base = OTHER; note = 2'-Omethyluridine
  modified_base 22: mod_base = OTHER; note = 2'-Omethylguanosine
  modified_base 23: mod_base = OTHER; note = 2'-Omethylcytosine
  modified_base 24: mod_base = OTHER; note = 2'-Omethylguanosine
  modified_base 25: mod_base = OTHER; note = 2'-Omethylcytosine
  modified_base 40: mod_base = OTHER; note = 2'-fluorouridine
  modified_base 41: mod_base = OTHER; note = 2'-fluorocytosine
  modified_base 42: mod_base = OTHER; note = 2'-fluoroadenosine
  modified_base 43: mod_base = OTHER; note = 2'-fluoroadenosine
  modified_base 44: mod_base = OTHER; note = 2'-Omethyladenosine
  modified_base 45: mod_base = OTHER; note = 2'-Omethylguanosine
  modified_base 46: mod_base = OTHER; note = 2'-Omethylguanosine
  modified_base 49: mod_base = OTHER; note = 2'-Omethylcytosine
  modified_base 50: mod_base = OTHER; note = 2'-Omethylcytosine
  modified_base 51: mod_base = OTHER; note = 2'-Omethylguanosine
  modified_base 52: mod_base = OTHER; note = 2'-Omethylguanosine
  modified_base 53: mod_base = OTHER; note = 2'-Omethylguanosine
  modified_base 54: mod_base = OTHER; note = 2'-Omethyluridine
  modified_base 56: mod_base = OTHER; note = 2'-Omethylcytosine
  modified_base 57: mod_base = OTHER; note = 2'-fluoroguanosine
  modified_base 59: mod_base = OTHER; note = 2'-Omethylguanosine
  modified_base 61: mod_base = OTHER; note = 2'-Omethylcytosine
  modified_base 62: mod_base = OTHER; note = 2'-Omethylcytosine
  modified_base 63: mod_base = OTHER; note = 2'-Omethylcytosine
  modified_base 64: mod_base = OTHER; note = 2'-Omethylguanosine
  modified_base 65: mod_base = OTHER; note = 2'-Omethylguanosine
  modified_base 66: mod_base = OTHER; note = 2'-Omethylcytosine
  modified_base 67: mod_base = OTHER; note = 2'-Omethylguanosine
  modified_base 68: mod_base = OTHER; note = 2'-Omethylguanosine
  modified_base 69: mod_base = OTHER; note = 2'-Omethyladenosine
  modified_base 73: mod_base = OTHER; note = 2'-Omethylguanosine

SEQ ID NO: 4652 - RNA, 76 nt, synthetic construct; identical to SEQ ID NO: 625
  source 1..76: mol_type = other RNA
  modified_base 1: mod_base = OTHER; note = 2'-fluoroguanosine
  modified_base 3: mod_base = OTHER; note = 2'-Omethylcytosine
  modified_base 7: mod_base = OTHER; note = Guanosine phosphorothiorate
  modified_base 10: mod_base = OTHER; note = 2'-fluoroguanosine
  modified_base 13: mod_base = OTHER; note = 2'-Omethylcytosine
  modified_base 18: mod_base = OTHER; note = 2'-Omethylguanosine
  modified_base 20: mod_base = OTHER; note = 2'-Omethyluridine
  modified_base 23: mod_base = OTHER; note = 2'-Omethylcytosine
  modified_base 24: mod_base = OTHER; note = 2'-fluoroguanosine
  modified_base 26: mod_base = OTHER; note = Adenosine phosphorothiorate
  modified_base 27: mod_base = OTHER; note = Uridine phosphorothiorate
  modified_base 28: mod_base = OTHER; note = 2'-Omethyluridine
  modified_base 32: mod_base = OTHER; note = 2'-fluorocytosine
  modified_base 33: mod_base = OTHER; note = Uridine phosphorothiorate
  modified_base 34: mod_base = OTHER; note = 2'-Omethyluridine phosphorothiorate
  modified_base 39: mod_base = OTHER; note = 2'-fluorouridine
  modified_base 40: mod_base = OTHER; note = 2'-Omethyluridine
  modified_base 42: mod_base = OTHER; note = 2'-Omethyladenosine
  modified_base 46: mod_base = OTHER; note = 2'-fluoroguanosine
  modified_base 47: mod_base = OTHER; note = 2'-Omethyluridine
  modified_base 48: mod_base = OTHER; note = 2'-fluorouridine
  modified_base 50: mod_base = OTHER; note = 2'-Omethylcytosine
  modified_base 53: mod_base = OTHER; note = Guanosine phosphorothiorate
  modified_base 55: mod_base = OTHER; note = Uridine phosphorothiorate
  modified_base 59: mod_base = OTHER; note = 2'-Omethylguanosine
  modified_base 60: mod_base = OTHER; note = 2'-Omethyluridine
  modified_base 61: mod_base = OTHER; note = Cytosine phosphorothiorate
  modified_base 62: mod_base = OTHER; note = 2'-fluorocytosine
  modified_base 65: mod_base = OTHER; note = 2'-Omethylguanosine phosphorothiorate
  modified_base 66: mod_base = OTHER; note = 2'-fluorocytosine
  modified_base 67: mod_base = OTHER; note = 2'-Omethylguanosine
  modified_base 68: mod_base = OTHER; note = 2'-fluoroguanosine phosphorothiorate
  modified_base 69: mod_base = OTHER; note = 2'-Omethyladenosine
  modified_base 73: mod_base = OTHER; note = 2'-Omethylguanosine
  modified_base 74: mod_base = OTHER; note = Cytosine phosphorothiorate
  modified_base 75: mod_base = OTHER; note = 2'-fluorocytosine

SEQ ID NO: 4653 - RNA, 76 nt, synthetic construct; identical to SEQ ID NO: 625
  source 1..76: mol_type = other RNA
  modified_base 1: mod_base = OTHER; note = 2'-Omethylguanosine
  modified_base 2: mod_base = OTHER; note = 2'-Omethylguanosine
  modified_base 3: mod_base = OTHER; note = 2'-Omethylcytosine
  modified_base 4: mod_base = OTHER; note = 2'-Omethyluridine
  modified_base 5: mod_base = OTHER; note = 2'-Omethylcytosine
  modified_base 6: mod_base = OTHER; note = 2'-Omethylcytosine
  modified_base 7: mod_base = OTHER; note = 2'-Omethylguanosine phosphorothiorate
  modified_base 9: mod_base = OTHER; note = 2'-Omethylguanosine phosphorothiorate
  modified_base 10: mod_base = OTHER; note = 2'-Omethylguanosine
  modified_base 11: mod_base = OTHER; note = 2'-Omethylcytosine
  modified_base 12: mod_base = OTHER; note = 2'-Omethylguanosine
  modified_base 13: mod_base = OTHER; note = 2'-Omethylcytosine
  modified_base 14: mod_base = OTHER; note = Adenosine phosphorothiorate
  modified_base 15: mod_base = OTHER; note = 2'-Omethyladenosine
  modified_base 16: mod_base = OTHER; note = 2'-Omethyluridine
  modified_base 17: mod_base = OTHER; note = 2'-Omethylguanosine
  modified_base 18: mod_base = OTHER; note = 2'-Omethylguanosine
  modified_base 20: mod_base = OTHER; note = 2'-Omethyluridine
  modified_base 21: mod_base = OTHER; note = 2'-fluoroadenosine phosphorothiorate
  modified_base 22: mod_base = OTHER; note = 2'-Omethylguanosine
  modified_base 23: mod_base = OTHER; note = 2'-Omethylcytosine
  modified_base 25: mod_base = OTHER; note = 2'-Omethylcytosine
  modified_base 26: mod_base = OTHER; note = Adenosine phosphorothiorate
  modified_base 29: mod_base = OTHER; note = 2'-Omethylguanosine phosphorothiorate
  modified_base 30: mod_base = OTHER; note = 2'-fluoroguanosine phosphorothiorate
  modified_base 31: mod_base = OTHER; note = 2'-Omethyladenosine
  modified_base 33: mod_base = OTHER; note = 2'-fluorouridine
  modified_base 34: mod_base = OTHER; note = 2'-Omethyluridine phosphorothiorate
  modified_base 35: mod_base = OTHER; note = 2'-Omethylcytosine phosphorothiorate
  modified_base 37: mod_base = OTHER; note = Adenosine phosphorothiorate
  modified_base 40: mod_base = OTHER; note = 2'-fluorouridine
  modified_base 41: mod_base = OTHER; note = 2'-fluorocytosine
  modified_base 42: mod_base = OTHER; note = Adenosine phosphorothiorate
  modified_base 44: mod_base = OTHER; note = 2'-Omethyladenosine
  modified_base 45: mod_base = OTHER; note = Guanosine phosphorothiorate
  modified_base 48: mod_base = OTHER; note = 2'-fluorouridine
  modified_base 49: mod_base = OTHER; note = 2'-Omethylcytosine
  modified_base 50: mod_base = OTHER; note = 2'-Omethylcytosine
  modified_base 51: mod_base = OTHER; note = Guanosine phosphorothiorate
  modified_base 52: mod_base = OTHER; note = 2'-Omethylguanosine
  modified_base 53: mod_base = OTHER; note = 2'-fluoroguanosine
  modified_base 54: mod_base = OTHER; note = Uridine phosphorothiorate
  modified_base 55: mod_base = OTHER; note = Uridine phosphorothiorate
  modified_base 56: mod_base = OTHER; note = Cytosine phosphorothiorate
  modified_base 59: mod_base = OTHER; note = 2'-Omethylguanosine
  modified_base 60: mod_base = OTHER; note = 2'-Omethyluridine phosphorothiorate
  modified_base 61: mod_base = OTHER; note = Cytosine phosphorothiorate
  modified_base 62: mod_base = OTHER; note = 2'-Omethylcytosine
  modified_base 63: mod_base = OTHER; note = 2'-Omethylcytosine phosphorothiorate
  modified_base 64: mod_base = OTHER; note = 2'-Omethylguanosine
  modified_base 65: mod_base = OTHER; note = 2'-Omethylguanosine phosphorothiorate
  modified_base 66: mod_base = OTHER; note = 2'-fluorocytosine
  modified_base 67: mod_base = OTHER; note = 2'-fluoroguanosine
  modified_base 68: mod_base = OTHER; note = 2'-Omethylguanosine phosphorothiorate
  modified_base 69: mod_base = OTHER; note = 2'-fluoroadenosine
  modified_base 70: mod_base = OTHER; note = 2'-fluoroguanosine
  modified_base 72: mod_base = OTHER; note = Cytosine phosphorothiorate
  modified_base 73: mod_base = OTHER; note = 2'-Omethylguanosine
  modified_base 74: mod_base = OTHER; note = 2'-fluorocytosine phosphorothiorate
  modified_base 75: mod_base = OTHER; note = 2'-fluorocytosine phosphorothiorate
  modified_base 76: mod_base = OTHER; note = 2'-fluoroadenosine

SEQ ID NO: 4654 - RNA, 76 nt, synthetic construct; identical to SEQ ID NO: 3318
  source 1..76: mol_type = other RNA
  modified_base 1: mod_base = OTHER; note = 2'-Omethylcytosine phosphorothiorate
  modified_base 2: mod_base = OTHER; note = 2'-Omethylcytosine phosphorothiorate
  modified_base 3: mod_base = OTHER; note = 2'-Omethyluridine
  modified_base 4: mod_base = OTHER; note = 2'-Omethyluridine
  modified_base 5: mod_base = OTHER; note = 2'-Omethylcytosine
  modified_base 6: mod_base = OTHER; note = 2'-Omethylguanosine
  modified_base 10: mod_base = OTHER; note = 2'-Omethylguanosine
  modified_base 11: mod_base = OTHER; note = 2'-Omethylcytosine
  modified_base 12: mod_base = OTHER; note = 2'-Omethyluridine
  modified_base 13: mod_base = OTHER; note = 2'-Omethylcytosine
  modified_base 14: mod_base = OTHER; note = 2'-Omethyladenosine
  modified_base 15: mod_base = OTHER; note = 2'-fluoroguanosine
  modified_base 16: mod_base = OTHER; note = 2'-Omethyluridine
  modified_base 18: mod_base = OTHER; note = 2'-Omethylguanosine
  modified_base 19: mod_base = OTHER; note = 2'-Omethylguanosine
  modified_base 20: mod_base = OTHER; note = 2'-fluorouridine
  modified_base 22: mod_base = OTHER; note = 2'-Omethylguanosine
  modified_base 23: mod_base = OTHER; note = 2'-Omethyladenosine
  modified_base 24: mod_base = OTHER; note = 2'-Omethylguanosine
  modified_base 25: mod_base = OTHER; note = 2'-Omethylcytosine
  modified_base 33: mod_base = OTHER; note = 2'-fluorouridine
  modified_base 35: mod_base = OTHER; note = Uridine phosphorothiorate
  modified_base 37: mod_base = OTHER; note = Guanosine phosphorothiorate
  modified_base 38: mod_base = OTHER; note = Adenosine phosphorothiorate
  modified_base 44: mod_base = OTHER; note = 2'-Omethyladenosine
  modified_base 45: mod_base = OTHER; note = 2'-Omethylguanosine
  modified_base 46: mod_base = OTHER; note = 2'-fluoroguanosine
  modified_base 47: mod_base = OTHER; note = 2'-fluorouridine
  modified_base 48: mod_base = OTHER; note = 2'-fluorocytosine
  modified_base 56: mod_base = OTHER; note = 2'-Omethylcytosine
  modified_base 59: mod_base = OTHER; note = 2'-Omethyladenosine
  modified_base 61: mod_base = OTHER; note = 2'-Omethylcytosine
  modified_base 62: mod_base = OTHER; note = 2'-Omethylcytosine
  modified_base 63: mod_base = OTHER; note = 2'-fluoroguanosine
  modified_base 64: mod_base = OTHER; note = 2'-Omethylguanosine
  modified_base 65: mod_base = OTHER; note = 2'-Omethylcytosine
  modified_base 66: mod_base = OTHER; note = 2'-Omethyluridine
  modified_base 67: mod_base = OTHER; note = 2'-Omethylcytosine
  modified_base 68: mod_base = OTHER; note = 2'-Omethylguanosine
  modified_base 73: mod_base = OTHER; note = 2'-Omethyladenosine

SEQ ID NO: 4655 - RNA, 76 nt, synthetic construct; identical to SEQ ID NO: 3615
  source 1..76: mol_type = other RNA
  modified_base 1: mod_base = OTHER; note = 2'-Omethylguanosine
  modified_base 2: mod_base = OTHER; note = 2'-Omethylguanosine
  modified_base 3: mod_base = OTHER; note = 2'-Omethylcytosine
  modified_base 4: mod_base = OTHER; note = 2'-Omethyluridine
  modified_base 5: mod_base = OTHER; note = 2'-Omethylcytosine
  modified_base 6: mod_base = OTHER; note = 2'-Omethylcytosine
  modified_base 14: mod_base = OTHER; note = 2'-Omethyladenosine
  modified_base 15: mod_base = OTHER; note = 2'-Omethyladenosine
  modified_base 16: mod_base = OTHER; note = 2'-Omethyluridine
  modified_base 17: mod_base = OTHER; note = 2'-Omethylguanosine
  modified_base 18: mod_base = OTHER; note = 2'-Omethylguanosine
  modified_base 20: mod_base = OTHER; note = 2'-Omethyluridine
  modified_base 25: mod_base = OTHER; note = 2'-Omethylcytosine
  modified_base 33: mod_base = OTHER; note = 2'-fluorouridine
  modified_base 35: mod_base = OTHER; note = Cytosine phosphorothiorate
  modified_base 37: mod_base = OTHER; note = Adenosine phosphorothiorate
  modified_base 38: mod_base = OTHER; note = Adenosine phosphorothiorate
  modified_base 41: mod_base = OTHER; note = 2'-fluorocytosine
  modified_base 42: mod_base = OTHER; note = 2'-Omethyladenosine
  modified_base 43: mod_base = OTHER; note = 2'-Omethyladenosine
  modified_base 44: mod_base = OTHER; note = 2'-fluoroguanosine
  modified_base 49: mod_base = OTHER; note = 2'-Omethylcytosine
  modified_base 50: mod_base = OTHER; note = 2'-Omethylcytosine
  modified_base 52: mod_base = OTHER; note = 2'-Omethylguanosine
  modified_base 54: mod_base = OTHER; note = 2'-Omethyluridine
  modified_base 55: mod_base = OTHER; note = Uridine phosphorothiorate
  modified_base 56: mod_base = OTHER; note = 2'-Omethylcytosine
  modified_base 57: mod_base = OTHER; note = 2'-fluoroguanosine
  modified_base 59: mod_base = OTHER; note = 2'-Omethylguanosine
  modified_base 61: mod_base = OTHER; note = 2'-Omethylcytosine
  modified_base 62: mod_base = OTHER; note = 2'-Omethylcytosine
  modified_base 63: mod_base = OTHER; note = 2'-fluorocytosine
  modified_base 64: mod_base = OTHER; note = 2'-Omethylguanosine
  modified_base 65: mod_base = OTHER; note = 2'-Omethylguanosine
  modified_base 73: mod_base = OTHER; note = 2'-Omethylguanosine

SEQ ID NO: 4656 - RNA, 85 nt, synthetic construct; identical to SEQ ID NO: 3297
  source 1..85: mol_type = other RNA
  modified_base 1: mod_base = OTHER; note = 2'-Omethylguanosine phosphorothiorate
  modified_base 2: mod_base = OTHER; note = 2'-Omethylcytosine
  modified_base 18: mod_base = OTHER; note = 2'-Omethylguanosine
  modified_base 33: mod_base = OTHER; note = 2'-fluorouridine
  modified_base 34: mod_base = OTHER; note = 2'-fluorouridine phosphorothiorate
  modified_base 44: mod_base = OTHER; note = 2'-fluorouridine
  modified_base 46: mod_base = OTHER; note = 2'-Omethylguanosine
  modified_base 55: mod_base = OTHER; note = 2'-fluorocytosine
  modified_base 59: mod_base = OTHER; note = 2'-Omethylcytosine phosphorothiorate
  modified_base 66: mod_base = OTHER; note = 2'-fluoroguanosine phosphorothiorate

SEQ ID NO: 4657 - RNA, 76 nt, synthetic construct; identical to SEQ ID NO: 625
  source 1..76: mol_type = other RNA
  modified_base 48: mod_base = OTHER; note = Thymine

SEQ ID NO: 4658 - RNA, 86 nt, synthetic construct; identical to SEQ ID NO: 3290
  source 1..86: mol_type = other RNA
  modified_base 1: mod_base = OTHER; note = 2'-Omethyladenosine
  modified_base 17: mod_base = OTHER; note = 2'-Omethylguanosine
  modified_base 18: mod_base = OTHER; note = 2'-Omethylguanosine
  modified_base 20: mod_base = OTHER; note = 2'-Omethyluridine
  modified_base 83: mod_base = OTHER; note = 2'-Omethyladenosine

SEQ ID NO: 4659 - RNA, 76 nt, synthetic construct
  source 1..76: mol_type = other RNA
ggctccgtggcgcaatggatagcgcattggacttcaaattcaaacacttcgggttcgagtcccgacggagtcgcca

SEQ ID NO: 4660 - RNA, 76 nt, synthetic construct; identical to SEQ ID NO: 625
  source 1..76: mol_type = other RNA
  modified_base 1: mod_base = OTHER; note = Guanosine phosphorothiorate
  modified_base 3: mod_base = OTHER; note = Cytosine phosphorothiorate
  modified_base 5: mod_base = OTHER; note = 2'-Omethylcytosine
  modified_base 9: mod_base = OTHER; note = Guanosine phosphorothiorate
  modified_base 10: mod_base = OTHER; note = Guanosine phosphorothiorate
  modified_base 11: mod_base = OTHER; note = 2'-fluorocytosine
  modified_base 13: mod_base = OTHER; note = Cytosine phosphorothiorate
  modified_base 15: mod_base = OTHER; note = 2'-fluoroadenosine
  modified_base 16: mod_base = OTHER; note = 2'-Omethyluridine
  modified_base 22: mod_base = OTHER; note = 2'-fluoroguanosine
  modified_base 23: mod_base = OTHER; note = 2'-Omethylcytosine
  modified_base 24: mod_base = OTHER; note = 2'-Omethylguanosine
  modified_base 25: mod_base = OTHER; note = Cytosine phosphorothiorate
  modified_base 27: mod_base = OTHER; note = 2'-fluorouridine
  modified_base 29: mod_base = OTHER; note = 2'-Omethylguanosine
  modified_base 30: mod_base = OTHER; note = 2'-fluoroguanosine
  modified_base 34: mod_base = OTHER; note = Uridine phosphorothiorate
  modified_base 38: mod_base = OTHER; note = 2'-fluoroadenosine phosphorothiorate
  modified_base 39: mod_base = OTHER; note = 2'-fluorouridine
  modified_base 40: mod_base = OTHER; note = 2'-fluorouridine
  modified_base 42: mod_base = OTHER; note = 2'-fluoroadenosine
  modified_base 43: mod_base = OTHER; note = Adenosine phosphorothiorate
  modified_base 48: mod_base = OTHER; note = Uridine phosphorothiorate
  modified_base 53: mod_base = OTHER; note = 2'-fluoroguanosine
  modified_base 55: mod_base = OTHER; note = Uridine phosphorothiorate
  modified_base 56: mod_base = OTHER; note = 2'-Omethylcytosine
  modified_base 65: mod_base = OTHER; note = 2'-Omethylguanosine
  modified_base 66: mod_base = OTHER; note = 2'-fluorocytosine
  modified_base 67: mod_base = OTHER; note = 2'-fluoroguanosine
  modified_base 69: mod_base = OTHER; note = 2'-fluoroadenosine
  modified_base 70: mod_base = OTHER; note = 2'-Omethylguanosine phosphorothiorate
  modified_base 74: mod_base = OTHER; note = Cytosine phosphorothiorate
  modified_base 75: mod_base = OTHER; note = 2'-fluorocytosine phosphorothiorate
  modified_base 76: mod_base = OTHER; note = 2'-Omethyladenosine

SEQ ID NO: 4661 - RNA, 76 nt, synthetic construct; identical to SEQ ID NO: 625
  source 1..76: mol_type = other RNA
  modified_base 1: mod_base = OTHER; note = 2'-Omethylguanosine phosphorothiorate
  modified_base 2: mod_base = OTHER; note = 2'-Omethylguanosine
  modified_base 3: mod_base = OTHER; note = 2'-Omethylcytosine
  modified_base 4: mod_base = OTHER; note = 2'-Omethyluridine
  modified_base 5: mod_base = OTHER; note = 2'-Omethylcytosine
  modified_base 6: mod_base = OTHER; note = 2'-Omethylcytosine
  modified_base 16: mod_base = OTHER; note = 2'-Omethyluridine
  modified_base 17: mod_base = OTHER; note = 2'-Omethylguanosine
  modified_base 18: mod_base = OTHER; note = 2'-Omethylguanosine
  modified_base 22: mod_base = OTHER; note = 2'-Omethylguanosine
  modified_base 23: mod_base = OTHER; note = 2'-Omethylcytosine
  modified_base 24: mod_base = OTHER; note = 2'-Omethylguanosine
  modified_base 25: mod_base = OTHER; note = 2'-Omethylcytosine
  modified_base 49: mod_base = OTHER; note = 2'-Omethylcytosine
  modified_base 50: mod_base = OTHER; note = 2'-Omethylcytosine
  modified_base 51: mod_base = OTHER; note = 2'-Omethylguanosine
  modified_base 52: mod_base = OTHER; note = 2'-Omethylguanosine
  modified_base 53: mod_base = OTHER; note = 2'-Omethylguanosine
  modified_base 54: mod_base = OTHER; note = 2'-Omethyluridine phosphorothiorate
  modified_base 56: mod_base = OTHER; note = 2'-Omethylcytosine
  modified_base 57: mod_base = OTHER; note = 2'-fluoroguanosine
  modified_base 59: mod_base = OTHER; note = 2'-Omethylguanosine
  modified_base 61: mod_base = OTHER; note = 2'-Omethylcytosine
  modified_base 62: mod_base = OTHER; note = 2'-Omethylcytosine
  modified_base 63: mod_base = OTHER; note = 2'-Omethylcytosine
  modified_base 64: mod_base = OTHER; note = 2'-Omethylguanosine
  modified_base 65: mod_base = OTHER; note = 2'-Omethylguanosine
  modified_base 66: mod_base = OTHER; note = 2'-Omethylcytosine
  modified_base 67: mod_base = OTHER; note = 2'-Omethylguanosine
  modified_base 68: mod_base = OTHER; note = 2'-Omethylguanosine
  modified_base 69: mod_base = OTHER; note = 2'-Omethyladenosine
  modified_base 73: mod_base = OTHER; note = 2'-Omethylguanosine

SEQ ID NO: 4662 - RNA, 75 nt, synthetic construct; identical to SEQ ID NO: 3311
  source 1..75: mol_type = other RNA
  modified_base 2: mod_base = OTHER; note = 2'-Omethylguanosine phosphorothiorate
  modified_base 3: mod_base = OTHER; note = Uridine phosphorothiorate
  modified_base 17: mod_base = OTHER; note = 2'-Omethylguanosine
  modified_base 20: mod_base = OTHER; note = 2'-fluoroadenosine
  modified_base 23: mod_base = OTHER; note = Cytosine phosphorothiorate
  modified_base 25: mod_base = OTHER; note = Cytosine phosphorothiorate
  modified_base 35: mod_base = OTHER; note = Uridine phosphorothiorate
  modified_base 36: mod_base = OTHER; note = 2'-fluoroadenosine
  modified_base 39: mod_base = OTHER; note = 2'-Omethyluridine
  modified_base 43: mod_base = OTHER; note = Guanosine phosphorothiorate
  modified_base 45: mod_base = OTHER; note = 2'-fluoroguanosine
  modified_base 54: mod_base = OTHER; note = 2'-Omethyluridine
  modified_base 56: mod_base = OTHER; note = 2'-Omethylguanosine
  modified_base 69: mod_base = OTHER; note = 2'-fluoroadenosine
  modified_base 75: mod_base = OTHER; note = 2'-fluoroadenosine

SEQ ID NO: 4663 - RNA, 76 nt, synthetic construct; identical to SEQ ID NO: 3295
  source 1..76: mol_type = other RNA
  modified_base 1: mod_base = OTHER; note = 2'-Omethylcytosine phosphorothiorate
  modified_base 2: mod_base = OTHER; note = 2'-Omethylcytosine
  modified_base 3: mod_base = OTHER; note = 2'-fluorouridine
  modified_base 4: mod_base = OTHER; note = 2'-Omethyluridine phosphorothiorate
  modified_base 7: mod_base = OTHER; note = 2'-fluoroadenosine phosphorothiorate
  modified_base 8: mod_base = OTHER; note = 2'-fluorouridine
  modified_base 10: mod_base = OTHER; note = 2'-fluoroguanosine phosphorothiorate
  modified_base 11: mod_base = OTHER; note = 2'-Omethylcytosine phosphorothiorate
  modified_base 15: mod_base = OTHER; note = 2'-fluoroguanosine phosphorothiorate
  modified_base 16: mod_base = OTHER; note = 2'-fluorouridine phosphorothiorate
  modified_base 17: mod_base = OTHER; note = 2'-fluorouridine phosphorothiorate
  modified_base 25: mod_base = OTHER; note = 2'-Omethylcytosine phosphorothiorate
  modified_base 26: mod_base = OTHER; note = 2'-Omethylguanosine
  modified_base 29: mod_base = OTHER; note = 2'-Omethylguanosine
  modified_base 37: mod_base = OTHER; note = 2'-Omethylguanosine
  modified_base 40: mod_base = OTHER; note = 2'-fluorocytosine
  modified_base 43: mod_base = OTHER; note = 2'-fluorouridine phosphorothiorate
  modified_base 47: mod_base = OTHER; note = 2'-fluorouridine
  modified_base 49: mod_base = OTHER; note = 2'-Omethylguanosine
  modified_base 52: mod_base = OTHER; note = 2'-Omethylguanosine phosphorothiorate
  modified_base 53: mod_base = OTHER; note = 2'-Omethylguanosine
  modified_base 60: mod_base = OTHER; note = 2'-fluorouridine
  modified_base 68: mod_base = OTHER; note = 2'-fluoroguanosine
  modified_base 74: mod_base = OTHER; note = 2'-Omethylcytosine phosphorothiorate
  modified_base 75: mod_base = OTHER; note = Cytosine phosphorothiorate
  modified_base 76: mod_base = OTHER; note = 2'-Omethyladenosine

SEQ ID NO: 4664 - RNA, 76 nt, synthetic construct; identical to SEQ ID NO: 625
  source 1..76: mol_type = other RNA
  modified_base 1: mod_base = OTHER; note = 2'-Omethylguanosine
  modified_base 2: mod_base = OTHER; note = 2'-Omethylguanosine
  modified_base 33: mod_base = OTHER; note = 2'-fluorouridine
  modified_base 35: mod_base = OTHER; note = Cytosine phosphorothiorate
  modified_base 37: mod_base = OTHER; note = Adenosine phosphorothiorate
  modified_base 38: mod_base = OTHER; note = Adenosine phosphorothiorate
  modified_base 52: mod_base = OTHER; note = 2'-Omethylguanosine
  modified_base 57: mod_base = OTHER; note = 2'-Omethylguanosine
  modified_base 62: mod_base = OTHER; note = 2'-Omethylcytosine
  modified_base 73: mod_base = OTHER; note = 2'-Omethylguanosine
  modified_base 75: mod_base = OTHER; note = 2'-fluorocytosine phosphorothiorate

SEQ ID NO: 4665 - RNA, 76 nt, synthetic construct; identical to SEQ ID NO: 625
  source 1..76: mol_type = other RNA
  modified_base 2: mod_base = OTHER; note = 2'-Omethylguanosine
  modified_base 3: mod_base = OTHER; note = 2'-fluorocytosine
  modified_base 4: mod_base = OTHER; note = 2'-Omethyluridine
  modified_base 5: mod_base = OTHER; note = Cytosine phosphorothiorate
  modified_base 15: mod_base = OTHER; note = 2'-fluoroadenosine
  modified_base 20: mod_base = OTHER; note = 2'-Omethyluridine
  modified_base 26: mod_base = OTHER; note = 2'-fluoroadenosine
  modified_base 27: mod_base = OTHER; note = 2'-fluorouridine
  modified_base 29: mod_base = OTHER; note = 2'-Omethylguanosine
  modified_base 30: mod_base = OTHER; note = 2'-Omethylguanosine
  modified_base 34: mod_base = OTHER; note = Uridine phosphorothiorate
  modified_base 38: mod_base = OTHER; note = 2'-fluoroadenosine
  modified_base 39: mod_base = OTHER; note = 2'-fluorouridine
  modified_base 42: mod_base = OTHER; note = Adenosine phosphorothiorate
  modified_base 44: mod_base = OTHER; note = Adenosine phosphorothiorate
  modified_base 45: mod_base = OTHER; note = 2'-fluoroguanosine phosphorothiorate
  modified_base 46: mod_base = OTHER; note = 2'-fluoroguanosine
  modified_base 48: mod_base = OTHER; note = 2'-fluorouridine
  modified_base 49: mod_base = OTHER; note = 2'-Omethylcytosine
  modified_base 50: mod_base = OTHER; note = 2'-Omethylcytosine
  modified_base 52: mod_base = OTHER; note = 2'-Omethylguanosine
  modified_base 53: mod_base = OTHER; note = 2'-Omethylguanosine
  modified_base 54: mod_base = OTHER; note = Uridine phosphorothiorate
  modified_base 57: mod_base = OTHER; note = 2'-Omethylguanosine
  modified_base 63: mod_base = OTHER; note = Cytosine phosphorothiorate
  modified_base 64: mod_base = OTHER; note = 2'-fluoroguanosine
  modified_base 65: mod_base = OTHER; note = 2'-fluoroguanosine phosphorothiorate
  modified_base 68: mod_base = OTHER; note = 2'-fluoroguanosine phosphorothiorate
  modified_base 69: mod_base = OTHER; note = 2'-fluoroadenosine
  modified_base 71: mod_base = OTHER; note = Uridine phosphorothiorate
  modified_base 73: mod_base = OTHER; note = 2'-Omethylguanosine phosphorothiorate
  modified_base 75: mod_base = OTHER; note = 2'-fluorocytosine phosphorothiorate
  modified_base 76: mod_base = OTHER; note = 2'-Omethyladenosine

SEQ ID NO: 4666 - RNA, 76 nt, synthetic construct; identical to SEQ ID NO: 625
  source 1..76: mol_type = other RNA
  modified_base 1: mod_base = OTHER; note = 2'-Omethylguanosine
  modified_base 2: mod_base = OTHER; note = 2'-Omethylguanosine
  modified_base 3: mod_base = OTHER; note = 2'-Omethylcytosine
  modified_base 4: mod_base = OTHER; note = 2'-Omethyluridine
  modified_base 5: mod_base = OTHER; note = 2'-Omethylcytosine
  modified_base 6: mod_base = OTHER; note = 2'-Omethylcytosine
  modified_base 10: mod_base = OTHER; note = 2'-Omethylguanosine
  modified_base 11: mod_base = OTHER; note = 2'-Omethylcytosine
  modified_base 12: mod_base = OTHER; note = 2'-Omethylguanosine
  modified_base 13: mod_base = OTHER; note = 2'-Omethylcytosine
  modified_base 22: mod_base = OTHER; note = 2'-Omethylguanosine
  modified_base 23: mod_base = OTHER; note = 2'-Omethylcytosine
  modified_base 24: mod_base = OTHER; note = 2'-Omethylguanosine
  modified_base 25: mod_base = OTHER; note = 2'-Omethylcytosine
  modified_base 33: mod_base = OTHER; note = 2'-O-(2-Methoxyethyl) thymine

SEQ ID NO: 4667 - RNA, 75 nt, synthetic construct; identical to SEQ ID NO: 1045
  source 1..75: mol_type = other RNA
  modified_base 1: mod_base = OTHER; note = 2'-Omethylguanosine
  modified_base 2: mod_base = OTHER; note = 2'-Omethylguanosine
  modified_base 3: mod_base = OTHER; note = 2'-Omethyluridine
  modified_base 4: mod_base = OTHER; note = 2'-Omethyluridine
  modified_base 5: mod_base = OTHER; note = 2'-Omethylcytosine
  modified_base 6: mod_base = OTHER; note = 2'-Omethylcytosine
  modified_base 10: mod_base = OTHER; note = 2'-Omethylguanosine
  modified_base 11: mod_base = OTHER; note = 2'-Omethyluridine
  modified_base 12: mod_base = OTHER; note = 2'-Omethylguanosine
  modified_base 13: mod_base = OTHER; note = 2'-Omethyluridine
  modified_base 16: mod_base = OTHER; note = 2'-Omethyluridine
  modified_base 17: mod_base = OTHER; note = 2'-Omethylguanosine
  modified_base 18: mod_base = OTHER; note = 2'-Omethylguanosine
  modified_base 20: mod_base = OTHER; note = 2'-Omethyladenosine
  modified_base 25: mod_base = OTHER; note = 2'-Omethylcytosine
  modified_base 33: mod_base = OTHER; note = 2'-fluorouridine
  modified_base 35: mod_base = OTHER; note = Uridine phosphorothiorate
  modified_base 37: mod_base = OTHER; note = Adenosine phosphorothiorate
  modified_base 38: mod_base = OTHER; note = Adenosine phosphorothiorate
  modified_base 41: mod_base = OTHER; note = 2'-fluorocytosine
  modified_base 42: mod_base = OTHER; note = 2'-Omethyladenosine
  modified_base 43: mod_base = OTHER; note = 2'-Omethylguanosine
  modified_base 44: mod_base = OTHER; note = 2'-fluorocytosine
  modified_base 48: mod_base = OTHER; note = 2'-Omethylcytosine
  modified_base 49: mod_base = OTHER; note = 2'-Omethylcytosine
  modified_base 51: mod_base = OTHER; note = 2'-Omethyladenosine
  modified_base 53: mod_base = OTHER; note = 2'-Omethyluridine
  modified_base 54: mod_base = OTHER; note = Uridine phosphorothiorate
  modified_base 55: mod_base = OTHER; note = 2'-Omethylcytosine
  modified_base 56: mod_base = OTHER; note = 2'-fluoroguanosine
  modified_base 58: mod_base = OTHER; note = 2'-Omethylguanosine
  modified_base 60: mod_base = OTHER; note = 2'-Omethylcytosine
  modified_base 64: mod_base = OTHER; note = 2'-Omethylguanosine
  modified_base 72: mod_base = OTHER; note = 2'-Omethyluridine

SEQ ID NO: 4668 - RNA, 76 nt, synthetic construct; identical to SEQ ID NO: 3295
  source 1..76: mol_type = other RNA
  modified_base 1: mod_base = OTHER; note = 2'-Omethylcytosine
  modified_base 2: mod_base = OTHER; note = 2'-fluorocytosine phosphorothiorate
  modified_base 3: mod_base = OTHER; note = 2'-fluorouridine
  modified_base 4: mod_base = OTHER; note = 2'-Omethyluridine phosphorothiorate
  modified_base 5: mod_base = OTHER; note = 2'-fluorocytosine
  modified_base 9: mod_base = OTHER; note = 2'-Omethyladenosine
  modified_base 10: mod_base = OTHER; note = 2'-Omethylguanosine phosphorothiorate
  modified_base 11: mod_base = OTHER; note = 2'-fluorocytosine
  modified_base 15: mod_base = OTHER; note = 2'-Omethylguanosine
  modified_base 24: mod_base = OTHER; note = 2'-Omethylguanosine phosphorothiorate
  modified_base 26: mod_base = OTHER; note = Guanosine phosphorothiorate
  modified_base 42: mod_base = OTHER; note = 2'-fluorouridine
  modified_base 49: mod_base = OTHER; note = 2'-Omethylguanosine
  modified_base 52: mod_base = OTHER; note = 2'-fluoroguanosine phosphorothiorate
  modified_base 53: mod_base = OTHER; note = 2'-Omethylguanosine
  modified_base 54: mod_base = OTHER; note = Uridine phosphorothiorate
  modified_base 74: mod_base = OTHER; note = 2'-fluorocytosine
  modified_base 75: mod_base = OTHER; note = 2'-fluorocytosine
  modified_base 76: mod_base = OTHER; note = 2'-Omethyladenosine

SEQ ID NO: 4669 - RNA, 86 nt, synthetic construct; identical to SEQ ID NO: 3290
  source 1..86: mol_type = other RNA
  modified_base 1: mod_base = OTHER; note = 2'-Omethyladenosine phosphorothiorate
  modified_base 2: mod_base = OTHER; note = 2'-Omethylcytosine
  modified_base 3: mod_base = OTHER; note = 2'-Omethylcytosine
  modified_base 17: mod_base = OTHER; note = Guanosine phosphorothiorate
  modified_base 18: mod_base = OTHER; note = 2'-Omethylguanosine
  modified_base 19: mod_base = OTHER; note = Uridine phosphorothiorate
  modified_base 20: mod_base = OTHER; note = 2'-Omethyluridine phosphorothiorate
  modified_base 25: mod_base = OTHER; note = 2'-Omethylcytosine
  modified_base 29: mod_base = OTHER; note = 2'-Omethylguanosine
  modified_base 35: mod_base = OTHER; note = Cytosine phosphorothiorate
  modified_base 37: mod_base = OTHER; note = Guanosine phosphorothiorate
  modified_base 38: mod_base = OTHER; note = Adenosine phosphorothiorate
  modified_base 57: mod_base = OTHER; note = Guanosine phosphorothiorate
  modified_base 60: mod_base = OTHER; note = 2'-Omethyluridine
  modified_base 62: mod_base = OTHER; note = 2'-Omethylguanosine
  modified_base 64: mod_base = OTHER; note = Uridine phosphorothiorate
  modified_base 65: mod_base = OTHER; note = Uridine phosphorothiorate
  modified_base 66: mod_base = OTHER; note = 2'-Omethylcytosine
  modified_base 67: mod_base = OTHER; note = Guanosine phosphorothiorate
  modified_base 75: mod_base = OTHER; note = 2'-Omethylcytosine
  modified_base 81: mod_base = OTHER; note = 2'-Omethylguanosine
  modified_base 83: mod_base = OTHER; note = 2'-Omethyladenosine

SEQ ID NO: 4670 - RNA, 85 nt, synthetic construct; identical to SEQ ID NO: 3317
  source 1..85: mol_type = other RNA
  modified_base 1: mod_base = OTHER; note = 2'-Omethylguanosine phosphorothiorate
  modified_base 2: mod_base = OTHER; note = 2'-Omethylcytosine
  modified_base 12: mod_base = OTHER; note = 2'-Omethylcytosine
  modified_base 20: mod_base = OTHER; note = Uridine phosphorothiorate
  modified_base 31: mod_base = OTHER; note = 2'-fluoroadenosine
  modified_base 44: mod_base = OTHER; note = 2'-fluorouridine
  modified_base 52: mod_base = OTHER; note = 2'-fluorocytosine
  modified_base 53: mod_base = OTHER; note = 2'-fluorocytosine
  modified_base 54: mod_base = OTHER; note = 2'-fluorocytosine phosphorothiorate
  modified_base 57: mod_base = OTHER; note = 2'-fluorocytosine phosphorothiorate
  modified_base 61: mod_base = OTHER; note = Guanosine phosphorothiorate
  modified_base 63: mod_base = OTHER; note = 2'-Omethyluridine
  modified_base 70: mod_base = OTHER; note = 2'-Omethylcytosine
  modified_base 72: mod_base = OTHER; note = 2'-fluorouridine
  modified_base 81: mod_base = OTHER; note = 2'-fluorocytosine phosphorothiorate
  modified_base 82: mod_base = OTHER; note = 2'-Omethylguanosine

SEQ ID NO: 4671 - RNA, 75 nt, synthetic construct; identical to SEQ ID NO: 1045
  source 1..75: mol_type = other RNA
  modified_base 1: mod_base = OTHER; note = 2'-Omethylguanosine phosphorothiorate
  modified_base 2: mod_base = OTHER; note = 2'-Omethylguanosine phosphorothiorate
  modified_base 14: mod_base = OTHER; note = 2'-Omethyladenosine
  modified_base 17: mod_base = OTHER; note = 2'-Omethylguanosine
  modified_base 18: mod_base = OTHER; note = 2'-Omethylguanosine
  modified_base 20: mod_base = OTHER; note = 2'-Omethyladenosine
  modified_base 22: mod_base = OTHER; note = 2'-Omethylguanosine
  modified_base 25: mod_base = OTHER; note = 2'-Omethylcytosine
  modified_base 27: mod_base = OTHER; note = 2'-Omethylcytosine
  modified_base 33: mod_base = OTHER; note = 2'-fluorouridine
  modified_base 41: mod_base = OTHER; note = 2'-Omethylcytosine
  modified_base 44: mod_base = OTHER; note = 2'-Omethylcytosine
  modified_base 45: mod_base = OTHER; note = 2'-Omethylguanosine
  modified_base 46: mod_base = OTHER; note = 2'-fluoroadenosine
  modified_base 47: mod_base = OTHER; note = 2'-fluorouridine
  modified_base 51: mod_base = OTHER; note = 2'-Omethyladenosine
  modified_base 54: mod_base = OTHER; note = Uridine phosphorothiorate
  modified_base 70: mod_base = OTHER; note = 2'-Omethylcytosine
  modified_base 72: mod_base = OTHER; note = 2'-Omethyluridine

SEQ ID NO: 4672 - RNA, 73 nt, synthetic construct; identical to SEQ ID NO: 935
  source 1..73: mol_type = other RNA
  modified_base 1: mod_base = OTHER; note = 2'-Omethylguanosine phosphorothiorate
  modified_base 73: mod_base = OTHER; note = 2'-Omethylguanosine

SEQ ID NO: 4673 - RNA, 75 nt, synthetic construct
  source 1..75: mol_type = other RNA
gcgttggtggtatagtggttagcatagctgccttcaaagcagttgacccgggttcgattcccggccaacgcacca

SEQ ID NO: 4674 - RNA, 74 nt, synthetic construct; identical to SEQ ID NO: 3293
  source 1..74: mol_type = other RNA
  modified_base 1: mod_base = OTHER; note = 2'-Omethyladenosine
  modified_base 2: mod_base = OTHER; note = Cytosine phosphorothiorate
  modified_base 3: mod_base = OTHER; note = Cytosine phosphorothiorate
  modified_base 4: mod_base = OTHER; note = Uridine phosphorothiorate
  modified_base 8: mod_base = OTHER; note = Guanosine phosphorothiorate
  modified_base 9: mod_base = OTHER; note = 2'-Omethylguanosine
  modified_base 10: mod_base = OTHER; note = Cytosine phosphorothiorate
  modified_base 11: mod_base = OTHER; note = 2'-fluoroguanosine
  modified_base 24: mod_base = OTHER; note = 2'-fluoroguanosine
  modified_base 25: mod_base = OTHER; note = 2'-fluorouridine phosphorothiorate
  modified_base 27: mod_base = OTHER; note = 2'-Omethyluridine
  modified_base 35: mod_base = OTHER; note = 2'-fluoroguanosine
  modified_base 42: mod_base = OTHER; note = Adenosine phosphorothiorate
  modified_base 43: mod_base = OTHER; note = 2'-fluoroguanosine
  modified_base 46: mod_base = OTHER; note = Uridine phosphorothiorate
  modified_base 48: mod_base = OTHER; note = 2'-fluorocytosine phosphorothiorate
  modified_base 50: mod_base = OTHER; note = Uridine phosphorothiorate
  modified_base 51: mod_base = OTHER; note = 2'-fluoroguanosine
  modified_base 62: mod_base = OTHER; note = Guanosine phosphorothiorate
  modified_base 73: mod_base = OTHER; note = 2'-Omethylcytosine phosphorothiorate

SEQ ID NO: 4675 - RNA, 76 nt, synthetic construct; identical to SEQ ID NO: 625
  source 1..76: mol_type = other RNA
  modified_base 1: mod_base = OTHER; note = 2'-Omethylguanosine phosphorothiorate
  modified_base 2: mod_base = OTHER; note = 2'-Omethylguanosine phosphorothiorate
  modified_base 33: mod_base = OTHER; note = 2'-O-(2-Methoxyethyl) thymine
  modified_base 52: mod_base = OTHER; note = Guanosine phosphorothiorate
  modified_base 74: mod_base = OTHER; note = Cytosine phosphorothiorate
  modified_base 75: mod_base = OTHER; note = 2'-Omethylcytosine

SEQ ID NO: 4676 - RNA, 85 nt, synthetic construct; identical to SEQ ID NO: 3288
  source 1..85: mol_type = other RNA
  modified_base 1: mod_base = OTHER; note = 2'-fluorocytosine phosphorothiorate
  modified_base 13: mod_base = OTHER; note = Adenosine phosphorothiorate
  modified_base 36: mod_base = OTHER; note = Guanosine phosphorothiorate
  modified_base 62: mod_base = OTHER; note = Guanosine phosphorothiorate
  modified_base 82: mod_base = OTHER; note = Adenosine phosphorothiorate

SEQ ID NO: 4677 - RNA, 76 nt, synthetic construct; identical to SEQ ID NO: 625
  source 1..76: mol_type = other RNA
  modified_base 1: mod_base = OTHER; note = 2'-Omethylguanosine
  modified_base 10: mod_base = OTHER; note = 2'-Omethylguanosine
  modified_base 13: mod_base = OTHER; note = 2'-Omethylcytosine
  modified_base 17: mod_base = OTHER; note = Guanosine phosphorothiorate
  modified_base 18: mod_base = OTHER; note = 2'-Omethylguanosine
  modified_base 19: mod_base = OTHER; note = Adenosine phosphorothiorate
  modified_base 20: mod_base = OTHER; note = 2'-Omethyluridine
  modified_base 25: mod_base = OTHER; note = 2'-Omethylcytosine
  modified_base 29: mod_base = OTHER; note = 2'-Omethylguanosine
  modified_base 33: mod_base = OTHER; note = 2'-fluorouridine
  modified_base 35: mod_base = OTHER; note = 2'-Omethylcytosine phosphorothiorate
  modified_base 37: mod_base = OTHER; note = Adenosine phosphorothiorate
  modified_base 38: mod_base = OTHER; note = Adenosine phosphorothiorate
  modified_base 43: mod_base = OTHER; note = 2'-Omethyladenosine
  modified_base 44: mod_base = OTHER; note = 2'-fluoroadenosine
  modified_base 46: mod_base = OTHER; note = Guanosine phosphorothiorate
  modified_base 50: mod_base = OTHER; note = 2'-Omethylcytosine
  modified_base 52: mod_base = OTHER; note = 2'-Omethylguanosine
  modified_base 54: mod_base = OTHER; note = Uridine phosphorothiorate
  modified_base 55: mod_base = OTHER; note = Uridine phosphorothiorate
  modified_base 56: mod_base = OTHER; note = 2'-Omethylcytosine
  modified_base 57: mod_base = OTHER; note = Guanosine phosphorothiorate
  modified_base 62: mod_base = OTHER; note = 2'-Omethylcytosine
  modified_base 63: mod_base = OTHER; note = 2'-fluorocytosine
  modified_base 65: mod_base = OTHER; note = 2'-Omethylguanosine
  modified_base 71: mod_base = OTHER; note = 2'-Omethyluridine
  modified_base 73: mod_base = OTHER; note = 2'-Omethylguanosine

SEQ ID NO: 4678 - DNA, 73 bp, synthetic construct; identical to SEQ ID NO: 3380
  source 1..73: mol_type = other DNA
  modified_base 1: mod_base = OTHER; note = 2'-Omethylguanosine phosphorothiorate
  modified_base 2: mod_base = OTHER; note = 2'-Omethylguanosine phosphorothiorate
  modified_base 45: mod_base = OTHER; note = Guanosine phosphorothiorate
  modified_base 65: mod_base = OTHER; note = 2'-Omethylguanosine
  modified_base 72: mod_base = OTHER; note = Cytosine phosphorothiorate
  misc_feature 1..45: note = RNA
  misc_feature 46: note = DNA
  misc_feature 47..73: note = RNA

SEQ ID NO: 4679 - RNA, 75 nt, synthetic construct; identical to SEQ ID NO: 1045
  source 1..75: mol_type = other RNA
  modified_base 1: mod_base = OTHER; note = 2'-Omethylguanosine phosphorothiorate
  modified_base 2: mod_base = OTHER; note = 2'-Omethylguanosine phosphorothiorate
  modified_base 19: mod_base = OTHER; note = 2'-fluorouridine
  modified_base 20: mod_base = OTHER; note = 2'-Omethyladenosine phosphorothiorate
  modified_base 22: mod_base = OTHER; note = 2'-fluoroguanosine
  modified_base 24: mod_base = OTHER; note = 2'-fluoroadenosine
  modified_base 25: mod_base = OTHER; note = Cytosine phosphorothiorate
  modified_base 27: mod_base = OTHER; note = 2'-fluorocytosine
  modified_base 38: mod_base = OTHER; note = 2'-fluoroadenosine
  modified_base 44: mod_base = OTHER; note = 2'-fluorocytosine
  modified_base 50: mod_base = OTHER; note = 2'-Omethylguanosine
  modified_base 54: mod_base = OTHER; note = 2'-fluorouridine phosphorothiorate
  modified_base 62: mod_base = OTHER; note = Cytosine phosphorothiorate
  modified_base 65: mod_base = OTHER; note = 2'-fluorouridine
  modified_base 66: mod_base = OTHER; note = Guanosine phosphorothiorate
  modified_base 72: mod_base = OTHER; note = Uridine phosphorothiorate
  modified_base 73: mod_base = OTHER; note = Cytosine phosphorothiorate
  modified_base 74: mod_base = OTHER; note = 2'-fluorocytosine phosphorothiorate
  modified_base 75: mod_base = OTHER; note = 2'-Omethyladenosine

SEQ ID NO: 4680 - RNA, 76 nt, synthetic construct; identical to SEQ ID NO: 625
  source 1..76: mol_type = other RNA
  modified_base 2: mod_base = OTHER; note = 2'-Omethylguanosine
  modified_base 3: mod_base = OTHER; note = 2'-fluorocytosine
  modified_base 10: mod_base = OTHER; note = 2'-Omethylguanosine phosphorothiorate
  modified_base 11: mod_base = OTHER; note = 2'-fluorocytosine
  modified_base 15: mod_base = OTHER; note = 2'-Omethyladenosine
  modified_base 24: mod_base = OTHER; note = 2'-fluoroguanosine
  modified_base 27: mod_base = OTHER; note = Uridine phosphorothiorate
  modified_base 28: mod_base = OTHER; note = 2'-Omethyluridine phosphorothiorate
  modified_base 29: mod_base = OTHER; note = 2'-fluoroguanosine
  modified_base 30: mod_base = OTHER; note = 2'-fluoroguanosine
  modified_base 31: mod_base = OTHER; note = 2'-Omethyladenosine
  modified_base 32: mod_base = OTHER; note = 2'-fluorocytosine
  modified_base 33: mod_base = OTHER; note = Uridine phosphorothiorate
  modified_base 34: mod_base = OTHER; note = 2'-fluorouridine phosphorothiorate
  modified_base 43: mod_base = OTHER; note = 2'-fluoroadenosine
  modified_base 44: mod_base = OTHER; note = 2'-fluoroadenosine
  modified_base 47: mod_base = OTHER; note = 2'-Omethyluridine
  modified_base 48: mod_base = OTHER; note = Uridine phosphorothiorate
  modified_base 50: mod_base = OTHER; note = 2'-Omethylcytosine
  modified_base 54: mod_base = OTHER; note = 2'-Omethyluridine phosphorothiorate
  modified_base 59: mod_base = OTHER; note = 2'-fluoroguanosine
  modified_base 60: mod_base = OTHER; note = 2'-Omethyluridine
  modified_base 63: mod_base = OTHER; note = 2'-Omethylcytosine phosphorothiorate
  modified_base 64: mod_base = OTHER; note = 2'-fluoroguanosine phosphorothiorate
  modified_base 67: mod_base = OTHER; note = Guanosine phosphorothiorate
  modified_base 68: mod_base = OTHER; note = Guanosine phosphorothiorate
  modified_base 72: mod_base = OTHER; note = Cytosine phosphorothiorate
  modified_base 74: mod_base = OTHER; note = 2'-Omethylcytosine
  modified_base 76: mod_base = OTHER; note = 2'-fluoroadenosine

SEQ ID NO: 4681 - RNA, 76 nt, synthetic construct; identical to SEQ ID NO: 625
  source 1..76: mol_type = other RNA
  modified_base 1: mod_base = OTHER; note = 2'-Omethylguanosine
  modified_base 4: mod_base = OTHER; note = Thymine
  modified_base 17: mod_base = OTHER; note = 2'-Omethylguanosine
  modified_base 18: mod_base = OTHER; note = 2'-Omethylguanosine
  modified_base 33: mod_base = OTHER; note = 2'-fluorouridine
  modified_base 50: mod_base = OTHER; note = 2'-Omethylcytosine
  modified_base 52: mod_base = OTHER; note = 2'-Omethylguanosine
  modified_base 55: mod_base = OTHER; note = Uridine phosphorothiorate
  modified_base 73: mod_base = OTHER; note = 2'-Omethylguanosine

SEQ ID NO: 4682 - RNA, 76 nt, synthetic construct; identical to SEQ ID NO: 3289
  source 1..76: mol_type = other RNA
  modified_base 1: mod_base = OTHER; note = 2'-Omethylguanosine phosphorothiorate
  modified_base 2: mod_base = OTHER; note = 2'-Omethylcytosine phosphorothiorate
  modified_base 3: mod_base = OTHER; note = 2'-Omethylcytosine
  modified_base 4: mod_base = OTHER; note = 2'-Omethyluridine
  modified_base 5: mod_base = OTHER; note = 2'-Omethylguanosine
  modified_base 6: mod_base = OTHER; note = 2'-Omethylguanosine
  modified_base 66: mod_base = OTHER; note = 2'-Omethyluridine
  modified_base 67: mod_base = OTHER; note = 2'-Omethylcytosine
  modified_base 68: mod_base = OTHER; note = 2'-Omethylcytosine
  modified_base 69: mod_base = OTHER; note = 2'-Omethyladenosine
  modified_base 71: mod_base = OTHER; note = 2'-Omethylguanosine
  modified_base 72: mod_base = OTHER; note = 2'-fluorocytosine
  modified_base 73: mod_base = OTHER; note = 2'-Omethylguanosine

SEQ ID NO: 4683 - RNA, 76 nt, synthetic construct; identical to SEQ ID NO: 625
  source 1..76: mol_type = other RNA
  modified_base 1: mod_base = OTHER; note = 2'-Omethylguanosine phosphorothiorate
  modified_base 2: mod_base = OTHER; note = 2'-Omethylguanosine
  modified_base 3: mod_base = OTHER; note = 2'-Omethylcytosine
  modified_base 10: mod_base = OTHER; note = 2'-Omethylguanosine
  modified_base 11: mod_base = OTHER; note = 2'-Omethylcytosine
  modified_base 12: mod_base = OTHER; note = 2'-Omethylguanosine
  modified_base 13: mod_base = OTHER; note = 2'-Omethylcytosine
  modified_base 14: mod_base = OTHER; note = 2'-Omethyladenosine
  modified_base 15: mod_base = OTHER; note = 2'-fluoroadenosine
  modified_base 16: mod_base = OTHER; note = 2'-Omethyluridine
  modified_base 17: mod_base = OTHER; note = 2'-Omethylguanosine
  modified_base 18: mod_base = OTHER; note = 2'-Omethylguanosine
  modified_base 19: mod_base = OTHER; note = 2'-fluoroadenosine
  modified_base 20: mod_base = OTHER; note = 2'-Omethyluridine
  modified_base 21: mod_base = OTHER; note = 2'-fluoroadenosine
  modified_base 22: mod_base = OTHER; note = 2'-Omethylguanosine
  modified_base 23: mod_base = OTHER; note = 2'-Omethylcytosine
  modified_base 24: mod_base = OTHER; note = 2'-Omethylguanosine
  modified_base 25: mod_base = OTHER; note = 2'-Omethylcytosine
  modified_base 38: mod_base = OTHER; note = Adenosine phosphorothiorate
  modified_base 39: mod_base = OTHER; note = Uridine phosphorothiorate
  modified_base 40: mod_base = OTHER; note = 2'-fluorouridine
  modified_base 43: mod_base = OTHER; note = 2'-Omethyladenosine
  modified_base 44: mod_base = OTHER; note = 2'-Omethyladenosine
  modified_base 45: mod_base = OTHER; note = 2'-Omethylguanosine
  modified_base 46: mod_base = OTHER; note = 2'-fluoroguanosine
  modified_base 48: mod_base = OTHER; note = 2'-fluorouridine
  modified_base 49: mod_base = OTHER; note = 2'-Omethylcytosine
  modified_base 50: mod_base = OTHER; note = 2'-Omethylcytosine
  modified_base 51: mod_base = OTHER; note = 2'-Omethylguanosine
  modified_base 52: mod_base = OTHER; note = 2'-Omethylguanosine
  modified_base 53: mod_base = OTHER; note = 2'-Omethylguanosine
  modified_base 54: mod_base = OTHER; note = 2'-Omethyluridine
  modified_base 61: mod_base = OTHER; note = 2'-Omethylcytosine
  modified_base 62: mod_base = OTHER; note = 2'-Omethylcytosine
  modified_base 63: mod_base = OTHER; note = 2'-fluorocytosine
  modified_base 64: mod_base = OTHER; note = 2'-Omethylguanosine
  modified_base 65: mod_base = OTHER; note = 2'-Omethylguanosine
  modified_base 66: mod_base = OTHER; note = 2'-Omethylcytosine
  modified_base 67: mod_base = OTHER; note = 2'-Omethylguanosine
  modified_base 68: mod_base = OTHER; note = 2'-Omethylguanosine
  modified_base 69: mod_base = OTHER; note = 2'-Omethyladenosine

SEQ ID NO: 4684 - RNA, 76 nt, synthetic construct; identical to SEQ ID NO: 625
  source 1..76: mol_type = other RNA
  modified_base 1: mod_base = OTHER; note = 2'-Omethylguanosine
  modified_base 10: mod_base = OTHER; note = 2'-Omethylguanosine
  modified_base 13: mod_base = OTHER; note = 2'-Omethylcytosine
  modified_base 17: mod_base = OTHER; note = Guanosine phosphorothiorate
  modified_base 18: mod_base = OTHER; note = 2'-Omethylguanosine
  modified_base 19: mod_base = OTHER; note = Adenosine phosphorothiorate
  modified_base 20: mod_base = OTHER; note = 2'-Omethyluridine
  modified_base 24: mod_base = OTHER; note = 2'-Omethylguanosine
  modified_base 25: mod_base = OTHER; note = 2'-Omethylcytosine
  modified_base 29: mod_base = OTHER; note = 2'-Omethylguanosine
  modified_base 33: mod_base = OTHER; note = 2'-fluorouridine
  modified_base 35: mod_base = OTHER; note = Cytosine phosphorothiorate
  modified_base 37: mod_base = OTHER; note = Adenosine phosphorothiorate
  modified_base 38: mod_base = OTHER; note = Adenosine phosphorothiorate
  modified_base 43: mod_base = OTHER; note = 2'-Omethyladenosine
  modified_base 44: mod_base = OTHER; note = 2'-fluoroadenosine
  modified_base 46: mod_base = OTHER; note = Guanosine phosphorothiorate
  modified_base 50: mod_base = OTHER; note = 2'-Omethylcytosine
  modified_base 52: mod_base = OTHER; note = 2'-Omethylguanosine
  modified_base 54: mod_base = OTHER; note = Uridine phosphorothiorate
  modified_base 55: mod_base = OTHER; note = Uridine phosphorothiorate
  modified_base 56: mod_base = OTHER; note = 2'-Omethylcytosine
  modified_base 57: mod_base = OTHER; note = Guanosine phosphorothiorate
  modified_base 62: mod_base = OTHER; note = 2'-Omethylcytosine
  modified_base 63: mod_base = OTHER; note = 2'-fluorocytosine
  modified_base 65: mod_base = OTHER; note = 2'-Omethylguanosine
  modified_base 71: mod_base = OTHER; note = 2'-Omethyluridine
  modified_base 73: mod_base = OTHER; note = 2'-Omethylguanosine

SEQ ID NO: 4685 - RNA, 74 nt, synthetic construct; identical to SEQ ID NO: 766
  source 1..74: mol_type = other RNA
  modified_base 1: mod_base = OTHER; note = 2'-Omethylguanosine phosphorothiorate
  modified_base 2: mod_base = OTHER; note = 2'-Omethylguanosine
  modified_base 3: mod_base = OTHER; note = 2'-Omethylcytosine
  modified_base 4: mod_base = OTHER; note = 2'-Omethyluridine
  modified_base 5: mod_base = OTHER; note = 2'-Omethylcytosine
  modified_base 6: mod_base = OTHER; note = 2'-Omethylcytosine
  modified_base 10: mod_base = OTHER; note = 2'-Omethylguanosine
  modified_base 11: mod_base = OTHER; note = 2'-Omethylcytosine
  modified_base 12: mod_base = OTHER; note = 2'-Omethylguanosine
  modified_base 13: mod_base = OTHER; note = 2'-Omethylcytosine
  modified_base 14: mod_base = OTHER; note = 2'-Omethyladenosine
  modified_base 15: mod_base = OTHER; note = 2'-Omethyladenosine
  modified_base 16: mod_base = OTHER; note = 2'-Omethyluridine
  modified_base 17: mod_base = OTHER; note = 2'-Omethylguanosine
  modified_base 18: mod_base = OTHER; note = 2'-Omethylguanosine
  modified_base 20: mod_base = OTHER; note = 2'-Omethyluridine
  modified_base 22: mod_base = OTHER; note = 2'-Omethylguanosine
  modified_base 23: mod_base = OTHER; note = 2'-Omethylcytosine
  modified_base 24: mod_base = OTHER; note = 2'-Omethylguanosine
  modified_base 25: mod_base = OTHER; note = 2'-Omethylcytosine
  modified_base 33: mod_base = OTHER; note = 2'-fluorouridine
  modified_base 35: mod_base = OTHER; note = Cytosine phosphorothiorate
  modified_base 37: mod_base = OTHER; note = Adenosine phosphorothiorate
  modified_base 38: mod_base = OTHER; note = Adenosine phosphorothiorate
  modified_base 49: mod_base = OTHER; note = 2'-Omethylcytosine
  modified_base 50: mod_base = OTHER; note = 2'-Omethylcytosine
  modified_base 52: mod_base = OTHER; note = 2'-Omethylguanosine
  modified_base 54: mod_base = OTHER; note = 2'-Omethyluridine
  modified_base 55: mod_base = OTHER; note = Uridine phosphorothiorate
  modified_base 56: mod_base = OTHER; note = 2'-Omethylcytosine
  modified_base 57: mod_base = OTHER; note = 2'-fluoroguanosine
  modified_base 59: mod_base = OTHER; note = 2'-Omethylguanosine
  modified_base 61: mod_base = OTHER; note = 2'-Omethylcytosine
  modified_base 65: mod_base = OTHER; note = 2'-Omethylguanosine
  modified_base 73: mod_base = OTHER; note = 2'-Omethylguanosine

SEQ ID NO: 4686 - RNA, 75 nt, synthetic construct; identical to SEQ ID NO: 3299
  source 1..75: mol_type = other RNA
  modified_base 4: mod_base = OTHER; note = 2'-Omethylguanosine
  modified_base 13: mod_base = OTHER; note = 2'-fluoroadenosine
  modified_base 14: mod_base = OTHER; note = 2'-fluoroguanosine
  modified_base 18: mod_base = OTHER; note = 2'-Omethylguanosine phosphorothiorate
  modified_base 21: mod_base = OTHER; note = 2'-fluoroguanosine phosphorothiorate
  modified_base 26: mod_base = OTHER; note = Uridine phosphorothiorate
  modified_base 28: mod_base = OTHER; note = 2'-fluoroadenosine
  modified_base 31: mod_base = OTHER; note = 2'-fluorocytosine phosphorothiorate
  modified_base 39: mod_base = OTHER; note = 2'-Omethylcytosine
  modified_base 41: mod_base = OTHER; note = 2'-Omethylguanosine phosphorothiorate
  modified_base 46: mod_base = OTHER; note = 2'-fluorouridine
  modified_base 47: mod_base = OTHER; note = 2'-fluorocytosine
  modified_base 54: mod_base = OTHER; note = 2'-fluorouridine
  modified_base 58: mod_base = OTHER; note = Guanosine phosphorothiorate
  modified_base 60: mod_base = OTHER; note = 2'-fluorocytosine phosphorothiorate
  modified_base 64: mod_base = OTHER; note = 2'-fluoroguanosine
  modified_base 72: mod_base = OTHER; note = 2'-Omethylguanosine
  modified_base 73: mod_base = OTHER; note = Cytosine phosphorothiorate
  modified_base 74: mod_base = OTHER; note = Cytosine phosphorothiorate

SEQ ID NO: 4687 - RNA, 87 nt, synthetic construct
  source 1..87: mol_type = other RNA
gctggtttgcccgagtggttaagggggaagacttcagatcttctgcagtcaatctgcgcgtgggttcgaaccccacagccagcacca

SEQ ID NO: 4688 - RNA, 86 nt, synthetic construct; identical to SEQ ID NO: 3290
  source 1..86: mol_type = other RNA
  modified_base 56: mod_base = OTHER; note = 2'-Omethylcytosine

SEQ ID NO: 4689 - RNA, 85 nt, synthetic construct; identical to SEQ ID NO: 3297
  source 1..85: mol_type = other RNA
  modified_base 1: mod_base = OTHER; note = 2'-Omethylguanosine
  modified_base 16: mod_base = OTHER; note = 2'-Omethyluridine
  modified_base 17: mod_base = OTHER; note = 2'-Omethylguanosine
  modified_base 18: mod_base = OTHER; note = 2'-Omethylguanosine
  modified_base 63: mod_base = OTHER; note = 2'-Omethyluridine
  modified_base 65: mod_base = OTHER; note = 2'-Omethylcytosine
  modified_base 66: mod_base = OTHER; note = 2'-fluoroguanosine
  modified_base 68: mod_base = OTHER; note = 2'-Omethyladenosine
  modified_base 82: mod_base = OTHER; note = 2'-Omethylguanosine

SEQ ID NO: 4690 - RNA, 76 nt, synthetic construct; identical to SEQ ID NO: 625
  source 1..76: mol_type = other RNA
  modified_base 1: mod_base = OTHER; note = 2'-Omethylguanosine phosphorothiorate
  modified_base 2: mod_base = OTHER; note = 2'-Omethylguanosine
  modified_base 10: mod_base = OTHER; note = 2'-Omethylguanosine
  modified_base 11: mod_base = OTHER; note = 2'-Omethylcytosine
  modified_base 12: mod_base = OTHER; note = 2'-Omethylguanosine
  modified_base 13: mod_base = OTHER; note = 2'-Omethylcytosine
  modified_base 17: mod_base = OTHER; note = 2'-Omethylguanosine
  modified_base 22: mod_base = OTHER; note = 2'-Omethylguanosine
  modified_base 23: mod_base = OTHER; note = 2'-Omethylcytosine
  modified_base 24: mod_base = OTHER; note = 2'-Omethylguanosine
  modified_base 25: mod_base = OTHER; note = 2'-Omethylcytosine
  modified_base 33: mod_base = OTHER; note = 2'-fluorouridine
  modified_base 35: mod_base = OTHER; note = Cytosine phosphorothiorate
  modified_base 37: mod_base = OTHER; note = Adenosine phosphorothiorate
  modified_base 38: mod_base = OTHER; note = Adenosine phosphorothiorate
  modified_base 52: mod_base = OTHER; note = 2'-fluoroguanosine
  modified_base 54: mod_base = OTHER; note = 2'-Omethyluridine
  modified_base 62: mod_base = OTHER; note = 2'-Omethylcytosine
  modified_base 63: mod_base = OTHER; note = 2'-fluorocytosine
  modified_base 65: mod_base = OTHER; note = 2'-Omethylguanosine
  modified_base 73: mod_base = OTHER; note = 2'-Omethylguanosine
  modified_base 75: mod_base = OTHER; note = 2'-fluorocytosine phosphorothiorate

SEQ ID NO: 4691 - RNA, 85 nt, synthetic construct; identical to SEQ ID NO: 3317
  source 1..85: mol_type = other RNA
  modified_base 2: mod_base = OTHER; note = 2'-Omethylcytosine phosphorothiorate
  modified_base 3: mod_base = OTHER; note = 2'-Omethyluridine phosphorothiorate
  modified_base 25: mod_base = OTHER; note = 2'-Omethylcytosine phosphorothiorate
  modified_base 32: mod_base = OTHER; note = Cytosine phosphorothiorate
  modified_base 51: mod_base = OTHER; note = Uridine phosphorothiorate
  modified_base 55: mod_base = OTHER; note = 2'-Omethylcytosine phosphorothiorate
  modified_base 82: mod_base = OTHER; note = 2'-Omethylguanosine

SEQ ID NO: 4692 - RNA, 76 nt, synthetic construct; identical to SEQ ID NO: 625
  source 1..76: mol_type = other RNA
  modified_base 1: mod_base = OTHER; note = 2'-Omethylguanosine
  modified_base 2: mod_base = OTHER; note = 2'-Omethylguanosine
  modified_base 10: mod_base = OTHER; note = 2'-Omethylguanosine
  modified_base 13: mod_base = OTHER; note = 2'-Omethylcytosine
  modified_base 17: mod_base = OTHER; note = Guanosine phosphorothiorate
  modified_base 18: mod_base = OTHER; note = 2'-Omethylguanosine
  modified_base 19: mod_base = OTHER; note = Adenosine phosphorothiorate
  modified_base 20: mod_base = OTHER; note = 2'-Omethyluridine
  modified_base 25: mod_base = OTHER; note = 2'-Omethylcytosine
  modified_base 29: mod_base = OTHER; note = 2'-Omethylguanosine
  modified_base 33: mod_base = OTHER; note = 2'-fluorouridine
  modified_base 35: mod_base = OTHER; note = Cytosine phosphorothiorate
  modified_base 37: mod_base = OTHER; note = Adenosine phosphorothiorate
  modified_base 38: mod_base = OTHER; note = Adenosine phosphorothiorate
  modified_base 41: mod_base = OTHER; note = 2'-Omethylcytosine
  modified_base 43: mod_base = OTHER; note = 2'-Omethyladenosine
  modified_base 44: mod_base = OTHER; note = 2'-fluoroadenosine
  modified_base 46: mod_base = OTHER; note = Guanosine phosphorothiorate
  modified_base 50: mod_base = OTHER; note = 2'-Omethylcytosine
  modified_base 52: mod_base = OTHER; note = 2'-Omethylguanosine
  modified_base 54: mod_base = OTHER; note = Uridine phosphorothiorate
  modified_base 55: mod_base = OTHER; note = Uridine phosphorothiorate
  modified_base 56: mod_base = OTHER; note = 2'-Omethylcytosine
  modified_base 57: mod_base = OTHER; note = Guanosine phosphorothiorate
  modified_base 62: mod_base = OTHER; note = 2'-Omethylcytosine
  modified_base 63: mod_base = OTHER; note = 2'-fluorocytosine
  modified_base 65: mod_base = OTHER; note = 2'-Omethylguanosine
  modified_base 71: mod_base = OTHER; note = 2'-Omethyluridine
  modified_base 73: mod_base = OTHER; note = 2'-Omethylguanosine

SEQ ID NO: 4693 - RNA, 75 nt, synthetic construct; identical to SEQ ID NO: 1045
  source 1..75: mol_type = other RNA
  modified_base 2: mod_base = OTHER; note = 2'-Omethylguanosine phosphorothiorate
  modified_base 18: mod_base = OTHER; note = 2'-Omethylguanosine
  modified_base 19: mod_base = OTHER; note = 2'-fluorouridine phosphorothiorate
  modified_base 38: mod_base = OTHER; note = 2'-Omethyladenosine
  modified_base 39: mod_base = OTHER; note = 2'-fluorouridine phosphorothiorate
  modified_base 51: mod_base = OTHER; note = 2'-Omethyladenosine phosphorothiorate
  modified_base 52: mod_base = OTHER; note = 2'-Omethylguanosine phosphorothiorate
  modified_base 53: mod_base = OTHER; note = 2'-Omethyluridine phosphorothiorate
  modified_base 56: mod_base = OTHER; note = 2'-Omethylguanosine
  modified_base 58: mod_base = OTHER; note = 2'-Omethylguanosine
  modified_base 59: mod_base = OTHER; note = 2'-fluorouridine phosphorothiorate
  modified_base 65: mod_base = OTHER; note = 2'-Omethyluridine
  modified_base 66: mod_base = OTHER; note = 2'-Omethylguanosine
  modified_base 67: mod_base = OTHER; note = 2'-Omethylguanosine
  modified_base 72: mod_base = OTHER; note = 2'-Omethyluridine
  modified_base 73: mod_base = OTHER; note = Cytosine phosphorothiorate
  modified_base 74: mod_base = OTHER; note = 2'-Omethylcytosine phosphorothiorate

SEQ ID NO: 4694 - RNA, 76 nt, synthetic construct
  source 1..76: mol_type = other RNA
ggctccgtggcgcaatggatagcgcaaacatcttcaaaatgttaggttccgggttcgagtcccggcggagtcgcca

SEQ ID NO: 4695 - RNA, 76 nt, synthetic construct
  source 1..76: mol_type = other RNA
ataagcgtggcgcaatggatagcgcattggacttcaaattcaaaggttccgggttcgagtcccggcgcttatgcca

SEQ ID NO: 4696 - RNA, 76 nt, synthetic construct
  source 1..76: mol_type = other RNA
ggctccgtggcgcaatggatagcgcatgtgacttcaaattacacggttccgggttcgagtcccggcggagtcgcca

SEQ ID NO: 4697 - RNA, 76 nt, synthetic construct; identical to SEQ ID NO: 625
  source 1..76: mol_type = other RNA
  modified_base 1: mod_base = OTHER; note = 2'-Omethylguanosine
  modified_base 2: mod_base = OTHER; note = 2'-fluoroguanosine
  modified_base 3: mod_base = OTHER; note = 2'-fluorocytosine
  modified_base 4: mod_base = OTHER; note = 2'-fluorouridine phosphorothiorate
  modified_base 6: mod_base = OTHER; note = 2'-fluorocytosine
  modified_base 7: mod_base = OTHER; note = Guanosine phosphorothiorate
  modified_base 11: mod_base = OTHER; note = 2'-fluorocytosine
  modified_base 14: mod_base = OTHER; note = Adenosine phosphorothiorate
  modified_base 16: mod_base = OTHER; note = 2'-Omethyluridine
  modified_base 20: mod_base = OTHER; note = Uridine phosphorothiorate
  modified_base 23: mod_base = OTHER; note = 2'-fluorocytosine
  modified_base 39: mod_base = OTHER; note = Uridine phosphorothiorate
  modified_base 40: mod_base = OTHER; note = 2'-fluorouridine
  modified_base 43: mod_base = OTHER; note = Adenosine phosphorothiorate
  modified_base 47: mod_base = OTHER; note = 2'-Omethyluridine
  modified_base 48: mod_base = OTHER; note = 2'-fluorouridine
  modified_base 50: mod_base = OTHER; note = 2'-fluorocytosine
  modified_base 52: mod_base = OTHER; note = 2'-Omethylguanosine
  modified_base 53: mod_base = OTHER; note = 2'-Omethylguanosine
  modified_base 56: mod_base = OTHER; note = Cytosine phosphorothiorate
  modified_base 57: mod_base = OTHER; note = 2'-fluoroguanosine
  modified_base 58: mod_base = OTHER; note = Adenosine phosphorothiorate
  modified_base 59: mod_base = OTHER; note = Guanosine phosphorothiorate
  modified_base 60: mod_base = OTHER; note = 2'-fluorouridine
  modified_base 63: mod_base = OTHER; note = 2'-fluorocytosine
  modified_base 64: mod_base = OTHER; note = 2'-Omethylguanosine
  modified_base 65: mod_base = OTHER; note = 2'-Omethylguanosine
  modified_base 69: mod_base = OTHER; note = 2'-fluoroadenosine
  modified_base 70: mod_base = OTHER; note = 2'-fluoroguanosine
  modified_base 71: mod_base = OTHER; note = 2'-fluorouridine
  modified_base 72: mod_base = OTHER; note = 2'-fluorocytosine
  modified_base 74: mod_base = OTHER; note = 2'-fluorocytosine

SEQ ID NO: 4698 - RNA, 75 nt, synthetic construct; identical to SEQ ID NO: 3311
  source 1..75: mol_type = other RNA
  modified_base 1: mod_base = OTHER; note = Guanosine phosphorothiorate
  modified_base 2: mod_base = OTHER; note = 2'-Omethylguanosine phosphorothiorate
  modified_base 9: mod_base = OTHER; note = Guanosine phosphorothiorate
  modified_base 11: mod_base = OTHER; note = Uridine phosphorothiorate
  modified_base 20: mod_base = OTHER; note = 2'-fluoroadenosine
  modified_base 23: mod_base = OTHER; note = 2'-Omethylcytosine
  modified_base 24: mod_base = OTHER; note = 2'-fluoroadenosine
  modified_base 27: mod_base = OTHER; note = 2'-fluorocytosine
  modified_base 28: mod_base = OTHER; note = 2'-fluorouridine
  modified_base 29: mod_base = OTHER; note = 2'-Omethylguanosine
  modified_base 36: mod_base = OTHER; note = 2'-fluoroadenosine
  modified_base 43: mod_base = OTHER; note = Guanosine phosphorothiorate
  modified_base 44: mod_base = OTHER; note = 2'-fluorocytosine
  modified_base 57: mod_base = OTHER; note = 2'-Omethyladenosine
  modified_base 64: mod_base = OTHER; note = 2'-fluoroguanosine phosphorothiorate
  modified_base 67: mod_base = OTHER; note = Guanosine phosphorothiorate
  modified_base 68: mod_base = OTHER; note = 2'-fluoroadenosine
  modified_base 71: mod_base = OTHER; note = Cytosine phosphorothiorate
  modified_base 72: mod_base = OTHER; note = 2'-fluorouridine
  modified_base 74: mod_base = OTHER; note = Cytosine phosphorothiorate

SEQ ID NO: 4699 - RNA, 76 nt, synthetic construct; identical to SEQ ID NO: 625
  source 1..76: mol_type = other RNA
  modified_base 1: mod_base = OTHER; note = 2'-Omethylguanosine phosphorothiorate
  modified_base 2: mod_base = OTHER; note = 2'-Omethylguanosine phosphorothiorate
  modified_base 3: mod_base = OTHER; note = 2'-Omethylcytosine phosphorothiorate
  modified_base 4: mod_base = OTHER; note = 2'-Omethyluridine phosphorothiorate
  modified_base 5: mod_base = OTHER; note = 2'-Omethylcytosine phosphorothiorate
  modified_base 6: mod_base = OTHER; note = 2'-Omethylcytosine phosphorothiorate
  modified_base 14: mod_base = OTHER; note = 2'-Omethyladenosine
  modified_base 15: mod_base = OTHER; note = 2'-Omethyladenosine
  modified_base 16: mod_base = OTHER; note = 2'-Omethyluridine
  modified_base 17: mod_base = OTHER; note = 2'-Omethylguanosine
  modified_base 18: mod_base = OTHER; note = 2'-Omethylguanosine
  modified_base 19: mod_base = OTHER; note = 2'-Omethyladenosine
  modified_base 20: mod_base = OTHER; note = 2'-Omethyluridine
  modified_base 22: mod_base = OTHER; note = 2'-Omethylguanosine
  modified_base 23: mod_base = OTHER; note = 2'-Omethylcytosine
  modified_base 24: mod_base = OTHER; note = 2'-Omethylguanosine
  modified_base 25: mod_base = OTHER; note = 2'-Omethylcytosine
  modified_base 40: mod_base = OTHER; note = 2'-fluorouridine
  modified_base 41: mod_base = OTHER; note = 2'-fluorocytosine
  modified_base 42: mod_base = OTHER; note = 2'-fluoroadenosine
  modified_base 43: mod_base = OTHER; note = 2'-fluoroadenosine
  modified_base 44: mod_base = OTHER; note = 2'-Omethyladenosine
  modified_base 45: mod_base = OTHER; note = 2'-Omethylguanosine
  modified_base 46: mod_base = OTHER; note = 2'-Omethylguanosine
  modified_base 49: mod_base = OTHER; note = 2'-Omethylcytosine
  modified_base 50: mod_base = OTHER; note = 2'-Omethylcytosine
  modified_base 51: mod_base = OTHER; note = 2'-Omethylguanosine
  modified_base 52: mod_base = OTHER; note = 2'-Omethylguanosine
  modified_base 53: mod_base = OTHER; note = 2'-Omethylguanosine
  modified_base 54: mod_base = OTHER; note = Uridine phosphorothiorate
  modified_base 55: mod_base = OTHER; note = Uridine phosphorothiorate
  modified_base 56: mod_base = OTHER; note = Cytosine phosphorothiorate
  modified_base 57: mod_base = OTHER; note = Guanosine phosphorothiorate
  modified_base 61: mod_base = OTHER; note = 2'-Omethylcytosine
  modified_base 62: mod_base = OTHER; note = 2'-Omethylcytosine
  modified_base 63: mod_base = OTHER; note = 2'-Omethylcytosine
  modified_base 64: mod_base = OTHER; note = 2'-Omethylguanosine
  modified_base 65: mod_base = OTHER; note = 2'-Omethylguanosine
  modified_base 66: mod_base = OTHER; note = 2'-Omethylcytosine
  modified_base 67: mod_base = OTHER; note = 2'-Omethylguanosine
  modified_base 68: mod_base = OTHER; note = 2'-Omethylguanosine
  modified_base 69: mod_base = OTHER; note = 2'-Omethyladenosine

SEQ ID NO: 4700 - RNA, 73 nt, synthetic construct; identical to SEQ ID NO: 935
  source 1..73: mol_type = other RNA
  modified_base 1: mod_base = OTHER; note = 2'-Omethylguanosine phosphorothiorate
  modified_base 2: mod_base = OTHER; note = 2'-Omethylguanosine phosphorothiorate
  modified_base 5: mod_base = OTHER; note = 2'-Omethylcytosine
  modified_base 61: mod_base = OTHER; note = 2'-fluorocytosine

SEQ ID NO: 4701 - RNA, 74 nt, synthetic construct; identical to SEQ ID NO: 3293
  source 1..74: mol_type = other RNA
  modified_base 1: mod_base = OTHER; note = Adenosine phosphorothiorate
  modified_base 2: mod_base = OTHER; note = 2'-fluorocytosine
  modified_base 3: mod_base = OTHER; note = 2'-fluorocytosine phosphorothiorate
  modified_base 4: mod_base = OTHER; note = 2'-Omethyluridine
  modified_base 9: mod_base = OTHER; note = Guanosine phosphorothiorate
  modified_base 22: mod_base = OTHER; note = 2'-fluoroguanosine phosphorothiorate
  modified_base 39: mod_base = OTHER; note = 2'-fluoroadenosine
  modified_base 48: mod_base = OTHER; note = 2'-fluorocytosine phosphorothiorate
  modified_base 50: mod_base = OTHER; note = Uridine phosphorothiorate
  modified_base 62: mod_base = OTHER; note = 2'-fluoroguanosine
  modified_base 67: mod_base = OTHER; note = Guanosine phosphorothiorate
  modified_base 73: mod_base = OTHER; note = 2'-fluorocytosine phosphorothiorate

SEQ ID NO: 4702 - RNA, 86 nt, synthetic construct; identical to SEQ ID NO: 3290
  source 1..86: mol_type = other RNA
  modified_base 57: mod_base = OTHER; note = 2'-fluoroguanosine

SEQ ID NO: 4703 - RNA, 76 nt, synthetic construct; identical to SEQ ID NO: 625
  source 1..76: mol_type = other RNA
  modified_base 1: mod_base = OTHER; note = 2'-Omethylguanosine
  modified_base 10: mod_base = OTHER; note = 2'-Omethylguanosine
  modified_base 13: mod_base = OTHER; note = 2'-Omethylcytosine
  modified_base 17: mod_base = OTHER; note = Guanosine phosphorothiorate
  modified_base 18: mod_base = OTHER; note = 2'-Omethylguanosine
  modified_base 19: mod_base = OTHER; note = Adenosine phosphorothiorate
  modified_base 20: mod_base = OTHER; note = 2'-Omethyluridine
  modified_base 25: mod_base = OTHER; note = 2'-Omethylcytosine
  modified_base 29: mod_base = OTHER; note = 2'-Omethylguanosine
  modified_base 33: mod_base = OTHER; note = 2'-fluorouridine
  modified_base 35: mod_base = OTHER; note = Cytosine phosphorothiorate
  modified_base 37: mod_base = OTHER; note = Adenosine phosphorothiorate
  modified_base 38: mod_base = OTHER; note = Adenosine phosphorothiorate
  modified_base 43: mod_base = OTHER; note = 2'-Omethyladenosine
  modified_base 44: mod_base = OTHER; note = 2'-fluoroadenosine
  modified_base 46: mod_base = OTHER; note = Guanosine phosphorothiorate
  modified_base 50: mod_base = OTHER; note = 2'-Omethylcytosine
  modified_base 52: mod_base = OTHER; note = 2'-Omethylguanosine
  modified_base 54: mod_base = OTHER; note = Uridine phosphorothiorate
  modified_base 55: mod_base = OTHER; note = Uridine phosphorothiorate
  modified_base 56: mod_base = OTHER; note = 2'-Omethylcytosine
  modified_base 57: mod_base = OTHER; note = Guanosine phosphorothiorate
  modified_base 62: mod_base = OTHER; note = 2'-Omethylcytosine
  modified_base 63: mod_base = OTHER; note = 2'-fluorocytosine
  modified_base 65: mod_base = OTHER; note = 2'-Omethylguanosine
  modified_base 71: mod_base = OTHER; note = 2'-Omethyluridine
  modified_base 73: mod_base = OTHER; note = 2'-Omethylguanosine
  modified_base 75: mod_base = OTHER; note = 2'-fluorocytosine phosphorothiorate

SEQ ID NO: 4704 - RNA, 85 nt, synthetic construct; identical to SEQ ID NO: 3286
  source 1..85: mol_type = other RNA
  modified_base 1: mod_base = OTHER; note = 2'-fluorocytosine phosphorothiorate
  modified_base 13: mod_base = OTHER; note = Adenosine phosphorothiorate
  modified_base 36: mod_base = OTHER; note = Guanosine phosphorothiorate
  modified_base 62: mod_base = OTHER; note = Guanosine phosphorothiorate
  modified_base 82: mod_base = OTHER; note = Adenosine phosphorothiorate

SEQ ID NO: 4705 - RNA, 75 nt, synthetic construct; identical to SEQ ID NO: 3306
  source 1..75: mol_type = other RNA
  modified_base 50: mod_base = OTHER; note = 2'-Omethylguanosine
  modified_base 62: mod_base = OTHER; note = 2'-Omethylcytosine

SEQ ID NO: 4706 - RNA, 76 nt, synthetic construct; identical to SEQ ID NO: 625
  source 1..76: mol_type = other RNA
  modified_base 44: mod_base = OTHER; note = 2'-fluoroadenosine
  modified_base 45: mod_base = OTHER; note = 2'-fluoroguanosine
  modified_base 46: mod_base = OTHER; note = 2'-fluoroguanosine
  modified_base 47: mod_base = OTHER; note = 2'-fluorouridine
  modified_base 48: mod_base = OTHER; note = 2'-fluorouridine

SEQ ID NO: 4707 - RNA, 75 nt, synthetic construct; identical to SEQ ID NO: 3299
  source 1..75: mol_type = other RNA
  modified_base 1: mod_base = OTHER; note = 2'-Omethylcytosine
  modified_base 3: mod_base = OTHER; note = 2'-Omethyluridine
  modified_base 10: mod_base = OTHER; note = 2'-Omethylcytosine
  modified_base 16: mod_base = OTHER; note = 2'-fluorocytosine
  modified_base 17: mod_base = OTHER; note = 2'-fluoroguanosine
  modified_base 19: mod_base = OTHER; note = 2'-fluorouridine
  modified_base 21: mod_base = OTHER; note = 2'-Omethylguanosine
  modified_base 25: mod_base = OTHER; note = Adenosine phosphorothiorate
  modified_base 26: mod_base = OTHER; note = Uridine phosphorothiorate
  modified_base 28: mod_base = OTHER; note = 2'-fluoroadenosine phosphorothiorate
  modified_base 36: mod_base = OTHER; note = 2'-fluoroadenosine phosphorothiorate
  modified_base 40: mod_base = OTHER; note = Uridine phosphorothiorate
  modified_base 46: mod_base = OTHER; note = 2'-fluorouridine
  modified_base 47: mod_base = OTHER; note = 2'-fluorocytosine
  modified_base 48: mod_base = OTHER; note = 2'-Omethylcytosine
  modified_base 53: mod_base = OTHER; note = Uridine phosphorothiorate
  modified_base 55: mod_base = OTHER; note = Cytosine phosphorothiorate
  modified_base 56: mod_base = OTHER; note = 2'-Omethyladenosine phosphorothiorate
  modified_base 67: mod_base = OTHER; note = Cytosine phosphorothiorate
  modified_base 73: mod_base = OTHER; note = Cytosine phosphorothiorate
  modified_base 74: mod_base = OTHER; note = 2'-Omethylcytosine

SEQ ID NO: 4708 - RNA, 76 nt, synthetic construct; identical to SEQ ID NO: 625
  source 1..76: mol_type = other RNA
  modified_base 1: mod_base = OTHER; note = 2'-Omethylguanosine phosphorothiorate
  modified_base 2: mod_base = OTHER; note = 2'-Omethylguanosine
  modified_base 3: mod_base = OTHER; note = 2'-Omethylcytosine
  modified_base 4: mod_base = OTHER; note = 2'-Omethyluridine
  modified_base 5: mod_base = OTHER; note = 2'-Omethylcytosine
  modified_base 6: mod_base = OTHER; note = 2'-Omethylcytosine
  modified_base 10: mod_base = OTHER; note = 2'-Omethylguanosine
  modified_base 11: mod_base = OTHER; note = 2'-Omethylcytosine
  modified_base 12: mod_base = OTHER; note = 2'-Omethylguanosine
  modified_base 13: mod_base = OTHER; note = 2'-Omethylcytosine
  modified_base 40: mod_base = OTHER; note = 2'-fluorouridine
  modified_base 41: mod_base = OTHER; note = 2'-fluorocytosine
  modified_base 42: mod_base = OTHER; note = 2'-fluoroadenosine
  modified_base 43: mod_base = OTHER; note = 2'-fluoroadenosine
  modified_base 44: mod_base = OTHER; note = 2'-Omethyladenosine
  modified_base 45: mod_base = OTHER; note = 2'-Omethylguanosine
  modified_base 46: mod_base = OTHER; note = 2'-Omethylguanosine
  modified_base 49: mod_base = OTHER; note = 2'-Omethylcytosine
  modified_base 50: mod_base = OTHER; note = 2'-Omethylcytosine
  modified_base 51: mod_base = OTHER; note = 2'-Omethylguanosine
  modified_base 52: mod_base = OTHER; note = 2'-Omethylguanosine
  modified_base 53: mod_base = OTHER; note = 2'-Omethylguanosine
  modified_base 61: mod_base = OTHER; note = 2'-Omethylcytosine
  modified_base 62: mod_base = OTHER; note = 2'-Omethylcytosine
  modified_base 63: mod_base = OTHER; note = 2'-fluorocytosine
  modified_base 64: mod_base = OTHER; note = 2'-Omethylguanosine
  modified_base 65: mod_base = OTHER; note = 2'-Omethylguanosine
  modified_base 66: mod_base = OTHER; note = 2'-Omethylcytosine
  modified_base 67: mod_base = OTHER; note = 2'-Omethylguanosine
  modified_base 68: mod_base = OTHER; note = 2'-Omethylguanosine
  modified_base 69: mod_base = OTHER; note = 2'-Omethyladenosine

SEQ ID NO: 4709 - RNA, 76 nt, synthetic construct; identical to SEQ ID NO: 625
  source 1..76: mol_type = other RNA
  modified_base 1: mod_base = OTHER; note = 2'-Omethylguanosine
  modified_base 4: mod_base = OTHER; note = 2'-fluorouridine
  modified_base 5: mod_base = OTHER; note = 2'-fluorocytosine phosphorothiorate
  modified_base 6: mod_base = OTHER; note = 2'-Omethylcytosine phosphorothiorate
  modified_base 10: mod_base = OTHER; note = 2'-Omethylguanosine
  modified_base 11: mod_base = OTHER; note = 2'-Omethylcytosine
  modified_base 12: mod_base = OTHER; note = 2'-Omethylguanosine
  modified_base 13: mod_base = OTHER; note = 2'-fluorocytosine
  modified_base 15: mod_base = OTHER; note = 2'-fluoroadenosine phosphorothiorate
  modified_base 16: mod_base = OTHER; note = 2'-fluorouridine phosphorothiorate
  modified_base 18: mod_base = OTHER; note = Guanosine phosphorothiorate
  modified_base 22: mod_base = OTHER; note = 2'-Omethylguanosine
  modified_base 26: mod_base = OTHER; note = 2'-fluoroadenosine
  modified_base 34: mod_base = OTHER; note = Uridine phosphorothiorate
  modified_base 39: mod_base = OTHER; note = Uridine phosphorothiorate
  modified_base 42: mod_base = OTHER; note = 2'-Omethyladenosine phosphorothiorate
  modified_base 43: mod_base = OTHER; note = 2'-Omethyladenosine
  modified_base 45: mod_base = OTHER; note = 2'-Omethylguanosine phosphorothiorate
  modified_base 46: mod_base = OTHER; note = 2'-Omethylguanosine
  modified_base 49: mod_base = OTHER; note = 2'-Omethylcytosine
  modified_base 54: mod_base = OTHER; note = 2'-fluorouridine
  modified_base 63: mod_base = OTHER; note = 2'-Omethylcytosine phosphorothiorate
  modified_base 64: mod_base = OTHER; note = Guanosine phosphorothiorate
  modified_base 65: mod_base = OTHER; note = 2'-fluoroguanosine
  modified_base 67: mod_base = OTHER; note = Guanosine phosphorothiorate
  modified_base 68: mod_base = OTHER; note = 2'-Omethylguanosine phosphorothiorate
  modified_base 69: mod_base = OTHER; note = 2'-fluoroadenosine
  modified_base 74: mod_base = OTHER; note = 2'-fluorocytosine
  modified_base 75: mod_base = OTHER; note = Cytosine phosphorothiorate
  modified_base 76: mod_base = OTHER; note = 2'-fluoroadenosine

SEQ ID NO: 4710 - RNA, 75 nt, synthetic construct; identical to SEQ ID NO: 3299
  source 1..75: mol_type = other RNA
  modified_base 8: mod_base = OTHER; note = 2'-fluoroadenosine
  modified_base 16: mod_base = OTHER; note = 2'-fluorocytosine
  modified_base 20: mod_base = OTHER; note = 2'-fluoroadenosine
  modified_base 22: mod_base = OTHER; note = 2'-fluoroadenosine
  modified_base 46: mod_base = OTHER; note = 2'-fluorouridine
  modified_base 48: mod_base = OTHER; note = 2'-fluorocytosine
  modified_base 58: mod_base = OTHER; note = 2'-fluoroguanosine
  modified_base 73: mod_base = OTHER; note = Cytosine phosphorothiorate
  modified_base 74: mod_base = OTHER; note = 2'-Omethylcytosine

SEQ ID NO: 4711 - RNA, 76 nt, synthetic construct; identical to SEQ ID NO: 3795
  source 1..76: mol_type = other RNA
  modified_base 1: mod_base = OTHER; note = 2'-Omethylguanosine phosphorothiorate
  modified_base 2: mod_base = OTHER; note = 2'-Omethylcytosine phosphorothiorate
  modified_base 3: mod_base = OTHER; note = 2'-Omethylcytosine
  modified_base 4: mod_base = OTHER; note = 2'-Omethyluridine
  modified_base 5: mod_base = OTHER; note = 2'-Omethylcytosine
  modified_base 6: mod_base = OTHER; note = 2'-Omethylcytosine
  modified_base 16: mod_base = OTHER; note = 2'-Omethyluridine
  modified_base 17: mod_base = OTHER; note = 2'-Omethylguanosine
  modified_base 18: mod_base = OTHER; note = 2'-Omethylguanosine
  modified_base 20: mod_base = OTHER; note = 2'-Omethyluridine
  modified_base 25: mod_base = OTHER; note = 2'-Omethylcytosine
  modified_base 33: mod_base = OTHER; note = 2'-fluorouridine
  modified_base 35: mod_base = OTHER; note = Cytosine phosphorothiorate
  modified_base 37: mod_base = OTHER; note = Adenosine phosphorothiorate
  modified_base 38: mod_base = OTHER; note = Adenosine phosphorothiorate
  modified_base 41: mod_base = OTHER; note = 2'-Omethylcytosine
  modified_base 44: mod_base = OTHER; note = 2'-Omethylguanosine
  modified_base 45: mod_base = OTHER; note = 2'-Omethylguanosine
  modified_base 46: mod_base = OTHER; note = 2'-fluoroadenosine
  modified_base 47: mod_base = OTHER; note = 2'-fluorouridine
  modified_base 48: mod_base = OTHER; note = 2'-fluorouridine
  modified_base 56: mod_base = OTHER; note = 2'-Omethylcytosine
  modified_base 59: mod_base = OTHER; note = 2'-Omethylguanosine
  modified_base 73: mod_base = OTHER; note = 2'-Omethylguanosine

SEQ ID NO: 4712 - RNA, 76 nt, synthetic construct; identical to SEQ ID NO: 3615
  source 1..76: mol_type = other RNA
  modified_base 1: mod_base = OTHER; note = 2'-Omethylguanosine
  modified_base 14: mod_base = OTHER; note = 2'-Omethyladenosine
  modified_base 15: mod_base = OTHER; note = 2'-fluoroadenosine
  modified_base 16: mod_base = OTHER; note = 2'-Omethyluridine
  modified_base 17: mod_base = OTHER; note = 2'-Omethylguanosine
  modified_base 18: mod_base = OTHER; note = 2'-Omethylguanosine
  modified_base 19: mod_base = OTHER; note = 2'-fluoroadenosine
  modified_base 20: mod_base = OTHER; note = 2'-Omethyluridine
  modified_base 54: mod_base = OTHER; note = 2'-Omethyluridine phosphorothiorate
  modified_base 55: mod_base = OTHER; note = Uridine phosphorothiorate
  modified_base 56: mod_base = OTHER; note = 2'-Omethylcytosine
  modified_base 57: mod_base = OTHER; note = 2'-Omethylguanosine
  modified_base 59: mod_base = OTHER; note = 2'-Omethylguanosine
  modified_base 73: mod_base = OTHER; note = 2'-Omethylguanosine

SEQ ID NO: 4713 - RNA, 86 nt, synthetic construct; identical to SEQ ID NO: 3290
  source 1..86: mol_type = other RNA
  modified_base 59: mod_base = OTHER; note = 2'-fluoroguanosine

SEQ ID NO: 4714 - RNA, 76 nt, synthetic construct; identical to SEQ ID NO: 625
  source 1..76: mol_type = other RNA
  modified_base 1: mod_base = OTHER; note = Guanosine phosphorothiorate
  modified_base 2: mod_base = OTHER; note = Guanosine phosphorothiorate
  modified_base 5: mod_base = OTHER; note = 2'-Omethylcytosine phosphorothiorate
  modified_base 6: mod_base = OTHER; note = 2'-fluorocytosine
  modified_base 7: mod_base = OTHER; note = Guanosine phosphorothiorate
  modified_base 10: mod_base = OTHER; note = 2'-fluoroguanosine
  modified_base 13: mod_base = OTHER; note = 2'-Omethylcytosine
  modified_base 14: mod_base = OTHER; note = 2'-Omethyladenosine
  modified_base 17: mod_base = OTHER; note = Guanosine phosphorothiorate
  modified_base 25: mod_base = OTHER; note = 2'-fluorocytosine
  modified_base 26: mod_base = OTHER; note = 2'-Omethyladenosine
  modified_base 27: mod_base = OTHER; note = 2'-fluorouridine phosphorothiorate
  modified_base 28: mod_base = OTHER; note = 2'-Omethyluridine
  modified_base 30: mod_base = OTHER; note = 2'-Omethylguanosine phosphorothiorate
  modified_base 31: mod_base = OTHER; note = 2'-fluoroadenosine
  modified_base 38: mod_base = OTHER; note = 2'-Omethyladenosine
  modified_base 39: mod_base = OTHER; note = 2'-fluorouridine
  modified_base 41: mod_base = OTHER; note = 2'-fluorocytosine
  modified_base 53: mod_base = OTHER; note = 2'-Omethylguanosine
  modified_base 54: mod_base = OTHER; note = 2'-Omethyluridine
  modified_base 56: mod_base = OTHER; note = Cytosine phosphorothiorate
  modified_base 57: mod_base = OTHER; note = 2'-Omethylguanosine
  modified_base 58: mod_base = OTHER; note = 2'-fluoroadenosine
  modified_base 59: mod_base = OTHER; note = 2'-fluoroguanosine phosphorothiorate
  modified_base 60: mod_base = OTHER; note = 2'-fluorouridine
  modified_base 62: mod_base = OTHER; note = 2'-Omethylcytosine
  modified_base 64: mod_base = OTHER; note = 2'-Omethylguanosine
  modified_base 66: mod_base = OTHER; note = Cytosine phosphorothiorate
  modified_base 67: mod_base = OTHER; note = 2'-fluoroguanosine
  modified_base 68: mod_base = OTHER; note = 2'-Omethylguanosine
  modified_base 70: mod_base = OTHER; note = 2'-Omethylguanosine
  modified_base 72: mod_base = OTHER; note = 2'-fluorocytosine
  modified_base 73: mod_base = OTHER; note = 2'-fluoroguanosine
  modified_base 76: mod_base = OTHER; note = 2'-fluoroadenosine

SEQ ID NO: 4715 - DNA, 76 bp, synthetic construct; identical to SEQ ID NO: 1924
  source 1..76: mol_type = other DNA
  modified_base 1: mod_base = OTHER; note = 2'-Omethylguanosine phosphorothiorate
  modified_base 2: mod_base = OTHER; note = 2'-Omethylguanosine phosphorothiorate
  modified_base 17: mod_base = OTHER; note = Guanosine phosphorothiorate
  modified_base 23: mod_base = OTHER; note = Cytosine phosphorothiorate
  modified_base 24: mod_base = OTHER; note = 2'-fluoroguanosine
  modified_base 25: mod_base = OTHER; note = 2'-O-(2-Methoxyethyl) 5-methylcytosine
  modified_base 30: mod_base = OTHER; note = Guanosine phosphorothiorate
  modified_base 39: mod_base = OTHER; note = Uridine phosphorothiorate
  modified_base 40: mod_base = OTHER; note = 2'-Omethyluridine
  modified_base 44: mod_base = OTHER; note = Adenosine phosphorothiorate
  modified_base 55: mod_base = OTHER; note = Uridine phosphorothiorate
  modified_base 56: mod_base = OTHER; note = Cytosine phosphorothiorate
  modified_base 61: mod_base = OTHER; note = Cytosine phosphorothiorate
  modified_base 74: mod_base = OTHER; note = Cytosine phosphorothiorate
  modified_base 75: mod_base = OTHER; note = 2'-Omethylcytosine phosphorothiorate
  modified_base 76: mod_base = OTHER; note = 2'-Omethyladenosine
  misc_feature 1..13: note = RNA
  misc_feature 14: note = DNA
  misc_feature 15..30: note = RNA
  misc_feature 31: note = DNA
  misc_feature 32..63: note = RNA
  misc_feature 64: note = DNA
  misc_feature 65..76: note = RNA

SEQ ID NO: 4716 - RNA, 76 nt, synthetic construct; identical to SEQ ID NO: 3316
  source 1..76: mol_type = other RNA
  modified_base 1: mod_base = OTHER; note = 2'-Omethyladenosine phosphorothiorate
  modified_base 2: mod_base = OTHER; note = 2'-Omethylcytosine
  modified_base 3: mod_base = OTHER; note = 2'-Omethylcytosine
  modified_base 4: mod_base = OTHER; note = 2'-Omethyladenosine
  modified_base 5: mod_base = OTHER; note = 2'-Omethyladenosine
  modified_base 6: mod_base = OTHER; note = 2'-Omethylcytosine
  modified_base 49: mod_base = OTHER; note = 2'-Omethylcytosine
  modified_base 50: mod_base = OTHER; note = 2'-Omethylcytosine
  modified_base 51: mod_base = OTHER; note = 2'-Omethylguanosine
  modified_base 52: mod_base = OTHER; note = 2'-Omethylguanosine
  modified_base 53: mod_base = OTHER; note = 2'-Omethylguanosine
  modified_base 61: mod_base = OTHER; note = 2'-Omethylcytosine
  modified_base 62: mod_base = OTHER; note = 2'-Omethylcytosine
  modified_base 63: mod_base = OTHER; note = 2'-fluorocytosine
  modified_base 64: mod_base = OTHER; note = 2'-Omethylguanosine
  modified_base 65: mod_base = OTHER; note = 2'-Omethylguanosine
  modified_base 66: mod_base = OTHER; note = 2'-Omethylcytosine
  modified_base 67: mod_base = OTHER; note = 2'-Omethylguanosine
  modified_base 68: mod_base = OTHER; note = 2'-Omethyluridine
  modified_base 69: mod_base = OTHER; note = 2'-Omethyluridine
  modified_base 71: mod_base = OTHER; note = 2'-Omethylguanosine
  modified_base 72: mod_base = OTHER; note = 2'-Omethyluridine

SEQ ID NO: 4717 - RNA, 76 nt, synthetic construct; identical to SEQ ID NO: 3289
  source 1..76: mol_type = other RNA
  modified_base 1: mod_base = OTHER; note = 2'-Omethylguanosine
  modified_base 13: mod_base = OTHER; note = 2'-Omethylcytosine
  modified_base 14: mod_base = OTHER; note = 2'-Omethyladenosine
  modified_base 15: mod_base = OTHER; note = 2'-Omethylguanosine
  modified_base 16: mod_base = OTHER; note = 2'-Omethyluridine
  modified_base 18: mod_base = OTHER; note = 2'-Omethylguanosine
  modified_base 19: mod_base = OTHER; note = 2'-Omethylguanosine
  modified_base 20: mod_base = OTHER; note = Uridine phosphorothiorate
  modified_base 21: mod_base = OTHER; note = Adenosine phosphorothiorate
  modified_base 25: mod_base = OTHER; note = 2'-Omethylcytosine
  modified_base 33: mod_base = OTHER; note = Uridine phosphorothiorate
  modified_base 34: mod_base = OTHER; note = 2'-Omethyluridine
  modified_base 35: mod_base = OTHER; note = Uridine phosphorothiorate
  modified_base 37: mod_base = OTHER; note = Adenosine phosphorothiorate
  modified_base 38: mod_base = OTHER; note = Adenosine phosphorothiorate
  modified_base 49: mod_base = OTHER; note = 2'-Omethylcytosine
  modified_base 50: mod_base = OTHER; note = 2'-Omethyladenosine
  modified_base 52: mod_base = OTHER; note = 2'-Omethylguanosine
  modified_base 54: mod_base = OTHER; note = Uridine phosphorothiorate
  modified_base 55: mod_base = OTHER; note = Uridine phosphorothiorate
  modified_base 56: mod_base = OTHER; note = 2'-Omethylcytosine
  modified_base 57: mod_base = OTHER; note = Adenosine phosphorothiorate
  modified_base 58: mod_base = OTHER; note = Adenosine phosphorothiorate
  modified_base 59: mod_base = OTHER; note = 2'-Omethylguanosine
  modified_base 61: mod_base = OTHER; note = 2'-Omethylcytosine
  modified_base 65: mod_base = OTHER; note = 2'-Omethylguanosine
  modified_base 73: mod_base = OTHER; note = 2'-Omethylguanosine

SEQ ID NO: 4718 - RNA, 76 nt, synthetic construct; identical to SEQ ID NO: 3295
  source 1..76: mol_type = other RNA
  modified_base 1: mod_base = OTHER; note = 2'-Omethylcytosine phosphorothiorate
  modified_base 2: mod_base = OTHER; note = 2'-Omethylcytosine phosphorothiorate
  modified_base 3: mod_base = OTHER; note = 2'-Omethyluridine phosphorothiorate
  modified_base 6: mod_base = OTHER; note = 2'-fluoroguanosine phosphorothiorate
  modified_base 25: mod_base = OTHER; note = 2'-fluorocytosine phosphorothiorate
  modified_base 28: mod_base = OTHER; note = 2'-Omethyladenosine
  modified_base 34: mod_base = OTHER; note = Uridine phosphorothiorate
  modified_base 43: mod_base = OTHER; note = 2'-fluorouridine phosphorothiorate
  modified_base 55: mod_base = OTHER; note = 2'-fluorouridine phosphorothiorate
  modified_base 57: mod_base = OTHER; note = 2'-fluoroguanosine phosphorothiorate

SEQ ID NO: 4719 - RNA, 85 nt, synthetic construct; identical to SEQ ID NO: 3286
  source 1..85: mol_type = other RNA
  modified_base 1: mod_base = OTHER; note = 2'-Omethylcytosine
  modified_base 9: mod_base = OTHER; note = Guanosine phosphorothiorate
  modified_base 26: mod_base = OTHER; note = 2'-fluorouridine
  modified_base 28: mod_base = OTHER; note = 2'-fluoroguanosine
  modified_base 38: mod_base = OTHER; note = Uridine phosphorothiorate
  modified_base 41: mod_base = OTHER; note = Adenosine phosphorothiorate
  modified_base 47: mod_base = OTHER; note = 2'-Omethylcytosine
  modified_base 73: mod_base = OTHER; note = Adenosine phosphorothiorate
  modified_base 84: mod_base = OTHER; note = Cytosine phosphorothiorate
  modified_base 85: mod_base = OTHER; note = 2'-Omethyladenosine

SEQ ID NO: 4720 - RNA, 76 nt, synthetic construct; identical to SEQ ID NO: 625
  source 1..76: mol_type = other RNA
  modified_base 1: mod_base = OTHER; note = 2'-fluoroguanosine
  modified_base 3: mod_base = OTHER; note = 2'-fluorocytosine
  modified_base 4: mod_base = OTHER; note = 2'-Omethyluridine
  modified_base 5: mod_base = OTHER; note = Cytosine phosphorothiorate
  modified_base 6: mod_base = OTHER; note = 2'-fluorocytosine phosphorothiorate
  modified_base 13: mod_base = OTHER; note = 2'-Omethylcytosine
  modified_base 15: mod_base = OTHER; note = 2'-Omethyladenosine
  modified_base 18: mod_base = OTHER; note = 2'-Omethylguanosine
  modified_base 21: mod_base = OTHER; note = Adenosine phosphorothiorate
  modified_base 22: mod_base = OTHER; note = 2'-Omethylguanosine phosphorothiorate
  modified_base 24: mod_base = OTHER; note = Guanosine phosphorothiorate
  modified_base 25: mod_base = OTHER; note = 2'-fluorocytosine
  modified_base 26: mod_base = OTHER; note = 2'-fluoroadenosine phosphorothiorate
  modified_base 27: mod_base = OTHER; note = Uridine phosphorothiorate
  modified_base 28: mod_base = OTHER; note = 2'-fluorouridine phosphorothiorate
  modified_base 29: mod_base = OTHER; note = 2'-Omethylguanosine
  modified_base 30: mod_base = OTHER; note = 2'-fluoroguanosine
  modified_base 33: mod_base = OTHER; note = 2'-fluorouridine
  modified_base 36: mod_base = OTHER; note = Adenosine phosphorothiorate
  modified_base 40: mod_base = OTHER; note = Uridine phosphorothiorate
  modified_base 45: mod_base = OTHER; note = 2'-fluoroguanosine
  modified_base 46: mod_base = OTHER; note = Guanosine phosphorothiorate
  modified_base 48: mod_base = OTHER; note = Uridine phosphorothiorate
  modified_base 49: mod_base = OTHER; note = 2'-Omethylcytosine
  modified_base 51: mod_base = OTHER; note = Guanosine phosphorothiorate
  modified_base 56: mod_base = OTHER; note = 2'-fluorocytosine
  modified_base 58: mod_base = OTHER; note = 2'-fluoroadenosine
  modified_base 59: mod_base = OTHER; note = 2'-Omethylguanosine
  modified_base 60: mod_base = OTHER; note = 2'-Omethyluridine
  modified_base 62: mod_base = OTHER; note = 2'-Omethylcytosine phosphorothiorate
  modified_base 63: mod_base = OTHER; note = 2'-fluorocytosine
  modified_base 64: mod_base = OTHER; note = Guanosine phosphorothiorate
  modified_base 65: mod_base = OTHER; note = 2'-Omethylguanosine phosphorothiorate
  modified_base 66: mod_base = OTHER; note = 2'-fluorocytosine
  modified_base 67: mod_base = OTHER; note = 2'-fluoroguanosine
  modified_base 73: mod_base = OTHER; note = 2'-fluoroguanosine

SEQ ID NO: 4721 - DNA, 76 bp, synthetic construct; identical to SEQ ID NO: 1924
  source 1..76: mol_type = other DNA
  modified_base 1: mod_base = OTHER; note = 2'-Omethylguanosine phosphorothiorate
  modified_base 2: mod_base = OTHER; note = 2'-Omethylguanosine
  modified_base 3: mod_base = OTHER; note = 2'-O-(2-Methoxyethyl) 5-methylcytosine
  modified_base 5: mod_base = OTHER; note = 2'-fluorocytosine
  modified_base 6: mod_base = OTHER; note = deoxycytosine phosphorothiorate
  modified_base 7: mod_base = OTHER; note = 2'-Omethylguanosine
  modified_base 11: mod_base = OTHER; note = 2'-Omethylcytosine
  modified_base 12: mod_base = OTHER; note = Guanosine phosphorothiorate
  modified_base 13: mod_base = OTHER; note = 2'-Omethylcytosine
  modified_base 15: mod_base = OTHER; note = Adenosine phosphorothiorate
  modified_base 16: mod_base = OTHER; note = deoxyuridine phosphorothiorate
  modified_base 17: mod_base = OTHER; note = 2'-Omethylguanosine
  modified_base 22: mod_base = OTHER; note = Guanosine phosphorothiorate
  modified_base 24: mod_base = OTHER; note = Guanosine phosphorothiorate
  modified_base 25: mod_base = OTHER; note = 2'-fluorocytosine phosphorothiorate
  modified_base 28: mod_base = OTHER; note = deoxyuridine phosphorothiorate
  modified_base 30: mod_base = OTHER; note = 2'-O-(2-Methoxyethyl) guanosine phosphorothiorate
  modified_base 33: mod_base = OTHER; note = Uridine phosphorothiorate
  modified_base 34: mod_base = OTHER; note = 2'-O-(2-Methoxyethyl) thymine
  modified_base 36: mod_base = OTHER; note = Adenosine phosphorothiorate
  modified_base 37: mod_base = OTHER; note = 2'-fluoroadenosine
  modified_base 38: mod_base = OTHER; note = Adenosine phosphorothiorate
  modified_base 39: mod_base = OTHER; note = 2'-O-(2-Methoxyethyl) thymine
  modified_base 40: mod_base = OTHER; note = 2'-O-(2-Methoxyethyl) thymine
  modified_base 47: mod_base = OTHER; note = 2'-Omethyluridine
  modified_base 48: mod_base = OTHER; note = 2'-fluorouridine
  modified_base 51: mod_base = OTHER; note = 2'-fluoroguanosine
  modified_base 54: mod_base = OTHER; note = 2'-O-(2-Methoxyethyl) thymine
  modified_base 56: mod_base = OTHER; note = Cytosine phosphorothiorate
  modified_base 57: mod_base = OTHER; note = 2'-fluoroguanosine
  modified_base 61: mod_base = OTHER; note = Cytosine phosphorothiorate
  modified_base 63: mod_base = OTHER; note = 2'-fluorocytosine phosphorothiorate
  modified_base 64: mod_base = OTHER; note = 2'-fluoroguanosine
  modified_base 65: mod_base = OTHER; note = Guanosine phosphorothiorate
  modified_base 74: mod_base = OTHER; note = Cytosine phosphorothiorate
  modified_base 75: mod_base = OTHER; note = 2'-Omethylcytosine phosphorothiorate
  modified_base 76: mod_base = OTHER; note = 2'-Omethyladenosine
  misc_feature 1..5: note = RNA
  misc_feature 6: note = DNA
  misc_feature 7..15: note = RNA
  misc_feature 16: note = DNA
  misc_feature 17..27: note = RNA
  misc_feature 28: note = DNA
  misc_feature 29..48: note = RNA
  misc_feature 49: note = DNA
  misc_feature 50..76: note = RNA

SEQ ID NO: 4722 - RNA, 76 nt, synthetic construct; identical to SEQ ID NO: 3289
  source 1..76: mol_type = other RNA
  modified_base 1: mod_base = OTHER; note = 2'-Omethylguanosine phosphorothiorate
  modified_base 2: mod_base = OTHER; note = 2'-Omethylcytosine phosphorothiorate
  modified_base 3: mod_base = OTHER; note = 2'-Omethylcytosine
  modified_base 4: mod_base = OTHER; note = 2'-Omethyluridine
  modified_base 5: mod_base = OTHER; note = 2'-Omethylguanosine
  modified_base 6: mod_base = OTHER; note = 2'-Omethylguanosine
  modified_base 10: mod_base = OTHER; note = 2'-Omethylguanosine
  modified_base 11: mod_base = OTHER; note = 2'-Omethylcytosine
  modified_base 12: mod_base = OTHER; note = 2'-Omethyluridine
  modified_base 13: mod_base = OTHER; note = 2'-Omethylcytosine
  modified_base 14: mod_base = OTHER; note = 2'-Omethyladenosine
  modified_base 15: mod_base = OTHER; note = 2'-fluoroguanosine
  modified_base 16: mod_base = OTHER; note = 2'-Omethyluridine
  modified_base 18: mod_base = OTHER; note = 2'-Omethylguanosine
  modified_base 19: mod_base = OTHER; note = 2'-Omethylguanosine
  modified_base 20: mod_base = OTHER; note = 2'-fluorouridine
  modified_base 22: mod_base = OTHER; note = 2'-Omethylguanosine
  modified_base 23: mod_base = OTHER; note = 2'-Omethyladenosine
  modified_base 24: mod_base = OTHER; note = 2'-Omethylguanosine
  modified_base 25: mod_base = OTHER; note = 2'-Omethylcytosine
  modified_base 49: mod_base = OTHER; note = 2'-Omethylcytosine
  modified_base 50: mod_base = OTHER; note = 2'-Omethyladenosine
  modified_base 51: mod_base = OTHER; note = 2'-Omethylguanosine
  modified_base 52: mod_base = OTHER; note = 2'-Omethylguanosine
  modified_base 53: mod_base = OTHER; note = 2'-Omethylguanosine
  modified_base 54: mod_base = OTHER; note = 2'-Omethyluridine
  modified_base 61: mod_base = OTHER; note = 2'-Omethylcytosine
  modified_base 62: mod_base = OTHER; note = 2'-Omethylcytosine
  modified_base 63: mod_base = OTHER; note = 2'-fluorocytosine
  modified_base 64: mod_base = OTHER; note = 2'-Omethyluridine
  modified_base 65: mod_base = OTHER; note = 2'-Omethylguanosine
  modified_base 66: mod_base = OTHER; note = 2'-Omethyluridine
  modified_base 67: mod_base = OTHER; note = 2'-Omethylcytosine
  modified_base 68: mod_base = OTHER; note = 2'-Omethylcytosine
  modified_base 73: mod_base = OTHER; note = 2'-Omethylguanosine

SEQ ID NO: 4723 - RNA, 76 nt, synthetic construct
  source 1..76: mol_type = other RNA
ggctccgtggcgcaatggatagcgcattggacttcaaattcaaaggttccagtcacgagtactggcggagtcgcca

SEQ ID NO: 4724 - RNA, 86 nt, synthetic construct; identical to SEQ ID NO: 3290
  source 1..86: mol_type = other RNA
  modified_base 1: mod_base = OTHER; note = 2'-Omethyladenosine
  modified_base 2: mod_base = OTHER; note = 2'-Omethylcytosine
  modified_base 3: mod_base = OTHER; note = 2'-Omethylcytosine
  modified_base 4: mod_base = OTHER; note = 2'-Omethyladenosine
  modified_base 5: mod_base = OTHER; note = 2'-Omethylguanosine
  modified_base 6: mod_base = OTHER; note = 2'-Omethylguanosine
  modified_base 10: mod_base = OTHER; note = 2'-Omethylguanosine
  modified_base 11: mod_base = OTHER; note = 2'-Omethylcytosine
  modified_base 12: mod_base = OTHER; note = 2'-Omethylcytosine
  modified_base 13: mod_base = OTHER; note = 2'-Omethylguanosine
  modified_base 14: mod_base = OTHER; note = 2'-Omethyladenosine
  modified_base 15: mod_base = OTHER; note = 2'-fluoroguanosine
  modified_base 16: mod_base = OTHER; note = 2'-Omethyluridine
  modified_base 17: mod_base = OTHER; note = 2'-Omethylguanosine
  modified_base 18: mod_base = OTHER; note = 2'-Omethylguanosine
  modified_base 19: mod_base = OTHER; note = 2'-fluorouridine
  modified_base 20: mod_base = OTHER; note = 2'-Omethyluridine
  modified_base 22: mod_base = OTHER; note = 2'-Omethyladenosine
  modified_base 23: mod_base = OTHER; note = 2'-Omethylguanosine
  modified_base 24: mod_base = OTHER; note = 2'-Omethylguanosine
  modified_base 25: mod_base = OTHER; note = 2'-Omethylcytosine
  modified_base 33: mod_base = OTHER; note = 2'-fluorouridine
  modified_base 35: mod_base = OTHER; note = Cytosine phosphorothiorate
  modified_base 37: mod_base = OTHER; note = Guanosine phosphorothiorate
  modified_base 38: mod_base = OTHER; note = Adenosine phosphorothiorate
  modified_base 41: mod_base = OTHER; note = 2'-Omethylcytosine
  modified_base 42: mod_base = OTHER; note = 2'-Omethyladenosine
  modified_base 43: mod_base = OTHER; note = 2'-Omethyladenosine
  modified_base 44: mod_base = OTHER; note = 2'-Omethyluridine
  modified_base 59: mod_base = OTHER; note = 2'-Omethylguanosine
  modified_base 60: mod_base = OTHER; note = 2'-Omethyluridine
  modified_base 62: mod_base = OTHER; note = 2'-Omethylguanosine
  modified_base 64: mod_base = OTHER; note = 2'-Omethyluridine
  modified_base 65: mod_base = OTHER; note = Uridine phosphorothiorate
  modified_base 66: mod_base = OTHER; note = 2'-Omethylcytosine
  modified_base 67: mod_base = OTHER; note = 2'-fluoroguanosine
  modified_base 69: mod_base = OTHER; note = 2'-Omethyladenosine
  modified_base 71: mod_base = OTHER; note = 2'-Omethylcytosine
  modified_base 75: mod_base = OTHER; note = 2'-Omethylcytosine
  modified_base 83: mod_base = OTHER; note = 2'-Omethyladenosine

SEQ ID NO: 4725 - RNA, 76 nt, synthetic construct
  source 1..76: mol_type = other RNA
ggctccgtggcgcaatggagagcgcattggacttcaaattcaaaggttccgggttcgaatcccggcggagtcgcca

SEQ ID NO: 4726 - RNA, 74 nt, synthetic construct; identical to SEQ ID NO: 3293
  source 1..74: mol_type = other RNA
  modified_base 1: mod_base = OTHER; note = 2'-fluoroadenosine phosphorothiorate
  modified_base 2: mod_base = OTHER; note = 2'-Omethylcytosine
  modified_base 3: mod_base = OTHER; note = 2'-fluorocytosine
  modified_base 11: mod_base = OTHER; note = 2'-fluoroguanosine
  modified_base 14: mod_base = OTHER; note = 2'-Omethyladenosine
  modified_base 56: mod_base = OTHER; note = 2'-fluoroadenosine phosphorothiorate
  modified_base 73: mod_base = OTHER; note = 2'-Omethylcytosine phosphorothiorate

SEQ ID NO: 4727 - RNA, 75 nt, synthetic construct; identical to SEQ ID NO: 1045
  source 1..75: mol_type = other RNA
  modified_base 2: mod_base = OTHER; note = 2'-Omethylguanosine phosphorothiorate
  modified_base 3: mod_base = OTHER; note = 2'-Omethyluridine
  modified_base 6: mod_base = OTHER; note = 2'-fluorocytosine phosphorothiorate
  modified_base 14: mod_base = OTHER; note = 2'-Omethyladenosine
  modified_base 15: mod_base = OTHER; note = 2'-fluoroadenosine
  modified_base 16: mod_base = OTHER; note = 2'-Omethyluridine
  modified_base 18: mod_base = OTHER; note = 2'-Omethylguanosine phosphorothiorate
  modified_base 26: mod_base = OTHER; note = 2'-Omethyluridine
  modified_base 38: mod_base = OTHER; note = 2'-Omethyladenosine phosphorothiorate
  modified_base 39: mod_base = OTHER; note = 2'-Omethyluridine
  modified_base 45: mod_base = OTHER; note = 2'-Omethylguanosine
  modified_base 46: mod_base = OTHER; note = 2'-Omethyladenosine phosphorothiorate
  modified_base 47: mod_base = OTHER; note = 2'-fluorouridine phosphorothiorate
  modified_base 49: mod_base = OTHER; note = 2'-fluorocytosine
  modified_base 50: mod_base = OTHER; note = 2'-Omethylguanosine
  modified_base 53: mod_base = OTHER; note = 2'-Omethyluridine phosphorothiorate
  modified_base 55: mod_base = OTHER; note = 2'-Omethylcytosine
  modified_base 63: mod_base = OTHER; note = 2'-Omethylguanosine
  modified_base 66: mod_base = OTHER; note = 2'-Omethylguanosine
  modified_base 67: mod_base = OTHER; note = 2'-Omethylguanosine
  modified_base 72: mod_base = OTHER; note = 2'-Omethyluridine
  modified_base 73: mod_base = OTHER; note = Cytosine phosphorothiorate
  modified_base 74: mod_base = OTHER; note = 2'-Omethylcytosine phosphorothiorate
  modified_base 75: mod_base = OTHER; note = 2'-Omethyladenosine

SEQ ID NO: 4728 - RNA, 86 nt, synthetic construct; identical to SEQ ID NO: 3290
  source 1..86: mol_type = other RNA
  modified_base 1: mod_base = OTHER; note = 2'-Omethyladenosine phosphorothiorate
  modified_base 2: mod_base = OTHER; note = 2'-Omethylcytosine phosphorothiorate
  modified_base 84: mod_base = OTHER; note = Cytosine phosphorothiorate
  modified_base 85: mod_base = OTHER; note = 2'-Omethylcytosine phosphorothiorate

SEQ ID NO: 4729 - RNA, 75 nt, synthetic construct; identical to SEQ ID NO: 3336
  source 1..75: mol_type = other RNA
  modified_base 14: mod_base = OTHER; note = 2'-fluoroguanosine phosphorothiorate
  modified_base 19: mod_base = OTHER; note = 2'-Omethyluridine phosphorothiorate
  modified_base 20: mod_base = OTHER; note = Adenosine phosphorothiorate
  modified_base 35: mod_base = OTHER; note = 2'-Omethyladenosine phosphorothiorate
  modified_base 55: mod_base = OTHER; note = 2'-fluorocytosine
  modified_base 72: mod_base = OTHER; note = 2'-fluoroguanosine phosphorothiorate
  modified_base 73: mod_base = OTHER; note = Cytosine phosphorothiorate

SEQ ID NO: 4730 - RNA, 86 nt, synthetic construct; identical to SEQ ID NO: 3290
  source 1..86: mol_type = other RNA
  modified_base 5: mod_base = OTHER; note = 2'-fluoroguanosine

SEQ ID NO: 4731 - RNA, 76 nt, synthetic construct; identical to SEQ ID NO: 3675
  source 1..76: mol_type = other RNA
  modified_base 1: mod_base = OTHER; note = 2'-Omethylguanosine phosphorothiorate
  modified_base 2: mod_base = OTHER; note = 2'-Omethylcytosine phosphorothiorate
  modified_base 3: mod_base = OTHER; note = 2'-Omethylcytosine
  modified_base 4: mod_base = OTHER; note = 2'-Omethyluridine
  modified_base 5: mod_base = OTHER; note = 2'-Omethylcytosine
  modified_base 6: mod_base = OTHER; note = 2'-Omethylcytosine
  modified_base 10: mod_base = OTHER; note = 2'-Omethylguanosine
  modified_base 11: mod_base = OTHER; note = 2'-Omethylcytosine
  modified_base 12: mod_base = OTHER; note = 2'-Omethylguanosine
  modified_base 13: mod_base = OTHER; note = 2'-Omethylcytosine
  modified_base 17: mod_base = OTHER; note = 2'-Omethylguanosine
  modified_base 18: mod_base = OTHER; note = 2'-Omethylguanosine
  modified_base 22: mod_base = OTHER; note = 2'-Omethylguanosine
  modified_base 23: mod_base = OTHER; note = 2'-Omethylcytosine
  modified_base 24: mod_base = OTHER; note = 2'-Omethylguanosine
  modified_base 25: mod_base = OTHER; note = 2'-Omethylcytosine
  modified_base 33: mod_base = OTHER; note = 2'-fluorouridine
  modified_base 35: mod_base = OTHER; note = Cytosine phosphorothiorate
  modified_base 37: mod_base = OTHER; note = Adenosine phosphorothiorate
  modified_base 38: mod_base = OTHER; note = Adenosine phosphorothiorate
  modified_base 41: mod_base = OTHER; note = 2'-fluorocytosine
  modified_base 42: mod_base = OTHER; note = 2'-Omethyladenosine
  modified_base 43: mod_base = OTHER; note = 2'-Omethylcytosine
  modified_base 44: mod_base = OTHER; note = 2'-fluoroadenosine
  modified_base 49: mod_base = OTHER; note = 2'-Omethylcytosine
  modified_base 50: mod_base = OTHER; note = 2'-Omethylcytosine
  modified_base 51: mod_base = OTHER; note = 2'-Omethylguanosine
  modified_base 52: mod_base = OTHER; note = 2'-Omethylguanosine
  modified_base 53: mod_base = OTHER; note = 2'-Omethylguanosine
  modified_base 54: mod_base = OTHER; note = Uridine phosphorothiorate
  modified_base 55: mod_base = OTHER; note = Uridine phosphorothiorate
  modified_base 61: mod_base = OTHER; note = 2'-Omethylcytosine
  modified_base 62: mod_base = OTHER; note = 2'-Omethylcytosine
  modified_base 63: mod_base = OTHER; note = 2'-fluorocytosine
  modified_base 64: mod_base = OTHER; note = 2'-Omethylguanosine
  modified_base 65: mod_base = OTHER; note = 2'-Omethylguanosine
  modified_base 66: mod_base = OTHER; note = 2'-Omethylcytosine
  modified_base 67: mod_base = OTHER; note = 2'-Omethylguanosine
  modified_base 68: mod_base = OTHER; note = 2'-Omethylguanosine
  modified_base 73: mod_base = OTHER; note = 2'-Omethylguanosine

SEQ ID NO: 4732 - RNA, 75 nt, synthetic construct; identical to SEQ ID NO: 3311
  source 1..75: mol_type = other RNA
  modified_base 2: mod_base = OTHER; note = 2'-Omethylguanosine
  modified_base 27: mod_base = OTHER; note = 2'-Omethylcytosine
  modified_base 42: mod_base = OTHER; note = 2'-fluoroadenosine
  modified_base 47: mod_base = OTHER; note = 2'-fluorouridine
  modified_base 48: mod_base = OTHER; note = 2'-fluorocytosine
  modified_base 61: mod_base = OTHER; note = 2'-fluorouridine
  modified_base 65: mod_base = OTHER; note = 2'-fluorouridine
  modified_base 73: mod_base = OTHER; note = Cytosine phosphorothiorate
  modified_base 74: mod_base = OTHER; note = Cytosine phosphorothiorate

SEQ ID NO: 4733 - RNA, 76 nt, synthetic construct; identical to SEQ ID NO: 625
  source 1..76: mol_type = other RNA
  modified_base 1: mod_base = OTHER; note = 2'-Omethylguanosine phosphorothiorate
  modified_base 2: mod_base = OTHER; note = 2'-Omethylguanosine phosphorothiorate
  modified_base 3: mod_base = OTHER; note = 2'-Omethylcytosine phosphorothiorate
  modified_base 4: mod_base = OTHER; note = 2'-Omethyluridine phosphorothiorate
  modified_base 5: mod_base = OTHER; note = 2'-Omethylcytosine phosphorothiorate
  modified_base 6: mod_base = OTHER; note = 2'-Omethylcytosine phosphorothiorate
  modified_base 10: mod_base = OTHER; note = 2'-Omethylguanosine
  modified_base 11: mod_base = OTHER; note = 2'-Omethylcytosine
  modified_base 12: mod_base = OTHER; note = 2'-Omethylguanosine
  modified_base 13: mod_base = OTHER; note = 2'-Omethylcytosine
  modified_base 14: mod_base = OTHER; note = 2'-Omethyladenosine
  modified_base 15: mod_base = OTHER; note = 2'-Omethyladenosine
  modified_base 16: mod_base = OTHER; note = 2'-Omethyluridine
  modified_base 17: mod_base = OTHER; note = 2'-Omethylguanosine
  modified_base 18: mod_base = OTHER; note = 2'-Omethylguanosine
  modified_base 19: mod_base = OTHER; note = 2'-Omethyladenosine
  modified_base 20: mod_base = OTHER; note = 2'-Omethyluridine
  modified_base 49: mod_base = OTHER; note = 2'-Omethylcytosine
  modified_base 50: mod_base = OTHER; note = 2'-Omethylcytosine
  modified_base 51: mod_base = OTHER; note = 2'-Omethylguanosine
  modified_base 52: mod_base = OTHER; note = 2'-Omethylguanosine
  modified_base 53: mod_base = OTHER; note = 2'-Omethylguanosine
  modified_base 54: mod_base = OTHER; note = Uridine phosphorothiorate
  modified_base 55: mod_base = OTHER; note = Uridine phosphorothiorate
  modified_base 56: mod_base = OTHER; note = Cytosine phosphorothiorate
  modified_base 57: mod_base = OTHER; note = Guanosine phosphorothiorate
  modified_base 61: mod_base = OTHER; note = 2'-Omethylcytosine
  modified_base 62: mod_base = OTHER; note = 2'-Omethylcytosine
  modified_base 63: mod_base = OTHER; note = 2'-Omethylcytosine
  modified_base 64: mod_base = OTHER; note = 2'-Omethylguanosine
  modified_base 65: mod_base = OTHER; note = 2'-Omethylguanosine
  modified_base 66: mod_base = OTHER; note = 2'-Omethylcytosine
  modified_base 67: mod_base = OTHER; note = 2'-Omethylguanosine
  modified_base 68: mod_base = OTHER; note = 2'-Omethylguanosine
  modified_base 69: mod_base = OTHER; note = 2'-Omethyladenosine

SEQ ID NO: 4734 - RNA, 86 nt, synthetic construct; identical to SEQ ID NO: 3290
  source 1..86: mol_type = other RNA
  modified_base 1: mod_base = OTHER; note = 2'-Omethyladenosine phosphorothiorate
  modified_base 2: mod_base = OTHER; note = 2'-Omethylcytosine phosphorothiorate
  modified_base 14: mod_base = OTHER; note = 2'-Omethyladenosine
  modified_base 17: mod_base = OTHER; note = 2'-Omethylguanosine
  modified_base 18: mod_base = OTHER; note = 2'-Omethylguanosine
  modified_base 20: mod_base = OTHER; note = 2'-Omethyluridine
  modified_base 22: mod_base = OTHER; note = 2'-Omethyladenosine
  modified_base 25: mod_base = OTHER; note = 2'-Omethylcytosine
  modified_base 27: mod_base = OTHER; note = 2'-Omethyluridine
  modified_base 33: mod_base = OTHER; note = 2'-fluorouridine
  modified_base 41: mod_base = OTHER; note = 2'-Omethylcytosine
  modified_base 44: mod_base = OTHER; note = 2'-Omethyluridine
  modified_base 57: mod_base = OTHER; note = 2'-fluoroguanosine
  modified_base 58: mod_base = OTHER; note = 2'-fluorocytosine
  modified_base 62: mod_base = OTHER; note = 2'-Omethylguanosine
  modified_base 65: mod_base = OTHER; note = Uridine phosphorothiorate
  modified_base 81: mod_base = OTHER; note = 2'-Omethylguanosine
  modified_base 83: mod_base = OTHER; note = 2'-Omethyladenosine

SEQ ID NO: 4735 - RNA, 73 nt, synthetic construct; identical to SEQ ID NO: 935
  source 1..73: mol_type = other RNA
  modified_base 1: mod_base = OTHER; note = 2'-Omethylguanosine phosphorothiorate
  modified_base 2: mod_base = OTHER; note = 2'-Omethylguanosine
  modified_base 25: mod_base = OTHER; note = 2'-fluorocytosine

SEQ ID NO: 4736 - RNA, 76 nt, synthetic construct; identical to SEQ ID NO: 625
  source 1..76: mol_type = other RNA
  modified_base 1: mod_base = OTHER; note = 2'-Omethylguanosine phosphorothiorate
  modified_base 33: mod_base = OTHER; note = 2'-O-(2-Methoxyethyl) thymine

SEQ ID NO: 4737 - RNA, 76 nt, synthetic construct; identical to SEQ ID NO: 625
  source 1..76: mol_type = other RNA
  modified_base 1: mod_base = OTHER; note = 2'-Omethylguanosine
  modified_base 17: mod_base = OTHER; note = 2'-Omethylguanosine
  modified_base 18: mod_base = OTHER; note = 2'-Omethylguanosine
  modified_base 48: mod_base = OTHER; note = Thymine
  modified_base 50: mod_base = OTHER; note = 2'-Omethylcytosine
  modified_base 52: mod_base = OTHER; note = 2'-Omethylguanosine
  modified_base 73: mod_base = OTHER; note = 2'-Omethylguanosine

SEQ ID NO: 4738 - RNA, 76 nt, synthetic construct; identical to SEQ ID NO: 3289
  source 1..76: mol_type = other RNA
  modified_base 1: mod_base = OTHER; note = 2'-Omethylguanosine phosphorothiorate
  modified_base 2: mod_base = OTHER; note = 2'-Omethylcytosine phosphorothiorate
  modified_base 3: mod_base = OTHER; note = 2'-Omethylcytosine
  modified_base 4: mod_base = OTHER; note = 2'-Omethyluridine
  modified_base 5: mod_base = OTHER; note = 2'-Omethylguanosine
  modified_base 6: mod_base = OTHER; note = 2'-Omethylguanosine
  modified_base 16: mod_base = OTHER; note = 2'-Omethyluridine
  modified_base 18: mod_base = OTHER; note = 2'-Omethylguanosine
  modified_base 19: mod_base = OTHER; note = 2'-Omethylguanosine
  modified_base 33: mod_base = OTHER; note = 2'-fluorouridine
  modified_base 35: mod_base = OTHER; note = Uridine phosphorothiorate
  modified_base 37: mod_base = OTHER; note = Adenosine phosphorothiorate
  modified_base 38: mod_base = OTHER; note = Adenosine phosphorothiorate
  modified_base 44: mod_base = OTHER; note = 2'-Omethylguanosine
  modified_base 45: mod_base = OTHER; note = 2'-Omethylguanosine
  modified_base 46: mod_base = OTHER; note = 2'-fluoroguanosine
  modified_base 47: mod_base = OTHER; note = 2'-fluorouridine
  modified_base 49: mod_base = OTHER; note = 2'-Omethylcytosine
  modified_base 50: mod_base = OTHER; note = 2'-Omethyladenosine
  modified_base 51: mod_base = OTHER; note = 2'-Omethylguanosine
  modified_base 52: mod_base = OTHER; note = 2'-Omethylguanosine
  modified_base 53: mod_base = OTHER; note = 2'-Omethylguanosine
  modified_base 54: mod_base = OTHER; note = 2'-Omethyluridine
  modified_base 56: mod_base = OTHER; note = 2'-Omethylcytosine
  modified_base 59: mod_base = OTHER; note = 2'-Omethylguanosine
  modified_base 61: mod_base = OTHER; note = 2'-Omethylcytosine
  modified_base 62: mod_base = OTHER; note = 2'-Omethylcytosine
  modified_base 63: mod_base = OTHER; note = 2'-fluorocytosine
  modified_base 64: mod_base = OTHER; note = 2'-Omethyluridine
  modified_base 65: mod_base = OTHER; note = 2'-Omethylguanosine
  modified_base 66: mod_base = OTHER; note = 2'-Omethyluridine
  modified_base 67: mod_base = OTHER; note = 2'-Omethylcytosine
  modified_base 68: mod_base = OTHER; note = 2'-Omethylcytosine
  modified_base 73: mod_base = OTHER; note = 2'-Omethylguanosine

SEQ ID NO: 4739 - RNA, 76 nt, synthetic construct; identical to SEQ ID NO: 625
  source 1..76: mol_type = other RNA
  modified_base 1: mod_base = OTHER; note = 2'-Omethylguanosine phosphorothiorate
  modified_base 2: mod_base = OTHER; note = 2'-Omethylguanosine phosphorothiorate
  modified_base 3: mod_base = OTHER; note = 2'-Omethylcytosine phosphorothiorate
  modified_base 4: mod_base = OTHER; note = 2'-Omethyluridine phosphorothiorate
  modified_base 5: mod_base = OTHER; note = 2'-Omethylcytosine phosphorothiorate
  modified_base 6: mod_base = OTHER; note = 2'-Omethylcytosine phosphorothiorate
  modified_base 10: mod_base = OTHER; note = 2'-Omethylguanosine
  modified_base 11: mod_base = OTHER; note = 2'-Omethylcytosine
  modified_base 12: mod_base = OTHER; note = 2'-Omethylguanosine
  modified_base 13: mod_base = OTHER; note = 2'-Omethylcytosine
  modified_base 22: mod_base = OTHER; note = 2'-Omethylguanosine
  modified_base 23: mod_base = OTHER; note = 2'-Omethylcytosine
  modified_base 24: mod_base = OTHER; note = 2'-Omethylguanosine
  modified_base 25: mod_base = OTHER; note = 2'-Omethylcytosine
  modified_base 40: mod_base = OTHER; note = 2'-fluorouridine
  modified_base 41: mod_base = OTHER; note = 2'-fluorocytosine
  modified_base 42: mod_base = OTHER; note = 2'-fluoroadenosine
  modified_base 43: mod_base = OTHER; note = 2'-fluoroadenosine
  modified_base 61: mod_base = OTHER; note = 2'-Omethylcytosine
  modified_base 62: mod_base = OTHER; note = 2'-Omethylcytosine
  modified_base 63: mod_base = OTHER; note = 2'-Omethylcytosine
  modified_base 64: mod_base = OTHER; note = 2'-Omethylguanosine
  modified_base 65: mod_base = OTHER; note = 2'-Omethylguanosine
  modified_base 66: mod_base = OTHER; note = 2'-Omethylcytosine
  modified_base 67: mod_base = OTHER; note = 2'-Omethylguanosine
  modified_base 68: mod_base = OTHER; note = 2'-Omethylguanosine
  modified_base 69: mod_base = OTHER; note = 2'-Omethyladenosine

SEQ ID NO: 4740 - RNA, 85 nt, synthetic construct; identical to SEQ ID NO: 3286
  source 1..85: mol_type = other RNA
  modified_base 13: mod_base = OTHER; note = 2'-Omethyladenosine
  modified_base 28: mod_base = OTHER; note = 2'-fluoroguanosine
  modified_base 49: mod_base = OTHER; note = 2'-Omethyluridine
  modified_base 52: mod_base = OTHER; note = Guanosine phosphorothiorate
  modified_base 67: mod_base = OTHER; note = 2'-fluoroadenosine
  modified_base 84: mod_base = OTHER; note = 2'-fluorocytosine
  modified_base 85: mod_base = OTHER; note = 2'-fluoroadenosine

SEQ ID NO: 4741 - RNA, 85 nt, synthetic construct
  source 1..85: mol_type = other RNA
gcagttgtggccgagtggttaaggcgtctgacttcaaatcagattccctctgggagcgtaggttcgaatcctaccagctgcgcca

SEQ ID NO: 4742 - RNA, 76 nt, synthetic construct; identical to SEQ ID NO: 3318
  source 1..76: mol_type = other RNA
  modified_base 1: mod_base = OTHER; note = 2'-Omethylcytosine
  modified_base 2: mod_base = OTHER; note = 2'-Omethylcytosine
  modified_base 3: mod_base = OTHER; note = 2'-Omethyluridine
  modified_base 4: mod_base = OTHER; note = 2'-Omethyluridine
  modified_base 5: mod_base = OTHER; note = 2'-Omethylcytosine
  modified_base 6: mod_base = OTHER; note = 2'-Omethylguanosine
  modified_base 10: mod_base = OTHER; note = 2'-Omethylguanosine
  modified_base 11: mod_base = OTHER; note = 2'-Omethylcytosine
  modified_base 12: mod_base = OTHER; note = 2'-Omethyluridine
  modified_base 13: mod_base = OTHER; note = 2'-Omethylcytosine
  modified_base 49: mod_base = OTHER; note = 2'-Omethylguanosine
  modified_base 50: mod_base = OTHER; note = 2'-Omethylcytosine
  modified_base 51: mod_base = OTHER; note = 2'-Omethyluridine
  modified_base 52: mod_base = OTHER; note = 2'-Omethylguanosine
  modified_base 53: mod_base = OTHER; note = 2'-Omethylguanosine

SEQ ID NO: 4743 - RNA, 76 nt, synthetic construct; identical to SEQ ID NO: 3289
  source 1..76: mol_type = other RNA
  modified_base 1: mod_base = OTHER; note = 2'-Omethylguanosine
  modified_base 16: mod_base = OTHER; note = 2'-Omethyluridine
  modified_base 18: mod_base = OTHER; note = 2'-Omethylguanosine
  modified_base 19: mod_base = OTHER; note = 2'-Omethylguanosine
  modified_base 54: mod_base = OTHER; note = 2'-Omethyluridine
  modified_base 56: mod_base = OTHER; note = 2'-Omethylcytosine
  modified_base 57: mod_base = OTHER; note = 2'-fluoroadenosine
  modified_base 59: mod_base = OTHER; note = 2'-Omethylguanosine
  modified_base 73: mod_base = OTHER; note = 2'-Omethylguanosine

SEQ ID NO: 4744 - RNA, 76 nt, synthetic construct; identical to SEQ ID NO: 625
  source 1..76: mol_type = other RNA
  modified_base 1: mod_base = OTHER; note = 2'-Omethylguanosine phosphorothiorate
  modified_base 2: mod_base = OTHER; note = 2'-Omethylguanosine
  modified_base 3: mod_base = OTHER; note = 2'-Omethylcytosine
  modified_base 4: mod_base = OTHER; note = 2'-Omethyluridine
  modified_base 5: mod_base = OTHER; note = 2'-Omethylcytosine
  modified_base 6: mod_base = OTHER; note = 2'-Omethylcytosine
  modified_base 10: mod_base = OTHER; note = 2'-Omethylguanosine
  modified_base 11: mod_base = OTHER; note = 2'-Omethylcytosine
  modified_base 12: mod_base = OTHER; note = 2'-Omethylguanosine
  modified_base 13: mod_base = OTHER; note = 2'-Omethylcytosine
  modified_base 22: mod_base = OTHER; note = 2'-Omethylguanosine
  modified_base 23: mod_base = OTHER; note = 2'-Omethylcytosine
  modified_base 24: mod_base = OTHER; note = 2'-Omethylguanosine
  modified_base 25: mod_base = OTHER; note = 2'-Omethylcytosine
  modified_base 49: mod_base = OTHER; note = 2'-Omethylcytosine
  modified_base 50: mod_base = OTHER; note = 2'-Omethylcytosine
  modified_base 51: mod_base = OTHER; note = 2'-Omethylguanosine
  modified_base 52: mod_base = OTHER; note = 2'-Omethylguanosine
  modified_base 53: mod_base = OTHER; note = 2'-Omethylguanosine
  modified_base 54: mod_base = OTHER; note = Uridine phosphorothiorate
  modified_base 55: mod_base = OTHER; note = Uridine phosphorothiorate
  modified_base 56: mod_base = OTHER; note = Cytosine phosphorothiorate
  modified_base 57: mod_base = OTHER; note = Guanosine phosphorothiorate
  modified_base 61: mod_base = OTHER; note = 2'-Omethylcytosine
  modified_base 62: mod_base = OTHER; note = 2'-Omethylcytosine
  modified_base 63: mod_base = OTHER; note = 2'-fluorocytosine
  modified_base 64: mod_base = OTHER; note = 2'-Omethylguanosine
  modified_base 65: mod_base = OTHER; note = 2'-Omethylguanosine
  modified_base 66: mod_base = OTHER; note = 2'-Omethylcytosine
  modified_base 67: mod_base = OTHER; note = 2'-Omethylguanosine
  modified_base 68: mod_base = OTHER; note = 2'-Omethylguanosine
  modified_base 69: mod_base = OTHER; note = 2'-fluoroadenosine
  modified_base 71: mod_base = OTHER; note = 2'-Omethyluridine

SEQ ID NO: 4745 - RNA, 75 nt, synthetic construct; identical to SEQ ID NO: 3299
  source 1..75: mol_type = other RNA
  modified_base 11: mod_base = OTHER; note = 2'-Omethyluridine phosphorothiorate
  modified_base 14: mod_base = OTHER; note = Guanosine phosphorothiorate
  modified_base 18: mod_base = OTHER; note = 2'-fluoroguanosine
  modified_base 23: mod_base = OTHER; note = 2'-fluoroguanosine
  modified_base 25: mod_base = OTHER; note = 2'-fluoroadenosine
  modified_base 28: mod_base = OTHER; note = 2'-Omethyladenosine phosphorothiorate
  modified_base 29: mod_base = OTHER; note = Guanosine phosphorothiorate
  modified_base 40: mod_base = OTHER; note = 2'-fluorouridine
  modified_base 41: mod_base = OTHER; note = 2'-fluoroguanosine
  modified_base 46: mod_base = OTHER; note = Uridine phosphorothiorate
  modified_base 47: mod_base = OTHER; note = 2'-Omethylcytosine phosphorothiorate
  modified_base 48: mod_base = OTHER; note = 2'-Omethylcytosine phosphorothiorate
  modified_base 60: mod_base = OTHER; note = Cytosine phosphorothiorate
  modified_base 71: mod_base = OTHER; note = 2'-fluorocytosine phosphorothiorate
  modified_base 72: mod_base = OTHER; note = Guanosine phosphorothiorate
  modified_base 74: mod_base = OTHER; note = 2'-fluorocytosine

SEQ ID NO: 4746 - RNA, 76 nt, synthetic construct; identical to SEQ ID NO: 3289
  source 1..76: mol_type = other RNA
  modified_base 43: mod_base = OTHER; note = 2'-Omethyladenosine
  modified_base 73: mod_base = OTHER; note = 2'-Omethylguanosine

SEQ ID NO: 4747 - RNA, 76 nt, synthetic construct; identical to SEQ ID NO: 3295
  source 1..76: mol_type = other RNA
  modified_base 1: mod_base = OTHER; note = 2'-Omethylcytosine phosphorothiorate
  modified_base 2: mod_base = OTHER; note = 2'-fluorocytosine
  modified_base 3: mod_base = OTHER; note = 2'-fluorouridine phosphorothiorate
  modified_base 4: mod_base = OTHER; note = 2'-Omethyluridine
  modified_base 9: mod_base = OTHER; note = Adenosine phosphorothiorate
  modified_base 13: mod_base = OTHER; note = Cytosine phosphorothiorate
  modified_base 14: mod_base = OTHER; note = 2'-fluoroadenosine phosphorothiorate
  modified_base 20: mod_base = OTHER; note = 2'-Omethyluridine
  modified_base 28: mod_base = OTHER; note = 2'-Omethyladenosine phosphorothiorate
  modified_base 43: mod_base = OTHER; note = 2'-Omethyluridine
  modified_base 52: mod_base = OTHER; note = 2'-fluoroguanosine phosphorothiorate
  modified_base 54: mod_base = OTHER; note = 2'-fluorouridine
  modified_base 74: mod_base = OTHER; note = 2'-Omethylcytosine phosphorothiorate
  modified_base 75: mod_base = OTHER; note = Cytosine phosphorothiorate
  modified_base 76: mod_base = OTHER; note = 2'-Omethyladenosine

SEQ ID NO: 4748 - RNA, 86 nt, synthetic construct; identical to SEQ ID NO: 3290
  source 1..86: mol_type = other RNA
  modified_base 1: mod_base = OTHER; note = 2'-Omethyladenosine
  modified_base 2: mod_base = OTHER; note = 2'-Omethylcytosine
  modified_base 3: mod_base = OTHER; note = 2'-Omethylcytosine
  modified_base 4: mod_base = OTHER; note = 2'-Omethyladenosine
  modified_base 5: mod_base = OTHER; note = 2'-Omethylguanosine
  modified_base 6: mod_base = OTHER; note = 2'-Omethylguanosine
  modified_base 10: mod_base = OTHER; note = 2'-Omethylguanosine
  modified_base 11: mod_base = OTHER; note = 2'-Omethylcytosine
  modified_base 12: mod_base = OTHER; note = 2'-Omethylcytosine
  modified_base 13: mod_base = OTHER; note = 2'-Omethylguanosine
  modified_base 22: mod_base = OTHER; note = 2'-Omethyladenosine
  modified_base 23: mod_base = OTHER; note = 2'-Omethylguanosine
  modified_base 24: mod_base = OTHER; note = 2'-Omethylguanosine
  modified_base 25: mod_base = OTHER; note = 2'-Omethylcytosine
  modified_base 59: mod_base = OTHER; note = 2'-Omethylguanosine
  modified_base 60: mod_base = OTHER; note = 2'-Omethyluridine
  modified_base 61: mod_base = OTHER; note = 2'-Omethylguanosine
  modified_base 62: mod_base = OTHER; note = 2'-Omethylguanosine
  modified_base 63: mod_base = OTHER; note = 2'-Omethylguanosine
  modified_base 83: mod_base = OTHER; note = 2'-Omethyladenosine

SEQ ID NO: 4749 - RNA, 85 nt, synthetic construct; identical to SEQ ID NO: 3286
  source 1..85: mol_type = other RNA
  modified_base 1: mod_base = OTHER; note = 2'-Omethylcytosine phosphorothiorate
  modified_base 3: mod_base = OTHER; note = 2'-Omethyladenosine
  modified_base 13: mod_base = OTHER; note = Adenosine phosphorothiorate
  modified_base 27: mod_base = OTHER; note = 2'-fluorouridine
  modified_base 45: mod_base = OTHER; note = 2'-Omethylguanosine
  modified_base 58: mod_base = OTHER; note = 2'-Omethylguanosine
  modified_base 64: mod_base = OTHER; note = 2'-fluorouridine
  modified_base 84: mod_base = OTHER; note = 2'-Omethylcytosine

SEQ ID NO: 4750 - RNA, 75 nt, synthetic construct; identical to SEQ ID NO: 3336
  source 1..75: mol_type = other RNA
  modified_base 16: mod_base = OTHER; note = 2'-Omethylcytosine phosphorothiorate
  modified_base 37: mod_base = OTHER; note = 2'-fluoroadenosine
  modified_base 39: mod_base = OTHER; note = 2'-fluorocytosine
  modified_base 49: mod_base = OTHER; note = 2'-fluoroadenosine phosphorothiorate
  modified_base 67: mod_base = OTHER; note = 2'-fluorocytosine phosphorothiorate
  modified_base 73: mod_base = OTHER; note = Cytosine phosphorothiorate

SEQ ID NO: 4751 - RNA, 75 nt, synthetic construct; identical to SEQ ID NO: 3336
  source 1..75: mol_type = other RNA
  modified_base 1: mod_base = OTHER; note = 2'-Omethylcytosine
  modified_base 6: mod_base = OTHER; note = 2'-Omethylguanosine phosphorothiorate
  modified_base 9: mod_base = OTHER; note = Guanosine phosphorothiorate
  modified_base 11: mod_base = OTHER; note = 2'-fluorouridine phosphorothiorate
  modified_base 17: mod_base = OTHER; note = 2'-fluoroguanosine
  modified_base 21: mod_base = OTHER; note = 2'-fluoroguanosine phosphorothiorate
  modified_base 23: mod_base = OTHER; note = Guanosine phosphorothiorate
  modified_base 28: mod_base = OTHER; note = 2'-fluoroadenosine
  modified_base 29: mod_base = OTHER; note = 2'-fluoroguanosine
  modified_base 37: mod_base = OTHER; note = 2'-Omethyladenosine phosphorothiorate
  modified_base 38: mod_base = OTHER; note = Uridine phosphorothiorate
  modified_base 39: mod_base = OTHER; note = 2'-Omethylcytosine phosphorothiorate
  modified_base 40: mod_base = OTHER; note = 2'-fluorouridine
  modified_base 41: mod_base = OTHER; note = 2'-Omethylguanosine phosphorothiorate
  modified_base 45: mod_base = OTHER; note = 2'-fluoroguanosine
  modified_base 47: mod_base = OTHER; note = 2'-fluorocytosine
  modified_base 50: mod_base = OTHER; note = 2'-fluoroguanosine phosphorothiorate
  modified_base 54: mod_base = OTHER; note = 2'-Omethyluridine phosphorothiorate
  modified_base 55: mod_base = OTHER; note = Cytosine phosphorothiorate
  modified_base 64: mod_base = OTHER; note = 2'-fluoroguanosine phosphorothiorate
  modified_base 73: mod_base = OTHER; note = Cytosine phosphorothiorate
  modified_base 74: mod_base = OTHER; note = Cytosine phosphorothiorate
  modified_base 75: mod_base = OTHER; note = 2'-fluoroadenosine

SEQ ID NO: 4752 - RNA, 73 nt, synthetic construct; identical to SEQ ID NO: 935
  source 1..73: mol_type = other RNA
  modified_base 1: mod_base = OTHER; note = 2'-Omethylguanosine phosphorothiorate
  modified_base 2: mod_base = OTHER; note = 2'-Omethylguanosine
  modified_base 22: mod_base = OTHER; note = 2'-Omethylguanosine
  modified_base 52: mod_base = OTHER; note = 2'-Omethylguanosine
  modified_base 72: mod_base = OTHER; note = 2'-Omethylcytosine

SEQ ID NO: 4753 - RNA, 75 nt, synthetic construct; identical to SEQ ID NO: 3306
  source 1..75: mol_type = other RNA
  modified_base 1: mod_base = OTHER; note = 2'-Omethylguanosine
  modified_base 34: mod_base = OTHER; note = Uridine phosphorothiorate
  modified_base 36: mod_base = OTHER; note = Guanosine phosphorothiorate
  modified_base 72: mod_base = OTHER; note = 2'-Omethyladenosine

SEQ ID NO: 4754 - RNA, 75 nt, synthetic construct; identical to SEQ ID NO: 3306
  source 1..75: mol_type = other RNA
  modified_base 1: mod_base = OTHER; note = 2'-Omethylguanosine
  modified_base 17: mod_base = OTHER; note = 2'-Omethylguanosine
  modified_base 18: mod_base = OTHER; note = 2'-Omethylguanosine
  modified_base 49: mod_base = OTHER; note = 2'-Omethylcytosine
  modified_base 51: mod_base = OTHER; note = 2'-Omethyluridine
  modified_base 72: mod_base = OTHER; note = 2'-Omethyladenosine

SEQ ID NO: 4755 - RNA, 76 nt, synthetic construct; identical to SEQ ID NO: 625
  source 1..76: mol_type = other RNA
  modified_base 1: mod_base = OTHER; note = 2'-Omethylguanosine
  modified_base 2: mod_base = OTHER; note = 2'-fluoroguanosine
  modified_base 10: mod_base = OTHER; note = 2'-Omethylguanosine
  modified_base 13: mod_base = OTHER; note = 2'-Omethylcytosine
  modified_base 17: mod_base = OTHER; note = Guanosine phosphorothiorate
  modified_base 18: mod_base = OTHER; note = 2'-Omethylguanosine
  modified_base 19: mod_base = OTHER; note = Adenosine phosphorothiorate
  modified_base 20: mod_base = OTHER; note = 2'-Omethyluridine
  modified_base 25: mod_base = OTHER; note = 2'-Omethylcytosine
  modified_base 29: mod_base = OTHER; note = 2'-Omethylguanosine
  modified_base 33: mod_base = OTHER; note = 2'-fluorouridine
  modified_base 35: mod_base = OTHER; note = Cytosine phosphorothiorate
  modified_base 37: mod_base = OTHER; note = Adenosine phosphorothiorate
  modified_base 38: mod_base = OTHER; note = Adenosine phosphorothiorate
  modified_base 43: mod_base = OTHER; note = 2'-Omethyladenosine
  modified_base 44: mod_base = OTHER; note = 2'-fluoroadenosine
  modified_base 46: mod_base = OTHER; note = Guanosine phosphorothiorate
  modified_base 50: mod_base = OTHER; note = 2'-Omethylcytosine
  modified_base 52: mod_base = OTHER; note = 2'-Omethylguanosine
  modified_base 54: mod_base = OTHER; note = Uridine phosphorothiorate
  modified_base 55: mod_base = OTHER; note = Uridine phosphorothiorate
  modified_base 56: mod_base = OTHER; note = 2'-Omethylcytosine
  modified_base 57: mod_base = OTHER; note = Guanosine phosphorothiorate
  modified_base 62: mod_base = OTHER; note = 2'-Omethylcytosine
  modified_base 63: mod_base = OTHER; note = 2'-fluorocytosine
  modified_base 65: mod_base = OTHER; note = 2'-Omethylguanosine
  modified_base 71: mod_base = OTHER; note = 2'-Omethyluridine
  modified_base 73: mod_base = OTHER; note = 2'-Omethylguanosine

SEQ ID NO: 4756 - RNA, 75 nt, synthetic construct; identical to SEQ ID NO: 3299
  source 1..75: mol_type = other RNA
  modified_base 3: mod_base = OTHER; note = 2'-fluorouridine phosphorothiorate
  modified_base 7: mod_base = OTHER; note = 2'-fluorouridine phosphorothiorate
  modified_base 10: mod_base = OTHER; note = Cytosine phosphorothiorate
  modified_base 14: mod_base = OTHER; note = 2'-fluoroguanosine phosphorothiorate
  modified_base 15: mod_base = OTHER; note = 2'-fluorouridine
  modified_base 19: mod_base = OTHER; note = 2'-fluorouridine
  modified_base 22: mod_base = OTHER; note = 2'-Omethyladenosine
  modified_base 37: mod_base = OTHER; note = 2'-fluoroadenosine
  modified_base 38: mod_base = OTHER; note = 2'-fluorouridine phosphorothiorate
  modified_base 39: mod_base = OTHER; note = 2'-fluorocytosine
  modified_base 45: mod_base = OTHER; note = Guanosine phosphorothiorate
  modified_base 55: mod_base = OTHER; note = 2'-fluorocytosine
  modified_base 61: mod_base = OTHER; note = 2'-Omethylcytosine phosphorothiorate
  modified_base 64: mod_base = OTHER; note = Guanosine phosphorothiorate
  modified_base 73: mod_base = OTHER; note = Cytosine phosphorothiorate
  modified_base 74: mod_base = OTHER; note = 2'-Omethylcytosine

SEQ ID NO: 4757 - RNA, 85 nt, synthetic construct; identical to SEQ ID NO: 3310
  source 1..85: mol_type = other RNA
  modified_base 1: mod_base = OTHER; note = 2'-fluorocytosine phosphorothiorate
  modified_base 13: mod_base = OTHER; note = Adenosine phosphorothiorate
  modified_base 30: mod_base = OTHER; note = 2'-fluoroadenosine
  modified_base 52: mod_base = OTHER; note = 2'-fluoroguanosine
  modified_base 53: mod_base = OTHER; note = 2'-fluorouridine
  modified_base 57: mod_base = OTHER; note = 2'-Omethylcytosine
  modified_base 73: mod_base = OTHER; note = Adenosine phosphorothiorate
  modified_base 84: mod_base = OTHER; note = 2'-Omethylcytosine

SEQ ID NO: 4758 - RNA, 76 nt, synthetic construct; identical to SEQ ID NO: 625
  source 1..76: mol_type = other RNA
  modified_base 1: mod_base = OTHER; note = 2'-Omethylguanosine phosphorothiorate
  modified_base 2: mod_base = OTHER; note = 2'-Omethylguanosine
  modified_base 17: mod_base = OTHER; note = 2'-Omethylguanosine
  modified_base 33: mod_base = OTHER; note = 2'-fluorouridine
  modified_base 35: mod_base = OTHER; note = Cytosine phosphorothiorate
  modified_base 37: mod_base = OTHER; note = Adenosine phosphorothiorate
  modified_base 38: mod_base = OTHER; note = Adenosine phosphorothiorate
  modified_base 52: mod_base = OTHER; note = 2'-Omethylguanosine
  modified_base 65: mod_base = OTHER; note = 2'-Omethylguanosine
  modified_base 68: mod_base = OTHER; note = 2'-Omethylguanosine
  modified_base 73: mod_base = OTHER; note = 2'-Omethylguanosine
  modified_base 75: mod_base = OTHER; note = 2'-fluorocytosine phosphorothiorate

SEQ ID NO: 4759 - RNA, 75 nt, synthetic construct; identical to SEQ ID NO: 3299
  source 1..75: mol_type = other RNA
  modified_base 2: mod_base = OTHER; note = Cytosine phosphorothiorate
  modified_base 6: mod_base = OTHER; note = 2'-fluoroguanosine phosphorothiorate
  modified_base 17: mod_base = OTHER; note = 2'-fluoroguanosine phosphorothiorate
  modified_base 20: mod_base = OTHER; note = 2'-fluoroadenosine
  modified_base 26: mod_base = OTHER; note = 2'-fluorouridine
  modified_base 28: mod_base = OTHER; note = 2'-fluoroadenosine phosphorothiorate
  modified_base 35: mod_base = OTHER; note = 2'-fluoroadenosine
  modified_base 37: mod_base = OTHER; note = 2'-Omethyladenosine
  modified_base 39: mod_base = OTHER; note = 2'-Omethylcytosine
  modified_base 40: mod_base = OTHER; note = 2'-Omethyluridine phosphorothiorate
  modified_base 45: mod_base = OTHER; note = Guanosine phosphorothiorate
  modified_base 50: mod_base = OTHER; note = Guanosine phosphorothiorate
  modified_base 53: mod_base = OTHER; note = 2'-fluorouridine
  modified_base 58: mod_base = OTHER; note = 2'-fluoroguanosine
  modified_base 62: mod_base = OTHER; note = 2'-Omethylcytosine
  modified_base 72: mod_base = OTHER; note = Guanosine phosphorothiorate
  modified_base 74: mod_base = OTHER; note = Cytosine phosphorothiorate

SEQ ID NO: 4760 - RNA, 74 nt, synthetic construct; identical to SEQ ID NO: 3293
  source 1..74: mol_type = other RNA
  modified_base 1: mod_base = OTHER; note = 2'-fluoroadenosine phosphorothiorate
  modified_base 2: mod_base = OTHER; note = 2'-fluorocytosine
  modified_base 4: mod_base = OTHER; note = Uridine phosphorothiorate
  modified_base 8: mod_base = OTHER; note = Guanosine phosphorothiorate
  modified_base 21: mod_base = OTHER; note = 2'-fluorocytosine
  modified_base 26: mod_base = OTHER; note = 2'-fluorocytosine
  modified_base 33: mod_base = OTHER; note = 2'-Omethyluridine
  modified_base 37: mod_base = OTHER; note = 2'-fluorouridine
  modified_base 44: mod_base = OTHER; note = Guanosine phosphorothiorate
  modified_base 47: mod_base = OTHER; note = 2'-fluoroguanosine
  modified_base 50: mod_base = OTHER; note = Uridine phosphorothiorate
  modified_base 52: mod_base = OTHER; note = 2'-fluorouridine
  modified_base 60: mod_base = OTHER; note = 2'-Omethyladenosine phosphorothiorate
  modified_base 62: mod_base = OTHER; note = Guanosine phosphorothiorate
  modified_base 73: mod_base = OTHER; note = 2'-Omethylcytosine phosphorothiorate

SEQ ID NO: 4761 - RNA, 76 nt, synthetic construct; identical to SEQ ID NO: 625
  source 1..76: mol_type = other RNA
  modified_base 1: mod_base = OTHER; note = 2'-Omethylguanosine
  modified_base 2: mod_base = OTHER; note = Guanosine phosphorothiorate
  modified_base 4: mod_base = OTHER; note = 2'-Omethyluridine
  modified_base 8: mod_base = OTHER; note = Uridine phosphorothiorate
  modified_base 11: mod_base = OTHER; note = 2'-fluorocytosine
  modified_base 12: mod_base = OTHER; note = 2'-fluoroguanosine
  modified_base 13: mod_base = OTHER; note = 2'-Omethylcytosine
  modified_base 14: mod_base = OTHER; note = Adenosine phosphorothiorate
  modified_base 16: mod_base = OTHER; note = 2'-Omethyluridine
  modified_base 18: mod_base = OTHER; note = 2'-Omethylguanosine phosphorothiorate
  modified_base 20: mod_base = OTHER; note = Uridine phosphorothiorate
  modified_base 23: mod_base = OTHER; note = Cytosine phosphorothiorate
  modified_base 25: mod_base = OTHER; note = 2'-fluorocytosine
  modified_base 28: mod_base = OTHER; note = 2'-fluorouridine
  modified_base 34: mod_base = OTHER; note = 2'-Omethyluridine phosphorothiorate
  modified_base 36: mod_base = OTHER; note = Adenosine phosphorothiorate
  modified_base 40: mod_base = OTHER; note = 2'-fluorouridine
  modified_base 41: mod_base = OTHER; note = 2'-Omethylcytosine
  modified_base 45: mod_base = OTHER; note = 2'-Omethylguanosine
  modified_base 46: mod_base = OTHER; note = 2'-Omethylguanosine
  modified_base 48: mod_base = OTHER; note = Uridine phosphorothiorate
  modified_base 49: mod_base = OTHER; note = 2'-fluorocytosine
  modified_base 50: mod_base = OTHER; note = Cytosine phosphorothiorate
  modified_base 51: mod_base = OTHER; note = 2'-Omethylguanosine
  modified_base 54: mod_base = OTHER; note = 2'-Omethyluridine
  modified_base 59: mod_base = OTHER; note = 2'-fluoroguanosine
  modified_base 60: mod_base = OTHER; note = 2'-Omethyluridine
  modified_base 61: mod_base = OTHER; note = 2'-Omethylcytosine
  modified_base 62: mod_base = OTHER; note = 2'-Omethylcytosine
  modified_base 63: mod_base = OTHER; note = 2'-Omethylcytosine
  modified_base 64: mod_base = OTHER; note = 2'-fluoroguanosine
  modified_base 65: mod_base = OTHER; note = 2'-fluoroguanosine
  modified_base 67: mod_base = OTHER; note = Guanosine phosphorothiorate
  modified_base 68: mod_base = OTHER; note = 2'-fluoroguanosine phosphorothiorate
  modified_base 69: mod_base = OTHER; note = Adenosine phosphorothiorate
  modified_base 70: mod_base = OTHER; note = Guanosine phosphorothiorate
  modified_base 71: mod_base = OTHER; note = 2'-Omethyluridine
  modified_base 73: mod_base = OTHER; note = 2'-fluoroguanosine
  modified_base 76: mod_base = OTHER; note = 2'-Omethyladenosine

SEQ ID NO: 4762 - RNA, 86 nt, synthetic construct; identical to SEQ ID NO: 3290
  source 1..86: mol_type = other RNA

SEQ ID NO: 4763 - RNA, 76 nt, synthetic construct; identical to SEQ ID NO: 625
  source 1..76: mol_type = other RNA
  modified_base 1: mod_base = OTHER; note = 2'-fluoroguanosine
  modified_base 9: mod_base = OTHER; note = Guanosine phosphorothiorate
  modified_base 10: mod_base = OTHER; note = 2'-fluoroguanosine
  modified_base 11: mod_base = OTHER; note = 2'-fluorocytosine phosphorothiorate
  modified_base 12: mod_base = OTHER; note = 2'-Omethylguanosine
  modified_base 16: mod_base = OTHER; note = 2'-Omethyluridine
  modified_base 20: mod_base = OTHER; note = Uridine phosphorothiorate
  modified_base 22: mod_base = OTHER; note = 2'-fluoroguanosine phosphorothiorate
  modified_base 23: mod_base = OTHER; note = 2'-fluorocytosine
  modified_base 25: mod_base = OTHER; note = 2'-Omethylcytosine
  modified_base 29: mod_base = OTHER; note = 2'-Omethylguanosine
  modified_base 30: mod_base = OTHER; note = Guanosine phosphorothiorate
  modified_base 31: mod_base = OTHER; note = 2'-fluoroadenosine
  modified_base 34: mod_base = OTHER; note = 2'-Omethyluridine
  modified_base 38: mod_base = OTHER; note = 2'-Omethyladenosine
  modified_base 40: mod_base = OTHER; note = 2'-Omethyluridine
  modified_base 42: mod_base = OTHER; note = 2'-fluoroadenosine
  modified_base 45: mod_base = OTHER; note = 2'-fluoroguanosine
  modified_base 48: mod_base = OTHER; note = 2'-fluorouridine
  modified_base 49: mod_base = OTHER; note = 2'-Omethylcytosine
  modified_base 50: mod_base = OTHER; note = 2'-fluorocytosine
  modified_base 52: mod_base = OTHER; note = 2'-fluoroguanosine
  modified_base 53: mod_base = OTHER; note = Guanosine phosphorothiorate
  modified_base 56: mod_base = OTHER; note = 2'-fluorocytosine phosphorothiorate
  modified_base 57: mod_base = OTHER; note = 2'-Omethylguanosine phosphorothiorate
  modified_base 58: mod_base = OTHER; note = 2'-fluoroadenosine
  modified_base 59: mod_base = OTHER; note = 2'-fluoroguanosine
  modified_base 60: mod_base = OTHER; note = Uridine phosphorothiorate
  modified_base 62: mod_base = OTHER; note = 2'-Omethylcytosine
  modified_base 63: mod_base = OTHER; note = 2'-Omethylcytosine
  modified_base 65: mod_base = OTHER; note = 2'-fluoroguanosine
  modified_base 73: mod_base = OTHER; note = 2'-Omethylguanosine
  modified_base 75: mod_base = OTHER; note = Cytosine phosphorothiorate
  modified_base 76: mod_base = OTHER; note = 2'-Omethyladenosine

SEQ ID NO: 4764 - RNA, 76 nt, synthetic construct; identical to SEQ ID NO: 625
  source 1..76: mol_type = other RNA
  modified_base 1: mod_base = OTHER; note = 2'-Omethylguanosine
  modified_base 10: mod_base = OTHER; note = 2'-fluoroguanosine phosphorothiorate
  modified_base 13: mod_base = OTHER; note = 2'-Omethylcytosine
  modified_base 17: mod_base = OTHER; note = Guanosine phosphorothiorate
  modified_base 18: mod_base = OTHER; note = 2'-Omethylguanosine
  modified_base 19: mod_base = OTHER; note = Adenosine phosphorothiorate
  modified_base 20: mod_base = OTHER; note = 2'-Omethyluridine
  modified_base 25: mod_base = OTHER; note = 2'-Omethylcytosine
  modified_base 29: mod_base = OTHER; note = 2'-Omethylguanosine
  modified_base 33: mod_base = OTHER; note = 2'-fluorouridine
  modified_base 35: mod_base = OTHER; note = Cytosine phosphorothiorate
  modified_base 37: mod_base = OTHER; note = Adenosine phosphorothiorate
  modified_base 38: mod_base = OTHER; note = Adenosine phosphorothiorate
  modified_base 43: mod_base = OTHER; note = 2'-Omethyladenosine
  modified_base 44: mod_base = OTHER; note = 2'-fluoroadenosine
  modified_base 46: mod_base = OTHER; note = Guanosine phosphorothiorate
  modified_base 50: mod_base = OTHER; note = 2'-Omethylcytosine
  modified_base 52: mod_base = OTHER; note = 2'-Omethylguanosine
  modified_base 54: mod_base = OTHER; note = Uridine phosphorothiorate
  modified_base 55: mod_base = OTHER; note = Uridine phosphorothiorate
  modified_base 56: mod_base = OTHER; note = 2'-Omethylcytosine
  modified_base 57: mod_base = OTHER; note = Guanosine phosphorothiorate
  modified_base 62: mod_base = OTHER; note = 2'-Omethylcytosine
  modified_base 63: mod_base = OTHER; note = 2'-fluorocytosine
  modified_base 65: mod_base = OTHER; note = 2'-Omethylguanosine
  modified_base 71: mod_base = OTHER; note = 2'-Omethyluridine
  modified_base 73: mod_base = OTHER; note = 2'-Omethylguanosine

SEQ ID NO: 4765 - RNA, 75 nt, synthetic construct; identical to SEQ ID NO: 1045
  source 1..75: mol_type = other RNA
  modified_base 27: mod_base = OTHER; note = 2'-Omethylcytosine
  modified_base 28: mod_base = OTHER; note = 2'-Omethyluridine
  modified_base 29: mod_base = OTHER; note = 2'-Omethylguanosine
  modified_base 30: mod_base = OTHER; note = 2'-Omethylguanosine
  modified_base 31: mod_base = OTHER; note = 2'-Omethyladenosine

SEQ ID NO: 4766 - RNA, 76 nt, synthetic construct; identical to SEQ ID NO: 625
  source 1..76: mol_type = other RNA
  modified_base 1: mod_base = OTHER; note = Guanosine phosphorothiorate
  modified_base 2: mod_base = OTHER; note = Guanosine phosphorothiorate
  modified_base 3: mod_base = OTHER; note = 2'-Omethylcytosine
  modified_base 5: mod_base = OTHER; note = 2'-fluorocytosine
  modified_base 6: mod_base = OTHER; note = 2'-fluorocytosine
  modified_base 7: mod_base = OTHER; note = Guanosine phosphorothiorate
  modified_base 10: mod_base = OTHER; note = 2'-Omethylguanosine phosphorothiorate
  modified_base 11: mod_base = OTHER; note = 2'-Omethylcytosine
  modified_base 13: mod_base = OTHER; note = Cytosine phosphorothiorate
  modified_base 14: mod_base = OTHER; note = 2'-fluoroadenosine
  modified_base 15: mod_base = OTHER; note = 2'-Omethyladenosine
  modified_base 16: mod_base = OTHER; note = 2'-Omethyluridine
  modified_base 18: mod_base = OTHER; note = 2'-fluoroguanosine
  modified_base 22: mod_base = OTHER; note = 2'-Omethylguanosine
  modified_base 25: mod_base = OTHER; note = 2'-Omethylcytosine
  modified_base 27: mod_base = OTHER; note = 2'-Omethyluridine
  modified_base 29: mod_base = OTHER; note = 2'-fluoroguanosine
  modified_base 33: mod_base = OTHER; note = 2'-fluorouridine
  modified_base 38: mod_base = OTHER; note = 2'-Omethyladenosine
  modified_base 48: mod_base = OTHER; note = 2'-Omethyluridine
  modified_base 49: mod_base = OTHER; note = 2'-fluorocytosine
  modified_base 50: mod_base = OTHER; note = 2'-Omethylcytosine phosphorothiorate
  modified_base 51: mod_base = OTHER; note = 2'-Omethylguanosine
  modified_base 52: mod_base = OTHER; note = Guanosine phosphorothiorate
  modified_base 53: mod_base = OTHER; note = 2'-fluoroguanosine phosphorothiorate
  modified_base 54: mod_base = OTHER; note = 2'-Omethyluridine
  modified_base 59: mod_base = OTHER; note = 2'-fluoroguanosine
  modified_base 61: mod_base = OTHER; note = 2'-Omethylcytosine
  modified_base 62: mod_base = OTHER; note = 2'-Omethylcytosine
  modified_base 63: mod_base = OTHER; note = 2'-fluorocytosine phosphorothiorate
  modified_base 64: mod_base = OTHER; note = 2'-fluoroguanosine
  modified_base 65: mod_base = OTHER; note = Guanosine phosphorothiorate
  modified_base 66: mod_base = OTHER; note = 2'-Omethylcytosine phosphorothiorate
  modified_base 67: mod_base = OTHER; note = 2'-Omethylguanosine
  modified_base 68: mod_base = OTHER; note = 2'-Omethylguanosine
  modified_base 73: mod_base = OTHER; note = Guanosine phosphorothiorate
  modified_base 74: mod_base = OTHER; note = 2'-fluorocytosine

SEQ ID NO: 4767 - RNA, 73 nt, synthetic construct
  source 1..73: mol_type = other RNA
  modified_base 55: mod_base = OTHER; note = Uridine phosphorothiorate
gcctgggtagctcagtcggtagagcatcagactttaaatctgagggtccagggttcaagtccctgtccaggcg

SEQ ID NO: 4768 - RNA, 76 nt, synthetic construct; identical to SEQ ID NO: 3615
  source 1..76: mol_type = other RNA
  modified_base 1: mod_base = OTHER; note = 2'-Omethylguanosine phosphorothiorate
  modified_base 2: mod_base = OTHER; note = 2'-Omethylguanosine phosphorothiorate
  modified_base 3: mod_base = OTHER; note = 2'-Omethylcytosine
  modified_base 4: mod_base = OTHER; note = 2'-Omethyluridine
  modified_base 5: mod_base = OTHER; note = 2'-Omethylcytosine
  modified_base 6: mod_base = OTHER; note = 2'-Omethylcytosine
  modified_base 16: mod_base = OTHER; note = 2'-Omethyluridine
  modified_base 17: mod_base = OTHER; note = 2'-Omethylguanosine
  modified_base 18: mod_base = OTHER; note = 2'-Omethylguanosine
  modified_base 20: mod_base = OTHER; note = 2'-Omethyluridine
  modified_base 25: mod_base = OTHER; note = 2'-Omethylcytosine
  modified_base 33: mod_base = OTHER; note = 2'-fluorouridine
  modified_base 35: mod_base = OTHER; note = Cytosine phosphorothiorate
  modified_base 37: mod_base = OTHER; note = Adenosine phosphorothiorate
  modified_base 38: mod_base = OTHER; note = Adenosine phosphorothiorate
  modified_base 41: mod_base = OTHER; note = 2'-Omethylcytosine
  modified_base 44: mod_base = OTHER; note = 2'-Omethylguanosine
  modified_base 45: mod_base = OTHER; note = 2'-Omethylguanosine
  modified_base 46: mod_base = OTHER; note = 2'-fluoroguanosine
  modified_base 47: mod_base = OTHER; note = 2'-fluorouridine
  modified_base 48: mod_base = OTHER; note = 2'-fluorouridine
  modified_base 56: mod_base = OTHER; note = 2'-Omethylcytosine
  modified_base 59: mod_base = OTHER; note = 2'-Omethylguanosine
  modified_base 73: mod_base = OTHER; note = 2'-Omethylguanosine

SEQ ID NO: 4769 - RNA, 75 nt, synthetic construct; identical to SEQ ID NO: 3336
  source 1..75: mol_type = other RNA
  modified_base 2: mod_base = OTHER; note = 2'-Omethylcytosine phosphorothiorate
  modified_base 9: mod_base = OTHER; note = 2'-Omethylguanosine
  modified_base 15: mod_base = OTHER; note = 2'-Omethyluridine
  modified_base 18: mod_base = OTHER; note = 2'-fluoroguanosine
  modified_base 23: mod_base = OTHER; note = Guanosine phosphorothiorate
  modified_base 25: mod_base = OTHER; note = 2'-fluoroadenosine phosphorothiorate
  modified_base 27: mod_base = OTHER; note = Cytosine phosphorothiorate
  modified_base 34: mod_base = OTHER; note = 2'-fluorouridine
  modified_base 36: mod_base = OTHER; note = 2'-fluoroadenosine phosphorothiorate
  modified_base 40: mod_base = OTHER; note = 2'-fluorouridine
  modified_base 46: mod_base = OTHER; note = 2'-fluorouridine
  modified_base 47: mod_base = OTHER; note = 2'-fluorocytosine
  modified_base 48: mod_base = OTHER; note = 2'-Omethylcytosine phosphorothiorate
  modified_base 50: mod_base = OTHER; note = 2'-fluoroguanosine
  modified_base 56: mod_base = OTHER; note = 2'-Omethyladenosine phosphorothiorate
  modified_base 58: mod_base = OTHER; note = 2'-Omethylguanosine phosphorothiorate
  modified_base 59: mod_base = OTHER; note = Uridine phosphorothiorate
  modified_base 69: mod_base = OTHER; note = Guanosine phosphorothiorate
  modified_base 73: mod_base = OTHER; note = Cytosine phosphorothiorate
  modified_base 74: mod_base = OTHER; note = Cytosine phosphorothiorate

SEQ ID NO: 4770 - RNA, 85 nt, synthetic construct; identical to SEQ ID NO: 3317
  source 1..85: mol_type = other RNA
  modified_base 1: mod_base = OTHER; note = 2'-Omethylguanosine phosphorothiorate
  modified_base 13: mod_base = OTHER; note = Guanosine phosphorothiorate
  modified_base 16: mod_base = OTHER; note = 2'-Omethyluridine phosphorothiorate
  modified_base 19: mod_base = OTHER; note = Uridine phosphorothiorate
  modified_base 22: mod_base = OTHER; note = 2'-fluoroadenosine
  modified_base 24: mod_base = OTHER; note = 2'-fluoroguanosine phosphorothiorate
  modified_base 27: mod_base = OTHER; note = Uridine phosphorothiorate
  modified_base 40: mod_base = OTHER; note = Cytosine phosphorothiorate
  modified_base 45: mod_base = OTHER; note = 2'-Omethylguanosine phosphorothiorate
  modified_base 48: mod_base = OTHER; note = 2'-Omethylguanosine
  modified_base 52: mod_base = OTHER; note = 2'-fluorocytosine
  modified_base 59: mod_base = OTHER; note = 2'-Omethylcytosine
  modified_base 61: mod_base = OTHER; note = 2'-Omethylguanosine
  modified_base 70: mod_base = OTHER; note = 2'-fluorocytosine phosphorothiorate
  modified_base 73: mod_base = OTHER; note = 2'-fluoroguanosine
  modified_base 81: mod_base = OTHER; note = 2'-Omethylcytosine phosphorothiorate
  modified_base 83: mod_base = OTHER; note = Cytosine phosphorothiorate

SEQ ID NO: 4771 - RNA, 76 nt, synthetic construct; identical to SEQ ID NO: 625
  source 1..76: mol_type = other RNA
  modified_base 4: mod_base = OTHER; note = Thymine
  modified_base 8: mod_base = OTHER; note = Thymine
  modified_base 16: mod_base = OTHER; note = Thymine
  modified_base 20: mod_base = OTHER; note = Thymine
  modified_base 27: mod_base = OTHER; note = Thymine
  modified_base 28: mod_base = OTHER; note = Thymine
  modified_base 33: mod_base = OTHER; note = Thymine
  modified_base 34: mod_base = OTHER; note = Thymine
  modified_base 39: mod_base = OTHER; note = Thymine
  modified_base 40: mod_base = OTHER; note = Thymine
  modified_base 47: mod_base = OTHER; note = Thymine
  modified_base 48: mod_base = OTHER; note = Thymine
  modified_base 54: mod_base = OTHER; note = Thymine
  modified_base 55: mod_base = OTHER; note = Thymine
  modified_base 60: mod_base = OTHER; note = Thymine
  modified_base 71: mod_base = OTHER; note = Thymine

SEQ ID NO: 4772 - RNA, 75 nt, synthetic construct; identical to SEQ ID NO: 3311
  source 1..75: mol_type = other RNA
  modified_base 1: mod_base = OTHER; note = 2'-fluoroguanosine phosphorothiorate
  modified_base 2: mod_base = OTHER; note = 2'-Omethylguanosine phosphorothiorate
  modified_base 16: mod_base = OTHER; note = Uridine phosphorothiorate
  modified_base 23: mod_base = OTHER; note = 2'-fluorocytosine
  modified_base 40: mod_base = OTHER; note = 2'-fluorocytosine
  modified_base 52: mod_base = OTHER; note = 2'-fluoroguanosine phosphorothiorate
  modified_base 61: mod_base = OTHER; note = 2'-Omethyluridine
  modified_base 74: mod_base = OTHER; note = Cytosine phosphorothiorate

SEQ ID NO: 4773 - RNA, 75 nt, synthetic construct; identical to SEQ ID NO: 3299
  source 1..75: mol_type = other RNA
  modified_base 1: mod_base = OTHER; note = 2'-Omethylcytosine phosphorothiorate
  modified_base 15: mod_base = OTHER; note = 2'-Omethyluridine
  modified_base 25: mod_base = OTHER; note = 2'-fluoroadenosine
  modified_base 26: mod_base = OTHER; note = 2'-fluorouridine
  modified_base 41: mod_base = OTHER; note = 2'-fluoroguanosine
  modified_base 46: mod_base = OTHER; note = 2'-fluorouridine
  modified_base 47: mod_base = OTHER; note = 2'-Omethylcytosine phosphorothiorate
  modified_base 60: mod_base = OTHER; note = 2'-fluorocytosine
  modified_base 73: mod_base = OTHER; note = Cytosine phosphorothiorate
  modified_base 74: mod_base = OTHER; note = 2'-Omethylcytosine

SEQ ID NO: 4774 - RNA, 76 nt, synthetic construct; identical to SEQ ID NO: 3419
  source 1..76: mol_type = other RNA
  modified_base 1: mod_base = OTHER; note = 2'-Omethylguanosine phosphorothiorate
  modified_base 2: mod_base = OTHER; note = 2'-Omethylguanosine phosphorothiorate
  modified_base 3: mod_base = OTHER; note = 2'-Omethylcytosine
  modified_base 4: mod_base = OTHER; note = 2'-Omethyluridine
  modified_base 5: mod_base = OTHER; note = 2'-Omethylcytosine
  modified_base 6: mod_base = OTHER; note = 2'-Omethylcytosine
  modified_base 10: mod_base = OTHER; note = 2'-Omethylguanosine
  modified_base 11: mod_base = OTHER; note = 2'-Omethylcytosine
  modified_base 12: mod_base = OTHER; note = 2'-Omethylguanosine
  modified_base 13: mod_base = OTHER; note = 2'-Omethylcytosine
  modified_base 14: mod_base = OTHER; note = 2'-Omethyladenosine
  modified_base 15: mod_base = OTHER; note = 2'-fluoroadenosine
  modified_base 16: mod_base = OTHER; note = 2'-Omethyluridine
  modified_base 17: mod_base = OTHER; note = 2'-Omethylguanosine
  modified_base 18: mod_base = OTHER; note = 2'-Omethylguanosine
  modified_base 19: mod_base = OTHER; note = 2'-fluoroadenosine
  modified_base 20: mod_base = OTHER; note = 2'-Omethyluridine
  modified_base 22: mod_base = OTHER; note = 2'-Omethylguanosine
  modified_base 23: mod_base = OTHER; note = 2'-Omethylcytosine
  modified_base 24: mod_base = OTHER; note = 2'-Omethylguanosine
  modified_base 25: mod_base = OTHER; note = 2'-Omethylcytosine
  modified_base 33: mod_base = OTHER; note = 2'-fluorouridine
  modified_base 35: mod_base = OTHER; note = Cytosine phosphorothiorate
  modified_base 37: mod_base = OTHER; note = Adenosine phosphorothiorate
  modified_base 38: mod_base = OTHER; note = Adenosine phosphorothiorate
  modified_base 44: mod_base = OTHER; note = 2'-Omethyladenosine
  modified_base 45: mod_base = OTHER; note = 2'-Omethylguanosine
  modified_base 46: mod_base = OTHER; note = 2'-fluoroguanosine
  modified_base 47: mod_base = OTHER; note = 2'-fluorouridine
  modified_base 48: mod_base = OTHER; note = 2'-fluorouridine
  modified_base 56: mod_base = OTHER; note = 2'-Omethylcytosine
  modified_base 59: mod_base = OTHER; note = 2'-Omethylguanosine
  modified_base 61: mod_base = OTHER; note = 2'-Omethylcytosine
  modified_base 62: mod_base = OTHER; note = 2'-Omethylcytosine
  modified_base 63: mod_base = OTHER; note = 2'-fluorocytosine
  modified_base 64: mod_base = OTHER; note = 2'-Omethylguanosine
  modified_base 65: mod_base = OTHER; note = 2'-Omethylguanosine
  modified_base 66: mod_base = OTHER; note = 2'-Omethylcytosine
  modified_base 67: mod_base = OTHER; note = 2'-Omethylguanosine
  modified_base 68: mod_base = OTHER; note = 2'-Omethylguanosine
  modified_base 73: mod_base = OTHER; note = 2'-Omethylguanosine

SEQ ID NO: 4775 - RNA, 85 nt, synthetic construct; identical to SEQ ID NO: 3288
  source 1..85: mol_type = other RNA
  modified_base 1: mod_base = OTHER; note = 2'-fluorocytosine phosphorothiorate
  modified_base 3: mod_base = OTHER; note = 2'-fluoroadenosine
  modified_base 8: mod_base = OTHER; note = 2'-fluoroguanosine
  modified_base 13: mod_base = OTHER; note = 2'-fluoroadenosine phosphorothiorate
  modified_base 15: mod_base = OTHER; note = Uridine phosphorothiorate
  modified_base 20: mod_base = OTHER; note = 2'-fluoroadenosine
  modified_base 26: mod_base = OTHER; note = 2'-fluorouridine
  modified_base 30: mod_base = OTHER; note = 2'-fluoroadenosine
  modified_base 32: mod_base = OTHER; note = 2'-fluorouridine
  modified_base 48: mod_base = OTHER; note = 2'-fluoroadenosine phosphorothiorate
  modified_base 54: mod_base = OTHER; note = 2'-fluorocytosine
  modified_base 56: mod_base = OTHER; note = 2'-fluoroguanosine
  modified_base 57: mod_base = OTHER; note = 2'-Omethylcytosine
  modified_base 79: mod_base = OTHER; note = 2'-Omethylguanosine
  modified_base 84: mod_base = OTHER; note = 2'-fluorocytosine phosphorothiorate

SEQ ID NO: 4776 - RNA, 76 nt, synthetic construct
  source 1..76: mol_type = other RNA
ggcgccgtggcgcaatggacagcgcattggacttcaaattcaaaggttccgggttcgagtcccggcggcgtcgcca

SEQ ID NO: 4777 - RNA, 76 nt, synthetic construct; identical to SEQ ID NO: 3318
  source 1..76: mol_type = other RNA
  modified_base 52: mod_base = OTHER; note = 2'-Omethylguanosine
  modified_base 65: mod_base = OTHER; note = 2'-Omethylcytosine

SEQ ID NO: 4778 - RNA, 86 nt, synthetic construct; identical to SEQ ID NO: 3290
  source 1..86: mol_type = other RNA
  modified_base 18: mod_base = OTHER; note = 2'-Omethylguanosine

SEQ ID NO: 4779 - RNA, 76 nt, synthetic construct; identical to SEQ ID NO: 3318
  source 1..76: mol_type = other RNA
  modified_base 1: mod_base = OTHER; note = 2'-Omethylcytosine
  modified_base 2: mod_base = OTHER; note = 2'-Omethylcytosine
  modified_base 3: mod_base = OTHER; note = 2'-Omethyluridine
  modified_base 4: mod_base = OTHER; note = 2'-Omethyluridine
  modified_base 5: mod_base = OTHER; note = 2'-Omethylcytosine
  modified_base 6: mod_base = OTHER; note = 2'-Omethylguanosine
  modified_base 49: mod_base = OTHER; note = 2'-Omethylguanosine
  modified_base 50: mod_base = OTHER; note = 2'-Omethylcytosine
  modified_base 51: mod_base = OTHER; note = 2'-Omethyluridine
  modified_base 52: mod_base = OTHER; note = 2'-Omethylguanosine
  modified_base 53: mod_base = OTHER; note = 2'-Omethylguanosine
  modified_base 54: mod_base = OTHER; note = 2'-Omethyluridine
  modified_base 61: mod_base = OTHER; note = 2'-Omethylcytosine
  modified_base 62: mod_base = OTHER; note = 2'-Omethylcytosine
  modified_base 63: mod_base = OTHER; note = 2'-fluoroguanosine
  modified_base 64: mod_base = OTHER; note = 2'-Omethylguanosine
  modified_base 65: mod_base = OTHER; note = 2'-Omethylcytosine
  modified_base 66: mod_base = OTHER; note = 2'-Omethyluridine
  modified_base 67: mod_base = OTHER; note = 2'-Omethylcytosine
  modified_base 68: mod_base = OTHER; note = 2'-Omethylguanosine
  modified_base 73: mod_base = OTHER; note = 2'-Omethyladenosine

SEQ ID NO: 4780 - RNA, 75 nt, synthetic construct; identical to SEQ ID NO: 1045
  source 1..75: mol_type = other RNA
  modified_base 1: mod_base = OTHER; note = 2'-Omethylguanosine
  modified_base 2: mod_base = OTHER; note = 2'-Omethylguanosine phosphorothiorate
  modified_base 19: mod_base = OTHER; note = Uridine phosphorothiorate
  modified_base 20: mod_base = OTHER; note = 2'-fluoroadenosine
  modified_base 25: mod_base = OTHER; note = Cytosine phosphorothiorate
  modified_base 36: mod_base = OTHER; note = 2'-fluoroadenosine
  modified_base 41: mod_base = OTHER; note = 2'-fluorocytosine
  modified_base 44: mod_base = OTHER; note = 2'-fluorocytosine
  modified_base 51: mod_base = OTHER; note = 2'-fluoroadenosine phosphorothiorate
  modified_base 66: mod_base = OTHER; note = Guanosine phosphorothiorate
  modified_base 67: mod_base = OTHER; note = 2'-fluoroguanosine
  modified_base 73: mod_base = OTHER; note = 2'-fluorocytosine phosphorothiorate

SEQ ID NO: 4781 - RNA, 85 nt, synthetic construct; identical to SEQ ID NO: 3317
  source 1..85: mol_type = other RNA
  modified_base 1: mod_base = OTHER; note = 2'-Omethylguanosine phosphorothiorate
  modified_base 2: mod_base = OTHER; note = Cytosine phosphorothiorate
  modified_base 21: mod_base = OTHER; note = 2'-fluoroadenosine phosphorothiorate
  modified_base 47: mod_base = OTHER; note = 2'-Omethylguanosine
  modified_base 52: mod_base = OTHER; note = 2'-fluorocytosine
  modified_base 61: mod_base = OTHER; note = 2'-Omethylguanosine
  modified_base 80: mod_base = OTHER; note = 2'-fluoroguanosine
  modified_base 84: mod_base = OTHER; note = 2'-Omethylcytosine phosphorothiorate

SEQ ID NO: 4782 - RNA, 85 nt, synthetic construct; identical to SEQ ID NO: 3297
  source 1..85: mol_type = other RNA
  modified_base 1: mod_base = OTHER; note = 2'-Omethylguanosine
  modified_base 2: mod_base = OTHER; note = 2'-Omethylcytosine
  modified_base 3: mod_base = OTHER; note = 2'-Omethyluridine
  modified_base 4: mod_base = OTHER; note = 2'-Omethylguanosine
  modified_base 5: mod_base = OTHER; note = 2'-Omethyluridine
  modified_base 6: mod_base = OTHER; note = 2'-Omethylguanosine
  modified_base 14: mod_base = OTHER; note = 2'-Omethyladenosine
  modified_base 15: mod_base = OTHER; note = 2'-Omethylguanosine
  modified_base 16: mod_base = OTHER; note = 2'-Omethyluridine
  modified_base 17: mod_base = OTHER; note = 2'-Omethylguanosine
  modified_base 18: mod_base = OTHER; note = 2'-Omethylguanosine
  modified_base 20: mod_base = OTHER; note = 2'-Omethyluridine
  modified_base 25: mod_base = OTHER; note = 2'-Omethylcytosine
  modified_base 41: mod_base = OTHER; note = 2'-fluorocytosine
  modified_base 42: mod_base = OTHER; note = 2'-Omethyladenosine
  modified_base 43: mod_base = OTHER; note = 2'-Omethyladenosine
  modified_base 44: mod_base = OTHER; note = 2'-fluorouridine
  modified_base 58: mod_base = OTHER; note = 2'-Omethylguanosine
  modified_base 59: mod_base = OTHER; note = 2'-Omethylcytosine
  modified_base 61: mod_base = OTHER; note = 2'-Omethylguanosine
  modified_base 63: mod_base = OTHER; note = 2'-Omethyluridine
  modified_base 64: mod_base = OTHER; note = Uridine phosphorothiorate
  modified_base 65: mod_base = OTHER; note = 2'-Omethylcytosine
  modified_base 66: mod_base = OTHER; note = 2'-fluoroguanosine
  modified_base 68: mod_base = OTHER; note = 2'-Omethyladenosine
  modified_base 70: mod_base = OTHER; note = 2'-Omethylcytosine
  modified_base 74: mod_base = OTHER; note = 2'-Omethylcytosine
  modified_base 82: mod_base = OTHER; note = 2'-Omethylguanosine

SEQ ID NO: 4783 - RNA, 85 nt, synthetic construct; identical to SEQ ID NO: 3310
  source 1..85: mol_type = other RNA
  modified_base 1: mod_base = OTHER; note = 2'-Omethylcytosine phosphorothiorate
  modified_base 11: mod_base = OTHER; note = Cytosine phosphorothiorate
  modified_base 25: mod_base = OTHER; note = Guanosine phosphorothiorate
  modified_base 26: mod_base = OTHER; note = 2'-fluorouridine
  modified_base 30: mod_base = OTHER; note = 2'-fluoroadenosine
  modified_base 45: mod_base = OTHER; note = Guanosine phosphorothiorate
  modified_base 51: mod_base = OTHER; note = 2'-Omethyluridine
  modified_base 57: mod_base = OTHER; note = 2'-Omethylcytosine
  modified_base 67: mod_base = OTHER; note = Adenosine phosphorothiorate
  modified_base 84: mod_base = OTHER; note = 2'-fluorocytosine phosphorothiorate

SEQ ID NO: 4784 - RNA, 86 nt, synthetic construct; identical to SEQ ID NO: 3290
  source 1..86: mol_type = other RNA
  modified_base 47: mod_base = OTHER; note = 2'-fluoroadenosine

SEQ ID NO: 4785 - RNA, 76 nt, synthetic construct; identical to SEQ ID NO: 625
  source 1..76: mol_type = other RNA
  modified_base 1: mod_base = OTHER; note = 2'-Omethylguanosine phosphorothiorate
  modified_base 2: mod_base = OTHER; note = 2'-Omethylguanosine
  modified_base 17: mod_base = OTHER; note = 2'-Omethylguanosine
  modified_base 25: mod_base = OTHER; note = 2'-Omethylcytosine
  modified_base 33: mod_base = OTHER; note = 2'-fluorouridine
  modified_base 35: mod_base = OTHER; note = Cytosine phosphorothiorate
  modified_base 37: mod_base = OTHER; note = Adenosine phosphorothiorate
  modified_base 38: mod_base = OTHER; note = Adenosine phosphorothiorate
  modified_base 52: mod_base = OTHER; note = 2'-fluoroguanosine
  modified_base 62: mod_base = OTHER; note = 2'-Omethylcytosine
  modified_base 68: mod_base = OTHER; note = 2'-Omethylguanosine
  modified_base 73: mod_base = OTHER; note = 2'-Omethylguanosine
  modified_base 75: mod_base = OTHER; note = 2'-fluorocytosine phosphorothiorate

SEQ ID NO: 4786 - RNA, 76 nt, synthetic construct; identical to SEQ ID NO: 3318
  source 1..76: mol_type = other RNA
  modified_base 1: mod_base = OTHER; note = 2'-Omethylcytosine
  modified_base 20: mod_base = OTHER; note = 2'-Omethyluridine
  modified_base 21: mod_base = OTHER; note = 2'-fluoroadenosine
  modified_base 22: mod_base = OTHER; note = 2'-Omethylguanosine
  modified_base 40: mod_base = OTHER; note = 2'-fluorocytosine
  modified_base 41: mod_base = OTHER; note = 2'-Omethylcytosine
  modified_base 42: mod_base = OTHER; note = 2'-Omethyluridine
  modified_base 43: mod_base = OTHER; note = 2'-Omethyluridine
  modified_base 73: mod_base = OTHER; note = 2'-Omethyladenosine

SEQ ID NO: 4787 - RNA, 85 nt, synthetic construct; identical to SEQ ID NO: 3297
  source 1..85: mol_type = other RNA
  modified_base 1: mod_base = OTHER; note = 2'-Omethylguanosine
  modified_base 16: mod_base = OTHER; note = 2'-Omethyluridine
  modified_base 17: mod_base = OTHER; note = 2'-Omethylguanosine
  modified_base 18: mod_base = OTHER; note = 2'-Omethylguanosine
  modified_base 63: mod_base = OTHER; note = 2'-Omethyluridine phosphorothiorate
  modified_base 65: mod_base = OTHER; note = 2'-Omethylcytosine
  modified_base 68: mod_base = OTHER; note = 2'-Omethyladenosine
  modified_base 82: mod_base = OTHER; note = 2'-Omethylguanosine

SEQ ID NO: 4788 - RNA, 85 nt, synthetic construct; identical to SEQ ID NO: 3297
  source 1..85: mol_type = other RNA
  modified_base 1: mod_base = OTHER; note = 2'-Omethylguanosine
  modified_base 10: mod_base = OTHER; note = 2'-Omethylguanosine
  modified_base 11: mod_base = OTHER; note = 2'-Omethylcytosine
  modified_base 12: mod_base = OTHER; note = 2'-Omethylcytosine
  modified_base 13: mod_base = OTHER; note = 2'-Omethylguanosine
  modified_base 16: mod_base = OTHER; note = 2'-Omethyluridine
  modified_base 17: mod_base = OTHER; note = 2'-Omethylguanosine
  modified_base 18: mod_base = OTHER; note = 2'-Omethylguanosine
  modified_base 22: mod_base = OTHER; note = 2'-Omethyladenosine
  modified_base 23: mod_base = OTHER; note = 2'-Omethylguanosine
  modified_base 24: mod_base = OTHER; note = 2'-Omethylguanosine
  modified_base 25: mod_base = OTHER; note = 2'-Omethylcytosine
  modified_base 44: mod_base = OTHER; note = 2'-Omethyluridine
  modified_base 56: mod_base = OTHER; note = 2'-fluoroguanosine
  modified_base 57: mod_base = OTHER; note = 2'-fluorocytosine
  modified_base 82: mod_base = OTHER; note = 2'-Omethylguanosine

SEQ ID NO: 4789 - RNA, 85 nt, synthetic construct; identical to SEQ ID NO: 3297
  source 1..85: mol_type = other RNA
  modified_base 1: mod_base = OTHER; note = 2'-Omethylguanosine
  modified_base 2: mod_base = OTHER; note = 2'-Omethylcytosine
  modified_base 3: mod_base = OTHER; note = 2'-Omethyluridine
  modified_base 4: mod_base = OTHER; note = 2'-Omethylguanosine
  modified_base 5: mod_base = OTHER; note = 2'-Omethyluridine
  modified_base 6: mod_base = OTHER; note = 2'-Omethylguanosine
  modified_base 10: mod_base = OTHER; note = 2'-Omethylguanosine
  modified_base 11: mod_base = OTHER; note = 2'-Omethylcytosine
  modified_base 12: mod_base = OTHER; note = 2'-Omethylcytosine
  modified_base 13: mod_base = OTHER; note = 2'-Omethylguanosine
  modified_base 14: mod_base = OTHER; note = 2'-Omethyladenosine
  modified_base 15: mod_base = OTHER; note = 2'-Omethylguanosine
  modified_base 16: mod_base = OTHER; note = 2'-Omethyluridine
  modified_base 17: mod_base = OTHER; note = 2'-Omethylguanosine
  modified_base 18: mod_base = OTHER; note = 2'-Omethylguanosine
  modified_base 20: mod_base = OTHER; note = 2'-Omethyluridine
  modified_base 22: mod_base = OTHER; note = 2'-Omethyladenosine
  modified_base 23: mod_base = OTHER; note = 2'-Omethylguanosine
  modified_base 24: mod_base = OTHER; note = 2'-Omethylguanosine
  modified_base 25: mod_base = OTHER; note = 2'-Omethylcytosine
  modified_base 41: mod_base = OTHER; note = 2'-Omethylcytosine
  modified_base 42: mod_base = OTHER; note = 2'-Omethyladenosine
  modified_base 43: mod_base = OTHER; note = 2'-Omethyladenosine
  modified_base 44: mod_base = OTHER; note = 2'-Omethyluridine
  modified_base 58: mod_base = OTHER; note = 2'-Omethylguanosine
  modified_base 59: mod_base = OTHER; note = 2'-Omethylcytosine
  modified_base 61: mod_base = OTHER; note = 2'-Omethylguanosine
  modified_base 63: mod_base = OTHER; note = 2'-Omethyluridine
  modified_base 64: mod_base = OTHER; note = Uridine phosphorothiorate
  modified_base 65: mod_base = OTHER; note = 2'-Omethylcytosine
  modified_base 66: mod_base = OTHER; note = 2'-fluoroguanosine
  modified_base 68: mod_base = OTHER; note = 2'-Omethyladenosine
  modified_base 70: mod_base = OTHER; note = 2'-Omethylcytosine
  modified_base 74: mod_base = OTHER; note = 2'-Omethylcytosine
  modified_base 82: mod_base = OTHER; note = 2'-Omethylguanosine

SEQ ID NO: 4790 - RNA, 76 nt, synthetic construct; identical to SEQ ID NO: 625
  source 1..76: mol_type = other RNA
  modified_base 3: mod_base = OTHER; note = 2'-Omethylcytosine phosphorothiorate
  modified_base 4: mod_base = OTHER; note = 2'-fluorouridine
  modified_base 5: mod_base = OTHER; note = 2'-Omethylcytosine
  modified_base 6: mod_base = OTHER; note = Cytosine phosphorothiorate
  modified_base 10: mod_base = OTHER; note = 2'-Omethylguanosine
  modified_base 12: mod_base = OTHER; note = 2'-Omethylguanosine
  modified_base 16: mod_base = OTHER; note = 2'-fluorouridine
  modified_base 20: mod_base = OTHER; note = Uridine phosphorothiorate
  modified_base 23: mod_base = OTHER; note = 2'-fluorocytosine
  modified_base 24: mod_base = OTHER; note = 2'-Omethylguanosine
  modified_base 29: mod_base = OTHER; note = 2'-Omethylguanosine
  modified_base 31: mod_base = OTHER; note = 2'-Omethyladenosine
  modified_base 33: mod_base = OTHER; note = Uridine phosphorothiorate
  modified_base 34: mod_base = OTHER; note = 2'-Omethyluridine phosphorothiorate
  modified_base 38: mod_base = OTHER; note = 2'-Omethyladenosine
  modified_base 41: mod_base = OTHER; note = 2'-Omethylcytosine
  modified_base 42: mod_base = OTHER; note = 2'-fluoroadenosine phosphorothiorate
  modified_base 45: mod_base = OTHER; note = 2'-fluoroguanosine
  modified_base 47: mod_base = OTHER; note = 2'-fluorouridine
  modified_base 48: mod_base = OTHER; note = 2'-Omethyluridine phosphorothiorate
  modified_base 49: mod_base = OTHER; note = 2'-Omethylcytosine
  modified_base 51: mod_base = OTHER; note = Guanosine phosphorothiorate
  modified_base 52: mod_base = OTHER; note = 2'-Omethylguanosine phosphorothiorate
  modified_base 54: mod_base = OTHER; note = 2'-fluorouridine
  modified_base 56: mod_base = OTHER; note = Cytosine phosphorothiorate
  modified_base 57: mod_base = OTHER; note = 2'-Omethylguanosine
  modified_base 61: mod_base = OTHER; note = 2'-fluorocytosine
  modified_base 63: mod_base = OTHER; note = 2'-Omethylcytosine
  modified_base 64: mod_base = OTHER; note = 2'-fluoroguanosine
  modified_base 70: mod_base = OTHER; note = Guanosine phosphorothiorate
  modified_base 71: mod_base = OTHER; note = 2'-Omethyluridine
  modified_base 73: mod_base = OTHER; note = Guanosine phosphorothiorate
  modified_base 74: mod_base = OTHER; note = 2'-Omethylcytosine phosphorothiorate
  modified_base 75: mod_base = OTHER; note = 2'-Omethylcytosine

SEQ ID NO: 4791 - RNA, 85 nt, synthetic construct; identical to SEQ ID NO: 3297
  source 1..85: mol_type = other RNA
  modified_base 1: mod_base = OTHER; note = 2'-Omethylguanosine phosphorothiorate
  modified_base 2: mod_base = OTHER; note = Cytosine phosphorothiorate
  modified_base 18: mod_base = OTHER; note = 2'-Omethylguanosine
  modified_base 30: mod_base = OTHER; note = Guanosine phosphorothiorate
  modified_base 37: mod_base = OTHER; note = Adenosine phosphorothiorate
  modified_base 48: mod_base = OTHER; note = 2'-Omethylguanosine phosphorothiorate
  modified_base 52: mod_base = OTHER; note = 2'-Omethylcytosine phosphorothiorate
  modified_base 62: mod_base = OTHER; note = 2'-Omethylguanosine
  modified_base 82: mod_base = OTHER; note = 2'-fluoroguanosine

SEQ ID NO: 4792 - RNA, 86 nt, synthetic construct; identical to SEQ ID NO: 3290
  source 1..86: mol_type = other RNA
  modified_base 1: mod_base = OTHER; note = 2'-Omethyladenosine
  modified_base 13: mod_base = OTHER; note = 2'-Omethylguanosine
  modified_base 14: mod_base = OTHER; note = 2'-Omethyladenosine
  modified_base 15: mod_base = OTHER; note = 2'-Omethylguanosine
  modified_base 16: mod_base = OTHER; note = 2'-Omethyluridine
  modified_base 17: mod_base = OTHER; note = 2'-Omethylguanosine
  modified_base 18: mod_base = OTHER; note = 2'-Omethylguanosine
  modified_base 19: mod_base = OTHER; note = Uridine phosphorothiorate
  modified_base 20: mod_base = OTHER; note = 2'-Omethyluridine
  modified_base 21: mod_base = OTHER; note = Adenosine phosphorothiorate
  modified_base 25: mod_base = OTHER; note = 2'-Omethylcytosine
  modified_base 33: mod_base = OTHER; note = 2'-fluorouridine
  modified_base 34: mod_base = OTHER; note = 2'-Omethyluridine
  modified_base 35: mod_base = OTHER; note = Cytosine phosphorothiorate
  modified_base 37: mod_base = OTHER; note = Guanosine phosphorothiorate
  modified_base 38: mod_base = OTHER; note = Adenosine phosphorothiorate
  modified_base 41: mod_base = OTHER; note = 2'-Omethylcytosine
  modified_base 42: mod_base = OTHER; note = 2'-Omethyladenosine
  modified_base 43: mod_base = OTHER; note = 2'-Omethyladenosine
  modified_base 44: mod_base = OTHER; note = 2'-Omethyluridine
  modified_base 59: mod_base = OTHER; note = 2'-Omethylguanosine
  modified_base 60: mod_base = OTHER; note = 2'-Omethyluridine
  modified_base 62: mod_base = OTHER; note = 2'-Omethylguanosine
  modified_base 64: mod_base = OTHER; note = Uridine phosphorothiorate
  modified_base 65: mod_base = OTHER; note = Uridine phosphorothiorate
  modified_base 71: mod_base = OTHER; note = 2'-Omethylcytosine
  modified_base 75: mod_base = OTHER; note = 2'-Omethylcytosine
  modified_base 83: mod_base = OTHER; note = 2'-Omethyladenosine

SEQ ID NO: 4793 - RNA, 76 nt, synthetic construct; identical to SEQ ID NO: 625
  source 1..76: mol_type = other RNA
  modified_base 3: mod_base = OTHER; note = 2'-fluorocytosine
  modified_base 4: mod_base = OTHER; note = 2'-Omethyluridine
  modified_base 6: mod_base = OTHER; note = 2'-fluorocytosine
  modified_base 11: mod_base = OTHER; note = 2'-Omethylcytosine
  modified_base 12: mod_base = OTHER; note = Guanosine phosphorothiorate
  modified_base 15: mod_base = OTHER; note = Adenosine phosphorothiorate
  modified_base 19: mod_base = OTHER; note = Adenosine phosphorothiorate
  modified_base 20: mod_base = OTHER; note = 2'-fluorouridine
  modified_base 21: mod_base = OTHER; note = Adenosine phosphorothiorate
  modified_base 22: mod_base = OTHER; note = 2'-Omethylguanosine
  modified_base 28: mod_base = OTHER; note = 2'-Omethyluridine
  modified_base 30: mod_base = OTHER; note = 2'-Omethylguanosine
  modified_base 31: mod_base = OTHER; note = 2'-Omethyladenosine
  modified_base 33: mod_base = OTHER; note = 2'-fluorouridine phosphorothiorate
  modified_base 34: mod_base = OTHER; note = 2'-fluorouridine
  modified_base 37: mod_base = OTHER; note = Adenosine phosphorothiorate
  modified_base 38: mod_base = OTHER; note = 2'-Omethyladenosine
  modified_base 40: mod_base = OTHER; note = 2'-Omethyluridine
  modified_base 41: mod_base = OTHER; note = Cytosine phosphorothiorate
  modified_base 44: mod_base = OTHER; note = Adenosine phosphorothiorate
  modified_base 45: mod_base = OTHER; note = 2'-Omethylguanosine
  modified_base 48: mod_base = OTHER; note = 2'-fluorouridine
  modified_base 49: mod_base = OTHER; note = 2'-fluorocytosine
  modified_base 51: mod_base = OTHER; note = Guanosine phosphorothiorate
  modified_base 52: mod_base = OTHER; note = Guanosine phosphorothiorate
  modified_base 53: mod_base = OTHER; note = 2'-Omethylguanosine
  modified_base 54: mod_base = OTHER; note = 2'-Omethyluridine
  modified_base 58: mod_base = OTHER; note = Adenosine phosphorothiorate
  modified_base 59: mod_base = OTHER; note = 2'-Omethylguanosine
  modified_base 61: mod_base = OTHER; note = 2'-Omethylcytosine phosphorothiorate
  modified_base 63: mod_base = OTHER; note = 2'-Omethylcytosine
  modified_base 64: mod_base = OTHER; note = 2'-fluoroguanosine
  modified_base 69: mod_base = OTHER; note = 2'-Omethyladenosine
  modified_base 70: mod_base = OTHER; note = 2'-fluoroguanosine
  modified_base 71: mod_base = OTHER; note = 2'-fluorouridine phosphorothiorate
  modified_base 72: mod_base = OTHER; note = 2'-Omethylcytosine
  modified_base 74: mod_base = OTHER; note = 2'-fluorocytosine
  modified_base 75: mod_base = OTHER; note = 2'-fluorocytosine

SEQ ID NO: 4794 - RNA, 86 nt, synthetic construct; identical to SEQ ID NO: 3290
  source 1..86: mol_type = other RNA
  modified_base 1: mod_base = OTHER; note = 2'-Omethyladenosine
  modified_base 43: mod_base = OTHER; note = 2'-Omethyladenosine

SEQ ID NO: 4795 - RNA, 76 nt, synthetic construct; identical to SEQ ID NO: 625
  source 1..76: mol_type = other RNA
  modified_base 2: mod_base = OTHER; note = Guanosine phosphorothiorate
  modified_base 3: mod_base = OTHER; note = 2'-Omethylcytosine
  modified_base 6: mod_base = OTHER; note = 2'-Omethylcytosine
  modified_base 8: mod_base = OTHER; note = Uridine phosphorothiorate
  modified_base 11: mod_base = OTHER; note = 2'-Omethylcytosine
  modified_base 12: mod_base = OTHER; note = 2'-fluoroguanosine
  modified_base 13: mod_base = OTHER; note = Cytosine phosphorothiorate
  modified_base 14: mod_base = OTHER; note = Adenosine phosphorothiorate
  modified_base 15: mod_base = OTHER; note = 2'-Omethyladenosine
  modified_base 16: mod_base = OTHER; note = 2'-Omethyluridine
  modified_base 17: mod_base = OTHER; note = Guanosine phosphorothiorate
  modified_base 18: mod_base = OTHER; note = 2'-fluoroguanosine
  modified_base 19: mod_base = OTHER; note = Adenosine phosphorothiorate
  modified_base 20: mod_base = OTHER; note = 2'-Omethyluridine
  modified_base 27: mod_base = OTHER; note = 2'-Omethyluridine
  modified_base 28: mod_base = OTHER; note = 2'-Omethyluridine
  modified_base 29: mod_base = OTHER; note = Guanosine phosphorothiorate
  modified_base 30: mod_base = OTHER; note = 2'-fluoroguanosine
  modified_base 33: mod_base = OTHER; note = Uridine phosphorothiorate
  modified_base 34: mod_base = OTHER; note = 2'-fluorouridine phosphorothiorate
  modified_base 39: mod_base = OTHER; note = 2'-Omethyluridine
  modified_base 40: mod_base = OTHER; note = 2'-Omethyluridine
  modified_base 42: mod_base = OTHER; note = 2'-Omethyladenosine
  modified_base 43: mod_base = OTHER; note = 2'-Omethyladenosine
  modified_base 44: mod_base = OTHER; note = 2'-Omethyladenosine
  modified_base 47: mod_base = OTHER; note = 2'-Omethyluridine
  modified_base 48: mod_base = OTHER; note = 2'-Omethyluridine
  modified_base 49: mod_base = OTHER; note = Cytosine phosphorothiorate
  modified_base 50: mod_base = OTHER; note = 2'-Omethylcytosine
  modified_base 52: mod_base = OTHER; note = Guanosine phosphorothiorate
  modified_base 56: mod_base = OTHER; note = Cytosine phosphorothiorate
  modified_base 65: mod_base = OTHER; note = 2'-fluoroguanosine
  modified_base 66: mod_base = OTHER; note = 2'-Omethylcytosine
  modified_base 67: mod_base = OTHER; note = 2'-Omethylguanosine
  modified_base 73: mod_base = OTHER; note = 2'-Omethylguanosine
  modified_base 76: mod_base = OTHER; note = 2'-Omethyladenosine

SEQ ID NO: 4796 - RNA, 76 nt, synthetic construct; identical to SEQ ID NO: 3318
  source 1..76: mol_type = other RNA
  modified_base 49: mod_base = OTHER; note = 2'-Omethylguanosine
  modified_base 52: mod_base = OTHER; note = 2'-Omethylguanosine

SEQ ID NO: 4797 - RNA, 86 nt, synthetic construct; identical to SEQ ID NO: 3290
  source 1..86: mol_type = other RNA
  modified_base 1: mod_base = OTHER; note = 2'-Omethyladenosine
  modified_base 2: mod_base = OTHER; note = 2'-Omethylcytosine
  modified_base 3: mod_base = OTHER; note = 2'-Omethylcytosine
  modified_base 4: mod_base = OTHER; note = 2'-Omethyladenosine
  modified_base 5: mod_base = OTHER; note = 2'-Omethylguanosine
  modified_base 6: mod_base = OTHER; note = 2'-Omethylguanosine
  modified_base 14: mod_base = OTHER; note = 2'-Omethyladenosine
  modified_base 15: mod_base = OTHER; note = 2'-Omethylguanosine
  modified_base 16: mod_base = OTHER; note = 2'-Omethyluridine
  modified_base 17: mod_base = OTHER; note = 2'-Omethylguanosine
  modified_base 18: mod_base = OTHER; note = 2'-Omethylguanosine
  modified_base 20: mod_base = OTHER; note = 2'-Omethyluridine
  modified_base 25: mod_base = OTHER; note = 2'-Omethylcytosine
  modified_base 41: mod_base = OTHER; note = 2'-fluorocytosine
  modified_base 42: mod_base = OTHER; note = 2'-Omethyladenosine
  modified_base 43: mod_base = OTHER; note = 2'-Omethyladenosine
  modified_base 44: mod_base = OTHER; note = 2'-fluorouridine
  modified_base 59: mod_base = OTHER; note = 2'-Omethylguanosine
  modified_base 60: mod_base = OTHER; note = 2'-Omethyluridine
  modified_base 62: mod_base = OTHER; note = 2'-Omethylguanosine
  modified_base 64: mod_base = OTHER; note = 2'-Omethyluridine
  modified_base 65: mod_base = OTHER; note = Uridine phosphorothiorate
  modified_base 66: mod_base = OTHER; note = 2'-Omethylcytosine
  modified_base 67: mod_base = OTHER; note = 2'-fluoroguanosine
  modified_base 69: mod_base = OTHER; note = 2'-Omethyladenosine
  modified_base 71: mod_base = OTHER; note = 2'-Omethylcytosine
  modified_base 75: mod_base = OTHER; note = 2'-Omethylcytosine
  modified_base 83: mod_base = OTHER; note = 2'-Omethyladenosine

SEQ ID NO: 4798 - RNA, 85 nt, synthetic construct; identical to SEQ ID NO: 3288
  source 1..85: mol_type = other RNA
  modified_base 5: mod_base = OTHER; note = 2'-fluoroguanosine
  modified_base 27: mod_base = OTHER; note = 2'-fluorouridine
  modified_base 50: mod_base = OTHER; note = Adenosine phosphorothiorate
  modified_base 64: mod_base = OTHER; note = Uridine phosphorothiorate
  modified_base 74: mod_base = OTHER; note = 2'-fluorocytosine

SEQ ID NO: 4799 - RNA, 76 nt, synthetic construct; identical to SEQ ID NO: 625
  source 1..76: mol_type = other RNA
  modified_base 1: mod_base = OTHER; note = 2'-Omethylguanosine phosphorothiorate
  modified_base 2: mod_base = OTHER; note = 2'-Omethylguanosine phosphorothiorate
  modified_base 10: mod_base = OTHER; note = 2'-fluoroguanosine
  modified_base 31: mod_base = OTHER; note = Adenosine phosphorothiorate
  modified_base 32: mod_base = OTHER; note = 2'-O-(2-Methoxyethyl) 5-methylcytosine
  modified_base 47: mod_base = OTHER; note = Uridine phosphorothiorate
  modified_base 48: mod_base = OTHER; note = 2'-O-(2-Methoxyethyl) thymine
  modified_base 74: mod_base = OTHER; note = Cytosine phosphorothiorate
  modified_base 75: mod_base = OTHER; note = 2'-Omethylcytosine phosphorothiorate
  modified_base 76: mod_base = OTHER; note = 2'-Omethyladenosine

SEQ ID NO: 4800 - RNA, 75 nt, synthetic construct; identical to SEQ ID NO: 1045
  source 1..75: mol_type = other RNA
  modified_base 2: mod_base = OTHER; note = 2'-Omethylguanosine phosphorothiorate
  modified_base 3: mod_base = OTHER; note = 2'-Omethyluridine phosphorothiorate
  modified_base 4: mod_base = OTHER; note = 2'-Omethyluridine phosphorothiorate
  modified_base 5: mod_base = OTHER; note = 2'-Omethylcytosine phosphorothiorate
  modified_base 18: mod_base = OTHER; note = 2'-Omethylguanosine
  modified_base 19: mod_base = OTHER; note = 2'-fluorouridine phosphorothiorate
  modified_base 23: mod_base = OTHER; note = 2'-Omethylcytosine
  modified_base 27: mod_base = OTHER; note = 2'-fluorocytosine phosphorothiorate
  modified_base 28: mod_base = OTHER; note = 2'-Omethyluridine
  modified_base 51: mod_base = OTHER; note = 2'-Omethyladenosine
  modified_base 55: mod_base = OTHER; note = 2'-Omethylcytosine phosphorothiorate
  modified_base 56: mod_base = OTHER; note = 2'-Omethylguanosine phosphorothiorate
  modified_base 58: mod_base = OTHER; note = 2'-Omethylguanosine
  modified_base 66: mod_base = OTHER; note = 2'-Omethylguanosine
  modified_base 72: mod_base = OTHER; note = 2'-Omethyluridine
  modified_base 74: mod_base = OTHER; note = 2'-Omethylcytosine phosphorothiorate

SEQ ID NO: 4801 - RNA, 85 nt, synthetic construct; identical to SEQ ID NO: 3297
  source 1..85: mol_type = other RNA
  modified_base 2: mod_base = OTHER; note = 2'-Omethylcytosine
  modified_base 5: mod_base = OTHER; note = Uridine phosphorothiorate
  modified_base 19: mod_base = OTHER; note = 2'-Omethyluridine
  modified_base 46: mod_base = OTHER; note = 2'-Omethylguanosine
  modified_base 61: mod_base = OTHER; note = Guanosine phosphorothiorate
  modified_base 82: mod_base = OTHER; note = 2'-Omethylguanosine

SEQ ID NO: 4802 - RNA, 76 nt, synthetic construct; identical to SEQ ID NO: 625
  source 1..76: mol_type = other RNA
  modified_base 3: mod_base = OTHER; note = 2'-Omethylcytosine
  modified_base 4: mod_base = OTHER; note = 2'-Omethyluridine
  modified_base 7: mod_base = OTHER; note = Guanosine phosphorothiorate
  modified_base 10: mod_base = OTHER; note = 2'-fluoroguanosine phosphorothiorate
  modified_base 12: mod_base = OTHER; note = 2'-Omethylguanosine
  modified_base 13: mod_base = OTHER; note = 2'-fluorocytosine
  modified_base 14: mod_base = OTHER; note = 2'-Omethyladenosine
  modified_base 15: mod_base = OTHER; note = 2'-fluoroadenosine
  modified_base 17: mod_base = OTHER; note = 2'-Omethylguanosine
  modified_base 18: mod_base = OTHER; note = Guanosine phosphorothiorate
  modified_base 21: mod_base = OTHER; note = Adenosine phosphorothiorate
  modified_base 22: mod_base = OTHER; note = 2'-fluoroguanosine
  modified_base 23: mod_base = OTHER; note = Cytosine phosphorothiorate
  modified_base 24: mod_base = OTHER; note = 2'-fluoroguanosine
  modified_base 25: mod_base = OTHER; note = 2'-Omethylcytosine
  modified_base 28: mod_base = OTHER; note = Uridine phosphorothiorate
  modified_base 29: mod_base = OTHER; note = 2'-Omethylguanosine
  modified_base 30: mod_base = OTHER; note = 2'-fluoroguanosine
  modified_base 31: mod_base = OTHER; note = 2'-Omethyladenosine
  modified_base 38: mod_base = OTHER; note = Adenosine phosphorothiorate
  modified_base 41: mod_base = OTHER; note = 2'-fluorocytosine phosphorothiorate
  modified_base 47: mod_base = OTHER; note = Uridine phosphorothiorate
  modified_base 48: mod_base = OTHER; note = 2'-fluorouridine
  modified_base 50: mod_base = OTHER; note = 2'-Omethylcytosine
  modified_base 56: mod_base = OTHER; note = Cytosine phosphorothiorate
  modified_base 57: mod_base = OTHER; note = 2'-Omethylguanosine
  modified_base 59: mod_base = OTHER; note = 2'-Omethylguanosine
  modified_base 62: mod_base = OTHER; note = 2'-fluorocytosine
  modified_base 64: mod_base = OTHER; note = Guanosine phosphorothiorate
  modified_base 65: mod_base = OTHER; note = 2'-fluoroguanosine
  modified_base 66: mod_base = OTHER; note = Cytosine phosphorothiorate
  modified_base 67: mod_base = OTHER; note = 2'-Omethylguanosine
  modified_base 68: mod_base = OTHER; note = 2'-Omethylguanosine
  modified_base 69: mod_base = OTHER; note = 2'-fluoroadenosine phosphorothiorate
  modified_base 70: mod_base = OTHER; note = 2'-fluoroguanosine phosphorothiorate
  modified_base 71: mod_base = OTHER; note = 2'-Omethyluridine
  modified_base 74: mod_base = OTHER; note = 2'-Omethylcytosine phosphorothiorate
  modified_base 75: mod_base = OTHER; note = 2'-fluorocytosine

SEQ ID NO: 4803 - RNA, 75 nt, synthetic construct; identical to SEQ ID NO: 3336
  source 1..75: mol_type = other RNA
  modified_base 1: mod_base = OTHER; note = 2'-fluorocytosine phosphorothiorate
  modified_base 2: mod_base = OTHER; note = 2'-Omethylcytosine phosphorothiorate
  modified_base 3: mod_base = OTHER; note = 2'-Omethyluridine phosphorothiorate
  modified_base 4: mod_base = OTHER; note = Guanosine phosphorothiorate
  modified_base 14: mod_base = OTHER; note = 2'-fluoroguanosine
  modified_base 15: mod_base = OTHER; note = 2'-Omethyluridine
  modified_base 19: mod_base = OTHER; note = 2'-fluorouridine
  modified_base 23: mod_base = OTHER; note = Guanosine phosphorothiorate
  modified_base 25: mod_base = OTHER; note = 2'-fluoroadenosine
  modified_base 27: mod_base = OTHER; note = 2'-fluorocytosine phosphorothiorate
  modified_base 29: mod_base = OTHER; note = Guanosine phosphorothiorate
  modified_base 40: mod_base = OTHER; note = 2'-Omethyluridine
  modified_base 42: mod_base = OTHER; note = 2'-fluoroadenosine
  modified_base 46: mod_base = OTHER; note = 2'-Omethyluridine phosphorothiorate
  modified_base 62: mod_base = OTHER; note = 2'-fluorocytosine
  modified_base 63: mod_base = OTHER; note = 2'-Omethyluridine phosphorothiorate
  modified_base 71: mod_base = OTHER; note = 2'-fluorocytosine phosphorothiorate
  modified_base 73: mod_base = OTHER; note = Cytosine phosphorothiorate
  modified_base 74: mod_base = OTHER; note = Cytosine phosphorothiorate

SEQ ID NO: 4804 - RNA, 85 nt, synthetic construct; identical to SEQ ID NO: 3317
  source 1..85: mol_type = other RNA
  modified_base 1: mod_base = OTHER; note = 2'-Omethylguanosine phosphorothiorate
  modified_base 2: mod_base = OTHER; note = 2'-fluorocytosine phosphorothiorate
  modified_base 3: mod_base = OTHER; note = 2'-Omethyluridine phosphorothiorate
  modified_base 4: mod_base = OTHER; note = 2'-Omethylguanosine phosphorothiorate
  modified_base 12: mod_base = OTHER; note = Cytosine phosphorothiorate
  modified_base 14: mod_base = OTHER; note = 2'-Omethyladenosine phosphorothiorate
  modified_base 18: mod_base = OTHER; note = 2'-Omethylguanosine phosphorothiorate
  modified_base 25: mod_base = OTHER; note = 2'-Omethylcytosine
  modified_base 29: mod_base = OTHER; note = 2'-fluoroguanosine
  modified_base 34: mod_base = OTHER; note = 2'-fluorocytosine
  modified_base 46: mod_base = OTHER; note = 2'-fluoroguanosine
  modified_base 47: mod_base = OTHER; note = Guanosine phosphorothiorate
  modified_base 50: mod_base = OTHER; note = Cytosine phosphorothiorate
  modified_base 54: mod_base = OTHER; note = 2'-fluorocytosine
  modified_base 55: mod_base = OTHER; note = 2'-fluorocytosine phosphorothiorate
  modified_base 59: mod_base = OTHER; note = 2'-Omethylcytosine
  modified_base 61: mod_base = OTHER; note = 2'-Omethylguanosine
  modified_base 72: mod_base = OTHER; note = 2'-fluorouridine phosphorothiorate
  modified_base 73: mod_base = OTHER; note = 2'-fluoroguanosine phosphorothiorate
  modified_base 83: mod_base = OTHER; note = 2'-fluorocytosine phosphorothiorate

SEQ ID NO: 4805 - RNA, 75 nt, synthetic construct; identical to SEQ ID NO: 3299
  source 1..75: mol_type = other RNA
  modified_base 10: mod_base = OTHER; note = Cytosine phosphorothiorate
  modified_base 17: mod_base = OTHER; note = 2'-fluoroguanosine
  modified_base 27: mod_base = OTHER; note = 2'-fluorocytosine
  modified_base 38: mod_base = OTHER; note = 2'-fluorouridine
  modified_base 42: mod_base = OTHER; note = 2'-fluoroadenosine
  modified_base 49: mod_base = OTHER; note = 2'-fluoroadenosine
  modified_base 68: mod_base = OTHER; note = 2'-fluoroadenosine phosphorothiorate

SEQ ID NO: 4806 - RNA, 76 nt, synthetic construct; identical to SEQ ID NO: 625
  source 1..76: mol_type = other RNA
  modified_base 1: mod_base = OTHER; note = 2'-Omethylguanosine
  modified_base 4: mod_base = OTHER; note = 2'-Omethyluridine
  modified_base 10: mod_base = OTHER; note = 2'-fluoroguanosine
  modified_base 14: mod_base = OTHER; note = Adenosine phosphorothiorate
  modified_base 15: mod_base = OTHER; note = 2'-fluoroadenosine
  modified_base 16: mod_base = OTHER; note = 2'-fluorouridine
  modified_base 18: mod_base = OTHER; note = 2'-Omethylguanosine
  modified_base 24: mod_base = OTHER; note = 2'-fluoroguanosine
  modified_base 26: mod_base = OTHER; note = 2'-fluoroadenosine phosphorothiorate
  modified_base 28: mod_base = OTHER; note = 2'-Omethyluridine
  modified_base 29: mod_base = OTHER; note = 2'-Omethylguanosine
  modified_base 30: mod_base = OTHER; note = 2'-Omethylguanosine
  modified_base 33: mod_base = OTHER; note = Uridine phosphorothiorate
  modified_base 34: mod_base = OTHER; note = 2'-Omethyluridine
  modified_base 36: mod_base = OTHER; note = Adenosine phosphorothiorate
  modified_base 38: mod_base = OTHER; note = Adenosine phosphorothiorate
  modified_base 39: mod_base = OTHER; note = 2'-Omethyluridine
  modified_base 41: mod_base = OTHER; note = 2'-fluorocytosine
  modified_base 43: mod_base = OTHER; note = 2'-Omethyladenosine
  modified_base 45: mod_base = OTHER; note = 2'-fluoroguanosine
  modified_base 46: mod_base = OTHER; note = 2'-Omethylguanosine
  modified_base 47: mod_base = OTHER; note = 2'-fluorouridine
  modified_base 50: mod_base = OTHER; note = Cytosine phosphorothiorate
  modified_base 51: mod_base = OTHER; note = 2'-Omethylguanosine
  modified_base 52: mod_base = OTHER; note = 2'-Omethylguanosine
  modified_base 53: mod_base = OTHER; note = Guanosine phosphorothiorate
  modified_base 54: mod_base = OTHER; note = 2'-Omethyluridine
  modified_base 55: mod_base = OTHER; note = Uridine phosphorothiorate
  modified_base 56: mod_base = OTHER; note = 2'-Omethylcytosine
  modified_base 57: mod_base = OTHER; note = 2'-fluoroguanosine
  modified_base 58: mod_base = OTHER; note = 2'-fluoroadenosine
  modified_base 62: mod_base = OTHER; note = 2'-Omethylcytosine
  modified_base 63: mod_base = OTHER; note = Cytosine phosphorothiorate
  modified_base 64: mod_base = OTHER; note = 2'-fluoroguanosine
  modified_base 67: mod_base = OTHER; note = 2'-Omethylguanosine
  modified_base 68: mod_base = OTHER; note = 2'-fluoroguanosine
  modified_base 70: mod_base = OTHER; note = 2'-Omethylguanosine

SEQ ID NO: 4807 - RNA, 76 nt, synthetic construct; identical to SEQ ID NO: 625
  source 1..76: mol_type = other RNA
  modified_base 1: mod_base = OTHER; note = 2'-Omethylguanosine phosphorothiorate
  modified_base 2: mod_base = OTHER; note = 2'-Omethylguanosine
  modified_base 3: mod_base = OTHER; note = 2'-Omethylcytosine
  modified_base 4: mod_base = OTHER; note = 2'-Omethyluridine
  modified_base 5: mod_base = OTHER; note = 2'-Omethylcytosine
  modified_base 6: mod_base = OTHER; note = 2'-Omethylcytosine
  modified_base 22: mod_base = OTHER; note = 2'-Omethylguanosine
  modified_base 23: mod_base = OTHER; note = 2'-Omethylcytosine
  modified_base 24: mod_base = OTHER; note = 2'-Omethylguanosine
  modified_base 25: mod_base = OTHER; note = 2'-Omethylcytosine
  modified_base 49: mod_base = OTHER; note = 2'-Omethylcytosine
  modified_base 50: mod_base = OTHER; note = 2'-Omethylcytosine
  modified_base 51: mod_base = OTHER; note = 2'-Omethylguanosine
  modified_base 52: mod_base = OTHER; note = 2'-Omethylguanosine
  modified_base 53: mod_base = OTHER; note = 2'-Omethylguanosine
  modified_base 61: mod_base = OTHER; note = 2'-Omethylcytosine
  modified_base 62: mod_base = OTHER; note = 2'-Omethylcytosine
  modified_base 63: mod_base = OTHER; note = 2'-fluorocytosine
  modified_base 64: mod_base = OTHER; note = 2'-Omethylguanosine
  modified_base 65: mod_base = OTHER; note = 2'-Omethylguanosine
  modified_base 66: mod_base = OTHER; note = 2'-Omethylcytosine
  modified_base 67: mod_base = OTHER; note = 2'-Omethylguanosine
  modified_base 68: mod_base = OTHER; note = 2'-Omethylguanosine
  modified_base 69: mod_base = OTHER; note = 2'-Omethyladenosine
  modified_base 71: mod_base = OTHER; note = 2'-Omethyluridine
  modified_base 72: mod_base = OTHER; note = 2'-Omethylcytosine

SEQ ID NO: 4808 - RNA, 85 nt, synthetic construct; identical to SEQ ID NO: 3297
  source 1..85: mol_type = other RNA
  modified_base 61: mod_base = OTHER; note = 2'-Omethylguanosine
  modified_base 74: mod_base = OTHER; note = 2'-Omethylcytosine

SEQ ID NO: 4809 - RNA, 76 nt, synthetic construct; identical to SEQ ID NO: 3295
  source 1..76: mol_type = other RNA
  modified_base 1: mod_base = OTHER; note = 2'-Omethylcytosine phosphorothiorate
  modified_base 2: mod_base = OTHER; note = 2'-Omethylcytosine
  modified_base 14: mod_base = OTHER; note = 2'-fluoroadenosine phosphorothiorate
  modified_base 27: mod_base = OTHER; note = 2'-Omethylguanosine
  modified_base 37: mod_base = OTHER; note = 2'-Omethylguanosine
  modified_base 42: mod_base = OTHER; note = Uridine phosphorothiorate
  modified_base 43: mod_base = OTHER; note = 2'-fluorouridine phosphorothiorate
  modified_base 48: mod_base = OTHER; note = 2'-Omethylcytosine
  modified_base 52: mod_base = OTHER; note = 2'-fluoroguanosine phosphorothiorate
  modified_base 75: mod_base = OTHER; note = Cytosine phosphorothiorate
  modified_base 76: mod_base = OTHER; note = 2'-fluoroadenosine

SEQ ID NO: 4810 - RNA, 75 nt, synthetic construct; identical to SEQ ID NO: 3311
  source 1..75: mol_type = other RNA
  modified_base 1: mod_base = OTHER; note = 2'-Omethylguanosine
  modified_base 2: mod_base = OTHER; note = 2'-Omethylguanosine phosphorothiorate
  modified_base 12: mod_base = OTHER; note = Guanosine phosphorothiorate
  modified_base 16: mod_base = OTHER; note = 2'-fluorouridine
  modified_base 19: mod_base = OTHER; note = 2'-fluorouridine
  modified_base 31: mod_base = OTHER; note = 2'-fluoroadenosine
  modified_base 40: mod_base = OTHER; note = Cytosine phosphorothiorate
  modified_base 41: mod_base = OTHER; note = 2'-fluorocytosine
  modified_base 43: mod_base = OTHER; note = 2'-fluoroguanosine
  modified_base 44: mod_base = OTHER; note = 2'-fluorocytosine
  modified_base 51: mod_base = OTHER; note = 2'-fluoroadenosine
  modified_base 55: mod_base = OTHER; note = 2'-fluorocytosine phosphorothiorate
  modified_base 74: mod_base = OTHER; note = Cytosine phosphorothiorate
  modified_base 75: mod_base = OTHER; note = 2'-fluoroadenosine

SEQ ID NO: 4811 - RNA, 75 nt, synthetic construct; identical to SEQ ID NO: 3311
  source 1..75: mol_type = other RNA
  modified_base 2: mod_base = OTHER; note = 2'-Omethylguanosine phosphorothiorate
  modified_base 17: mod_base = OTHER; note = 2'-Omethylguanosine
  modified_base 19: mod_base = OTHER; note = 2'-fluorouridine
  modified_base 21: mod_base = OTHER; note = 2'-fluoroadenosine
  modified_base 44: mod_base = OTHER; note = 2'-fluorocytosine
  modified_base 53: mod_base = OTHER; note = 2'-fluorouridine
  modified_base 56: mod_base = OTHER; note = 2'-fluoroguanosine
  modified_base 59: mod_base = OTHER; note = 2'-Omethyluridine
  modified_base 73: mod_base = OTHER; note = Cytosine phosphorothiorate
  modified_base 74: mod_base = OTHER; note = 2'-Omethylcytosine

SEQ ID NO: 4812 - RNA, 86 nt, synthetic construct; identical to SEQ ID NO: 3290
  source 1..86: mol_type = other RNA
  modified_base 1: mod_base = OTHER; note = 2'-Omethyladenosine
  modified_base 18: mod_base = OTHER; note = 2'-Omethylguanosine

SEQ ID NO: 4813 - RNA, 75 nt, synthetic construct; identical to SEQ ID NO: 1045
  source 1..75: mol_type = other RNA
  modified_base 10: mod_base = OTHER; note = 2'-Omethylguanosine
  modified_base 11: mod_base = OTHER; note = 2'-Omethyluridine
  modified_base 12: mod_base = OTHER; note = 2'-Omethylguanosine
  modified_base 13: mod_base = OTHER; note = 2'-Omethyluridine
  modified_base 22: mod_base = OTHER; note = 2'-Omethylguanosine
  modified_base 23: mod_base = OTHER; note = 2'-Omethylcytosine
  modified_base 24: mod_base = OTHER; note = 2'-Omethyladenosine
  modified_base 25: mod_base = OTHER; note = 2'-Omethylcytosine
  modified_base 48: mod_base = OTHER; note = 2'-Omethylcytosine
  modified_base 49: mod_base = OTHER; note = 2'-Omethylcytosine
  modified_base 50: mod_base = OTHER; note = 2'-Omethylguanosine
  modified_base 51: mod_base = OTHER; note = 2'-Omethyladenosine
  modified_base 52: mod_base = OTHER; note = 2'-Omethylguanosine

SEQ ID NO: 4814 - RNA, 76 nt, synthetic construct; identical to SEQ ID NO: 3490
  source 1..76: mol_type = other RNA
  modified_base 1: mod_base = OTHER; note = 2'-Omethylguanosine
  modified_base 2: mod_base = OTHER; note = 2'-Omethylguanosine
  modified_base 3: mod_base = OTHER; note = 2'-Omethylcytosine
  modified_base 4: mod_base = OTHER; note = 2'-Omethyluridine
  modified_base 5: mod_base = OTHER; note = 2'-Omethylcytosine
  modified_base 6: mod_base = OTHER; note = 2'-Omethylcytosine
  modified_base 16: mod_base = OTHER; note = 2'-Omethyluridine
  modified_base 17: mod_base = OTHER; note = 2'-Omethylguanosine
  modified_base 18: mod_base = OTHER; note = 2'-Omethylguanosine
  modified_base 20: mod_base = OTHER; note = 2'-Omethyluridine
  modified_base 25: mod_base = OTHER; note = 2'-Omethylcytosine
  modified_base 33: mod_base = OTHER; note = 2'-fluorouridine
  modified_base 35: mod_base = OTHER; note = Cytosine phosphorothiorate
  modified_base 37: mod_base = OTHER; note = Adenosine phosphorothiorate
  modified_base 38: mod_base = OTHER; note = Adenosine phosphorothiorate
  modified_base 41: mod_base = OTHER; note = 2'-Omethylcytosine
  modified_base 42: mod_base = OTHER; note = 2'-Omethyladenosine
  modified_base 43: mod_base = OTHER; note = 2'-Omethyladenosine
  modified_base 44: mod_base = OTHER; note = 2'-Omethyladenosine
  modified_base 49: mod_base = OTHER; note = 2'-Omethylguanosine
  modified_base 50: mod_base = OTHER; note = 2'-Omethylcytosine
  modified_base 52: mod_base = OTHER; note = 2'-Omethylguanosine
  modified_base 54: mod_base = OTHER; note = Uridine phosphorothiorate
  modified_base 55: mod_base = OTHER; note = Uridine phosphorothiorate
  modified_base 61: mod_base = OTHER; note = 2'-Omethylcytosine
  modified_base 65: mod_base = OTHER; note = 2'-Omethylcytosine
  modified_base 73: mod_base = OTHER; note = 2'-Omethylguanosine

SEQ ID NO: 4815 - RNA, 73 nt, synthetic construct; identical to SEQ ID NO: 935
  source 1..73: mol_type = other RNA
  modified_base 1: mod_base = OTHER; note = 2'-Omethylguanosine phosphorothiorate
  modified_base 2: mod_base = OTHER; note = 2'-Omethylguanosine
  modified_base 3: mod_base = OTHER; note = 2'-Omethylcytosine
  modified_base 4: mod_base = OTHER; note = 2'-Omethyluridine
  modified_base 5: mod_base = OTHER; note = 2'-Omethylcytosine
  modified_base 6: mod_base = OTHER; note = 2'-Omethylcytosine
  modified_base 43: mod_base = OTHER; note = 2'-Omethyladenosine
  modified_base 44: mod_base = OTHER; note = 2'-Omethyladenosine
  modified_base 45: mod_base = OTHER; note = 2'-Omethylguanosine
  modified_base 46: mod_base = OTHER; note = 2'-fluoroguanosine
  modified_base 48: mod_base = OTHER; note = 2'-fluorouridine
  modified_base 49: mod_base = OTHER; note = 2'-Omethylcytosine
  modified_base 50: mod_base = OTHER; note = 2'-Omethylcytosine
  modified_base 73: mod_base = OTHER; note = 2'-Omethylguanosine

SEQ ID NO: 4816 - RNA, 76 nt, synthetic construct; identical to SEQ ID NO: 625
  source 1..76: mol_type = other RNA
  modified_base 1: mod_base = OTHER; note = 2'-Omethylguanosine
  modified_base 17: mod_base = OTHER; note = 2'-Omethylguanosine
  modified_base 18: mod_base = OTHER; note = 2'-Omethylguanosine
  modified_base 50: mod_base = OTHER; note = 2'-Omethylcytosine
  modified_base 52: mod_base = OTHER; note = 2'-Omethylguanosine
  modified_base 55: mod_base = OTHER; note = Uridine phosphorothiorate
  modified_base 73: mod_base = OTHER; note = 2'-Omethylguanosine

SEQ ID NO: 4817 - RNA, 76 nt, synthetic construct; identical to SEQ ID NO: 625
  source 1..76: mol_type = other RNA
  modified_base 4: mod_base = OTHER; note = 2'-fluorouridine
  modified_base 5: mod_base = OTHER; note = 2'-fluorocytosine phosphorothiorate
  modified_base 6: mod_base = OTHER; note = 2'-fluorocytosine
  modified_base 8: mod_base = OTHER; note = Uridine phosphorothiorate
  modified_base 10: mod_base = OTHER; note = 2'-fluoroguanosine
  modified_base 11: mod_base = OTHER; note = 2'-fluorocytosine
  modified_base 12: mod_base = OTHER; note = 2'-Omethylguanosine
  modified_base 13: mod_base = OTHER; note = Cytosine phosphorothiorate
  modified_base 18: mod_base = OTHER; note = Guanosine phosphorothiorate
  modified_base 20: mod_base = OTHER; note = 2'-Omethyluridine phosphorothiorate
  modified_base 21: mod_base = OTHER; note = Adenosine phosphorothiorate
  modified_base 26: mod_base = OTHER; note = 2'-Omethyladenosine
  modified_base 28: mod_base = OTHER; note = 2'-Omethyluridine
  modified_base 31: mod_base = OTHER; note = 2'-Omethyladenosine
  modified_base 34: mod_base = OTHER; note = 2'-Omethyluridine
  modified_base 38: mod_base = OTHER; note = Adenosine phosphorothiorate
  modified_base 39: mod_base = OTHER; note = 2'-Omethyluridine
  modified_base 43: mod_base = OTHER; note = Adenosine phosphorothiorate
  modified_base 47: mod_base = OTHER; note = 2'-fluorouridine
  modified_base 48: mod_base = OTHER; note = 2'-fluorouridine
  modified_base 49: mod_base = OTHER; note = 2'-fluorocytosine
  modified_base 50: mod_base = OTHER; note = 2'-Omethylcytosine
  modified_base 52: mod_base = OTHER; note = 2'-fluoroguanosine
  modified_base 53: mod_base = OTHER; note = 2'-Omethylguanosine
  modified_base 55: mod_base = OTHER; note = Uridine phosphorothiorate
  modified_base 56: mod_base = OTHER; note = 2'-Omethylcytosine
  modified_base 57: mod_base = OTHER; note = 2'-Omethylguanosine
  modified_base 59: mod_base = OTHER; note = Guanosine phosphorothiorate
  modified_base 60: mod_base = OTHER; note = 2'-Omethyluridine phosphorothiorate
  modified_base 61: mod_base = OTHER; note = 2'-fluorocytosine
  modified_base 63: mod_base = OTHER; note = 2'-Omethylcytosine
  modified_base 65: mod_base = OTHER; note = 2'-Omethylguanosine
  modified_base 68: mod_base = OTHER; note = Guanosine phosphorothiorate
  modified_base 69: mod_base = OTHER; note = 2'-fluoroadenosine
  modified_base 73: mod_base = OTHER; note = 2'-fluoroguanosine

SEQ ID NO: 4818 - RNA, 76 nt, synthetic construct
  source 1..76: mol_type = other RNA
ggctccctggcgcaatggacagcgcattggacttcaaattcaaaggttccgggttcgagtcccgggggagtcgcca

SEQ ID NO: 4819 - RNA, 75 nt, synthetic construct; identical to SEQ ID NO: 1045
  source 1..75: mol_type = other RNA
  modified_base 1: mod_base = OTHER; note = 2'-Omethylguanosine phosphorothiorate
  modified_base 3: mod_base = OTHER; note = 2'-fluorouridine phosphorothiorate
  modified_base 13: mod_base = OTHER; note = 2'-fluorouridine
  modified_base 17: mod_base = OTHER; note = 2'-fluoroguanosine phosphorothiorate
  modified_base 18: mod_base = OTHER; note = 2'-Omethylguanosine
  modified_base 21: mod_base = OTHER; note = 2'-fluoroadenosine
  modified_base 31: mod_base = OTHER; note = 2'-fluoroadenosine
  modified_base 40: mod_base = OTHER; note = 2'-fluorocytosine
  modified_base 49: mod_base = OTHER; note = 2'-fluorocytosine
  modified_base 61: mod_base = OTHER; note = 2'-fluorouridine
  modified_base 64: mod_base = OTHER; note = 2'-fluoroguanosine phosphorothiorate
  modified_base 70: mod_base = OTHER; note = Cytosine phosphorothiorate
  modified_base 71: mod_base = OTHER; note = 2'-fluorocytosine

SEQ ID NO: 4820 - RNA, 75 nt, synthetic construct; identical to SEQ ID NO: 3306
  source 1..75: mol_type = other RNA
  modified_base 13: mod_base = OTHER; note = 2'-Omethylcytosine
  modified_base 51: mod_base = OTHER; note = 2'-Omethyluridine

SEQ ID NO: 4821 - RNA, 75 nt, synthetic construct; identical to SEQ ID NO: 3306
  source 1..75: mol_type = other RNA
  modified_base 1: mod_base = OTHER; note = 2'-Omethylguanosine
  modified_base 53: mod_base = OTHER; note = 2'-Omethyluridine
  modified_base 55: mod_base = OTHER; note = 2'-Omethylcytosine
  modified_base 56: mod_base = OTHER; note = 2'-fluoroadenosine
  modified_base 57: mod_base = OTHER; note = 2'-fluoroadenosine
  modified_base 58: mod_base = OTHER; note = 2'-Omethyladenosine
  modified_base 59: mod_base = OTHER; note = 2'-fluorouridine
  modified_base 72: mod_base = OTHER; note = 2'-Omethyladenosine

SEQ ID NO: 4822 - DNA, 76 bp, synthetic construct; identical to SEQ ID NO: 1924
  source 1..76: mol_type = other DNA
  modified_base 1: mod_base = OTHER; note = 2'-Omethylguanosine phosphorothiorate
  modified_base 2: mod_base = OTHER; note = 2'-Omethylguanosine
  modified_base 3: mod_base = OTHER; note = 2'-fluorocytosine
  modified_base 9: mod_base = OTHER; note = 2'-fluoroguanosine
  modified_base 13: mod_base = OTHER; note = Cytosine phosphorothiorate
  modified_base 14: mod_base = OTHER; note = 2'-O-(2-Methoxyethyl) adenosine
  modified_base 20: mod_base = OTHER; note = 2'-fluorouridine phosphorothiorate
  modified_base 21: mod_base = OTHER; note = deoxyadenosine phosphorothiorate
  modified_base 22: mod_base = OTHER; note = 2'-fluoroguanosine
  modified_base 25: mod_base = OTHER; note = 2'-fluorocytosine
  modified_base 27: mod_base = OTHER; note = Uridine phosphorothiorate
  modified_base 30: mod_base = OTHER; note = Guanosine phosphorothiorate
  modified_base 31: mod_base = OTHER; note = Adenosine phosphorothiorate
  modified_base 32: mod_base = OTHER; note = 2'-Omethylcytosine phosphorothiorate
  modified_base 33: mod_base = OTHER; note = 2'-O-(2-Methoxyethyl) thymine
  modified_base 36: mod_base = OTHER; note = Adenosine phosphorothiorate
  modified_base 37: mod_base = OTHER; note = 2'-fluoroadenosine
  modified_base 38: mod_base = OTHER; note = Adenosine phosphorothiorate
  modified_base 39: mod_base = OTHER; note = 2'-fluorouridine
  modified_base 40: mod_base = OTHER; note = Uridine phosphorothiorate
  modified_base 41: mod_base = OTHER; note = 2'-O-(2-Methoxyethyl) 5-methylcytosine
  modified_base 46: mod_base = OTHER; note = 2'-Omethylguanosine
  modified_base 47: mod_base = OTHER; note = 2'-Omethyluridine
  modified_base 49: mod_base = OTHER; note = 2'-fluorocytosine
  modified_base 53: mod_base = OTHER; note = 2'-Omethylguanosine phosphorothiorate
  modified_base 54: mod_base = OTHER; note = 2'-fluorouridine
  modified_base 63: mod_base = OTHER; note = Cytosine phosphorothiorate
  modified_base 68: mod_base = OTHER; note = 2'-Omethylguanosine phosphorothiorate
  modified_base 69: mod_base = OTHER; note = 2'-fluoroadenosine phosphorothiorate
  modified_base 74: mod_base = OTHER; note = Cytosine phosphorothiorate
  modified_base 75: mod_base = OTHER; note = 2'-Omethylcytosine
  misc_feature 1..15: note = RNA
  misc_feature 16: note = DNA
  misc_feature 17..20: note = RNA
  misc_feature 21: note = DNA
  misc_feature 22..27: note = RNA
  misc_feature 28: note = DNA
  misc_feature 29..50: note = RNA
  misc_feature 51..52: note = DNA
  misc_feature 53..69: note = RNA
  misc_feature 70: note = DNA
  misc_feature 71..76: note = RNA

SEQ ID NO: 4823 - RNA, 75 nt, synthetic construct; identical to SEQ ID NO: 3299
  source 1..75: mol_type = other RNA
  modified_base 1: mod_base = OTHER; note = 2'-Omethylcytosine
  modified_base 15: mod_base = OTHER; note = 2'-fluorouridine
  modified_base 19: mod_base = OTHER; note = 2'-fluorouridine
  modified_base 21: mod_base = OTHER; note = 2'-fluoroguanosine
  modified_base 23: mod_base = OTHER; note = 2'-fluoroguanosine
  modified_base 35: mod_base = OTHER; note = 2'-fluoroadenosine
  modified_base 37: mod_base = OTHER; note = 2'-fluoroadenosine
  modified_base 39: mod_base = OTHER; note = Cytosine phosphorothiorate
  modified_base 46: mod_base = OTHER; note = 2'-fluorouridine
  modified_base 47: mod_base = OTHER; note = 2'-fluorocytosine
  modified_base 72: mod_base = OTHER; note = 2'-Omethylguanosine
  modified_base 74: mod_base = OTHER; note = Cytosine phosphorothiorate

SEQ ID NO: 4824 - RNA, 76 nt, synthetic construct; identical to SEQ ID NO: 625
  source 1..76: mol_type = other RNA
  modified_base 1: mod_base = OTHER; note = 2'-Omethylguanosine
  modified_base 2: mod_base = OTHER; note = 2'-Omethylguanosine
  modified_base 3: mod_base = OTHER; note = 2'-Omethylcytosine
  modified_base 4: mod_base = OTHER; note = 2'-Omethyluridine
  modified_base 6: mod_base = OTHER; note = 2'-Omethylcytosine phosphorothiorate
  modified_base 7: mod_base = OTHER; note = Guanosine phosphorothiorate
  modified_base 9: mod_base = OTHER; note = 2'-Omethylguanosine phosphorothiorate
  modified_base 10: mod_base = OTHER; note = 2'-Omethylguanosine
  modified_base 11: mod_base = OTHER; note = 2'-Omethylcytosine
  modified_base 12: mod_base = OTHER; note = 2'-Omethylguanosine
  modified_base 13: mod_base = OTHER; note = 2'-Omethylcytosine
  modified_base 14: mod_base = OTHER; note = 2'-Omethyladenosine
  modified_base 15: mod_base = OTHER; note = 2'-fluoroadenosine phosphorothiorate
  modified_base 16: mod_base = OTHER; note = 2'-Omethyluridine
  modified_base 17: mod_base = OTHER; note = 2'-Omethylguanosine
  modified_base 18: mod_base = OTHER; note = 2'-fluoroguanosine phosphorothiorate
  modified_base 19: mod_base = OTHER; note = 2'-Omethyladenosine
  modified_base 20: mod_base = OTHER; note = 2'-Omethyluridine
  modified_base 21: mod_base = OTHER; note = 2'-fluoroadenosine phosphorothiorate
  modified_base 23: mod_base = OTHER; note = 2'-Omethylcytosine
  modified_base 24: mod_base = OTHER; note = 2'-Omethylguanosine
  modified_base 25: mod_base = OTHER; note = 2'-Omethylcytosine
  modified_base 26: mod_base = OTHER; note = Adenosine phosphorothiorate
  modified_base 28: mod_base = OTHER; note = 2'-Omethyluridine phosphorothiorate
  modified_base 29: mod_base = OTHER; note = 2'-fluoroguanosine phosphorothiorate
  modified_base 30: mod_base = OTHER; note = 2'-Omethylguanosine phosphorothiorate
  modified_base 31: mod_base = OTHER; note = 2'-Omethyladenosine phosphorothiorate
  modified_base 32: mod_base = OTHER; note = 2'-Omethylcytosine phosphorothiorate
  modified_base 33: mod_base = OTHER; note = 2'-fluorouridine
  modified_base 34: mod_base = OTHER; note = 2'-Omethyluridine phosphorothiorate
  modified_base 35: mod_base = OTHER; note = Cytosine phosphorothiorate
  modified_base 36: mod_base = OTHER; note = 2'-Omethyladenosine phosphorothiorate
  modified_base 37: mod_base = OTHER; note = Adenosine phosphorothiorate
  modified_base 38: mod_base = OTHER; note = Adenosine phosphorothiorate
  modified_base 39: mod_base = OTHER; note = 2'-Omethyluridine phosphorothiorate
  modified_base 40: mod_base = OTHER; note = 2'-Omethyluridine
  modified_base 41: mod_base = OTHER; note = 2'-Omethylcytosine
  modified_base 42: mod_base = OTHER; note = Adenosine phosphorothiorate
  modified_base 43: mod_base = OTHER; note = Adenosine phosphorothiorate
  modified_base 44: mod_base = OTHER; note = 2'-Omethyladenosine
  modified_base 48: mod_base = OTHER; note = 2'-fluorouridine
  modified_base 49: mod_base = OTHER; note = 2'-Omethylcytosine
  modified_base 50: mod_base = OTHER; note = 2'-Omethylcytosine
  modified_base 52: mod_base = OTHER; note = 2'-Omethylguanosine
  modified_base 53: mod_base = OTHER; note = 2'-fluoroguanosine
  modified_base 54: mod_base = OTHER; note = 2'-fluorouridine
  modified_base 55: mod_base = OTHER; note = Uridine phosphorothiorate
  modified_base 56: mod_base = OTHER; note = Cytosine phosphorothiorate
  modified_base 57: mod_base = OTHER; note = 2'-Omethylguanosine
  modified_base 59: mod_base = OTHER; note = 2'-Omethylguanosine
  modified_base 60: mod_base = OTHER; note = 2'-Omethyluridine phosphorothiorate
  modified_base 61: mod_base = OTHER; note = 2'-Omethylcytosine
  modified_base 62: mod_base = OTHER; note = 2'-Omethylcytosine
  modified_base 63: mod_base = OTHER; note = 2'-fluorocytosine
  modified_base 64: mod_base = OTHER; note = 2'-Omethylguanosine
  modified_base 65: mod_base = OTHER; note = Guanosine phosphorothiorate
  modified_base 66: mod_base = OTHER; note = 2'-Omethylcytosine
  modified_base 67: mod_base = OTHER; note = 2'-Omethylguanosine phosphorothiorate
  modified_base 68: mod_base = OTHER; note = 2'-fluoroguanosine
  modified_base 69: mod_base = OTHER; note = 2'-fluoroadenosine
  modified_base 72: mod_base = OTHER; note = 2'-Omethylcytosine
  modified_base 73: mod_base = OTHER; note = 2'-Omethylguanosine
  modified_base 74: mod_base = OTHER; note = 2'-fluorocytosine phosphorothiorate
  modified_base 75: mod_base = OTHER; note = 2'-fluorocytosine
  modified_base 76: mod_base = OTHER; note = 2'-fluoroadenosine

SEQ ID NO: 4825 - RNA, 76 nt, synthetic construct; identical to SEQ ID NO: 3795
  source 1..76: mol_type = other RNA
  modified_base 1: mod_base = OTHER; note = 2'-Omethylguanosine
  modified_base 13: mod_base = OTHER; note = 2'-Omethyluridine
  modified_base 14: mod_base = OTHER; note = 2'-Omethyladenosine
  modified_base 15: mod_base = OTHER; note = 2'-Omethyladenosine
  modified_base 16: mod_base = OTHER; note = 2'-Omethyluridine
  modified_base 17: mod_base = OTHER; note = 2'-Omethylguanosine
  modified_base 18: mod_base = OTHER; note = 2'-Omethylguanosine
  modified_base 19: mod_base = OTHER; note = Adenosine phosphorothiorate
  modified_base 20: mod_base = OTHER; note = 2'-Omethyluridine
  modified_base 21: mod_base = OTHER; note = Adenosine phosphorothiorate
  modified_base 25: mod_base = OTHER; note = 2'-Omethylcytosine
  modified_base 41: mod_base = OTHER; note = 2'-fluorocytosine
  modified_base 42: mod_base = OTHER; note = 2'-Omethylguanosine
  modified_base 43: mod_base = OTHER; note = 2'-Omethylguanosine
  modified_base 44: mod_base = OTHER; note = 2'-fluoroguanosine
  modified_base 49: mod_base = OTHER; note = 2'-Omethylguanosine
  modified_base 50: mod_base = OTHER; note = 2'-Omethylcytosine
  modified_base 51: mod_base = OTHER; note = 2'-Omethylguanosine
  modified_base 52: mod_base = OTHER; note = 2'-Omethylguanosine
  modified_base 53: mod_base = OTHER; note = 2'-Omethylguanosine
  modified_base 54: mod_base = OTHER; note = Uridine phosphorothiorate
  modified_base 55: mod_base = OTHER; note = Uridine phosphorothiorate
  modified_base 61: mod_base = OTHER; note = 2'-Omethylcytosine
  modified_base 65: mod_base = OTHER; note = 2'-Omethyluridine
  modified_base 73: mod_base = OTHER; note = 2'-Omethylguanosine

SEQ ID NO: 4826 - RNA, 75 nt, synthetic construct; identical to SEQ ID NO: 3306
  source 1..75: mol_type = other RNA
  modified_base 1: mod_base = OTHER; note = 2'-Omethylguanosine
  modified_base 48: mod_base = OTHER; note = 2'-Omethylguanosine

SEQ ID NO: 4827 - RNA, 76 nt, synthetic construct; identical to SEQ ID NO: 625
  source 1..76: mol_type = other RNA
  modified_base 1: mod_base = OTHER; note = 2'-Omethylguanosine
  modified_base 2: mod_base = OTHER; note = 2'-Omethylguanosine
  modified_base 3: mod_base = OTHER; note = 2'-Omethylcytosine
  modified_base 4: mod_base = OTHER; note = 2'-Omethyluridine
  modified_base 5: mod_base = OTHER; note = 2'-Omethylcytosine
  modified_base 6: mod_base = OTHER; note = 2'-Omethylcytosine
  modified_base 14: mod_base = OTHER; note = 2'-Omethyladenosine
  modified_base 15: mod_base = OTHER; note = 2'-fluoroadenosine
  modified_base 16: mod_base = OTHER; note = 2'-Omethyluridine
  modified_base 17: mod_base = OTHER; note = 2'-Omethylguanosine
  modified_base 18: mod_base = OTHER; note = 2'-Omethylguanosine
  modified_base 19: mod_base = OTHER; note = 2'-fluoroadenosine
  modified_base 20: mod_base = OTHER; note = 2'-Omethyluridine
  modified_base 33: mod_base = OTHER; note = 2'-fluorouridine
  modified_base 35: mod_base = OTHER; note = Cytosine phosphorothiorate
  modified_base 37: mod_base = OTHER; note = Adenosine phosphorothiorate
  modified_base 38: mod_base = OTHER; note = Adenosine phosphorothiorate
  modified_base 49: mod_base = OTHER; note = 2'-Omethylcytosine
  modified_base 50: mod_base = OTHER; note = 2'-Omethylcytosine
  modified_base 51: mod_base = OTHER; note = 2'-Omethylguanosine
  modified_base 52: mod_base = OTHER; note = 2'-fluoroguanosine
  modified_base 53: mod_base = OTHER; note = 2'-Omethylguanosine
  modified_base 56: mod_base = OTHER; note = 2'-Omethylcytosine
  modified_base 61: mod_base = OTHER; note = 2'-Omethylcytosine
  modified_base 62: mod_base = OTHER; note = 2'-Omethylcytosine
  modified_base 63: mod_base = OTHER; note = 2'-fluorocytosine
  modified_base 64: mod_base = OTHER; note = 2'-Omethylguanosine
  modified_base 65: mod_base = OTHER; note = 2'-Omethylguanosine
  modified_base 66: mod_base = OTHER; note = 2'-Omethylcytosine
  modified_base 67: mod_base = OTHER; note = 2'-Omethylguanosine
  modified_base 68: mod_base = OTHER; note = 2'-Omethylguanosine
  modified_base 69: mod_base = OTHER; note = 2'-fluoroadenosine
  modified_base 70: mod_base = OTHER; note = 2'-fluoroguanosine
  modified_base 73: mod_base = OTHER; note = 2'-Omethylguanosine
  modified_base 75: mod_base = OTHER; note = 2'-fluorocytosine phosphorothiorate

SEQ ID NO: 4828 - RNA, 85 nt, synthetic construct; identical to SEQ ID NO: 3297
  source 1..85: mol_type = other RNA
  modified_base 1: mod_base = OTHER; note = 2'-Omethylguanosine
  modified_base 63: mod_base = OTHER; note = 2'-Omethyluridine phosphorothiorate
  modified_base 64: mod_base = OTHER; note = Uridine phosphorothiorate
  modified_base 65: mod_base = OTHER; note = 2'-Omethylcytosine
  modified_base 66: mod_base = OTHER; note = 2'-fluoroguanosine
  modified_base 67: mod_base = OTHER; note = 2'-fluoroadenosine phosphorothiorate
  modified_base 68: mod_base = OTHER; note = 2'-Omethyladenosine
  modified_base 69: mod_base = OTHER; note = 2'-fluorouridine
  modified_base 82: mod_base = OTHER; note = 2'-Omethylguanosine

SEQ ID NO: 4829 - RNA, 76 nt, synthetic construct; identical to SEQ ID NO: 625
  source 1..76: mol_type = other RNA
  modified_base 1: mod_base = OTHER; note = 2'-Omethylguanosine phosphorothiorate
  modified_base 2: mod_base = OTHER; note = 2'-Omethylguanosine phosphorothiorate
  modified_base 3: mod_base = OTHER; note = 2'-Omethylcytosine
  modified_base 4: mod_base = OTHER; note = 2'-Omethyluridine
  modified_base 5: mod_base = OTHER; note = 2'-Omethylcytosine
  modified_base 6: mod_base = OTHER; note = 2'-Omethylcytosine
  modified_base 14: mod_base = OTHER; note = 2'-Omethyladenosine
  modified_base 15: mod_base = OTHER; note = 2'-Omethyladenosine
  modified_base 16: mod_base = OTHER; note = 2'-Omethyluridine
  modified_base 17: mod_base = OTHER; note = 2'-Omethylguanosine
  modified_base 18: mod_base = OTHER; note = 2'-Omethylguanosine
  modified_base 20: mod_base = OTHER; note = 2'-Omethyluridine
  modified_base 25: mod_base = OTHER; note = 2'-Omethylcytosine
  modified_base 33: mod_base = OTHER; note = 2'-fluorouridine
  modified_base 35: mod_base = OTHER; note = Cytosine phosphorothiorate
  modified_base 37: mod_base = OTHER; note = Adenosine phosphorothiorate
  modified_base 38: mod_base = OTHER; note = Adenosine phosphorothiorate
  modified_base 49: mod_base = OTHER; note = 2'-Omethylcytosine
  modified_base 50: mod_base = OTHER; note = 2'-Omethylcytosine
  modified_base 52: mod_base = OTHER; note = 2'-Omethylguanosine
  modified_base 54: mod_base = OTHER; note = 2'-Omethyluridine
  modified_base 55: mod_base = OTHER; note = Uridine phosphorothiorate
  modified_base 56: mod_base = OTHER; note = 2'-Omethylcytosine
  modified_base 57: mod_base = OTHER; note = 2'-fluoroguanosine
  modified_base 59: mod_base = OTHER; note = 2'-Omethylguanosine
  modified_base 61: mod_base = OTHER; note = 2'-Omethylcytosine
  modified_base 62: mod_base = OTHER; note = 2'-Omethylcytosine
  modified_base 63: mod_base = OTHER; note = 2'-fluorocytosine
  modified_base 64: mod_base = OTHER; note = 2'-Omethylguanosine
  modified_base 65: mod_base = OTHER; note = 2'-Omethylguanosine
  modified_base 74: mod_base = OTHER; note = Cytosine phosphorothiorate
  modified_base 75: mod_base = OTHER; note = 2'-Omethylcytosine phosphorothiorate
  modified_base 76: mod_base = OTHER; note = 2'-Omethyladenosine

SEQ ID NO: 4830 - RNA, 75 nt, synthetic construct; identical to SEQ ID NO: 1045
  source 1..75: mol_type = other RNA
  modified_base 1: mod_base = OTHER; note = 2'-Omethylguanosine
  modified_base 14: mod_base = OTHER; note = 2'-Omethyladenosine
  modified_base 15: mod_base = OTHER; note = 2'-Omethyladenosine
  modified_base 16: mod_base = OTHER; note = 2'-Omethyluridine
  modified_base 17: mod_base = OTHER; note = 2'-Omethylguanosine
  modified_base 18: mod_base = OTHER; note = 2'-Omethylguanosine
  modified_base 19: mod_base = OTHER; note = Uridine phosphorothiorate
  modified_base 20: mod_base = OTHER; note = 2'-Omethyladenosine
  modified_base 21: mod_base = OTHER; note = Adenosine phosphorothiorate
  modified_base 33: mod_base = OTHER; note = 2'-fluorouridine
  modified_base 34: mod_base = OTHER; note = 2'-Omethyluridine
  modified_base 35: mod_base = OTHER; note = Uridine phosphorothiorate
  modified_base 37: mod_base = OTHER; note = Adenosine phosphorothiorate
  modified_base 38: mod_base = OTHER; note = Adenosine phosphorothiorate
  modified_base 41: mod_base = OTHER; note = 2'-Omethylcytosine
  modified_base 42: mod_base = OTHER; note = 2'-Omethyladenosine
  modified_base 43: mod_base = OTHER; note = 2'-Omethylguanosine
  modified_base 44: mod_base = OTHER; note = 2'-Omethylcytosine
  modified_base 49: mod_base = OTHER; note = 2'-Omethylcytosine
  modified_base 51: mod_base = OTHER; note = 2'-Omethyladenosine
  modified_base 72: mod_base = OTHER; note = 2'-Omethyluridine

SEQ ID NO: 4831 - RNA, 85 nt, synthetic construct; identical to SEQ ID NO: 3286
  source 1..85: mol_type = other RNA
  modified_base 1: mod_base = OTHER; note = 2'-Omethylcytosine
  modified_base 2: mod_base = OTHER; note = 2'-Omethylcytosine
  modified_base 3: mod_base = OTHER; note = 2'-fluoroadenosine phosphorothiorate
  modified_base 10: mod_base = OTHER; note = Cytosine phosphorothiorate
  modified_base 17: mod_base = OTHER; note = 2'-Omethylguanosine
  modified_base 27: mod_base = OTHER; note = 2'-fluorouridine
  modified_base 29: mod_base = OTHER; note = 2'-fluoroguanosine
  modified_base 32: mod_base = OTHER; note = 2'-fluorouridine
  modified_base 36: mod_base = OTHER; note = 2'-Omethylguanosine
  modified_base 42: mod_base = OTHER; note = Adenosine phosphorothiorate
  modified_base 44: mod_base = OTHER; note = Guanosine phosphorothiorate
  modified_base 47: mod_base = OTHER; note = Cytosine phosphorothiorate
  modified_base 50: mod_base = OTHER; note = 2'-Omethyladenosine
  modified_base 54: mod_base = OTHER; note = Cytosine phosphorothiorate
  modified_base 59: mod_base = OTHER; note = 2'-Omethyluridine
  modified_base 61: mod_base = OTHER; note = 2'-Omethylguanosine
  modified_base 65: mod_base = OTHER; note = Cytosine phosphorothiorate

SEQ ID NO: 4832 - RNA, 75 nt, synthetic construct; identical to SEQ ID NO: 1045
  source 1..75: mol_type = other RNA
  modified_base 1: mod_base = OTHER; note = 2'-Omethylguanosine phosphorothiorate
  modified_base 2: mod_base = OTHER; note = 2'-Omethylguanosine phosphorothiorate
  modified_base 10: mod_base = OTHER; note = 2'-fluoroguanosine
  modified_base 11: mod_base = OTHER; note = 2'-Omethyluridine
  modified_base 20: mod_base = OTHER; note = 2'-Omethyladenosine phosphorothiorate
  modified_base 21: mod_base = OTHER; note = 2'-fluoroadenosine
  modified_base 22: mod_base = OTHER; note = 2'-fluoroguanosine
  modified_base 23: mod_base = OTHER; note = 2'-fluorocytosine
  modified_base 24: mod_base = OTHER; note = Adenosine phosphorothiorate
  modified_base 32: mod_base = OTHER; note = 2'-Omethylcytosine phosphorothiorate
  modified_base 33: mod_base = OTHER; note = 2'-fluorouridine
  modified_base 37: mod_base = OTHER; note = 2'-Omethyladenosine phosphorothiorate
  modified_base 55: mod_base = OTHER; note = 2'-fluorocytosine
  modified_base 64: mod_base = OTHER; note = 2'-fluoroguanosine
  modified_base 65: mod_base = OTHER; note = 2'-fluorouridine
  modified_base 66: mod_base = OTHER; note = 2'-fluoroguanosine
  modified_base 67: mod_base = OTHER; note = Guanosine phosphorothiorate
  modified_base 73: mod_base = OTHER; note = Cytosine phosphorothiorate
  modified_base 74: mod_base = OTHER; note = 2'-Omethylcytosine

SEQ ID NO: 4833 - RNA, 74 nt, synthetic construct; identical to SEQ ID NO: 3293
  source 1..74: mol_type = other RNA
  modified_base 1: mod_base = OTHER; note = 2'-fluoroadenosine
  modified_base 2: mod_base = OTHER; note = 2'-fluorocytosine
  modified_base 3: mod_base = OTHER; note = Cytosine phosphorothiorate
  modified_base 4: mod_base = OTHER; note = 2'-fluorouridine
  modified_base 6: mod_base = OTHER; note = 2'-fluoroguanosine
  modified_base 8: mod_base = OTHER; note = Guanosine phosphorothiorate
  modified_base 9: mod_base = OTHER; note = 2'-fluoroguanosine
  modified_base 12: mod_base = OTHER; note = 2'-Omethylcytosine
  modified_base 25: mod_base = OTHER; note = Uridine phosphorothiorate
  modified_base 33: mod_base = OTHER; note = 2'-Omethyluridine
  modified_base 36: mod_base = OTHER; note = 2'-fluoroadenosine phosphorothiorate
  modified_base 43: mod_base = OTHER; note = Guanosine phosphorothiorate
  modified_base 44: mod_base = OTHER; note = Guanosine phosphorothiorate
  modified_base 50: mod_base = OTHER; note = Uridine phosphorothiorate
  modified_base 58: mod_base = OTHER; note = 2'-fluorouridine phosphorothiorate
  modified_base 62: mod_base = OTHER; note = Guanosine phosphorothiorate
  modified_base 73: mod_base = OTHER; note = 2'-Omethylcytosine phosphorothiorate

SEQ ID NO: 4834 - RNA, 76 nt, synthetic construct; identical to SEQ ID NO: 3318
  source 1..76: mol_type = other RNA

SEQ ID NO: 4835 - RNA, 76 nt, synthetic construct; identical to SEQ ID NO: 625
  source 1..76: mol_type = other RNA
  modified_base 4: mod_base = OTHER; note = 2'-fluorouridine
  modified_base 12: mod_base = OTHER; note = 2'-Omethylguanosine phosphorothiorate
  modified_base 13: mod_base = OTHER; note = 2'-Omethylcytosine phosphorothiorate
  modified_base 14: mod_base = OTHER; note = 2'-fluoroadenosine
  modified_base 17: mod_base = OTHER; note = 2'-Omethylguanosine
  modified_base 18: mod_base = OTHER; note = Guanosine phosphorothiorate
  modified_base 20: mod_base = OTHER; note = Uridine phosphorothiorate
  modified_base 21: mod_base = OTHER; note = Adenosine phosphorothiorate
  modified_base 22: mod_base = OTHER; note = 2'-Omethylguanosine
  modified_base 24: mod_base = OTHER; note = Guanosine phosphorothiorate
  modified_base 25: mod_base = OTHER; note = 2'-Omethylcytosine
  modified_base 27: mod_base = OTHER; note = 2'-fluorouridine
  modified_base 31: mod_base = OTHER; note = 2'-Omethyladenosine
  modified_base 33: mod_base = OTHER; note = 2'-fluorouridine
  modified_base 34: mod_base = OTHER; note = 2'-fluorouridine
  modified_base 38: mod_base = OTHER; note = 2'-fluoroadenosine
  modified_base 39: mod_base = OTHER; note = 2'-fluorouridine
  modified_base 40: mod_base = OTHER; note = 2'-Omethyluridine
  modified_base 42: mod_base = OTHER; note = Adenosine phosphorothiorate
  modified_base 43: mod_base = OTHER; note = 2'-Omethyladenosine
  modified_base 47: mod_base = OTHER; note = 2'-fluorouridine
  modified_base 50: mod_base = OTHER; note = 2'-fluorocytosine
  modified_base 52: mod_base = OTHER; note = 2'-fluoroguanosine phosphorothiorate
  modified_base 53: mod_base = OTHER; note = 2'-fluoroguanosine
  modified_base 57: mod_base = OTHER; note = 2'-Omethylguanosine phosphorothiorate
  modified_base 58: mod_base = OTHER; note = 2'-fluoroadenosine phosphorothiorate
  modified_base 60: mod_base = OTHER; note = Uridine phosphorothiorate
  modified_base 61: mod_base = OTHER; note = Cytosine phosphorothiorate
  modified_base 62: mod_base = OTHER; note = 2'-Omethylcytosine phosphorothiorate
  modified_base 63: mod_base = OTHER; note = 2'-Omethylcytosine
  modified_base 64: mod_base = OTHER; note = 2'-fluoroguanosine
  modified_base 65: mod_base = OTHER; note = 2'-fluoroguanosine
  modified_base 70: mod_base = OTHER; note = 2'-Omethylguanosine
  modified_base 75: mod_base = OTHER; note = 2'-fluorocytosine

SEQ ID NO: 4836 - RNA, 76 nt, synthetic construct
  source 1..76: mol_type = other RNA
ggctcgggggcgcaatggatagcgcattggacttcaaattcaaaggttccgggttcgagtcccggcggagtcgcca

SEQ ID NO: 4837 - RNA, 76 nt, synthetic construct
  source 1..76: mol_type = other RNA
ggctccgtggcgcaatggatagcgcattggacttcaaattcaaaggttccgaaacggagtttcggcggagtcgcca

SEQ ID NO: 4838 - RNA, 76 nt, synthetic construct; identical to SEQ ID NO: 3316
  source 1..76: mol_type = other RNA
  modified_base 1: mod_base = OTHER; note = 2'-Omethyladenosine
  modified_base 2: mod_base = OTHER; note = 2'-Omethylcytosine
  modified_base 3: mod_base = OTHER; note = 2'-Omethylcytosine
  modified_base 4: mod_base = OTHER; note = 2'-Omethyladenosine
  modified_base 5: mod_base = OTHER; note = 2'-Omethyladenosine
  modified_base 6: mod_base = OTHER; note = 2'-Omethylcytosine
  modified_base 16: mod_base = OTHER; note = 2'-Omethyluridine
  modified_base 17: mod_base = OTHER; note = 2'-Omethylguanosine
  modified_base 18: mod_base = OTHER; note = 2'-Omethylguanosine
  modified_base 20: mod_base = OTHER; note = 2'-Omethyluridine
  modified_base 22: mod_base = OTHER; note = 2'-Omethylguanosine
  modified_base 23: mod_base = OTHER; note = 2'-Omethylcytosine
  modified_base 24: mod_base = OTHER; note = 2'-Omethylguanosine
  modified_base 25: mod_base = OTHER; note = 2'-Omethylcytosine
  modified_base 33: mod_base = OTHER; note = 2'-fluorouridine
  modified_base 35: mod_base = OTHER; note = Cytosine phosphorothiorate
  modified_base 37: mod_base = OTHER; note = Adenosine phosphorothiorate
  modified_base 38: mod_base = OTHER; note = Adenosine phosphorothiorate
  modified_base 41: mod_base = OTHER; note = 2'-Omethylcytosine
  modified_base 42: mod_base = OTHER; note = 2'-Omethyladenosine
  modified_base 43: mod_base = OTHER; note = 2'-Omethyladenosine
  modified_base 44: mod_base = OTHER; note = 2'-Omethyladenosine
  modified_base 45: mod_base = OTHER; note = 2'-Omethylguanosine
  modified_base 46: mod_base = OTHER; note = 2'-fluoroguanosine
  modified_base 48: mod_base = OTHER; note = 2'-fluorouridine
  modified_base 49: mod_base = OTHER; note = 2'-Omethylcytosine
  modified_base 50: mod_base = OTHER; note = 2'-Omethylcytosine
  modified_base 52: mod_base = OTHER; note = 2'-Omethylguanosine
  modified_base 54: mod_base = OTHER; note = 2'-Omethyluridine
  modified_base 55: mod_base = OTHER; note = Uridine phosphorothiorate
  modified_base 56: mod_base = OTHER; note = 2'-Omethylcytosine
  modified_base 57: mod_base = OTHER; note = 2'-fluoroguanosine
  modified_base 59: mod_base = OTHER; note = 2'-Omethylguanosine
  modified_base 61: mod_base = OTHER; note = 2'-Omethylcytosine
  modified_base 65: mod_base = OTHER; note = 2'-Omethylguanosine
  modified_base 73: mod_base = OTHER; note = 2'-Omethylguanosine

SEQ ID NO: 4839 - RNA, 85 nt, synthetic construct; identical to SEQ ID NO: 3297
  source 1..85: mol_type = other RNA
  modified_base 1: mod_base = OTHER; note = 2'-Omethylguanosine phosphorothiorate
  modified_base 7: mod_base = OTHER; note = 2'-Omethyladenosine phosphorothiorate
  modified_base 14: mod_base = OTHER; note = 2'-Omethyladenosine phosphorothiorate
  modified_base 22: mod_base = OTHER; note = Adenosine phosphorothiorate
  modified_base 24: mod_base = OTHER; note = 2'-fluoroguanosine
  modified_base 56: mod_base = OTHER; note = 2'-Omethylguanosine
  modified_base 58: mod_base = OTHER; note = Guanosine phosphorothiorate
  modified_base 73: mod_base = OTHER; note = 2'-fluoroguanosine
  modified_base 82: mod_base = OTHER; note = 2'-Omethylguanosine

SEQ ID NO: 4840 - RNA, 75 nt, synthetic construct; identical to SEQ ID NO: 1045
  source 1..75: mol_type = other RNA
  modified_base 1: mod_base = OTHER; note = 2'-Omethylguanosine phosphorothiorate
  modified_base 2: mod_base = OTHER; note = 2'-Omethylguanosine
  modified_base 13: mod_base = OTHER; note = Uridine phosphorothiorate
  modified_base 14: mod_base = OTHER; note = Adenosine phosphorothiorate
  modified_base 15: mod_base = OTHER; note = 2'-fluoroadenosine
  modified_base 18: mod_base = OTHER; note = 2'-fluoroguanosine
  modified_base 19: mod_base = OTHER; note = 2'-fluorouridine
  modified_base 20: mod_base = OTHER; note = 2'-Omethyladenosine
  modified_base 21: mod_base = OTHER; note = 2'-fluoroadenosine
  modified_base 22: mod_base = OTHER; note = Guanosine phosphorothiorate
  modified_base 23: mod_base = OTHER; note = 2'-fluorocytosine
  modified_base 31: mod_base = OTHER; note = 2'-Omethyladenosine
  modified_base 38: mod_base = OTHER; note = 2'-Omethyladenosine
  modified_base 47: mod_base = OTHER; note = 2'-fluorouridine
  modified_base 65: mod_base = OTHER; note = 2'-fluorouridine
  modified_base 66: mod_base = OTHER; note = 2'-fluoroguanosine
  modified_base 67: mod_base = OTHER; note = Guanosine phosphorothiorate
  modified_base 69: mod_base = OTHER; note = 2'-fluoroadenosine
  modified_base 72: mod_base = OTHER; note = 2'-fluorouridine phosphorothiorate
  modified_base 74: mod_base = OTHER; note = Cytosine phosphorothiorate
  modified_base 75: mod_base = OTHER; note = 2'-Omethyladenosine

SEQ ID NO: 4841 - RNA, 75 nt, synthetic construct; identical to SEQ ID NO: 3311
  source 1..75: mol_type = other RNA
  modified_base 1: mod_base = OTHER; note = Guanosine phosphorothiorate
  modified_base 10: mod_base = OTHER; note = Guanosine phosphorothiorate
  modified_base 24: mod_base = OTHER; note = 2'-fluoroadenosine
  modified_base 26: mod_base = OTHER; note = 2'-fluorouridine
  modified_base 44: mod_base = OTHER; note = 2'-fluorocytosine
  modified_base 58: mod_base = OTHER; note = 2'-fluoroguanosine
  modified_base 59: mod_base = OTHER; note = Uridine phosphorothiorate
  modified_base 63: mod_base = OTHER; note = Guanosine phosphorothiorate
  modified_base 64: mod_base = OTHER; note = 2'-fluoroguanosine
  modified_base 69: mod_base = OTHER; note = 2'-fluoroadenosine
  modified_base 73: mod_base = OTHER; note = Cytosine phosphorothiorate

SEQ ID NO: 4842 - RNA, 76 nt, synthetic construct; identical to SEQ ID NO: 625
  source 1..76: mol_type = other RNA
  modified_base 1: mod_base = OTHER; note = 2'-fluoroguanosine phosphorothiorate
  modified_base 2: mod_base = OTHER; note = 2'-Omethylguanosine
  modified_base 4: mod_base = OTHER; note = 2'-fluorouridine
  modified_base 5: mod_base = OTHER; note = Cytosine phosphorothiorate
  modified_base 6: mod_base = OTHER; note = 2'-Omethylcytosine
  modified_base 8: mod_base = OTHER; note = Uridine phosphorothiorate
  modified_base 10: mod_base = OTHER; note = 2'-Omethylguanosine
  modified_base 11: mod_base = OTHER; note = 2'-Omethylcytosine
  modified_base 12: mod_base = OTHER; note = 2'-fluoroguanosine
  modified_base 13: mod_base = OTHER; note = 2'-fluorocytosine
  modified_base 14: mod_base = OTHER; note = 2'-fluoroadenosine
  modified_base 16: mod_base = OTHER; note = 2'-Omethyluridine phosphorothiorate
  modified_base 17: mod_base = OTHER; note = 2'-Omethylguanosine
  modified_base 19: mod_base = OTHER; note = Adenosine phosphorothiorate
  modified_base 20: mod_base = OTHER; note = 2'-Omethyluridine
  modified_base 22: mod_base = OTHER; note = Guanosine phosphorothiorate
  modified_base 29: mod_base = OTHER; note = 2'-fluoroguanosine
  modified_base 30: mod_base = OTHER; note = 2'-Omethylguanosine
  modified_base 33: mod_base = OTHER; note = 2'-fluorouridine phosphorothiorate
  modified_base 34: mod_base = OTHER; note = 2'-fluorouridine
  modified_base 37: mod_base = OTHER; note = Adenosine phosphorothiorate
  modified_base 38: mod_base = OTHER; note = Adenosine phosphorothiorate
  modified_base 41: mod_base = OTHER; note = 2'-fluorocytosine
  modified_base 48: mod_base = OTHER; note = 2'-fluorouridine
  modified_base 49: mod_base = OTHER; note = Cytosine phosphorothiorate
  modified_base 51: mod_base = OTHER; note = Guanosine phosphorothiorate
  modified_base 54: mod_base = OTHER; note = 2'-Omethyluridine
  modified_base 58: mod_base = OTHER; note = 2'-fluoroadenosine
  modified_base 60: mod_base = OTHER; note = Uridine phosphorothiorate
  modified_base 64: mod_base = OTHER; note = Guanosine phosphorothiorate
  modified_base 65: mod_base = OTHER; note = 2'-Omethylguanosine
  modified_base 66: mod_base = OTHER; note = 2'-fluorocytosine
  modified_base 67: mod_base = OTHER; note = 2'-fluoroguanosine
  modified_base 68: mod_base = OTHER; note = 2'-Omethylguanosine
  modified_base 69: mod_base = OTHER; note = Adenosine phosphorothiorate
  modified_base 70: mod_base = OTHER; note = 2'-Omethylguanosine
  modified_base 72: mod_base = OTHER; note = 2'-Omethylcytosine
  modified_base 73: mod_base = OTHER; note = 2'-Omethylguanosine

SEQ ID NO: 4843 - RNA, 74 nt, synthetic construct; identical to SEQ ID NO: 3293
  source 1..74: mol_type = other RNA
  modified_base 2: mod_base = OTHER; note = 2'-Omethylcytosine
  modified_base 7: mod_base = OTHER; note = Uridine phosphorothiorate
  modified_base 14: mod_base = OTHER; note = 2'-fluoroadenosine
  modified_base 25: mod_base = OTHER; note = 2'-fluorouridine
  modified_base 42: mod_base = OTHER; note = 2'-fluoroadenosine
  modified_base 46: mod_base = OTHER; note = 2'-fluorouridine phosphorothiorate
  modified_base 73: mod_base = OTHER; note = 2'-Omethylcytosine phosphorothiorate

SEQ ID NO: 4844 - RNA, 76 nt, synthetic construct; identical to SEQ ID NO: 625
  source 1..76: mol_type = other RNA
  modified_base 1: mod_base = OTHER; note = 2'-Omethylguanosine phosphorothiorate
  modified_base 2: mod_base = OTHER; note = 2'-Omethylguanosine
  modified_base 17: mod_base = OTHER; note = 2'-Omethylguanosine
  modified_base 33: mod_base = OTHER; note = 2'-fluorouridine
  modified_base 35: mod_base = OTHER; note = Cytosine phosphorothiorate
  modified_base 37: mod_base = OTHER; note = Adenosine phosphorothiorate
  modified_base 52: mod_base = OTHER; note = 2'-Omethylguanosine
  modified_base 57: mod_base = OTHER; note = 2'-Omethylguanosine
  modified_base 62: mod_base = OTHER; note = 2'-Omethylcytosine
  modified_base 73: mod_base = OTHER; note = 2'-Omethylguanosine
  modified_base 75: mod_base = OTHER; note = 2'-fluorocytosine phosphorothiorate

SEQ ID NO: 4845 - RNA, 76 nt, synthetic construct; identical to SEQ ID NO: 625
  source 1..76: mol_type = other RNA
  modified_base 1: mod_base = OTHER; note = 2'-Omethylguanosine
  modified_base 17: mod_base = OTHER; note = 2'-Omethylguanosine
  modified_base 18: mod_base = OTHER; note = 2'-Omethylguanosine
  modified_base 33: mod_base = OTHER; note = 2'-fluorouridine
  modified_base 40: mod_base = OTHER; note = Thymine
  modified_base 50: mod_base = OTHER; note = 2'-Omethylcytosine
  modified_base 52: mod_base = OTHER; note = 2'-Omethylguanosine
  modified_base 55: mod_base = OTHER; note = Uridine phosphorothiorate
  modified_base 73: mod_base = OTHER; note = 2'-Omethylguanosine

SEQ ID NO: 4846 - DNA, 76 bp, synthetic construct; identical to SEQ ID NO: 1924
  source 1..76: mol_type = other DNA
  modified_base 1: mod_base = OTHER; note = 2'-Omethylguanosine phosphorothiorate
  modified_base 2: mod_base = OTHER; note = 2'-Omethylguanosine phosphorothiorate
  modified_base 3: mod_base = OTHER; note = Cytosine phosphorothiorate
  modified_base 4: mod_base = OTHER; note = 2'-O-(2-Methoxyethyl) thymine
  modified_base 9: mod_base = OTHER; note = Guanosine phosphorothiorate
  modified_base 10: mod_base = OTHER; note = 2'-Omethylguanosine phosphorothiorate
  modified_base 12: mod_base = OTHER; note = 2'-fluoroguanosine phosphorothiorate
  modified_base 13: mod_base = OTHER; note = 2'-fluorocytosine phosphorothiorate
  modified_base 14: mod_base = OTHER; note = 2'-Omethyladenosine
  modified_base 16: mod_base = OTHER; note = Uridine phosphorothiorate
  modified_base 20: mod_base = OTHER; note = 2'-O-(2-Methoxyethyl) thymine
  modified_base 23: mod_base = OTHER; note = Cytosine phosphorothiorate
  modified_base 24: mod_base = OTHER; note = 2'-Omethylguanosine
  modified_base 26: mod_base = OTHER; note = 2'-Omethyladenosine
  modified_base 28: mod_base = OTHER; note = Uridine phosphorothiorate
  modified_base 30: mod_base = OTHER; note = 2'-Omethylguanosine
  modified_base 32: mod_base = OTHER; note = 2'-O-(2-Methoxyethyl) 5-methylcytosine
  modified_base 38: mod_base = OTHER; note = Adenosine phosphorothiorate
  modified_base 39: mod_base = OTHER; note = 2'-Omethyluridine phosphorothiorate
  modified_base 44: mod_base = OTHER; note = 2'-O-(2-Methoxyethyl) adenosine
  modified_base 45: mod_base = OTHER; note = Guanosine phosphorothiorate
  modified_base 46: mod_base = OTHER; note = deoxyguanosine phosphorothiorate
  modified_base 47: mod_base = OTHER; note = 2'-Omethyluridine
  modified_base 52: mod_base = OTHER; note = 2'-O-(2-Methoxyethyl) guanosine
  modified_base 53: mod_base = OTHER; note = Guanosine phosphorothiorate
  modified_base 57: mod_base = OTHER; note = Guanosine phosphorothiorate
  modified_base 58: mod_base = OTHER; note = Adenosine phosphorothiorate
  modified_base 63: mod_base = OTHER; note = deoxycytosine phosphorothiorate
  modified_base 66: mod_base = OTHER; note = 2'-fluorocytosine
  modified_base 68: mod_base = OTHER; note = Guanosine phosphorothiorate
  modified_base 70: mod_base = OTHER; note = Guanosine phosphorothiorate
  modified_base 71: mod_base = OTHER; note = 2'-O-(2-Methoxyethyl) thymine
  modified_base 75: mod_base = OTHER; note = 2'-O-(2-Methoxyethyl) 5-methylcytosine phosphorothiorate
  modified_base 76: mod_base = OTHER; note = 2'-O-(2-Methoxyethyl) adenosine
  misc_feature 1..14: note = RNA
  misc_feature 15: note = DNA
  misc_feature 16..39: note = RNA
  misc_feature 40: note = DNA
  misc_feature 41..45: note = RNA
  misc_feature 46: note = DNA
  misc_feature 47..58: note = RNA
  misc_feature 59: note = DNA
  misc_feature 60..61: note = RNA
  misc_feature 62..65: note = DNA
  misc_feature 66..76: note = RNA

SEQ ID NO: 4847 - RNA, 76 nt, synthetic construct; identical to SEQ ID NO: 3490
  source 1..76: mol_type = other RNA
  modified_base 1: mod_base = OTHER; note = 2'-Omethylguanosine
  modified_base 13: mod_base = OTHER; note = 2'-Omethylcytosine
  modified_base 17: mod_base = OTHER; note = 2'-Omethylguanosine
  modified_base 18: mod_base = OTHER; note = 2'-Omethylguanosine
  modified_base 25: mod_base = OTHER; note = 2'-Omethylcytosine
  modified_base 33: mod_base = OTHER; note = Uridine phosphorothiorate
  modified_base 34: mod_base = OTHER; note = 2'-Omethyluridine
  modified_base 35: mod_base = OTHER; note = Cytosine phosphorothiorate
  modified_base 37: mod_base = OTHER; note = Adenosine phosphorothiorate
  modified_base 38: mod_base = OTHER; note = Adenosine phosphorothiorate
  modified_base 41: mod_base = OTHER; note = 2'-fluorocytosine
  modified_base 42: mod_base = OTHER; note = 2'-Omethyladenosine
  modified_base 43: mod_base = OTHER; note = 2'-Omethyladenosine
  modified_base 44: mod_base = OTHER; note = 2'-fluoroadenosine
  modified_base 49: mod_base = OTHER; note = 2'-Omethylguanosine
  modified_base 50: mod_base = OTHER; note = 2'-Omethylcytosine
  modified_base 52: mod_base = OTHER; note = 2'-Omethylguanosine
  modified_base 54: mod_base = OTHER; note = Uridine phosphorothiorate
  modified_base 55: mod_base = OTHER; note = Uridine phosphorothiorate
  modified_base 56: mod_base = OTHER; note = 2'-Omethylcytosine
  modified_base 57: mod_base = OTHER; note = Guanosine phosphorothiorate
  modified_base 58: mod_base = OTHER; note = Adenosine phosphorothiorate
  modified_base 59: mod_base = OTHER; note = 2'-Omethylguanosine
  modified_base 61: mod_base = OTHER; note = 2'-Omethylcytosine
  modified_base 65: mod_base = OTHER; note = 2'-Omethylcytosine
  modified_base 73: mod_base = OTHER; note = 2'-Omethylguanosine

SEQ ID NO: 4848 - RNA, 85 nt, synthetic construct; identical to SEQ ID NO: 3310
  source 1..85: mol_type = other RNA
  modified_base 1: mod_base = OTHER; note = 2'-Omethylcytosine
  modified_base 11: mod_base = OTHER; note = Cytosine phosphorothiorate
  modified_base 17: mod_base = OTHER; note = 2'-Omethylguanosine
  modified_base 28: mod_base = OTHER; note = 2'-fluoroguanosine
  modified_base 30: mod_base = OTHER; note = 2'-fluoroadenosine
  modified_base 51: mod_base = OTHER; note = 2'-fluorouridine
  modified_base 53: mod_base = OTHER; note = 2'-fluorouridine
  modified_base 60: mod_base = OTHER; note = 2'-Omethylguanosine
  modified_base 84: mod_base = OTHER; note = Cytosine phosphorothiorate

SEQ ID NO: 4849 - RNA, 85 nt, synthetic construct; identical to SEQ ID NO: 3317
  source 1..85: mol_type = other RNA
  modified_base 1: mod_base = OTHER; note = 2'-Omethylguanosine phosphorothiorate
  modified_base 2: mod_base = OTHER; note = 2'-Omethylcytosine
  modified_base 15: mod_base = OTHER; note = 2'-Omethylguanosine
  modified_base 23: mod_base = OTHER; note = Guanosine phosphorothiorate
  modified_base 35: mod_base = OTHER; note = 2'-fluorouridine phosphorothiorate
  modified_base 61: mod_base = OTHER; note = 2'-Omethylguanosine
  modified_base 72: mod_base = OTHER; note = 2'-fluorouridine
  modified_base 80: mod_base = OTHER; note = 2'-fluoroguanosine

SEQ ID NO: 4850 - RNA, 76 nt, synthetic construct; identical to SEQ ID NO: 625
  source 1..76: mol_type = other RNA
  modified_base 1: mod_base = OTHER; note = Guanosine phosphorothiorate
  modified_base 2: mod_base = OTHER; note = 2'-Omethylguanosine
  modified_base 3: mod_base = OTHER; note = 2'-Omethylcytosine
  modified_base 4: mod_base = OTHER; note = 2'-fluorouridine
  modified_base 7: mod_base = OTHER; note = Guanosine phosphorothiorate
  modified_base 12: mod_base = OTHER; note = 2'-Omethylguanosine
  modified_base 14: mod_base = OTHER; note = 2'-Omethyladenosine
  modified_base 15: mod_base = OTHER; note = 2'-Omethyladenosine
  modified_base 17: mod_base = OTHER; note = 2'-Omethylguanosine
  modified_base 20: mod_base = OTHER; note = 2'-fluorouridine phosphorothiorate
  modified_base 25: mod_base = OTHER; note = 2'-fluorocytosine
  modified_base 27: mod_base = OTHER; note = Uridine phosphorothiorate
  modified_base 28: mod_base = OTHER; note = 2'-Omethyluridine
  modified_base 29: mod_base = OTHER; note = 2'-Omethylguanosine
  modified_base 32: mod_base = OTHER; note = 2'-fluorocytosine
  modified_base 42: mod_base = OTHER; note = 2'-Omethyladenosine phosphorothiorate
  modified_base 43: mod_base = OTHER; note = 2'-Omethyladenosine
  modified_base 46: mod_base = OTHER; note = Guanosine phosphorothiorate
  modified_base 47: mod_base = OTHER; note = 2'-fluorouridine phosphorothiorate
  modified_base 48: mod_base = OTHER; note = 2'-fluorouridine phosphorothiorate
  modified_base 49: mod_base = OTHER; note = 2'-Omethylcytosine
  modified_base 50: mod_base = OTHER; note = 2'-Omethylcytosine
  modified_base 51: mod_base = OTHER; note = Guanosine phosphorothiorate
  modified_base 52: mod_base = OTHER; note = 2'-fluoroguanosine
  modified_base 53: mod_base = OTHER; note = 2'-Omethylguanosine
  modified_base 54: mod_base = OTHER; note = 2'-fluorouridine
  modified_base 57: mod_base = OTHER; note = Guanosine phosphorothiorate
  modified_base 60: mod_base = OTHER; note = 2'-fluorouridine
  modified_base 61: mod_base = OTHER; note = 2'-Omethylcytosine
  modified_base 63: mod_base = OTHER; note = 2'-fluorocytosine phosphorothiorate
  modified_base 64: mod_base = OTHER; note = 2'-fluoroguanosine
  modified_base 66: mod_base = OTHER; note = 2'-fluorocytosine
  modified_base 68: mod_base = OTHER; note = 2'-Omethylguanosine
  modified_base 71: mod_base = OTHER; note = 2'-fluorouridine
  modified_base 76: mod_base = OTHER; note = 2'-fluoroadenosine

SEQ ID NO: 4851 - RNA, 76 nt, synthetic construct; identical to SEQ ID NO: 625
  source 1..76: mol_type = other RNA
  modified_base 47: mod_base = OTHER; note = Thymine

SEQ ID NO: 4852 - RNA, 75 nt, synthetic construct; identical to SEQ ID NO: 3299
  source 1..75: mol_type = other RNA
  modified_base 7: mod_base = OTHER; note = 2'-fluorouridine phosphorothiorate
  modified_base 16: mod_base = OTHER; note = 2'-Omethylcytosine phosphorothiorate
  modified_base 19: mod_base = OTHER; note = Uridine phosphorothiorate
  modified_base 25: mod_base = OTHER; note = 2'-fluoroadenosine
  modified_base 26: mod_base = OTHER; note = 2'-fluorouridine
  modified_base 51: mod_base = OTHER; note = 2'-fluoroguanosine phosphorothiorate
  modified_base 74: mod_base = OTHER; note = Cytosine phosphorothiorate

SEQ ID NO: 4853 - RNA, 76 nt, synthetic construct; identical to SEQ ID NO: 3447
  source 1..76: mol_type = other RNA
  modified_base 1: mod_base = OTHER; note = 2'-Omethylguanosine phosphorothiorate
  modified_base 2: mod_base = OTHER; note = 2'-Omethylcytosine phosphorothiorate
  modified_base 3: mod_base = OTHER; note = 2'-Omethylcytosine
  modified_base 4: mod_base = OTHER; note = 2'-Omethylcytosine
  modified_base 5: mod_base = OTHER; note = 2'-Omethylguanosine
  modified_base 6: mod_base = OTHER; note = 2'-Omethyladenosine
  modified_base 10: mod_base = OTHER; note = 2'-Omethylguanosine
  modified_base 11: mod_base = OTHER; note = 2'-Omethylcytosine
  modified_base 12: mod_base = OTHER; note = 2'-Omethylguanosine
  modified_base 13: mod_base = OTHER; note = 2'-Omethylcytosine
  modified_base 17: mod_base = OTHER; note = 2'-Omethylguanosine
  modified_base 18: mod_base = OTHER; note = 2'-Omethylguanosine
  modified_base 22: mod_base = OTHER; note = 2'-Omethylguanosine
  modified_base 23: mod_base = OTHER; note = 2'-Omethylcytosine
  modified_base 24: mod_base = OTHER; note = 2'-Omethylguanosine
  modified_base 25: mod_base = OTHER; note = 2'-Omethylcytosine
  modified_base 33: mod_base = OTHER; note = 2'-fluorouridine
  modified_base 35: mod_base = OTHER; note = Cytosine phosphorothiorate
  modified_base 37: mod_base = OTHER; note = Adenosine phosphorothiorate
  modified_base 38: mod_base = OTHER; note = Adenosine phosphorothiorate
  modified_base 41: mod_base = OTHER; note = 2'-fluorocytosine
  modified_base 42: mod_base = OTHER; note = 2'-Omethyladenosine
  modified_base 43: mod_base = OTHER; note = 2'-Omethyladenosine
  modified_base 44: mod_base = OTHER; note = 2'-fluoroadenosine
  modified_base 49: mod_base = OTHER; note = 2'-Omethylcytosine
  modified_base 50: mod_base = OTHER; note = 2'-Omethylcytosine
  modified_base 51: mod_base = OTHER; note = 2'-Omethylguanosine
  modified_base 52: mod_base = OTHER; note = 2'-Omethylguanosine
  modified_base 53: mod_base = OTHER; note = 2'-Omethylguanosine
  modified_base 54: mod_base = OTHER; note = Uridine phosphorothiorate
  modified_base 55: mod_base = OTHER; note = Uridine phosphorothiorate
  modified_base 61: mod_base = OTHER; note = 2'-Omethylcytosine
  modified_base 62: mod_base = OTHER; note = 2'-Omethylcytosine
  modified_base 63: mod_base = OTHER; note = 2'-fluorocytosine
  modified_base 64: mod_base = OTHER; note = 2'-Omethylguanosine
  modified_base 65: mod_base = OTHER; note = 2'-Omethylguanosine
  modified_base 66: mod_base = OTHER; note = 2'-Omethylcytosine
  modified_base 67: mod_base = OTHER; note = 2'-Omethyluridine
  modified_base 68: mod_base = OTHER; note = 2'-Omethylcytosine
  modified_base 73: mod_base = OTHER; note = 2'-Omethylguanosine

SEQ ID NO: 4854 - RNA, 76 nt, synthetic construct; identical to SEQ ID NO: 625
  source 1..76: mol_type = other RNA
  modified_base 6: mod_base = OTHER; note = Cytosine phosphorothiorate
  modified_base 12: mod_base = OTHER; note = 2'-Omethylguanosine
  modified_base 13: mod_base = OTHER; note = 2'-fluorocytosine
  modified_base 14: mod_base = OTHER; note = 2'-Omethyladenosine
  modified_base 15: mod_base = OTHER; note = 2'-fluoroadenosine
  modified_base 16: mod_base = OTHER; note = Uridine phosphorothiorate
  modified_base 19: mod_base = OTHER; note = Adenosine phosphorothiorate
  modified_base 24: mod_base = OTHER; note = 2'-Omethylguanosine
  modified_base 25: mod_base = OTHER; note = 2'-Omethylcytosine
  modified_base 28: mod_base = OTHER; note = Uridine phosphorothiorate
  modified_base 29: mod_base = OTHER; note = Guanosine phosphorothiorate
  modified_base 32: mod_base = OTHER; note = 2'-fluorocytosine
  modified_base 34: mod_base = OTHER; note = 2'-Omethyluridine
  modified_base 38: mod_base = OTHER; note = 2'-Omethyladenosine
  modified_base 41: mod_base = OTHER; note = Cytosine phosphorothiorate
  modified_base 43: mod_base = OTHER; note = 2'-Omethyladenosine
  modified_base 44: mod_base = OTHER; note = 2'-Omethyladenosine
  modified_base 49: mod_base = OTHER; note = 2'-fluorocytosine
  modified_base 52: mod_base = OTHER; note = 2'-Omethylguanosine phosphorothiorate
  modified_base 54: mod_base = OTHER; note = 2'-fluorouridine phosphorothiorate
  modified_base 58: mod_base = OTHER; note = 2'-fluoroadenosine
  modified_base 60: mod_base = OTHER; note = Uridine phosphorothiorate
  modified_base 61: mod_base = OTHER; note = 2'-fluorocytosine
  modified_base 62: mod_base = OTHER; note = 2'-fluorocytosine
  modified_base 63: mod_base = OTHER; note = 2'-Omethylcytosine
  modified_base 67: mod_base = OTHER; note = 2'-fluoroguanosine
  modified_base 68: mod_base = OTHER; note = 2'-fluoroguanosine
  modified_base 69: mod_base = OTHER; note = Adenosine phosphorothiorate
  modified_base 70: mod_base = OTHER; note = 2'-fluoroguanosine phosphorothiorate
  modified_base 71: mod_base = OTHER; note = 2'-fluorouridine
  modified_base 72: mod_base = OTHER; note = 2'-Omethylcytosine
  modified_base 76: mod_base = OTHER; note = 2'-fluoroadenosine

SEQ ID NO: 4855 - RNA, 85 nt, synthetic construct; identical to SEQ ID NO: 3310
  source 1..85: mol_type = other RNA
  modified_base 54: mod_base = OTHER; note = 2'-fluorocytosine
  modified_base 55: mod_base = OTHER; note = 2'-Omethylcytosine
  modified_base 58: mod_base = OTHER; note = Guanosine phosphorothiorate
  modified_base 73: mod_base = OTHER; note = 2'-fluoroadenosine
  modified_base 77: mod_base = OTHER; note = 2'-Omethylcytosine
  modified_base 85: mod_base = OTHER; note = 2'-Omethyladenosine

SEQ ID NO: 4856 - RNA, 76 nt, synthetic construct; identical to SEQ ID NO: 3295
  source 1..76: mol_type = other RNA
  modified_base 1: mod_base = OTHER; note = 2'-Omethylcytosine
  modified_base 2: mod_base = OTHER; note = 2'-fluorocytosine
  modified_base 3: mod_base = OTHER; note = 2'-Omethyluridine phosphorothiorate
  modified_base 5: mod_base = OTHER; note = 2'-fluorocytosine phosphorothiorate
  modified_base 6: mod_base = OTHER; note = 2'-fluoroguanosine
  modified_base 10: mod_base = OTHER; note = 2'-fluoroguanosine
  modified_base 17: mod_base = OTHER; note = 2'-Omethyluridine
  modified_base 20: mod_base = OTHER; note = 2'-Omethyluridine
  modified_base 25: mod_base = OTHER; note = 2'-Omethylcytosine phosphorothiorate
  modified_base 28: mod_base = OTHER; note = Adenosine phosphorothiorate
  modified_base 29: mod_base = OTHER; note = Guanosine phosphorothiorate
  modified_base 38: mod_base = OTHER; note = 2'-fluoroadenosine phosphorothiorate
  modified_base 39: mod_base = OTHER; note = 2'-fluorouridine
  modified_base 47: mod_base = OTHER; note = 2'-Omethyluridine
  modified_base 52: mod_base = OTHER; note = 2'-Omethylguanosine phosphorothiorate
  modified_base 53: mod_base = OTHER; note = Guanosine phosphorothiorate
  modified_base 56: mod_base = OTHER; note = 2'-fluorocytosine phosphorothiorate
  modified_base 68: mod_base = OTHER; note = 2'-fluoroguanosine
  modified_base 74: mod_base = OTHER; note = 2'-Omethylcytosine phosphorothiorate
  modified_base 75: mod_base = OTHER; note = Cytosine phosphorothiorate

SEQ ID NO: 4857 - RNA, 74 nt, synthetic construct; identical to SEQ ID NO: 766
  source 1..74: mol_type = other RNA
  modified_base 1: mod_base = OTHER; note = 2'-Omethylguanosine phosphorothiorate
  modified_base 2: mod_base = OTHER; note = 2'-Omethylguanosine
  modified_base 3: mod_base = OTHER; note = 2'-Omethylcytosine
  modified_base 4: mod_base = OTHER; note = 2'-Omethyluridine
  modified_base 5: mod_base = OTHER; note = 2'-Omethylcytosine
  modified_base 6: mod_base = OTHER; note = 2'-Omethylcytosine
  modified_base 43: mod_base = OTHER; note = 2'-Omethyladenosine
  modified_base 44: mod_base = OTHER; note = 2'-Omethyladenosine
  modified_base 45: mod_base = OTHER; note = 2'-Omethylguanosine
  modified_base 46: mod_base = OTHER; note = 2'-fluoroguanosine
  modified_base 48: mod_base = OTHER; note = 2'-fluorouridine
  modified_base 49: mod_base = OTHER; note = 2'-Omethylcytosine
  modified_base 50: mod_base = OTHER; note = 2'-Omethylcytosine
  modified_base 73: mod_base = OTHER; note = 2'-Omethylguanosine phosphorothiorate

SEQ ID NO: 4858 - RNA, 76 nt, synthetic construct; identical to SEQ ID NO: 625
  source 1..76: mol_type = other RNA
  modified_base 1: mod_base = OTHER; note = 2'-Omethylguanosine phosphorothiorate
  modified_base 2: mod_base = OTHER; note = 2'-Omethylguanosine phosphorothiorate
  modified_base 3: mod_base = OTHER; note = 2'-Omethylcytosine phosphorothiorate
  modified_base 4: mod_base = OTHER; note = 2'-Omethyluridine phosphorothiorate
  modified_base 5: mod_base = OTHER; note = 2'-Omethylcytosine phosphorothiorate
  modified_base 6: mod_base = OTHER; note = 2'-Omethylcytosine phosphorothiorate
  modified_base 10: mod_base = OTHER; note = 2'-Omethylguanosine
  modified_base 11: mod_base = OTHER; note = 2'-Omethylcytosine
  modified_base 12: mod_base = OTHER; note = 2'-Omethylguanosine
  modified_base 13: mod_base = OTHER; note = 2'-Omethylcytosine
  modified_base 22: mod_base = OTHER; note = 2'-Omethylguanosine
  modified_base 23: mod_base = OTHER; note = 2'-Omethylcytosine
  modified_base 24: mod_base = OTHER; note = 2'-Omethylguanosine
  modified_base 25: mod_base = OTHER; note = 2'-Omethylcytosine
  modified_base 44: mod_base = OTHER; note = 2'-Omethyladenosine
  modified_base 45: mod_base = OTHER; note = 2'-Omethylguanosine
  modified_base 46: mod_base = OTHER; note = 2'-Omethylguanosine
  modified_base 49: mod_base = OTHER; note = 2'-Omethylcytosine
  modified_base 50: mod_base = OTHER; note = 2'-Omethylcytosine
  modified_base 51: mod_base = OTHER; note = 2'-Omethylguanosine
  modified_base 52: mod_base = OTHER; note = 2'-Omethylguanosine
  modified_base 53: mod_base = OTHER; note = 2'-Omethylguanosine
  modified_base 54: mod_base = OTHER; note = Uridine phosphorothiorate
  modified_base 55: mod_base = OTHER; note = Uridine phosphorothiorate
  modified_base 56: mod_base = OTHER; note = Cytosine phosphorothiorate
  modified_base 57: mod_base = OTHER; note = Guanosine phosphorothiorate
  modified_base 61: mod_base = OTHER; note = 2'-Omethylcytosine
  modified_base 62: mod_base = OTHER; note = 2'-Omethylcytosine
  modified_base 63: mod_base = OTHER; note = 2'-Omethylcytosine
  modified_base 64: mod_base = OTHER; note = 2'-Omethylguanosine
  modified_base 65: mod_base = OTHER; note = 2'-Omethylguanosine
  modified_base 66: mod_base = OTHER; note = 2'-Omethylcytosine
  modified_base 67: mod_base = OTHER; note = 2'-Omethylguanosine
  modified_base 68: mod_base = OTHER; note = 2'-Omethylguanosine
  modified_base 69: mod_base = OTHER; note = 2'-Omethyladenosine

SEQ ID NO: 4859 - RNA, 76 nt, synthetic construct; identical to SEQ ID NO: 3289
  source 1..76: mol_type = other RNA
  modified_base 22: mod_base = OTHER; note = 2'-Omethylguanosine
  modified_base 23: mod_base = OTHER; note = 2'-Omethyladenosine
  modified_base 24: mod_base = OTHER; note = 2'-Omethylguanosine
  modified_base 25: mod_base = OTHER; note = 2'-Omethylcytosine
  modified_base 73: mod_base = OTHER; note = 2'-Omethylguanosine

SEQ ID NO: 4860 - RNA, 74 nt, synthetic construct; identical to SEQ ID NO: 3293
  source 1..74: mol_type = other RNA
  modified_base 1: mod_base = OTHER; note = 2'-fluoroadenosine
  modified_base 2: mod_base = OTHER; note = Cytosine phosphorothiorate
  modified_base 3: mod_base = OTHER; note = Cytosine phosphorothiorate
  modified_base 4: mod_base = OTHER; note = Uridine phosphorothiorate
  modified_base 6: mod_base = OTHER; note = Guanosine phosphorothiorate
  modified_base 8: mod_base = OTHER; note = 2'-fluoroguanosine
  modified_base 9: mod_base = OTHER; note = 2'-fluoroguanosine
  modified_base 11: mod_base = OTHER; note = 2'-fluoroguanosine
  modified_base 24: mod_base = OTHER; note = 2'-fluoroguanosine
  modified_base 26: mod_base = OTHER; note = Cytosine phosphorothiorate
  modified_base 33: mod_base = OTHER; note = 2'-fluorouridine
  modified_base 35: mod_base = OTHER; note = 2'-fluoroguanosine
  modified_base 42: mod_base = OTHER; note = Adenosine phosphorothiorate
  modified_base 43: mod_base = OTHER; note = 2'-fluoroguanosine
  modified_base 46: mod_base = OTHER; note = Uridine phosphorothiorate
  modified_base 48: mod_base = OTHER; note = Cytosine phosphorothiorate
  modified_base 50: mod_base = OTHER; note = Uridine phosphorothiorate
  modified_base 51: mod_base = OTHER; note = 2'-fluoroguanosine phosphorothiorate
  modified_base 60: mod_base = OTHER; note = Adenosine phosphorothiorate
  modified_base 62: mod_base = OTHER; note = 2'-fluoroguanosine
  modified_base 73: mod_base = OTHER; note = 2'-Omethylcytosine phosphorothiorate
  modified_base 74: mod_base = OTHER; note = 2'-fluoroadenosine

SEQ ID NO: 4861 - RNA, 76 nt, synthetic construct; identical to SEQ ID NO: 625
  source 1..76: mol_type = other RNA
  modified_base 1: mod_base = OTHER; note = 2'-Omethylguanosine phosphorothiorate
  modified_base 2: mod_base = OTHER; note = 2'-fluoroguanosine
  modified_base 3: mod_base = OTHER; note = 2'-Omethylcytosine
  modified_base 4: mod_base = OTHER; note = 2'-fluorouridine
  modified_base 6: mod_base = OTHER; note = 2'-Omethylcytosine
  modified_base 11: mod_base = OTHER; note = 2'-fluorocytosine
  modified_base 12: mod_base = OTHER; note = Guanosine phosphorothiorate
  modified_base 13: mod_base = OTHER; note = 2'-Omethylcytosine
  modified_base 20: mod_base = OTHER; note = 2'-fluorouridine
  modified_base 21: mod_base = OTHER; note = Adenosine phosphorothiorate
  modified_base 22: mod_base = OTHER; note = 2'-fluoroguanosine phosphorothiorate
  modified_base 23: mod_base = OTHER; note = 2'-Omethylcytosine
  modified_base 24: mod_base = OTHER; note = 2'-fluoroguanosine
  modified_base 25: mod_base = OTHER; note = Cytosine phosphorothiorate
  modified_base 26: mod_base = OTHER; note = 2'-fluoroadenosine
  modified_base 27: mod_base = OTHER; note = 2'-fluorouridine
  modified_base 36: mod_base = OTHER; note = Adenosine phosphorothiorate
  modified_base 40: mod_base = OTHER; note = 2'-fluorouridine phosphorothiorate
  modified_base 43: mod_base = OTHER; note = 2'-Omethyladenosine
  modified_base 46: mod_base = OTHER; note = Guanosine phosphorothiorate
  modified_base 48: mod_base = OTHER; note = Uridine phosphorothiorate
  modified_base 49: mod_base = OTHER; note = 2'-Omethylcytosine
  modified_base 50: mod_base = OTHER; note = 2'-fluorocytosine
  modified_base 55: mod_base = OTHER; note = Uridine phosphorothiorate
  modified_base 56: mod_base = OTHER; note = 2'-Omethylcytosine
  modified_base 57: mod_base = OTHER; note = Guanosine phosphorothiorate
  modified_base 63: mod_base = OTHER; note = Cytosine phosphorothiorate
  modified_base 64: mod_base = OTHER; note = 2'-Omethylguanosine
  modified_base 65: mod_base = OTHER; note = 2'-fluoroguanosine
  modified_base 69: mod_base = OTHER; note = Adenosine phosphorothiorate
  modified_base 70: mod_base = OTHER; note = 2'-fluoroguanosine
  modified_base 71: mod_base = OTHER; note = Uridine phosphorothiorate
  modified_base 72: mod_base = OTHER; note = 2'-Omethylcytosine phosphorothiorate
  modified_base 75: mod_base = OTHER; note = Cytosine phosphorothiorate
  modified_base 76: mod_base = OTHER; note = 2'-Omethyladenosine

SEQ ID NO: 4862 - RNA, 85 nt, synthetic construct; identical to SEQ ID NO: 3288
  source 1..85: mol_type = other RNA
  modified_base 1: mod_base = OTHER; note = 2'-Omethylcytosine phosphorothiorate
  modified_base 25: mod_base = OTHER; note = 2'-fluoroguanosine
  modified_base 44: mod_base = OTHER; note = Guanosine phosphorothiorate
  modified_base 51: mod_base = OTHER; note = 2'-Omethyluridine
  modified_base 58: mod_base = OTHER; note = 2'-Omethylguanosine
  modified_base 83: mod_base = OTHER; note = 2'-fluorocytosine

SEQ ID NO: 4863 - RNA, 76 nt, synthetic construct; identical to SEQ ID NO: 3295
  source 1..76: mol_type = other RNA
  modified_base 1: mod_base = OTHER; note = 2'-Omethylcytosine
  modified_base 2: mod_base = OTHER; note = 2'-fluorocytosine phosphorothiorate
  modified_base 8: mod_base = OTHER; note = 2'-fluorouridine phosphorothiorate
  modified_base 14: mod_base = OTHER; note = 2'-fluoroadenosine phosphorothiorate
  modified_base 17: mod_base = OTHER; note = 2'-fluorouridine
  modified_base 42: mod_base = OTHER; note = 2'-Omethyluridine phosphorothiorate
  modified_base 48: mod_base = OTHER; note = 2'-Omethylcytosine
  modified_base 53: mod_base = OTHER; note = 2'-Omethylguanosine
  modified_base 55: mod_base = OTHER; note = 2'-fluorouridine phosphorothiorate
  modified_base 59: mod_base = OTHER; note = Adenosine phosphorothiorate
  modified_base 76: mod_base = OTHER; note = 2'-Omethyladenosine

SEQ ID NO: 4864 - RNA, 85 nt, synthetic construct; identical to SEQ ID NO: 3288
  source 1..85: mol_type = other RNA
  modified_base 2: mod_base = OTHER; note = 2'-Omethylcytosine
  modified_base 3: mod_base = OTHER; note = 2'-fluoroadenosine
  modified_base 10: mod_base = OTHER; note = Cytosine phosphorothiorate
  modified_base 11: mod_base = OTHER; note = 2'-fluorocytosine
  modified_base 25: mod_base = OTHER; note = 2'-fluoroguanosine
  modified_base 28: mod_base = OTHER; note = 2'-fluoroguanosine phosphorothiorate
  modified_base 52: mod_base = OTHER; note = 2'-Omethylguanosine
  modified_base 55: mod_base = OTHER; note = 2'-fluorocytosine
  modified_base 59: mod_base = OTHER; note = 2'-Omethyluridine
  modified_base 62: mod_base = OTHER; note = Guanosine phosphorothiorate
  modified_base 67: mod_base = OTHER; note = Adenosine phosphorothiorate

SEQ ID NO: 4865 - RNA, 76 nt, synthetic construct; identical to SEQ ID NO: 625
  source 1..76: mol_type = other RNA
  modified_base 1: mod_base = OTHER; note = 2'-Omethylguanosine
  modified_base 2: mod_base = OTHER; note = 2'-Omethylguanosine
  modified_base 3: mod_base = OTHER; note = 2'-Omethylcytosine
  modified_base 10: mod_base = OTHER; note = 2'-Omethylguanosine
  modified_base 13: mod_base = OTHER; note = 2'-Omethylcytosine
  modified_base 17: mod_base = OTHER; note = Guanosine phosphorothiorate
  modified_base 18: mod_base = OTHER; note = 2'-Omethylguanosine
  modified_base 19: mod_base = OTHER; note = Adenosine phosphorothiorate
  modified_base 20: mod_base = OTHER; note = 2'-Omethyluridine
  modified_base 25: mod_base = OTHER; note = 2'-Omethylcytosine
  modified_base 29: mod_base = OTHER; note = 2'-Omethylguanosine
  modified_base 33: mod_base = OTHER; note = 2'-fluorouridine
  modified_base 35: mod_base = OTHER; note = Cytosine phosphorothiorate
  modified_base 37: mod_base = OTHER; note = Adenosine phosphorothiorate
  modified_base 38: mod_base = OTHER; note = Adenosine phosphorothiorate
  modified_base 41: mod_base = OTHER; note = 2'-fluorocytosine phosphorothiorate
  modified_base 43: mod_base = OTHER; note = 2'-Omethyladenosine
  modified_base 44: mod_base = OTHER; note = 2'-fluoroadenosine
  modified_base 46: mod_base = OTHER; note = Guanosine phosphorothiorate
  modified_base 50: mod_base = OTHER; note = 2'-Omethylcytosine
  modified_base 52: mod_base = OTHER; note = 2'-Omethylguanosine
  modified_base 54: mod_base = OTHER; note = Uridine phosphorothiorate
  modified_base 55: mod_base = OTHER; note = Uridine phosphorothiorate
  modified_base 56: mod_base = OTHER; note = 2'-Omethylcytosine
  modified_base 57: mod_base = OTHER; note = Guanosine phosphorothiorate
  modified_base 62: mod_base = OTHER; note = 2'-Omethylcytosine
  modified_base 63: mod_base = OTHER; note = 2'-fluorocytosine
  modified_base 65: mod_base = OTHER; note = 2'-Omethylguanosine
  modified_base 71: mod_base = OTHER; note = 2'-Omethyluridine
  modified_base 73: mod_base = OTHER; note = 2'-Omethylguanosine

SEQ ID NO: 4866 - RNA, 85 nt, synthetic construct; identical to SEQ ID NO: 3297
  source 1..85: mol_type = other RNA
  modified_base 17: mod_base = OTHER; note = 2'-Omethylguanosine
  modified_base 61: mod_base = OTHER; note = 2'-Omethylguanosine

SEQ ID NO: 4867 - RNA, 85 nt, synthetic construct; identical to SEQ ID NO: 3310
  source 1..85: mol_type = other RNA
  modified_base 1: mod_base = OTHER; note = 2'-Omethylcytosine phosphorothiorate
  modified_base 26: mod_base = OTHER; note = 2'-fluorouridine
  modified_base 30: mod_base = OTHER; note = 2'-fluoroadenosine
  modified_base 34: mod_base = OTHER; note = 2'-fluorouridine
  modified_base 44: mod_base = OTHER; note = Guanosine phosphorothiorate
  modified_base 45: mod_base = OTHER; note = Guanosine phosphorothiorate
  modified_base 56: mod_base = OTHER; note = Guanosine phosphorothiorate
  modified_base 83: mod_base = OTHER; note = Cytosine phosphorothiorate
  modified_base 84: mod_base = OTHER; note = 2'-Omethylcytosine

SEQ ID NO: 4868 - RNA, 76 nt, synthetic construct; identical to SEQ ID NO: 3318
  source 1..76: mol_type = other RNA
  modified_base 1: mod_base = OTHER; note = 2'-Omethylcytosine phosphorothiorate
  modified_base 2: mod_base = OTHER; note = 2'-Omethylcytosine phosphorothiorate
  modified_base 3: mod_base = OTHER; note = 2'-Omethyluridine
  modified_base 4: mod_base = OTHER; note = 2'-Omethyluridine
  modified_base 5: mod_base = OTHER; note = 2'-Omethylcytosine
  modified_base 6: mod_base = OTHER; note = 2'-Omethylguanosine
  modified_base 10: mod_base = OTHER; note = 2'-Omethylguanosine
  modified_base 11: mod_base = OTHER; note = 2'-Omethylcytosine
  modified_base 12: mod_base = OTHER; note = 2'-Omethyluridine
  modified_base 13: mod_base = OTHER; note = 2'-Omethylcytosine
  modified_base 18: mod_base = OTHER; note = 2'-Omethylguanosine
  modified_base 19: mod_base = OTHER; note = 2'-Omethylguanosine
  modified_base 22: mod_base = OTHER; note = 2'-Omethylguanosine
  modified_base 23: mod_base = OTHER; note = 2'-Omethyladenosine
  modified_base 24: mod_base = OTHER; note = 2'-Omethylguanosine
  modified_base 25: mod_base = OTHER; note = 2'-Omethylcytosine
  modified_base 33: mod_base = OTHER; note = 2'-fluorouridine
  modified_base 35: mod_base = OTHER; note = Uridine phosphorothiorate
  modified_base 37: mod_base = OTHER; note = Guanosine phosphorothiorate
  modified_base 38: mod_base = OTHER; note = Adenosine phosphorothiorate
  modified_base 41: mod_base = OTHER; note = 2'-fluorocytosine
  modified_base 42: mod_base = OTHER; note = 2'-Omethyluridine
  modified_base 43: mod_base = OTHER; note = 2'-Omethyluridine
  modified_base 44: mod_base = OTHER; note = 2'-fluoroadenosine
  modified_base 49: mod_base = OTHER; note = 2'-Omethylguanosine
  modified_base 50: mod_base = OTHER; note = 2'-Omethylcytosine
  modified_base 51: mod_base = OTHER; note = 2'-Omethyluridine
  modified_base 52: mod_base = OTHER; note = 2'-Omethylguanosine
  modified_base 53: mod_base = OTHER; note = 2'-Omethylguanosine
  modified_base 54: mod_base = OTHER; note = Uridine phosphorothiorate
  modified_base 55: mod_base = OTHER; note = Uridine phosphorothiorate
  modified_base 61: mod_base = OTHER; note = 2'-Omethylcytosine
  modified_base 62: mod_base = OTHER; note = 2'-Omethylcytosine
  modified_base 63: mod_base = OTHER; note = 2'-fluoroguanosine
  modified_base 64: mod_base = OTHER; note = 2'-Omethylguanosine
  modified_base 65: mod_base = OTHER; note = 2'-Omethylcytosine
  modified_base 66: mod_base = OTHER; note = 2'-Omethyluridine
  modified_base 67: mod_base = OTHER; note = 2'-Omethylcytosine
  modified_base 68: mod_base = OTHER; note = 2'-Omethylguanosine
  modified_base 73: mod_base = OTHER; note = 2'-Omethyladenosine

SEQ ID NO: 4869 - RNA, 85 nt, synthetic construct; identical to SEQ ID NO: 3288
  source 1..85: mol_type = other RNA
  modified_base 1: mod_base = OTHER; note = 2'-Omethylcytosine
  modified_base 30: mod_base = OTHER; note = 2'-fluoroadenosine
  modified_base 34: mod_base = OTHER; note = 2'-fluorocytosine
  modified_base 42: mod_base = OTHER; note = Adenosine phosphorothiorate
  modified_base 55: mod_base = OTHER; note = Cytosine phosphorothiorate
  modified_base 58: mod_base = OTHER; note = 2'-fluoroguanosine
  modified_base 59: mod_base = OTHER; note = 2'-Omethyluridine
  modified_base 67: mod_base = OTHER; note = 2'-Omethyladenosine
  modified_base 83: mod_base = OTHER; note = Cytosine phosphorothiorate
  modified_base 84: mod_base = OTHER; note = 2'-Omethylcytosine

SEQ ID NO: 4870 - RNA, 76 nt, synthetic construct; identical to SEQ ID NO: 625
  source 1..76: mol_type = other RNA
  modified_base 1: mod_base = OTHER; note = 2'-Omethylguanosine phosphorothiorate
  modified_base 2: mod_base = OTHER; note = 2'-Omethylguanosine phosphorothiorate
  modified_base 3: mod_base = OTHER; note = 2'-Omethylcytosine phosphorothiorate
  modified_base 4: mod_base = OTHER; note = 2'-Omethyluridine phosphorothiorate
  modified_base 5: mod_base = OTHER; note = 2'-Omethylcytosine phosphorothiorate
  modified_base 6: mod_base = OTHER; note = 2'-Omethylcytosine phosphorothiorate
  modified_base 10: mod_base = OTHER; note = 2'-Omethylguanosine
  modified_base 11: mod_base = OTHER; note = 2'-Omethylcytosine
  modified_base 12: mod_base = OTHER; note = 2'-Omethylguanosine
  modified_base 13: mod_base = OTHER; note = 2'-Omethylcytosine
  modified_base 14: mod_base = OTHER; note = 2'-Omethyladenosine
  modified_base 15: mod_base = OTHER; note = 2'-Omethyladenosine
  modified_base 16: mod_base = OTHER; note = 2'-Omethyluridine
  modified_base 17: mod_base = OTHER; note = 2'-Omethylguanosine
  modified_base 18: mod_base = OTHER; note = 2'-Omethylguanosine
  modified_base 19: mod_base = OTHER; note = 2'-Omethyladenosine
  modified_base 20: mod_base = OTHER; note = 2'-Omethyluridine
  modified_base 22: mod_base = OTHER; note = 2'-Omethylguanosine
  modified_base 23: mod_base = OTHER; note = 2'-Omethylcytosine
  modified_base 24: mod_base = OTHER; note = 2'-Omethylguanosine
  modified_base 25: mod_base = OTHER; note = 2'-Omethylcytosine

SEQ ID NO: 4871 - RNA, 76 nt, synthetic construct; identical to SEQ ID NO: 625
  source 1..76: mol_type = other RNA
  modified_base 1: mod_base = OTHER; note = 2'-Omethylguanosine
  modified_base 10: mod_base = OTHER; note = 2'-Omethylguanosine
  modified_base 13: mod_base = OTHER; note = 2'-Omethylcytosine
  modified_base 17: mod_base = OTHER; note = Guanosine phosphorothiorate
  modified_base 18: mod_base = OTHER; note = 2'-Omethylguanosine
  modified_base 20: mod_base = OTHER; note = 2'-Omethyluridine
  modified_base 25: mod_base = OTHER; note = 2'-Omethylcytosine
  modified_base 29: mod_base = OTHER; note = 2'-Omethylguanosine
  modified_base 33: mod_base = OTHER; note = 2'-fluorouridine
  modified_base 35: mod_base = OTHER; note = Cytosine phosphorothiorate
  modified_base 37: mod_base = OTHER; note = Adenosine phosphorothiorate
  modified_base 38: mod_base = OTHER; note = Adenosine phosphorothiorate
  modified_base 41: mod_base = OTHER; note = 2'-fluorocytosine phosphorothiorate
  modified_base 43: mod_base = OTHER; note = 2'-Omethyladenosine
  modified_base 44: mod_base = OTHER; note = 2'-fluoroadenosine
  modified_base 50: mod_base = OTHER; note = 2'-Omethylcytosine
  modified_base 52: mod_base = OTHER; note = 2'-Omethylguanosine
  modified_base 54: mod_base = OTHER; note = Uridine phosphorothiorate
  modified_base 55: mod_base = OTHER; note = Uridine phosphorothiorate
  modified_base 56: mod_base = OTHER; note = 2'-Omethylcytosine
  modified_base 57: mod_base = OTHER; note = Guanosine phosphorothiorate
  modified_base 62: mod_base = OTHER; note = 2'-Omethylcytosine
  modified_base 63: mod_base = OTHER; note = 2'-fluorocytosine
  modified_base 65: mod_base = OTHER; note = 2'-Omethylguanosine
  modified_base 71: mod_base = OTHER; note = 2'-Omethyluridine
  modified_base 73: mod_base = OTHER; note = 2'-Omethylguanosine

SEQ ID NO: 4872 - RNA, 76 nt, synthetic construct; identical to SEQ ID NO: 625
  source 1..76: mol_type = other RNA
  modified_base 4: mod_base = OTHER; note = 2'-fluorouridine
  modified_base 9: mod_base = OTHER; note = Guanosine phosphorothiorate
  modified_base 10: mod_base = OTHER; note = 2'-Omethylguanosine
  modified_base 11: mod_base = OTHER; note = Cytosine phosphorothiorate
  modified_base 12: mod_base = OTHER; note = 2'-fluoroguanosine
  modified_base 24: mod_base = OTHER; note = 2'-fluoroguanosine
  modified_base 26: mod_base = OTHER; note = 2'-Omethyladenosine
  modified_base 27: mod_base = OTHER; note = Uridine phosphorothiorate
  modified_base 28: mod_base = OTHER; note = 2'-Omethyluridine
  modified_base 30: mod_base = OTHER; note = 2'-Omethylguanosine phosphorothiorate
  modified_base 31: mod_base = OTHER; note = 2'-Omethyladenosine
  modified_base 32: mod_base = OTHER; note = 2'-fluorocytosine
  modified_base 37: mod_base = OTHER; note = Adenosine phosphorothiorate
  modified_base 38: mod_base = OTHER; note = 2'-Omethyladenosine phosphorothiorate
  modified_base 39: mod_base = OTHER; note = 2'-fluorouridine
  modified_base 40: mod_base = OTHER; note = 2'-fluorouridine
  modified_base 41: mod_base = OTHER; note = 2'-Omethylcytosine
  modified_base 42: mod_base = OTHER; note = 2'-fluoroadenosine
  modified_base 44: mod_base = OTHER; note = 2'-Omethyladenosine
  modified_base 48: mod_base = OTHER; note = 2'-fluorouridine
  modified_base 49: mod_base = OTHER; note = Cytosine phosphorothiorate
  modified_base 50: mod_base = OTHER; note = 2'-fluorocytosine
  modified_base 52: mod_base = OTHER; note = 2'-fluoroguanosine
  modified_base 56: mod_base = OTHER; note = 2'-fluorocytosine
  modified_base 58: mod_base = OTHER; note = 2'-fluoroadenosine
  modified_base 63: mod_base = OTHER; note = 2'-Omethylcytosine
  modified_base 64: mod_base = OTHER; note = Guanosine phosphorothiorate
  modified_base 65: mod_base = OTHER; note = 2'-Omethylguanosine
  modified_base 66: mod_base = OTHER; note = 2'-Omethylcytosine
  modified_base 68: mod_base = OTHER; note = 2'-fluoroguanosine
  modified_base 70: mod_base = OTHER; note = 2'-fluoroguanosine
  modified_base 71: mod_base = OTHER; note = Uridine phosphorothiorate
  modified_base 72: mod_base = OTHER; note = 2'-fluorocytosine
  modified_base 73: mod_base = OTHER; note = 2'-Omethylguanosine
  modified_base 74: mod_base = OTHER; note = Cytosine phosphorothiorate
  modified_base 75: mod_base = OTHER; note = 2'-Omethylcytosine phosphorothiorate
  modified_base 76: mod_base = OTHER; note = 2'-fluoroadenosine

SEQ ID NO: 4873 - RNA, 76 nt, synthetic construct; identical to SEQ ID NO: 625
  source 1..76: mol_type = other RNA
  modified_base 1: mod_base = OTHER; note = 2'-Omethylguanosine phosphorothiorate
  modified_base 2: mod_base = OTHER; note = 2'-Omethylguanosine
  modified_base 3: mod_base = OTHER; note = 2'-Omethylcytosine
  modified_base 10: mod_base = OTHER; note = 2'-Omethylguanosine
  modified_base 11: mod_base = OTHER; note = 2'-Omethylcytosine
  modified_base 12: mod_base = OTHER; note = 2'-Omethylguanosine
  modified_base 13: mod_base = OTHER; note = 2'-Omethylcytosine
  modified_base 14: mod_base = OTHER; note = 2'-Omethyladenosine
  modified_base 15: mod_base = OTHER; note = 2'-fluoroadenosine
  modified_base 16: mod_base = OTHER; note = 2'-Omethyluridine
  modified_base 17: mod_base = OTHER; note = 2'-Omethylguanosine
  modified_base 18: mod_base = OTHER; note = 2'-Omethylguanosine
  modified_base 19: mod_base = OTHER; note = 2'-fluoroadenosine
  modified_base 20: mod_base = OTHER; note = 2'-Omethyluridine
  modified_base 22: mod_base = OTHER; note = 2'-Omethylguanosine
  modified_base 23: mod_base = OTHER; note = 2'-Omethylcytosine
  modified_base 24: mod_base = OTHER; note = 2'-Omethylguanosine
  modified_base 25: mod_base = OTHER; note = 2'-Omethylcytosine
  modified_base 38: mod_base = OTHER; note = Adenosine phosphorothiorate
  modified_base 39: mod_base = OTHER; note = Uridine phosphorothiorate
  modified_base 40: mod_base = OTHER; note = 2'-fluorouridine
  modified_base 43: mod_base = OTHER; note = 2'-Omethyladenosine
  modified_base 44: mod_base = OTHER; note = 2'-Omethyladenosine
  modified_base 45: mod_base = OTHER; note = 2'-Omethylguanosine
  modified_base 46: mod_base = OTHER; note = 2'-fluoroguanosine
  modified_base 48: mod_base = OTHER; note = 2'-fluorouridine
  modified_base 49: mod_base = OTHER; note = 2'-Omethylcytosine
  modified_base 50: mod_base = OTHER; note = 2'-Omethylcytosine
  modified_base 54: mod_base = OTHER; note = Uridine phosphorothiorate
  modified_base 55: mod_base = OTHER; note = Uridine phosphorothiorate
  modified_base 56: mod_base = OTHER; note = 2'-Omethylcytosine
  modified_base 57: mod_base = OTHER; note = Guanosine phosphorothiorate
  modified_base 61: mod_base = OTHER; note = 2'-Omethylcytosine
  modified_base 62: mod_base = OTHER; note = 2'-Omethylcytosine
  modified_base 63: mod_base = OTHER; note = 2'-fluorocytosine
  modified_base 64: mod_base = OTHER; note = 2'-Omethylguanosine
  modified_base 65: mod_base = OTHER; note = 2'-Omethylguanosine
  modified_base 66: mod_base = OTHER; note = 2'-Omethylcytosine
  modified_base 67: mod_base = OTHER; note = 2'-Omethylguanosine
  modified_base 68: mod_base = OTHER; note = 2'-Omethylguanosine
  modified_base 69: mod_base = OTHER; note = 2'-Omethyladenosine

SEQ ID NO: 4874 - RNA, 76 nt, synthetic construct; identical to SEQ ID NO: 625
  source 1..76: mol_type = other RNA
  modified_base 1: mod_base = OTHER; note = 2'-Omethylguanosine
  modified_base 3: mod_base = OTHER; note = 2'-fluorocytosine
  modified_base 10: mod_base = OTHER; note = 2'-Omethylguanosine
  modified_base 13: mod_base = OTHER; note = 2'-Omethylcytosine
  modified_base 17: mod_base = OTHER; note = Guanosine phosphorothiorate
  modified_base 18: mod_base = OTHER; note = 2'-Omethylguanosine
  modified_base 19: mod_base = OTHER; note = Adenosine phosphorothiorate
  modified_base 20: mod_base = OTHER; note = 2'-Omethyluridine
  modified_base 25: mod_base = OTHER; note = 2'-Omethylcytosine
  modified_base 29: mod_base = OTHER; note = 2'-Omethylguanosine
  modified_base 33: mod_base = OTHER; note = 2'-fluorouridine
  modified_base 35: mod_base = OTHER; note = Cytosine phosphorothiorate
  modified_base 37: mod_base = OTHER; note = Adenosine phosphorothiorate
  modified_base 38: mod_base = OTHER; note = Adenosine phosphorothiorate
  modified_base 43: mod_base = OTHER; note = 2'-Omethyladenosine
  modified_base 44: mod_base = OTHER; note = 2'-fluoroadenosine
  modified_base 46: mod_base = OTHER; note = Guanosine phosphorothiorate
  modified_base 50: mod_base = OTHER; note = 2'-Omethylcytosine
  modified_base 52: mod_base = OTHER; note = 2'-Omethylguanosine
  modified_base 54: mod_base = OTHER; note = Uridine phosphorothiorate
  modified_base 55: mod_base = OTHER; note = Uridine phosphorothiorate
  modified_base 56: mod_base = OTHER; note = 2'-Omethylcytosine
  modified_base 57: mod_base = OTHER; note = Guanosine phosphorothiorate
  modified_base 62: mod_base = OTHER; note = 2'-Omethylcytosine
  modified_base 63: mod_base = OTHER; note = 2'-fluorocytosine
  modified_base 65: mod_base = OTHER; note = 2'-Omethylguanosine
  modified_base 71: mod_base = OTHER; note = 2'-Omethyluridine
  modified_base 73: mod_base = OTHER; note = 2'-Omethylguanosine

SEQ ID NO: 4875 - RNA, 76 nt, synthetic construct; identical to SEQ ID NO: 3447
  source 1..76: mol_type = other RNA
  modified_base 1: mod_base = OTHER; note = 2'-Omethylguanosine
  modified_base 2: mod_base = OTHER; note = 2'-Omethylcytosine
  modified_base 3: mod_base = OTHER; note = 2'-Omethylcytosine
  modified_base 4: mod_base = OTHER; note = 2'-Omethylcytosine
  modified_base 5: mod_base = OTHER; note = 2'-Omethylguanosine
  modified_base 6: mod_base = OTHER; note = 2'-Omethyladenosine
  modified_base 14: mod_base = OTHER; note = 2'-Omethyladenosine
  modified_base 15: mod_base = OTHER; note = 2'-Omethyladenosine
  modified_base 16: mod_base = OTHER; note = 2'-Omethyluridine
  modified_base 17: mod_base = OTHER; note = 2'-Omethylguanosine
  modified_base 18: mod_base = OTHER; note = 2'-Omethylguanosine
  modified_base 20: mod_base = OTHER; note = 2'-Omethyluridine
  modified_base 25: mod_base = OTHER; note = 2'-Omethylcytosine
  modified_base 41: mod_base = OTHER; note = 2'-Omethylcytosine
  modified_base 42: mod_base = OTHER; note = 2'-Omethyladenosine
  modified_base 43: mod_base = OTHER; note = 2'-Omethyladenosine
  modified_base 44: mod_base = OTHER; note = 2'-Omethyladenosine
  modified_base 49: mod_base = OTHER; note = 2'-Omethylcytosine
  modified_base 50: mod_base = OTHER; note = 2'-Omethylcytosine
  modified_base 52: mod_base = OTHER; note = 2'-Omethylguanosine
  modified_base 54: mod_base = OTHER; note = 2'-Omethyluridine
  modified_base 55: mod_base = OTHER; note = Uridine phosphorothiorate
  modified_base 56: mod_base = OTHER; note = 2'-Omethylcytosine
  modified_base 57: mod_base = OTHER; note = 2'-fluoroguanosine
  modified_base 59: mod_base = OTHER; note = 2'-Omethylguanosine
  modified_base 61: mod_base = OTHER; note = 2'-Omethylcytosine
  modified_base 65: mod_base = OTHER; note = 2'-Omethylguanosine
  modified_base 73: mod_base = OTHER; note = 2'-Omethylguanosine

SEQ ID NO: 4876 - RNA, 76 nt, synthetic construct; identical to SEQ ID NO: 625
  source 1..76: mol_type = other RNA
  modified_base 1: mod_base = OTHER; note = 2'-fluoroguanosine
  modified_base 3: mod_base = OTHER; note = 2'-fluorocytosine phosphorothiorate
  modified_base 8: mod_base = OTHER; note = Uridine phosphorothiorate
  modified_base 11: mod_base = OTHER; note = 2'-fluorocytosine phosphorothiorate
  modified_base 13: mod_base = OTHER; note = Cytosine phosphorothiorate
  modified_base 14: mod_base = OTHER; note = 2'-Omethyladenosine
  modified_base 20: mod_base = OTHER; note = 2'-Omethyluridine
  modified_base 22: mod_base = OTHER; note = 2'-Omethylguanosine
  modified_base 25: mod_base = OTHER; note = 2'-Omethylcytosine
  modified_base 26: mod_base = OTHER; note = 2'-Omethyladenosine
  modified_base 27: mod_base = OTHER; note = 2'-fluorouridine
  modified_base 29: mod_base = OTHER; note = Guanosine phosphorothiorate
  modified_base 30: mod_base = OTHER; note = 2'-fluoroguanosine
  modified_base 33: mod_base = OTHER; note = 2'-fluorouridine phosphorothiorate
  modified_base 34: mod_base = OTHER; note = 2'-Omethyluridine phosphorothiorate
  modified_base 41: mod_base = OTHER; note = 2'-fluorocytosine
  modified_base 42: mod_base = OTHER; note = 2'-fluoroadenosine
  modified_base 43: mod_base = OTHER; note = 2'-Omethyladenosine phosphorothiorate
  modified_base 44: mod_base = OTHER; note = 2'-fluoroadenosine
  modified_base 46: mod_base = OTHER; note = Guanosine phosphorothiorate
  modified_base 47: mod_base = OTHER; note = 2'-fluorouridine
  modified_base 48: mod_base = OTHER; note = 2'-Omethyluridine
  modified_base 50: mod_base = OTHER; note = Cytosine phosphorothiorate
  modified_base 51: mod_base = OTHER; note = 2'-Omethylguanosine
  modified_base 52: mod_base = OTHER; note = Guanosine phosphorothiorate
  modified_base 53: mod_base = OTHER; note = 2'-fluoroguanosine phosphorothiorate
  modified_base 54: mod_base = OTHER; note = 2'-Omethyluridine
  modified_base 60: mod_base = OTHER; note = 2'-Omethyluridine
  modified_base 64: mod_base = OTHER; note = Guanosine phosphorothiorate
  modified_base 65: mod_base = OTHER; note = Guanosine phosphorothiorate
  modified_base 66: mod_base = OTHER; note = 2'-Omethylcytosine
  modified_base 68: mod_base = OTHER; note = 2'-Omethylguanosine
  modified_base 71: mod_base = OTHER; note = 2'-Omethyluridine
  modified_base 72: mod_base = OTHER; note = Cytosine phosphorothiorate
  modified_base 74: mod_base = OTHER; note = 2'-fluorocytosine
  modified_base 75: mod_base = OTHER; note = 2'-fluorocytosine

SEQ ID NO: 4877 - RNA, 85 nt, synthetic construct; identical to SEQ ID NO: 3286
  source 1..85: mol_type = other RNA
  modified_base 1: mod_base = OTHER; note = 2'-Omethylcytosine
  modified_base 6: mod_base = OTHER; note = Adenosine phosphorothiorate
  modified_base 11: mod_base = OTHER; note = Cytosine phosphorothiorate
  modified_base 45: mod_base = OTHER; note = Guanosine phosphorothiorate
  modified_base 47: mod_base = OTHER; note = Cytosine phosphorothiorate
  modified_base 84: mod_base = OTHER; note = 2'-Omethylcytosine phosphorothiorate

SEQ ID NO: 4878 - RNA, 85 nt, synthetic construct; identical to SEQ ID NO: 3297
  source 1..85: mol_type = other RNA
  modified_base 1: mod_base = OTHER; note = 2'-Omethylguanosine
  modified_base 2: mod_base = OTHER; note = 2'-Omethylcytosine
  modified_base 3: mod_base = OTHER; note = 2'-Omethyluridine
  modified_base 4: mod_base = OTHER; note = 2'-Omethylguanosine
  modified_base 5: mod_base = OTHER; note = 2'-Omethyluridine
  modified_base 6: mod_base = OTHER; note = 2'-Omethylguanosine
  modified_base 14: mod_base = OTHER; note = 2'-Omethyladenosine
  modified_base 15: mod_base = OTHER; note = 2'-fluoroguanosine
  modified_base 16: mod_base = OTHER; note = 2'-Omethyluridine
  modified_base 17: mod_base = OTHER; note = 2'-Omethylguanosine
  modified_base 18: mod_base = OTHER; note = 2'-Omethylguanosine
  modified_base 19: mod_base = OTHER; note = 2'-fluorouridine
  modified_base 20: mod_base = OTHER; note = 2'-Omethyluridine
  modified_base 22: mod_base = OTHER; note = 2'-Omethyladenosine
  modified_base 23: mod_base = OTHER; note = 2'-Omethylguanosine
  modified_base 24: mod_base = OTHER; note = 2'-Omethylguanosine
  modified_base 25: mod_base = OTHER; note = 2'-Omethylcytosine
  modified_base 82: mod_base = OTHER; note = 2'-Omethylguanosine

SEQ ID NO: 4879 - RNA, 85 nt, synthetic construct; identical to SEQ ID NO: 3297
  source 1..85: mol_type = other RNA
  modified_base 1: mod_base = OTHER; note = 2'-Omethylguanosine phosphorothiorate
  modified_base 2: mod_base = OTHER; note = 2'-Omethylcytosine
  modified_base 13: mod_base = OTHER; note = Guanosine phosphorothiorate
  modified_base 14: mod_base = OTHER; note = 2'-Omethyladenosine
  modified_base 64: mod_base = OTHER; note = Uridine phosphorothiorate
  modified_base 83: mod_base = OTHER; note = Cytosine phosphorothiorate
  modified_base 84: mod_base = OTHER; note = 2'-Omethylcytosine

SEQ ID NO: 4880 - RNA, 86 nt, synthetic construct; identical to SEQ ID NO: 3290
  source 1..86: mol_type = other RNA
  modified_base 1: mod_base = OTHER; note = 2'-Omethyladenosine
  modified_base 58: mod_base = OTHER; note = 2'-fluorocytosine
  modified_base 83: mod_base = OTHER; note = 2'-Omethyladenosine

SEQ ID NO: 4881 - RNA, 76 nt, synthetic construct; identical to SEQ ID NO: 3318
  source 1..76: mol_type = other RNA
  modified_base 1: mod_base = OTHER; note = 2'-Omethylcytosine
  modified_base 46: mod_base = OTHER; note = 2'-fluoroguanosine
  modified_base 48: mod_base = OTHER; note = 2'-fluorocytosine
  modified_base 73: mod_base = OTHER; note = 2'-Omethyladenosine

SEQ ID NO: 4882 - RNA, 76 nt, synthetic construct; identical to SEQ ID NO: 625
  source 1..76: mol_type = other RNA
  modified_base 1: mod_base = OTHER; note = 2'-Omethylguanosine
  modified_base 10: mod_base = OTHER; note = 2'-Omethylguanosine
  modified_base 13: mod_base = OTHER; note = 2'-Omethylcytosine
  modified_base 17: mod_base = OTHER; note = Guanosine phosphorothiorate
  modified_base 18: mod_base = OTHER; note = 2'-Omethylguanosine
  modified_base 19: mod_base = OTHER; note = Adenosine phosphorothiorate
  modified_base 20: mod_base = OTHER; note = 2'-Omethyluridine
  modified_base 25: mod_base = OTHER; note = 2'-Omethylcytosine
  modified_base 29: mod_base = OTHER; note = 2'-Omethylguanosine
  modified_base 33: mod_base = OTHER; note = 2'-fluorouridine
  modified_base 35: mod_base = OTHER; note = Cytosine phosphorothiorate
  modified_base 37: mod_base = OTHER; note = Adenosine phosphorothiorate
  modified_base 38: mod_base = OTHER; note = Adenosine phosphorothiorate
  modified_base 43: mod_base = OTHER; note = 2'-Omethyladenosine
  modified_base 44: mod_base = OTHER; note = 2'-fluoroadenosine
  modified_base 46: mod_base = OTHER; note = Guanosine phosphorothiorate
  modified_base 50: mod_base = OTHER; note = 2'-Omethylcytosine
  modified_base 52: mod_base = OTHER; note = 2'-Omethylguanosine
  modified_base 54: mod_base = OTHER; note = Uridine phosphorothiorate
  modified_base 56: mod_base = OTHER; note = 2'-Omethylcytosine
  modified_base 57: mod_base = OTHER; note = Guanosine phosphorothiorate
  modified_base 62: mod_base = OTHER; note = 2'-Omethylcytosine
  modified_base 63: mod_base = OTHER; note = 2'-fluorocytosine
  modified_base 65: mod_base = OTHER; note = 2'-Omethylguanosine
  modified_base 71: mod_base = OTHER; note = 2'-Omethyluridine
  modified_base 73: mod_base = OTHER; note = 2'-Omethylguanosine

SEQ ID NO: 4883 - RNA, 76 nt, synthetic construct; identical to SEQ ID NO: 3289
  source 1..76: mol_type = other RNA
  modified_base 1: mod_base = OTHER; note = 2'-Omethylguanosine
  modified_base 2: mod_base = OTHER; note = 2'-Omethylcytosine
  modified_base 3: mod_base = OTHER; note = 2'-Omethylcytosine
  modified_base 4: mod_base = OTHER; note = 2'-Omethyluridine
  modified_base 5: mod_base = OTHER; note = 2'-Omethylguanosine
  modified_base 6: mod_base = OTHER; note = 2'-Omethylguanosine
  modified_base 14: mod_base = OTHER; note = 2'-Omethyladenosine
  modified_base 15: mod_base = OTHER; note = 2'-fluoroguanosine
  modified_base 16: mod_base = OTHER; note = 2'-Omethyluridine
  modified_base 18: mod_base = OTHER; note = 2'-Omethylguanosine
  modified_base 19: mod_base = OTHER; note = 2'-Omethylguanosine
  modified_base 20: mod_base = OTHER; note = 2'-fluorouridine
  modified_base 25: mod_base = OTHER; note = 2'-Omethylcytosine
  modified_base 33: mod_base = OTHER; note = 2'-fluorouridine
  modified_base 35: mod_base = OTHER; note = Uridine phosphorothiorate
  modified_base 37: mod_base = OTHER; note = Adenosine phosphorothiorate
  modified_base 38: mod_base = OTHER; note = Adenosine phosphorothiorate
  modified_base 41: mod_base = OTHER; note = 2'-Omethyluridine
  modified_base 42: mod_base = OTHER; note = 2'-Omethylguanosine
  modified_base 43: mod_base = OTHER; note = 2'-Omethyladenosine
  modified_base 44: mod_base = OTHER; note = 2'-Omethylguanosine
  modified_base 49: mod_base = OTHER; note = 2'-Omethylcytosine
  modified_base 50: mod_base = OTHER; note = 2'-Omethyladenosine
  modified_base 52: mod_base = OTHER; note = 2'-Omethylguanosine
  modified_base 54: mod_base = OTHER; note = 2'-Omethyluridine
  modified_base 55: mod_base = OTHER; note = Uridine phosphorothiorate
  modified_base 56: mod_base = OTHER; note = 2'-Omethylcytosine
  modified_base 57: mod_base = OTHER; note = 2'-fluoroadenosine
  modified_base 59: mod_base = OTHER; note = 2'-Omethylguanosine
  modified_base 61: mod_base = OTHER; note = 2'-Omethylcytosine
  modified_base 65: mod_base = OTHER; note = 2'-Omethylguanosine
  modified_base 73: mod_base = OTHER; note = 2'-Omethylguanosine

SEQ ID NO: 4884 - RNA, 85 nt, synthetic construct; identical to SEQ ID NO: 3286
  source 1..85: mol_type = other RNA
  modified_base 1: mod_base = OTHER; note = 2'-Omethylcytosine
  modified_base 2: mod_base = OTHER; note = 2'-Omethylcytosine phosphorothiorate
  modified_base 12: mod_base = OTHER; note = Guanosine phosphorothiorate
  modified_base 16: mod_base = OTHER; note = Guanosine phosphorothiorate
  modified_base 27: mod_base = OTHER; note = 2'-fluorouridine
  modified_base 29: mod_base = OTHER; note = 2'-fluoroguanosine
  modified_base 32: mod_base = OTHER; note = 2'-fluorouridine
  modified_base 33: mod_base = OTHER; note = 2'-fluorouridine
  modified_base 36: mod_base = OTHER; note = Guanosine phosphorothiorate
  modified_base 42: mod_base = OTHER; note = Adenosine phosphorothiorate
  modified_base 45: mod_base = OTHER; note = Guanosine phosphorothiorate
  modified_base 48: mod_base = OTHER; note = 2'-Omethyladenosine
  modified_base 55: mod_base = OTHER; note = Cytosine phosphorothiorate
  modified_base 57: mod_base = OTHER; note = 2'-Omethylcytosine
  modified_base 84: mod_base = OTHER; note = 2'-Omethylcytosine
  modified_base 85: mod_base = OTHER; note = 2'-Omethyladenosine

SEQ ID NO: 4885 - RNA, 85 nt, synthetic construct; identical to SEQ ID NO: 3297
  source 1..85: mol_type = other RNA
  modified_base 1: mod_base = OTHER; note = 2'-Omethylguanosine
  modified_base 13: mod_base = OTHER; note = 2'-Omethylguanosine
  modified_base 14: mod_base = OTHER; note = 2'-Omethyladenosine
  modified_base 15: mod_base = OTHER; note = 2'-Omethylguanosine
  modified_base 16: mod_base = OTHER; note = 2'-Omethyluridine
  modified_base 17: mod_base = OTHER; note = 2'-Omethylguanosine
  modified_base 18: mod_base = OTHER; note = 2'-Omethylguanosine
  modified_base 19: mod_base = OTHER; note = Uridine phosphorothiorate
  modified_base 20: mod_base = OTHER; note = 2'-Omethyluridine
  modified_base 21: mod_base = OTHER; note = Adenosine phosphorothiorate
  modified_base 25: mod_base = OTHER; note = 2'-Omethylcytosine
  modified_base 33: mod_base = OTHER; note = 2'-fluorouridine
  modified_base 34: mod_base = OTHER; note = 2'-Omethyluridine
  modified_base 35: mod_base = OTHER; note = Cytosine phosphorothiorate
  modified_base 37: mod_base = OTHER; note = Adenosine phosphorothiorate
  modified_base 38: mod_base = OTHER; note = Adenosine phosphorothiorate
  modified_base 58: mod_base = OTHER; note = 2'-Omethylguanosine
  modified_base 59: mod_base = OTHER; note = 2'-Omethylcytosine
  modified_base 60: mod_base = OTHER; note = 2'-Omethyladenosine
  modified_base 61: mod_base = OTHER; note = 2'-Omethylguanosine
  modified_base 62: mod_base = OTHER; note = 2'-Omethylguanosine
  modified_base 63: mod_base = OTHER; note = Uridine phosphorothiorate
  modified_base 64: mod_base = OTHER; note = Uridine phosphorothiorate
  modified_base 70: mod_base = OTHER; note = 2'-Omethylcytosine
  modified_base 74: mod_base = OTHER; note = 2'-Omethylcytosine
  modified_base 82: mod_base = OTHER; note = 2'-Omethylguanosine

SEQ ID NO: 4886 - RNA, 75 nt, synthetic construct; identical to SEQ ID NO: 3306
  source 1..75: mol_type = other RNA
  modified_base 26: mod_base = OTHER; note = 2'-Omethyluridine
  modified_base 27: mod_base = OTHER; note = 2'-Omethylcytosine
  modified_base 28: mod_base = OTHER; note = 2'-Omethyluridine
  modified_base 29: mod_base = OTHER; note = 2'-Omethylguanosine
  modified_base 30: mod_base = OTHER; note = 2'-Omethyladenosine

SEQ ID NO: 4887 - RNA, 76 nt, synthetic construct; identical to SEQ ID NO: 3318
  source 1..76: mol_type = other RNA
  modified_base 1: mod_base = OTHER; note = 2'-Omethylcytosine
  modified_base 2: mod_base = OTHER; note = 2'-Omethylcytosine
  modified_base 3: mod_base = OTHER; note = 2'-Omethyluridine
  modified_base 4: mod_base = OTHER; note = 2'-Omethyluridine
  modified_base 5: mod_base = OTHER; note = 2'-Omethylcytosine
  modified_base 6: mod_base = OTHER; note = 2'-Omethylguanosine
  modified_base 14: mod_base = OTHER; note = 2'-Omethyladenosine
  modified_base 15: mod_base = OTHER; note = 2'-fluoroguanosine
  modified_base 16: mod_base = OTHER; note = 2'-Omethyluridine
  modified_base 18: mod_base = OTHER; note = 2'-Omethylguanosine
  modified_base 19: mod_base = OTHER; note = 2'-Omethylguanosine
  modified_base 20: mod_base = OTHER; note = 2'-fluorouridine
  modified_base 22: mod_base = OTHER; note = 2'-Omethylguanosine
  modified_base 23: mod_base = OTHER; note = 2'-Omethyladenosine
  modified_base 24: mod_base = OTHER; note = 2'-Omethylguanosine
  modified_base 25: mod_base = OTHER; note = 2'-Omethylcytosine
  modified_base 73: mod_base = OTHER; note = 2'-Omethyladenosine

SEQ ID NO: 4888 - RNA, 76 nt, synthetic construct; identical to SEQ ID NO: 3295
  source 1..76: mol_type = other RNA
  modified_base 1: mod_base = OTHER; note = 2'-Omethylcytosine
  modified_base 6: mod_base = OTHER; note = Guanosine phosphorothiorate
  modified_base 9: mod_base = OTHER; note = 2'-fluoroadenosine
  modified_base 17: mod_base = OTHER; note = 2'-Omethyluridine
  modified_base 25: mod_base = OTHER; note = 2'-Omethylcytosine phosphorothiorate
  modified_base 26: mod_base = OTHER; note = 2'-fluoroguanosine phosphorothiorate
  modified_base 28: mod_base = OTHER; note = 2'-fluoroadenosine
  modified_base 43: mod_base = OTHER; note = 2'-fluorouridine
  modified_base 48: mod_base = OTHER; note = 2'-Omethylcytosine
  modified_base 53: mod_base = OTHER; note = Guanosine phosphorothiorate
  modified_base 70: mod_base = OTHER; note = 2'-fluoroadenosine
  modified_base 76: mod_base = OTHER; note = 2'-Omethyladenosine

SEQ ID NO: 4889 - RNA, 75 nt, synthetic construct; identical to SEQ ID NO: 3299
  source 1..75: mol_type = other RNA
  modified_base 9: mod_base = OTHER; note = 2'-fluoroguanosine phosphorothiorate
  modified_base 21: mod_base = OTHER; note = 2'-fluoroguanosine phosphorothiorate
  modified_base 37: mod_base = OTHER; note = 2'-Omethyladenosine
  modified_base 45: mod_base = OTHER; note = 2'-fluoroguanosine
  modified_base 46: mod_base = OTHER; note = 2'-fluorouridine
  modified_base 49: mod_base = OTHER; note = Adenosine phosphorothiorate
  modified_base 56: mod_base = OTHER; note = 2'-fluoroadenosine phosphorothiorate
  modified_base 72: mod_base = OTHER; note = Guanosine phosphorothiorate
  modified_base 74: mod_base = OTHER; note = 2'-Omethylcytosine

SEQ ID NO: 4890 - RNA, 74 nt, synthetic construct; identical to SEQ ID NO: 3293
  source 1..74: mol_type = other RNA
  modified_base 1: mod_base = OTHER; note = 2'-fluoroadenosine
  modified_base 2: mod_base = OTHER; note = Cytosine phosphorothiorate
  modified_base 3: mod_base = OTHER; note = Cytosine phosphorothiorate
  modified_base 4: mod_base = OTHER; note = Uridine phosphorothiorate
  modified_base 9: mod_base = OTHER; note = 2'-fluoroguanosine
  modified_base 15: mod_base = OTHER; note = 2'-fluorocytosine
  modified_base 24: mod_base = OTHER; note = 2'-fluoroguanosine
  modified_base 26: mod_base = OTHER; note = 2'-fluorocytosine
  modified_base 35: mod_base = OTHER; note = 2'-Omethylguanosine
  modified_base 42: mod_base = OTHER; note = Adenosine phosphorothiorate
  modified_base 43: mod_base = OTHER; note = 2'-fluoroguanosine
  modified_base 48: mod_base = OTHER; note = Cytosine phosphorothiorate
  modified_base 50: mod_base = OTHER; note = Uridine phosphorothiorate
  modified_base 55: mod_base = OTHER; note = 2'-Omethyladenosine phosphorothiorate
  modified_base 62: mod_base = OTHER; note = Guanosine phosphorothiorate
  modified_base 73: mod_base = OTHER; note = 2'-Omethylcytosine phosphorothiorate
  modified_base 74: mod_base = OTHER; note = 2'-Omethyladenosine

SEQ ID NO: 4891 - RNA, 74 nt, synthetic construct; identical to SEQ ID NO: 3293
  source 1..74: mol_type = other RNA
  modified_base 1: mod_base = OTHER; note = 2'-fluoroadenosine phosphorothiorate
  modified_base 7: mod_base = OTHER; note = 2'-fluorouridine
  modified_base 12: mod_base = OTHER; note = 2'-fluorocytosine
  modified_base 25: mod_base = OTHER; note = 2'-fluorouridine
  modified_base 34: mod_base = OTHER; note = 2'-fluoroadenosine
  modified_base 46: mod_base = OTHER; note = 2'-fluorouridine
  modified_base 48: mod_base = OTHER; note = Cytosine phosphorothiorate
  modified_base 60: mod_base = OTHER; note = Adenosine phosphorothiorate
  modified_base 73: mod_base = OTHER; note = 2'-Omethylcytosine phosphorothiorate
  modified_base 74: mod_base = OTHER; note = 2'-fluoroadenosine

SEQ ID NO: 4892 - RNA, 75 nt, synthetic construct; identical to SEQ ID NO: 1045
  source 1..75: mol_type = other RNA
  modified_base 1: mod_base = OTHER; note = 2'-Omethylguanosine phosphorothiorate
  modified_base 2: mod_base = OTHER; note = 2'-Omethylguanosine phosphorothiorate
  modified_base 3: mod_base = OTHER; note = 2'-Omethyluridine phosphorothiorate
  modified_base 4: mod_base = OTHER; note = 2'-Omethyluridine phosphorothiorate
  modified_base 16: mod_base = OTHER; note = 2'-Omethyluridine
  modified_base 22: mod_base = OTHER; note = Guanosine phosphorothiorate
  modified_base 28: mod_base = OTHER; note = Uridine phosphorothiorate
  modified_base 33: mod_base = OTHER; note = 2'-fluorouridine phosphorothiorate
  modified_base 57: mod_base = OTHER; note = 2'-fluoroadenosine
  modified_base 58: mod_base = OTHER; note = 2'-Omethylguanosine
  modified_base 60: mod_base = OTHER; note = 2'-Omethylcytosine
  modified_base 65: mod_base = OTHER; note = 2'-Omethyluridine
  modified_base 66: mod_base = OTHER; note = 2'-fluoroguanosine
  modified_base 72: mod_base = OTHER; note = 2'-Omethyluridine
  modified_base 74: mod_base = OTHER; note = 2'-Omethylcytosine phosphorothiorate

SEQ ID NO: 4893 - RNA, 76 nt, synthetic construct; identical to SEQ ID NO: 3316
  source 1..76: mol_type = other RNA
  modified_base 1: mod_base = OTHER; note = 2'-Omethyladenosine
  modified_base 2: mod_base = OTHER; note = 2'-Omethylcytosine
  modified_base 3: mod_base = OTHER; note = 2'-Omethylcytosine
  modified_base 4: mod_base = OTHER; note = 2'-Omethyladenosine
  modified_base 5: mod_base = OTHER; note = 2'-Omethyladenosine
  modified_base 6: mod_base = OTHER; note = 2'-Omethylcytosine
  modified_base 16: mod_base = OTHER; note = 2'-Omethyluridine
  modified_base 17: mod_base = OTHER; note = 2'-Omethylguanosine
  modified_base 18: mod_base = OTHER; note = 2'-Omethylguanosine
  modified_base 20: mod_base = OTHER; note = 2'-Omethyluridine
  modified_base 25: mod_base = OTHER; note = 2'-Omethylcytosine
  modified_base 33: mod_base = OTHER; note = 2'-fluorouridine
  modified_base 35: mod_base = OTHER; note = Cytosine phosphorothiorate
  modified_base 37: mod_base = OTHER; note = Adenosine phosphorothiorate
  modified_base 38: mod_base = OTHER; note = Adenosine phosphorothiorate
  modified_base 41: mod_base = OTHER; note = 2'-Omethylcytosine
  modified_base 42: mod_base = OTHER; note = 2'-Omethyladenosine
  modified_base 43: mod_base = OTHER; note = 2'-Omethyladenosine
  modified_base 44: mod_base = OTHER; note = 2'-Omethyladenosine
  modified_base 49: mod_base = OTHER; note = 2'-Omethylcytosine
  modified_base 50: mod_base = OTHER; note = 2'-Omethylcytosine
  modified_base 52: mod_base = OTHER; note = 2'-Omethylguanosine
  modified_base 54: mod_base = OTHER; note = Uridine phosphorothiorate
  modified_base 55: mod_base = OTHER; note = Uridine phosphorothiorate
  modified_base 61: mod_base = OTHER; note = 2'-Omethylcytosine
  modified_base 65: mod_base = OTHER; note = 2'-Omethylguanosine
  modified_base 73: mod_base = OTHER; note = 2'-Omethylguanosine

SEQ ID NO: 4894 - RNA, 76 nt, synthetic construct; identical to SEQ ID NO: 625
  source 1..76: mol_type = other RNA
  modified_base 66: mod_base = OTHER; note = 2'-O-(2-Methoxyethyl) cytosine
  modified_base 67: mod_base = OTHER; note = 2'-O-(2-Methoxyethyl) guanosine
  modified_base 68: mod_base = OTHER; note = 2'-O-(2-Methoxyethyl) guanosine
  modified_base 69: mod_base = OTHER; note = 2'-O-(2-Methoxyethyl) adenosine
  modified_base 70: mod_base = OTHER; note = 2'-O-(2-Methoxyethyl) guanosine
  modified_base 71: mod_base = OTHER; note = 2'-O-(2-Methoxyethyl) thymine
  modified_base 72: mod_base = OTHER; note = 2'-O-(2-Methoxyethyl) cytosine

SEQ ID NO: 4895 - RNA, 76 nt, synthetic construct; identical to SEQ ID NO: 625
  source 1..76: mol_type = other RNA
  modified_base 1: mod_base = OTHER; note = 2'-Omethylguanosine phosphorothiorate
  modified_base 2: mod_base = OTHER; note = 2'-Omethylguanosine phosphorothiorate
  modified_base 3: mod_base = OTHER; note = 2'-Omethylcytosine
  modified_base 4: mod_base = OTHER; note = 2'-Omethyluridine
  modified_base 5: mod_base = OTHER; note = 2'-Omethylcytosine
  modified_base 6: mod_base = OTHER; note = 2'-Omethylcytosine
  modified_base 10: mod_base = OTHER; note = 2'-Omethylguanosine
  modified_base 11: mod_base = OTHER; note = 2'-Omethylcytosine
  modified_base 12: mod_base = OTHER; note = 2'-Omethylguanosine
  modified_base 13: mod_base = OTHER; note = 2'-Omethylcytosine
  modified_base 14: mod_base = OTHER; note = 2'-Omethyladenosine
  modified_base 15: mod_base = OTHER; note = 2'-Omethyladenosine
  modified_base 16: mod_base = OTHER; note = 2'-Omethyluridine
  modified_base 17: mod_base = OTHER; note = 2'-Omethylguanosine
  modified_base 18: mod_base = OTHER; note = 2'-Omethylguanosine
  modified_base 19: mod_base = OTHER; note = 2'-Omethyladenosine
  modified_base 20: mod_base = OTHER; note = 2'-Omethyluridine
  modified_base 22: mod_base = OTHER; note = 2'-Omethylguanosine
  modified_base 23: mod_base = OTHER; note = 2'-Omethylcytosine
  modified_base 24: mod_base = OTHER; note = 2'-Omethylguanosine
  modified_base 25: mod_base = OTHER; note = 2'-Omethylcytosine
  modified_base 48: mod_base = OTHER; note = 2'-fluorouridine
  modified_base 49: mod_base = OTHER; note = 2'-Omethylcytosine
  modified_base 50: mod_base = OTHER; note = 2'-Omethylcytosine
  modified_base 51: mod_base = OTHER; note = 2'-Omethylguanosine
  modified_base 52: mod_base = OTHER; note = 2'-Omethylguanosine
  modified_base 53: mod_base = OTHER; note = 2'-Omethylguanosine
  modified_base 54: mod_base = OTHER; note = 2'-Omethyluridine
  modified_base 61: mod_base = OTHER; note = 2'-Omethylcytosine
  modified_base 62: mod_base = OTHER; note = 2'-Omethylcytosine
  modified_base 63: mod_base = OTHER; note = 2'-fluorocytosine
  modified_base 64: mod_base = OTHER; note = 2'-Omethylguanosine
  modified_base 65: mod_base = OTHER; note = 2'-Omethylguanosine
  modified_base 66: mod_base = OTHER; note = 2'-Omethylcytosine
  modified_base 67: mod_base = OTHER; note = 2'-Omethylguanosine
  modified_base 68: mod_base = OTHER; note = 2'-Omethylguanosine
  modified_base 73: mod_base = OTHER; note = 2'-Omethylguanosine

SEQ ID NO: 4896 - RNA, 76 nt, synthetic construct; identical to SEQ ID NO: 625
  source 1..76: mol_type = other RNA
  modified_base 1: mod_base = OTHER; note = Guanosine phosphorothiorate
  modified_base 2: mod_base = OTHER; note = 2'-fluoroguanosine
  modified_base 3: mod_base = OTHER; note = 2'-fluorocytosine
  modified_base 6: mod_base = OTHER; note = 2'-fluorocytosine
  modified_base 14: mod_base = OTHER; note = 2'-fluoroadenosine
  modified_base 15: mod_base = OTHER; note = 2'-fluoroadenosine
  modified_base 19: mod_base = OTHER; note = Adenosine phosphorothiorate
  modified_base 20: mod_base = OTHER; note = 2'-Omethyluridine
  modified_base 22: mod_base = OTHER; note = Guanosine phosphorothiorate
  modified_base 24: mod_base = OTHER; note = Guanosine phosphorothiorate
  modified_base 25: mod_base = OTHER; note = 2'-fluorocytosine phosphorothiorate
  modified_base 26: mod_base = OTHER; note = 2'-Omethyladenosine
  modified_base 30: mod_base = OTHER; note = 2'-fluoroguanosine
  modified_base 33: mod_base = OTHER; note = 2'-fluorouridine
  modified_base 36: mod_base = OTHER; note = Adenosine phosphorothiorate
  modified_base 37: mod_base = OTHER; note = Adenosine phosphorothiorate
  modified_base 38: mod_base = OTHER; note = 2'-Omethyladenosine
  modified_base 39: mod_base = OTHER; note = 2'-fluorouridine
  modified_base 40: mod_base = OTHER; note = Uridine phosphorothiorate
  modified_base 41: mod_base = OTHER; note = 2'-Omethylcytosine phosphorothiorate
  modified_base 43: mod_base = OTHER; note = 2'-Omethyladenosine
  modified_base 45: mod_base = OTHER; note = 2'-Omethylguanosine
  modified_base 46: mod_base = OTHER; note = 2'-Omethylguanosine
  modified_base 47: mod_base = OTHER; note = 2'-fluorouridine phosphorothiorate
  modified_base 48: mod_base = OTHER; note = 2'-Omethyluridine
  modified_base 49: mod_base = OTHER; note = 2'-Omethylcytosine
  modified_base 56: mod_base = OTHER; note = Cytosine phosphorothiorate
  modified_base 57: mod_base = OTHER; note = 2'-Omethylguanosine
  modified_base 59: mod_base = OTHER; note = Guanosine phosphorothiorate
  modified_base 60: mod_base = OTHER; note = 2'-fluorouridine phosphorothiorate
  modified_base 62: mod_base = OTHER; note = Cytosine phosphorothiorate
  modified_base 63: mod_base = OTHER; note = 2'-fluorocytosine
  modified_base 67: mod_base = OTHER; note = 2'-Omethylguanosine
  modified_base 68: mod_base = OTHER; note = Guanosine phosphorothiorate
  modified_base 69: mod_base = OTHER; note = 2'-fluoroadenosine
  modified_base 74: mod_base = OTHER; note = 2'-Omethylcytosine
  modified_base 75: mod_base = OTHER; note = Cytosine phosphorothiorate
  modified_base 76: mod_base = OTHER; note = 2'-Omethyladenosine

SEQ ID NO: 4897 - RNA, 73 nt, synthetic construct; identical to SEQ ID NO: 935
  source 1..73: mol_type = other RNA
  modified_base 1: mod_base = OTHER; note = 2'-Omethylguanosine phosphorothiorate
  modified_base 2: mod_base = OTHER; note = 2'-Omethylguanosine
  modified_base 3: mod_base = OTHER; note = 2'-Omethylcytosine
  modified_base 4: mod_base = OTHER; note = 2'-Omethyluridine
  modified_base 5: mod_base = OTHER; note = 2'-Omethylcytosine
  modified_base 6: mod_base = OTHER; note = 2'-Omethylcytosine
  modified_base 49: mod_base = OTHER; note = 2'-Omethylcytosine
  modified_base 50: mod_base = OTHER; note = 2'-Omethylcytosine
  modified_base 51: mod_base = OTHER; note = 2'-Omethylguanosine
  modified_base 52: mod_base = OTHER; note = 2'-Omethylguanosine
  modified_base 53: mod_base = OTHER; note = 2'-Omethylguanosine
  modified_base 61: mod_base = OTHER; note = 2'-Omethylcytosine
  modified_base 62: mod_base = OTHER; note = 2'-Omethylcytosine
  modified_base 63: mod_base = OTHER; note = 2'-fluorocytosine
  modified_base 64: mod_base = OTHER; note = 2'-Omethylguanosine
  modified_base 65: mod_base = OTHER; note = 2'-Omethylguanosine
  modified_base 66: mod_base = OTHER; note = 2'-Omethylcytosine
  modified_base 67: mod_base = OTHER; note = 2'-Omethylguanosine
  modified_base 68: mod_base = OTHER; note = 2'-Omethylguanosine
  modified_base 69: mod_base = OTHER; note = 2'-fluoroadenosine
  modified_base 71: mod_base = OTHER; note = 2'-Omethyluridine
  modified_base 72: mod_base = OTHER; note = 2'-Omethylcytosine

SEQ ID NO: 4898 - RNA, 75 nt, synthetic construct; identical to SEQ ID NO: 3306
  source 1..75: mol_type = other RNA
  modified_base 1: mod_base = OTHER; note = 2'-Omethylguanosine phosphorothiorate
  modified_base 2: mod_base = OTHER; note = 2'-Omethyladenosine
  modified_base 13: mod_base = OTHER; note = Cytosine phosphorothiorate
  modified_base 14: mod_base = OTHER; note = 2'-Omethyladenosine
  modified_base 54: mod_base = OTHER; note = Uridine phosphorothiorate
  modified_base 73: mod_base = OTHER; note = Cytosine phosphorothiorate
  modified_base 74: mod_base = OTHER; note = 2'-Omethylcytosine

SEQ ID NO: 4899 - RNA, 76 nt, synthetic construct; identical to SEQ ID NO: 3295
  source 1..76: mol_type = other RNA
  modified_base 1: mod_base = OTHER; note = 2'-fluorocytosine
  modified_base 3: mod_base = OTHER; note = 2'-Omethyluridine
  modified_base 7: mod_base = OTHER; note = Adenosine phosphorothiorate
  modified_base 13: mod_base = OTHER; note = Cytosine phosphorothiorate
  modified_base 27: mod_base = OTHER; note = 2'-Omethylguanosine phosphorothiorate
  modified_base 36: mod_base = OTHER; note = 2'-fluoroadenosine
  modified_base 47: mod_base = OTHER; note = 2'-fluorouridine phosphorothiorate
  modified_base 48: mod_base = OTHER; note = 2'-fluorocytosine phosphorothiorate
  modified_base 54: mod_base = OTHER; note = Uridine phosphorothiorate

SEQ ID NO: 4900 - RNA, 76 nt, synthetic construct; identical to SEQ ID NO: 3615
  source 1..76: mol_type = other RNA
  modified_base 1: mod_base = OTHER; note = 2'-Omethylguanosine phosphorothiorate
  modified_base 2: mod_base = OTHER; note = 2'-Omethylguanosine phosphorothiorate
  modified_base 13: mod_base = OTHER; note = 2'-fluorocytosine
  modified_base 14: mod_base = OTHER; note = 2'-fluoroadenosine
  modified_base 54: mod_base = OTHER; note = 2'-fluorouridine
  modified_base 59: mod_base = OTHER; note = 2'-Omethylguanosine
  modified_base 75: mod_base = OTHER; note = Cytosine phosphorothiorate
  modified_base 76: mod_base = OTHER; note = 2'-Omethyladenosine

SEQ ID NO: 4901 - RNA, 85 nt, synthetic construct; identical to SEQ ID NO: 3288
  source 1..85: mol_type = other RNA
  modified_base 1: mod_base = OTHER; note = 2'-fluorocytosine phosphorothiorate
  modified_base 32: mod_base = OTHER; note = 2'-fluorouridine
  modified_base 44: mod_base = OTHER; note = Guanosine phosphorothiorate
  modified_base 48: mod_base = OTHER; note = 2'-fluoroadenosine
  modified_base 57: mod_base = OTHER; note = 2'-fluorocytosine
  modified_base 60: mod_base = OTHER; note = Guanosine phosphorothiorate

SEQ ID NO: 4902 - RNA, 76 nt, synthetic construct; identical to SEQ ID NO: 625
  source 1..76: mol_type = other RNA
  modified_base 1: mod_base = OTHER; note = 2'-Omethylguanosine phosphorothiorate
  modified_base 2: mod_base = OTHER; note = 2'-Omethylguanosine
  modified_base 3: mod_base = OTHER; note = 2'-Omethylcytosine
  modified_base 4: mod_base = OTHER; note = 2'-Omethyluridine
  modified_base 5: mod_base = OTHER; note = 2'-Omethylcytosine
  modified_base 6: mod_base = OTHER; note = 2'-Omethylcytosine
  modified_base 10: mod_base = OTHER; note = 2'-Omethylguanosine
  modified_base 11: mod_base = OTHER; note = 2'-Omethylcytosine
  modified_base 12: mod_base = OTHER; note = 2'-Omethylguanosine
  modified_base 13: mod_base = OTHER; note = 2'-Omethylcytosine
  modified_base 16: mod_base = OTHER; note = 2'-Omethyluridine
  modified_base 17: mod_base = OTHER; note = 2'-Omethylguanosine
  modified_base 18: mod_base = OTHER; note = 2'-Omethylguanosine
  modified_base 22: mod_base = OTHER; note = 2'-Omethylguanosine
  modified_base 23: mod_base = OTHER; note = 2'-Omethylcytosine
  modified_base 24: mod_base = OTHER; note = 2'-Omethylguanosine
  modified_base 25: mod_base = OTHER; note = 2'-Omethylcytosine
  modified_base 40: mod_base = OTHER; note = 2'-fluorouridine
  modified_base 41: mod_base = OTHER; note = 2'-fluorocytosine
  modified_base 42: mod_base = OTHER; note = 2'-fluoroadenosine
  modified_base 43: mod_base = OTHER; note = 2'-fluoroadenosine
  modified_base 54: mod_base = OTHER; note = 2'-Omethyluridine phosphorothiorate
  modified_base 55: mod_base = OTHER; note = Uridine phosphorothiorate
  modified_base 56: mod_base = OTHER; note = 2'-Omethylcytosine
  modified_base 57: mod_base = OTHER; note = 2'-fluoroguanosine
  modified_base 59: mod_base = OTHER; note = 2'-Omethylguanosine
  modified_base 73: mod_base = OTHER; note = 2'-Omethylguanosine

SEQ ID NO: 4903 - RNA, 86 nt, synthetic construct; identical to SEQ ID NO: 3290
  source 1..86: mol_type = other RNA
  modified_base 1: mod_base = OTHER; note = 2'-Omethyladenosine
  modified_base 14: mod_base = OTHER; note = 2'-Omethyladenosine
  modified_base 15: mod_base = OTHER; note = 2'-Omethylguanosine
  modified_base 16: mod_base = OTHER; note = 2'-Omethyluridine
  modified_base 17: mod_base = OTHER; note = 2'-Omethylguanosine
  modified_base 18: mod_base = OTHER; note = 2'-Omethylguanosine
  modified_base 19: mod_base = OTHER; note = Uridine phosphorothiorate
  modified_base 20: mod_base = OTHER; note = 2'-Omethyluridine
  modified_base 21: mod_base = OTHER; note = Adenosine phosphorothiorate
  modified_base 33: mod_base = OTHER; note = 2'-fluorouridine
  modified_base 34: mod_base = OTHER; note = 2'-Omethyluridine
  modified_base 35: mod_base = OTHER; note = Cytosine phosphorothiorate
  modified_base 37: mod_base = OTHER; note = Guanosine phosphorothiorate
  modified_base 38: mod_base = OTHER; note = Adenosine phosphorothiorate
  modified_base 60: mod_base = OTHER; note = 2'-Omethyluridine
  modified_base 62: mod_base = OTHER; note = 2'-Omethylguanosine
  modified_base 83: mod_base = OTHER; note = 2'-Omethyladenosine

SEQ ID NO: 4904 - RNA, 74 nt, synthetic construct; identical to SEQ ID NO: 3293
  source 1..74: mol_type = other RNA
  modified_base 1: mod_base = OTHER; note = 2'-fluoroadenosine
  modified_base 2: mod_base = OTHER; note = 2'-fluorocytosine phosphorothiorate
  modified_base 3: mod_base = OTHER; note = Cytosine phosphorothiorate
  modified_base 6: mod_base = OTHER; note = Guanosine phosphorothiorate
  modified_base 8: mod_base = OTHER; note = Guanosine phosphorothiorate
  modified_base 9: mod_base = OTHER; note = 2'-fluoroguanosine
  modified_base 19: mod_base = OTHER; note = 2'-Omethyladenosine
  modified_base 24: mod_base = OTHER; note = 2'-fluoroguanosine
  modified_base 26: mod_base = OTHER; note = 2'-fluorocytosine
  modified_base 29: mod_base = OTHER; note = 2'-fluoroadenosine
  modified_base 35: mod_base = OTHER; note = 2'-Omethylguanosine
  modified_base 42: mod_base = OTHER; note = Adenosine phosphorothiorate
  modified_base 43: mod_base = OTHER; note = 2'-fluoroguanosine
  modified_base 48: mod_base = OTHER; note = 2'-fluorocytosine
  modified_base 51: mod_base = OTHER; note = 2'-fluoroguanosine
  modified_base 62: mod_base = OTHER; note = 2'-fluoroguanosine
  modified_base 73: mod_base = OTHER; note = 2'-Omethylcytosine phosphorothiorate
  modified_base 74: mod_base = OTHER; note = 2'-Omethyladenosine

SEQ ID NO: 4905 - RNA, 86 nt, synthetic construct; identical to SEQ ID NO: 3290
  source 1..86: mol_type = other RNA
  modified_base 1: mod_base = OTHER; note = 2'-Omethyladenosine
  modified_base 64: mod_base = OTHER; note = 2'-Omethyluridine phosphorothiorate
  modified_base 65: mod_base = OTHER; note = Uridine phosphorothiorate
  modified_base 66: mod_base = OTHER; note = 2'-Omethylcytosine
  modified_base 67: mod_base = OTHER; note = 2'-fluoroguanosine
  modified_base 68: mod_base = OTHER; note = 2'-fluoroadenosine phosphorothiorate
  modified_base 69: mod_base = OTHER; note = 2'-Omethyladenosine
  modified_base 70: mod_base = OTHER; note = 2'-fluorocytosine
  modified_base 83: mod_base = OTHER; note = 2'-Omethyladenosine

SEQ ID NO: 4906 - RNA, 75 nt, synthetic construct; identical to SEQ ID NO: 1045
  source 1..75: mol_type = other RNA
  modified_base 2: mod_base = OTHER; note = 2'-fluoroguanosine phosphorothiorate
  modified_base 5: mod_base = OTHER; note = 2'-fluorocytosine
  modified_base 11: mod_base = OTHER; note = 2'-fluorouridine
  modified_base 15: mod_base = OTHER; note = 2'-fluoroadenosine
  modified_base 16: mod_base = OTHER; note = 2'-fluorouridine phosphorothiorate
  modified_base 20: mod_base = OTHER; note = 2'-fluoroadenosine
  modified_base 21: mod_base = OTHER; note = Adenosine phosphorothiorate
  modified_base 31: mod_base = OTHER; note = 2'-fluoroadenosine phosphorothiorate
  modified_base 42: mod_base = OTHER; note = 2'-fluoroadenosine
  modified_base 43: mod_base = OTHER; note = 2'-Omethylguanosine phosphorothiorate
  modified_base 56: mod_base = OTHER; note = 2'-Omethylguanosine
  modified_base 62: mod_base = OTHER; note = 2'-fluorocytosine
  modified_base 63: mod_base = OTHER; note = Guanosine phosphorothiorate
  modified_base 66: mod_base = OTHER; note = Guanosine phosphorothiorate
  modified_base 73: mod_base = OTHER; note = Cytosine phosphorothiorate

SEQ ID NO: 4907 - RNA, 75 nt, synthetic construct; identical to SEQ ID NO: 3299
  source 1..75: mol_type = other RNA
  modified_base 1: mod_base = OTHER; note = 2'-Omethylcytosine
  modified_base 3: mod_base = OTHER; note = 2'-Omethyluridine
  modified_base 12: mod_base = OTHER; note = 2'-fluorocytosine
  modified_base 14: mod_base = OTHER; note = 2'-Omethylguanosine phosphorothiorate
  modified_base 17: mod_base = OTHER; note = 2'-Omethylguanosine
  modified_base 18: mod_base = OTHER; note = 2'-fluoroguanosine
  modified_base 21: mod_base = OTHER; note = Guanosine phosphorothiorate
  modified_base 22: mod_base = OTHER; note = 2'-fluoroadenosine
  modified_base 28: mod_base = OTHER; note = 2'-fluoroadenosine
  modified_base 38: mod_base = OTHER; note = Uridine phosphorothiorate
  modified_base 41: mod_base = OTHER; note = 2'-Omethylguanosine
  modified_base 49: mod_base = OTHER; note = Adenosine phosphorothiorate
  modified_base 60: mod_base = OTHER; note = 2'-fluorocytosine
  modified_base 61: mod_base = OTHER; note = Cytosine phosphorothiorate
  modified_base 72: mod_base = OTHER; note = 2'-fluoroguanosine phosphorothiorate
  modified_base 74: mod_base = OTHER; note = 2'-Omethylcytosine
  modified_base 75: mod_base = OTHER; note = 2'-fluoroadenosine

SEQ ID NO: 4908 - RNA, 74 nt, synthetic construct; identical to SEQ ID NO: 766
  source 1..74: mol_type = other RNA
  modified_base 1: mod_base = OTHER; note = 2'-Omethylguanosine phosphorothiorate
  modified_base 2: mod_base = OTHER; note = 2'-Omethylguanosine phosphorothiorate
  modified_base 3: mod_base = OTHER; note = 2'-Omethylcytosine
  modified_base 4: mod_base = OTHER; note = 2'-Omethyluridine
  modified_base 5: mod_base = OTHER; note = 2'-Omethylcytosine
  modified_base 6: mod_base = OTHER; note = 2'-Omethylcytosine
  modified_base 16: mod_base = OTHER; note = 2'-Omethyluridine
  modified_base 17: mod_base = OTHER; note = 2'-Omethylguanosine
  modified_base 18: mod_base = OTHER; note = 2'-Omethylguanosine
  modified_base 20: mod_base = OTHER; note = 2'-Omethyluridine
  modified_base 25: mod_base = OTHER; note = 2'-Omethylcytosine
  modified_base 33: mod_base = OTHER; note = 2'-fluorouridine
  modified_base 35: mod_base = OTHER; note = Cytosine phosphorothiorate
  modified_base 37: mod_base = OTHER; note = Adenosine phosphorothiorate
  modified_base 38: mod_base = OTHER; note = Adenosine phosphorothiorate
  modified_base 41: mod_base = OTHER; note = 2'-fluorocytosine
  modified_base 42: mod_base = OTHER; note = 2'-Omethyladenosine
  modified_base 43: mod_base = OTHER; note = 2'-Omethyladenosine
  modified_base 44: mod_base = OTHER; note = 2'-fluoroadenosine
  modified_base 49: mod_base = OTHER; note = 2'-Omethylcytosine
  modified_base 50: mod_base = OTHER; note = 2'-Omethylcytosine
  modified_base 52: mod_base = OTHER; note = 2'-Omethylguanosine
  modified_base 54: mod_base = OTHER; note = 2'-Omethyluridine
  modified_base 55: mod_base = OTHER; note = Uridine phosphorothiorate
  modified_base 56: mod_base = OTHER; note = 2'-Omethylcytosine
  modified_base 57: mod_base = OTHER; note = 2'-fluoroguanosine
  modified_base 59: mod_base = OTHER; note = 2'-Omethylguanosine
  modified_base 61: mod_base = OTHER; note = 2'-Omethylcytosine
  modified_base 62: mod_base = OTHER; note = 2'-Omethylcytosine
  modified_base 63: mod_base = OTHER; note = 2'-fluorocytosine
  modified_base 64: mod_base = OTHER; note = 2'-Omethylguanosine
  modified_base 65: mod_base = OTHER; note = 2'-Omethylguanosine
  modified_base 72: mod_base = OTHER; note = Cytosine phosphorothiorate
  modified_base 73: mod_base = OTHER; note = 2'-Omethylguanosine phosphorothiorate

SEQ ID NO: 4909 - RNA, 76 nt, synthetic construct; identical to SEQ ID NO: 625
  source 1..76: mol_type = other RNA
  modified_base 1: mod_base = OTHER; note = 2'-Omethylguanosine
  modified_base 10: mod_base = OTHER; note = 2'-Omethylguanosine
  modified_base 13: mod_base = OTHER; note = 2'-fluorocytosine
  modified_base 17: mod_base = OTHER; note = Guanosine phosphorothiorate
  modified_base 18: mod_base = OTHER; note = 2'-Omethylguanosine
  modified_base 19: mod_base = OTHER; note = Adenosine phosphorothiorate
  modified_base 20: mod_base = OTHER; note = 2'-Omethyluridine
  modified_base 25: mod_base = OTHER; note = 2'-Omethylcytosine
  modified_base 29: mod_base = OTHER; note = 2'-Omethylguanosine
  modified_base 33: mod_base = OTHER; note = 2'-fluorouridine
  modified_base 35: mod_base = OTHER; note = Cytosine phosphorothiorate
  modified_base 37: mod_base = OTHER; note = Adenosine phosphorothiorate
  modified_base 38: mod_base = OTHER; note = Adenosine phosphorothiorate
  modified_base 43: mod_base = OTHER; note = 2'-Omethyladenosine
  modified_base 44: mod_base = OTHER; note = 2'-fluoroadenosine
  modified_base 46: mod_base = OTHER; note = Guanosine phosphorothiorate
  modified_base 50: mod_base = OTHER; note = 2'-Omethylcytosine
  modified_base 52: mod_base = OTHER; note = 2'-Omethylguanosine
  modified_base 54: mod_base = OTHER; note = Uridine phosphorothiorate
  modified_base 55: mod_base = OTHER; note = Uridine phosphorothiorate
  modified_base 56: mod_base = OTHER; note = 2'-Omethylcytosine
  modified_base 57: mod_base = OTHER; note = Guanosine phosphorothiorate
  modified_base 62: mod_base = OTHER; note = 2'-Omethylcytosine
  modified_base 63: mod_base = OTHER; note = 2'-fluorocytosine
  modified_base 65: mod_base = OTHER; note = 2'-Omethylguanosine
  modified_base 71: mod_base = OTHER; note = 2'-Omethyluridine
  modified_base 73: mod_base = OTHER; note = 2'-Omethylguanosine

SEQ ID NO: 4910 - RNA, 76 nt, synthetic construct; identical to SEQ ID NO: 625
  source 1..76: mol_type = other RNA
  modified_base 1: mod_base = OTHER; note = 2'-Omethylguanosine phosphorothiorate
  modified_base 2: mod_base = OTHER; note = 2'-Omethylguanosine
  modified_base 17: mod_base = OTHER; note = 2'-Omethylguanosine
  modified_base 33: mod_base = OTHER; note = 2'-fluorouridine
  modified_base 35: mod_base = OTHER; note = Cytosine phosphorothiorate
  modified_base 37: mod_base = OTHER; note = Adenosine phosphorothiorate
  modified_base 38: mod_base = OTHER; note = Adenosine phosphorothiorate
  modified_base 52: mod_base = OTHER; note = 2'-Omethylguanosine
  modified_base 62: mod_base = OTHER; note = 2'-Omethylcytosine
  modified_base 63: mod_base = OTHER; note = 2'-fluorocytosine
  modified_base 65: mod_base = OTHER; note = 2'-Omethylguanosine
  modified_base 68: mod_base = OTHER; note = 2'-Omethylguanosine
  modified_base 73: mod_base = OTHER; note = 2'-Omethylguanosine
  modified_base 75: mod_base = OTHER; note = 2'-fluorocytosine phosphorothiorate

SEQ ID NO: 4911 - RNA, 75 nt, synthetic construct; identical to SEQ ID NO: 1045
  source 1..75: mol_type = other RNA
  modified_base 2: mod_base = OTHER; note = 2'-Omethylguanosine phosphorothiorate
  modified_base 3: mod_base = OTHER; note = 2'-Omethyluridine phosphorothiorate
  modified_base 6: mod_base = OTHER; note = 2'-Omethylcytosine
  modified_base 14: mod_base = OTHER; note = 2'-Omethyladenosine
  modified_base 15: mod_base = OTHER; note = 2'-Omethyladenosine
  modified_base 16: mod_base = OTHER; note = 2'-Omethyluridine
  modified_base 18: mod_base = OTHER; note = 2'-fluoroguanosine phosphorothiorate
  modified_base 23: mod_base = OTHER; note = 2'-Omethylcytosine
  modified_base 34: mod_base = OTHER; note = 2'-Omethyluridine
  modified_base 39: mod_base = OTHER; note = 2'-Omethyluridine
  modified_base 41: mod_base = OTHER; note = 2'-Omethylcytosine phosphorothiorate
  modified_base 45: mod_base = OTHER; note = 2'-Omethylguanosine
  modified_base 47: mod_base = OTHER; note = 2'-Omethyluridine
  modified_base 50: mod_base = OTHER; note = 2'-Omethylguanosine
  modified_base 52: mod_base = OTHER; note = 2'-Omethylguanosine
  modified_base 53: mod_base = OTHER; note = 2'-Omethyluridine phosphorothiorate
  modified_base 55: mod_base = OTHER; note = 2'-Omethylcytosine
  modified_base 61: mod_base = OTHER; note = Uridine phosphorothiorate
  modified_base 65: mod_base = OTHER; note = 2'-Omethyluridine
  modified_base 66: mod_base = OTHER; note = 2'-Omethylguanosine
  modified_base 67: mod_base = OTHER; note = 2'-Omethylguanosine
  modified_base 72: mod_base = OTHER; note = 2'-Omethyluridine
  modified_base 73: mod_base = OTHER; note = Cytosine phosphorothiorate
  modified_base 74: mod_base = OTHER; note = 2'-Omethylcytosine phosphorothiorate
  modified_base 75: mod_base = OTHER; note = 2'-Omethyladenosine

SEQ ID NO: 4912 - RNA, 86 nt, synthetic construct; identical to SEQ ID NO: 3290
  source 1..86: mol_type = other RNA
  modified_base 11: mod_base = OTHER; note = Cytosine phosphorothiorate

SEQ ID NO: 4913 - RNA, 86 nt, synthetic construct; identical to SEQ ID NO: 3290
  source 1..86: mol_type = other RNA
  modified_base 60: mod_base = OTHER; note = Uridine phosphorothiorate

SEQ ID NO: 4914 - RNA, 86 nt, synthetic construct; identical to SEQ ID NO: 3290
  source 1..86: mol_type = other RNA
  modified_base 1: mod_base = OTHER; note = 2'-Omethyladenosine phosphorothiorate
  modified_base 2: mod_base = OTHER; note = 2'-Omethylcytosine phosphorothiorate
  modified_base 84: mod_base = OTHER; note = 2'-Omethylcytosine phosphorothiorate
  modified_base 85: mod_base = OTHER; note = 2'-Omethylcytosine phosphorothiorate

SEQ ID NO: 4915 - RNA, 76 nt, synthetic construct; identical to SEQ ID NO: 625
  source 1..76: mol_type = other RNA
  modified_base 10: mod_base = OTHER; note = 2'-Omethylguanosine phosphorothiorate
  modified_base 11: mod_base = OTHER; note = Cytosine phosphorothiorate
  modified_base 13: mod_base = OTHER; note = Cytosine phosphorothiorate
  modified_base 16: mod_base = OTHER; note = 2'-fluorouridine
  modified_base 18: mod_base = OTHER; note = 2'-fluoroguanosine
  modified_base 21: mod_base = OTHER; note = Adenosine phosphorothiorate
  modified_base 22: mod_base = OTHER; note = 2'-fluoroguanosine
  modified_base 24: mod_base = OTHER; note = 2'-fluoroguanosine
  modified_base 26: mod_base = OTHER; note = 2'-Omethyladenosine phosphorothiorate
  modified_base 30: mod_base = OTHER; note = Guanosine phosphorothiorate
  modified_base 42: mod_base = OTHER; note = 2'-Omethyladenosine phosphorothiorate
  modified_base 43: mod_base = OTHER; note = 2'-Omethyladenosine phosphorothiorate
  modified_base 45: mod_base = OTHER; note = Guanosine phosphorothiorate
  modified_base 46: mod_base = OTHER; note = 2'-Omethylguanosine
  modified_base 47: mod_base = OTHER; note = 2'-fluorouridine
  modified_base 49: mod_base = OTHER; note = Cytosine phosphorothiorate
  modified_base 52: mod_base = OTHER; note = Guanosine phosphorothiorate
  modified_base 54: mod_base = OTHER; note = 2'-fluorouridine phosphorothiorate
  modified_base 56: mod_base = OTHER; note = Cytosine phosphorothiorate
  modified_base 57: mod_base = OTHER; note = 2'-fluoroguanosine
  modified_base 59: mod_base = OTHER; note = 2'-fluoroguanosine
  modified_base 60: mod_base = OTHER; note = 2'-Omethyluridine
  modified_base 66: mod_base = OTHER; note = 2'-fluorocytosine phosphorothiorate
  modified_base 67: mod_base = OTHER; note = 2'-fluoroguanosine
  modified_base 69: mod_base = OTHER; note = 2'-fluoroadenosine
  modified_base 70: mod_base = OTHER; note = 2'-fluoroguanosine
  modified_base 71: mod_base = OTHER; note = 2'-Omethyluridine
  modified_base 73: mod_base = OTHER; note = 2'-fluoroguanosine
  modified_base 76: mod_base = OTHER; note = 2'-fluoroadenosine

SEQ ID NO: 4916 - RNA, 75 nt, synthetic construct; identical to SEQ ID NO: 1045
  source 1..75: mol_type = other RNA
  modified_base 1: mod_base = OTHER; note = 2'-Omethylguanosine phosphorothiorate
  modified_base 2: mod_base = OTHER; note = 2'-Omethylguanosine phosphorothiorate
  modified_base 12: mod_base = OTHER; note = Guanosine phosphorothiorate
  modified_base 20: mod_base = OTHER; note = 2'-fluoroadenosine phosphorothiorate
  modified_base 21: mod_base = OTHER; note = 2'-fluoroadenosine
  modified_base 36: mod_base = OTHER; note = 2'-fluoroadenosine
  modified_base 40: mod_base = OTHER; note = 2'-Omethylcytosine
  modified_base 46: mod_base = OTHER; note = 2'-fluoroadenosine
  modified_base 59: mod_base = OTHER; note = 2'-fluorouridine
  modified_base 68: mod_base = OTHER; note = 2'-fluoroadenosine
  modified_base 74: mod_base = OTHER; note = Cytosine phosphorothiorate

SEQ ID NO: 4917 - RNA, 76 nt, synthetic construct; identical to SEQ ID NO: 625
  source 1..76: mol_type = other RNA
  modified_base 1: mod_base = OTHER; note = 2'-Omethylguanosine
  modified_base 2: mod_base = OTHER; note = 2'-Omethylguanosine
  modified_base 10: mod_base = OTHER; note = 2'-Omethylguanosine
  modified_base 13: mod_base = OTHER; note = 2'-Omethylcytosine
  modified_base 17: mod_base = OTHER; note = Guanosine phosphorothiorate
  modified_base 18: mod_base = OTHER; note = 2'-Omethylguanosine
  modified_base 20: mod_base = OTHER; note = 2'-Omethyluridine
  modified_base 25: mod_base = OTHER; note = 2'-Omethylcytosine
  modified_base 29: mod_base = OTHER; note = 2'-Omethylguanosine
  modified_base 33: mod_base = OTHER; note = 2'-fluorouridine
  modified_base 35: mod_base = OTHER; note = Cytosine phosphorothiorate
  modified_base 37: mod_base = OTHER; note = Adenosine phosphorothiorate
  modified_base 38: mod_base = OTHER; note = Adenosine phosphorothiorate
  modified_base 41: mod_base = OTHER; note = 2'-fluorocytosine phosphorothiorate
  modified_base 43: mod_base = OTHER; note = 2'-Omethyladenosine
  modified_base 44: mod_base = OTHER; note = 2'-fluoroadenosine
  modified_base 46: mod_base = OTHER; note = Guanosine phosphorothiorate
  modified_base 50: mod_base = OTHER; note = 2'-Omethylcytosine
  modified_base 52: mod_base = OTHER; note = 2'-Omethylguanosine
  modified_base 54: mod_base = OTHER; note = Uridine phosphorothiorate
  modified_base 55: mod_base = OTHER; note = Uridine phosphorothiorate
  modified_base 56: mod_base = OTHER; note = 2'-Omethylcytosine
  modified_base 57: mod_base = OTHER; note = Guanosine phosphorothiorate
  modified_base 62: mod_base = OTHER; note = 2'-Omethylcytosine
  modified_base 63: mod_base = OTHER; note = 2'-fluorocytosine
  modified_base 65: mod_base = OTHER; note = 2'-Omethylguanosine
  modified_base 71: mod_base = OTHER; note = 2'-Omethyluridine
  modified_base 73: mod_base = OTHER; note = 2'-Omethylguanosine

SEQ ID NO: 4918 - RNA, 74 nt, synthetic construct; identical to SEQ ID NO: 766
  source 1..74: mol_type = other RNA
  modified_base 1: mod_base = OTHER; note = 2'-Omethylguanosine
  modified_base 14: mod_base = OTHER; note = 2'-Omethyladenosine
  modified_base 16: mod_base = OTHER; note = 2'-Omethyluridine
  modified_base 17: mod_base = OTHER; note = 2'-Omethylguanosine
  modified_base 18: mod_base = OTHER; note = 2'-Omethylguanosine
  modified_base 19: mod_base = OTHER; note = 2'-fluoroadenosine
  modified_base 20: mod_base = OTHER; note = 2'-Omethyluridine
  modified_base 73: mod_base = OTHER; note = 2'-Omethylguanosine phosphorothiorate

SEQ ID NO: 4919 - RNA, 76 nt, synthetic construct; identical to SEQ ID NO: 625
  source 1..76: mol_type = other RNA
  modified_base 1: mod_base = OTHER; note = 2'-Omethylguanosine phosphorothiorate
  modified_base 2: mod_base = OTHER; note = 2'-Omethylguanosine
  modified_base 3: mod_base = OTHER; note = 2'-Omethylcytosine
  modified_base 4: mod_base = OTHER; note = 2'-Omethyluridine
  modified_base 5: mod_base = OTHER; note = 2'-Omethylcytosine
  modified_base 6: mod_base = OTHER; note = 2'-Omethylcytosine
  modified_base 10: mod_base = OTHER; note = 2'-Omethylguanosine
  modified_base 11: mod_base = OTHER; note = 2'-Omethylcytosine
  modified_base 12: mod_base = OTHER; note = 2'-Omethylguanosine
  modified_base 13: mod_base = OTHER; note = 2'-Omethylcytosine
  modified_base 14: mod_base = OTHER; note = 2'-Omethyladenosine
  modified_base 15: mod_base = OTHER; note = 2'-fluoroadenosine
  modified_base 16: mod_base = OTHER; note = 2'-Omethyluridine
  modified_base 17: mod_base = OTHER; note = 2'-Omethylguanosine
  modified_base 18: mod_base = OTHER; note = 2'-Omethylguanosine
  modified_base 19: mod_base = OTHER; note = 2'-fluoroadenosine
  modified_base 20: mod_base = OTHER; note = 2'-Omethyluridine
  modified_base 22: mod_base = OTHER; note = 2'-Omethylguanosine
  modified_base 23: mod_base = OTHER; note = 2'-Omethylcytosine
  modified_base 24: mod_base = OTHER; note = 2'-Omethylguanosine
  modified_base 25: mod_base = OTHER; note = 2'-Omethylcytosine
  modified_base 38: mod_base = OTHER; note = Adenosine phosphorothiorate
  modified_base 39: mod_base = OTHER; note = Uridine phosphorothiorate
  modified_base 40: mod_base = OTHER; note = 2'-fluorouridine
  modified_base 43: mod_base = OTHER; note = 2'-Omethyladenosine
  modified_base 44: mod_base = OTHER; note = 2'-Omethyladenosine
  modified_base 45: mod_base = OTHER; note = 2'-Omethylguanosine
  modified_base 46: mod_base = OTHER; note = 2'-fluoroguanosine
  modified_base 48: mod_base = OTHER; note = 2'-fluorouridine
  modified_base 49: mod_base = OTHER; note = 2'-Omethylcytosine
  modified_base 50: mod_base = OTHER; note = 2'-Omethylcytosine
  modified_base 54: mod_base = OTHER; note = Uridine phosphorothiorate
  modified_base 55: mod_base = OTHER; note = Uridine phosphorothiorate
  modified_base 56: mod_base = OTHER; note = 2'-Omethylcytosine
  modified_base 57: mod_base = OTHER; note = Guanosine phosphorothiorate
  modified_base 61: mod_base = OTHER; note = 2'-Omethylcytosine
  modified_base 62: mod_base = OTHER; note = 2'-Omethylcytosine
  modified_base 63: mod_base = OTHER; note = 2'-fluorocytosine
  modified_base 64: mod_base = OTHER; note = 2'-Omethylguanosine
  modified_base 65: mod_base = OTHER; note = 2'-Omethylguanosine
  modified_base 66: mod_base = OTHER; note = 2'-Omethylcytosine
  modified_base 67: mod_base = OTHER; note = 2'-Omethylguanosine
  modified_base 68: mod_base = OTHER; note = 2'-Omethylguanosine

SEQ ID NO: 4920 - RNA, 85 nt, synthetic construct; identical to SEQ ID NO: 3297
  source 1..85: mol_type = other RNA
  modified_base 1: mod_base = OTHER; note = 2'-Omethylguanosine phosphorothiorate
  modified_base 2: mod_base = OTHER; note = 2'-Omethylcytosine
  modified_base 19: mod_base = OTHER; note = 2'-Omethyluridine phosphorothiorate
  modified_base 46: mod_base = OTHER; note = 2'-Omethylguanosine
  modified_base 55: mod_base = OTHER; note = 2'-fluorocytosine
  modified_base 58: mod_base = OTHER; note = Guanosine phosphorothiorate
  modified_base 62: mod_base = OTHER; note = 2'-Omethylguanosine
  modified_base 71: mod_base = OTHER; note = 2'-fluorocytosine
  modified_base 82: mod_base = OTHER; note = 2'-fluoroguanosine phosphorothiorate

SEQ ID NO: 4921 - RNA, 76 nt, synthetic construct; identical to SEQ ID NO: 3318
  source 1..76: mol_type = other RNA
  modified_base 1: mod_base = OTHER; note = 2'-Omethylcytosine
  modified_base 10: mod_base = OTHER; note = 2'-Omethylguanosine
  modified_base 13: mod_base = OTHER; note = 2'-Omethylcytosine
  modified_base 16: mod_base = OTHER; note = Uridine phosphorothiorate
  modified_base 18: mod_base = OTHER; note = Guanosine phosphorothiorate
  modified_base 19: mod_base = OTHER; note = 2'-Omethylguanosine phosphorothiorate
  modified_base 20: mod_base = OTHER; note = Uridine phosphorothiorate
  modified_base 25: mod_base = OTHER; note = 2'-Omethylcytosine
  modified_base 29: mod_base = OTHER; note = 2'-Omethylguanosine
  modified_base 33: mod_base = OTHER; note = 2'-fluorouridine phosphorothiorate
  modified_base 35: mod_base = OTHER; note = Uridine phosphorothiorate
  modified_base 37: mod_base = OTHER; note = Guanosine phosphorothiorate
  modified_base 38: mod_base = OTHER; note = Adenosine phosphorothiorate
  modified_base 41: mod_base = OTHER; note = 2'-fluorocytosine
  modified_base 42: mod_base = OTHER; note = Uridine phosphorothiorate
  modified_base 43: mod_base = OTHER; note = 2'-Omethyluridine
  modified_base 44: mod_base = OTHER; note = 2'-fluoroadenosine
  modified_base 46: mod_base = OTHER; note = Guanosine phosphorothiorate
  modified_base 47: mod_base = OTHER; note = Uridine phosphorothiorate
  modified_base 50: mod_base = OTHER; note = 2'-Omethylcytosine
  modified_base 52: mod_base = OTHER; note = 2'-Omethylguanosine
  modified_base 54: mod_base = OTHER; note = Uridine phosphorothiorate
  modified_base 55: mod_base = OTHER; note = Uridine phosphorothiorate
  modified_base 56: mod_base = OTHER; note = 2'-Omethylcytosine
  modified_base 57: mod_base = OTHER; note = Guanosine phosphorothiorate
  modified_base 60: mod_base = OTHER; note = Uridine phosphorothiorate
  modified_base 62: mod_base = OTHER; note = 2'-Omethylcytosine
  modified_base 63: mod_base = OTHER; note = 2'-fluoroguanosine
  modified_base 65: mod_base = OTHER; note = 2'-Omethylcytosine
  modified_base 71: mod_base = OTHER; note = 2'-Omethylguanosine
  modified_base 73: mod_base = OTHER; note = 2'-Omethyladenosine

SEQ ID NO: 4922 - RNA, 74 nt, synthetic construct; identical to SEQ ID NO: 3293
  source 1..74: mol_type = other RNA
  modified_base 1: mod_base = OTHER; note = 2'-fluoroadenosine
  modified_base 2: mod_base = OTHER; note = Cytosine phosphorothiorate
  modified_base 3: mod_base = OTHER; note = Cytosine phosphorothiorate
  modified_base 4: mod_base = OTHER; note = Uridine phosphorothiorate
  modified_base 6: mod_base = OTHER; note = Guanosine phosphorothiorate
  modified_base 8: mod_base = OTHER; note = Guanosine phosphorothiorate
  modified_base 9: mod_base = OTHER; note = 2'-fluoroguanosine
  modified_base 11: mod_base = OTHER; note = Guanosine phosphorothiorate
  modified_base 15: mod_base = OTHER; note = 2'-fluorocytosine
  modified_base 21: mod_base = OTHER; note = 2'-fluorocytosine
  modified_base 24: mod_base = OTHER; note = 2'-fluoroguanosine
  modified_base 26: mod_base = OTHER; note = 2'-fluorocytosine
  modified_base 35: mod_base = OTHER; note = 2'-fluoroguanosine
  modified_base 41: mod_base = OTHER; note = Adenosine phosphorothiorate
  modified_base 43: mod_base = OTHER; note = 2'-fluoroguanosine
  modified_base 46: mod_base = OTHER; note = Uridine phosphorothiorate
  modified_base 48: mod_base = OTHER; note = Cytosine phosphorothiorate
  modified_base 51: mod_base = OTHER; note = 2'-fluoroguanosine
  modified_base 62: mod_base = OTHER; note = 2'-Omethylguanosine phosphorothiorate
  modified_base 67: mod_base = OTHER; note = 2'-fluoroguanosine
  modified_base 73: mod_base = OTHER; note = 2'-Omethylcytosine phosphorothiorate

SEQ ID NO: 4923 - RNA, 76 nt, synthetic construct; identical to SEQ ID NO: 3318
  source 1..76: mol_type = other RNA
  modified_base 1: mod_base = OTHER; note = 2'-Omethylcytosine phosphorothiorate
  modified_base 2: mod_base = OTHER; note = 2'-Omethylcytosine phosphorothiorate
  modified_base 3: mod_base = OTHER; note = 2'-Omethyluridine
  modified_base 4: mod_base = OTHER; note = 2'-Omethyluridine
  modified_base 5: mod_base = OTHER; note = 2'-Omethylcytosine
  modified_base 6: mod_base = OTHER; note = 2'-Omethylguanosine
  modified_base 10: mod_base = OTHER; note = 2'-Omethylguanosine
  modified_base 11: mod_base = OTHER; note = 2'-Omethylcytosine
  modified_base 12: mod_base = OTHER; note = 2'-Omethyluridine
  modified_base 13: mod_base = OTHER; note = 2'-Omethylcytosine
  modified_base 18: mod_base = OTHER; note = 2'-Omethylguanosine
  modified_base 19: mod_base = OTHER; note = 2'-Omethylguanosine
  modified_base 22: mod_base = OTHER; note = 2'-Omethylguanosine
  modified_base 23: mod_base = OTHER; note = 2'-Omethyladenosine
  modified_base 24: mod_base = OTHER; note = 2'-Omethylguanosine
  modified_base 25: mod_base = OTHER; note = 2'-Omethylcytosine
  modified_base 33: mod_base = OTHER; note = 2'-fluorouridine
  modified_base 34: mod_base = OTHER; note = 2'-Omethylcytosine
  modified_base 35: mod_base = OTHER; note = Uridine phosphorothiorate
  modified_base 37: mod_base = OTHER; note = Guanosine phosphorothiorate
  modified_base 38: mod_base = OTHER; note = Adenosine phosphorothiorate
  modified_base 41: mod_base = OTHER; note = 2'-fluorocytosine
  modified_base 42: mod_base = OTHER; note = 2'-Omethyluridine
  modified_base 43: mod_base = OTHER; note = 2'-Omethyluridine
  modified_base 44: mod_base = OTHER; note = 2'-fluoroadenosine
  modified_base 49: mod_base = OTHER; note = 2'-Omethylguanosine
  modified_base 50: mod_base = OTHER; note = 2'-Omethylcytosine
  modified_base 51: mod_base = OTHER; note = 2'-Omethyluridine
  modified_base 52: mod_base = OTHER; note = 2'-Omethylguanosine
  modified_base 53: mod_base = OTHER; note = 2'-Omethylguanosine
  modified_base 54: mod_base = OTHER; note = Uridine phosphorothiorate
  modified_base 55: mod_base = OTHER; note = Uridine phosphorothiorate
  modified_base 61: mod_base = OTHER; note = 2'-Omethylcytosine
  modified_base 62: mod_base = OTHER; note = 2'-Omethylcytosine
  modified_base 63: mod_base = OTHER; note = 2'-fluoroguanosine
  modified_base 64: mod_base = OTHER; note = 2'-Omethylguanosine
  modified_base 65: mod_base = OTHER; note = 2'-Omethylcytosine
  modified_base 66: mod_base = OTHER; note = 2'-Omethyluridine
  modified_base 67: mod_base = OTHER; note = 2'-Omethylcytosine
  modified_base 68: mod_base = OTHER; note = 2'-Omethylguanosine
  modified_base 73: mod_base = OTHER; note = 2'-Omethyladenosine

SEQ ID NO: 4924 - DNA, 76 bp, synthetic construct; identical to SEQ ID NO: 1924
  source 1..76: mol_type = other DNA
  modified_base 1: mod_base = OTHER; note = 2'-Omethylguanosine
  modified_base 4: mod_base = OTHER; note = 2'-fluorouridine
  modified_base 5: mod_base = OTHER; note = 2'-Omethylcytosine phosphorothiorate
  modified_base 6: mod_base = OTHER; note = deoxycytosine phosphorothiorate
  modified_base 11: mod_base = OTHER; note = Cytosine phosphorothiorate
  modified_base 15: mod_base = OTHER; note = Adenosine phosphorothiorate
  modified_base 19: mod_base = OTHER; note = Adenosine phosphorothiorate
  modified_base 25: mod_base = OTHER; note = Cytosine phosphorothiorate
  modified_base 26: mod_base = OTHER; note = Adenosine phosphorothiorate
  modified_base 27: mod_base = OTHER; note = 2'-fluorouridine
  modified_base 30: mod_base = OTHER; note = Guanosine phosphorothiorate
  modified_base 31: mod_base = OTHER; note = 2'-O-(2-Methoxyethyl) adenosine
  modified_base 32: mod_base = OTHER; note = Cytosine phosphorothiorate
  modified_base 33: mod_base = OTHER; note = 2'-fluorouridine
  modified_base 39: mod_base = OTHER; note = Uridine phosphorothiorate
  modified_base 40: mod_base = OTHER; note = 2'-O-(2-Methoxyethyl) thymine
  modified_base 43: mod_base = OTHER; note = Adenosine phosphorothiorate
  modified_base 47: mod_base = OTHER; note = 2'-O-(2-Methoxyethyl) thymine
  modified_base 48: mod_base = OTHER; note = deoxyuridine phosphorothiorate
  modified_base 49: mod_base = OTHER; note = 2'-fluorocytosine
  modified_base 53: mod_base = OTHER; note = Guanosine phosphorothiorate
  modified_base 58: mod_base = OTHER; note = Adenosine phosphorothiorate
  modified_base 60: mod_base = OTHER; note = Uridine phosphorothiorate
  modified_base 63: mod_base = OTHER; note = Cytosine phosphorothiorate
  modified_base 64: mod_base = OTHER; note = deoxyguanosine phosphorothiorate
  modified_base 70: mod_base = OTHER; note = 2'-Omethylguanosine
  modified_base 74: mod_base = OTHER; note = Cytosine phosphorothiorate
  modified_base 75: mod_base = OTHER; note = 2'-Omethylcytosine
  modified_base 76: mod_base = OTHER; note = 2'-O-(2-Methoxyethyl) adenosine
  misc_feature 1..5: note = RNA
  misc_feature 6: note = DNA
  misc_feature 7..17: note = RNA
  misc_feature 18: note = DNA
  misc_feature 19..43: note = RNA
  misc_feature 44: note = DNA
  misc_feature 45..47: note = RNA
  misc_feature 48: note = DNA
  misc_feature 49..63: note = RNA
  misc_feature 64: note = DNA
  misc_feature 65..76: note = RNA

SEQ ID NO: 4925 - RNA, 73 nt, synthetic construct; identical to SEQ ID NO: 935
  source 1..73: mol_type = other RNA
  modified_base 1: mod_base = OTHER; note = 2'-Omethylguanosine phosphorothiorate
  modified_base 2: mod_base = OTHER; note = 2'-Omethylguanosine
  modified_base 20: mod_base = OTHER; note = Uridine phosphorothiorate
  modified_base 21: mod_base = OTHER; note = 2'-fluoroadenosine
  modified_base 33: mod_base = OTHER; note = 2'-fluorouridine
  modified_base 54: mod_base = OTHER; note = 2'-Omethyluridine
  modified_base 68: mod_base = OTHER; note = 2'-fluoroguanosine
  modified_base 72: mod_base = OTHER; note = 2'-Omethylcytosine

SEQ ID NO: 4926 - RNA, 75 nt, synthetic construct; identical to SEQ ID NO: 3306
  source 1..75: mol_type = other RNA
  modified_base 1: mod_base = OTHER; note = 2'-Omethylguanosine phosphorothiorate
  modified_base 2: mod_base = OTHER; note = Adenosine phosphorothiorate
  modified_base 74: mod_base = OTHER; note = 2'-Omethylcytosine phosphorothiorate
  modified_base 75: mod_base = OTHER; note = 2'-Omethyladenosine

SEQ ID NO: 4927 - RNA, 76 nt, synthetic construct; identical to SEQ ID NO: 625
  source 1..76: mol_type = other RNA
  modified_base 1: mod_base = OTHER; note = 2'-Omethylguanosine phosphorothiorate
  modified_base 2: mod_base = OTHER; note = 2'-Omethylguanosine
  modified_base 13: mod_base = OTHER; note = 2'-Omethylcytosine
  modified_base 33: mod_base = OTHER; note = 2'-fluorouridine
  modified_base 37: mod_base = OTHER; note = Adenosine phosphorothiorate
  modified_base 52: mod_base = OTHER; note = 2'-Omethylguanosine
  modified_base 62: mod_base = OTHER; note = 2'-Omethylcytosine
  modified_base 63: mod_base = OTHER; note = 2'-fluorocytosine
  modified_base 73: mod_base = OTHER; note = 2'-Omethylguanosine
  modified_base 75: mod_base = OTHER; note = 2'-fluorocytosine phosphorothiorate
  modified_base 76: mod_base = OTHER; note = 2'-Omethyladenosine

SEQ ID NO: 4928 - RNA, 76 nt, synthetic construct; identical to SEQ ID NO: 625
  source 1..76: mol_type = other RNA
  modified_base 1: mod_base = OTHER; note = 2'-Omethylguanosine phosphorothiorate
  modified_base 2: mod_base = OTHER; note = 2'-Omethylguanosine phosphorothiorate
  modified_base 3: mod_base = OTHER; note = 2'-Omethylcytosine phosphorothiorate
  modified_base 4: mod_base = OTHER; note = 2'-Omethyluridine phosphorothiorate
  modified_base 5: mod_base = OTHER; note = 2'-Omethylcytosine phosphorothiorate
  modified_base 6: mod_base = OTHER; note = 2'-Omethylcytosine phosphorothiorate
  modified_base 49: mod_base = OTHER; note = 2'-Omethylcytosine
  modified_base 50: mod_base = OTHER; note = 2'-Omethylcytosine
  modified_base 51: mod_base = OTHER; note = 2'-Omethylguanosine
  modified_base 52: mod_base = OTHER; note = 2'-Omethylguanosine
  modified_base 53: mod_base = OTHER; note = 2'-Omethylguanosine

SEQ ID NO: 4929 - RNA, 85 nt, synthetic construct; identical to SEQ ID NO: 3288
  source 1..85: mol_type = other RNA
  modified_base 1: mod_base = OTHER; note = Cytosine phosphorothiorate
  modified_base 25: mod_base = OTHER; note = 2'-fluoroguanosine
  modified_base 43: mod_base = OTHER; note = 2'-Omethyluridine
  modified_base 46: mod_base = OTHER; note = Adenosine phosphorothiorate
  modified_base 54: mod_base = OTHER; note = 2'-fluorocytosine
  modified_base 59: mod_base = OTHER; note = 2'-fluorouridine
  modified_base 76: mod_base = OTHER; note = 2'-fluorocytosine

SEQ ID NO: 4930 - RNA, 76 nt, synthetic construct; identical to SEQ ID NO: 3289
  source 1..76: mol_type = other RNA
  modified_base 10: mod_base = OTHER; note = 2'-Omethylguanosine
  modified_base 11: mod_base = OTHER; note = 2'-Omethylcytosine
  modified_base 12: mod_base = OTHER; note = 2'-Omethyluridine
  modified_base 13: mod_base = OTHER; note = 2'-Omethylcytosine
  modified_base 22: mod_base = OTHER; note = 2'-Omethylguanosine
  modified_base 23: mod_base = OTHER; note = 2'-Omethyladenosine
  modified_base 24: mod_base = OTHER; note = 2'-Omethylguanosine
  modified_base 25: mod_base = OTHER; note = 2'-Omethylcytosine
  modified_base 49: mod_base = OTHER; note = 2'-Omethylcytosine
  modified_base 50: mod_base = OTHER; note = 2'-Omethyladenosine
  modified_base 51: mod_base = OTHER; note = 2'-Omethylguanosine
  modified_base 52: mod_base = OTHER; note = 2'-Omethylguanosine
  modified_base 53: mod_base = OTHER; note = 2'-Omethylguanosine
  modified_base 73: mod_base = OTHER; note = 2'-Omethylguanosine

SEQ ID NO: 4931 - RNA, 86 nt, synthetic construct; identical to SEQ ID NO: 3290
  source 1..86: mol_type = other RNA
  modified_base 1: mod_base = OTHER; note = 2'-Omethyladenosine
  modified_base 14: mod_base = OTHER; note = 2'-Omethyladenosine
  modified_base 15: mod_base = OTHER; note = 2'-Omethylguanosine
  modified_base 16: mod_base = OTHER; note = 2'-Omethyluridine
  modified_base 17: mod_base = OTHER; note = 2'-Omethylguanosine
  modified_base 18: mod_base = OTHER; note = 2'-Omethylguanosine
  modified_base 19: mod_base = OTHER; note = Uridine phosphorothiorate
  modified_base 20: mod_base = OTHER; note = 2'-Omethyluridine
  modified_base 21: mod_base = OTHER; note = Adenosine phosphorothiorate
  modified_base 33: mod_base = OTHER; note = Uridine phosphorothiorate
  modified_base 34: mod_base = OTHER; note = 2'-Omethyluridine
  modified_base 35: mod_base = OTHER; note = Cytosine phosphorothiorate
  modified_base 37: mod_base = OTHER; note = Guanosine phosphorothiorate
  modified_base 38: mod_base = OTHER; note = Adenosine phosphorothiorate
  modified_base 41: mod_base = OTHER; note = 2'-fluorocytosine
  modified_base 42: mod_base = OTHER; note = 2'-Omethyladenosine
  modified_base 43: mod_base = OTHER; note = 2'-Omethyladenosine
  modified_base 44: mod_base = OTHER; note = 2'-fluorouridine
  modified_base 60: mod_base = OTHER; note = 2'-Omethyluridine
  modified_base 62: mod_base = OTHER; note = 2'-Omethylguanosine
  modified_base 83: mod_base = OTHER; note = 2'-Omethyladenosine

SEQ ID NO: 4932 - RNA, 76 nt, synthetic construct; identical to SEQ ID NO: 625
  source 1..76: mol_type = other RNA
  modified_base 1: mod_base = OTHER; note = 2'-Omethylguanosine phosphorothiorate
  modified_base 2: mod_base = OTHER; note = 2'-Omethylguanosine phosphorothiorate
  modified_base 3: mod_base = OTHER; note = 2'-Omethylcytosine phosphorothiorate
  modified_base 4: mod_base = OTHER; note = 2'-Omethyluridine phosphorothiorate
  modified_base 5: mod_base = OTHER; note = 2'-Omethylcytosine phosphorothiorate
  modified_base 6: mod_base = OTHER; note = 2'-Omethylcytosine phosphorothiorate
  modified_base 14: mod_base = OTHER; note = 2'-Omethyladenosine
  modified_base 15: mod_base = OTHER; note = 2'-Omethyladenosine
  modified_base 16: mod_base = OTHER; note = 2'-Omethyluridine
  modified_base 17: mod_base = OTHER; note = 2'-Omethylguanosine
  modified_base 18: mod_base = OTHER; note = 2'-Omethylguanosine
  modified_base 19: mod_base = OTHER; note = 2'-Omethyladenosine
  modified_base 20: mod_base = OTHER; note = 2'-Omethyluridine
  modified_base 49: mod_base = OTHER; note = 2'-Omethylcytosine
  modified_base 50: mod_base = OTHER; note = 2'-Omethylcytosine
  modified_base 51: mod_base = OTHER; note = 2'-Omethylguanosine
  modified_base 52: mod_base = OTHER; note = 2'-Omethylguanosine
  modified_base 53: mod_base = OTHER; note = 2'-Omethylguanosine
  modified_base 54: mod_base = OTHER; note = Uridine phosphorothiorate
  modified_base 55: mod_base = OTHER; note = Uridine phosphorothiorate
  modified_base 56: mod_base = OTHER; note = Cytosine phosphorothiorate
  modified_base 57: mod_base = OTHER; note = Guanosine phosphorothiorate
  modified_base 61: mod_base = OTHER; note = 2'-Omethylcytosine
  modified_base 62: mod_base = OTHER; note = 2'-Omethylcytosine
  modified_base 63: mod_base = OTHER; note = 2'-Omethylcytosine
  modified_base 64: mod_base = OTHER; note = 2'-Omethylguanosine
  modified_base 65: mod_base = OTHER; note = 2'-Omethylguanosine
  modified_base 66: mod_base = OTHER; note = 2'-Omethylcytosine
  modified_base 67: mod_base = OTHER; note = 2'-Omethylguanosine
  modified_base 68: mod_base = OTHER; note = 2'-Omethylguanosine
  modified_base 69: mod_base = OTHER; note = 2'-Omethyladenosine

SEQ ID NO: 4933 - RNA, 75 nt, synthetic construct; identical to SEQ ID NO: 3311
  source 1..75: mol_type = other RNA
  modified_base 2: mod_base = OTHER; note = 2'-Omethylguanosine phosphorothiorate
  modified_base 3: mod_base = OTHER; note = Uridine phosphorothiorate
  modified_base 11: mod_base = OTHER; note = Uridine phosphorothiorate
  modified_base 20: mod_base = OTHER; note = 2'-fluoroadenosine phosphorothiorate
  modified_base 29: mod_base = OTHER; note = 2'-fluoroguanosine
  modified_base 30: mod_base = OTHER; note = 2'-Omethylguanosine phosphorothiorate
  modified_base 36: mod_base = OTHER; note = 2'-fluoroadenosine
  modified_base 37: mod_base = OTHER; note = Adenosine phosphorothiorate
  modified_base 39: mod_base = OTHER; note = Uridine phosphorothiorate
  modified_base 42: mod_base = OTHER; note = 2'-fluoroadenosine
  modified_base 55: mod_base = OTHER; note = 2'-fluorocytosine phosphorothiorate
  modified_base 61: mod_base = OTHER; note = 2'-fluorouridine
  modified_base 67: mod_base = OTHER; note = Guanosine phosphorothiorate
  modified_base 68: mod_base = OTHER; note = 2'-fluoroadenosine
  modified_base 73: mod_base = OTHER; note = Cytosine phosphorothiorate

SEQ ID NO: 4934 - DNA, 76 bp, synthetic construct; identical to SEQ ID NO: 1924
  source 1..76: mol_type = other DNA
  modified_base 1: mod_base = OTHER; note = 2'-Omethylguanosine phosphorothiorate
  modified_base 2: mod_base = OTHER; note = 2'-Omethylguanosine
  modified_base 3: mod_base = OTHER; note = Cytosine phosphorothiorate
  modified_base 9: mod_base = OTHER; note = Guanosine phosphorothiorate
  modified_base 10: mod_base = OTHER; note = 2'-fluoroguanosine
  modified_base 12: mod_base = OTHER; note = 2'-Omethylguanosine phosphorothiorate
  modified_base 13: mod_base = OTHER; note = 2'-O-(2-Methoxyethyl) 5-methylcytosine phosphorothiorate
  modified_base 14: mod_base = OTHER; note = 2'-Omethyladenosine
  modified_base 15: mod_base = OTHER; note = 2'-O-(2-Methoxyethyl) adenosine
  modified_base 19: mod_base = OTHER; note = Adenosine phosphorothiorate
  modified_base 21: mod_base = OTHER; note = 2'-O-(2-Methoxyethyl) adenosine phosphorothiorate
  modified_base 22: mod_base = OTHER; note = 2'-O-(2-Methoxyethyl) guanosine
  modified_base 26: mod_base = OTHER; note = Adenosine phosphorothiorate
  modified_base 27: mod_base = OTHER; note = 2'-O-(2-Methoxyethyl) thymine
  modified_base 28: mod_base = OTHER; note = 2'-Omethyluridine
  modified_base 32: mod_base = OTHER; note = 2'-O-(2-Methoxyethyl) 5-methylcytosine
  modified_base 33: mod_base = OTHER; note = Uridine phosphorothiorate
  modified_base 34: mod_base = OTHER; note = 2'-Omethyluridine
  modified_base 35: mod_base = OTHER; note = Cytosine phosphorothiorate
  modified_base 39: mod_base = OTHER; note = 2'-Omethyluridine
  modified_base 43: mod_base = OTHER; note = 2'-Omethyladenosine
  modified_base 47: mod_base = OTHER; note = 2'-Omethyluridine
  modified_base 49: mod_base = OTHER; note = 2'-O-(2-Methoxyethyl) 5-methylcytosine
  modified_base 50: mod_base = OTHER; note = Cytosine phosphorothiorate
  modified_base 51: mod_base = OTHER; note = 2'-Omethylguanosine
  modified_base 52: mod_base = OTHER; note = Guanosine phosphorothiorate
  modified_base 54: mod_base = OTHER; note = Uridine phosphorothiorate
  modified_base 63: mod_base = OTHER; note = 2'-O-(2-Methoxyethyl) 5-methylcytosine
  modified_base 64: mod_base = OTHER; note = 2'-O-(2-Methoxyethyl) guanosine phosphorothiorate
  modified_base 65: mod_base = OTHER; note = 2'-Omethylguanosine
  modified_base 67: mod_base = OTHER; note = Guanosine phosphorothiorate
  modified_base 68: mod_base = OTHER; note = 2'-fluoroguanosine phosphorothiorate
  modified_base 69: mod_base = OTHER; note = Adenosine phosphorothiorate
  modified_base 73: mod_base = OTHER; note = 2'-O-(2-Methoxyethyl) guanosine
  modified_base 75: mod_base = OTHER; note = 2'-fluorocytosine phosphorothiorate
  modified_base 76: mod_base = OTHER; note = 2'-Omethyladenosine
  misc_feature 1..69: note = RNA
  misc_feature 70: note = DNA
  misc_feature 71..76: note = RNA

SEQ ID NO: 4935 - RNA, 85 nt, synthetic construct; identical to SEQ ID NO: 3286
  source 1..85: mol_type = other RNA
  modified_base 1: mod_base = OTHER; note = 2'-Omethylcytosine
  modified_base 13: mod_base = OTHER; note = Adenosine phosphorothiorate
  modified_base 16: mod_base = OTHER; note = Guanosine phosphorothiorate
  modified_base 17: mod_base = OTHER; note = 2'-fluoroguanosine phosphorothiorate
  modified_base 28: mod_base = OTHER; note = 2'-fluoroguanosine
  modified_base 30: mod_base = OTHER; note = 2'-fluoroadenosine
  modified_base 33: mod_base = OTHER; note = 2'-fluorouridine
  modified_base 35: mod_base = OTHER; note = 2'-fluoroadenosine
  modified_base 38: mod_base = OTHER; note = Uridine phosphorothiorate
  modified_base 43: mod_base = OTHER; note = 2'-Omethyluridine
  modified_base 51: mod_base = OTHER; note = 2'-Omethyluridine
  modified_base 54: mod_base = OTHER; note = 2'-Omethylcytosine
  modified_base 55: mod_base = OTHER; note = 2'-Omethylcytosine
  modified_base 57: mod_base = OTHER; note = 2'-Omethylcytosine
  modified_base 65: mod_base = OTHER; note = Cytosine phosphorothiorate
  modified_base 73: mod_base = OTHER; note = 2'-fluoroadenosine
  modified_base 75: mod_base = OTHER; note = Uridine phosphorothiorate
  modified_base 77: mod_base = OTHER; note = 2'-fluorocytosine
  modified_base 82: mod_base = OTHER; note = Adenosine phosphorothiorate
  modified_base 84: mod_base = OTHER; note = Cytosine phosphorothiorate

SEQ ID NO: 4936 - RNA, 75 nt, synthetic construct; identical to SEQ ID NO: 3336
  source 1..75: mol_type = other RNA
  modified_base 1: mod_base = OTHER; note = 2'-Omethylcytosine
  modified_base 3: mod_base = OTHER; note = 2'-Omethyluridine phosphorothiorate
  modified_base 4: mod_base = OTHER; note = Guanosine phosphorothiorate
  modified_base 7: mod_base = OTHER; note = Uridine phosphorothiorate
  modified_base 13: mod_base = OTHER; note = 2'-fluoroadenosine
  modified_base 20: mod_base = OTHER; note = 2'-fluoroadenosine
  modified_base 26: mod_base = OTHER; note = 2'-fluorouridine
  modified_base 27: mod_base = OTHER; note = 2'-fluorocytosine phosphorothiorate
  modified_base 36: mod_base = OTHER; note = 2'-fluoroadenosine phosphorothiorate
  modified_base 40: mod_base = OTHER; note = 2'-Omethyluridine
  modified_base 41: mod_base = OTHER; note = 2'-Omethylguanosine phosphorothiorate
  modified_base 46: mod_base = OTHER; note = 2'-fluorouridine
  modified_base 47: mod_base = OTHER; note = 2'-fluorocytosine
  modified_base 48: mod_base = OTHER; note = 2'-Omethylcytosine phosphorothiorate
  modified_base 49: mod_base = OTHER; note = 2'-fluoroadenosine
  modified_base 53: mod_base = OTHER; note = 2'-fluorouridine
  modified_base 60: mod_base = OTHER; note = 2'-fluorocytosine phosphorothiorate
  modified_base 63: mod_base = OTHER; note = 2'-Omethyluridine phosphorothiorate
  modified_base 70: mod_base = OTHER; note = Guanosine phosphorothiorate
  modified_base 73: mod_base = OTHER; note = Cytosine phosphorothiorate
  modified_base 74: mod_base = OTHER; note = 2'-Omethylcytosine

SEQ ID NO: 4937 - RNA, 75 nt, synthetic construct; identical to SEQ ID NO: 3306
  source 1..75: mol_type = other RNA
  modified_base 1: mod_base = OTHER; note = 2'-Omethylguanosine
  modified_base 2: mod_base = OTHER; note = 2'-Omethyladenosine
  modified_base 3: mod_base = OTHER; note = 2'-Omethylcytosine
  modified_base 4: mod_base = OTHER; note = 2'-Omethylcytosine
  modified_base 5: mod_base = OTHER; note = 2'-Omethyluridine
  modified_base 6: mod_base = OTHER; note = 2'-Omethylcytosine
  modified_base 14: mod_base = OTHER; note = 2'-Omethyladenosine
  modified_base 15: mod_base = OTHER; note = 2'-fluoroadenosine
  modified_base 16: mod_base = OTHER; note = 2'-Omethylcytosine
  modified_base 17: mod_base = OTHER; note = 2'-Omethylguanosine
  modified_base 18: mod_base = OTHER; note = 2'-Omethylguanosine
  modified_base 19: mod_base = OTHER; note = 2'-fluorouridine
  modified_base 24: mod_base = OTHER; note = 2'-Omethylcytosine
  modified_base 32: mod_base = OTHER; note = 2'-fluorouridine
  modified_base 34: mod_base = OTHER; note = Uridine phosphorothiorate
  modified_base 36: mod_base = OTHER; note = Guanosine phosphorothiorate
  modified_base 37: mod_base = OTHER; note = Adenosine phosphorothiorate
  modified_base 40: mod_base = OTHER; note = 2'-Omethyladenosine
  modified_base 41: mod_base = OTHER; note = 2'-Omethylguanosine
  modified_base 42: mod_base = OTHER; note = 2'-Omethyladenosine
  modified_base 43: mod_base = OTHER; note = 2'-Omethyladenosine
  modified_base 48: mod_base = OTHER; note = 2'-Omethylguanosine
  modified_base 49: mod_base = OTHER; note = 2'-Omethylcytosine
  modified_base 51: mod_base = OTHER; note = 2'-Omethyluridine
  modified_base 53: mod_base = OTHER; note = 2'-Omethyluridine
  modified_base 54: mod_base = OTHER; note = Uridine phosphorothiorate
  modified_base 55: mod_base = OTHER; note = 2'-Omethylcytosine
  modified_base 56: mod_base = OTHER; note = 2'-fluoroadenosine
  modified_base 58: mod_base = OTHER; note = 2'-Omethyladenosine
  modified_base 60: mod_base = OTHER; note = 2'-Omethylcytosine
  modified_base 64: mod_base = OTHER; note = 2'-Omethyluridine
  modified_base 72: mod_base = OTHER; note = 2'-Omethyladenosine

SEQ ID NO: 4938 - RNA, 76 nt, synthetic construct
  source 1..76: mol_type = other RNA
ggccaactggcgcaatggatagcgcattggacttcaaattcaaaggttacgggttcgagtcccgtgttggtcgcca

SEQ ID NO: 4939 - RNA, 76 nt, synthetic construct; identical to SEQ ID NO: 625
  source 1..76: mol_type = other RNA
  modified_base 1: mod_base = OTHER; note = Guanosine phosphorothiorate
  modified_base 2: mod_base = OTHER; note = 2'-Omethylguanosine
  modified_base 7: mod_base = OTHER; note = Guanosine phosphorothiorate
  modified_base 10: mod_base = OTHER; note = 2'-fluoroguanosine phosphorothiorate
  modified_base 11: mod_base = OTHER; note = 2'-Omethylcytosine
  modified_base 12: mod_base = OTHER; note = 2'-fluoroguanosine
  modified_base 13: mod_base = OTHER; note = 2'-Omethylcytosine
  modified_base 14: mod_base = OTHER; note = 2'-fluoroadenosine phosphorothiorate
  modified_base 20: mod_base = OTHER; note = 2'-fluorouridine
  modified_base 23: mod_base = OTHER; note = Cytosine phosphorothiorate
  modified_base 24: mod_base = OTHER; note = 2'-fluoroguanosine
  modified_base 27: mod_base = OTHER; note = 2'-fluorouridine
  modified_base 28: mod_base = OTHER; note = 2'-fluorouridine
  modified_base 34: mod_base = OTHER; note = 2'-fluorouridine phosphorothiorate
  modified_base 36: mod_base = OTHER; note = Adenosine phosphorothiorate
  modified_base 38: mod_base = OTHER; note = 2'-fluoroadenosine
  modified_base 39: mod_base = OTHER; note = 2'-fluorouridine
  modified_base 43: mod_base = OTHER; note = Adenosine phosphorothiorate
  modified_base 44: mod_base = OTHER; note = 2'-fluoroadenosine phosphorothiorate
  modified_base 46: mod_base = OTHER; note = 2'-fluoroguanosine phosphorothiorate
  modified_base 47: mod_base = OTHER; note = 2'-Omethyluridine phosphorothiorate
  modified_base 48: mod_base = OTHER; note = 2'-Omethyluridine
  modified_base 54: mod_base = OTHER; note = 2'-fluorouridine
  modified_base 63: mod_base = OTHER; note = 2'-fluorocytosine phosphorothiorate
  modified_base 64: mod_base = OTHER; note = 2'-Omethylguanosine
  modified_base 66: mod_base = OTHER; note = 2'-Omethylcytosine phosphorothiorate
  modified_base 69: mod_base = OTHER; note = Adenosine phosphorothiorate
  modified_base 70: mod_base = OTHER; note = 2'-Omethylguanosine
  modified_base 76: mod_base = OTHER; note = 2'-fluoroadenosine

SEQ ID NO: 4940 - RNA, 76 nt, synthetic construct; identical to SEQ ID NO: 3289
  source 1..76: mol_type = other RNA
  modified_base 1: mod_base = OTHER; note = 2'-Omethylguanosine
  modified_base 2: mod_base = OTHER; note = 2'-Omethylcytosine
  modified_base 3: mod_base = OTHER; note = 2'-Omethylcytosine
  modified_base 4: mod_base = OTHER; note = 2'-Omethyluridine
  modified_base 5: mod_base = OTHER; note = 2'-Omethylguanosine
  modified_base 6: mod_base = OTHER; note = 2'-Omethylguanosine
  modified_base 14: mod_base = OTHER; note = 2'-Omethyladenosine
  modified_base 15: mod_base = OTHER; note = 2'-Omethylguanosine
  modified_base 16: mod_base = OTHER; note = 2'-Omethyluridine
  modified_base 18: mod_base = OTHER; note = 2'-Omethylguanosine
  modified_base 19: mod_base = OTHER; note = 2'-Omethylguanosine
  modified_base 22: mod_base = OTHER; note = 2'-Omethylguanosine
  modified_base 23: mod_base = OTHER; note = 2'-Omethyladenosine
  modified_base 24: mod_base = OTHER; note = 2'-Omethylguanosine
  modified_base 25: mod_base = OTHER; note = 2'-Omethylcytosine
  modified_base 33: mod_base = OTHER; note = 2'-fluorouridine
  modified_base 35: mod_base = OTHER; note = Uridine phosphorothiorate
  modified_base 37: mod_base = OTHER; note = Adenosine phosphorothiorate
  modified_base 38: mod_base = OTHER; note = Adenosine phosphorothiorate
  modified_base 41: mod_base = OTHER; note = 2'-Omethyluridine
  modified_base 42: mod_base = OTHER; note = 2'-Omethylguanosine
  modified_base 43: mod_base = OTHER; note = 2'-Omethyladenosine
  modified_base 44: mod_base = OTHER; note = 2'-Omethylguanosine
  modified_base 49: mod_base = OTHER; note = 2'-Omethylcytosine
  modified_base 50: mod_base = OTHER; note = 2'-Omethyladenosine
  modified_base 52: mod_base = OTHER; note = 2'-Omethylguanosine
  modified_base 54: mod_base = OTHER; note = 2'-Omethyluridine
  modified_base 55: mod_base = OTHER; note = Uridine phosphorothiorate
  modified_base 56: mod_base = OTHER; note = 2'-Omethylcytosine
  modified_base 57: mod_base = OTHER; note = 2'-fluoroadenosine
  modified_base 59: mod_base = OTHER; note = 2'-Omethylguanosine
  modified_base 61: mod_base = OTHER; note = 2'-Omethylcytosine
  modified_base 65: mod_base = OTHER; note = 2'-Omethylguanosine
  modified_base 73: mod_base = OTHER; note = 2'-Omethylguanosine

SEQ ID NO: 4941 - RNA, 75 nt, synthetic construct; identical to SEQ ID NO: 3336
  source 1..75: mol_type = other RNA
  modified_base 38: mod_base = OTHER; note = 2'-fluorouridine
  modified_base 39: mod_base = OTHER; note = 2'-fluorocytosine
  modified_base 47: mod_base = OTHER; note = 2'-fluorocytosine
  modified_base 48: mod_base = OTHER; note = Cytosine phosphorothiorate
  modified_base 53: mod_base = OTHER; note = 2'-fluorouridine
  modified_base 71: mod_base = OTHER; note = 2'-fluorocytosine phosphorothiorate
  modified_base 73: mod_base = OTHER; note = Cytosine phosphorothiorate
  modified_base 74: mod_base = OTHER; note = Cytosine phosphorothiorate

SEQ ID NO: 4942 - RNA, 86 nt, synthetic construct; identical to SEQ ID NO: 3290
  source 1..86: mol_type = other RNA
  modified_base 40: mod_base = OTHER; note = Cytosine phosphorothiorate

SEQ ID NO: 4943 - RNA, 76 nt, synthetic construct; identical to SEQ ID NO: 625
  source 1..76: mol_type = other RNA
  modified_base 1: mod_base = OTHER; note = 2'-Omethylguanosine phosphorothiorate
  modified_base 2: mod_base = OTHER; note = 2'-Omethylguanosine
  modified_base 13: mod_base = OTHER; note = 2'-Omethylcytosine
  modified_base 18: mod_base = OTHER; note = 2'-Omethylguanosine
  modified_base 33: mod_base = OTHER; note = 2'-fluorouridine
  modified_base 35: mod_base = OTHER; note = Cytosine phosphorothiorate
  modified_base 52: mod_base = OTHER; note = 2'-Omethylguanosine
  modified_base 57: mod_base = OTHER; note = 2'-Omethylguanosine
  modified_base 62: mod_base = OTHER; note = 2'-Omethylcytosine
  modified_base 73: mod_base = OTHER; note = 2'-Omethylguanosine

SEQ ID NO: 4944 - RNA, 86 nt, synthetic construct; identical to SEQ ID NO: 3290
  source 1..86: mol_type = other RNA
  modified_base 83: mod_base = OTHER; note = 2'-fluoroadenosine

SEQ ID NO: 4945 - RNA, 86 nt, synthetic construct; identical to SEQ ID NO: 3290
  source 1..86: mol_type = other RNA
  modified_base 1: mod_base = OTHER; note = 2'-Omethyladenosine
  modified_base 44: mod_base = OTHER; note = 2'-Omethyluridine
  modified_base 57: mod_base = OTHER; note = 2'-fluoroguanosine
  modified_base 58: mod_base = OTHER; note = 2'-fluorocytosine
  modified_base 83: mod_base = OTHER; note = 2'-Omethyladenosine

SEQ ID NO: 4946 - RNA, 86 nt, synthetic construct; identical to SEQ ID NO: 3290
  source 1..86: mol_type = other RNA
  modified_base 1: mod_base = OTHER; note = 2'-Omethyladenosine phosphorothiorate
  modified_base 2: mod_base = OTHER; note = 2'-Omethylcytosine phosphorothiorate
  modified_base 12: mod_base = OTHER; note = Cytosine phosphorothiorate
  modified_base 13: mod_base = OTHER; note = 2'-Omethylguanosine
  modified_base 84: mod_base = OTHER; note = Cytosine phosphorothiorate
  modified_base 85: mod_base = OTHER; note = 2'-Omethylcytosine phosphorothiorate
  modified_base 86: mod_base = OTHER; note = 2'-Omethyladenosine

SEQ ID NO: 4947 - RNA, 75 nt, synthetic construct
  source 1..75: mol_type = other RNA
gcgttggtggtatagtggtaagcatagctgccttcaaagcagttgacccgggttcgattcccggccaacgcacca

SEQ ID NO: 4948 - RNA, 85 nt, synthetic construct; identical to SEQ ID NO: 3297
  source 1..85: mol_type = other RNA
  modified_base 1: mod_base = OTHER; note = 2'-Omethylguanosine phosphorothiorate
  modified_base 4: mod_base = OTHER; note = 2'-Omethylguanosine phosphorothiorate
  modified_base 16: mod_base = OTHER; note = 2'-Omethyluridine
  modified_base 23: mod_base = OTHER; note = Guanosine phosphorothiorate
  modified_base 48: mod_base = OTHER; note = 2'-fluoroguanosine
  modified_base 51: mod_base = OTHER; note = 2'-fluorouridine
  modified_base 83: mod_base = OTHER; note = Cytosine phosphorothiorate

SEQ ID NO: 4949 - RNA, 75 nt, synthetic construct; identical to SEQ ID NO: 3306
  source 1..75: mol_type = other RNA
  modified_base 1: mod_base = OTHER; note = 2'-Omethylguanosine
  modified_base 2: mod_base = OTHER; note = 2'-Omethyladenosine
  modified_base 3: mod_base = OTHER; note = 2'-Omethylcytosine
  modified_base 4: mod_base = OTHER; note = 2'-Omethylcytosine
  modified_base 5: mod_base = OTHER; note = 2'-Omethyluridine
  modified_base 6: mod_base = OTHER; note = 2'-Omethylcytosine
  modified_base 64: mod_base = OTHER; note = 2'-Omethyluridine
  modified_base 65: mod_base = OTHER; note = 2'-Omethylcytosine
  modified_base 66: mod_base = OTHER; note = 2'-Omethylguanosine
  modified_base 67: mod_base = OTHER; note = 2'-Omethylguanosine
  modified_base 72: mod_base = OTHER; note = 2'-Omethyladenosine

SEQ ID NO: 4950 - RNA, 85 nt, synthetic construct; identical to SEQ ID NO: 3288
  source 1..85: mol_type = other RNA
  modified_base 1: mod_base = OTHER; note = 2'-fluorocytosine phosphorothiorate
  modified_base 32: mod_base = OTHER; note = 2'-fluorouridine
  modified_base 50: mod_base = OTHER; note = 2'-Omethyladenosine
  modified_base 56: mod_base = OTHER; note = 2'-Omethylguanosine
  modified_base 62: mod_base = OTHER; note = 2'-fluoroguanosine
  modified_base 69: mod_base = OTHER; note = Cytosine phosphorothiorate
  modified_base 84: mod_base = OTHER; note = Cytosine phosphorothiorate

SEQ ID NO: 4951 - RNA, 76 nt, synthetic construct; identical to SEQ ID NO: 625
  source 1..76: mol_type = other RNA
  modified_base 2: mod_base = OTHER; note = 2'-Omethylguanosine
  modified_base 3: mod_base = OTHER; note = 2'-fluorocytosine
  modified_base 4: mod_base = OTHER; note = 2'-Omethyluridine
  modified_base 8: mod_base = OTHER; note = Uridine phosphorothiorate
  modified_base 12: mod_base = OTHER; note = 2'-fluoroguanosine
  modified_base 14: mod_base = OTHER; note = 2'-Omethyladenosine
  modified_base 15: mod_base = OTHER; note = 2'-fluoroadenosine
  modified_base 17: mod_base = OTHER; note = 2'-Omethylguanosine phosphorothiorate
  modified_base 18: mod_base = OTHER; note = 2'-Omethylguanosine
  modified_base 20: mod_base = OTHER; note = 2'-Omethyluridine
  modified_base 25: mod_base = OTHER; note = 2'-Omethylcytosine
  modified_base 27: mod_base = OTHER; note = Uridine phosphorothiorate
  modified_base 28: mod_base = OTHER; note = 2'-fluorouridine
  modified_base 29: mod_base = OTHER; note = Guanosine phosphorothiorate
  modified_base 33: mod_base = OTHER; note = Uridine phosphorothiorate
  modified_base 34: mod_base = OTHER; note = 2'-Omethyluridine
  modified_base 36: mod_base = OTHER; note = Adenosine phosphorothiorate
  modified_base 38: mod_base = OTHER; note = 2'-fluoroadenosine phosphorothiorate
  modified_base 39: mod_base = OTHER; note = 2'-Omethyluridine
  modified_base 41: mod_base = OTHER; note = Cytosine phosphorothiorate
  modified_base 42: mod_base = OTHER; note = Adenosine phosphorothiorate
  modified_base 45: mod_base = OTHER; note = 2'-fluoroguanosine
  modified_base 47: mod_base = OTHER; note = 2'-Omethyluridine
  modified_base 48: mod_base = OTHER; note = 2'-fluorouridine
  modified_base 50: mod_base = OTHER; note = Cytosine phosphorothiorate
  modified_base 51: mod_base = OTHER; note = 2'-Omethylguanosine
  modified_base 52: mod_base = OTHER; note = 2'-Omethylguanosine
  modified_base 53: mod_base = OTHER; note = 2'-fluoroguanosine
  modified_base 54: mod_base = OTHER; note = 2'-Omethyluridine
  modified_base 63: mod_base = OTHER; note = 2'-Omethylcytosine
  modified_base 69: mod_base = OTHER; note = Adenosine phosphorothiorate
  modified_base 70: mod_base = OTHER; note = 2'-Omethylguanosine phosphorothiorate
  modified_base 73: mod_base = OTHER; note = 2'-fluoroguanosine phosphorothiorate
  modified_base 74: mod_base = OTHER; note = 2'-fluorocytosine
  modified_base 75: mod_base = OTHER; note = 2'-fluorocytosine
  modified_base 76: mod_base = OTHER; note = 2'-fluoroadenosine

SEQ ID NO: 4952 - RNA, 75 nt, synthetic construct; identical to SEQ ID NO: 3336
  source 1..75: mol_type = other RNA
  modified_base 2: mod_base = OTHER; note = Cytosine phosphorothiorate
  modified_base 12: mod_base = OTHER; note = 2'-fluorocytosine phosphorothiorate
  modified_base 16: mod_base = OTHER; note = 2'-fluorocytosine
  modified_base 23: mod_base = OTHER; note = 2'-fluoroguanosine phosphorothiorate
  modified_base 25: mod_base = OTHER; note = 2'-fluoroadenosine
  modified_base 28: mod_base = OTHER; note = Adenosine phosphorothiorate
  modified_base 34: mod_base = OTHER; note = 2'-fluorouridine
  modified_base 35: mod_base = OTHER; note = 2'-fluoroadenosine
  modified_base 38: mod_base = OTHER; note = 2'-fluorouridine
  modified_base 40: mod_base = OTHER; note = 2'-fluorouridine
  modified_base 46: mod_base = OTHER; note = 2'-fluorouridine
  modified_base 47: mod_base = OTHER; note = 2'-fluorocytosine
  modified_base 50: mod_base = OTHER; note = 2'-fluoroguanosine
  modified_base 60: mod_base = OTHER; note = Cytosine phosphorothiorate
  modified_base 70: mod_base = OTHER; note = 2'-fluoroguanosine phosphorothiorate
  modified_base 72: mod_base = OTHER; note = Guanosine phosphorothiorate
  modified_base 74: mod_base = OTHER; note = Cytosine phosphorothiorate

SEQ ID NO: 4953 - RNA, 76 nt, synthetic construct; identical to SEQ ID NO: 3318
  source 1..76: mol_type = other RNA
  modified_base 1: mod_base = OTHER; note = 2'-Omethylcytosine
  modified_base 2: mod_base = OTHER; note = 2'-Omethylcytosine
  modified_base 3: mod_base = OTHER; note = 2'-Omethyluridine
  modified_base 4: mod_base = OTHER; note = 2'-Omethyluridine
  modified_base 5: mod_base = OTHER; note = 2'-Omethylcytosine
  modified_base 6: mod_base = OTHER; note = 2'-Omethylguanosine
  modified_base 16: mod_base = OTHER; note = 2'-Omethyluridine
  modified_base 18: mod_base = OTHER; note = 2'-Omethylguanosine
  modified_base 19: mod_base = OTHER; note = 2'-Omethylguanosine
  modified_base 22: mod_base = OTHER; note = 2'-Omethylguanosine
  modified_base 23: mod_base = OTHER; note = 2'-Omethyladenosine
  modified_base 24: mod_base = OTHER; note = 2'-Omethylguanosine
  modified_base 25: mod_base = OTHER; note = 2'-Omethylcytosine
  modified_base 33: mod_base = OTHER; note = 2'-fluorouridine
  modified_base 35: mod_base = OTHER; note = Uridine phosphorothiorate
  modified_base 37: mod_base = OTHER; note = Guanosine phosphorothiorate
  modified_base 38: mod_base = OTHER; note = Adenosine phosphorothiorate
  modified_base 41: mod_base = OTHER; note = 2'-Omethylcytosine
  modified_base 42: mod_base = OTHER; note = 2'-Omethyluridine
  modified_base 43: mod_base = OTHER; note = 2'-Omethyluridine
  modified_base 44: mod_base = OTHER; note = 2'-Omethyladenosine
  modified_base 45: mod_base = OTHER; note = 2'-Omethylguanosine
  modified_base 46: mod_base = OTHER; note = 2'-fluoroguanosine
  modified_base 48: mod_base = OTHER; note = 2'-fluorocytosine
  modified_base 49: mod_base = OTHER; note = 2'-Omethylguanosine
  modified_base 50: mod_base = OTHER; note = 2'-Omethylcytosine
  modified_base 52: mod_base = OTHER; note = 2'-Omethylguanosine
  modified_base 54: mod_base = OTHER; note = 2'-Omethyluridine
  modified_base 55: mod_base = OTHER; note = Uridine phosphorothiorate
  modified_base 56: mod_base = OTHER; note = 2'-Omethylcytosine
  modified_base 57: mod_base = OTHER; note = 2'-fluoroguanosine
  modified_base 59: mod_base = OTHER; note = 2'-Omethyladenosine
  modified_base 61: mod_base = OTHER; note = 2'-Omethylcytosine
  modified_base 65: mod_base = OTHER; note = 2'-Omethylcytosine
  modified_base 73: mod_base = OTHER; note = 2'-Omethyladenosine

SEQ ID NO: 4954 - RNA, 75 nt, synthetic construct; identical to SEQ ID NO: 1045
  source 1..75: mol_type = other RNA
  modified_base 2: mod_base = OTHER; note = 2'-Omethylguanosine phosphorothiorate
  modified_base 3: mod_base = OTHER; note = 2'-Omethyluridine phosphorothiorate
  modified_base 4: mod_base = OTHER; note = 2'-Omethyluridine
  modified_base 17: mod_base = OTHER; note = 2'-Omethylguanosine phosphorothiorate
  modified_base 18: mod_base = OTHER; note = 2'-Omethylguanosine phosphorothiorate
  modified_base 19: mod_base = OTHER; note = 2'-Omethyluridine
  modified_base 25: mod_base = OTHER; note = Cytosine phosphorothiorate
  modified_base 30: mod_base = OTHER; note = 2'-Omethylguanosine
  modified_base 49: mod_base = OTHER; note = 2'-fluorocytosine
  modified_base 53: mod_base = OTHER; note = 2'-Omethyluridine phosphorothiorate
  modified_base 61: mod_base = OTHER; note = 2'-fluorouridine
  modified_base 63: mod_base = OTHER; note = 2'-Omethylguanosine phosphorothiorate
  modified_base 66: mod_base = OTHER; note = 2'-fluoroguanosine
  modified_base 72: mod_base = OTHER; note = 2'-Omethyluridine
  modified_base 74: mod_base = OTHER; note = 2'-Omethylcytosine phosphorothiorate

SEQ ID NO: 4955 - RNA, 85 nt, synthetic construct; identical to SEQ ID NO: 3310
  source 1..85: mol_type = other RNA
  modified_base 1: mod_base = OTHER; note = 2'-Omethylcytosine
  modified_base 11: mod_base = OTHER; note = Cytosine phosphorothiorate
  modified_base 28: mod_base = OTHER; note = 2'-fluoroguanosine
  modified_base 32: mod_base = OTHER; note = 2'-fluorouridine
  modified_base 42: mod_base = OTHER; note = Adenosine phosphorothiorate
  modified_base 54: mod_base = OTHER; note = 2'-Omethylcytosine
  modified_base 57: mod_base = OTHER; note = 2'-Omethylcytosine
  modified_base 59: mod_base = OTHER; note = 2'-Omethyluridine
  modified_base 83: mod_base = OTHER; note = Cytosine phosphorothiorate
  modified_base 84: mod_base = OTHER; note = 2'-Omethylcytosine
  modified_base 85: mod_base = OTHER; note = 2'-fluoroadenosine

SEQ ID NO: 4956 - RNA, 85 nt, synthetic construct; identical to SEQ ID NO: 3297
  source 1..85: mol_type = other RNA
  modified_base 1: mod_base = OTHER; note = 2'-Omethylguanosine
  modified_base 2: mod_base = OTHER; note = 2'-Omethylcytosine
  modified_base 3: mod_base = OTHER; note = 2'-Omethyluridine
  modified_base 4: mod_base = OTHER; note = 2'-Omethylguanosine
  modified_base 5: mod_base = OTHER; note = 2'-Omethyluridine
  modified_base 6: mod_base = OTHER; note = 2'-Omethylguanosine
  modified_base 14: mod_base = OTHER; note = 2'-Omethyladenosine
  modified_base 15: mod_base = OTHER; note = 2'-fluoroguanosine
  modified_base 16: mod_base = OTHER; note = 2'-Omethyluridine
  modified_base 17: mod_base = OTHER; note = 2'-Omethylguanosine
  modified_base 18: mod_base = OTHER; note = 2'-Omethylguanosine
  modified_base 20: mod_base = OTHER; note = 2'-Omethyluridine
  modified_base 25: mod_base = OTHER; note = 2'-Omethylcytosine
  modified_base 33: mod_base = OTHER; note = 2'-fluorouridine
  modified_base 35: mod_base = OTHER; note = Cytosine phosphorothiorate
  modified_base 37: mod_base = OTHER; note = Adenosine phosphorothiorate
  modified_base 38: mod_base = OTHER; note = Adenosine phosphorothiorate
  modified_base 41: mod_base = OTHER; note = 2'-Omethylcytosine
  modified_base 42: mod_base = OTHER; note = 2'-Omethyladenosine
  modified_base 43: mod_base = OTHER; note = 2'-Omethyladenosine
  modified_base 44: mod_base = OTHER; note = 2'-Omethyluridine
  modified_base 58: mod_base = OTHER; note = 2'-Omethylguanosine
  modified_base 59: mod_base = OTHER; note = 2'-Omethylcytosine
  modified_base 61: mod_base = OTHER; note = 2'-Omethylguanosine
  modified_base 63: mod_base = OTHER; note = 2'-Omethyluridine
  modified_base 64: mod_base = OTHER; note = Uridine phosphorothiorate
  modified_base 65: mod_base = OTHER; note = 2'-Omethylcytosine
  modified_base 66: mod_base = OTHER; note = 2'-fluoroguanosine
  modified_base 68: mod_base = OTHER; note = 2'-Omethyladenosine
  modified_base 70: mod_base = OTHER; note = 2'-Omethylcytosine
  modified_base 74: mod_base = OTHER; note = 2'-Omethylcytosine
  modified_base 82: mod_base = OTHER; note = 2'-Omethylguanosine

SEQ ID NO: 4957 - DNA, 73 bp, synthetic construct; identical to SEQ ID NO: 3380
  source 1..73: mol_type = other DNA
  modified_base 1: mod_base = OTHER; note = 2'-Omethylguanosine phosphorothiorate
  modified_base 2: mod_base = OTHER; note = 2'-Omethylguanosine
  modified_base 13: mod_base = OTHER; note = 2'-fluorocytosine
  modified_base 22: mod_base = OTHER; note = Guanosine phosphorothiorate
  modified_base 68: mod_base = OTHER; note = 2'-fluoroguanosine
  modified_base 72: mod_base = OTHER; note = 2'-Omethylcytosine phosphorothiorate
  misc_feature 1..22: note = RNA
  misc_feature 23: note = DNA
  misc_feature 24..73: note = RNA

SEQ ID NO: 4958 - RNA, 73 nt, synthetic construct; identical to SEQ ID NO: 935
  source 1..73: mol_type = other RNA
  modified_base 1: mod_base = OTHER; note = 2'-Omethylguanosine phosphorothiorate
  modified_base 2: mod_base = OTHER; note = 2'-Omethylguanosine
  modified_base 3: mod_base = OTHER; note = 2'-Omethylcytosine
  modified_base 4: mod_base = OTHER; note = 2'-Omethyluridine
  modified_base 5: mod_base = OTHER; note = 2'-Omethylcytosine
  modified_base 6: mod_base = OTHER; note = 2'-Omethylcytosine
  modified_base 43: mod_base = OTHER; note = 2'-Omethyladenosine
  modified_base 44: mod_base = OTHER; note = 2'-Omethyladenosine
  modified_base 45: mod_base = OTHER; note = 2'-Omethylguanosine
  modified_base 46: mod_base = OTHER; note = 2'-fluoroguanosine
  modified_base 48: mod_base = OTHER; note = 2'-fluorouridine
  modified_base 49: mod_base = OTHER; note = 2'-Omethylcytosine
  modified_base 50: mod_base = OTHER; note = 2'-Omethylcytosine
  modified_base 72: mod_base = OTHER; note = 2'-Omethylcytosine

SEQ ID NO: 4959 - RNA, 76 nt, synthetic construct; identical to SEQ ID NO: 625
  source 1..76: mol_type = other RNA
  modified_base 22: mod_base = OTHER; note = Guanosine phosphorothiorate
  modified_base 23: mod_base = OTHER; note = Cytosine phosphorothiorate
  modified_base 24: mod_base = OTHER; note = Guanosine phosphorothiorate
  modified_base 25: mod_base = OTHER; note = Cytosine phosphorothiorate

SEQ ID NO: 4960 - RNA, 86 nt, synthetic construct; identical to SEQ ID NO: 3290
  source 1..86: mol_type = other RNA
  modified_base 1: mod_base = OTHER; note = 2'-Omethyladenosine
  modified_base 14: mod_base = OTHER; note = 2'-Omethyladenosine
  modified_base 15: mod_base = OTHER; note = 2'-Omethylguanosine
  modified_base 16: mod_base = OTHER; note = 2'-Omethyluridine
  modified_base 17: mod_base = OTHER; note = 2'-Omethylguanosine
  modified_base 18: mod_base = OTHER; note = 2'-Omethylguanosine
  modified_base 19: mod_base = OTHER; note = Uridine phosphorothiorate
  modified_base 20: mod_base = OTHER; note = 2'-Omethyluridine
  modified_base 21: mod_base = OTHER; note = Adenosine phosphorothiorate
  modified_base 33: mod_base = OTHER; note = 2'-fluorouridine
  modified_base 34: mod_base = OTHER; note = 2'-Omethyluridine
  modified_base 35: mod_base = OTHER; note = Cytosine phosphorothiorate
  modified_base 37: mod_base = OTHER; note = Guanosine phosphorothiorate
  modified_base 38: mod_base = OTHER; note = Adenosine phosphorothiorate
  modified_base 41: mod_base = OTHER; note = 2'-Omethylcytosine
  modified_base 42: mod_base = OTHER; note = 2'-Omethyladenosine
  modified_base 43: mod_base = OTHER; note = 2'-Omethyladenosine
  modified_base 44: mod_base = OTHER; note = 2'-Omethyluridine
  modified_base 60: mod_base = OTHER; note = 2'-Omethyluridine
  modified_base 62: mod_base = OTHER; note = 2'-Omethylguanosine
  modified_base 83: mod_base = OTHER; note = 2'-Omethyladenosine

SEQ ID NO: 4961 - RNA, 76 nt, synthetic construct; identical to SEQ ID NO: 625
  source 1..76: mol_type = other RNA
  modified_base 1: mod_base = OTHER; note = 2'-Omethylguanosine phosphorothiorate
  modified_base 2: mod_base = OTHER; note = 2'-Omethylguanosine phosphorothiorate
  modified_base 3: mod_base = OTHER; note = 2'-O-(2-Methoxyethyl) 5-methylcytosine
  modified_base 74: mod_base = OTHER; note = Cytosine phosphorothiorate
  modified_base 75: mod_base = OTHER; note = 2'-Omethylcytosine phosphorothiorate
  modified_base 76: mod_base = OTHER; note = 2'-Omethyladenosine

SEQ ID NO: 4962 - DNA, 76 bp, synthetic construct; identical to SEQ ID NO: 1924
  source 1..76: mol_type = other DNA
  misc_feature 1..7: note = RNA
  misc_feature 8..65: note = DNA
  misc_feature 66..72: note = RNA
  misc_feature 73..76: note = DNA

SEQ ID NO: 4963 - RNA, 76 nt, synthetic construct; identical to SEQ ID NO: 625
  source 1..76: mol_type = other RNA
  modified_base 1: mod_base = OTHER; note = 2'-Omethylguanosine phosphorothiorate
  modified_base 2: mod_base = OTHER; note = 2'-Omethylguanosine
  modified_base 3: mod_base = OTHER; note = 2'-Omethylcytosine
  modified_base 4: mod_base = OTHER; note = 2'-Omethyluridine
  modified_base 5: mod_base = OTHER; note = 2'-Omethylcytosine
  modified_base 6: mod_base = OTHER; note = 2'-Omethylcytosine
  modified_base 10: mod_base = OTHER; note = 2'-Omethylguanosine
  modified_base 11: mod_base = OTHER; note = 2'-Omethylcytosine
  modified_base 12: mod_base = OTHER; note = 2'-Omethylguanosine
  modified_base 13: mod_base = OTHER; note = 2'-Omethylcytosine
  modified_base 14: mod_base = OTHER; note = 2'-Omethyladenosine
  modified_base 15: mod_base = OTHER; note = 2'-fluoroadenosine
  modified_base 16: mod_base = OTHER; note = 2'-Omethyluridine
  modified_base 17: mod_base = OTHER; note = 2'-Omethylguanosine
  modified_base 18: mod_base = OTHER; note = 2'-Omethylguanosine
  modified_base 19: mod_base = OTHER; note = 2'-fluoroadenosine
  modified_base 20: mod_base = OTHER; note = 2'-Omethyluridine
  modified_base 54: mod_base = OTHER; note = 2'-Omethyluridine
  modified_base 56: mod_base = OTHER; note = 2'-Omethylcytosine
  modified_base 57: mod_base = OTHER; note = 2'-fluoroguanosine
  modified_base 59: mod_base = OTHER; note = 2'-Omethylguanosine
  modified_base 61: mod_base = OTHER; note = 2'-Omethylcytosine
  modified_base 62: mod_base = OTHER; note = 2'-Omethylcytosine
  modified_base 63: mod_base = OTHER; note = 2'-Omethylcytosine
  modified_base 64: mod_base = OTHER; note = 2'-Omethylguanosine
  modified_base 65: mod_base = OTHER; note = 2'-Omethylguanosine
  modified_base 66: mod_base = OTHER; note = 2'-Omethylcytosine
  modified_base 67: mod_base = OTHER; note = 2'-Omethylguanosine
  modified_base 68: mod_base = OTHER; note = 2'-Omethylguanosine
  modified_base 69: mod_base = OTHER; note = 2'-Omethyladenosine
  modified_base 73: mod_base = OTHER; note = 2'-Omethylguanosine

SEQ ID NO: 4964 - RNA, 75 nt, synthetic construct; identical to SEQ ID NO: 1045
  source 1..75: mol_type = other RNA
  modified_base 1: mod_base = OTHER; note = 2'-Omethylguanosine
  modified_base 2: mod_base = OTHER; note = 2'-Omethylguanosine
  modified_base 3: mod_base = OTHER; note = 2'-Omethyluridine
  modified_base 4: mod_base = OTHER; note = 2'-Omethyluridine
  modified_base 5: mod_base = OTHER; note = 2'-Omethylcytosine
  modified_base 6: mod_base = OTHER; note = 2'-Omethylcytosine
  modified_base 14: mod_base = OTHER; note = 2'-Omethyladenosine
  modified_base 15: mod_base = OTHER; note = 2'-fluoroadenosine
  modified_base 16: mod_base = OTHER; note = 2'-Omethyluridine
  modified_base 17: mod_base = OTHER; note = 2'-Omethylguanosine
  modified_base 18: mod_base = OTHER; note = 2'-Omethylguanosine
  modified_base 19: mod_base = OTHER; note = 2'-fluorouridine
  modified_base 20: mod_base = OTHER; note = 2'-Omethyladenosine
  modified_base 22: mod_base = OTHER; note = 2'-Omethylguanosine
  modified_base 23: mod_base = OTHER; note = 2'-Omethylcytosine
  modified_base 24: mod_base = OTHER; note = 2'-Omethyladenosine
  modified_base 25: mod_base = OTHER; note = 2'-Omethylcytosine
  modified_base 72: mod_base = OTHER; note = 2'-Omethyluridine

SEQ ID NO: 4965 - RNA, 75 nt, synthetic construct; identical to SEQ ID NO: 3299
  source 1..75: mol_type = other RNA
  modified_base 1: mod_base = OTHER; note = 2'-fluorocytosine
  modified_base 2: mod_base = OTHER; note = 2'-fluorocytosine phosphorothiorate
  modified_base 3: mod_base = OTHER; note = 2'-Omethyluridine
  modified_base 11: mod_base = OTHER; note = 2'-Omethyluridine phosphorothiorate
  modified_base 15: mod_base = OTHER; note = 2'-fluorouridine
  modified_base 18: mod_base = OTHER; note = 2'-fluoroguanosine
  modified_base 19: mod_base = OTHER; note = 2'-Omethyluridine phosphorothiorate
  modified_base 20: mod_base = OTHER; note = Adenosine phosphorothiorate
  modified_base 25: mod_base = OTHER; note = 2'-Omethyladenosine phosphorothiorate
  modified_base 27: mod_base = OTHER; note = 2'-fluorocytosine
  modified_base 29: mod_base = OTHER; note = Guanosine phosphorothiorate
  modified_base 37: mod_base = OTHER; note = 2'-fluoroadenosine
  modified_base 38: mod_base = OTHER; note = Uridine phosphorothiorate
  modified_base 39: mod_base = OTHER; note = 2'-Omethylcytosine phosphorothiorate
  modified_base 46: mod_base = OTHER; note = 2'-fluorouridine
  modified_base 47: mod_base = OTHER; note = 2'-fluorocytosine
  modified_base 49: mod_base = OTHER; note = Adenosine phosphorothiorate
  modified_base 50: mod_base = OTHER; note = 2'-fluoroguanosine
  modified_base 69: mod_base = OTHER; note = Guanosine phosphorothiorate
  modified_base 72: mod_base = OTHER; note = 2'-fluoroguanosine
  modified_base 73: mod_base = OTHER; note = Cytosine phosphorothiorate
  modified_base 74: mod_base = OTHER; note = Cytosine phosphorothiorate

SEQ ID NO: 4966 - RNA, 76 nt, synthetic construct; identical to SEQ ID NO: 625
  source 1..76: mol_type = other RNA
  modified_base 1: mod_base = OTHER; note = 2'-Omethylguanosine phosphorothiorate
  modified_base 2: mod_base = OTHER; note = 2'-Omethylguanosine
  modified_base 37: mod_base = OTHER; note = Adenosine phosphorothiorate
  modified_base 38: mod_base = OTHER; note = 2'-fluoroadenosine
  modified_base 41: mod_base = OTHER; note = 2'-O-(2-Methoxyethyl) 5-methylcytosine
  modified_base 66: mod_base = OTHER; note = Cytosine phosphorothiorate
  modified_base 73: mod_base = OTHER; note = Guanosine phosphorothiorate
  modified_base 74: mod_base = OTHER; note = 2'-fluorocytosine phosphorothiorate
  modified_base 75: mod_base = OTHER; note = 2'-Omethylcytosine
  modified_base 76: mod_base = OTHER; note = 2'-O-(2-Methoxyethyl) adenosine

SEQ ID NO: 4967 - RNA, 85 nt, synthetic construct; identical to SEQ ID NO: 3317
  source 1..85: mol_type = other RNA
  modified_base 1: mod_base = OTHER; note = 2'-Omethylguanosine phosphorothiorate
  modified_base 4: mod_base = OTHER; note = 2'-fluoroguanosine
  modified_base 14: mod_base = OTHER; note = 2'-fluoroadenosine
  modified_base 26: mod_base = OTHER; note = 2'-fluoroguanosine
  modified_base 27: mod_base = OTHER; note = 2'-fluorouridine
  modified_base 47: mod_base = OTHER; note = 2'-Omethylguanosine
  modified_base 50: mod_base = OTHER; note = 2'-fluorocytosine
  modified_base 61: mod_base = OTHER; note = 2'-Omethylguanosine
  modified_base 82: mod_base = OTHER; note = 2'-Omethylguanosine

SEQ ID NO: 4968 - RNA, 74 nt, synthetic construct; identical to SEQ ID NO: 766
  source 1..74: mol_type = other RNA
  modified_base 1: mod_base = OTHER; note = 2'-Omethylguanosine phosphorothiorate
  modified_base 2: mod_base = OTHER; note = 2'-Omethylguanosine
  modified_base 72: mod_base = OTHER; note = 2'-Omethylcytosine
  modified_base 73: mod_base = OTHER; note = 2'-Omethylguanosine

SEQ ID NO: 4969 - RNA, 76 nt, synthetic construct; identical to SEQ ID NO: 625
  source 1..76: mol_type = other RNA
  modified_base 1: mod_base = OTHER; note = 2'-fluoroguanosine
  modified_base 2: mod_base = OTHER; note = 2'-fluoroguanosine
  modified_base 3: mod_base = OTHER; note = 2'-fluorocytosine
  modified_base 10: mod_base = OTHER; note = 2'-fluoroguanosine
  modified_base 12: mod_base = OTHER; note = 2'-fluoroguanosine phosphorothiorate
  modified_base 14: mod_base = OTHER; note = 2'-Omethyladenosine phosphorothiorate
  modified_base 15: mod_base = OTHER; note = Adenosine phosphorothiorate
  modified_base 21: mod_base = OTHER; note = Adenosine phosphorothiorate
  modified_base 22: mod_base = OTHER; note = 2'-Omethylguanosine
  modified_base 23: mod_base = OTHER; note = Cytosine phosphorothiorate
  modified_base 25: mod_base = OTHER; note = 2'-fluorocytosine
  modified_base 27: mod_base = OTHER; note = 2'-Omethyluridine
  modified_base 30: mod_base = OTHER; note = 2'-fluoroguanosine
  modified_base 33: mod_base = OTHER; note = Uridine phosphorothiorate
  modified_base 39: mod_base = OTHER; note = 2'-Omethyluridine phosphorothiorate
  modified_base 40: mod_base = OTHER; note = 2'-Omethyluridine
  modified_base 42: mod_base = OTHER; note = 2'-Omethyladenosine
  modified_base 46: mod_base = OTHER; note = 2'-fluoroguanosine
  modified_base 48: mod_base = OTHER; note = 2'-Omethyluridine
  modified_base 51: mod_base = OTHER; note = Guanosine phosphorothiorate
  modified_base 54: mod_base = OTHER; note = 2'-Omethyluridine
  modified_base 57: mod_base = OTHER; note = 2'-fluoroguanosine phosphorothiorate
  modified_base 61: mod_base = OTHER; note = 2'-Omethylcytosine
  modified_base 62: mod_base = OTHER; note = 2'-Omethylcytosine
  modified_base 63: mod_base = OTHER; note = 2'-fluorocytosine
  modified_base 64: mod_base = OTHER; note = 2'-Omethylguanosine
  modified_base 66: mod_base = OTHER; note = 2'-Omethylcytosine
  modified_base 67: mod_base = OTHER; note = 2'-Omethylguanosine
  modified_base 68: mod_base = OTHER; note = 2'-fluoroguanosine
  modified_base 70: mod_base = OTHER; note = Guanosine phosphorothiorate
  modified_base 71: mod_base = OTHER; note = 2'-Omethyluridine
  modified_base 72: mod_base = OTHER; note = 2'-Omethylcytosine
  modified_base 74: mod_base = OTHER; note = 2'-Omethylcytosine

SEQ ID NO: 4970 - RNA, 76 nt, synthetic construct; identical to SEQ ID NO: 625
  source 1..76: mol_type = other RNA
  modified_base 1: mod_base = OTHER; note = 2'-fluoroguanosine
  modified_base 2: mod_base = OTHER; note = 2'-fluoroguanosine
  modified_base 4: mod_base = OTHER; note = 2'-fluorouridine
  modified_base 5: mod_base = OTHER; note = Cytosine phosphorothiorate
  modified_base 6: mod_base = OTHER; note = 2'-Omethylcytosine
  modified_base 8: mod_base = OTHER; note = Uridine phosphorothiorate
  modified_base 10: mod_base = OTHER; note = 2'-Omethylguanosine phosphorothiorate
  modified_base 17: mod_base = OTHER; note = Guanosine phosphorothiorate
  modified_base 18: mod_base = OTHER; note = 2'-Omethylguanosine phosphorothiorate
  modified_base 22: mod_base = OTHER; note = 2'-fluoroguanosine
  modified_base 24: mod_base = OTHER; note = 2'-fluoroguanosine
  modified_base 28: mod_base = OTHER; note = Uridine phosphorothiorate
  modified_base 29: mod_base = OTHER; note = 2'-fluoroguanosine
  modified_base 30: mod_base = OTHER; note = Guanosine phosphorothiorate
  modified_base 31: mod_base = OTHER; note = 2'-fluoroadenosine
  modified_base 32: mod_base = OTHER; note = 2'-fluorocytosine
  modified_base 33: mod_base = OTHER; note = Uridine phosphorothiorate
  modified_base 44: mod_base = OTHER; note = 2'-Omethyladenosine
  modified_base 45: mod_base = OTHER; note = 2'-fluoroguanosine
  modified_base 46: mod_base = OTHER; note = 2'-fluoroguanosine
  modified_base 49: mod_base = OTHER; note = 2'-Omethylcytosine
  modified_base 50: mod_base = OTHER; note = 2'-Omethylcytosine
  modified_base 51: mod_base = OTHER; note = 2'-Omethylguanosine
  modified_base 52: mod_base = OTHER; note = 2'-Omethylguanosine phosphorothiorate
  modified_base 54: mod_base = OTHER; note = 2'-Omethyluridine phosphorothiorate
  modified_base 57: mod_base = OTHER; note = 2'-Omethylguanosine
  modified_base 58: mod_base = OTHER; note = Adenosine phosphorothiorate
  modified_base 59: mod_base = OTHER; note = 2'-Omethylguanosine
  modified_base 61: mod_base = OTHER; note = 2'-Omethylcytosine
  modified_base 62: mod_base = OTHER; note = 2'-Omethylcytosine
  modified_base 63: mod_base = OTHER; note = 2'-Omethylcytosine
  modified_base 64: mod_base = OTHER; note = 2'-Omethylguanosine
  modified_base 66: mod_base = OTHER; note = 2'-fluorocytosine
  modified_base 67: mod_base = OTHER; note = 2'-Omethylguanosine
  modified_base 68: mod_base = OTHER; note = 2'-Omethylguanosine
  modified_base 70: mod_base = OTHER; note = 2'-fluoroguanosine
  modified_base 75: mod_base = OTHER; note = Cytosine phosphorothiorate
  modified_base 76: mod_base = OTHER; note = 2'-fluoroadenosine

SEQ ID NO: 4971 - RNA, 85 nt, synthetic construct; identical to SEQ ID NO: 3317
  source 1..85: mol_type = other RNA
  modified_base 1: mod_base = OTHER; note = 2'-Omethylguanosine phosphorothiorate
  modified_base 2: mod_base = OTHER; note = 2'-Omethylcytosine
  modified_base 3: mod_base = OTHER; note = 2'-Omethyluridine phosphorothiorate
  modified_base 5: mod_base = OTHER; note = 2'-Omethyluridine phosphorothiorate
  modified_base 13: mod_base = OTHER; note = 2'-fluoroguanosine
  modified_base 14: mod_base = OTHER; note = 2'-fluoroadenosine
  modified_base 23: mod_base = OTHER; note = 2'-fluoroguanosine
  modified_base 29: mod_base = OTHER; note = 2'-fluoroguanosine
  modified_base 34: mod_base = OTHER; note = 2'-fluorocytosine
  modified_base 44: mod_base = OTHER; note = 2'-Omethyluridine
  modified_base 46: mod_base = OTHER; note = 2'-Omethylguanosine
  modified_base 52: mod_base = OTHER; note = 2'-fluorocytosine
  modified_base 55: mod_base = OTHER; note = 2'-Omethylcytosine
  modified_base 56: mod_base = OTHER; note = 2'-Omethylguanosine
  modified_base 66: mod_base = OTHER; note = Guanosine phosphorothiorate
  modified_base 71: mod_base = OTHER; note = Cytosine phosphorothiorate
  modified_base 72: mod_base = OTHER; note = 2'-fluorouridine
  modified_base 73: mod_base = OTHER; note = 2'-fluoroguanosine phosphorothiorate
  modified_base 80: mod_base = OTHER; note = 2'-fluoroguanosine phosphorothiorate
  modified_base 81: mod_base = OTHER; note = 2'-fluorocytosine
  modified_base 84: mod_base = OTHER; note = Cytosine phosphorothiorate

SEQ ID NO: 4972 - RNA, 76 nt, synthetic construct; identical to SEQ ID NO: 625
  source 1..76: mol_type = other RNA
  modified_base 1: mod_base = OTHER; note = 2'-Omethylguanosine phosphorothiorate
  modified_base 2: mod_base = OTHER; note = 2'-Omethylguanosine phosphorothiorate
  modified_base 3: mod_base = OTHER; note = 2'-Omethylcytosine phosphorothiorate
  modified_base 4: mod_base = OTHER; note = 2'-Omethyluridine phosphorothiorate
  modified_base 5: mod_base = OTHER; note = 2'-Omethylcytosine phosphorothiorate
  modified_base 6: mod_base = OTHER; note = 2'-Omethylcytosine phosphorothiorate
  modified_base 10: mod_base = OTHER; note = 2'-Omethylguanosine
  modified_base 11: mod_base = OTHER; note = 2'-Omethylcytosine
  modified_base 12: mod_base = OTHER; note = 2'-Omethylguanosine
  modified_base 13: mod_base = OTHER; note = 2'-Omethylcytosine
  modified_base 14: mod_base = OTHER; note = 2'-Omethyladenosine
  modified_base 15: mod_base = OTHER; note = 2'-Omethyladenosine
  modified_base 16: mod_base = OTHER; note = 2'-Omethyluridine
  modified_base 17: mod_base = OTHER; note = 2'-Omethylguanosine
  modified_base 18: mod_base = OTHER; note = 2'-Omethylguanosine
  modified_base 19: mod_base = OTHER; note = 2'-Omethyladenosine
  modified_base 20: mod_base = OTHER; note = 2'-Omethyluridine
  modified_base 22: mod_base = OTHER; note = 2'-Omethylguanosine
  modified_base 23: mod_base = OTHER; note = 2'-Omethylcytosine
  modified_base 24: mod_base = OTHER; note = 2'-Omethylguanosine
  modified_base 25: mod_base = OTHER; note = 2'-Omethylcytosine
  modified_base 40: mod_base = OTHER; note = 2'-fluorouridine
  modified_base 41: mod_base = OTHER; note = 2'-fluorocytosine
  modified_base 42: mod_base = OTHER; note = 2'-fluoroadenosine
  modified_base 43: mod_base = OTHER; note = 2'-fluoroadenosine
  modified_base 44: mod_base = OTHER; note = 2'-Omethyladenosine
  modified_base 45: mod_base = OTHER; note = 2'-Omethylguanosine
  modified_base 46: mod_base = OTHER; note = 2'-Omethylguanosine
  modified_base 49: mod_base = OTHER; note = 2'-Omethylcytosine
  modified_base 50: mod_base = OTHER; note = 2'-Omethylcytosine
  modified_base 51: mod_base = OTHER; note = 2'-Omethylguanosine
  modified_base 52: mod_base = OTHER; note = 2'-Omethylguanosine
  modified_base 53: mod_base = OTHER; note = 2'-Omethylguanosine

SEQ ID NO: 4973 - RNA, 76 nt, synthetic construct; identical to SEQ ID NO: 3316
  source 1..76: mol_type = other RNA
  modified_base 1: mod_base = OTHER; note = 2'-Omethyladenosine
  modified_base 2: mod_base = OTHER; note = 2'-Omethylcytosine
  modified_base 3: mod_base = OTHER; note = 2'-Omethylcytosine
  modified_base 4: mod_base = OTHER; note = 2'-Omethyladenosine
  modified_base 5: mod_base = OTHER; note = 2'-Omethyladenosine
  modified_base 6: mod_base = OTHER; note = 2'-Omethylcytosine
  modified_base 14: mod_base = OTHER; note = 2'-Omethyladenosine
  modified_base 15: mod_base = OTHER; note = 2'-Omethyladenosine
  modified_base 16: mod_base = OTHER; note = 2'-Omethyluridine
  modified_base 17: mod_base = OTHER; note = 2'-Omethylguanosine
  modified_base 18: mod_base = OTHER; note = 2'-Omethylguanosine
  modified_base 20: mod_base = OTHER; note = 2'-Omethyluridine
  modified_base 25: mod_base = OTHER; note = 2'-Omethylcytosine
  modified_base 33: mod_base = OTHER; note = 2'-fluorouridine
  modified_base 35: mod_base = OTHER; note = Cytosine phosphorothiorate
  modified_base 37: mod_base = OTHER; note = Adenosine phosphorothiorate
  modified_base 38: mod_base = OTHER; note = Adenosine phosphorothiorate
  modified_base 41: mod_base = OTHER; note = 2'-Omethylcytosine
  modified_base 42: mod_base = OTHER; note = 2'-Omethyladenosine
  modified_base 43: mod_base = OTHER; note = 2'-Omethyladenosine
  modified_base 44: mod_base = OTHER; note = 2'-fluoroadenosine
  modified_base 49: mod_base = OTHER; note = 2'-Omethylcytosine
  modified_base 50: mod_base = OTHER; note = 2'-Omethylcytosine
  modified_base 52: mod_base = OTHER; note = 2'-Omethylguanosine
  modified_base 54: mod_base = OTHER; note = 2'-Omethyluridine
  modified_base 55: mod_base = OTHER; note = Uridine phosphorothiorate
  modified_base 56: mod_base = OTHER; note = 2'-Omethylcytosine
  modified_base 57: mod_base = OTHER; note = 2'-fluoroguanosine
  modified_base 59: mod_base = OTHER; note = 2'-Omethylguanosine
  modified_base 61: mod_base = OTHER; note = 2'-Omethylcytosine
  modified_base 65: mod_base = OTHER; note = 2'-Omethylguanosine
  modified_base 73: mod_base = OTHER; note = 2'-Omethylguanosine

SEQ ID NO: 4974 - RNA, 76 nt, synthetic construct; identical to SEQ ID NO: 3447
  source 1..76: mol_type = other RNA
  modified_base 1: mod_base = OTHER; note = 2'-Omethylguanosine
  modified_base 2: mod_base = OTHER; note = 2'-Omethylcytosine
  modified_base 3: mod_base = OTHER; note = 2'-Omethylcytosine
  modified_base 4: mod_base = OTHER; note = 2'-Omethylcytosine
  modified_base 5: mod_base = OTHER; note = 2'-Omethylguanosine
  modified_base 6: mod_base = OTHER; note = 2'-Omethyladenosine
  modified_base 14: mod_base = OTHER; note = 2'-Omethyladenosine
  modified_base 17: mod_base = OTHER; note = 2'-Omethylguanosine
  modified_base 18: mod_base = OTHER; note = 2'-Omethylguanosine
  modified_base 20: mod_base = OTHER; note = 2'-Omethyluridine
  modified_base 22: mod_base = OTHER; note = 2'-Omethylguanosine
  modified_base 25: mod_base = OTHER; note = 2'-Omethylcytosine
  modified_base 27: mod_base = OTHER; note = 2'-Omethyluridine
  modified_base 33: mod_base = OTHER; note = 2'-fluorouridine
  modified_base 71: mod_base = OTHER; note = 2'-Omethylguanosine
  modified_base 73: mod_base = OTHER; note = 2'-Omethylguanosine

SEQ ID NO: 4975 - RNA, 75 nt, synthetic construct; identical to SEQ ID NO: 3299
  source 1..75: mol_type = other RNA
  modified_base 11: mod_base = OTHER; note = Uridine phosphorothiorate
  modified_base 16: mod_base = OTHER; note = 2'-fluorocytosine
  modified_base 23: mod_base = OTHER; note = 2'-fluoroguanosine
  modified_base 26: mod_base = OTHER; note = 2'-fluorouridine
  modified_base 34: mod_base = OTHER; note = 2'-fluorouridine
  modified_base 46: mod_base = OTHER; note = 2'-fluorouridine
  modified_base 47: mod_base = OTHER; note = 2'-fluorocytosine
  modified_base 53: mod_base = OTHER; note = 2'-fluorouridine
  modified_base 63: mod_base = OTHER; note = 2'-fluorouridine
  modified_base 73: mod_base = OTHER; note = Cytosine phosphorothiorate
  modified_base 74: mod_base = OTHER; note = 2'-Omethylcytosine

SEQ ID NO: 4976 - RNA, 76 nt, synthetic construct
  source 1..76: mol_type = other RNA
ggcccgatggcgcaatggatagcgcattggacttcaaattcaaaggttgcgggttcgagtcccgctcgggtcgcca

SEQ ID NO: 4977 - RNA, 76 nt, synthetic construct; identical to SEQ ID NO: 625
  source 1..76: mol_type = other RNA
  modified_base 3: mod_base = OTHER; note = Cytosine phosphorothiorate
  modified_base 4: mod_base = OTHER; note = 2'-Omethyluridine
  modified_base 5: mod_base = OTHER; note = 2'-Omethylcytosine
  modified_base 8: mod_base = OTHER; note = Uridine phosphorothiorate
  modified_base 10: mod_base = OTHER; note = Guanosine phosphorothiorate
  modified_base 13: mod_base = OTHER; note = 2'-Omethylcytosine
  modified_base 14: mod_base = OTHER; note = Adenosine phosphorothiorate
  modified_base 15: mod_base = OTHER; note = 2'-fluoroadenosine
  modified_base 17: mod_base = OTHER; note = Guanosine phosphorothiorate
  modified_base 18: mod_base = OTHER; note = 2'-Omethylguanosine
  modified_base 20: mod_base = OTHER; note = Uridine phosphorothiorate
  modified_base 22: mod_base = OTHER; note = 2'-Omethylguanosine phosphorothiorate
  modified_base 23: mod_base = OTHER; note = 2'-Omethylcytosine
  modified_base 25: mod_base = OTHER; note = 2'-fluorocytosine
  modified_base 26: mod_base = OTHER; note = 2'-fluoroadenosine
  modified_base 27: mod_base = OTHER; note = 2'-fluorouridine phosphorothiorate
  modified_base 28: mod_base = OTHER; note = 2'-fluorouridine
  modified_base 34: mod_base = OTHER; note = Uridine phosphorothiorate
  modified_base 38: mod_base = OTHER; note = 2'-fluoroadenosine
  modified_base 41: mod_base = OTHER; note = 2'-Omethylcytosine
  modified_base 47: mod_base = OTHER; note = 2'-Omethyluridine
  modified_base 51: mod_base = OTHER; note = 2'-Omethylguanosine
  modified_base 52: mod_base = OTHER; note = 2'-fluoroguanosine phosphorothiorate
  modified_base 53: mod_base = OTHER; note = 2'-Omethylguanosine
  modified_base 54: mod_base = OTHER; note = Uridine phosphorothiorate
  modified_base 56: mod_base = OTHER; note = 2'-Omethylcytosine
  modified_base 58: mod_base = OTHER; note = Adenosine phosphorothiorate
  modified_base 59: mod_base = OTHER; note = 2'-Omethylguanosine
  modified_base 62: mod_base = OTHER; note = 2'-fluorocytosine phosphorothiorate
  modified_base 63: mod_base = OTHER; note = 2'-fluorocytosine
  modified_base 64: mod_base = OTHER; note = Guanosine phosphorothiorate
  modified_base 65: mod_base = OTHER; note = 2'-fluoroguanosine
  modified_base 66: mod_base = OTHER; note = 2'-Omethylcytosine
  modified_base 68: mod_base = OTHER; note = Guanosine phosphorothiorate
  modified_base 69: mod_base = OTHER; note = 2'-Omethyladenosine
  modified_base 70: mod_base = OTHER; note = Guanosine phosphorothiorate
  modified_base 71: mod_base = OTHER; note = 2'-fluorouridine phosphorothiorate
  modified_base 72: mod_base = OTHER; note = 2'-Omethylcytosine

SEQ ID NO: 4978 - RNA, 75 nt, synthetic construct; identical to SEQ ID NO: 3299
  source 1..75: mol_type = other RNA
  modified_base 13: mod_base = OTHER; note = 2'-fluoroadenosine
  modified_base 14: mod_base = OTHER; note = 2'-fluoroguanosine
  modified_base 19: mod_base = OTHER; note = Uridine phosphorothiorate
  modified_base 21: mod_base = OTHER; note = 2'-fluoroguanosine
  modified_base 26: mod_base = OTHER; note = Uridine phosphorothiorate
  modified_base 27: mod_base = OTHER; note = Cytosine phosphorothiorate
  modified_base 47: mod_base = OTHER; note = 2'-fluorocytosine
  modified_base 49: mod_base = OTHER; note = 2'-fluoroadenosine
  modified_base 73: mod_base = OTHER; note = Cytosine phosphorothiorate
  modified_base 74: mod_base = OTHER; note = 2'-Omethylcytosine

SEQ ID NO: 4979 - RNA, 76 nt, synthetic construct; identical to SEQ ID NO: 625
  source 1..76: mol_type = other RNA
  modified_base 4: mod_base = OTHER; note = 2'-fluorouridine
  modified_base 9: mod_base = OTHER; note = Guanosine phosphorothiorate
  modified_base 10: mod_base = OTHER; note = 2'-Omethylguanosine
  modified_base 11: mod_base = OTHER; note = 2'-Omethylcytosine
  modified_base 13: mod_base = OTHER; note = Cytosine phosphorothiorate
  modified_base 16: mod_base = OTHER; note = 2'-Omethyluridine
  modified_base 18: mod_base = OTHER; note = Guanosine phosphorothiorate
  modified_base 20: mod_base = OTHER; note = 2'-Omethyluridine
  modified_base 23: mod_base = OTHER; note = 2'-fluorocytosine
  modified_base 26: mod_base = OTHER; note = 2'-fluoroadenosine
  modified_base 27: mod_base = OTHER; note = 2'-fluorouridine
  modified_base 28: mod_base = OTHER; note = 2'-fluorouridine phosphorothiorate
  modified_base 29: mod_base = OTHER; note = 2'-fluoroguanosine
  modified_base 30: mod_base = OTHER; note = 2'-fluoroguanosine
  modified_base 32: mod_base = OTHER; note = 2'-fluorocytosine
  modified_base 36: mod_base = OTHER; note = Adenosine phosphorothiorate
  modified_base 38: mod_base = OTHER; note = 2'-Omethyladenosine
  modified_base 41: mod_base = OTHER; note = 2'-fluorocytosine
  modified_base 43: mod_base = OTHER; note = 2'-fluoroadenosine
  modified_base 45: mod_base = OTHER; note = 2'-Omethylguanosine
  modified_base 49: mod_base = OTHER; note = 2'-Omethylcytosine phosphorothiorate
  modified_base 52: mod_base = OTHER; note = 2'-Omethylguanosine phosphorothiorate
  modified_base 53: mod_base = OTHER; note = 2'-fluoroguanosine
  modified_base 54: mod_base = OTHER; note = 2'-fluorouridine
  modified_base 57: mod_base = OTHER; note = Guanosine phosphorothiorate
  modified_base 58: mod_base = OTHER; note = 2'-fluoroadenosine
  modified_base 59: mod_base = OTHER; note = 2'-Omethylguanosine
  modified_base 60: mod_base = OTHER; note = 2'-Omethyluridine
  modified_base 62: mod_base = OTHER; note = 2'-fluorocytosine
  modified_base 63: mod_base = OTHER; note = 2'-fluorocytosine
  modified_base 67: mod_base = OTHER; note = 2'-fluoroguanosine
  modified_base 68: mod_base = OTHER; note = 2'-fluoroguanosine
  modified_base 71: mod_base = OTHER; note = 2'-fluorouridine
  modified_base 72: mod_base = OTHER; note = 2'-fluorocytosine phosphorothiorate
  modified_base 73: mod_base = OTHER; note = 2'-fluoroguanosine
  modified_base 74: mod_base = OTHER; note = 2'-fluorocytosine phosphorothiorate
  modified_base 75: mod_base = OTHER; note = 2'-Omethylcytosine

SEQ ID NO: 4980 - RNA, 76 nt, synthetic construct; identical to SEQ ID NO: 625
  source 1..76: mol_type = other RNA
  modified_base 2: mod_base = OTHER; note = Guanosine phosphorothiorate
  modified_base 4: mod_base = OTHER; note = Uridine phosphorothiorate
  modified_base 6: mod_base = OTHER; note = 2'-fluorocytosine
  modified_base 8: mod_base = OTHER; note = Uridine phosphorothiorate
  modified_base 12: mod_base = OTHER; note = 2'-fluoroguanosine
  modified_base 13: mod_base = OTHER; note = 2'-fluorocytosine
  modified_base 15: mod_base = OTHER; note = 2'-fluoroadenosine
  modified_base 17: mod_base = OTHER; note = Guanosine phosphorothiorate
  modified_base 20: mod_base = OTHER; note = 2'-Omethyluridine
  modified_base 23: mod_base = OTHER; note = 2'-fluorocytosine
  modified_base 26: mod_base = OTHER; note = 2'-fluoroadenosine
  modified_base 29: mod_base = OTHER; note = 2'-fluoroguanosine phosphorothiorate
  modified_base 31: mod_base = OTHER; note = 2'-fluoroadenosine
  modified_base 32: mod_base = OTHER; note = 2'-fluorocytosine
  modified_base 34: mod_base = OTHER; note = Uridine phosphorothiorate
  modified_base 41: mod_base = OTHER; note = 2'-Omethylcytosine phosphorothiorate
  modified_base 43: mod_base = OTHER; note = Adenosine phosphorothiorate
  modified_base 44: mod_base = OTHER; note = 2'-Omethyladenosine
  modified_base 45: mod_base = OTHER; note = 2'-Omethylguanosine
  modified_base 47: mod_base = OTHER; note = 2'-Omethyluridine
  modified_base 51: mod_base = OTHER; note = 2'-Omethylguanosine
  modified_base 52: mod_base = OTHER; note = 2'-Omethylguanosine
  modified_base 57: mod_base = OTHER; note = Guanosine phosphorothiorate
  modified_base 58: mod_base = OTHER; note = 2'-fluoroadenosine phosphorothiorate
  modified_base 59: mod_base = OTHER; note = 2'-fluoroguanosine
  modified_base 60: mod_base = OTHER; note = 2'-Omethyluridine
  modified_base 63: mod_base = OTHER; note = 2'-fluorocytosine
  modified_base 68: mod_base = OTHER; note = 2'-fluoroguanosine phosphorothiorate
  modified_base 69: mod_base = OTHER; note = 2'-Omethyladenosine
  modified_base 70: mod_base = OTHER; note = Guanosine phosphorothiorate
  modified_base 71: mod_base = OTHER; note = 2'-Omethyluridine
  modified_base 72: mod_base = OTHER; note = Cytosine phosphorothiorate
  modified_base 73: mod_base = OTHER; note = 2'-Omethylguanosine
  modified_base 74: mod_base = OTHER; note = Cytosine phosphorothiorate
  modified_base 76: mod_base = OTHER; note = 2'-Omethyladenosine

SEQ ID NO: 4981 - RNA, 76 nt, synthetic construct; identical to SEQ ID NO: 625
  source 1..76: mol_type = other RNA
  modified_base 1: mod_base = OTHER; note = 2'-fluoroguanosine
  modified_base 2: mod_base = OTHER; note = 2'-fluoroguanosine
  modified_base 3: mod_base = OTHER; note = Cytosine phosphorothiorate
  modified_base 4: mod_base = OTHER; note = 2'-fluorouridine
  modified_base 7: mod_base = OTHER; note = Guanosine phosphorothiorate
  modified_base 15: mod_base = OTHER; note = 2'-Omethyladenosine
  modified_base 17: mod_base = OTHER; note = Guanosine phosphorothiorate
  modified_base 18: mod_base = OTHER; note = 2'-fluoroguanosine
  modified_base 20: mod_base = OTHER; note = Uridine phosphorothiorate
  modified_base 22: mod_base = OTHER; note = 2'-Omethylguanosine
  modified_base 24: mod_base = OTHER; note = 2'-Omethylguanosine phosphorothiorate
  modified_base 25: mod_base = OTHER; note = 2'-Omethylcytosine
  modified_base 26: mod_base = OTHER; note = 2'-fluoroadenosine
  modified_base 27: mod_base = OTHER; note = 2'-Omethyluridine phosphorothiorate
  modified_base 28: mod_base = OTHER; note = 2'-fluorouridine phosphorothiorate
  modified_base 29: mod_base = OTHER; note = 2'-Omethylguanosine phosphorothiorate
  modified_base 34: mod_base = OTHER; note = 2'-fluorouridine phosphorothiorate
  modified_base 39: mod_base = OTHER; note = 2'-Omethyluridine
  modified_base 40: mod_base = OTHER; note = 2'-Omethyluridine
  modified_base 42: mod_base = OTHER; note = 2'-fluoroadenosine
  modified_base 44: mod_base = OTHER; note = 2'-fluoroadenosine phosphorothiorate
  modified_base 45: mod_base = OTHER; note = Guanosine phosphorothiorate
  modified_base 46: mod_base = OTHER; note = 2'-Omethylguanosine phosphorothiorate
  modified_base 47: mod_base = OTHER; note = 2'-fluorouridine
  modified_base 52: mod_base = OTHER; note = 2'-fluoroguanosine
  modified_base 55: mod_base = OTHER; note = Uridine phosphorothiorate
  modified_base 62: mod_base = OTHER; note = 2'-Omethylcytosine
  modified_base 63: mod_base = OTHER; note = 2'-fluorocytosine
  modified_base 64: mod_base = OTHER; note = 2'-Omethylguanosine
  modified_base 65: mod_base = OTHER; note = Guanosine phosphorothiorate
  modified_base 69: mod_base = OTHER; note = 2'-Omethyladenosine phosphorothiorate
  modified_base 70: mod_base = OTHER; note = 2'-fluoroguanosine phosphorothiorate
  modified_base 73: mod_base = OTHER; note = 2'-Omethylguanosine
  modified_base 74: mod_base = OTHER; note = 2'-Omethylcytosine

SEQ ID NO: 4982 - RNA, 75 nt, synthetic construct; identical to SEQ ID NO: 3311
  source 1..75: mol_type = other RNA
  modified_base 1: mod_base = OTHER; note = 2'-Omethylguanosine phosphorothiorate
  modified_base 11: mod_base = OTHER; note = 2'-Omethyluridine phosphorothiorate
  modified_base 14: mod_base = OTHER; note = Adenosine phosphorothiorate
  modified_base 16: mod_base = OTHER; note = 2'-fluorouridine
  modified_base 20: mod_base = OTHER; note = 2'-fluoroadenosine
  modified_base 21: mod_base = OTHER; note = Adenosine phosphorothiorate
  modified_base 22: mod_base = OTHER; note = Guanosine phosphorothiorate
  modified_base 23: mod_base = OTHER; note = 2'-fluorocytosine
  modified_base 29: mod_base = OTHER; note = 2'-fluoroguanosine phosphorothiorate
  modified_base 32: mod_base = OTHER; note = 2'-fluorocytosine
  modified_base 44: mod_base = OTHER; note = 2'-fluorocytosine
  modified_base 45: mod_base = OTHER; note = 2'-fluoroguanosine
  modified_base 52: mod_base = OTHER; note = Guanosine phosphorothiorate
  modified_base 54: mod_base = OTHER; note = Uridine phosphorothiorate
  modified_base 55: mod_base = OTHER; note = 2'-fluorocytosine phosphorothiorate
  modified_base 61: mod_base = OTHER; note = 2'-fluorouridine phosphorothiorate
  modified_base 63: mod_base = OTHER; note = Guanosine phosphorothiorate
  modified_base 64: mod_base = OTHER; note = Guanosine phosphorothiorate
  modified_base 67: mod_base = OTHER; note = 2'-fluoroguanosine
  modified_base 74: mod_base = OTHER; note = Cytosine phosphorothiorate
  modified_base 75: mod_base = OTHER; note = 2'-Omethyladenosine

SEQ ID NO: 4983 - RNA, 76 nt, synthetic construct; identical to SEQ ID NO: 625
  source 1..76: mol_type = other RNA
  modified_base 1: mod_base = OTHER; note = 2'-Omethylguanosine
  modified_base 2: mod_base = OTHER; note = 2'-fluoroguanosine phosphorothiorate
  modified_base 10: mod_base = OTHER; note = 2'-Omethylguanosine
  modified_base 13: mod_base = OTHER; note = 2'-Omethylcytosine
  modified_base 17: mod_base = OTHER; note = Guanosine phosphorothiorate
  modified_base 18: mod_base = OTHER; note = 2'-Omethylguanosine
  modified_base 19: mod_base = OTHER; note = Adenosine phosphorothiorate
  modified_base 20: mod_base = OTHER; note = 2'-Omethyluridine
  modified_base 25: mod_base = OTHER; note = 2'-Omethylcytosine
  modified_base 29: mod_base = OTHER; note = 2'-Omethylguanosine
  modified_base 33: mod_base = OTHER; note = 2'-fluorouridine
  modified_base 35: mod_base = OTHER; note = Cytosine phosphorothiorate
  modified_base 37: mod_base = OTHER; note = Adenosine phosphorothiorate
  modified_base 38: mod_base = OTHER; note = Adenosine phosphorothiorate
  modified_base 41: mod_base = OTHER; note = 2'-fluorocytosine
  modified_base 43: mod_base = OTHER; note = 2'-Omethyladenosine
  modified_base 44: mod_base = OTHER; note = 2'-fluoroadenosine
  modified_base 46: mod_base = OTHER; note = Guanosine phosphorothiorate
  modified_base 50: mod_base = OTHER; note = 2'-Omethylcytosine
  modified_base 52: mod_base = OTHER; note = 2'-Omethylguanosine
  modified_base 54: mod_base = OTHER; note = Uridine phosphorothiorate
  modified_base 55: mod_base = OTHER; note = Uridine phosphorothiorate
  modified_base 56: mod_base = OTHER; note = 2'-Omethylcytosine
  modified_base 57: mod_base = OTHER; note = Guanosine phosphorothiorate
  modified_base 62: mod_base = OTHER; note = 2'-Omethylcytosine
  modified_base 63: mod_base = OTHER; note = 2'-fluorocytosine
  modified_base 65: mod_base = OTHER; note = 2'-Omethylguanosine
  modified_base 71: mod_base = OTHER; note = 2'-Omethyluridine
  modified_base 73: mod_base = OTHER; note = 2'-Omethylguanosine

SEQ ID NO: 4984 - RNA, 75 nt, synthetic construct; identical to SEQ ID NO: 1045
  source 1..75: mol_type = other RNA
  modified_base 2: mod_base = OTHER; note = 2'-Omethylguanosine phosphorothiorate
  modified_base 5: mod_base = OTHER; note = 2'-Omethylcytosine phosphorothiorate
  modified_base 15: mod_base = OTHER; note = 2'-Omethyladenosine
  modified_base 17: mod_base = OTHER; note = 2'-Omethylguanosine
  modified_base 20: mod_base = OTHER; note = 2'-Omethyladenosine phosphorothiorate
  modified_base 53: mod_base = OTHER; note = 2'-Omethyluridine phosphorothiorate
  modified_base 54: mod_base = OTHER; note = 2'-Omethyluridine phosphorothiorate
  modified_base 55: mod_base = OTHER; note = 2'-Omethylcytosine phosphorothiorate
  modified_base 57: mod_base = OTHER; note = 2'-fluoroadenosine
  modified_base 58: mod_base = OTHER; note = 2'-Omethylguanosine
  modified_base 60: mod_base = OTHER; note = 2'-Omethylcytosine
  modified_base 67: mod_base = OTHER; note = 2'-fluoroguanosine
  modified_base 68: mod_base = OTHER; note = 2'-Omethyladenosine
  modified_base 69: mod_base = OTHER; note = 2'-Omethyladenosine
  modified_base 72: mod_base = OTHER; note = 2'-Omethyluridine
  modified_base 73: mod_base = OTHER; note = 2'-Omethylcytosine phosphorothiorate
  modified_base 74: mod_base = OTHER; note = 2'-Omethylcytosine phosphorothiorate

SEQ ID NO: 4985 - RNA, 75 nt, synthetic construct; identical to SEQ ID NO: 3299
  source 1..75: mol_type = other RNA
  modified_base 8: mod_base = OTHER; note = 2'-fluoroadenosine
  modified_base 13: mod_base = OTHER; note = 2'-Omethyladenosine phosphorothiorate
  modified_base 17: mod_base = OTHER; note = 2'-fluoroguanosine
  modified_base 19: mod_base = OTHER; note = 2'-fluorouridine
  modified_base 24: mod_base = OTHER; note = 2'-fluorocytosine
  modified_base 28: mod_base = OTHER; note = 2'-Omethyladenosine phosphorothiorate
  modified_base 29: mod_base = OTHER; note = 2'-Omethylguanosine phosphorothiorate
  modified_base 38: mod_base = OTHER; note = 2'-Omethyluridine phosphorothiorate
  modified_base 51: mod_base = OTHER; note = Guanosine phosphorothiorate
  modified_base 54: mod_base = OTHER; note = 2'-Omethyluridine phosphorothiorate
  modified_base 62: mod_base = OTHER; note = Cytosine phosphorothiorate
  modified_base 71: mod_base = OTHER; note = 2'-fluorocytosine phosphorothiorate
  modified_base 74: mod_base = OTHER; note = 2'-Omethylcytosine

SEQ ID NO: 4986 - RNA, 76 nt, synthetic construct; identical to SEQ ID NO: 3318
  source 1..76: mol_type = other RNA
  modified_base 1: mod_base = OTHER; note = 2'-Omethylcytosine
  modified_base 10: mod_base = OTHER; note = 2'-Omethylguanosine
  modified_base 11: mod_base = OTHER; note = 2'-Omethylcytosine
  modified_base 12: mod_base = OTHER; note = 2'-Omethyluridine
  modified_base 13: mod_base = OTHER; note = 2'-Omethylcytosine
  modified_base 16: mod_base = OTHER; note = 2'-Omethyluridine
  modified_base 18: mod_base = OTHER; note = 2'-Omethylguanosine
  modified_base 19: mod_base = OTHER; note = 2'-Omethylguanosine
  modified_base 22: mod_base = OTHER; note = 2'-Omethylguanosine
  modified_base 23: mod_base = OTHER; note = 2'-Omethyladenosine
  modified_base 24: mod_base = OTHER; note = 2'-Omethylguanosine
  modified_base 25: mod_base = OTHER; note = 2'-Omethylcytosine
  modified_base 44: mod_base = OTHER; note = 2'-Omethyladenosine
  modified_base 45: mod_base = OTHER; note = 2'-Omethylguanosine
  modified_base 46: mod_base = OTHER; note = 2'-fluoroguanosine
  modified_base 47: mod_base = OTHER; note = 2'-fluorouridine
  modified_base 48: mod_base = OTHER; note = 2'-fluorocytosine
  modified_base 73: mod_base = OTHER; note = 2'-Omethyladenosine

SEQ ID NO: 4987 - RNA, 86 nt, synthetic construct; identical to SEQ ID NO: 3290
  source 1..86: mol_type = other RNA
  modified_base 68: mod_base = OTHER; note = Adenosine phosphorothiorate

SEQ ID NO: 4988 - DNA, 76 bp, synthetic construct; identical to SEQ ID NO: 1924
  source 1..76: mol_type = other DNA
  modified_base 1: mod_base = OTHER; note = 2'-Omethylguanosine
  modified_base 8: mod_base = OTHER; note = Uridine phosphorothiorate
  modified_base 10: mod_base = OTHER; note = Guanosine phosphorothiorate
  modified_base 11: mod_base = OTHER; note = 2'-O-(2-Methoxyethyl) 5-methylcytosine
  modified_base 12: mod_base = OTHER; note = Guanosine phosphorothiorate
  modified_base 13: mod_base = OTHER; note = 2'-Omethylcytosine
  modified_base 18: mod_base = OTHER; note = Guanosine phosphorothiorate
  modified_base 20: mod_base = OTHER; note = 2'-O-(2-Methoxyethyl) thymine phosphorothiorate
  modified_base 21: mod_base = OTHER; note = 2'-O-(2-Methoxyethyl) adenosine
  modified_base 22: mod_base = OTHER; note = 2'-O-(2-Methoxyethyl) guanosine
  modified_base 24: mod_base = OTHER; note = Guanosine phosphorothiorate
  modified_base 26: mod_base = OTHER; note = 2'-Omethyladenosine
  modified_base 28: mod_base = OTHER; note = 2'-Omethyluridine
  modified_base 29: mod_base = OTHER; note = Guanosine phosphorothiorate
  modified_base 30: mod_base = OTHER; note = 2'-O-(2-Methoxyethyl) guanosine
  modified_base 31: mod_base = OTHER; note = 2'-O-(2-Methoxyethyl) adenosine
  modified_base 34: mod_base = OTHER; note = Uridine phosphorothiorate
  modified_base 35: mod_base = OTHER; note = 2'-Omethylcytosine
  modified_base 37: mod_base = OTHER; note = 2'-O-(2-Methoxyethyl) adenosine
  modified_base 38: mod_base = OTHER; note = 2'-Omethyladenosine
  modified_base 39: mod_base = OTHER; note = Uridine phosphorothiorate
  modified_base 40: mod_base = OTHER; note = 2'-Omethyluridine
  modified_base 42: mod_base = OTHER; note = Adenosine phosphorothiorate
  modified_base 43: mod_base = OTHER; note = 2'-fluoroadenosine
  modified_base 44: mod_base = OTHER; note = Adenosine phosphorothiorate
  modified_base 45: mod_base = OTHER; note = 2'-O-(2-Methoxyethyl) guanosine phosphorothiorate
  modified_base 50: mod_base = OTHER; note = 2'-fluorocytosine
  modified_base 52: mod_base = OTHER; note = 2'-O-(2-Methoxyethyl) guanosine
  modified_base 55: mod_base = OTHER; note = Uridine phosphorothiorate
  modified_base 57: mod_base = OTHER; note = 2'-Omethylguanosine
  modified_base 59: mod_base = OTHER; note = 2'-fluoroguanosine
  modified_base 62: mod_base = OTHER; note = Cytosine phosphorothiorate
  modified_base 63: mod_base = OTHER; note = 2'-fluorocytosine
  modified_base 67: mod_base = OTHER; note = Guanosine phosphorothiorate
  modified_base 72: mod_base = OTHER; note = Cytosine phosphorothiorate
  modified_base 73: mod_base = OTHER; note = 2'-fluoroguanosine
  modified_base 74: mod_base = OTHER; note = 2'-Omethylcytosine
  modified_base 75: mod_base = OTHER; note = Cytosine phosphorothiorate
  modified_base 76: mod_base = OTHER; note = 2'-Omethyladenosine
  misc_feature 1..67: note = RNA
  misc_feature 68: note = DNA
  misc_feature 69..70: note = RNA
  misc_feature 71: note = DNA
  misc_feature 72..76: note = RNA

SEQ ID NO: 4989 - RNA, 76 nt, synthetic construct; identical to SEQ ID NO: 625
  source 1..76: mol_type = other RNA
  modified_base 1: mod_base = OTHER; note = 2'-Omethylguanosine
  modified_base 10: mod_base = OTHER; note = 2'-Omethylguanosine
  modified_base 13: mod_base = OTHER; note = 2'-Omethylcytosine
  modified_base 17: mod_base = OTHER; note = Guanosine phosphorothiorate
  modified_base 18: mod_base = OTHER; note = 2'-Omethylguanosine
  modified_base 19: mod_base = OTHER; note = Adenosine phosphorothiorate
  modified_base 20: mod_base = OTHER; note = 2'-Omethyluridine
  modified_base 25: mod_base = OTHER; note = 2'-Omethylcytosine
  modified_base 29: mod_base = OTHER; note = 2'-Omethylguanosine
  modified_base 33: mod_base = OTHER; note = 2'-fluorouridine
  modified_base 35: mod_base = OTHER; note = Cytosine phosphorothiorate
  modified_base 37: mod_base = OTHER; note = Adenosine phosphorothiorate
  modified_base 38: mod_base = OTHER; note = Adenosine phosphorothiorate
  modified_base 41: mod_base = OTHER; note = 2'-fluorocytosine
  modified_base 43: mod_base = OTHER; note = 2'-Omethyladenosine
  modified_base 44: mod_base = OTHER; note = 2'-fluoroadenosine
  modified_base 46: mod_base = OTHER; note = Guanosine phosphorothiorate
  modified_base 50: mod_base = OTHER; note = 2'-Omethylcytosine
  modified_base 52: mod_base = OTHER; note = 2'-Omethylguanosine
  modified_base 54: mod_base = OTHER; note = Uridine phosphorothiorate
  modified_base 55: mod_base = OTHER; note = Uridine phosphorothiorate
  modified_base 56: mod_base = OTHER; note = 2'-Omethylcytosine
  modified_base 57: mod_base = OTHER; note = Guanosine phosphorothiorate
  modified_base 62: mod_base = OTHER; note = 2'-Omethylcytosine
  modified_base 63: mod_base = OTHER; note = 2'-fluorocytosine
  modified_base 71: mod_base = OTHER; note = 2'-Omethyluridine
  modified_base 73: mod_base = OTHER; note = 2'-Omethylguanosine

SEQ ID NO: 4990 - RNA, 76 nt, synthetic construct; identical to SEQ ID NO: 625
  source 1..76: mol_type = other RNA
  modified_base 1: mod_base = OTHER; note = 2'-Omethylguanosine
  modified_base 2: mod_base = OTHER; note = 2'-Omethylguanosine
  modified_base 33: mod_base = OTHER; note = 2'-fluorouridine
  modified_base 37: mod_base = OTHER; note = Adenosine phosphorothiorate
  modified_base 52: mod_base = OTHER; note = 2'-Omethylguanosine
  modified_base 57: mod_base = OTHER; note = 2'-Omethylguanosine
  modified_base 73: mod_base = OTHER; note = 2'-Omethylguanosine
  modified_base 75: mod_base = OTHER; note = 2'-fluorocytosine phosphorothiorate

SEQ ID NO: 4991 - RNA, 75 nt, synthetic construct; identical to SEQ ID NO: 3311
  source 1..75: mol_type = other RNA
  modified_base 1: mod_base = OTHER; note = 2'-Omethylguanosine
  modified_base 2: mod_base = OTHER; note = 2'-Omethylguanosine
  modified_base 23: mod_base = OTHER; note = 2'-fluorocytosine
  modified_base 37: mod_base = OTHER; note = 2'-fluoroadenosine
  modified_base 46: mod_base = OTHER; note = 2'-fluoroadenosine
  modified_base 54: mod_base = OTHER; note = 2'-Omethyluridine
  modified_base 63: mod_base = OTHER; note = 2'-fluoroguanosine

SEQ ID NO: 4992 - RNA, 75 nt, synthetic construct; identical to SEQ ID NO: 3306
  source 1..75: mol_type = other RNA
  modified_base 1: mod_base = OTHER; note = 2'-Omethylguanosine phosphorothiorate
  modified_base 2: mod_base = OTHER; note = 2'-Omethyladenosine phosphorothiorate
  modified_base 3: mod_base = OTHER; note = 2'-Omethylcytosine
  modified_base 4: mod_base = OTHER; note = 2'-Omethylcytosine
  modified_base 5: mod_base = OTHER; note = 2'-Omethyluridine
  modified_base 6: mod_base = OTHER; note = 2'-Omethylcytosine
  modified_base 65: mod_base = OTHER; note = 2'-Omethylcytosine
  modified_base 66: mod_base = OTHER; note = 2'-Omethylguanosine
  modified_base 67: mod_base = OTHER; note = 2'-Omethylguanosine
  modified_base 68: mod_base = OTHER; note = 2'-Omethylguanosine
  modified_base 70: mod_base = OTHER; note = 2'-Omethyluridine
  modified_base 71: mod_base = OTHER; note = 2'-fluorocytosine
  modified_base 72: mod_base = OTHER; note = 2'-Omethyladenosine

SEQ ID NO: 4993 - RNA, 75 nt, synthetic construct; identical to SEQ ID NO: 3311
  source 1..75: mol_type = other RNA
  modified_base 1: mod_base = OTHER; note = 2'-Omethylguanosine phosphorothiorate
  modified_base 2: mod_base = OTHER; note = 2'-Omethylguanosine phosphorothiorate
  modified_base 11: mod_base = OTHER; note = 2'-fluorouridine
  modified_base 12: mod_base = OTHER; note = Guanosine phosphorothiorate
  modified_base 13: mod_base = OTHER; note = Uridine phosphorothiorate
  modified_base 19: mod_base = OTHER; note = 2'-fluorouridine
  modified_base 23: mod_base = OTHER; note = 2'-fluorocytosine
  modified_base 26: mod_base = OTHER; note = 2'-fluorouridine
  modified_base 37: mod_base = OTHER; note = 2'-fluoroadenosine
  modified_base 42: mod_base = OTHER; note = 2'-fluoroadenosine
  modified_base 44: mod_base = OTHER; note = 2'-fluorocytosine
  modified_base 55: mod_base = OTHER; note = 2'-fluorocytosine phosphorothiorate
  modified_base 58: mod_base = OTHER; note = Guanosine phosphorothiorate
  modified_base 65: mod_base = OTHER; note = Uridine phosphorothiorate
  modified_base 66: mod_base = OTHER; note = 2'-fluoroguanosine
  modified_base 73: mod_base = OTHER; note = Cytosine phosphorothiorate
  modified_base 74: mod_base = OTHER; note = 2'-Omethylcytosine

SEQ ID NO: 4994 - RNA, 75 nt, synthetic construct; identical to SEQ ID NO: 3306
  source 1..75: mol_type = other RNA
  modified_base 1: mod_base = OTHER; note = 2'-Omethylguanosine phosphorothiorate
  modified_base 2: mod_base = OTHER; note = 2'-Omethyladenosine
  modified_base 3: mod_base = OTHER; note = 2'-Omethylcytosine
  modified_base 4: mod_base = OTHER; note = 2'-Omethylcytosine
  modified_base 5: mod_base = OTHER; note = 2'-Omethyluridine
  modified_base 6: mod_base = OTHER; note = 2'-Omethylcytosine
  modified_base 43: mod_base = OTHER; note = 2'-Omethyladenosine
  modified_base 44: mod_base = OTHER; note = 2'-Omethylguanosine
  modified_base 45: mod_base = OTHER; note = 2'-fluoroguanosine
  modified_base 46: mod_base = OTHER; note = 2'-fluorouridine
  modified_base 47: mod_base = OTHER; note = 2'-Omethyluridine
  modified_base 48: mod_base = OTHER; note = 2'-Omethylguanosine
  modified_base 72: mod_base = OTHER; note = 2'-Omethyladenosine

SEQ ID NO: 4995 - RNA, 76 nt, synthetic construct; identical to SEQ ID NO: 625
  source 1..76: mol_type = other RNA
  modified_base 1: mod_base = OTHER; note = 2'-Omethylguanosine phosphorothiorate
  modified_base 2: mod_base = OTHER; note = 2'-Omethylguanosine phosphorothiorate
  modified_base 3: mod_base = OTHER; note = 2'-Omethylcytosine
  modified_base 4: mod_base = OTHER; note = 2'-Omethyluridine
  modified_base 5: mod_base = OTHER; note = 2'-Omethylcytosine
  modified_base 6: mod_base = OTHER; note = 2'-Omethylcytosine
  modified_base 10: mod_base = OTHER; note = 2'-Omethylguanosine
  modified_base 11: mod_base = OTHER; note = 2'-Omethylcytosine
  modified_base 12: mod_base = OTHER; note = 2'-Omethylguanosine
  modified_base 13: mod_base = OTHER; note = 2'-Omethylcytosine
  modified_base 14: mod_base = OTHER; note = 2'-Omethyladenosine
  modified_base 15: mod_base = OTHER; note = 2'-fluoroadenosine
  modified_base 16: mod_base = OTHER; note = 2'-Omethyluridine
  modified_base 17: mod_base = OTHER; note = 2'-Omethylguanosine
  modified_base 18: mod_base = OTHER; note = 2'-Omethylguanosine
  modified_base 19: mod_base = OTHER; note = 2'-fluoroadenosine
  modified_base 20: mod_base = OTHER; note = 2'-Omethyluridine
  modified_base 21: mod_base = OTHER; note = 2'-fluoroadenosine
  modified_base 22: mod_base = OTHER; note = 2'-Omethylguanosine
  modified_base 23: mod_base = OTHER; note = 2'-Omethylcytosine
  modified_base 24: mod_base = OTHER; note = 2'-Omethylguanosine
  modified_base 25: mod_base = OTHER; note = 2'-Omethylcytosine
  modified_base 38: mod_base = OTHER; note = Adenosine phosphorothiorate
  modified_base 39: mod_base = OTHER; note = Uridine phosphorothiorate
  modified_base 40: mod_base = OTHER; note = 2'-fluorouridine
  modified_base 43: mod_base = OTHER; note = 2'-Omethyladenosine
  modified_base 44: mod_base = OTHER; note = 2'-Omethyladenosine
  modified_base 45: mod_base = OTHER; note = 2'-Omethylguanosine
  modified_base 46: mod_base = OTHER; note = 2'-fluoroguanosine
  modified_base 48: mod_base = OTHER; note = 2'-fluorouridine
  modified_base 49: mod_base = OTHER; note = 2'-Omethylcytosine
  modified_base 50: mod_base = OTHER; note = 2'-Omethylcytosine
  modified_base 54: mod_base = OTHER; note = Uridine phosphorothiorate
  modified_base 55: mod_base = OTHER; note = Uridine phosphorothiorate
  modified_base 56: mod_base = OTHER; note = 2'-Omethylcytosine
  modified_base 57: mod_base = OTHER; note = Guanosine phosphorothiorate
  modified_base 61: mod_base = OTHER; note = 2'-Omethylcytosine
  modified_base 62: mod_base = OTHER; note = 2'-Omethylcytosine
  modified_base 63: mod_base = OTHER; note = 2'-fluorocytosine
  modified_base 64: mod_base = OTHER; note = 2'-Omethylguanosine
  modified_base 65: mod_base = OTHER; note = 2'-Omethylguanosine
  modified_base 66: mod_base = OTHER; note = 2'-Omethylcytosine
  modified_base 67: mod_base = OTHER; note = 2'-Omethylguanosine
  modified_base 68: mod_base = OTHER; note = 2'-Omethylguanosine
  modified_base 69: mod_base = OTHER; note = 2'-Omethyladenosine

SEQ ID NO: 4996 - RNA, 76 nt, synthetic construct; identical to SEQ ID NO: 625
  source 1..76: mol_type = other RNA
  modified_base 1: mod_base = OTHER; note = 2'-Omethylguanosine
  modified_base 2: mod_base = OTHER; note = 2'-Omethylguanosine phosphorothiorate
  modified_base 10: mod_base = OTHER; note = 2'-Omethylguanosine
  modified_base 13: mod_base = OTHER; note = 2'-Omethylcytosine
  modified_base 17: mod_base = OTHER; note = Guanosine phosphorothiorate
  modified_base 18: mod_base = OTHER; note = 2'-Omethylguanosine
  modified_base 19: mod_base = OTHER; note = Adenosine phosphorothiorate
  modified_base 20: mod_base = OTHER; note = 2'-Omethyluridine
  modified_base 25: mod_base = OTHER; note = 2'-Omethylcytosine
  modified_base 29: mod_base = OTHER; note = 2'-Omethylguanosine
  modified_base 33: mod_base = OTHER; note = 2'-fluorouridine
  modified_base 35: mod_base = OTHER; note = Cytosine phosphorothiorate
  modified_base 37: mod_base = OTHER; note = Adenosine phosphorothiorate
  modified_base 38: mod_base = OTHER; note = Adenosine phosphorothiorate
  modified_base 43: mod_base = OTHER; note = 2'-Omethyladenosine
  modified_base 44: mod_base = OTHER; note = 2'-fluoroadenosine
  modified_base 46: mod_base = OTHER; note = Guanosine phosphorothiorate
  modified_base 50: mod_base = OTHER; note = 2'-Omethylcytosine
  modified_base 52: mod_base = OTHER; note = 2'-Omethylguanosine
  modified_base 54: mod_base = OTHER; note = Uridine phosphorothiorate
  modified_base 55: mod_base = OTHER; note = Uridine phosphorothiorate
  modified_base 56: mod_base = OTHER; note = 2'-Omethylcytosine
  modified_base 57: mod_base = OTHER; note = Guanosine phosphorothiorate
  modified_base 62: mod_base = OTHER; note = 2'-Omethylcytosine
  modified_base 63: mod_base = OTHER; note = 2'-fluorocytosine
  modified_base 65: mod_base = OTHER; note = 2'-Omethylguanosine
  modified_base 71: mod_base = OTHER; note = 2'-Omethyluridine
  modified_base 73: mod_base = OTHER; note = 2'-Omethylguanosine

SEQ ID NO: 4997 - RNA, 76 nt, synthetic construct; identical to SEQ ID NO: 625
  source 1..76: mol_type = other RNA
  modified_base 1: mod_base = OTHER; note = 2'-Omethylguanosine phosphorothiorate
  modified_base 2: mod_base = OTHER; note = 2'-Omethylguanosine
  modified_base 19: mod_base = OTHER; note = 2'-fluoroadenosine
  modified_base 28: mod_base = OTHER; note = 2'-fluorouridine
  modified_base 33: mod_base = OTHER; note = 2'-O-(2-Methoxyethyl) thymine
  modified_base 52: mod_base = OTHER; note = 2'-fluoroguanosine
  modified_base 74: mod_base = OTHER; note = Cytosine phosphorothiorate
  modified_base 75: mod_base = OTHER; note = 2'-Omethylcytosine

SEQ ID NO: 4998 - RNA, 76 nt, synthetic construct; identical to SEQ ID NO: 625
  source 1..76: mol_type = other RNA
  modified_base 1: mod_base = OTHER; note = 2'-Omethylguanosine phosphorothiorate
  modified_base 2: mod_base = OTHER; note = 2'-Omethylguanosine
  modified_base 13: mod_base = OTHER; note = 2'-Omethylcytosine
  modified_base 33: mod_base = OTHER; note = 2'-fluorouridine
  modified_base 35: mod_base = OTHER; note = Cytosine phosphorothiorate
  modified_base 37: mod_base = OTHER; note = Adenosine phosphorothiorate
  modified_base 38: mod_base = OTHER; note = Adenosine phosphorothiorate
  modified_base 50: mod_base = OTHER; note = 2'-Omethylcytosine
  modified_base 52: mod_base = OTHER; note = 2'-fluoroguanosine
  modified_base 62: mod_base = OTHER; note = 2'-Omethylcytosine
  modified_base 63: mod_base = OTHER; note = 2'-fluorocytosine
  modified_base 65: mod_base = OTHER; note = 2'-Omethylguanosine
  modified_base 73: mod_base = OTHER; note = 2'-Omethylguanosine
  modified_base 75: mod_base = OTHER; note = 2'-fluorocytosine phosphorothiorate

SEQ ID NO: 4999 - RNA, 73 nt, synthetic construct; identical to SEQ ID NO: 935
  source 1..73: mol_type = other RNA
  modified_base 1: mod_base = OTHER; note = 2'-Omethylguanosine phosphorothiorate
  modified_base 2: mod_base = OTHER; note = 2'-Omethylguanosine phosphorothiorate
  modified_base 25: mod_base = OTHER; note = Cytosine phosphorothiorate
  modified_base 43: mod_base = OTHER; note = 2'-fluoroadenosine
  modified_base 55: mod_base = OTHER; note = Uridine phosphorothiorate
  modified_base 72: mod_base = OTHER; note = 2'-Omethylcytosine

SEQ ID NO: 5000 - RNA, 85 nt, synthetic construct; identical to SEQ ID NO: 3301
  source 1..85: mol_type = other RNA
  modified_base 1: mod_base = OTHER; note = 2'-Omethylguanosine phosphorothiorate
  modified_base 2: mod_base = OTHER; note = 2'-Omethylcytosine
  modified_base 14: mod_base = OTHER; note = Adenosine phosphorothiorate
  modified_base 16: mod_base = OTHER; note = 2'-Omethyluridine
  modified_base 25: mod_base = OTHER; note = 2'-Omethylcytosine
  modified_base 26: mod_base = OTHER; note = 2'-Omethylguanosine
  modified_base 33: mod_base = OTHER; note = 2'-fluorouridine
  modified_base 44: mod_base = OTHER; note = 2'-fluorouridine
  modified_base 45: mod_base = OTHER; note = 2'-Omethylguanosine
  modified_base 47: mod_base = OTHER; note = 2'-Omethylguanosine
  modified_base 54: mod_base = OTHER; note = Cytosine phosphorothiorate
  modified_base 60: mod_base = OTHER; note = 2'-Omethyladenosine phosphorothiorate
  modified_base 72: mod_base = OTHER; note = 2'-Omethyluridine phosphorothiorate
  modified_base 74: mod_base = OTHER; note = 2'-fluorocytosine
  modified_base 76: mod_base = OTHER; note = 2'-fluorocytosine
  modified_base 80: mod_base = OTHER; note = 2'-Omethylguanosine
  modified_base 82: mod_base = OTHER; note = 2'-Omethylguanosine

SEQ ID NO: 5001 - RNA, 75 nt, synthetic construct; identical to SEQ ID NO: 3336
  source 1..75: mol_type = other RNA
  modified_base 21: mod_base = OTHER; note = 2'-fluoroguanosine
  modified_base 22: mod_base = OTHER; note = 2'-fluoroadenosine
  modified_base 25: mod_base = OTHER; note = Adenosine phosphorothiorate
  modified_base 35: mod_base = OTHER; note = Adenosine phosphorothiorate
  modified_base 39: mod_base = OTHER; note = Cytosine phosphorothiorate
  modified_base 46: mod_base = OTHER; note = Uridine phosphorothiorate
  modified_base 48: mod_base = OTHER; note = 2'-fluorocytosine
  modified_base 73: mod_base = OTHER; note = Cytosine phosphorothiorate
  modified_base 74: mod_base = OTHER; note = Cytosine phosphorothiorate

SEQ ID NO: 5002 - RNA, 76 nt, synthetic construct; identical to SEQ ID NO: 625
  source 1..76: mol_type = other RNA
  modified_base 1: mod_base = OTHER; note = 2'-Omethylguanosine phosphorothiorate
  modified_base 2: mod_base = OTHER; note = 2'-Omethylguanosine
  modified_base 20: mod_base = OTHER; note = Uridine phosphorothiorate
  modified_base 21: mod_base = OTHER; note = 2'-fluoroadenosine
  modified_base 33: mod_base = OTHER; note = 2'-fluorouridine
  modified_base 54: mod_base = OTHER; note = 2'-Omethyluridine
  modified_base 68: mod_base = OTHER; note = 2'-fluoroguanosine
  modified_base 73: mod_base = OTHER; note = 2'-Omethylguanosine phosphorothiorate
  modified_base 74: mod_base = OTHER; note = 2'-fluorocytosine phosphorothiorate
  modified_base 75: mod_base = OTHER; note = 2'-Omethylcytosine

SEQ ID NO: 5003 - RNA, 75 nt, synthetic construct; identical to SEQ ID NO: 1045
  source 1..75: mol_type = other RNA
  modified_base 1: mod_base = OTHER; note = 2'-Omethylguanosine
  modified_base 2: mod_base = OTHER; note = 2'-Omethylguanosine
  modified_base 3: mod_base = OTHER; note = 2'-Omethyluridine
  modified_base 4: mod_base = OTHER; note = 2'-Omethyluridine
  modified_base 5: mod_base = OTHER; note = 2'-Omethylcytosine
  modified_base 6: mod_base = OTHER; note = 2'-Omethylcytosine
  modified_base 10: mod_base = OTHER; note = 2'-Omethylguanosine
  modified_base 13: mod_base = OTHER; note = 2'-Omethyluridine
  modified_base 17: mod_base = OTHER; note = Guanosine phosphorothiorate
  modified_base 18: mod_base = OTHER; note = 2'-Omethylguanosine
  modified_base 19: mod_base = OTHER; note = Uridine phosphorothiorate
  modified_base 20: mod_base = OTHER; note = 2'-Omethyladenosine
  modified_base 25: mod_base = OTHER; note = 2'-Omethylcytosine
  modified_base 29: mod_base = OTHER; note = 2'-Omethylguanosine
  modified_base 33: mod_base = OTHER; note = 2'-fluorouridine
  modified_base 35: mod_base = OTHER; note = Uridine phosphorothiorate
  modified_base 37: mod_base = OTHER; note = Adenosine phosphorothiorate
  modified_base 38: mod_base = OTHER; note = Adenosine phosphorothiorate
  modified_base 41: mod_base = OTHER; note = 2'-fluorocytosine phosphorothiorate
  modified_base 43: mod_base = OTHER; note = 2'-Omethylguanosine
  modified_base 44: mod_base = OTHER; note = 2'-fluorocytosine
  modified_base 46: mod_base = OTHER; note = Adenosine phosphorothiorate
  modified_base 49: mod_base = OTHER; note = 2'-Omethylcytosine
  modified_base 51: mod_base = OTHER; note = 2'-Omethyladenosine
  modified_base 53: mod_base = OTHER; note = Uridine phosphorothiorate
  modified_base 54: mod_base = OTHER; note = Uridine phosphorothiorate
  modified_base 55: mod_base = OTHER; note = 2'-Omethylcytosine
  modified_base 56: mod_base = OTHER; note = Guanosine phosphorothiorate
  modified_base 61: mod_base = OTHER; note = 2'-Omethyluridine
  modified_base 62: mod_base = OTHER; note = 2'-fluorocytosine
  modified_base 64: mod_base = OTHER; note = 2'-Omethylguanosine
  modified_base 70: mod_base = OTHER; note = 2'-Omethylcytosine
  modified_base 72: mod_base = OTHER; note = 2'-Omethyluridine

SEQ ID NO: 5004 - RNA, 75 nt, synthetic construct; identical to SEQ ID NO: 3311
  source 1..75: mol_type = other RNA
  modified_base 2: mod_base = OTHER; note = 2'-Omethylguanosine phosphorothiorate
  modified_base 22: mod_base = OTHER; note = 2'-fluoroguanosine
  modified_base 38: mod_base = OTHER; note = Adenosine phosphorothiorate
  modified_base 42: mod_base = OTHER; note = 2'-fluoroadenosine
  modified_base 55: mod_base = OTHER; note = 2'-fluorocytosine phosphorothiorate
  modified_base 58: mod_base = OTHER; note = 2'-fluoroguanosine
  modified_base 63: mod_base = OTHER; note = Guanosine phosphorothiorate
  modified_base 64: mod_base = OTHER; note = 2'-fluoroguanosine
  modified_base 74: mod_base = OTHER; note = Cytosine phosphorothiorate
  modified_base 75: mod_base = OTHER; note = 2'-fluoroadenosine

SEQ ID NO: 5005 - RNA, 76 nt, synthetic construct
  source 1..76: mol_type = other RNA
ggccccgtggcgcaatggatagcgcagtggacttcaaattcacaggttccgggttcgagtcccggcggagtcgcca

SEQ ID NO: 5006 - RNA, 76 nt, synthetic construct; identical to SEQ ID NO: 625
  source 1..76: mol_type = other RNA
  modified_base 1: mod_base = OTHER; note = 2'-Omethylguanosine
  modified_base 2: mod_base = OTHER; note = 2'-Omethylguanosine
  modified_base 33: mod_base = OTHER; note = 2'-fluorouridine
  modified_base 52: mod_base = OTHER; note = 2'-Omethylguanosine
  modified_base 57: mod_base = OTHER; note = 2'-Omethylguanosine
  modified_base 62: mod_base = OTHER; note = 2'-Omethylcytosine
  modified_base 73: mod_base = OTHER; note = 2'-Omethylguanosine
  modified_base 75: mod_base = OTHER; note = 2'-fluorocytosine phosphorothiorate

SEQ ID NO: 5007 - RNA, 76 nt, synthetic construct; identical to SEQ ID NO: 625
  source 1..76: mol_type = other RNA
  modified_base 1: mod_base = OTHER; note = Guanosine phosphorothiorate
  modified_base 2: mod_base = OTHER; note = 2'-fluoroguanosine
  modified_base 3: mod_base = OTHER; note = 2'-fluorocytosine
  modified_base 5: mod_base = OTHER; note = 2'-Omethylcytosine
  modified_base 6: mod_base = OTHER; note = 2'-Omethylcytosine
  modified_base 14: mod_base = OTHER; note = 2'-Omethyladenosine
  modified_base 15: mod_base = OTHER; note = 2'-Omethyladenosine
  modified_base 20: mod_base = OTHER; note = Uridine phosphorothiorate
  modified_base 26: mod_base = OTHER; note = 2'-fluoroadenosine
  modified_base 28: mod_base = OTHER; note = 2'-fluorouridine
  modified_base 29: mod_base = OTHER; note = 2'-Omethylguanosine
  modified_base 31: mod_base = OTHER; note = 2'-fluoroadenosine
  modified_base 34: mod_base = OTHER; note = 2'-Omethyluridine phosphorothiorate
  modified_base 36: mod_base = OTHER; note = Adenosine phosphorothiorate
  modified_base 38: mod_base = OTHER; note = Adenosine phosphorothiorate
  modified_base 42: mod_base = OTHER; note = Adenosine phosphorothiorate
  modified_base 43: mod_base = OTHER; note = 2'-fluoroadenosine
  modified_base 44: mod_base = OTHER; note = 2'-fluoroadenosine
  modified_base 45: mod_base = OTHER; note = 2'-fluoroguanosine
  modified_base 46: mod_base = OTHER; note = 2'-fluoroguanosine
  modified_base 47: mod_base = OTHER; note = Uridine phosphorothiorate
  modified_base 48: mod_base = OTHER; note = 2'-Omethyluridine
  modified_base 49: mod_base = OTHER; note = 2'-fluorocytosine
  modified_base 53: mod_base = OTHER; note = 2'-fluoroguanosine
  modified_base 57: mod_base = OTHER; note = 2'-fluoroguanosine
  modified_base 58: mod_base = OTHER; note = 2'-fluoroadenosine
  modified_base 59: mod_base = OTHER; note = Guanosine phosphorothiorate
  modified_base 60: mod_base = OTHER; note = 2'-fluorouridine
  modified_base 61: mod_base = OTHER; note = 2'-Omethylcytosine
  modified_base 62: mod_base = OTHER; note = 2'-Omethylcytosine
  modified_base 65: mod_base = OTHER; note = 2'-Omethylguanosine
  modified_base 66: mod_base = OTHER; note = 2'-fluorocytosine
  modified_base 67: mod_base = OTHER; note = 2'-fluoroguanosine phosphorothiorate
  modified_base 68: mod_base = OTHER; note = 2'-Omethylguanosine
  modified_base 70: mod_base = OTHER; note = Guanosine phosphorothiorate
  modified_base 71: mod_base = OTHER; note = 2'-Omethyluridine
  modified_base 73: mod_base = OTHER; note = Guanosine phosphorothiorate
  modified_base 74: mod_base = OTHER; note = 2'-fluorocytosine
  modified_base 76: mod_base = OTHER; note = 2'-Omethyladenosine

SEQ ID NO: 5008 - RNA, 75 nt, synthetic construct; identical to SEQ ID NO: 3311
  source 1..75: mol_type = other RNA
  modified_base 4: mod_base = OTHER; note = 2'-Omethyluridine
  modified_base 12: mod_base = OTHER; note = 2'-fluoroguanosine phosphorothiorate
  modified_base 18: mod_base = OTHER; note = 2'-fluoroguanosine
  modified_base 20: mod_base = OTHER; note = 2'-fluoroadenosine
  modified_base 21: mod_base = OTHER; note = 2'-fluoroadenosine
  modified_base 27: mod_base = OTHER; note = 2'-fluorocytosine
  modified_base 28: mod_base = OTHER; note = 2'-fluorouridine phosphorothiorate
  modified_base 32: mod_base = OTHER; note = 2'-fluorocytosine
  modified_base 38: mod_base = OTHER; note = Adenosine phosphorothiorate
  modified_base 39: mod_base = OTHER; note = Uridine phosphorothiorate
  modified_base 40: mod_base = OTHER; note = 2'-Omethylcytosine
  modified_base 44: mod_base = OTHER; note = 2'-fluorocytosine
  modified_base 57: mod_base = OTHER; note = 2'-Omethyladenosine
  modified_base 62: mod_base = OTHER; note = 2'-fluorocytosine
  modified_base 67: mod_base = OTHER; note = Guanosine phosphorothiorate
  modified_base 68: mod_base = OTHER; note = Adenosine phosphorothiorate
  modified_base 69: mod_base = OTHER; note = 2'-fluoroadenosine
  modified_base 73: mod_base = OTHER; note = Cytosine phosphorothiorate
  modified_base 74: mod_base = OTHER; note = 2'-fluorocytosine phosphorothiorate
  modified_base 75: mod_base = OTHER; note = 2'-fluoroadenosine

SEQ ID NO: 5009 - RNA, 76 nt, synthetic construct; identical to SEQ ID NO: 625
  source 1..76: mol_type = other RNA
  modified_base 1: mod_base = OTHER; note = 2'-Omethylguanosine
  modified_base 17: mod_base = OTHER; note = 2'-Omethylguanosine
  modified_base 18: mod_base = OTHER; note = 2'-Omethylguanosine
  modified_base 39: mod_base = OTHER; note = Thymine
  modified_base 50: mod_base = OTHER; note = 2'-Omethylcytosine
  modified_base 52: mod_base = OTHER; note = 2'-Omethylguanosine
  modified_base 73: mod_base = OTHER; note = 2'-Omethylguanosine

SEQ ID NO: 5010 - RNA, 76 nt, synthetic construct; identical to SEQ ID NO: 625
  source 1..76: mol_type = other RNA
  modified_base 1: mod_base = OTHER; note = 2'-Omethylguanosine phosphorothiorate
  modified_base 2: mod_base = OTHER; note = 2'-Omethylguanosine
  modified_base 17: mod_base = OTHER; note = 2'-Omethylguanosine
  modified_base 25: mod_base = OTHER; note = 2'-Omethylcytosine
  modified_base 33: mod_base = OTHER; note = 2'-fluorouridine
  modified_base 35: mod_base = OTHER; note = Cytosine phosphorothiorate
  modified_base 37: mod_base = OTHER; note = Adenosine phosphorothiorate
  modified_base 38: mod_base = OTHER; note = Adenosine phosphorothiorate
  modified_base 62: mod_base = OTHER; note = 2'-Omethylcytosine
  modified_base 73: mod_base = OTHER; note = 2'-Omethylguanosine
  modified_base 75: mod_base = OTHER; note = 2'-fluorocytosine phosphorothiorate

SEQ ID NO: 5011 - RNA, 85 nt, synthetic construct; identical to SEQ ID NO: 3301
  source 1..85: mol_type = other RNA
  modified_base 1: mod_base = OTHER; note = 2'-Omethylguanosine phosphorothiorate
  modified_base 2: mod_base = OTHER; note = 2'-Omethylcytosine
  modified_base 3: mod_base = OTHER; note = 2'-Omethyluridine phosphorothiorate
  modified_base 4: mod_base = OTHER; note = 2'-Omethylguanosine
  modified_base 16: mod_base = OTHER; note = 2'-fluorouridine
  modified_base 18: mod_base = OTHER; note = Guanosine phosphorothiorate
  modified_base 26: mod_base = OTHER; note = Guanosine phosphorothiorate
  modified_base 34: mod_base = OTHER; note = 2'-Omethyluridine
  modified_base 36: mod_base = OTHER; note = Adenosine phosphorothiorate
  modified_base 44: mod_base = OTHER; note = 2'-Omethyluridine
  modified_base 48: mod_base = OTHER; note = 2'-fluoroguanosine phosphorothiorate
  modified_base 49: mod_base = OTHER; note = 2'-fluorouridine
  modified_base 57: mod_base = OTHER; note = 2'-fluorocytosine
  modified_base 58: mod_base = OTHER; note = 2'-fluoroguanosine
  modified_base 60: mod_base = OTHER; note = 2'-Omethyladenosine phosphorothiorate
  modified_base 64: mod_base = OTHER; note = 2'-Omethyluridine phosphorothiorate
  modified_base 71: mod_base = OTHER; note = Cytosine phosphorothiorate
  modified_base 73: mod_base = OTHER; note = 2'-fluoroguanosine
  modified_base 81: mod_base = OTHER; note = 2'-fluorocytosine
  modified_base 82: mod_base = OTHER; note = 2'-Omethylguanosine
  modified_base 84: mod_base = OTHER; note = 2'-fluorocytosine

SEQ ID NO: 5012 - RNA, 74 nt, synthetic construct; identical to SEQ ID NO: 3293
  source 1..74: mol_type = other RNA
  modified_base 1: mod_base = OTHER; note = 2'-fluoroadenosine
  modified_base 3: mod_base = OTHER; note = 2'-Omethylcytosine phosphorothiorate
  modified_base 10: mod_base = OTHER; note = 2'-fluorocytosine
  modified_base 27: mod_base = OTHER; note = 2'-fluorouridine
  modified_base 34: mod_base = OTHER; note = Adenosine phosphorothiorate
  modified_base 35: mod_base = OTHER; note = 2'-fluoroguanosine
  modified_base 44: mod_base = OTHER; note = 2'-fluoroguanosine
  modified_base 73: mod_base = OTHER; note = 2'-Omethylcytosine phosphorothiorate

SEQ ID NO: 5013 - RNA, 76 nt, synthetic construct; identical to SEQ ID NO: 3289
  source 1..76: mol_type = other RNA
  modified_base 1: mod_base = OTHER; note = 2'-Omethylguanosine
  modified_base 20: mod_base = OTHER; note = 2'-Omethyluridine
  modified_base 22: mod_base = OTHER; note = 2'-Omethylguanosine
  modified_base 40: mod_base = OTHER; note = 2'-fluorocytosine
  modified_base 41: mod_base = OTHER; note = 2'-Omethyluridine
  modified_base 42: mod_base = OTHER; note = 2'-Omethylguanosine
  modified_base 43: mod_base = OTHER; note = 2'-Omethyladenosine
  modified_base 73: mod_base = OTHER; note = 2'-Omethylguanosine

SEQ ID NO: 5014 - RNA, 76 nt, synthetic construct; identical to SEQ ID NO: 625
  source 1..76: mol_type = other RNA
  modified_base 1: mod_base = OTHER; note = 2'-Omethylguanosine phosphorothiorate
  modified_base 2: mod_base = OTHER; note = 2'-Omethylguanosine
  modified_base 3: mod_base = OTHER; note = 2'-Omethylcytosine
  modified_base 4: mod_base = OTHER; note = 2'-Omethyluridine
  modified_base 5: mod_base = OTHER; note = 2'-Omethylcytosine
  modified_base 6: mod_base = OTHER; note = 2'-Omethylcytosine
  modified_base 9: mod_base = OTHER; note = Guanosine phosphorothiorate
  modified_base 10: mod_base = OTHER; note = 2'-Omethylguanosine
  modified_base 13: mod_base = OTHER; note = 2'-Omethylcytosine
  modified_base 14: mod_base = OTHER; note = 2'-Omethyladenosine
  modified_base 15: mod_base = OTHER; note = 2'-fluoroadenosine
  modified_base 16: mod_base = OTHER; note = 2'-Omethyluridine
  modified_base 17: mod_base = OTHER; note = 2'-Omethylguanosine
  modified_base 18: mod_base = OTHER; note = 2'-Omethylguanosine
  modified_base 19: mod_base = OTHER; note = 2'-fluoroadenosine
  modified_base 20: mod_base = OTHER; note = 2'-Omethyluridine
  modified_base 21: mod_base = OTHER; note = 2'-fluoroadenosine
  modified_base 22: mod_base = OTHER; note = 2'-Omethylguanosine
  modified_base 25: mod_base = OTHER; note = 2'-Omethylcytosine
  modified_base 29: mod_base = OTHER; note = 2'-Omethylguanosine
  modified_base 33: mod_base = OTHER; note = 2'-fluorouridine
  modified_base 35: mod_base = OTHER; note = Cytosine phosphorothiorate
  modified_base 37: mod_base = OTHER; note = Adenosine phosphorothiorate
  modified_base 38: mod_base = OTHER; note = Adenosine phosphorothiorate
  modified_base 40: mod_base = OTHER; note = 2'-fluorouridine
  modified_base 41: mod_base = OTHER; note = 2'-Omethylcytosine
  modified_base 42: mod_base = OTHER; note = 2'-Omethyladenosine
  modified_base 43: mod_base = OTHER; note = 2'-Omethyladenosine
  modified_base 44: mod_base = OTHER; note = 2'-fluoroadenosine
  modified_base 46: mod_base = OTHER; note = Guanosine phosphorothiorate
  modified_base 49: mod_base = OTHER; note = 2'-Omethylcytosine
  modified_base 50: mod_base = OTHER; note = 2'-Omethylcytosine
  modified_base 51: mod_base = OTHER; note = 2'-Omethylguanosine
  modified_base 52: mod_base = OTHER; note = 2'-Omethylguanosine
  modified_base 53: mod_base = OTHER; note = 2'-Omethylguanosine
  modified_base 54: mod_base = OTHER; note = Uridine phosphorothiorate
  modified_base 55: mod_base = OTHER; note = Uridine phosphorothiorate
  modified_base 56: mod_base = OTHER; note = 2'-Omethylcytosine
  modified_base 57: mod_base = OTHER; note = Guanosine phosphorothiorate
  modified_base 59: mod_base = OTHER; note = 2'-O-(2-Methoxyethyl) guanosine
  modified_base 61: mod_base = OTHER; note = 2'-Omethylcytosine
  modified_base 62: mod_base = OTHER; note = 2'-Omethylcytosine
  modified_base 63: mod_base = OTHER; note = 2'-fluorocytosine
  modified_base 64: mod_base = OTHER; note = 2'-Omethylguanosine
  modified_base 65: mod_base = OTHER; note = 2'-Omethylguanosine
  modified_base 66: mod_base = OTHER; note = 2'-Omethylcytosine
  modified_base 67: mod_base = OTHER; note = 2'-Omethylguanosine
  modified_base 68: mod_base = OTHER; note = 2'-Omethylguanosine
  modified_base 69: mod_base = OTHER; note = 2'-fluoroadenosine
  modified_base 70: mod_base = OTHER; note = 2'-fluoroguanosine
  modified_base 71: mod_base = OTHER; note = 2'-Omethyluridine
  modified_base 73: mod_base = OTHER; note = 2'-Omethylguanosine
  modified_base 74: mod_base = OTHER; note = Cytosine phosphorothiorate
  modified_base 75: mod_base = OTHER; note = 2'-Omethylcytosine

SEQ ID NO: 5015 - RNA, 86 nt, synthetic construct; identical to SEQ ID NO: 3290
  source 1..86: mol_type = other RNA
  modified_base 1: mod_base = OTHER; note = 2'-Omethyladenosine phosphorothiorate
  modified_base 2: mod_base = OTHER; note = 2'-Omethylcytosine phosphorothiorate
  modified_base 3: mod_base = OTHER; note = 2'-Omethylcytosine
  modified_base 4: mod_base = OTHER; note = 2'-Omethyladenosine
  modified_base 5: mod_base = OTHER; note = 2'-Omethylguanosine
  modified_base 6: mod_base = OTHER; note = 2'-Omethylguanosine
  modified_base 16: mod_base = OTHER; note = 2'-Omethyluridine
  modified_base 17: mod_base = OTHER; note = 2'-Omethylguanosine
  modified_base 18: mod_base = OTHER; note = 2'-Omethylguanosine
  modified_base 20: mod_base = OTHER; note = 2'-Omethyluridine
  modified_base 22: mod_base = OTHER; note = 2'-Omethyladenosine
  modified_base 24: mod_base = OTHER; note = 2'-Omethylguanosine
  modified_base 25: mod_base = OTHER; note = 2'-Omethylcytosine
  modified_base 27: mod_base = OTHER; note = 2'-Omethyluridine
  modified_base 33: mod_base = OTHER; note = 2'-fluorouridine
  modified_base 35: mod_base = OTHER; note = Cytosine phosphorothiorate
  modified_base 37: mod_base = OTHER; note = Guanosine phosphorothiorate
  modified_base 38: mod_base = OTHER; note = Adenosine phosphorothiorate
  modified_base 44: mod_base = OTHER; note = 2'-Omethyluridine
  modified_base 57: mod_base = OTHER; note = 2'-fluoroguanosine
  modified_base 58: mod_base = OTHER; note = 2'-fluorocytosine
  modified_base 59: mod_base = OTHER; note = 2'-Omethylguanosine
  modified_base 60: mod_base = OTHER; note = 2'-Omethyluridine
  modified_base 61: mod_base = OTHER; note = 2'-Omethylguanosine
  modified_base 62: mod_base = OTHER; note = 2'-Omethylguanosine
  modified_base 63: mod_base = OTHER; note = 2'-Omethylguanosine
  modified_base 64: mod_base = OTHER; note = 2'-Omethyluridine
  modified_base 66: mod_base = OTHER; note = 2'-Omethylcytosine
  modified_base 69: mod_base = OTHER; note = 2'-Omethyladenosine
  modified_base 71: mod_base = OTHER; note = 2'-Omethylcytosine
  modified_base 72: mod_base = OTHER; note = 2'-Omethylcytosine
  modified_base 73: mod_base = OTHER; note = 2'-fluorocytosine
  modified_base 74: mod_base = OTHER; note = 2'-Omethyladenosine
  modified_base 75: mod_base = OTHER; note = 2'-Omethylcytosine
  modified_base 76: mod_base = OTHER; note = 2'-Omethyluridine
  modified_base 77: mod_base = OTHER; note = 2'-Omethylcytosine
  modified_base 78: mod_base = OTHER; note = 2'-Omethylcytosine
  modified_base 83: mod_base = OTHER; note = 2'-Omethyladenosine

SEQ ID NO: 5016 - RNA, 76 nt, synthetic construct; identical to SEQ ID NO: 3332
  source 1..76: mol_type = other RNA
  modified_base 1: mod_base = OTHER; note = 2'-Omethylguanosine
  modified_base 14: mod_base = OTHER; note = 2'-Omethyladenosine
  modified_base 15: mod_base = OTHER; note = 2'-fluoroadenosine
  modified_base 16: mod_base = OTHER; note = 2'-Omethyluridine
  modified_base 17: mod_base = OTHER; note = 2'-Omethylguanosine
  modified_base 18: mod_base = OTHER; note = 2'-Omethylguanosine
  modified_base 19: mod_base = OTHER; note = 2'-fluoroadenosine
  modified_base 20: mod_base = OTHER; note = 2'-Omethyluridine
  modified_base 33: mod_base = OTHER; note = 2'-fluorouridine
  modified_base 35: mod_base = OTHER; note = Cytosine phosphorothiorate
  modified_base 37: mod_base = OTHER; note = Adenosine phosphorothiorate
  modified_base 38: mod_base = OTHER; note = Adenosine phosphorothiorate
  modified_base 41: mod_base = OTHER; note = 2'-Omethylcytosine
  modified_base 42: mod_base = OTHER; note = 2'-Omethyladenosine
  modified_base 43: mod_base = OTHER; note = 2'-Omethyladenosine
  modified_base 44: mod_base = OTHER; note = 2'-Omethyladenosine
  modified_base 50: mod_base = OTHER; note = 2'-Omethylcytosine
  modified_base 52: mod_base = OTHER; note = 2'-Omethylguanosine
  modified_base 73: mod_base = OTHER; note = 2'-Omethylguanosine

SEQ ID NO: 5017 - DNA, 76 bp, synthetic construct; identical to SEQ ID NO: 1924
  source 1..76: mol_type = other DNA
  modified_base 1: mod_base = OTHER; note = 2'-Omethylguanosine phosphorothiorate
  modified_base 2: mod_base = OTHER; note = 2'-O-(2-Methoxyethyl) guanosine
  modified_base 3: mod_base = OTHER; note = deoxycytosine phosphorothiorate
  modified_base 4: mod_base = OTHER; note = 2'-O-(2-Methoxyethyl) thymine
  modified_base 5: mod_base = OTHER; note = 2'-Omethylcytosine
  modified_base 9: mod_base = OTHER; note = Guanosine phosphorothiorate
  modified_base 10: mod_base = OTHER; note = 2'-fluoroguanosine
  modified_base 13: mod_base = OTHER; note = Cytosine phosphorothiorate
  modified_base 14: mod_base = OTHER; note = 2'-O-(2-Methoxyethyl) adenosine
  modified_base 15: mod_base = OTHER; note = 2'-O-(2-Methoxyethyl) adenosine phosphorothiorate
  modified_base 19: mod_base = OTHER; note = Adenosine phosphorothiorate
  modified_base 20: mod_base = OTHER; note = 2'-fluorouridine
  modified_base 21: mod_base = OTHER; note = Adenosine phosphorothiorate
  modified_base 25: mod_base = OTHER; note = Cytosine phosphorothiorate
  modified_base 28: mod_base = OTHER; note = 2'-Omethyluridine
  modified_base 29: mod_base = OTHER; note = Guanosine phosphorothiorate
  modified_base 30: mod_base = OTHER; note = 2'-fluoroguanosine phosphorothiorate
  modified_base 31: mod_base = OTHER; note = 2'-fluoroadenosine phosphorothiorate
  modified_base 34: mod_base = OTHER; note = Uridine phosphorothiorate
  modified_base 36: mod_base = OTHER; note = Adenosine phosphorothiorate
  modified_base 37: mod_base = OTHER; note = 2'-Omethyladenosine phosphorothiorate
  modified_base 50: mod_base = OTHER; note = Cytosine phosphorothiorate
  modified_base 51: mod_base = OTHER; note = 2'-fluoroguanosine
  modified_base 52: mod_base = OTHER; note = 2'-O-(2-Methoxyethyl) guanosine
  modified_base 53: mod_base = OTHER; note = Guanosine phosphorothiorate
  modified_base 54: mod_base = OTHER; note = 2'-Omethyluridine
  modified_base 60: mod_base = OTHER; note = Uridine phosphorothiorate
  modified_base 61: mod_base = OTHER; note = 2'-O-(2-Methoxyethyl) 5-methylcytosine phosphorothiorate
  modified_base 62: mod_base = OTHER; note = 2'-O-(2-Methoxyethyl) 5-methylcytosine phosphorothiorate
  modified_base 63: mod_base = OTHER; note = 2'-Omethylcytosine
  modified_base 64: mod_base = OTHER; note = 2'-Omethylguanosine
  modified_base 67: mod_base = OTHER; note = 2'-O-(2-Methoxyethyl) guanosine
  modified_base 69: mod_base = OTHER; note = 2'-O-(2-Methoxyethyl) adenosine
  modified_base 71: mod_base = OTHER; note = Uridine phosphorothiorate
  modified_base 72: mod_base = OTHER; note = 2'-fluorocytosine
  modified_base 73: mod_base = OTHER; note = Guanosine phosphorothiorate
  modified_base 74: mod_base = OTHER; note = 2'-fluorocytosine phosphorothiorate
  modified_base 75: mod_base = OTHER; note = 2'-fluorocytosine
  modified_base 76: mod_base = OTHER; note = 2'-fluoroadenosine
  misc_feature 1..2: note = RNA
  misc_feature 3: note = DNA
  misc_feature 4..15: note = RNA
  misc_feature 16: note = DNA
  misc_feature 17..21: note = RNA
  misc_feature 22: note = DNA
  misc_feature 23..25: note = RNA
  misc_feature 26: note = DNA
  misc_feature 27..55: note = RNA
  misc_feature 56: note = DNA
  misc_feature 57..65: note = RNA
  misc_feature 66: note = DNA
  misc_feature 67: note = RNA
  misc_feature 68: note = DNA
  misc_feature 69..76: note = RNA

SEQ ID NO: 5018 - RNA, 76 nt, synthetic construct; identical to SEQ ID NO: 625
  source 1..76: mol_type = other RNA
  modified_base 1: mod_base = OTHER; note = 2'-Omethylguanosine phosphorothiorate
  modified_base 2: mod_base = OTHER; note = 2'-Omethylguanosine
  modified_base 15: mod_base = OTHER; note = 2'-fluoroadenosine
  modified_base 44: mod_base = OTHER; note = 2'-fluoroadenosine
  modified_base 60: mod_base = OTHER; note = Uridine phosphorothiorate
  modified_base 61: mod_base = OTHER; note = 2'-O-(2-Methoxyethyl) 5-methylcytosine
  modified_base 63: mod_base = OTHER; note = 2'-fluorocytosine
  modified_base 74: mod_base = OTHER; note = Cytosine phosphorothiorate
  modified_base 75: mod_base = OTHER; note = 2'-Omethylcytosine

SEQ ID NO: 5019 - RNA, 85 nt, synthetic construct; identical to SEQ ID NO: 3288
  source 1..85: mol_type = other RNA
  modified_base 1: mod_base = OTHER; note = 2'-fluorocytosine
  modified_base 16: mod_base = OTHER; note = Guanosine phosphorothiorate
  modified_base 23: mod_base = OTHER; note = 2'-fluoroguanosine
  modified_base 34: mod_base = OTHER; note = 2'-fluorocytosine phosphorothiorate
  modified_base 45: mod_base = OTHER; note = 2'-fluoroguanosine phosphorothiorate
  modified_base 53: mod_base = OTHER; note = 2'-fluorouridine
  modified_base 55: mod_base = OTHER; note = Cytosine phosphorothiorate
  modified_base 56: mod_base = OTHER; note = 2'-Omethylguanosine
  modified_base 57: mod_base = OTHER; note = 2'-fluorocytosine
  modified_base 58: mod_base = OTHER; note = 2'-Omethylguanosine
  modified_base 61: mod_base = OTHER; note = 2'-fluoroguanosine phosphorothiorate
  modified_base 65: mod_base = OTHER; note = Cytosine phosphorothiorate
  modified_base 73: mod_base = OTHER; note = 2'-fluoroadenosine
  modified_base 76: mod_base = OTHER; note = 2'-fluorocytosine phosphorothiorate
  modified_base 83: mod_base = OTHER; note = 2'-fluorocytosine phosphorothiorate
  modified_base 84: mod_base = OTHER; note = 2'-fluorocytosine

SEQ ID NO: 5020 - RNA, 76 nt, synthetic construct; identical to SEQ ID NO: 3318
  source 1..76: mol_type = other RNA
  modified_base 1: mod_base = OTHER; note = 2'-Omethylcytosine phosphorothiorate
  modified_base 2: mod_base = OTHER; note = 2'-Omethylcytosine phosphorothiorate
  modified_base 3: mod_base = OTHER; note = 2'-Omethyluridine
  modified_base 4: mod_base = OTHER; note = 2'-Omethyluridine
  modified_base 5: mod_base = OTHER; note = 2'-Omethylcytosine
  modified_base 6: mod_base = OTHER; note = 2'-Omethylguanosine
  modified_base 16: mod_base = OTHER; note = 2'-Omethyluridine
  modified_base 18: mod_base = OTHER; note = 2'-Omethylguanosine
  modified_base 19: mod_base = OTHER; note = 2'-Omethylguanosine
  modified_base 25: mod_base = OTHER; note = 2'-Omethylcytosine
  modified_base 33: mod_base = OTHER; note = 2'-fluorouridine
  modified_base 35: mod_base = OTHER; note = Uridine phosphorothiorate
  modified_base 37: mod_base = OTHER; note = Guanosine phosphorothiorate
  modified_base 38: mod_base = OTHER; note = Adenosine phosphorothiorate
  modified_base 41: mod_base = OTHER; note = 2'-Omethylcytosine
  modified_base 44: mod_base = OTHER; note = 2'-Omethyladenosine
  modified_base 45: mod_base = OTHER; note = 2'-Omethylguanosine
  modified_base 46: mod_base = OTHER; note = 2'-fluoroguanosine
  modified_base 47: mod_base = OTHER; note = 2'-fluorouridine
  modified_base 48: mod_base = OTHER; note = 2'-fluorocytosine
  modified_base 56: mod_base = OTHER; note = 2'-Omethylcytosine
  modified_base 59: mod_base = OTHER; note = 2'-Omethyladenosine
  modified_base 61: mod_base = OTHER; note = 2'-Omethylcytosine
  modified_base 62: mod_base = OTHER; note = 2'-Omethylcytosine
  modified_base 63: mod_base = OTHER; note = 2'-fluoroguanosine
  modified_base 64: mod_base = OTHER; note = 2'-Omethylguanosine
  modified_base 65: mod_base = OTHER; note = 2'-Omethylcytosine
  modified_base 66: mod_base = OTHER; note = 2'-Omethyluridine
  modified_base 67: mod_base = OTHER; note = 2'-Omethylcytosine
  modified_base 68: mod_base = OTHER; note = 2'-Omethylguanosine
  modified_base 73: mod_base = OTHER; note = 2'-Omethyladenosine

SEQ ID NO: 5021 - RNA, 85 nt, synthetic construct; identical to SEQ ID NO: 3297
  source 1..85: mol_type = other RNA
  modified_base 1: mod_base = OTHER; note = 2'-Omethylguanosine phosphorothiorate
  modified_base 2: mod_base = OTHER; note = Cytosine phosphorothiorate
  modified_base 12: mod_base = OTHER; note = 2'-fluorocytosine
  modified_base 14: mod_base = OTHER; note = 2'-fluoroadenosine
  modified_base 36: mod_base = OTHER; note = 2'-fluoroadenosine
  modified_base 38: mod_base = OTHER; note = 2'-Omethyladenosine
  modified_base 45: mod_base = OTHER; note = 2'-Omethylguanosine
  modified_base 58: mod_base = OTHER; note = 2'-Omethylguanosine phosphorothiorate
  modified_base 62: mod_base = OTHER; note = 2'-Omethylguanosine
  modified_base 83: mod_base = OTHER; note = Cytosine phosphorothiorate

SEQ ID NO: 5022 - RNA, 86 nt, synthetic construct; identical to SEQ ID NO: 3290
  source 1..86: mol_type = other RNA
  modified_base 1: mod_base = OTHER; note = 2'-Omethyladenosine
  modified_base 13: mod_base = OTHER; note = 2'-Omethylguanosine
  modified_base 17: mod_base = OTHER; note = 2'-Omethylguanosine
  modified_base 18: mod_base = OTHER; note = 2'-Omethylguanosine
  modified_base 25: mod_base = OTHER; note = 2'-Omethylcytosine
  modified_base 33: mod_base = OTHER; note = 2'-fluorouridine
  modified_base 34: mod_base = OTHER; note = 2'-Omethyluridine
  modified_base 35: mod_base = OTHER; note = Cytosine phosphorothiorate
  modified_base 37: mod_base = OTHER; note = Guanosine phosphorothiorate
  modified_base 38: mod_base = OTHER; note = Adenosine phosphorothiorate
  modified_base 41: mod_base = OTHER; note = 2'-Omethylcytosine
  modified_base 42: mod_base = OTHER; note = 2'-Omethyladenosine
  modified_base 43: mod_base = OTHER; note = 2'-Omethyladenosine
  modified_base 44: mod_base = OTHER; note = 2'-Omethyluridine
  modified_base 59: mod_base = OTHER; note = 2'-Omethylguanosine
  modified_base 60: mod_base = OTHER; note = 2'-Omethyluridine
  modified_base 62: mod_base = OTHER; note = 2'-Omethylguanosine
  modified_base 64: mod_base = OTHER; note = Uridine phosphorothiorate
  modified_base 65: mod_base = OTHER; note = Uridine phosphorothiorate
  modified_base 66: mod_base = OTHER; note = 2'-Omethylcytosine
  modified_base 67: mod_base = OTHER; note = Guanosine phosphorothiorate
  modified_base 68: mod_base = OTHER; note = Adenosine phosphorothiorate
  modified_base 69: mod_base = OTHER; note = 2'-Omethyladenosine
  modified_base 71: mod_base = OTHER; note = 2'-Omethylcytosine
  modified_base 75: mod_base = OTHER; note = 2'-Omethylcytosine
  modified_base 83: mod_base = OTHER; note = 2'-Omethyladenosine

SEQ ID NO: 5023 - RNA, 76 nt, synthetic construct; identical to SEQ ID NO: 625
  source 1..76: mol_type = other RNA
  modified_base 1: mod_base = OTHER; note = 2'-Omethylguanosine
  modified_base 2: mod_base = OTHER; note = 2'-Omethylguanosine
  modified_base 13: mod_base = OTHER; note = 2'-Omethylcytosine
  modified_base 33: mod_base = OTHER; note = 2'-fluorouridine
  modified_base 35: mod_base = OTHER; note = Cytosine phosphorothiorate
  modified_base 37: mod_base = OTHER; note = Adenosine phosphorothiorate
  modified_base 52: mod_base = OTHER; note = 2'-Omethylguanosine
  modified_base 56: mod_base = OTHER; note = 2'-Omethylcytosine
  modified_base 62: mod_base = OTHER; note = 2'-Omethylcytosine
  modified_base 73: mod_base = OTHER; note = 2'-Omethylguanosine
  modified_base 75: mod_base = OTHER; note = 2'-fluorocytosine phosphorothiorate

SEQ ID NO: 5024 - RNA, 76 nt, synthetic construct; identical to SEQ ID NO: 625
  source 1..76: mol_type = other RNA
  modified_base 1: mod_base = OTHER; note = 2'-Omethylguanosine phosphorothiorate
  modified_base 2: mod_base = OTHER; note = 2'-Omethylguanosine phosphorothiorate
  modified_base 3: mod_base = OTHER; note = 2'-Omethylcytosine
  modified_base 4: mod_base = OTHER; note = 2'-Omethyluridine
  modified_base 5: mod_base = OTHER; note = 2'-Omethylcytosine
  modified_base 6: mod_base = OTHER; note = 2'-Omethylcytosine
  modified_base 16: mod_base = OTHER; note = 2'-Omethyluridine
  modified_base 17: mod_base = OTHER; note = 2'-Omethylguanosine
  modified_base 18: mod_base = OTHER; note = 2'-Omethylguanosine
  modified_base 20: mod_base = OTHER; note = 2'-Omethyluridine
  modified_base 22: mod_base = OTHER; note = 2'-Omethylguanosine
  modified_base 23: mod_base = OTHER; note = 2'-Omethylcytosine
  modified_base 24: mod_base = OTHER; note = 2'-Omethylguanosine
  modified_base 25: mod_base = OTHER; note = 2'-Omethylcytosine
  modified_base 33: mod_base = OTHER; note = 2'-fluorouridine
  modified_base 35: mod_base = OTHER; note = Cytosine phosphorothiorate
  modified_base 37: mod_base = OTHER; note = Adenosine phosphorothiorate
  modified_base 38: mod_base = OTHER; note = Adenosine phosphorothiorate
  modified_base 41: mod_base = OTHER; note = 2'-Omethylcytosine
  modified_base 42: mod_base = OTHER; note = 2'-Omethyladenosine
  modified_base 43: mod_base = OTHER; note = 2'-Omethyladenosine
  modified_base 44: mod_base = OTHER; note = 2'-Omethyladenosine
  modified_base 49: mod_base = OTHER; note = 2'-Omethylcytosine
  modified_base 50: mod_base = OTHER; note = 2'-Omethylcytosine
  modified_base 52: mod_base = OTHER; note = 2'-Omethylguanosine
  modified_base 54: mod_base = OTHER; note = 2'-Omethyluridine
  modified_base 55: mod_base = OTHER; note = Uridine phosphorothiorate
  modified_base 56: mod_base = OTHER; note = 2'-Omethylcytosine
  modified_base 57: mod_base = OTHER; note = 2'-fluoroguanosine
  modified_base 59: mod_base = OTHER; note = 2'-Omethylguanosine
  modified_base 61: mod_base = OTHER; note = 2'-Omethylcytosine
  modified_base 62: mod_base = OTHER; note = 2'-Omethylcytosine
  modified_base 63: mod_base = OTHER; note = 2'-fluorocytosine
  modified_base 64: mod_base = OTHER; note = 2'-Omethylguanosine
  modified_base 65: mod_base = OTHER; note = 2'-Omethylguanosine
  modified_base 74: mod_base = OTHER; note = Cytosine phosphorothiorate
  modified_base 75: mod_base = OTHER; note = 2'-Omethylcytosine phosphorothiorate
  modified_base 76: mod_base = OTHER; note = 2'-Omethyladenosine

SEQ ID NO: 5025 - RNA, 75 nt, synthetic construct; identical to SEQ ID NO: 3311
  source 1..75: mol_type = other RNA
  modified_base 1: mod_base = OTHER; note = 2'-Omethylguanosine phosphorothiorate
  modified_base 2: mod_base = OTHER; note = 2'-fluoroguanosine phosphorothiorate
  modified_base 11: mod_base = OTHER; note = 2'-fluorouridine
  modified_base 21: mod_base = OTHER; note = 2'-fluoroadenosine
  modified_base 26: mod_base = OTHER; note = Uridine phosphorothiorate
  modified_base 29: mod_base = OTHER; note = 2'-Omethylguanosine phosphorothiorate
  modified_base 38: mod_base = OTHER; note = 2'-fluoroadenosine
  modified_base 41: mod_base = OTHER; note = 2'-fluorocytosine
  modified_base 54: mod_base = OTHER; note = 2'-Omethyluridine
  modified_base 55: mod_base = OTHER; note = 2'-Omethylcytosine
  modified_base 61: mod_base = OTHER; note = 2'-fluorouridine phosphorothiorate
  modified_base 62: mod_base = OTHER; note = 2'-fluorocytosine
  modified_base 66: mod_base = OTHER; note = Guanosine phosphorothiorate
  modified_base 74: mod_base = OTHER; note = Cytosine phosphorothiorate

SEQ ID NO: 5026 - RNA, 85 nt, synthetic construct; identical to SEQ ID NO: 3301
  source 1..85: mol_type = other RNA
  modified_base 1: mod_base = OTHER; note = 2'-Omethylguanosine
  modified_base 3: mod_base = OTHER; note = 2'-Omethyluridine
  modified_base 5: mod_base = OTHER; note = 2'-Omethyluridine phosphorothiorate
  modified_base 17: mod_base = OTHER; note = 2'-fluoroguanosine
  modified_base 18: mod_base = OTHER; note = 2'-fluoroguanosine
  modified_base 20: mod_base = OTHER; note = Uridine phosphorothiorate
  modified_base 24: mod_base = OTHER; note = Guanosine phosphorothiorate
  modified_base 30: mod_base = OTHER; note = Guanosine phosphorothiorate
  modified_base 47: mod_base = OTHER; note = 2'-fluoroguanosine
  modified_base 51: mod_base = OTHER; note = 2'-Omethyluridine phosphorothiorate
  modified_base 55: mod_base = OTHER; note = Cytosine phosphorothiorate
  modified_base 59: mod_base = OTHER; note = 2'-Omethylcytosine
  modified_base 62: mod_base = OTHER; note = 2'-fluoroguanosine phosphorothiorate
  modified_base 81: mod_base = OTHER; note = 2'-fluorocytosine phosphorothiorate
  modified_base 82: mod_base = OTHER; note = 2'-Omethylguanosine

SEQ ID NO: 5027 - RNA, 76 nt, synthetic construct; identical to SEQ ID NO: 625
  source 1..76: mol_type = other RNA
  modified_base 1: mod_base = OTHER; note = 2'-Omethylguanosine phosphorothiorate
  modified_base 2: mod_base = OTHER; note = 2'-Omethylguanosine
  modified_base 17: mod_base = OTHER; note = 2'-Omethylguanosine
  modified_base 33: mod_base = OTHER; note = 2'-fluorouridine
  modified_base 35: mod_base = OTHER; note = Cytosine phosphorothiorate
  modified_base 37: mod_base = OTHER; note = Adenosine phosphorothiorate
  modified_base 52: mod_base = OTHER; note = 2'-Omethylguanosine
  modified_base 62: mod_base = OTHER; note = 2'-Omethylcytosine
  modified_base 63: mod_base = OTHER; note = 2'-fluorocytosine
  modified_base 68: mod_base = OTHER; note = 2'-Omethylguanosine
  modified_base 73: mod_base = OTHER; note = 2'-Omethylguanosine
  modified_base 75: mod_base = OTHER; note = 2'-fluorocytosine phosphorothiorate

SEQ ID NO: 5028 - RNA, 76 nt, synthetic construct; identical to SEQ ID NO: 625
  source 1..76: mol_type = other RNA
  modified_base 1: mod_base = OTHER; note = 2'-fluoroguanosine
  modified_base 3: mod_base = OTHER; note = 2'-fluorocytosine
  modified_base 5: mod_base = OTHER; note = 2'-Omethylcytosine
  modified_base 6: mod_base = OTHER; note = 2'-fluorocytosine
  modified_base 11: mod_base = OTHER; note = 2'-fluorocytosine
  modified_base 13: mod_base = OTHER; note = 2'-Omethylcytosine
  modified_base 15: mod_base = OTHER; note = 2'-fluoroadenosine
  modified_base 18: mod_base = OTHER; note = 2'-fluoroguanosine
  modified_base 23: mod_base = OTHER; note = 2'-fluorocytosine
  modified_base 25: mod_base = OTHER; note = 2'-Omethylcytosine
  modified_base 27: mod_base = OTHER; note = Uridine phosphorothiorate
  modified_base 29: mod_base = OTHER; note = 2'-Omethylguanosine
  modified_base 34: mod_base = OTHER; note = 2'-Omethyluridine phosphorothiorate
  modified_base 37: mod_base = OTHER; note = Adenosine phosphorothiorate
  modified_base 38: mod_base = OTHER; note = 2'-fluoroadenosine
  modified_base 42: mod_base = OTHER; note = 2'-Omethyladenosine
  modified_base 43: mod_base = OTHER; note = 2'-fluoroadenosine
  modified_base 44: mod_base = OTHER; note = Adenosine phosphorothiorate
  modified_base 46: mod_base = OTHER; note = Guanosine phosphorothiorate
  modified_base 47: mod_base = OTHER; note = 2'-Omethyluridine
  modified_base 48: mod_base = OTHER; note = 2'-fluorouridine
  modified_base 50: mod_base = OTHER; note = 2'-Omethylcytosine
  modified_base 53: mod_base = OTHER; note = 2'-fluoroguanosine
  modified_base 54: mod_base = OTHER; note = 2'-Omethyluridine
  modified_base 56: mod_base = OTHER; note = 2'-fluorocytosine phosphorothiorate
  modified_base 60: mod_base = OTHER; note = 2'-Omethyluridine
  modified_base 63: mod_base = OTHER; note = 2'-fluorocytosine
  modified_base 65: mod_base = OTHER; note = Guanosine phosphorothiorate
  modified_base 66: mod_base = OTHER; note = 2'-Omethylcytosine
  modified_base 68: mod_base = OTHER; note = 2'-Omethylguanosine
  modified_base 70: mod_base = OTHER; note = Guanosine phosphorothiorate
  modified_base 71: mod_base = OTHER; note = 2'-fluorouridine
  modified_base 73: mod_base = OTHER; note = 2'-fluoroguanosine
  modified_base 75: mod_base = OTHER; note = Cytosine phosphorothiorate
  modified_base 76: mod_base = OTHER; note = 2'-Omethyladenosine

SEQ ID NO: 5029 - RNA, 76 nt, synthetic construct; identical to SEQ ID NO: 3289
  source 1..76: mol_type = other RNA
  modified_base 1: mod_base = OTHER; note = 2'-Omethylguanosine phosphorothiorate
  modified_base 2: mod_base = OTHER; note = 2'-Omethylcytosine phosphorothiorate
  modified_base 12: mod_base = OTHER; note = Uridine phosphorothiorate
  modified_base 13: mod_base = OTHER; note = 2'-Omethylcytosine
  modified_base 74: mod_base = OTHER; note = Cytosine phosphorothiorate
  modified_base 75: mod_base = OTHER; note = 2'-Omethylcytosine phosphorothiorate
  modified_base 76: mod_base = OTHER; note = 2'-Omethyladenosine

SEQ ID NO: 5030 - RNA, 76 nt, synthetic construct; identical to SEQ ID NO: 625
  source 1..76: mol_type = other RNA
  modified_base 1: mod_base = OTHER; note = 2'-Omethylguanosine phosphorothiorate
  modified_base 2: mod_base = OTHER; note = 2'-Omethylguanosine phosphorothiorate
  modified_base 3: mod_base = OTHER; note = 2'-Omethylcytosine phosphorothiorate
  modified_base 4: mod_base = OTHER; note = 2'-Omethyluridine phosphorothiorate
  modified_base 5: mod_base = OTHER; note = 2'-Omethylcytosine phosphorothiorate
  modified_base 6: mod_base = OTHER; note = 2'-Omethylcytosine phosphorothiorate
  modified_base 10: mod_base = OTHER; note = 2'-Omethylguanosine
  modified_base 11: mod_base = OTHER; note = 2'-Omethylcytosine
  modified_base 12: mod_base = OTHER; note = 2'-Omethylguanosine
  modified_base 13: mod_base = OTHER; note = 2'-Omethylcytosine
  modified_base 14: mod_base = OTHER; note = 2'-Omethyladenosine
  modified_base 15: mod_base = OTHER; note = 2'-Omethyladenosine
  modified_base 16: mod_base = OTHER; note = 2'-Omethyluridine
  modified_base 17: mod_base = OTHER; note = 2'-Omethylguanosine
  modified_base 18: mod_base = OTHER; note = 2'-Omethylguanosine
  modified_base 19: mod_base = OTHER; note = 2'-Omethyladenosine
  modified_base 20: mod_base = OTHER; note = 2'-Omethyluridine
  modified_base 22: mod_base = OTHER; note = 2'-Omethylguanosine
  modified_base 23: mod_base = OTHER; note = 2'-Omethylcytosine
  modified_base 24: mod_base = OTHER; note = 2'-Omethylguanosine
  modified_base 25: mod_base = OTHER; note = 2'-Omethylcytosine
  modified_base 40: mod_base = OTHER; note = 2'-fluorouridine
  modified_base 41: mod_base = OTHER; note = 2'-fluorocytosine
  modified_base 42: mod_base = OTHER; note = 2'-fluoroadenosine
  modified_base 43: mod_base = OTHER; note = 2'-fluoroadenosine
  modified_base 44: mod_base = OTHER; note = 2'-Omethyladenosine
  modified_base 45: mod_base = OTHER; note = 2'-Omethylguanosine
  modified_base 46: mod_base = OTHER; note = 2'-Omethylguanosine
  modified_base 49: mod_base = OTHER; note = 2'-Omethylcytosine
  modified_base 50: mod_base = OTHER; note = 2'-Omethylcytosine
  modified_base 51: mod_base = OTHER; note = 2'-Omethylguanosine
  modified_base 52: mod_base = OTHER; note = 2'-Omethylguanosine
  modified_base 53: mod_base = OTHER; note = 2'-Omethylguanosine
  modified_base 54: mod_base = OTHER; note = Uridine phosphorothiorate
  modified_base 55: mod_base = OTHER; note = Uridine phosphorothiorate
  modified_base 56: mod_base = OTHER; note = Cytosine phosphorothiorate
  modified_base 57: mod_base = OTHER; note = Guanosine phosphorothiorate
  modified_base 61: mod_base = OTHER; note = 2'-Omethylcytosine
  modified_base 62: mod_base = OTHER; note = 2'-Omethylcytosine
  modified_base 63: mod_base = OTHER; note = 2'-Omethylcytosine
  modified_base 64: mod_base = OTHER; note = 2'-Omethylguanosine
  modified_base 65: mod_base = OTHER; note = 2'-Omethylguanosine
  modified_base 66: mod_base = OTHER; note = 2'-Omethylcytosine
  modified_base 67: mod_base = OTHER; note = 2'-Omethylguanosine
  modified_base 68: mod_base = OTHER; note = 2'-Omethylguanosine
  modified_base 69: mod_base = OTHER; note = 2'-Omethyladenosine

SEQ ID NO: 5031 - RNA, 75 nt, synthetic construct; identical to SEQ ID NO: 3306
  source 1..75: mol_type = other RNA
  modified_base 51: mod_base = OTHER; note = 2'-Omethyluridine
  modified_base 72: mod_base = OTHER; note = 2'-Omethyladenosine

SEQ ID NO: 5032 - RNA, 85 nt, synthetic construct; identical to SEQ ID NO: 3297
  source 1..85: mol_type = other RNA
  modified_base 1: mod_base = OTHER; note = 2'-Omethylguanosine
  modified_base 17: mod_base = OTHER; note = 2'-Omethylguanosine
  modified_base 18: mod_base = OTHER; note = 2'-Omethylguanosine
  modified_base 20: mod_base = OTHER; note = 2'-Omethyluridine
  modified_base 82: mod_base = OTHER; note = 2'-Omethylguanosine

SEQ ID NO: 5033 - RNA, 75 nt, synthetic construct; identical to SEQ ID NO: 1045
  source 1..75: mol_type = other RNA
  modified_base 1: mod_base = OTHER; note = Guanosine phosphorothiorate
  modified_base 2: mod_base = OTHER; note = 2'-fluoroguanosine
  modified_base 9: mod_base = OTHER; note = 2'-fluoroguanosine phosphorothiorate
  modified_base 12: mod_base = OTHER; note = Guanosine phosphorothiorate
  modified_base 15: mod_base = OTHER; note = Adenosine phosphorothiorate
  modified_base 19: mod_base = OTHER; note = Uridine phosphorothiorate
  modified_base 27: mod_base = OTHER; note = 2'-fluorocytosine
  modified_base 38: mod_base = OTHER; note = Adenosine phosphorothiorate
  modified_base 39: mod_base = OTHER; note = 2'-fluorouridine
  modified_base 44: mod_base = OTHER; note = 2'-Omethylcytosine
  modified_base 49: mod_base = OTHER; note = 2'-fluorocytosine
  modified_base 57: mod_base = OTHER; note = 2'-Omethyladenosine
  modified_base 62: mod_base = OTHER; note = Cytosine phosphorothiorate
  modified_base 73: mod_base = OTHER; note = Cytosine phosphorothiorate

SEQ ID NO: 5034 - RNA, 75 nt, synthetic construct; identical to SEQ ID NO: 1045
  source 1..75: mol_type = other RNA
  modified_base 1: mod_base = OTHER; note = 2'-Omethylguanosine phosphorothiorate
  modified_base 2: mod_base = OTHER; note = 2'-Omethylguanosine phosphorothiorate
  modified_base 3: mod_base = OTHER; note = 2'-Omethyluridine
  modified_base 4: mod_base = OTHER; note = 2'-Omethyluridine
  modified_base 5: mod_base = OTHER; note = 2'-Omethylcytosine
  modified_base 6: mod_base = OTHER; note = 2'-Omethylcytosine
  modified_base 65: mod_base = OTHER; note = 2'-Omethyluridine
  modified_base 66: mod_base = OTHER; note = 2'-Omethylguanosine
  modified_base 67: mod_base = OTHER; note = 2'-Omethylguanosine
  modified_base 68: mod_base = OTHER; note = 2'-Omethyladenosine
  modified_base 70: mod_base = OTHER; note = 2'-Omethylcytosine
  modified_base 71: mod_base = OTHER; note = 2'-fluorocytosine
  modified_base 72: mod_base = OTHER; note = 2'-Omethyluridine

SEQ ID NO: 5035 - RNA, 85 nt, synthetic construct; identical to SEQ ID NO: 3310
  source 1..85: mol_type = other RNA
  modified_base 1: mod_base = OTHER; note = 2'-Omethylcytosine phosphorothiorate
  modified_base 2: mod_base = OTHER; note = 2'-Omethylcytosine
  modified_base 22: mod_base = OTHER; note = 2'-fluoroguanosine
  modified_base 28: mod_base = OTHER; note = 2'-fluoroguanosine
  modified_base 32: mod_base = OTHER; note = 2'-fluorouridine
  modified_base 36: mod_base = OTHER; note = Guanosine phosphorothiorate
  modified_base 58: mod_base = OTHER; note = Guanosine phosphorothiorate
  modified_base 84: mod_base = OTHER; note = Cytosine phosphorothiorate

SEQ ID NO: 5036 - DNA, 76 bp, synthetic construct; identical to SEQ ID NO: 1924
  source 1..76: mol_type = other DNA
  modified_base 1: mod_base = OTHER; note = 2'-Omethylguanosine phosphorothiorate
  modified_base 2: mod_base = OTHER; note = 2'-Omethylguanosine phosphorothiorate
  modified_base 3: mod_base = OTHER; note = 2'-O-(2-Methoxyethyl) 5-methylcytosine
  modified_base 9: mod_base = OTHER; note = 2'-fluoroguanosine
  modified_base 11: mod_base = OTHER; note = 2'-fluorocytosine
  modified_base 17: mod_base = OTHER; note = Guanosine phosphorothiorate
  modified_base 18: mod_base = OTHER; note = 2'-Omethylguanosine
  modified_base 21: mod_base = OTHER; note = 2'-Omethyladenosine
  modified_base 23: mod_base = OTHER; note = Cytosine phosphorothiorate
  modified_base 25: mod_base = OTHER; note = deoxycytosine phosphorothiorate
  modified_base 26: mod_base = OTHER; note = 2'-fluoroadenosine
  modified_base 28: mod_base = OTHER; note = Uridine phosphorothiorate
  modified_base 29: mod_base = OTHER; note = 2'-O-(2-Methoxyethyl) guanosine
  modified_base 30: mod_base = OTHER; note = 2'-fluoroguanosine
  modified_base 31: mod_base = OTHER; note = Adenosine phosphorothiorate
  modified_base 32: mod_base = OTHER; note = 2'-fluorocytosine
  modified_base 33: mod_base = OTHER; note = 2'-fluorouridine
  modified_base 37: mod_base = OTHER; note = Adenosine phosphorothiorate
  modified_base 38: mod_base = OTHER; note = 2'-O-(2-Methoxyethyl) adenosine phosphorothiorate
  modified_base 39: mod_base = OTHER; note = 2'-O-(2-Methoxyethyl) thymine
  modified_base 40: mod_base = OTHER; note = Uridine phosphorothiorate
  modified_base 41: mod_base = OTHER; note = 2'-O-(2-Methoxyethyl) 5-methylcytosine
  modified_base 42: mod_base = OTHER; note = 2'-fluoroadenosine
  modified_base 43: mod_base = OTHER; note = Adenosine phosphorothiorate
  modified_base 46: mod_base = OTHER; note = 2'-O-(2-Methoxyethyl) guanosine
  modified_base 48: mod_base = OTHER; note = Uridine phosphorothiorate
  modified_base 52: mod_base = OTHER; note = Guanosine phosphorothiorate
  modified_base 53: mod_base = OTHER; note = 2'-O-(2-Methoxyethyl) guanosine
  modified_base 54: mod_base = OTHER; note = Uridine phosphorothiorate
  modified_base 59: mod_base = OTHER; note = 2'-fluoroguanosine
  modified_base 61: mod_base = OTHER; note = Cytosine phosphorothiorate
  modified_base 62: mod_base = OTHER; note = 2'-fluorocytosine phosphorothiorate
  modified_base 63: mod_base = OTHER; note = 2'-Omethylcytosine
  modified_base 69: mod_base = OTHER; note = Adenosine phosphorothiorate
  modified_base 70: mod_base = OTHER; note = 2'-Omethylguanosine
  modified_base 71: mod_base = OTHER; note = deoxyuridine phosphorothiorate
  modified_base 72: mod_base = OTHER; note = Cytosine phosphorothiorate
  modified_base 73: mod_base = OTHER; note = 2'-O-(2-Methoxyethyl) guanosine
  modified_base 74: mod_base = OTHER; note = Cytosine phosphorothiorate
  modified_base 75: mod_base = OTHER; note = 2'-Omethylcytosine phosphorothiorate
  misc_feature 1..23: note = RNA
  misc_feature 24..25: note = DNA
  misc_feature 26..43: note = RNA
  misc_feature 44: note = DNA
  misc_feature 45..55: note = RNA
  misc_feature 56: note = DNA
  misc_feature 57..66: note = RNA
  misc_feature 67: note = DNA
  misc_feature 68..70: note = RNA
  misc_feature 71: note = DNA
  misc_feature 72..76: note = RNA

SEQ ID NO: 5037 - RNA, 76 nt, synthetic construct; identical to SEQ ID NO: 625
  source 1..76: mol_type = other RNA
  modified_base 61: mod_base = OTHER; note = 2'-Omethylcytosine
  modified_base 62: mod_base = OTHER; note = 2'-Omethylcytosine
  modified_base 63: mod_base = OTHER; note = 2'-fluorocytosine
  modified_base 64: mod_base = OTHER; note = 2'-Omethylguanosine
  modified_base 65: mod_base = OTHER; note = 2'-Omethylguanosine
  modified_base 66: mod_base = OTHER; note = 2'-Omethylcytosine
  modified_base 67: mod_base = OTHER; note = 2'-Omethylguanosine
  modified_base 68: mod_base = OTHER; note = 2'-Omethylguanosine
  modified_base 69: mod_base = OTHER; note = 2'-fluoroadenosine
  modified_base 70: mod_base = OTHER; note = 2'-fluoroguanosine

SEQ ID NO: 5038 - RNA, 76 nt, synthetic construct; identical to SEQ ID NO: 3289
  source 1..76: mol_type = other RNA
  modified_base 1: mod_base = OTHER; note = 2'-Omethylguanosine phosphorothiorate
  modified_base 2: mod_base = OTHER; note = 2'-Omethylcytosine
  modified_base 13: mod_base = OTHER; note = Cytosine phosphorothiorate
  modified_base 14: mod_base = OTHER; note = 2'-Omethyladenosine
  modified_base 55: mod_base = OTHER; note = Uridine phosphorothiorate
  modified_base 74: mod_base = OTHER; note = Cytosine phosphorothiorate
  modified_base 75: mod_base = OTHER; note = 2'-Omethylcytosine

SEQ ID NO: 5039 - DNA, 76 bp, synthetic construct; identical to SEQ ID NO: 1924
  source 1..76: mol_type = other DNA
  modified_base 1: mod_base = OTHER; note = 2'-Omethylguanosine phosphorothiorate
  modified_base 2: mod_base = OTHER; note = 2'-Omethylguanosine phosphorothiorate
  modified_base 20: mod_base = OTHER; note = 2'-Omethyluridine
  modified_base 24: mod_base = OTHER; note = Guanosine phosphorothiorate
  modified_base 39: mod_base = OTHER; note = Uridine phosphorothiorate
  modified_base 50: mod_base = OTHER; note = 2'-O-(2-Methoxyethyl) 5-methylcytosine
  misc_feature 1..24: note = RNA
  misc_feature 25: note = DNA
  misc_feature 26..32: note = RNA
  misc_feature 33: note = DNA
  misc_feature 34..75: note = RNA
  misc_feature 76: note = DNA

SEQ ID NO: 5040 - RNA, 85 nt, synthetic construct; identical to SEQ ID NO: 3297
  source 1..85: mol_type = other RNA
  modified_base 1: mod_base = OTHER; note = 2'-Omethylguanosine
  modified_base 13: mod_base = OTHER; note = 2'-Omethylguanosine
  modified_base 14: mod_base = OTHER; note = 2'-Omethyladenosine
  modified_base 15: mod_base = OTHER; note = 2'-Omethylguanosine
  modified_base 16: mod_base = OTHER; note = 2'-Omethyluridine
  modified_base 17: mod_base = OTHER; note = 2'-Omethylguanosine
  modified_base 18: mod_base = OTHER; note = 2'-Omethylguanosine
  modified_base 19: mod_base = OTHER; note = Uridine phosphorothiorate
  modified_base 20: mod_base = OTHER; note = 2'-Omethyluridine
  modified_base 21: mod_base = OTHER; note = Adenosine phosphorothiorate
  modified_base 22: mod_base = OTHER; note = 2'-Omethyladenosine
  modified_base 23: mod_base = OTHER; note = 2'-Omethylguanosine
  modified_base 24: mod_base = OTHER; note = 2'-Omethylguanosine
  modified_base 25: mod_base = OTHER; note = 2'-Omethylcytosine
  modified_base 33: mod_base = OTHER; note = 2'-fluorouridine
  modified_base 34: mod_base = OTHER; note = 2'-Omethyluridine
  modified_base 35: mod_base = OTHER; note = Cytosine phosphorothiorate
  modified_base 37: mod_base = OTHER; note = Adenosine phosphorothiorate
  modified_base 38: mod_base = OTHER; note = Adenosine phosphorothiorate
  modified_base 58: mod_base = OTHER; note = 2'-Omethylguanosine
  modified_base 59: mod_base = OTHER; note = 2'-Omethylcytosine
  modified_base 61: mod_base = OTHER; note = 2'-Omethylguanosine
  modified_base 63: mod_base = OTHER; note = Uridine phosphorothiorate
  modified_base 64: mod_base = OTHER; note = Uridine phosphorothiorate
  modified_base 70: mod_base = OTHER; note = 2'-Omethylcytosine
  modified_base 74: mod_base = OTHER; note = 2'-Omethylcytosine
  modified_base 82: mod_base = OTHER; note = 2'-Omethylguanosine

SEQ ID NO: 5041 - RNA, 76 nt, synthetic construct; identical to SEQ ID NO: 3795
  source 1..76: mol_type = other RNA
  modified_base 1: mod_base = OTHER; note = 2'-Omethylguanosine
  modified_base 2: mod_base = OTHER; note = 2'-Omethylcytosine
  modified_base 3: mod_base = OTHER; note = 2'-Omethylcytosine
  modified_base 4: mod_base = OTHER; note = 2'-Omethyluridine
  modified_base 5: mod_base = OTHER; note = 2'-Omethylcytosine
  modified_base 6: mod_base = OTHER; note = 2'-Omethylcytosine
  modified_base 13: mod_base = OTHER; note = 2'-Omethyluridine
  modified_base 14: mod_base = OTHER; note = 2'-Omethyladenosine
  modified_base 15: mod_base = OTHER; note = 2'-Omethyladenosine
  modified_base 16: mod_base = OTHER; note = 2'-Omethyluridine
  modified_base 17: mod_base = OTHER; note = 2'-Omethylguanosine
  modified_base 18: mod_base = OTHER; note = 2'-Omethylguanosine
  modified_base 19: mod_base = OTHER; note = Adenosine phosphorothiorate
  modified_base 20: mod_base = OTHER; note = 2'-Omethyluridine
  modified_base 21: mod_base = OTHER; note = Adenosine phosphorothiorate
  modified_base 25: mod_base = OTHER; note = 2'-Omethylcytosine
  modified_base 33: mod_base = OTHER; note = Uridine phosphorothiorate
  modified_base 34: mod_base = OTHER; note = 2'-Omethyluridine
  modified_base 35: mod_base = OTHER; note = Cytosine phosphorothiorate
  modified_base 37: mod_base = OTHER; note = Adenosine phosphorothiorate
  modified_base 38: mod_base = OTHER; note = Adenosine phosphorothiorate
  modified_base 49: mod_base = OTHER; note = 2'-Omethylguanosine
  modified_base 50: mod_base = OTHER; note = 2'-Omethylcytosine
  modified_base 51: mod_base = OTHER; note = 2'-Omethylguanosine
  modified_base 52: mod_base = OTHER; note = 2'-Omethylguanosine
  modified_base 53: mod_base = OTHER; note = 2'-Omethylguanosine
  modified_base 54: mod_base = OTHER; note = Uridine phosphorothiorate
  modified_base 55: mod_base = OTHER; note = Uridine phosphorothiorate
  modified_base 61: mod_base = OTHER; note = 2'-Omethylcytosine
  modified_base 65: mod_base = OTHER; note = 2'-Omethyluridine
  modified_base 73: mod_base = OTHER; note = 2'-Omethylguanosine

SEQ ID NO: 5042 - RNA, 76 nt, synthetic construct; identical to SEQ ID NO: 625
  source 1..76: mol_type = other RNA
  modified_base 1: mod_base = OTHER; note = 2'-Omethylguanosine phosphorothiorate
  modified_base 2: mod_base = OTHER; note = 2'-Omethylguanosine phosphorothiorate
  modified_base 3: mod_base = OTHER; note = 2'-Omethylcytosine phosphorothiorate
  modified_base 4: mod_base = OTHER; note = 2'-Omethyluridine phosphorothiorate
  modified_base 5: mod_base = OTHER; note = 2'-Omethylcytosine phosphorothiorate
  modified_base 6: mod_base = OTHER; note = 2'-Omethylcytosine phosphorothiorate
  modified_base 54: mod_base = OTHER; note = Uridine phosphorothiorate
  modified_base 55: mod_base = OTHER; note = Uridine phosphorothiorate
  modified_base 56: mod_base = OTHER; note = Cytosine phosphorothiorate
  modified_base 57: mod_base = OTHER; note = Guanosine phosphorothiorate

SEQ ID NO: 5043 - RNA, 76 nt, synthetic construct; identical to SEQ ID NO: 625
  source 1..76: mol_type = other RNA
  modified_base 1: mod_base = OTHER; note = 2'-Omethylguanosine
  modified_base 2: mod_base = OTHER; note = 2'-Omethylguanosine
  modified_base 3: mod_base = OTHER; note = 2'-Omethylcytosine
  modified_base 4: mod_base = OTHER; note = 2'-Omethyluridine
  modified_base 5: mod_base = OTHER; note = 2'-Omethylcytosine
  modified_base 6: mod_base = OTHER; note = 2'-Omethylcytosine
  modified_base 7: mod_base = OTHER; note = 2'-fluoroguanosine phosphorothiorate
  modified_base 9: mod_base = OTHER; note = 2'-Omethylguanosine phosphorothiorate
  modified_base 10: mod_base = OTHER; note = 2'-Omethylguanosine
  modified_base 11: mod_base = OTHER; note = 2'-Omethylcytosine
  modified_base 12: mod_base = OTHER; note = 2'-Omethylguanosine
  modified_base 13: mod_base = OTHER; note = 2'-Omethylcytosine phosphorothiorate
  modified_base 14: mod_base = OTHER; note = 2'-Omethyladenosine
  modified_base 15: mod_base = OTHER; note = 2'-Omethyladenosine
  modified_base 16: mod_base = OTHER; note = 2'-Omethyluridine
  modified_base 17: mod_base = OTHER; note = 2'-Omethylguanosine
  modified_base 18: mod_base = OTHER; note = 2'-Omethylguanosine
  modified_base 20: mod_base = OTHER; note = Uridine phosphorothiorate
  modified_base 21: mod_base = OTHER; note = 2'-fluoroadenosine phosphorothiorate
  modified_base 22: mod_base = OTHER; note = 2'-Omethylguanosine
  modified_base 23: mod_base = OTHER; note = 2'-Omethylcytosine
  modified_base 24: mod_base = OTHER; note = 2'-Omethylguanosine
  modified_base 25: mod_base = OTHER; note = 2'-Omethylcytosine
  modified_base 26: mod_base = OTHER; note = Adenosine phosphorothiorate
  modified_base 28: mod_base = OTHER; note = 2'-Omethyluridine phosphorothiorate
  modified_base 30: mod_base = OTHER; note = 2'-fluoroguanosine phosphorothiorate
  modified_base 31: mod_base = OTHER; note = 2'-Omethyladenosine phosphorothiorate
  modified_base 33: mod_base = OTHER; note = 2'-fluorouridine
  modified_base 35: mod_base = OTHER; note = 2'-Omethylcytosine phosphorothiorate
  modified_base 36: mod_base = OTHER; note = 2'-Omethyladenosine phosphorothiorate
  modified_base 37: mod_base = OTHER; note = Adenosine phosphorothiorate
  modified_base 39: mod_base = OTHER; note = Uridine phosphorothiorate
  modified_base 41: mod_base = OTHER; note = 2'-fluorocytosine
  modified_base 43: mod_base = OTHER; note = 2'-Omethyladenosine
  modified_base 44: mod_base = OTHER; note = 2'-Omethyladenosine
  modified_base 47: mod_base = OTHER; note = Uridine phosphorothiorate
  modified_base 49: mod_base = OTHER; note = 2'-Omethylcytosine
  modified_base 50: mod_base = OTHER; note = 2'-Omethylcytosine
  modified_base 51: mod_base = OTHER; note = 2'-Omethylguanosine
  modified_base 52: mod_base = OTHER; note = 2'-Omethylguanosine
  modified_base 55: mod_base = OTHER; note = Uridine phosphorothiorate
  modified_base 57: mod_base = OTHER; note = 2'-Omethylguanosine
  modified_base 59: mod_base = OTHER; note = 2'-Omethylguanosine
  modified_base 60: mod_base = OTHER; note = 2'-Omethyluridine phosphorothiorate
  modified_base 61: mod_base = OTHER; note = 2'-Omethylcytosine
  modified_base 62: mod_base = OTHER; note = 2'-Omethylcytosine
  modified_base 63: mod_base = OTHER; note = 2'-fluorocytosine
  modified_base 64: mod_base = OTHER; note = 2'-Omethylguanosine
  modified_base 65: mod_base = OTHER; note = 2'-Omethylguanosine phosphorothiorate
  modified_base 66: mod_base = OTHER; note = 2'-Omethylcytosine
  modified_base 67: mod_base = OTHER; note = 2'-Omethylguanosine phosphorothiorate
  modified_base 68: mod_base = OTHER; note = 2'-fluoroguanosine
  modified_base 69: mod_base = OTHER; note = 2'-fluoroadenosine
  modified_base 70: mod_base = OTHER; note = 2'-fluoroguanosine
  modified_base 73: mod_base = OTHER; note = 2'-Omethylguanosine
  modified_base 74: mod_base = OTHER; note = 2'-fluorocytosine phosphorothiorate
  modified_base 75: mod_base = OTHER; note = 2'-fluorocytosine phosphorothiorate
  modified_base 76: mod_base = OTHER; note = 2'-Omethyladenosine

SEQ ID NO: 5044 - RNA, 76 nt, synthetic construct; identical to SEQ ID NO: 3325
  source 1..76: mol_type = other RNA
  modified_base 1: mod_base = OTHER; note = 2'-Omethyluridine phosphorothiorate
  modified_base 2: mod_base = OTHER; note = 2'-Omethyladenosine
  modified_base 3: mod_base = OTHER; note = 2'-Omethylcytosine
  modified_base 4: mod_base = OTHER; note = 2'-Omethyladenosine
  modified_base 5: mod_base = OTHER; note = 2'-Omethylcytosine
  modified_base 6: mod_base = OTHER; note = 2'-Omethylcytosine
  modified_base 44: mod_base = OTHER; note = 2'-Omethyladenosine
  modified_base 45: mod_base = OTHER; note = 2'-Omethylguanosine
  modified_base 46: mod_base = OTHER; note = 2'-fluoroguanosine
  modified_base 47: mod_base = OTHER; note = 2'-fluorouridine
  modified_base 48: mod_base = OTHER; note = 2'-Omethyluridine
  modified_base 49: mod_base = OTHER; note = 2'-Omethylcytosine
  modified_base 73: mod_base = OTHER; note = 2'-Omethylguanosine

SEQ ID NO: 5045 - RNA, 76 nt, synthetic construct; identical to SEQ ID NO: 625
  source 1..76: mol_type = other RNA
  modified_base 1: mod_base = OTHER; note = 2'-Omethylguanosine phosphorothiorate
  modified_base 2: mod_base = OTHER; note = 2'-Omethylguanosine
  modified_base 31: mod_base = OTHER; note = Adenosine phosphorothiorate
  modified_base 32: mod_base = OTHER; note = 2'-O-(2-Methoxyethyl) 5-methylcytosine
  modified_base 49: mod_base = OTHER; note = 2'-Omethylcytosine
  modified_base 74: mod_base = OTHER; note = Cytosine phosphorothiorate
  modified_base 75: mod_base = OTHER; note = 2'-Omethylcytosine phosphorothiorate
  modified_base 76: mod_base = OTHER; note = 2'-Omethyladenosine

SEQ ID NO: 5046 - RNA, 74 nt, synthetic construct; identical to SEQ ID NO: 3293
  source 1..74: mol_type = other RNA
  modified_base 1: mod_base = OTHER; note = 2'-fluoroadenosine
  modified_base 2: mod_base = OTHER; note = Cytosine phosphorothiorate
  modified_base 3: mod_base = OTHER; note = 2'-fluorocytosine
  modified_base 4: mod_base = OTHER; note = Uridine phosphorothiorate
  modified_base 6: mod_base = OTHER; note = Guanosine phosphorothiorate
  modified_base 7: mod_base = OTHER; note = Uridine phosphorothiorate
  modified_base 8: mod_base = OTHER; note = Guanosine phosphorothiorate
  modified_base 9: mod_base = OTHER; note = 2'-Omethylguanosine phosphorothiorate
  modified_base 10: mod_base = OTHER; note = 2'-Omethylcytosine
  modified_base 11: mod_base = OTHER; note = Guanosine phosphorothiorate
  modified_base 24: mod_base = OTHER; note = 2'-fluoroguanosine
  modified_base 27: mod_base = OTHER; note = 2'-Omethyluridine
  modified_base 35: mod_base = OTHER; note = 2'-Omethylguanosine
  modified_base 42: mod_base = OTHER; note = Adenosine phosphorothiorate
  modified_base 43: mod_base = OTHER; note = 2'-fluoroguanosine
  modified_base 46: mod_base = OTHER; note = Uridine phosphorothiorate
  modified_base 48: mod_base = OTHER; note = 2'-fluorocytosine
  modified_base 62: mod_base = OTHER; note = 2'-fluoroguanosine
  modified_base 73: mod_base = OTHER; note = Cytosine phosphorothiorate

SEQ ID NO: 5047 - RNA, 75 nt, synthetic construct; identical to SEQ ID NO: 3311
  source 1..75: mol_type = other RNA
  modified_base 1: mod_base = OTHER; note = 2'-Omethylguanosine phosphorothiorate
  modified_base 3: mod_base = OTHER; note = Uridine phosphorothiorate
  modified_base 10: mod_base = OTHER; note = Guanosine phosphorothiorate
  modified_base 11: mod_base = OTHER; note = 2'-fluorouridine
  modified_base 12: mod_base = OTHER; note = 2'-fluoroguanosine
  modified_base 22: mod_base = OTHER; note = 2'-fluoroguanosine
  modified_base 25: mod_base = OTHER; note = 2'-fluorocytosine
  modified_base 26: mod_base = OTHER; note = 2'-fluorouridine
  modified_base 31: mod_base = OTHER; note = 2'-Omethyladenosine phosphorothiorate
  modified_base 32: mod_base = OTHER; note = 2'-fluorocytosine
  modified_base 37: mod_base = OTHER; note = 2'-fluoroadenosine phosphorothiorate
  modified_base 45: mod_base = OTHER; note = 2'-fluoroguanosine
  modified_base 52: mod_base = OTHER; note = 2'-fluoroguanosine phosphorothiorate
  modified_base 56: mod_base = OTHER; note = 2'-Omethylguanosine
  modified_base 60: mod_base = OTHER; note = Cytosine phosphorothiorate
  modified_base 63: mod_base = OTHER; note = 2'-fluoroguanosine
  modified_base 66: mod_base = OTHER; note = 2'-fluoroguanosine
  modified_base 74: mod_base = OTHER; note = Cytosine phosphorothiorate

SEQ ID NO: 5048 - RNA, 75 nt, synthetic construct; identical to SEQ ID NO: 1045
  source 1..75: mol_type = other RNA
  modified_base 1: mod_base = OTHER; note = 2'-Omethylguanosine
  modified_base 10: mod_base = OTHER; note = 2'-Omethylguanosine
  modified_base 11: mod_base = OTHER; note = 2'-Omethyluridine
  modified_base 12: mod_base = OTHER; note = 2'-Omethylguanosine
  modified_base 13: mod_base = OTHER; note = 2'-Omethyluridine
  modified_base 14: mod_base = OTHER; note = 2'-Omethyladenosine
  modified_base 15: mod_base = OTHER; note = 2'-Omethyladenosine
  modified_base 16: mod_base = OTHER; note = 2'-Omethyluridine
  modified_base 17: mod_base = OTHER; note = 2'-Omethylguanosine
  modified_base 18: mod_base = OTHER; note = 2'-Omethylguanosine
  modified_base 19: mod_base = OTHER; note = Uridine phosphorothiorate
  modified_base 20: mod_base = OTHER; note = 2'-Omethyladenosine
  modified_base 21: mod_base = OTHER; note = Adenosine phosphorothiorate
  modified_base 22: mod_base = OTHER; note = 2'-Omethylguanosine
  modified_base 23: mod_base = OTHER; note = 2'-Omethylcytosine
  modified_base 24: mod_base = OTHER; note = 2'-Omethyladenosine
  modified_base 25: mod_base = OTHER; note = 2'-Omethylcytosine
  modified_base 41: mod_base = OTHER; note = 2'-Omethylcytosine
  modified_base 42: mod_base = OTHER; note = 2'-Omethyladenosine
  modified_base 43: mod_base = OTHER; note = 2'-Omethylguanosine
  modified_base 44: mod_base = OTHER; note = 2'-Omethylcytosine
  modified_base 48: mod_base = OTHER; note = 2'-Omethylcytosine
  modified_base 49: mod_base = OTHER; note = 2'-Omethylcytosine
  modified_base 51: mod_base = OTHER; note = 2'-Omethyladenosine
  modified_base 53: mod_base = OTHER; note = Uridine phosphorothiorate
  modified_base 54: mod_base = OTHER; note = Uridine phosphorothiorate
  modified_base 60: mod_base = OTHER; note = 2'-Omethylcytosine
  modified_base 64: mod_base = OTHER; note = 2'-Omethylguanosine
  modified_base 72: mod_base = OTHER; note = 2'-Omethyluridine

SEQ ID NO: 5049 - RNA, 76 nt, synthetic construct; identical to SEQ ID NO: 625
  source 1..76: mol_type = other RNA
  modified_base 1: mod_base = OTHER; note = Guanosine phosphorothiorate
  modified_base 2: mod_base = OTHER; note = 2'-Omethylguanosine
  modified_base 4: mod_base = OTHER; note = Uridine phosphorothiorate
  modified_base 5: mod_base = OTHER; note = 2'-Omethylcytosine
  modified_base 10: mod_base = OTHER; note = Guanosine phosphorothiorate
  modified_base 11: mod_base = OTHER; note = 2'-Omethylcytosine phosphorothiorate
  modified_base 12: mod_base = OTHER; note = 2'-Omethylguanosine
  modified_base 14: mod_base = OTHER; note = Adenosine phosphorothiorate
  modified_base 18: mod_base = OTHER; note = 2'-Omethylguanosine
  modified_base 21: mod_base = OTHER; note = Adenosine phosphorothiorate
  modified_base 22: mod_base = OTHER; note = 2'-Omethylguanosine
  modified_base 23: mod_base = OTHER; note = Cytosine phosphorothiorate
  modified_base 24: mod_base = OTHER; note = 2'-Omethylguanosine
  modified_base 25: mod_base = OTHER; note = 2'-fluorocytosine
  modified_base 27: mod_base = OTHER; note = 2'-fluorouridine
  modified_base 28: mod_base = OTHER; note = Uridine phosphorothiorate
  modified_base 30: mod_base = OTHER; note = 2'-Omethylguanosine
  modified_base 34: mod_base = OTHER; note = 2'-fluorouridine phosphorothiorate
  modified_base 41: mod_base = OTHER; note = 2'-Omethylcytosine
  modified_base 42: mod_base = OTHER; note = Adenosine phosphorothiorate
  modified_base 43: mod_base = OTHER; note = 2'-Omethyladenosine
  modified_base 46: mod_base = OTHER; note = Guanosine phosphorothiorate
  modified_base 47: mod_base = OTHER; note = 2'-Omethyluridine
  modified_base 49: mod_base = OTHER; note = 2'-fluorocytosine
  modified_base 52: mod_base = OTHER; note = 2'-fluoroguanosine
  modified_base 54: mod_base = OTHER; note = 2'-Omethyluridine
  modified_base 56: mod_base = OTHER; note = Cytosine phosphorothiorate
  modified_base 57: mod_base = OTHER; note = 2'-fluoroguanosine
  modified_base 62: mod_base = OTHER; note = 2'-fluorocytosine phosphorothiorate
  modified_base 63: mod_base = OTHER; note = 2'-Omethylcytosine
  modified_base 65: mod_base = OTHER; note = 2'-Omethylguanosine
  modified_base 66: mod_base = OTHER; note = 2'-Omethylcytosine
  modified_base 67: mod_base = OTHER; note = 2'-Omethylguanosine
  modified_base 68: mod_base = OTHER; note = Guanosine phosphorothiorate
  modified_base 69: mod_base = OTHER; note = 2'-fluoroadenosine
  modified_base 70: mod_base = OTHER; note = 2'-Omethylguanosine
  modified_base 71: mod_base = OTHER; note = 2'-fluorouridine
  modified_base 75: mod_base = OTHER; note = 2'-Omethylcytosine

SEQ ID NO: 5050 - RNA, 76 nt, synthetic construct; identical to SEQ ID NO: 625
  source 1..76: mol_type = other RNA
  modified_base 1: mod_base = OTHER; note = 2'-Omethylguanosine phosphorothiorate
  modified_base 2: mod_base = OTHER; note = 2'-Omethylguanosine phosphorothiorate
  modified_base 3: mod_base = OTHER; note = 2'-Omethylcytosine
  modified_base 4: mod_base = OTHER; note = 2'-Omethyluridine
  modified_base 5: mod_base = OTHER; note = 2'-Omethylcytosine
  modified_base 12: mod_base = OTHER; note = 2'-Omethylguanosine
  modified_base 13: mod_base = OTHER; note = 2'-Omethylcytosine
  modified_base 14: mod_base = OTHER; note = 2'-Omethyladenosine
  modified_base 16: mod_base = OTHER; note = 2'-Omethyluridine
  modified_base 18: mod_base = OTHER; note = 2'-fluoroguanosine phosphorothiorate
  modified_base 19: mod_base = OTHER; note = 2'-fluoroadenosine phosphorothiorate
  modified_base 21: mod_base = OTHER; note = 2'-fluoroadenosine phosphorothiorate
  modified_base 22: mod_base = OTHER; note = 2'-Omethylguanosine
  modified_base 26: mod_base = OTHER; note = 2'-Omethyladenosine phosphorothiorate
  modified_base 29: mod_base = OTHER; note = Guanosine phosphorothiorate
  modified_base 30: mod_base = OTHER; note = 2'-fluoroguanosine phosphorothiorate
  modified_base 31: mod_base = OTHER; note = 2'-Omethyladenosine phosphorothiorate
  modified_base 33: mod_base = OTHER; note = 2'-fluorouridine
  modified_base 41: mod_base = OTHER; note = 2'-Omethylcytosine
  modified_base 43: mod_base = OTHER; note = Adenosine phosphorothiorate
  modified_base 44: mod_base = OTHER; note = 2'-Omethyladenosine phosphorothiorate
  modified_base 45: mod_base = OTHER; note = 2'-Omethylguanosine phosphorothiorate
  modified_base 46: mod_base = OTHER; note = 2'-Omethylguanosine phosphorothiorate
  modified_base 47: mod_base = OTHER; note = 2'-Omethyluridine phosphorothiorate
  modified_base 49: mod_base = OTHER; note = 2'-Omethylcytosine phosphorothiorate
  modified_base 50: mod_base = OTHER; note = 2'-Omethylcytosine
  modified_base 54: mod_base = OTHER; note = Uridine phosphorothiorate
  modified_base 55: mod_base = OTHER; note = Uridine phosphorothiorate
  modified_base 56: mod_base = OTHER; note = 2'-Omethylcytosine
  modified_base 57: mod_base = OTHER; note = 2'-Omethylguanosine
  modified_base 59: mod_base = OTHER; note = 2'-Omethylguanosine phosphorothiorate
  modified_base 62: mod_base = OTHER; note = 2'-Omethylcytosine phosphorothiorate
  modified_base 63: mod_base = OTHER; note = 2'-Omethylcytosine phosphorothiorate
  modified_base 65: mod_base = OTHER; note = 2'-Omethylguanosine phosphorothiorate
  modified_base 66: mod_base = OTHER; note = 2'-Omethylcytosine
  modified_base 68: mod_base = OTHER; note = 2'-Omethylguanosine
  modified_base 69: mod_base = OTHER; note = 2'-fluoroadenosine
  modified_base 71: mod_base = OTHER; note = 2'-Omethyluridine phosphorothiorate
  modified_base 72: mod_base = OTHER; note = 2'-Omethylcytosine phosphorothiorate
  modified_base 73: mod_base = OTHER; note = 2'-Omethylguanosine phosphorothiorate
  modified_base 74: mod_base = OTHER; note = 2'-fluorocytosine
  modified_base 75: mod_base = OTHER; note = 2'-fluorocytosine phosphorothiorate

SEQ ID NO: 5051 - RNA, 75 nt, synthetic construct; identical to SEQ ID NO: 1045
  source 1..75: mol_type = other RNA
  modified_base 1: mod_base = OTHER; note = 2'-Omethylguanosine phosphorothiorate
  modified_base 2: mod_base = OTHER; note = 2'-Omethylguanosine phosphorothiorate
  modified_base 3: mod_base = OTHER; note = 2'-Omethyluridine
  modified_base 4: mod_base = OTHER; note = 2'-Omethyluridine phosphorothiorate
  modified_base 7: mod_base = OTHER; note = 2'-Omethyladenosine
  modified_base 14: mod_base = OTHER; note = 2'-Omethyladenosine
  modified_base 15: mod_base = OTHER; note = 2'-Omethyladenosine
  modified_base 18: mod_base = OTHER; note = Guanosine phosphorothiorate
  modified_base 45: mod_base = OTHER; note = 2'-Omethylguanosine
  modified_base 50: mod_base = OTHER; note = Guanosine phosphorothiorate
  modified_base 60: mod_base = OTHER; note = Cytosine phosphorothiorate
  modified_base 72: mod_base = OTHER; note = 2'-Omethyluridine
  modified_base 75: mod_base = OTHER; note = 2'-Omethyladenosine

SEQ ID NO: 5052 - RNA, 76 nt, synthetic construct
  source 1..76: mol_type = other RNA
gtgatcgtggcgcaatggatagcgcattggacttcaaattcaaaggttccgggttcgagtcccggcgatcacgcca

SEQ ID NO: 5053 - DNA, 76 bp, synthetic construct; identical to SEQ ID NO: 1924
  source 1..76: mol_type = other DNA
  modified_base 1: mod_base = OTHER; note = 2'-Omethylguanosine phosphorothiorate
  modified_base 2: mod_base = OTHER; note = 2'-Omethylguanosine phosphorothiorate
  modified_base 22: mod_base = OTHER; note = Guanosine phosphorothiorate
  modified_base 23: mod_base = OTHER; note = 2'-O-(2-Methoxyethyl) 5-methylcytosine
  modified_base 37: mod_base = OTHER; note = Adenosine phosphorothiorate
  modified_base 47: mod_base = OTHER; note = 2'-Omethyluridine
  modified_base 64: mod_base = OTHER; note = Guanosine phosphorothiorate
  modified_base 73: mod_base = OTHER; note = Guanosine phosphorothiorate
  modified_base 74: mod_base = OTHER; note = Cytosine phosphorothiorate
  modified_base 75: mod_base = OTHER; note = 2'-Omethylcytosine phosphorothiorate
  modified_base 76: mod_base = OTHER; note = 2'-Omethyladenosine
  misc_feature 1..11: note = RNA
  misc_feature 12: note = DNA
  misc_feature 13..76: note = RNA

SEQ ID NO: 5054 - RNA, 85 nt, synthetic construct; identical to SEQ ID NO: 3288
  source 1..85: mol_type = other RNA
  modified_base 1: mod_base = OTHER; note = 2'-Omethylcytosine
  modified_base 16: mod_base = OTHER; note = 2'-fluoroguanosine phosphorothiorate
  modified_base 25: mod_base = OTHER; note = 2'-fluoroguanosine
  modified_base 28: mod_base = OTHER; note = 2'-fluoroguanosine
  modified_base 30: mod_base = OTHER; note = 2'-fluoroadenosine
  modified_base 37: mod_base = OTHER; note = 2'-Omethyladenosine
  modified_base 46: mod_base = OTHER; note = 2'-fluoroadenosine phosphorothiorate
  modified_base 48: mod_base = OTHER; note = 2'-Omethyladenosine
  modified_base 51: mod_base = OTHER; note = 2'-Omethyluridine
  modified_base 53: mod_base = OTHER; note = 2'-Omethyluridine
  modified_base 55: mod_base = OTHER; note = Cytosine phosphorothiorate
  modified_base 57: mod_base = OTHER; note = 2'-Omethylcytosine
  modified_base 69: mod_base = OTHER; note = 2'-fluorocytosine phosphorothiorate
  modified_base 84: mod_base = OTHER; note = Cytosine phosphorothiorate
  modified_base 85: mod_base = OTHER; note = 2'-fluoroadenosine

SEQ ID NO: 5055 - RNA, 75 nt, synthetic construct; identical to SEQ ID NO: 3311
  source 1..75: mol_type = other RNA
  modified_base 1: mod_base = OTHER; note = 2'-Omethylguanosine phosphorothiorate
  modified_base 2: mod_base = OTHER; note = 2'-Omethylguanosine
  modified_base 4: mod_base = OTHER; note = 2'-fluorouridine phosphorothiorate
  modified_base 9: mod_base = OTHER; note = 2'-fluoroguanosine
  modified_base 10: mod_base = OTHER; note = 2'-fluoroguanosine phosphorothiorate
  modified_base 22: mod_base = OTHER; note = Guanosine phosphorothiorate
  modified_base 26: mod_base = OTHER; note = 2'-Omethyluridine
  modified_base 28: mod_base = OTHER; note = 2'-fluorouridine
  modified_base 36: mod_base = OTHER; note = 2'-fluoroadenosine phosphorothiorate
  modified_base 46: mod_base = OTHER; note = 2'-fluoroadenosine
  modified_base 56: mod_base = OTHER; note = 2'-Omethylguanosine
  modified_base 62: mod_base = OTHER; note = Cytosine phosphorothiorate
  modified_base 63: mod_base = OTHER; note = 2'-fluoroguanosine
  modified_base 66: mod_base = OTHER; note = Guanosine phosphorothiorate
  modified_base 71: mod_base = OTHER; note = 2'-fluorocytosine phosphorothiorate

SEQ ID NO: 5056 - RNA, 85 nt, synthetic construct; identical to SEQ ID NO: 3288
  source 1..85: mol_type = other RNA
  modified_base 1: mod_base = OTHER; note = 2'-Omethylcytosine
  modified_base 11: mod_base = OTHER; note = Cytosine phosphorothiorate
  modified_base 18: mod_base = OTHER; note = 2'-fluorouridine phosphorothiorate
  modified_base 20: mod_base = OTHER; note = Adenosine phosphorothiorate
  modified_base 25: mod_base = OTHER; note = 2'-Omethylguanosine
  modified_base 27: mod_base = OTHER; note = 2'-fluorouridine
  modified_base 29: mod_base = OTHER; note = 2'-fluoroguanosine
  modified_base 33: mod_base = OTHER; note = 2'-fluorouridine
  modified_base 34: mod_base = OTHER; note = Cytosine phosphorothiorate
  modified_base 37: mod_base = OTHER; note = 2'-fluoroadenosine phosphorothiorate
  modified_base 43: mod_base = OTHER; note = Uridine phosphorothiorate
  modified_base 52: mod_base = OTHER; note = Guanosine phosphorothiorate
  modified_base 57: mod_base = OTHER; note = 2'-Omethylcytosine
  modified_base 59: mod_base = OTHER; note = 2'-Omethyluridine
  modified_base 73: mod_base = OTHER; note = 2'-fluoroadenosine phosphorothiorate
  modified_base 83: mod_base = OTHER; note = Cytosine phosphorothiorate
  modified_base 85: mod_base = OTHER; note = 2'-fluoroadenosine

SEQ ID NO: 5057 - RNA, 74 nt, synthetic construct; identical to SEQ ID NO: 766
  source 1..74: mol_type = other RNA
  modified_base 1: mod_base = OTHER; note = 2'-Omethylguanosine phosphorothiorate
  modified_base 2: mod_base = OTHER; note = 2'-Omethylguanosine
  modified_base 73: mod_base = OTHER; note = 2'-Omethylguanosine

SEQ ID NO: 5058 - RNA, 76 nt, synthetic construct; identical to SEQ ID NO: 3318
  source 1..76: mol_type = other RNA
  modified_base 1: mod_base = OTHER; note = 2'-Omethylcytosine phosphorothiorate
  modified_base 2: mod_base = OTHER; note = 2'-Omethylcytosine phosphorothiorate
  modified_base 52: mod_base = OTHER; note = Guanosine phosphorothiorate
  modified_base 74: mod_base = OTHER; note = Cytosine phosphorothiorate
  modified_base 75: mod_base = OTHER; note = 2'-Omethylcytosine

SEQ ID NO: 5059 - RNA, 76 nt, synthetic construct; identical to SEQ ID NO: 625
  source 1..76: mol_type = other RNA
  modified_base 1: mod_base = OTHER; note = 2'-Omethylguanosine
  modified_base 2: mod_base = OTHER; note = 2'-Omethylguanosine
  modified_base 3: mod_base = OTHER; note = 2'-Omethylcytosine
  modified_base 4: mod_base = OTHER; note = 2'-Omethyluridine
  modified_base 5: mod_base = OTHER; note = 2'-Omethylcytosine
  modified_base 6: mod_base = OTHER; note = 2'-Omethylcytosine
  modified_base 14: mod_base = OTHER; note = 2'-Omethyladenosine
  modified_base 15: mod_base = OTHER; note = 2'-fluoroadenosine
  modified_base 16: mod_base = OTHER; note = 2'-Omethyluridine
  modified_base 17: mod_base = OTHER; note = 2'-Omethylguanosine
  modified_base 18: mod_base = OTHER; note = 2'-Omethylguanosine
  modified_base 19: mod_base = OTHER; note = 2'-fluoroadenosine
  modified_base 20: mod_base = OTHER; note = 2'-Omethyluridine
  modified_base 21: mod_base = OTHER; note = 2'-fluoroadenosine
  modified_base 22: mod_base = OTHER; note = 2'-Omethylguanosine
  modified_base 23: mod_base = OTHER; note = 2'-Omethylcytosine
  modified_base 24: mod_base = OTHER; note = 2'-Omethylguanosine
  modified_base 25: mod_base = OTHER; note = 2'-Omethylcytosine
  modified_base 54: mod_base = OTHER; note = Uridine phosphorothiorate
  modified_base 55: mod_base = OTHER; note = Uridine phosphorothiorate
  modified_base 56: mod_base = OTHER; note = Cytosine phosphorothiorate
  modified_base 57: mod_base = OTHER; note = Guanosine phosphorothiorate
  modified_base 73: mod_base = OTHER; note = 2'-Omethylguanosine

SEQ ID NO: 5060 - RNA, 76 nt, synthetic construct; identical to SEQ ID NO: 625
  source 1..76: mol_type = other RNA
  modified_base 1: mod_base = OTHER; note = Guanosine phosphorothiorate
  modified_base 5: mod_base = OTHER; note = 2'-Omethylcytosine phosphorothiorate
  modified_base 10: mod_base = OTHER; note = 2'-fluoroguanosine phosphorothiorate
  modified_base 11: mod_base = OTHER; note = 2'-Omethylcytosine phosphorothiorate
  modified_base 12: mod_base = OTHER; note = Guanosine phosphorothiorate
  modified_base 14: mod_base = OTHER; note = 2'-fluoroadenosine
  modified_base 17: mod_base = OTHER; note = 2'-Omethylguanosine phosphorothiorate
  modified_base 22: mod_base = OTHER; note = Guanosine phosphorothiorate
  modified_base 23: mod_base = OTHER; note = 2'-fluorocytosine
  modified_base 24: mod_base = OTHER; note = Guanosine phosphorothiorate
  modified_base 25: mod_base = OTHER; note = 2'-Omethylcytosine
  modified_base 27: mod_base = OTHER; note = 2'-fluorouridine
  modified_base 28: mod_base = OTHER; note = Uridine phosphorothiorate
  modified_base 29: mod_base = OTHER; note = 2'-Omethylguanosine
  modified_base 30: mod_base = OTHER; note = Guanosine phosphorothiorate
  modified_base 31: mod_base = OTHER; note = 2'-fluoroadenosine
  modified_base 33: mod_base = OTHER; note = 2'-fluorouridine phosphorothiorate
  modified_base 34: mod_base = OTHER; note = 2'-Omethyluridine
  modified_base 40: mod_base = OTHER; note = 2'-fluorouridine
  modified_base 43: mod_base = OTHER; note = 2'-fluoroadenosine
  modified_base 44: mod_base = OTHER; note = 2'-Omethyladenosine
  modified_base 52: mod_base = OTHER; note = 2'-Omethylguanosine
  modified_base 53: mod_base = OTHER; note = 2'-fluoroguanosine
  modified_base 54: mod_base = OTHER; note = Uridine phosphorothiorate
  modified_base 57: mod_base = OTHER; note = 2'-Omethylguanosine
  modified_base 59: mod_base = OTHER; note = 2'-Omethylguanosine
  modified_base 63: mod_base = OTHER; note = Cytosine phosphorothiorate
  modified_base 66: mod_base = OTHER; note = 2'-Omethylcytosine
  modified_base 67: mod_base = OTHER; note = 2'-fluoroguanosine
  modified_base 70: mod_base = OTHER; note = Guanosine phosphorothiorate
  modified_base 71: mod_base = OTHER; note = Uridine phosphorothiorate
  modified_base 72: mod_base = OTHER; note = 2'-Omethylcytosine
  modified_base 73: mod_base = OTHER; note = 2'-fluoroguanosine
  modified_base 74: mod_base = OTHER; note = 2'-fluorocytosine phosphorothiorate
  modified_base 75: mod_base = OTHER; note = 2'-Omethylcytosine

SEQ ID NO: 5061 - RNA, 85 nt, synthetic construct; identical to SEQ ID NO: 3297
  source 1..85: mol_type = other RNA
  modified_base 1: mod_base = OTHER; note = 2'-Omethylguanosine phosphorothiorate
  modified_base 15: mod_base = OTHER; note = 2'-Omethylguanosine
  modified_base 26: mod_base = OTHER; note = 2'-fluoroguanosine
  modified_base 46: mod_base = OTHER; note = 2'-Omethylguanosine phosphorothiorate
  modified_base 72: mod_base = OTHER; note = Uridine phosphorothiorate
  modified_base 73: mod_base = OTHER; note = 2'-fluoroguanosine
  modified_base 82: mod_base = OTHER; note = 2'-Omethylguanosine

SEQ ID NO: 5062 - RNA, 85 nt, synthetic construct; identical to SEQ ID NO: 3297
  source 1..85: mol_type = other RNA
  modified_base 1: mod_base = OTHER; note = 2'-Omethylguanosine phosphorothiorate
  modified_base 2: mod_base = OTHER; note = 2'-Omethylcytosine phosphorothiorate
  modified_base 61: mod_base = OTHER; note = Guanosine phosphorothiorate
  modified_base 83: mod_base = OTHER; note = Cytosine phosphorothiorate
  modified_base 84: mod_base = OTHER; note = 2'-Omethylcytosine

SEQ ID NO: 5063 - RNA, 76 nt, synthetic construct; identical to SEQ ID NO: 625
  source 1..76: mol_type = other RNA
  modified_base 1: mod_base = OTHER; note = 2'-Omethylguanosine
  modified_base 16: mod_base = OTHER; note = 2'-Omethyluridine
  modified_base 33: mod_base = OTHER; note = 2'-O-(2-Methoxyethyl) thymine

SEQ ID NO: 5064 - RNA, 85 nt, synthetic construct; identical to SEQ ID NO: 3317
  source 1..85: mol_type = other RNA
  modified_base 1: mod_base = OTHER; note = 2'-Omethylguanosine phosphorothiorate
  modified_base 2: mod_base = OTHER; note = 2'-Omethylcytosine
  modified_base 4: mod_base = OTHER; note = 2'-Omethylguanosine
  modified_base 15: mod_base = OTHER; note = 2'-Omethylguanosine
  modified_base 17: mod_base = OTHER; note = Guanosine phosphorothiorate
  modified_base 27: mod_base = OTHER; note = 2'-fluorouridine
  modified_base 58: mod_base = OTHER; note = 2'-Omethylguanosine phosphorothiorate
  modified_base 62: mod_base = OTHER; note = 2'-Omethylguanosine

SEQ ID NO: 5065 - RNA, 74 nt, synthetic construct; identical to SEQ ID NO: 3293
  source 1..74: mol_type = other RNA
  modified_base 1: mod_base = OTHER; note = 2'-fluoroadenosine phosphorothiorate
  modified_base 2: mod_base = OTHER; note = 2'-fluorocytosine
  modified_base 6: mod_base = OTHER; note = 2'-fluoroguanosine
  modified_base 8: mod_base = OTHER; note = Guanosine phosphorothiorate
  modified_base 9: mod_base = OTHER; note = 2'-fluoroguanosine
  modified_base 12: mod_base = OTHER; note = 2'-Omethylcytosine
  modified_base 26: mod_base = OTHER; note = 2'-fluorocytosine
  modified_base 37: mod_base = OTHER; note = 2'-fluorouridine
  modified_base 43: mod_base = OTHER; note = 2'-fluoroguanosine
  modified_base 44: mod_base = OTHER; note = Guanosine phosphorothiorate
  modified_base 46: mod_base = OTHER; note = Uridine phosphorothiorate
  modified_base 48: mod_base = OTHER; note = Cytosine phosphorothiorate
  modified_base 50: mod_base = OTHER; note = Uridine phosphorothiorate
  modified_base 52: mod_base = OTHER; note = 2'-fluorouridine
  modified_base 73: mod_base = OTHER; note = 2'-Omethylcytosine phosphorothiorate

SEQ ID NO: 5066 - RNA, 85 nt, synthetic construct; identical to SEQ ID NO: 3317
  source 1..85: mol_type = other RNA
  modified_base 1: mod_base = OTHER; note = 2'-Omethylguanosine phosphorothiorate
  modified_base 2: mod_base = OTHER; note = Cytosine phosphorothiorate
  modified_base 3: mod_base = OTHER; note = 2'-Omethyluridine phosphorothiorate
  modified_base 4: mod_base = OTHER; note = 2'-Omethylguanosine phosphorothiorate
  modified_base 8: mod_base = OTHER; note = 2'-fluorouridine
  modified_base 13: mod_base = OTHER; note = 2'-fluoroguanosine
  modified_base 14: mod_base = OTHER; note = 2'-fluoroadenosine
  modified_base 18: mod_base = OTHER; note = 2'-Omethylguanosine
  modified_base 21: mod_base = OTHER; note = Adenosine phosphorothiorate
  modified_base 26: mod_base = OTHER; note = 2'-Omethylguanosine
  modified_base 27: mod_base = OTHER; note = 2'-fluorouridine
  modified_base 28: mod_base = OTHER; note = 2'-Omethyluridine
  modified_base 33: mod_base = OTHER; note = 2'-fluorouridine
  modified_base 44: mod_base = OTHER; note = 2'-Omethyluridine
  modified_base 46: mod_base = OTHER; note = 2'-Omethylguanosine
  modified_base 52: mod_base = OTHER; note = 2'-fluorocytosine
  modified_base 55: mod_base = OTHER; note = 2'-Omethylcytosine phosphorothiorate
  modified_base 59: mod_base = OTHER; note = 2'-Omethylcytosine phosphorothiorate
  modified_base 61: mod_base = OTHER; note = 2'-Omethylguanosine
  modified_base 66: mod_base = OTHER; note = Guanosine phosphorothiorate
  modified_base 72: mod_base = OTHER; note = 2'-fluorouridine
  modified_base 73: mod_base = OTHER; note = 2'-fluoroguanosine phosphorothiorate
  modified_base 82: mod_base = OTHER; note = 2'-fluoroguanosine
  modified_base 83: mod_base = OTHER; note = Cytosine phosphorothiorate

SEQ ID NO: 5067 - RNA, 85 nt, synthetic construct; identical to SEQ ID NO: 3310
  source 1..85: mol_type = other RNA
  modified_base 1: mod_base = OTHER; note = 2'-fluorocytosine phosphorothiorate
  modified_base 11: mod_base = OTHER; note = Cytosine phosphorothiorate
  modified_base 17: mod_base = OTHER; note = 2'-Omethylguanosine
  modified_base 26: mod_base = OTHER; note = 2'-Omethyluridine
  modified_base 47: mod_base = OTHER; note = 2'-Omethylcytosine
  modified_base 59: mod_base = OTHER; note = 2'-Omethyluridine
  modified_base 77: mod_base = OTHER; note = Cytosine phosphorothiorate
  modified_base 84: mod_base = OTHER; note = 2'-fluorocytosine

SEQ ID NO: 5068 - RNA, 76 nt, synthetic construct; identical to SEQ ID NO: 3329
  source 1..76: mol_type = other RNA
  modified_base 1: mod_base = OTHER; note = 2'-Omethylguanosine
  modified_base 2: mod_base = OTHER; note = 2'-Omethylguanosine
  modified_base 3: mod_base = OTHER; note = 2'-Omethylcytosine
  modified_base 4: mod_base = OTHER; note = 2'-Omethylcytosine
  modified_base 5: mod_base = OTHER; note = 2'-Omethylcytosine
  modified_base 6: mod_base = OTHER; note = 2'-Omethylcytosine
  modified_base 10: mod_base = OTHER; note = 2'-Omethylguanosine
  modified_base 11: mod_base = OTHER; note = 2'-Omethylcytosine
  modified_base 12: mod_base = OTHER; note = 2'-Omethylguanosine
  modified_base 13: mod_base = OTHER; note = 2'-Omethylcytosine
  modified_base 16: mod_base = OTHER; note = 2'-Omethyluridine
  modified_base 17: mod_base = OTHER; note = 2'-Omethylguanosine
  modified_base 18: mod_base = OTHER; note = 2'-Omethylguanosine
  modified_base 20: mod_base = OTHER; note = 2'-Omethyluridine
  modified_base 25: mod_base = OTHER; note = 2'-Omethylcytosine
  modified_base 33: mod_base = OTHER; note = 2'-fluorouridine
  modified_base 35: mod_base = OTHER; note = Cytosine phosphorothiorate
  modified_base 37: mod_base = OTHER; note = Adenosine phosphorothiorate
  modified_base 38: mod_base = OTHER; note = Adenosine phosphorothiorate
  modified_base 41: mod_base = OTHER; note = 2'-fluorocytosine
  modified_base 42: mod_base = OTHER; note = 2'-Omethyladenosine
  modified_base 43: mod_base = OTHER; note = 2'-Omethyladenosine
  modified_base 44: mod_base = OTHER; note = 2'-fluoroadenosine
  modified_base 49: mod_base = OTHER; note = 2'-Omethylcytosine
  modified_base 50: mod_base = OTHER; note = 2'-Omethylcytosine
  modified_base 52: mod_base = OTHER; note = 2'-Omethylguanosine
  modified_base 54: mod_base = OTHER; note = 2'-Omethyluridine
  modified_base 55: mod_base = OTHER; note = Uridine phosphorothiorate
  modified_base 56: mod_base = OTHER; note = 2'-Omethylcytosine
  modified_base 57: mod_base = OTHER; note = 2'-fluoroguanosine
  modified_base 59: mod_base = OTHER; note = 2'-Omethylguanosine
  modified_base 61: mod_base = OTHER; note = 2'-Omethylcytosine
  modified_base 65: mod_base = OTHER; note = 2'-Omethylguanosine
  modified_base 73: mod_base = OTHER; note = 2'-Omethylguanosine

SEQ ID NO: 5069 - RNA, 85 nt, synthetic construct; identical to SEQ ID NO: 3297
  source 1..85: mol_type = other RNA
  modified_base 1: mod_base = OTHER; note = 2'-Omethylguanosine phosphorothiorate
  modified_base 2: mod_base = OTHER; note = 2'-Omethylcytosine
  modified_base 17: mod_base = OTHER; note = 2'-fluoroguanosine phosphorothiorate
  modified_base 34: mod_base = OTHER; note = 2'-fluorouridine
  modified_base 47: mod_base = OTHER; note = 2'-Omethylguanosine phosphorothiorate
  modified_base 55: mod_base = OTHER; note = 2'-fluorocytosine
  modified_base 61: mod_base = OTHER; note = 2'-Omethylguanosine phosphorothiorate
  modified_base 74: mod_base = OTHER; note = Cytosine phosphorothiorate
  modified_base 82: mod_base = OTHER; note = 2'-Omethylguanosine

SEQ ID NO: 5070 - RNA, 75 nt, synthetic construct; identical to SEQ ID NO: 3306
  source 1..75: mol_type = other RNA
  modified_base 18: mod_base = OTHER; note = 2'-Omethylguanosine
  modified_base 38: mod_base = OTHER; note = 2'-Omethyluridine

SEQ ID NO: 5071 - RNA, 75 nt, synthetic construct; identical to SEQ ID NO: 1045
  source 1..75: mol_type = other RNA
  modified_base 11: mod_base = OTHER; note = 2'-fluorouridine
  modified_base 23: mod_base = OTHER; note = 2'-fluorocytosine
  modified_base 28: mod_base = OTHER; note = 2'-Omethyluridine
  modified_base 29: mod_base = OTHER; note = 2'-fluoroguanosine
  modified_base 42: mod_base = OTHER; note = 2'-Omethyladenosine
  modified_base 53: mod_base = OTHER; note = 2'-fluorouridine phosphorothiorate
  modified_base 54: mod_base = OTHER; note = 2'-Omethyluridine
  modified_base 56: mod_base = OTHER; note = Guanosine phosphorothiorate
  modified_base 64: mod_base = OTHER; note = 2'-fluoroguanosine
  modified_base 65: mod_base = OTHER; note = 2'-fluorouridine
  modified_base 72: mod_base = OTHER; note = Uridine phosphorothiorate
  modified_base 73: mod_base = OTHER; note = Cytosine phosphorothiorate
  modified_base 75: mod_base = OTHER; note = 2'-fluoroadenosine

SEQ ID NO: 5072 - RNA, 76 nt, synthetic construct; identical to SEQ ID NO: 625
  source 1..76: mol_type = other RNA
  modified_base 1: mod_base = OTHER; note = 2'-Omethylguanosine phosphorothiorate
  modified_base 2: mod_base = OTHER; note = 2'-Omethylguanosine
  modified_base 13: mod_base = OTHER; note = 2'-Omethylcytosine
  modified_base 17: mod_base = OTHER; note = 2'-Omethylguanosine
  modified_base 33: mod_base = OTHER; note = 2'-fluorouridine
  modified_base 35: mod_base = OTHER; note = Cytosine phosphorothiorate
  modified_base 37: mod_base = OTHER; note = Adenosine phosphorothiorate
  modified_base 38: mod_base = OTHER; note = Adenosine phosphorothiorate
  modified_base 52: mod_base = OTHER; note = 2'-Omethylguanosine
  modified_base 62: mod_base = OTHER; note = 2'-Omethylcytosine
  modified_base 63: mod_base = OTHER; note = 2'-fluorocytosine
  modified_base 73: mod_base = OTHER; note = 2'-Omethylguanosine
  modified_base 75: mod_base = OTHER; note = 2'-fluorocytosine phosphorothiorate

SEQ ID NO: 5073 - RNA, 74 nt, synthetic construct; identical to SEQ ID NO: 3293
  source 1..74: mol_type = other RNA
  modified_base 1: mod_base = OTHER; note = 2'-fluoroadenosine
  modified_base 2: mod_base = OTHER; note = 2'-fluorocytosine
  modified_base 4: mod_base = OTHER; note = Uridine phosphorothiorate
  modified_base 6: mod_base = OTHER; note = 2'-fluoroguanosine
  modified_base 8: mod_base = OTHER; note = Guanosine phosphorothiorate
  modified_base 9: mod_base = OTHER; note = 2'-fluoroguanosine
  modified_base 25: mod_base = OTHER; note = Uridine phosphorothiorate
  modified_base 26: mod_base = OTHER; note = 2'-fluorocytosine
  modified_base 33: mod_base = OTHER; note = 2'-Omethyluridine
  modified_base 39: mod_base = OTHER; note = 2'-fluoroadenosine phosphorothiorate
  modified_base 48: mod_base = OTHER; note = 2'-fluorocytosine phosphorothiorate
  modified_base 50: mod_base = OTHER; note = Uridine phosphorothiorate
  modified_base 62: mod_base = OTHER; note = Guanosine phosphorothiorate
  modified_base 72: mod_base = OTHER; note = 2'-fluorocytosine
  modified_base 73: mod_base = OTHER; note = Cytosine phosphorothiorate

SEQ ID NO: 5074 - RNA, 85 nt, synthetic construct; identical to SEQ ID NO: 3297
  source 1..85: mol_type = other RNA
  modified_base 1: mod_base = OTHER; note = 2'-Omethylguanosine phosphorothiorate
  modified_base 2: mod_base = OTHER; note = 2'-Omethylcytosine
  modified_base 3: mod_base = OTHER; note = 2'-Omethyluridine
  modified_base 4: mod_base = OTHER; note = 2'-Omethylguanosine
  modified_base 5: mod_base = OTHER; note = 2'-Omethyluridine
  modified_base 6: mod_base = OTHER; note = 2'-Omethylguanosine
  modified_base 58: mod_base = OTHER; note = 2'-Omethylguanosine
  modified_base 59: mod_base = OTHER; note = 2'-Omethylcytosine
  modified_base 60: mod_base = OTHER; note = 2'-Omethyladenosine
  modified_base 61: mod_base = OTHER; note = 2'-Omethylguanosine
  modified_base 62: mod_base = OTHER; note = 2'-Omethylguanosine
  modified_base 70: mod_base = OTHER; note = 2'-Omethylcytosine
  modified_base 71: mod_base = OTHER; note = 2'-Omethylcytosine
  modified_base 72: mod_base = OTHER; note = 2'-fluorouridine
  modified_base 73: mod_base = OTHER; note = 2'-Omethylguanosine
  modified_base 74: mod_base = OTHER; note = 2'-Omethylcytosine
  modified_base 75: mod_base = OTHER; note = 2'-Omethyluridine
  modified_base 76: mod_base = OTHER; note = 2'-Omethylcytosine
  modified_base 77: mod_base = OTHER; note = 2'-Omethyladenosine
  modified_base 78: mod_base = OTHER; note = 2'-Omethylcytosine
  modified_base 80: mod_base = OTHER; note = 2'-Omethylguanosine
  modified_base 81: mod_base = OTHER; note = 2'-Omethylcytosine

SEQ ID NO: 5075 - RNA, 76 nt, synthetic construct; identical to SEQ ID NO: 625
  source 1..76: mol_type = other RNA
  modified_base 4: mod_base = OTHER; note = Uridine phosphorothiorate
  modified_base 5: mod_base = OTHER; note = 2'-Omethylcytosine
  modified_base 6: mod_base = OTHER; note = 2'-Omethylcytosine phosphorothiorate
  modified_base 9: mod_base = OTHER; note = Guanosine phosphorothiorate
  modified_base 10: mod_base = OTHER; note = 2'-fluoroguanosine
  modified_base 11: mod_base = OTHER; note = 2'-fluorocytosine
  modified_base 12: mod_base = OTHER; note = 2'-fluoroguanosine
  modified_base 13: mod_base = OTHER; note = 2'-Omethylcytosine
  modified_base 15: mod_base = OTHER; note = 2'-fluoroadenosine
  modified_base 18: mod_base = OTHER; note = 2'-Omethylguanosine
  modified_base 20: mod_base = OTHER; note = 2'-Omethyluridine phosphorothiorate
  modified_base 25: mod_base = OTHER; note = Cytosine phosphorothiorate
  modified_base 26: mod_base = OTHER; note = 2'-fluoroadenosine
  modified_base 28: mod_base = OTHER; note = Uridine phosphorothiorate
  modified_base 29: mod_base = OTHER; note = 2'-Omethylguanosine phosphorothiorate
  modified_base 30: mod_base = OTHER; note = 2'-Omethylguanosine
  modified_base 31: mod_base = OTHER; note = 2'-fluoroadenosine
  modified_base 33: mod_base = OTHER; note = 2'-fluorouridine
  modified_base 38: mod_base = OTHER; note = 2'-Omethyladenosine
  modified_base 49: mod_base = OTHER; note = 2'-fluorocytosine
  modified_base 50: mod_base = OTHER; note = Cytosine phosphorothiorate
  modified_base 52: mod_base = OTHER; note = Guanosine phosphorothiorate
  modified_base 53: mod_base = OTHER; note = 2'-Omethylguanosine
  modified_base 57: mod_base = OTHER; note = 2'-Omethylguanosine phosphorothiorate
  modified_base 59: mod_base = OTHER; note = 2'-Omethylguanosine
  modified_base 60: mod_base = OTHER; note = 2'-Omethyluridine
  modified_base 62: mod_base = OTHER; note = 2'-fluorocytosine
  modified_base 63: mod_base = OTHER; note = Cytosine phosphorothiorate
  modified_base 64: mod_base = OTHER; note = 2'-Omethylguanosine
  modified_base 67: mod_base = OTHER; note = Guanosine phosphorothiorate
  modified_base 69: mod_base = OTHER; note = 2'-Omethyladenosine
  modified_base 71: mod_base = OTHER; note = 2'-fluorouridine
  modified_base 75: mod_base = OTHER; note = 2'-Omethylcytosine
  modified_base 76: mod_base = OTHER; note = 2'-fluoroadenosine

SEQ ID NO: 5076 - RNA, 76 nt, synthetic construct; identical to SEQ ID NO: 3289
  source 1..76: mol_type = other RNA
  modified_base 1: mod_base = OTHER; note = 2'-Omethylguanosine phosphorothiorate
  modified_base 2: mod_base = OTHER; note = 2'-Omethylcytosine phosphorothiorate
  modified_base 14: mod_base = OTHER; note = 2'-Omethyladenosine
  modified_base 18: mod_base = OTHER; note = 2'-Omethylguanosine
  modified_base 19: mod_base = OTHER; note = 2'-Omethylguanosine
  modified_base 22: mod_base = OTHER; note = 2'-Omethylguanosine
  modified_base 25: mod_base = OTHER; note = 2'-Omethylcytosine
  modified_base 27: mod_base = OTHER; note = 2'-Omethyluridine
  modified_base 33: mod_base = OTHER; note = 2'-fluorouridine
  modified_base 41: mod_base = OTHER; note = 2'-Omethyluridine phosphorothiorate
  modified_base 44: mod_base = OTHER; note = 2'-Omethylguanosine phosphorothiorate
  modified_base 45: mod_base = OTHER; note = 2'-Omethylguanosine
  modified_base 46: mod_base = OTHER; note = 2'-fluoroguanosine
  modified_base 47: mod_base = OTHER; note = 2'-fluorouridine
  modified_base 48: mod_base = OTHER; note = 2'-fluorocytosine
  modified_base 52: mod_base = OTHER; note = 2'-Omethylguanosine
  modified_base 55: mod_base = OTHER; note = Uridine phosphorothiorate
  modified_base 71: mod_base = OTHER; note = 2'-Omethylguanosine
  modified_base 73: mod_base = OTHER; note = 2'-Omethylguanosine

SEQ ID NO: 5077 - RNA, 76 nt, synthetic construct; identical to SEQ ID NO: 625
  source 1..76: mol_type = other RNA
  modified_base 4: mod_base = OTHER; note = 2'-Omethyluridine
  modified_base 8: mod_base = OTHER; note = Uridine phosphorothiorate
  modified_base 10: mod_base = OTHER; note = Guanosine phosphorothiorate
  modified_base 11: mod_base = OTHER; note = 2'-Omethylcytosine
  modified_base 15: mod_base = OTHER; note = 2'-Omethyladenosine
  modified_base 16: mod_base = OTHER; note = 2'-Omethyluridine
  modified_base 18: mod_base = OTHER; note = 2'-Omethylguanosine
  modified_base 22: mod_base = OTHER; note = 2'-fluoroguanosine
  modified_base 23: mod_base = OTHER; note = 2'-fluorocytosine
  modified_base 27: mod_base = OTHER; note = 2'-fluorouridine phosphorothiorate
  modified_base 33: mod_base = OTHER; note = Uridine phosphorothiorate
  modified_base 34: mod_base = OTHER; note = 2'-Omethyluridine phosphorothiorate
  modified_base 36: mod_base = OTHER; note = Adenosine phosphorothiorate
  modified_base 37: mod_base = OTHER; note = Adenosine phosphorothiorate
  modified_base 38: mod_base = OTHER; note = 2'-fluoroadenosine phosphorothiorate
  modified_base 39: mod_base = OTHER; note = 2'-fluorouridine
  modified_base 40: mod_base = OTHER; note = 2'-fluorouridine phosphorothiorate
  modified_base 42: mod_base = OTHER; note = 2'-fluoroadenosine
  modified_base 43: mod_base = OTHER; note = 2'-Omethyladenosine
  modified_base 44: mod_base = OTHER; note = 2'-Omethyladenosine
  modified_base 45: mod_base = OTHER; note = 2'-Omethylguanosine phosphorothiorate
  modified_base 46: mod_base = OTHER; note = 2'-fluoroguanosine
  modified_base 47: mod_base = OTHER; note = Uridine phosphorothiorate
  modified_base 48: mod_base = OTHER; note = 2'-fluorouridine phosphorothiorate
  modified_base 49: mod_base = OTHER; note = 2'-fluorocytosine
  modified_base 58: mod_base = OTHER; note = 2'-fluoroadenosine
  modified_base 62: mod_base = OTHER; note = 2'-fluorocytosine
  modified_base 63: mod_base = OTHER; note = 2'-fluorocytosine
  modified_base 64: mod_base = OTHER; note = Guanosine phosphorothiorate
  modified_base 65: mod_base = OTHER; note = 2'-Omethylguanosine
  modified_base 67: mod_base = OTHER; note = Guanosine phosphorothiorate
  modified_base 68: mod_base = OTHER; note = 2'-Omethylguanosine
  modified_base 71: mod_base = OTHER; note = Uridine phosphorothiorate
  modified_base 72: mod_base = OTHER; note = 2'-fluorocytosine
  modified_base 73: mod_base = OTHER; note = 2'-fluoroguanosine
  modified_base 74: mod_base = OTHER; note = 2'-fluorocytosine phosphorothiorate
  modified_base 75: mod_base = OTHER; note = 2'-fluorocytosine

SEQ ID NO: 5078 - RNA, 76 nt, synthetic construct; identical to SEQ ID NO: 3318
  source 1..76: mol_type = other RNA
  modified_base 43: mod_base = OTHER; note = 2'-Omethyluridine
  modified_base 52: mod_base = OTHER; note = 2'-Omethylguanosine

SEQ ID NO: 5079 - RNA, 74 nt, synthetic construct; identical to SEQ ID NO: 3293
  source 1..74: mol_type = other RNA
  modified_base 1: mod_base = OTHER; note = 2'-Omethyladenosine phosphorothiorate
  modified_base 2: mod_base = OTHER; note = Cytosine phosphorothiorate
  modified_base 6: mod_base = OTHER; note = 2'-fluoroguanosine
  modified_base 28: mod_base = OTHER; note = Guanosine phosphorothiorate
  modified_base 43: mod_base = OTHER; note = 2'-fluoroguanosine
  modified_base 48: mod_base = OTHER; note = 2'-fluorocytosine
  modified_base 56: mod_base = OTHER; note = Adenosine phosphorothiorate
  modified_base 62: mod_base = OTHER; note = 2'-fluoroguanosine
  modified_base 73: mod_base = OTHER; note = Cytosine phosphorothiorate

SEQ ID NO: 5080 - RNA, 85 nt, synthetic construct; identical to SEQ ID NO: 3297
  source 1..85: mol_type = other RNA
  modified_base 1: mod_base = OTHER; note = 2'-Omethylguanosine phosphorothiorate
  modified_base 2: mod_base = OTHER; note = 2'-Omethylcytosine phosphorothiorate
  modified_base 12: mod_base = OTHER; note = Cytosine phosphorothiorate
  modified_base 22: mod_base = OTHER; note = 2'-fluoroadenosine
  modified_base 26: mod_base = OTHER; note = Guanosine phosphorothiorate
  modified_base 27: mod_base = OTHER; note = Uridine phosphorothiorate
  modified_base 72: mod_base = OTHER; note = 2'-fluorouridine
  modified_base 83: mod_base = OTHER; note = Cytosine phosphorothiorate
  modified_base 84: mod_base = OTHER; note = 2'-Omethylcytosine phosphorothiorate
  modified_base 85: mod_base = OTHER; note = 2'-Omethyladenosine

SEQ ID NO: 5081 - RNA, 76 nt, synthetic construct; identical to SEQ ID NO: 625
  source 1..76: mol_type = other RNA
  modified_base 1: mod_base = OTHER; note = 2'-Omethylguanosine
  modified_base 2: mod_base = OTHER; note = 2'-Omethylguanosine
  modified_base 3: mod_base = OTHER; note = 2'-Omethylcytosine
  modified_base 5: mod_base = OTHER; note = 2'-Omethylcytosine
  modified_base 6: mod_base = OTHER; note = 2'-fluorocytosine
  modified_base 7: mod_base = OTHER; note = Guanosine phosphorothiorate
  modified_base 9: mod_base = OTHER; note = Guanosine phosphorothiorate
  modified_base 10: mod_base = OTHER; note = 2'-fluoroguanosine phosphorothiorate
  modified_base 12: mod_base = OTHER; note = Guanosine phosphorothiorate
  modified_base 13: mod_base = OTHER; note = 2'-fluorocytosine phosphorothiorate
  modified_base 14: mod_base = OTHER; note = 2'-fluoroadenosine
  modified_base 20: mod_base = OTHER; note = 2'-fluorouridine
  modified_base 24: mod_base = OTHER; note = 2'-Omethylguanosine
  modified_base 25: mod_base = OTHER; note = 2'-fluorocytosine
  modified_base 29: mod_base = OTHER; note = 2'-fluoroguanosine
  modified_base 30: mod_base = OTHER; note = 2'-fluoroguanosine
  modified_base 31: mod_base = OTHER; note = 2'-Omethyladenosine
  modified_base 34: mod_base = OTHER; note = 2'-fluorouridine
  modified_base 38: mod_base = OTHER; note = Adenosine phosphorothiorate
  modified_base 43: mod_base = OTHER; note = 2'-Omethyladenosine
  modified_base 48: mod_base = OTHER; note = Uridine phosphorothiorate
  modified_base 49: mod_base = OTHER; note = 2'-Omethylcytosine
  modified_base 51: mod_base = OTHER; note = Guanosine phosphorothiorate
  modified_base 52: mod_base = OTHER; note = 2'-Omethylguanosine phosphorothiorate
  modified_base 53: mod_base = OTHER; note = 2'-Omethylguanosine
  modified_base 54: mod_base = OTHER; note = Uridine phosphorothiorate
  modified_base 55: mod_base = OTHER; note = Uridine phosphorothiorate
  modified_base 56: mod_base = OTHER; note = 2'-Omethylcytosine
  modified_base 59: mod_base = OTHER; note = Guanosine phosphorothiorate
  modified_base 60: mod_base = OTHER; note = Uridine phosphorothiorate
  modified_base 61: mod_base = OTHER; note = 2'-Omethylcytosine phosphorothiorate
  modified_base 62: mod_base = OTHER; note = 2'-Omethylcytosine
  modified_base 63: mod_base = OTHER; note = Cytosine phosphorothiorate
  modified_base 64: mod_base = OTHER; note = Guanosine phosphorothiorate
  modified_base 65: mod_base = OTHER; note = Guanosine phosphorothiorate
  modified_base 66: mod_base = OTHER; note = 2'-Omethylcytosine
  modified_base 67: mod_base = OTHER; note = Guanosine phosphorothiorate
  modified_base 69: mod_base = OTHER; note = 2'-fluoroadenosine
  modified_base 74: mod_base = OTHER; note = 2'-Omethylcytosine

SEQ ID NO: 5082 - DNA, 76 bp, synthetic construct; identical to SEQ ID NO: 1924
  source 1..76: mol_type = other DNA
  modified_base 1: mod_base = OTHER; note = 2'-Omethylguanosine phosphorothiorate
  modified_base 2: mod_base = OTHER; note = 2'-Omethylguanosine phosphorothiorate
  modified_base 10: mod_base = OTHER; note = Guanosine phosphorothiorate
  modified_base 11: mod_base = OTHER; note = 2'-O-(2-Methoxyethyl) 5-methylcytosine phosphorothiorate
  modified_base 14: mod_base = OTHER; note = Adenosine phosphorothiorate
  modified_base 25: mod_base = OTHER; note = 2'-fluorocytosine
  modified_base 47: mod_base = OTHER; note = 2'-fluorouridine
  modified_base 56: mod_base = OTHER; note = Cytosine phosphorothiorate
  modified_base 59: mod_base = OTHER; note = 2'-O-(2-Methoxyethyl) guanosine
  modified_base 75: mod_base = OTHER; note = Cytosine phosphorothiorate
  modified_base 76: mod_base = OTHER; note = 2'-Omethyladenosine
  misc_feature 1..11: note = RNA
  misc_feature 12: note = DNA
  misc_feature 13..14: note = RNA
  misc_feature 15: note = DNA
  misc_feature 16..56: note = RNA
  misc_feature 57: note = DNA
  misc_feature 58..76: note = RNA

SEQ ID NO: 5083 - RNA, 85 nt, synthetic construct; identical to SEQ ID NO: 3288
  source 1..85: mol_type = other RNA
  modified_base 23: mod_base = OTHER; note = 2'-Omethylguanosine
  modified_base 25: mod_base = OTHER; note = 2'-fluoroguanosine
  modified_base 29: mod_base = OTHER; note = 2'-fluoroguanosine
  modified_base 33: mod_base = OTHER; note = Uridine phosphorothiorate
  modified_base 43: mod_base = OTHER; note = 2'-Omethyluridine
  modified_base 46: mod_base = OTHER; note = 2'-Omethyladenosine
  modified_base 54: mod_base = OTHER; note = 2'-fluorocytosine
  modified_base 55: mod_base = OTHER; note = 2'-Omethylcytosine
  modified_base 65: mod_base = OTHER; note = Cytosine phosphorothiorate
  modified_base 84: mod_base = OTHER; note = 2'-fluorocytosine

SEQ ID NO: 5084 - RNA, 75 nt, synthetic construct; identical to SEQ ID NO: 3306
  source 1..75: mol_type = other RNA
  modified_base 1: mod_base = OTHER; note = 2'-Omethylguanosine
  modified_base 17: mod_base = OTHER; note = 2'-Omethylguanosine
  modified_base 18: mod_base = OTHER; note = 2'-Omethylguanosine
  modified_base 32: mod_base = OTHER; note = 2'-fluorouridine
  modified_base 33: mod_base = OTHER; note = 2'-Omethylcytosine
  modified_base 34: mod_base = OTHER; note = Uridine phosphorothiorate
  modified_base 36: mod_base = OTHER; note = Guanosine phosphorothiorate
  modified_base 37: mod_base = OTHER; note = Adenosine phosphorothiorate
  modified_base 40: mod_base = OTHER; note = 2'-fluoroadenosine
  modified_base 41: mod_base = OTHER; note = 2'-Omethylguanosine
  modified_base 42: mod_base = OTHER; note = 2'-Omethyladenosine
  modified_base 43: mod_base = OTHER; note = 2'-fluoroadenosine
  modified_base 49: mod_base = OTHER; note = 2'-Omethylcytosine
  modified_base 51: mod_base = OTHER; note = 2'-Omethyluridine
  modified_base 72: mod_base = OTHER; note = 2'-Omethyladenosine

SEQ ID NO: 5085 - RNA, 75 nt, synthetic construct; identical to SEQ ID NO: 1045
  source 1..75: mol_type = other RNA
  modified_base 1: mod_base = OTHER; note = 2'-Omethylguanosine phosphorothiorate
  modified_base 12: mod_base = OTHER; note = 2'-fluoroguanosine
  modified_base 14: mod_base = OTHER; note = 2'-Omethyladenosine
  modified_base 15: mod_base = OTHER; note = Adenosine phosphorothiorate
  modified_base 19: mod_base = OTHER; note = 2'-fluorouridine
  modified_base 21: mod_base = OTHER; note = Adenosine phosphorothiorate
  modified_base 22: mod_base = OTHER; note = 2'-fluoroguanosine
  modified_base 23: mod_base = OTHER; note = 2'-fluorocytosine
  modified_base 26: mod_base = OTHER; note = Uridine phosphorothiorate
  modified_base 28: mod_base = OTHER; note = 2'-fluorouridine
  modified_base 38: mod_base = OTHER; note = 2'-fluoroadenosine
  modified_base 39: mod_base = OTHER; note = Uridine phosphorothiorate
  modified_base 41: mod_base = OTHER; note = 2'-Omethylcytosine
  modified_base 55: mod_base = OTHER; note = 2'-Omethylcytosine
  modified_base 63: mod_base = OTHER; note = 2'-Omethylguanosine phosphorothiorate
  modified_base 64: mod_base = OTHER; note = Guanosine phosphorothiorate
  modified_base 65: mod_base = OTHER; note = 2'-fluorouridine
  modified_base 72: mod_base = OTHER; note = Uridine phosphorothiorate
  modified_base 73: mod_base = OTHER; note = 2'-fluorocytosine
  modified_base 74: mod_base = OTHER; note = 2'-Omethylcytosine
  modified_base 75: mod_base = OTHER; note = 2'-fluoroadenosine

SEQ ID NO: 5086 - RNA, 74 nt, synthetic construct; identical to SEQ ID NO: 3293
  source 1..74: mol_type = other RNA
  modified_base 1: mod_base = OTHER; note = 2'-fluoroadenosine
  modified_base 2: mod_base = OTHER; note = Cytosine phosphorothiorate
  modified_base 3: mod_base = OTHER; note = Cytosine phosphorothiorate
  modified_base 4: mod_base = OTHER; note = Uridine phosphorothiorate
  modified_base 6: mod_base = OTHER; note = Guanosine phosphorothiorate
  modified_base 8: mod_base = OTHER; note = Guanosine phosphorothiorate
  modified_base 9: mod_base = OTHER; note = Guanosine phosphorothiorate
  modified_base 11: mod_base = OTHER; note = 2'-fluoroguanosine
  modified_base 21: mod_base = OTHER; note = 2'-fluorocytosine
  modified_base 24: mod_base = OTHER; note = 2'-fluoroguanosine
  modified_base 25: mod_base = OTHER; note = Uridine phosphorothiorate
  modified_base 27: mod_base = OTHER; note = 2'-Omethyluridine
  modified_base 40: mod_base = OTHER; note = 2'-fluoroguanosine
  modified_base 42: mod_base = OTHER; note = Adenosine phosphorothiorate
  modified_base 43: mod_base = OTHER; note = Guanosine phosphorothiorate
  modified_base 44: mod_base = OTHER; note = Guanosine phosphorothiorate
  modified_base 46: mod_base = OTHER; note = Uridine phosphorothiorate
  modified_base 48: mod_base = OTHER; note = 2'-fluorocytosine
  modified_base 62: mod_base = OTHER; note = Guanosine phosphorothiorate
  modified_base 73: mod_base = OTHER; note = 2'-Omethylcytosine phosphorothiorate

SEQ ID NO: 5087 - RNA, 76 nt, synthetic construct; identical to SEQ ID NO: 625
  source 1..76: mol_type = other RNA
  modified_base 1: mod_base = OTHER; note = 2'-Omethylguanosine phosphorothiorate
  modified_base 2: mod_base = OTHER; note = 2'-Omethylguanosine
  modified_base 3: mod_base = OTHER; note = 2'-Omethylcytosine
  modified_base 4: mod_base = OTHER; note = 2'-Omethyluridine
  modified_base 5: mod_base = OTHER; note = 2'-Omethylcytosine
  modified_base 6: mod_base = OTHER; note = 2'-Omethylcytosine
  modified_base 10: mod_base = OTHER; note = 2'-Omethylguanosine
  modified_base 11: mod_base = OTHER; note = 2'-Omethylcytosine
  modified_base 12: mod_base = OTHER; note = 2'-Omethylguanosine
  modified_base 13: mod_base = OTHER; note = 2'-Omethylcytosine
  modified_base 16: mod_base = OTHER; note = 2'-Omethyluridine
  modified_base 17: mod_base = OTHER; note = 2'-Omethylguanosine
  modified_base 18: mod_base = OTHER; note = 2'-Omethylguanosine
  modified_base 22: mod_base = OTHER; note = 2'-Omethylguanosine
  modified_base 23: mod_base = OTHER; note = 2'-Omethylcytosine
  modified_base 24: mod_base = OTHER; note = 2'-Omethylguanosine
  modified_base 25: mod_base = OTHER; note = 2'-Omethylcytosine
  modified_base 49: mod_base = OTHER; note = 2'-Omethylcytosine
  modified_base 50: mod_base = OTHER; note = 2'-Omethylcytosine
  modified_base 51: mod_base = OTHER; note = 2'-Omethylguanosine
  modified_base 52: mod_base = OTHER; note = 2'-Omethylguanosine
  modified_base 53: mod_base = OTHER; note = 2'-Omethylguanosine
  modified_base 54: mod_base = OTHER; note = 2'-Omethyluridine phosphorothiorate
  modified_base 56: mod_base = OTHER; note = 2'-Omethylcytosine
  modified_base 57: mod_base = OTHER; note = 2'-fluoroguanosine
  modified_base 59: mod_base = OTHER; note = 2'-Omethylguanosine
  modified_base 61: mod_base = OTHER; note = 2'-Omethylcytosine
  modified_base 62: mod_base = OTHER; note = 2'-Omethylcytosine
  modified_base 63: mod_base = OTHER; note = 2'-Omethylcytosine
  modified_base 64: mod_base = OTHER; note = 2'-Omethylguanosine
  modified_base 65: mod_base = OTHER; note = 2'-Omethylguanosine
  modified_base 66: mod_base = OTHER; note = 2'-Omethylcytosine
  modified_base 67: mod_base = OTHER; note = 2'-Omethylguanosine
  modified_base 68: mod_base = OTHER; note = 2'-Omethylguanosine
  modified_base 69: mod_base = OTHER; note = 2'-Omethyladenosine
  modified_base 73: mod_base = OTHER; note = 2'-Omethylguanosine

SEQ ID NO: 5088 - RNA, 86 nt, synthetic construct; identical to SEQ ID NO: 3290
  source 1..86: mol_type = other RNA
  modified_base 1: mod_base = OTHER; note = 2'-Omethyladenosine
  modified_base 16: mod_base = OTHER; note = 2'-Omethyluridine
  modified_base 17: mod_base = OTHER; note = 2'-Omethylguanosine
  modified_base 18: mod_base = OTHER; note = 2'-Omethylguanosine
  modified_base 64: mod_base = OTHER; note = 2'-Omethyluridine phosphorothiorate
  modified_base 65: mod_base = OTHER; note = Uridine phosphorothiorate
  modified_base 66: mod_base = OTHER; note = 2'-Omethylcytosine
  modified_base 67: mod_base = OTHER; note = 2'-fluoroguanosine
  modified_base 68: mod_base = OTHER; note = 2'-fluoroadenosine
  modified_base 69: mod_base = OTHER; note = 2'-Omethyladenosine
  modified_base 70: mod_base = OTHER; note = 2'-fluorocytosine
  modified_base 83: mod_base = OTHER; note = 2'-Omethyladenosine

SEQ ID NO: 5089 - RNA, 76 nt, synthetic construct; identical to SEQ ID NO: 625
  source 1..76: mol_type = other RNA
  modified_base 1: mod_base = OTHER; note = 2'-fluoroguanosine
  modified_base 2: mod_base = OTHER; note = Guanosine phosphorothiorate
  modified_base 3: mod_base = OTHER; note = 2'-Omethylcytosine phosphorothiorate
  modified_base 4: mod_base = OTHER; note = 2'-fluorouridine
  modified_base 10: mod_base = OTHER; note = 2'-Omethylguanosine
  modified_base 13: mod_base = OTHER; note = 2'-Omethylcytosine
  modified_base 14: mod_base = OTHER; note = 2'-fluoroadenosine
  modified_base 17: mod_base = OTHER; note = Guanosine phosphorothiorate
  modified_base 18: mod_base = OTHER; note = 2'-fluoroguanosine phosphorothiorate
  modified_base 24: mod_base = OTHER; note = 2'-fluoroguanosine phosphorothiorate
  modified_base 25: mod_base = OTHER; note = 2'-fluorocytosine
  modified_base 26: mod_base = OTHER; note = 2'-fluoroadenosine
  modified_base 27: mod_base = OTHER; note = 2'-Omethyluridine phosphorothiorate
  modified_base 28: mod_base = OTHER; note = 2'-Omethyluridine
  modified_base 29: mod_base = OTHER; note = 2'-fluoroguanosine
  modified_base 30: mod_base = OTHER; note = 2'-Omethylguanosine
  modified_base 34: mod_base = OTHER; note = 2'-Omethyluridine
  modified_base 37: mod_base = OTHER; note = Adenosine phosphorothiorate
  modified_base 39: mod_base = OTHER; note = 2'-fluorouridine
  modified_base 43: mod_base = OTHER; note = 2'-fluoroadenosine phosphorothiorate
  modified_base 44: mod_base = OTHER; note = 2'-Omethyladenosine
  modified_base 45: mod_base = OTHER; note = 2'-fluoroguanosine
  modified_base 46: mod_base = OTHER; note = 2'-fluoroguanosine
  modified_base 51: mod_base = OTHER; note = 2'-Omethylguanosine
  modified_base 52: mod_base = OTHER; note = 2'-fluoroguanosine
  modified_base 53: mod_base = OTHER; note = 2'-fluoroguanosine
  modified_base 59: mod_base = OTHER; note = 2'-fluoroguanosine
  modified_base 63: mod_base = OTHER; note = 2'-fluorocytosine
  modified_base 70: mod_base = OTHER; note = 2'-fluoroguanosine phosphorothiorate
  modified_base 71: mod_base = OTHER; note = 2'-Omethyluridine
  modified_base 74: mod_base = OTHER; note = 2'-Omethylcytosine
  modified_base 76: mod_base = OTHER; note = 2'-Omethyladenosine

SEQ ID NO: 5090 - RNA, 74 nt, synthetic construct; identical to SEQ ID NO: 3293
  source 1..74: mol_type = other RNA
  modified_base 4: mod_base = OTHER; note = Uridine phosphorothiorate
  modified_base 15: mod_base = OTHER; note = 2'-Omethylcytosine
  modified_base 24: mod_base = OTHER; note = Guanosine phosphorothiorate
  modified_base 30: mod_base = OTHER; note = 2'-fluorocytosine
  modified_base 46: mod_base = OTHER; note = Uridine phosphorothiorate
  modified_base 73: mod_base = OTHER; note = 2'-Omethylcytosine phosphorothiorate

SEQ ID NO: 5091 - RNA, 85 nt, synthetic construct; identical to SEQ ID NO: 3297
  source 1..85: mol_type = other RNA
  modified_base 1: mod_base = OTHER; note = 2'-Omethylguanosine phosphorothiorate
  modified_base 2: mod_base = OTHER; note = Cytosine phosphorothiorate
  modified_base 21: mod_base = OTHER; note = 2'-fluoroadenosine phosphorothiorate
  modified_base 47: mod_base = OTHER; note = 2'-Omethylguanosine
  modified_base 52: mod_base = OTHER; note = 2'-fluorocytosine
  modified_base 61: mod_base = OTHER; note = 2'-Omethylguanosine
  modified_base 80: mod_base = OTHER; note = 2'-fluoroguanosine
  modified_base 84: mod_base = OTHER; note = 2'-Omethylcytosine phosphorothiorate

SEQ ID NO: 5092 - RNA, 85 nt, synthetic construct; identical to SEQ ID NO: 3297
  source 1..85: mol_type = other RNA
  modified_base 1: mod_base = OTHER; note = 2'-Omethylguanosine
  modified_base 2: mod_base = OTHER; note = 2'-Omethylcytosine
  modified_base 3: mod_base = OTHER; note = 2'-Omethyluridine
  modified_base 4: mod_base = OTHER; note = 2'-Omethylguanosine
  modified_base 5: mod_base = OTHER; note = 2'-Omethyluridine
  modified_base 6: mod_base = OTHER; note = 2'-Omethylguanosine
  modified_base 10: mod_base = OTHER; note = 2'-Omethylguanosine
  modified_base 11: mod_base = OTHER; note = 2'-Omethylcytosine
  modified_base 12: mod_base = OTHER; note = 2'-Omethylcytosine
  modified_base 13: mod_base = OTHER; note = 2'-Omethylguanosine
  modified_base 14: mod_base = OTHER; note = 2'-Omethyladenosine
  modified_base 15: mod_base = OTHER; note = 2'-fluoroguanosine
  modified_base 16: mod_base = OTHER; note = 2'-Omethyluridine
  modified_base 17: mod_base = OTHER; note = 2'-Omethylguanosine
  modified_base 18: mod_base = OTHER; note = 2'-Omethylguanosine
  modified_base 20: mod_base = OTHER; note = 2'-Omethyluridine
  modified_base 22: mod_base = OTHER; note = 2'-Omethyladenosine
  modified_base 23: mod_base = OTHER; note = 2'-Omethylguanosine
  modified_base 24: mod_base = OTHER; note = 2'-Omethylguanosine
  modified_base 25: mod_base = OTHER; note = 2'-Omethylcytosine
  modified_base 33: mod_base = OTHER; note = 2'-fluorouridine
  modified_base 35: mod_base = OTHER; note = Cytosine phosphorothiorate
  modified_base 37: mod_base = OTHER; note = Adenosine phosphorothiorate
  modified_base 38: mod_base = OTHER; note = Adenosine phosphorothiorate
  modified_base 41: mod_base = OTHER; note = 2'-Omethylcytosine
  modified_base 42: mod_base = OTHER; note = 2'-Omethyladenosine
  modified_base 43: mod_base = OTHER; note = 2'-Omethyladenosine
  modified_base 44: mod_base = OTHER; note = 2'-Omethyluridine
  modified_base 58: mod_base = OTHER; note = 2'-Omethylguanosine
  modified_base 59: mod_base = OTHER; note = 2'-Omethylcytosine
  modified_base 61: mod_base = OTHER; note = 2'-Omethylguanosine
  modified_base 63: mod_base = OTHER; note = 2'-Omethyluridine
  modified_base 64: mod_base = OTHER; note = Uridine phosphorothiorate
  modified_base 65: mod_base = OTHER; note = 2'-Omethylcytosine
  modified_base 66: mod_base = OTHER; note = 2'-fluoroguanosine
  modified_base 68: mod_base = OTHER; note = 2'-Omethyladenosine
  modified_base 70: mod_base = OTHER; note = 2'-Omethylcytosine
  modified_base 74: mod_base = OTHER; note = 2'-Omethylcytosine
  modified_base 82: mod_base = OTHER; note = 2'-Omethylguanosine

SEQ ID NO: 5093 - RNA, 86 nt, synthetic construct; identical to SEQ ID NO: 3290
  source 1..86: mol_type = other RNA
  modified_base 1: mod_base = OTHER; note = 2'-Omethyladenosine
  modified_base 14: mod_base = OTHER; note = 2'-Omethyladenosine phosphorothiorate
  modified_base 15: mod_base = OTHER; note = 2'-Omethylguanosine phosphorothiorate
  modified_base 16: mod_base = OTHER; note = 2'-Omethyluridine phosphorothiorate
  modified_base 17: mod_base = OTHER; note = 2'-Omethylguanosine phosphorothiorate
  modified_base 18: mod_base = OTHER; note = 2'-Omethylguanosine phosphorothiorate
  modified_base 19: mod_base = OTHER; note = 2'-fluorouridine phosphorothiorate
  modified_base 20: mod_base = OTHER; note = 2'-Omethyluridine phosphorothiorate
  modified_base 21: mod_base = OTHER; note = 2'-fluoroadenosine phosphorothiorate
  modified_base 60: mod_base = OTHER; note = 2'-Omethyluridine
  modified_base 62: mod_base = OTHER; note = 2'-Omethylguanosine
  modified_base 83: mod_base = OTHER; note = 2'-Omethyladenosine

SEQ ID NO: 5094 - RNA, 76 nt, synthetic construct; identical to SEQ ID NO: 3615
  source 1..76: mol_type = other RNA
  modified_base 1: mod_base = OTHER; note = 2'-Omethylguanosine phosphorothiorate
  modified_base 2: mod_base = OTHER; note = 2'-Omethylguanosine
  modified_base 3: mod_base = OTHER; note = 2'-Omethylcytosine
  modified_base 4: mod_base = OTHER; note = 2'-Omethyluridine
  modified_base 5: mod_base = OTHER; note = 2'-Omethylcytosine
  modified_base 6: mod_base = OTHER; note = 2'-Omethylcytosine
  modified_base 49: mod_base = OTHER; note = 2'-Omethylcytosine
  modified_base 50: mod_base = OTHER; note = 2'-Omethylcytosine
  modified_base 51: mod_base = OTHER; note = 2'-Omethylguanosine
  modified_base 52: mod_base = OTHER; note = 2'-Omethylguanosine
  modified_base 53: mod_base = OTHER; note = 2'-Omethylguanosine
  modified_base 61: mod_base = OTHER; note = 2'-Omethylcytosine
  modified_base 62: mod_base = OTHER; note = 2'-Omethylcytosine
  modified_base 63: mod_base = OTHER; note = 2'-fluorocytosine
  modified_base 64: mod_base = OTHER; note = 2'-Omethylguanosine
  modified_base 65: mod_base = OTHER; note = 2'-Omethylguanosine
  modified_base 66: mod_base = OTHER; note = 2'-Omethylcytosine
  modified_base 67: mod_base = OTHER; note = 2'-Omethylguanosine
  modified_base 68: mod_base = OTHER; note = 2'-Omethylguanosine
  modified_base 69: mod_base = OTHER; note = 2'-Omethyladenosine
  modified_base 71: mod_base = OTHER; note = 2'-Omethyluridine
  modified_base 72: mod_base = OTHER; note = 2'-Omethylcytosine

SEQ ID NO: 5095 - RNA, 74 nt, synthetic construct; identical to SEQ ID NO: 3293
  source 1..74: mol_type = other RNA
  modified_base 4: mod_base = OTHER; note = 2'-fluorouridine
  modified_base 6: mod_base = OTHER; note = 2'-fluoroguanosine
  modified_base 39: mod_base = OTHER; note = Adenosine phosphorothiorate
  modified_base 44: mod_base = OTHER; note = Guanosine phosphorothiorate
  modified_base 48: mod_base = OTHER; note = 2'-fluorocytosine
  modified_base 60: mod_base = OTHER; note = 2'-fluoroadenosine
  modified_base 73: mod_base = OTHER; note = Cytosine phosphorothiorate
  modified_base 74: mod_base = OTHER; note = 2'-fluoroadenosine

SEQ ID NO: 5096 - RNA, 76 nt, synthetic construct; identical to SEQ ID NO: 625
  source 1..76: mol_type = other RNA
  modified_base 1: mod_base = OTHER; note = 2'-Omethylguanosine phosphorothiorate
  modified_base 2: mod_base = OTHER; note = 2'-Omethylguanosine
  modified_base 3: mod_base = OTHER; note = 2'-Omethylcytosine
  modified_base 4: mod_base = OTHER; note = 2'-Omethyluridine
  modified_base 5: mod_base = OTHER; note = 2'-Omethylcytosine
  modified_base 6: mod_base = OTHER; note = 2'-Omethylcytosine
  modified_base 14: mod_base = OTHER; note = 2'-Omethyladenosine
  modified_base 15: mod_base = OTHER; note = 2'-Omethyladenosine
  modified_base 16: mod_base = OTHER; note = 2'-Omethyluridine
  modified_base 17: mod_base = OTHER; note = 2'-Omethylguanosine
  modified_base 18: mod_base = OTHER; note = 2'-Omethylguanosine
  modified_base 19: mod_base = OTHER; note = 2'-Omethyladenosine
  modified_base 20: mod_base = OTHER; note = 2'-Omethyluridine
  modified_base 40: mod_base = OTHER; note = 2'-fluorouridine
  modified_base 41: mod_base = OTHER; note = 2'-fluorocytosine
  modified_base 42: mod_base = OTHER; note = 2'-fluoroadenosine
  modified_base 43: mod_base = OTHER; note = 2'-fluoroadenosine
  modified_base 49: mod_base = OTHER; note = 2'-Omethylcytosine
  modified_base 50: mod_base = OTHER; note = 2'-Omethylcytosine
  modified_base 51: mod_base = OTHER; note = 2'-Omethylguanosine
  modified_base 52: mod_base = OTHER; note = 2'-Omethylguanosine
  modified_base 53: mod_base = OTHER; note = 2'-Omethylguanosine
  modified_base 61: mod_base = OTHER; note = 2'-Omethylcytosine
  modified_base 62: mod_base = OTHER; note = 2'-Omethylcytosine
  modified_base 63: mod_base = OTHER; note = 2'-fluorocytosine
  modified_base 64: mod_base = OTHER; note = 2'-Omethylguanosine
  modified_base 65: mod_base = OTHER; note = 2'-Omethylguanosine
  modified_base 66: mod_base = OTHER; note = 2'-Omethylcytosine
  modified_base 67: mod_base = OTHER; note = 2'-Omethylguanosine
  modified_base 68: mod_base = OTHER; note = 2'-Omethylguanosine
  modified_base 69: mod_base = OTHER; note = 2'-Omethyladenosine
  modified_base 71: mod_base = OTHER; note = 2'-Omethyluridine
  modified_base 72: mod_base = OTHER; note = 2'-Omethylcytosine

SEQ ID NO: 5097 - RNA, 76 nt, synthetic construct; identical to SEQ ID NO: 625
  source 1..76: mol_type = other RNA
  modified_base 1: mod_base = OTHER; note = 2'-Omethylguanosine phosphorothiorate
  modified_base 2: mod_base = OTHER; note = 2'-Omethylguanosine
  modified_base 17: mod_base = OTHER; note = 2'-Omethylguanosine
  modified_base 33: mod_base = OTHER; note = 2'-fluorouridine
  modified_base 35: mod_base = OTHER; note = Cytosine phosphorothiorate
  modified_base 52: mod_base = OTHER; note = 2'-fluoroguanosine
  modified_base 56: mod_base = OTHER; note = 2'-Omethylcytosine
  modified_base 59: mod_base = OTHER; note = 2'-Omethylguanosine
  modified_base 62: mod_base = OTHER; note = 2'-Omethylcytosine
  modified_base 63: mod_base = OTHER; note = 2'-fluorocytosine
  modified_base 73: mod_base = OTHER; note = 2'-Omethylguanosine
  modified_base 75: mod_base = OTHER; note = 2'-fluorocytosine phosphorothiorate

SEQ ID NO: 5098 - RNA, 85 nt, synthetic construct; identical to SEQ ID NO: 3297
  source 1..85: mol_type = other RNA
  modified_base 1: mod_base = OTHER; note = 2'-Omethylguanosine
  modified_base 17: mod_base = OTHER; note = 2'-Omethylguanosine
  modified_base 18: mod_base = OTHER; note = 2'-Omethylguanosine
  modified_base 33: mod_base = OTHER; note = Uridine phosphorothiorate
  modified_base 34: mod_base = OTHER; note = 2'-Omethyluridine
  modified_base 35: mod_base = OTHER; note = Cytosine phosphorothiorate
  modified_base 37: mod_base = OTHER; note = Adenosine phosphorothiorate
  modified_base 38: mod_base = OTHER; note = Adenosine phosphorothiorate
  modified_base 41: mod_base = OTHER; note = 2'-Omethylcytosine
  modified_base 42: mod_base = OTHER; note = 2'-Omethyladenosine
  modified_base 43: mod_base = OTHER; note = 2'-Omethyladenosine
  modified_base 44: mod_base = OTHER; note = 2'-Omethyluridine
  modified_base 59: mod_base = OTHER; note = 2'-Omethylcytosine
  modified_base 61: mod_base = OTHER; note = 2'-Omethylguanosine
  modified_base 82: mod_base = OTHER; note = 2'-Omethylguanosine

SEQ ID NO: 5099 - RNA, 85 nt, synthetic construct; identical to SEQ ID NO: 3297
  source 1..85: mol_type = other RNA
  modified_base 1: mod_base = OTHER; note = 2'-Omethylguanosine phosphorothiorate
  modified_base 2: mod_base = OTHER; note = 2'-Omethylcytosine phosphorothiorate
  modified_base 12: mod_base = OTHER; note = 2'-Omethylcytosine phosphorothiorate
  modified_base 26: mod_base = OTHER; note = 2'-Omethylguanosine phosphorothiorate
  modified_base 38: mod_base = OTHER; note = 2'-fluoroadenosine
  modified_base 45: mod_base = OTHER; note = 2'-Omethylguanosine
  modified_base 51: mod_base = OTHER; note = 2'-Omethyluridine phosphorothiorate
  modified_base 57: mod_base = OTHER; note = 2'-Omethylcytosine phosphorothiorate
  modified_base 61: mod_base = OTHER; note = Guanosine phosphorothiorate

SEQ ID NO: 5100 - DNA, 76 bp, synthetic construct; identical to SEQ ID NO: 1924
  source 1..76: mol_type = other DNA
  modified_base 1: mod_base = OTHER; note = 2'-Omethylguanosine
  modified_base 2: mod_base = OTHER; note = 2'-Omethylguanosine
  modified_base 4: mod_base = OTHER; note = Uridine phosphorothiorate
  modified_base 5: mod_base = OTHER; note = 2'-O-(2-Methoxyethyl) 5-methylcytosine
  modified_base 10: mod_base = OTHER; note = Guanosine phosphorothiorate
  modified_base 11: mod_base = OTHER; note = 2'-fluorocytosine
  modified_base 12: mod_base = OTHER; note = Guanosine phosphorothiorate
  modified_base 13: mod_base = OTHER; note = deoxycytosine phosphorothiorate
  modified_base 14: mod_base = OTHER; note = 2'-Omethyladenosine
  modified_base 15: mod_base = OTHER; note = 2'-Omethyladenosine
  modified_base 18: mod_base = OTHER; note = Guanosine phosphorothiorate
  modified_base 20: mod_base = OTHER; note = 2'-fluorouridine
  modified_base 24: mod_base = OTHER; note = 2'-Omethylguanosine phosphorothiorate
  modified_base 25: mod_base = OTHER; note = 2'-fluorocytosine
  modified_base 28: mod_base = OTHER; note = Uridine phosphorothiorate
  modified_base 29: mod_base = OTHER; note = 2'-fluoroguanosine phosphorothiorate
  modified_base 33: mod_base = OTHER; note = 2'-O-(2-Methoxyethyl) thymine
  modified_base 36: mod_base = OTHER; note = Adenosine phosphorothiorate
  modified_base 37: mod_base = OTHER; note = Adenosine phosphorothiorate
  modified_base 38: mod_base = OTHER; note = Adenosine phosphorothiorate
  modified_base 52: mod_base = OTHER; note = 2'-fluoroguanosine phosphorothiorate
  modified_base 56: mod_base = OTHER; note = Cytosine phosphorothiorate
  modified_base 57: mod_base = OTHER; note = 2'-fluoroguanosine phosphorothiorate
  modified_base 58: mod_base = OTHER; note = Adenosine phosphorothiorate
  modified_base 63: mod_base = OTHER; note = Cytosine phosphorothiorate
  modified_base 64: mod_base = OTHER; note = 2'-Omethylguanosine
  modified_base 66: mod_base = OTHER; note = 2'-O-(2-Methoxyethyl) 5-methylcytosine
  modified_base 69: mod_base = OTHER; note = Adenosine phosphorothiorate
  modified_base 73: mod_base = OTHER; note = Guanosine phosphorothiorate
  modified_base 74: mod_base = OTHER; note = 2'-Omethylcytosine phosphorothiorate
  modified_base 75: mod_base = OTHER; note = 2'-Omethylcytosine
  misc_feature 1..12: note = RNA
  misc_feature 13: note = DNA
  misc_feature 14..18: note = RNA
  misc_feature 19: note = DNA
  misc_feature 20..29: note = RNA
  misc_feature 30: note = DNA
  misc_feature 31..40: note = RNA
  misc_feature 41: note = DNA
  misc_feature 42..58: note = RNA
  misc_feature 59: note = DNA
  misc_feature 60..67: note = RNA
  misc_feature 68: note = DNA
  misc_feature 69: note = RNA
  misc_feature 70: note = DNA
  misc_feature 71..76: note = RNA

SEQ ID NO: 5101 - RNA, 76 nt, synthetic construct; identical to SEQ ID NO: 625
  source 1..76: mol_type = other RNA
  modified_base 8: mod_base = OTHER; note = Thymine
  modified_base 47: mod_base = OTHER; note = Thymine
  modified_base 48: mod_base = OTHER; note = Thymine

SEQ ID NO: 5102 - RNA, 76 nt, synthetic construct; identical to SEQ ID NO: 3289
  source 1..76: mol_type = other RNA
  modified_base 1: mod_base = OTHER; note = 2'-Omethylguanosine phosphorothiorate
  modified_base 2: mod_base = OTHER; note = 2'-Omethylcytosine phosphorothiorate
  modified_base 14: mod_base = OTHER; note = Adenosine phosphorothiorate
  modified_base 21: mod_base = OTHER; note = 2'-fluoroadenosine
  modified_base 74: mod_base = OTHER; note = Cytosine phosphorothiorate
  modified_base 75: mod_base = OTHER; note = 2'-Omethylcytosine phosphorothiorate
  modified_base 76: mod_base = OTHER; note = 2'-Omethyladenosine

SEQ ID NO: 5103 - RNA, 77 nt, synthetic construct
  source 1..77: mol_type = other RNA
gtccctgtggcgcaatggattagcgcgttggacttcaaattcaaaggttccgggttcgaatcccggcagggatacca

SEQ ID NO: 5104 - RNA, 85 nt, synthetic construct; identical to SEQ ID NO: 3317
  source 1..85: mol_type = other RNA
  modified_base 1: mod_base = OTHER; note = 2'-Omethylguanosine phosphorothiorate
  modified_base 2: mod_base = OTHER; note = Cytosine phosphorothiorate
  modified_base 3: mod_base = OTHER; note = 2'-Omethyluridine phosphorothiorate
  modified_base 9: mod_base = OTHER; note = 2'-fluoroguanosine phosphorothiorate
  modified_base 14: mod_base = OTHER; note = 2'-fluoroadenosine
  modified_base 25: mod_base = OTHER; note = Cytosine phosphorothiorate
  modified_base 26: mod_base = OTHER; note = Guanosine phosphorothiorate
  modified_base 27: mod_base = OTHER; note = 2'-fluorouridine
  modified_base 29: mod_base = OTHER; note = Guanosine phosphorothiorate
  modified_base 33: mod_base = OTHER; note = 2'-fluorouridine
  modified_base 35: mod_base = OTHER; note = 2'-fluorouridine
  modified_base 46: mod_base = OTHER; note = 2'-fluoroguanosine
  modified_base 47: mod_base = OTHER; note = 2'-fluoroguanosine phosphorothiorate
  modified_base 51: mod_base = OTHER; note = 2'-fluorouridine
  modified_base 59: mod_base = OTHER; note = 2'-Omethylcytosine
  modified_base 61: mod_base = OTHER; note = 2'-Omethylguanosine
  modified_base 71: mod_base = OTHER; note = 2'-fluorocytosine
  modified_base 72: mod_base = OTHER; note = 2'-fluorouridine
  modified_base 79: mod_base = OTHER; note = Adenosine phosphorothiorate
  modified_base 83: mod_base = OTHER; note = Cytosine phosphorothiorate

SEQ ID NO: 5105 - RNA, 76 nt, synthetic construct; identical to SEQ ID NO: 3318
  source 1..76: mol_type = other RNA
  modified_base 1: mod_base = OTHER; note = 2'-Omethylcytosine phosphorothiorate
  modified_base 2: mod_base = OTHER; note = 2'-Omethylcytosine phosphorothiorate
  modified_base 3: mod_base = OTHER; note = 2'-Omethyluridine
  modified_base 4: mod_base = OTHER; note = 2'-Omethyluridine
  modified_base 5: mod_base = OTHER; note = 2'-Omethylcytosine
  modified_base 6: mod_base = OTHER; note = 2'-Omethylguanosine
  modified_base 16: mod_base = OTHER; note = 2'-Omethyluridine
  modified_base 18: mod_base = OTHER; note = 2'-Omethylguanosine
  modified_base 19: mod_base = OTHER; note = 2'-Omethylguanosine
  modified_base 25: mod_base = OTHER; note = 2'-Omethylcytosine
  modified_base 33: mod_base = OTHER; note = 2'-fluorouridine
  modified_base 35: mod_base = OTHER; note = Uridine phosphorothiorate
  modified_base 37: mod_base = OTHER; note = Guanosine phosphorothiorate
  modified_base 38: mod_base = OTHER; note = Adenosine phosphorothiorate
  modified_base 41: mod_base = OTHER; note = 2'-Omethylcytosine
  modified_base 44: mod_base = OTHER; note = 2'-Omethyladenosine
  modified_base 45: mod_base = OTHER; note = 2'-Omethylguanosine
  modified_base 46: mod_base = OTHER; note = 2'-fluoroguanosine
  modified_base 47: mod_base = OTHER; note = 2'-fluorouridine
  modified_base 48: mod_base = OTHER; note = 2'-fluorocytosine
  modified_base 56: mod_base = OTHER; note = 2'-Omethylcytosine
  modified_base 59: mod_base = OTHER; note = 2'-Omethyladenosine
  modified_base 73: mod_base = OTHER; note = 2'-Omethyladenosine

SEQ ID NO: 5106 - RNA, 85 nt, synthetic construct; identical to SEQ ID NO: 3286
  source 1..85: mol_type = other RNA
  modified_base 1: mod_base = OTHER; note = 2'-Omethylcytosine
  modified_base 2: mod_base = OTHER; note = Cytosine phosphorothiorate
  modified_base 20: mod_base = OTHER; note = Adenosine phosphorothiorate
  modified_base 22: mod_base = OTHER; note = 2'-fluoroguanosine phosphorothiorate
  modified_base 27: mod_base = OTHER; note = 2'-Omethyluridine phosphorothiorate
  modified_base 33: mod_base = OTHER; note = 2'-fluorouridine
  modified_base 37: mod_base = OTHER; note = Adenosine phosphorothiorate
  modified_base 43: mod_base = OTHER; note = Uridine phosphorothiorate
  modified_base 46: mod_base = OTHER; note = 2'-Omethyladenosine
  modified_base 55: mod_base = OTHER; note = Cytosine phosphorothiorate
  modified_base 57: mod_base = OTHER; note = 2'-Omethylcytosine
  modified_base 79: mod_base = OTHER; note = 2'-fluoroguanosine
  modified_base 84: mod_base = OTHER; note = 2'-Omethylcytosine phosphorothiorate

SEQ ID NO: 5107 - RNA, 85 nt, synthetic construct; identical to SEQ ID NO: 3317
  source 1..85: mol_type = other RNA
  modified_base 1: mod_base = OTHER; note = 2'-Omethylguanosine phosphorothiorate
  modified_base 12: mod_base = OTHER; note = Cytosine phosphorothiorate
  modified_base 59: mod_base = OTHER; note = 2'-Omethylcytosine
  modified_base 81: mod_base = OTHER; note = 2'-Omethylcytosine phosphorothiorate

SEQ ID NO: 5108 - RNA, 75 nt, synthetic construct; identical to SEQ ID NO: 3336
  source 1..75: mol_type = other RNA
  modified_base 8: mod_base = OTHER; note = 2'-fluoroadenosine
  modified_base 16: mod_base = OTHER; note = 2'-fluorocytosine
  modified_base 20: mod_base = OTHER; note = 2'-fluoroadenosine
  modified_base 22: mod_base = OTHER; note = 2'-fluoroadenosine
  modified_base 46: mod_base = OTHER; note = 2'-fluorouridine
  modified_base 48: mod_base = OTHER; note = 2'-fluorocytosine
  modified_base 58: mod_base = OTHER; note = 2'-fluoroguanosine
  modified_base 73: mod_base = OTHER; note = Cytosine phosphorothiorate
  modified_base 74: mod_base = OTHER; note = 2'-Omethylcytosine

SEQ ID NO: 5109 - RNA, 85 nt, synthetic construct; identical to SEQ ID NO: 3286
  source 1..85: mol_type = other RNA
  modified_base 1: mod_base = OTHER; note = 2'-Omethylcytosine
  modified_base 3: mod_base = OTHER; note = 2'-fluoroadenosine
  modified_base 11: mod_base = OTHER; note = Cytosine phosphorothiorate
  modified_base 23: mod_base = OTHER; note = 2'-fluoroguanosine
  modified_base 27: mod_base = OTHER; note = 2'-fluorouridine
  modified_base 30: mod_base = OTHER; note = 2'-fluoroadenosine
  modified_base 34: mod_base = OTHER; note = Uridine phosphorothiorate
  modified_base 43: mod_base = OTHER; note = 2'-Omethyluridine
  modified_base 46: mod_base = OTHER; note = Adenosine phosphorothiorate
  modified_base 47: mod_base = OTHER; note = 2'-fluorocytosine
  modified_base 48: mod_base = OTHER; note = 2'-fluoroadenosine phosphorothiorate
  modified_base 54: mod_base = OTHER; note = 2'-Omethylcytosine
  modified_base 56: mod_base = OTHER; note = 2'-fluoroguanosine
  modified_base 57: mod_base = OTHER; note = 2'-Omethylcytosine
  modified_base 59: mod_base = OTHER; note = 2'-fluorouridine phosphorothiorate
  modified_base 79: mod_base = OTHER; note = 2'-fluoroguanosine
  modified_base 80: mod_base = OTHER; note = 2'-Omethylguanosine
  modified_base 84: mod_base = OTHER; note = 2'-Omethylcytosine phosphorothiorate

SEQ ID NO: 5110 - DNA, 76 bp, synthetic construct; identical to SEQ ID NO: 1924
  source 1..76: mol_type = other DNA
  modified_base 1: mod_base = OTHER; note = 2'-Omethylguanosine phosphorothiorate
  modified_base 2: mod_base = OTHER; note = 2'-Omethylguanosine phosphorothiorate
  modified_base 26: mod_base = OTHER; note = 2'-Omethyladenosine
  modified_base 49: mod_base = OTHER; note = 2'-O-(2-Methoxyethyl) 5-methylcytosine
  modified_base 74: mod_base = OTHER; note = Cytosine phosphorothiorate
  modified_base 75: mod_base = OTHER; note = 2'-Omethylcytosine
  misc_feature 1..58: note = RNA
  misc_feature 59: note = DNA
  misc_feature 60..76: note = RNA

SEQ ID NO: 5111 - RNA, 75 nt, synthetic construct; identical to SEQ ID NO: 1045
  source 1..75: mol_type = other RNA
  modified_base 2: mod_base = OTHER; note = 2'-Omethylguanosine phosphorothiorate
  modified_base 3: mod_base = OTHER; note = 2'-Omethyluridine phosphorothiorate
  modified_base 14: mod_base = OTHER; note = Adenosine phosphorothiorate
  modified_base 15: mod_base = OTHER; note = 2'-Omethyladenosine
  modified_base 26: mod_base = OTHER; note = Uridine phosphorothiorate
  modified_base 30: mod_base = OTHER; note = 2'-Omethylguanosine
  modified_base 31: mod_base = OTHER; note = 2'-fluoroadenosine phosphorothiorate
  modified_base 42: mod_base = OTHER; note = Adenosine phosphorothiorate
  modified_base 64: mod_base = OTHER; note = 2'-Omethylguanosine phosphorothiorate
  modified_base 65: mod_base = OTHER; note = 2'-Omethyluridine
  modified_base 66: mod_base = OTHER; note = 2'-Omethylguanosine
  modified_base 67: mod_base = OTHER; note = 2'-Omethylguanosine
  modified_base 72: mod_base = OTHER; note = 2'-Omethyluridine
  modified_base 74: mod_base = OTHER; note = 2'-fluorocytosine phosphorothiorate
  modified_base 75: mod_base = OTHER; note = 2'-fluoroadenosine

SEQ ID NO: 5112 - RNA, 75 nt, synthetic construct; identical to SEQ ID NO: 1045
  source 1..75: mol_type = other RNA
  modified_base 2: mod_base = OTHER; note = 2'-Omethylguanosine phosphorothiorate
  modified_base 3: mod_base = OTHER; note = 2'-fluorouridine phosphorothiorate
  modified_base 5: mod_base = OTHER; note = 2'-Omethylcytosine phosphorothiorate
  modified_base 13: mod_base = OTHER; note = 2'-Omethyluridine
  modified_base 15: mod_base = OTHER; note = 2'-fluoroadenosine phosphorothiorate
  modified_base 28: mod_base = OTHER; note = 2'-Omethyluridine
  modified_base 30: mod_base = OTHER; note = 2'-Omethylguanosine phosphorothiorate
  modified_base 31: mod_base = OTHER; note = 2'-Omethyladenosine phosphorothiorate
  modified_base 52: mod_base = OTHER; note = 2'-Omethylguanosine
  modified_base 53: mod_base = OTHER; note = 2'-Omethyluridine
  modified_base 60: mod_base = OTHER; note = Cytosine phosphorothiorate
  modified_base 67: mod_base = OTHER; note = 2'-Omethylguanosine phosphorothiorate
  modified_base 69: mod_base = OTHER; note = 2'-fluoroadenosine
  modified_base 72: mod_base = OTHER; note = 2'-Omethyluridine
  modified_base 75: mod_base = OTHER; note = 2'-Omethyladenosine

SEQ ID NO: 5113 - RNA, 76 nt, synthetic construct; identical to SEQ ID NO: 3419
  source 1..76: mol_type = other RNA
  modified_base 1: mod_base = OTHER; note = 2'-Omethylguanosine
  modified_base 2: mod_base = OTHER; note = 2'-Omethylguanosine
  modified_base 3: mod_base = OTHER; note = 2'-Omethylcytosine
  modified_base 4: mod_base = OTHER; note = 2'-Omethyluridine
  modified_base 5: mod_base = OTHER; note = 2'-Omethylcytosine
  modified_base 6: mod_base = OTHER; note = 2'-Omethylcytosine
  modified_base 10: mod_base = OTHER; note = 2'-Omethylguanosine
  modified_base 11: mod_base = OTHER; note = 2'-Omethylcytosine
  modified_base 12: mod_base = OTHER; note = 2'-Omethylguanosine
  modified_base 13: mod_base = OTHER; note = 2'-Omethylcytosine
  modified_base 14: mod_base = OTHER; note = 2'-Omethyladenosine
  modified_base 15: mod_base = OTHER; note = 2'-fluoroadenosine
  modified_base 16: mod_base = OTHER; note = 2'-Omethyluridine
  modified_base 17: mod_base = OTHER; note = 2'-Omethylguanosine
  modified_base 18: mod_base = OTHER; note = 2'-Omethylguanosine
  modified_base 19: mod_base = OTHER; note = 2'-fluoroadenosine
  modified_base 20: mod_base = OTHER; note = 2'-Omethyluridine
  modified_base 25: mod_base = OTHER; note = 2'-Omethylcytosine
  modified_base 33: mod_base = OTHER; note = 2'-fluorouridine
  modified_base 35: mod_base = OTHER; note = Cytosine phosphorothiorate
  modified_base 37: mod_base = OTHER; note = Adenosine phosphorothiorate
  modified_base 38: mod_base = OTHER; note = Adenosine phosphorothiorate
  modified_base 41: mod_base = OTHER; note = 2'-Omethylguanosine
  modified_base 42: mod_base = OTHER; note = 2'-Omethylguanosine
  modified_base 43: mod_base = OTHER; note = 2'-Omethyluridine
  modified_base 44: mod_base = OTHER; note = 2'-Omethyladenosine
  modified_base 49: mod_base = OTHER; note = 2'-Omethylcytosine
  modified_base 50: mod_base = OTHER; note = 2'-Omethylcytosine
  modified_base 52: mod_base = OTHER; note = 2'-Omethylguanosine
  modified_base 54: mod_base = OTHER; note = 2'-Omethyluridine
  modified_base 55: mod_base = OTHER; note = Uridine phosphorothiorate
  modified_base 56: mod_base = OTHER; note = 2'-Omethylcytosine
  modified_base 57: mod_base = OTHER; note = 2'-fluoroguanosine
  modified_base 59: mod_base = OTHER; note = 2'-Omethylguanosine
  modified_base 61: mod_base = OTHER; note = 2'-Omethylcytosine
  modified_base 65: mod_base = OTHER; note = 2'-Omethylguanosine
  modified_base 73: mod_base = OTHER; note = 2'-Omethylguanosine

SEQ ID NO: 5114 - RNA, 85 nt, synthetic construct; identical to SEQ ID NO: 3286
  source 1..85: mol_type = other RNA
  modified_base 1: mod_base = OTHER; note = 2'-fluorocytosine
  modified_base 12: mod_base = OTHER; note = Guanosine phosphorothiorate
  modified_base 26: mod_base = OTHER; note = 2'-fluorouridine
  modified_base 42: mod_base = OTHER; note = Adenosine phosphorothiorate
  modified_base 45: mod_base = OTHER; note = 2'-Omethylguanosine
  modified_base 84: mod_base = OTHER; note = Cytosine phosphorothiorate

SEQ ID NO: 5115 - RNA, 76 nt, synthetic construct; identical to SEQ ID NO: 625
  source 1..76: mol_type = other RNA
  modified_base 1: mod_base = OTHER; note = 2'-Omethylguanosine
  modified_base 10: mod_base = OTHER; note = 2'-Omethylguanosine
  modified_base 13: mod_base = OTHER; note = 2'-Omethylcytosine
  modified_base 17: mod_base = OTHER; note = Guanosine phosphorothiorate
  modified_base 18: mod_base = OTHER; note = 2'-Omethylguanosine
  modified_base 19: mod_base = OTHER; note = Adenosine phosphorothiorate
  modified_base 20: mod_base = OTHER; note = 2'-Omethyluridine
  modified_base 25: mod_base = OTHER; note = 2'-Omethylcytosine
  modified_base 29: mod_base = OTHER; note = 2'-Omethylguanosine
  modified_base 33: mod_base = OTHER; note = 2'-fluorouridine
  modified_base 35: mod_base = OTHER; note = Cytosine phosphorothiorate
  modified_base 37: mod_base = OTHER; note = Adenosine phosphorothiorate
  modified_base 38: mod_base = OTHER; note = Adenosine phosphorothiorate
  modified_base 43: mod_base = OTHER; note = 2'-Omethyladenosine
  modified_base 44: mod_base = OTHER; note = 2'-fluoroadenosine
  modified_base 46: mod_base = OTHER; note = Guanosine phosphorothiorate
  modified_base 50: mod_base = OTHER; note = 2'-Omethylcytosine
  modified_base 52: mod_base = OTHER; note = 2'-Omethylguanosine
  modified_base 54: mod_base = OTHER; note = Uridine phosphorothiorate
  modified_base 55: mod_base = OTHER; note = Uridine phosphorothiorate
  modified_base 56: mod_base = OTHER; note = 2'-Omethylcytosine
  modified_base 57: mod_base = OTHER; note = Guanosine phosphorothiorate
  modified_base 62: mod_base = OTHER; note = 2'-Omethylcytosine
  modified_base 63: mod_base = OTHER; note = 2'-fluorocytosine
  modified_base 65: mod_base = OTHER; note = 2'-Omethylguanosine
  modified_base 68: mod_base = OTHER; note = 2'-Omethylguanosine
  modified_base 71: mod_base = OTHER; note = 2'-Omethyluridine
  modified_base 73: mod_base = OTHER; note = 2'-Omethylguanosine

SEQ ID NO: 5116 - RNA, 85 nt, synthetic construct; identical to SEQ ID NO: 3317
  source 1..85: mol_type = other RNA
  modified_base 1: mod_base = OTHER; note = Guanosine phosphorothiorate
  modified_base 2: mod_base = OTHER; note = 2'-Omethylcytosine
  modified_base 11: mod_base = OTHER; note = 2'-Omethylcytosine phosphorothiorate
  modified_base 12: mod_base = OTHER; note = 2'-Omethylcytosine phosphorothiorate
  modified_base 28: mod_base = OTHER; note = 2'-Omethyluridine phosphorothiorate
  modified_base 36: mod_base = OTHER; note = 2'-fluoroadenosine
  modified_base 37: mod_base = OTHER; note = 2'-Omethyladenosine phosphorothiorate
  modified_base 38: mod_base = OTHER; note = 2'-fluoroadenosine
  modified_base 42: mod_base = OTHER; note = 2'-Omethyladenosine phosphorothiorate
  modified_base 48: mod_base = OTHER; note = Guanosine phosphorothiorate
  modified_base 50: mod_base = OTHER; note = 2'-Omethylcytosine phosphorothiorate
  modified_base 72: mod_base = OTHER; note = 2'-fluorouridine
  modified_base 81: mod_base = OTHER; note = 2'-Omethylcytosine phosphorothiorate
  modified_base 82: mod_base = OTHER; note = 2'-fluoroguanosine
  modified_base 83: mod_base = OTHER; note = 2'-fluorocytosine phosphorothiorate

SEQ ID NO: 5117 - RNA, 85 nt, synthetic construct; identical to SEQ ID NO: 3310
  source 1..85: mol_type = other RNA
  modified_base 1: mod_base = OTHER; note = 2'-Omethylcytosine
  modified_base 16: mod_base = OTHER; note = Guanosine phosphorothiorate
  modified_base 28: mod_base = OTHER; note = 2'-fluoroguanosine
  modified_base 34: mod_base = OTHER; note = 2'-fluorouridine
  modified_base 36: mod_base = OTHER; note = Guanosine phosphorothiorate
  modified_base 42: mod_base = OTHER; note = Adenosine phosphorothiorate
  modified_base 53: mod_base = OTHER; note = 2'-fluorouridine
  modified_base 65: mod_base = OTHER; note = Cytosine phosphorothiorate
  modified_base 83: mod_base = OTHER; note = Cytosine phosphorothiorate
  modified_base 84: mod_base = OTHER; note = 2'-fluorocytosine phosphorothiorate

SEQ ID NO: 5118 - RNA, 76 nt, synthetic construct; identical to SEQ ID NO: 625
  source 1..76: mol_type = other RNA
  modified_base 1: mod_base = OTHER; note = 2'-Omethylguanosine phosphorothiorate
  modified_base 4: mod_base = OTHER; note = 2'-fluorouridine
  modified_base 6: mod_base = OTHER; note = 2'-fluorocytosine
  modified_base 10: mod_base = OTHER; note = 2'-Omethylguanosine
  modified_base 11: mod_base = OTHER; note = 2'-Omethylcytosine
  modified_base 15: mod_base = OTHER; note = Adenosine phosphorothiorate
  modified_base 16: mod_base = OTHER; note = 2'-Omethyluridine
  modified_base 19: mod_base = OTHER; note = Adenosine phosphorothiorate
  modified_base 20: mod_base = OTHER; note = 2'-fluorouridine
  modified_base 22: mod_base = OTHER; note = 2'-Omethylguanosine phosphorothiorate
  modified_base 23: mod_base = OTHER; note = 2'-fluorocytosine
  modified_base 24: mod_base = OTHER; note = 2'-Omethylguanosine
  modified_base 26: mod_base = OTHER; note = Adenosine phosphorothiorate
  modified_base 27: mod_base = OTHER; note = 2'-fluorouridine
  modified_base 29: mod_base = OTHER; note = 2'-Omethylguanosine
  modified_base 31: mod_base = OTHER; note = 2'-fluoroadenosine
  modified_base 32: mod_base = OTHER; note = 2'-fluorocytosine
  modified_base 38: mod_base = OTHER; note = 2'-Omethyladenosine
  modified_base 43: mod_base = OTHER; note = Adenosine phosphorothiorate
  modified_base 46: mod_base = OTHER; note = 2'-fluoroguanosine
  modified_base 49: mod_base = OTHER; note = Cytosine phosphorothiorate
  modified_base 50: mod_base = OTHER; note = 2'-Omethylcytosine
  modified_base 51: mod_base = OTHER; note = 2'-Omethylguanosine
  modified_base 52: mod_base = OTHER; note = 2'-fluoroguanosine phosphorothiorate
  modified_base 53: mod_base = OTHER; note = 2'-fluoroguanosine
  modified_base 54: mod_base = OTHER; note = 2'-Omethyluridine phosphorothiorate
  modified_base 56: mod_base = OTHER; note = 2'-Omethylcytosine
  modified_base 58: mod_base = OTHER; note = 2'-fluoroadenosine
  modified_base 59: mod_base = OTHER; note = Guanosine phosphorothiorate
  modified_base 60: mod_base = OTHER; note = Uridine phosphorothiorate
  modified_base 61: mod_base = OTHER; note = 2'-fluorocytosine
  modified_base 65: mod_base = OTHER; note = Guanosine phosphorothiorate
  modified_base 66: mod_base = OTHER; note = 2'-Omethylcytosine
  modified_base 68: mod_base = OTHER; note = Guanosine phosphorothiorate
  modified_base 69: mod_base = OTHER; note = 2'-Omethyladenosine
  modified_base 73: mod_base = OTHER; note = 2'-fluoroguanosine
  modified_base 75: mod_base = OTHER; note = 2'-Omethylcytosine

SEQ ID NO: 5119 - RNA, 76 nt, synthetic construct; identical to SEQ ID NO: 625
  source 1..76: mol_type = other RNA
  modified_base 2: mod_base = OTHER; note = 2'-fluoroguanosine
  modified_base 4: mod_base = OTHER; note = Uridine phosphorothiorate
  modified_base 11: mod_base = OTHER; note = 2'-fluorocytosine
  modified_base 12: mod_base = OTHER; note = 2'-Omethylguanosine
  modified_base 15: mod_base = OTHER; note = 2'-Omethyladenosine phosphorothiorate
  modified_base 16: mod_base = OTHER; note = Uridine phosphorothiorate
  modified_base 18: mod_base = OTHER; note = 2'-fluoroguanosine
  modified_base 24: mod_base = OTHER; note = 2'-fluoroguanosine
  modified_base 26: mod_base = OTHER; note = 2'-fluoroadenosine
  modified_base 28: mod_base = OTHER; note = 2'-fluorouridine
  modified_base 37: mod_base = OTHER; note = Adenosine phosphorothiorate
  modified_base 38: mod_base = OTHER; note = 2'-Omethyladenosine
  modified_base 39: mod_base = OTHER; note = 2'-fluorouridine
  modified_base 40: mod_base = OTHER; note = 2'-Omethyluridine
  modified_base 42: mod_base = OTHER; note = 2'-fluoroadenosine
  modified_base 44: mod_base = OTHER; note = 2'-Omethyladenosine
  modified_base 45: mod_base = OTHER; note = 2'-fluoroguanosine
  modified_base 46: mod_base = OTHER; note = 2'-fluoroguanosine
  modified_base 48: mod_base = OTHER; note = Uridine phosphorothiorate
  modified_base 51: mod_base = OTHER; note = 2'-Omethylguanosine
  modified_base 53: mod_base = OTHER; note = Guanosine phosphorothiorate
  modified_base 54: mod_base = OTHER; note = 2'-Omethyluridine phosphorothiorate
  modified_base 56: mod_base = OTHER; note = 2'-fluorocytosine phosphorothiorate
  modified_base 62: mod_base = OTHER; note = 2'-fluorocytosine
  modified_base 63: mod_base = OTHER; note = 2'-fluorocytosine phosphorothiorate
  modified_base 64: mod_base = OTHER; note = 2'-Omethylguanosine
  modified_base 65: mod_base = OTHER; note = 2'-Omethylguanosine
  modified_base 67: mod_base = OTHER; note = 2'-Omethylguanosine
  modified_base 68: mod_base = OTHER; note = 2'-Omethylguanosine
  modified_base 70: mod_base = OTHER; note = 2'-Omethylguanosine
  modified_base 72: mod_base = OTHER; note = 2'-Omethylcytosine

SEQ ID NO: 5120 - RNA, 76 nt, synthetic construct; identical to SEQ ID NO: 625
  source 1..76: mol_type = other RNA
  modified_base 1: mod_base = OTHER; note = 2'-Omethylguanosine
  modified_base 17: mod_base = OTHER; note = 2'-Omethylguanosine
  modified_base 18: mod_base = OTHER; note = 2'-Omethylguanosine
  modified_base 33: mod_base = OTHER; note = 2'-fluorouridine
  modified_base 50: mod_base = OTHER; note = 2'-Omethylcytosine
  modified_base 52: mod_base = OTHER; note = 2'-Omethylguanosine
  modified_base 55: mod_base = OTHER; note = Uridine phosphorothiorate
  modified_base 60: mod_base = OTHER; note = Thymine
  modified_base 73: mod_base = OTHER; note = 2'-Omethylguanosine

SEQ ID NO: 5121 - RNA, 76 nt, synthetic construct; identical to SEQ ID NO: 625
  source 1..76: mol_type = other RNA
  modified_base 1: mod_base = OTHER; note = 2'-Omethylguanosine phosphorothiorate
  modified_base 2: mod_base = OTHER; note = 2'-Omethylguanosine phosphorothiorate
  modified_base 3: mod_base = OTHER; note = 2'-Omethylcytosine phosphorothiorate
  modified_base 4: mod_base = OTHER; note = 2'-Omethyluridine phosphorothiorate
  modified_base 5: mod_base = OTHER; note = 2'-Omethylcytosine phosphorothiorate
  modified_base 6: mod_base = OTHER; note = 2'-Omethylcytosine phosphorothiorate
  modified_base 10: mod_base = OTHER; note = 2'-Omethylguanosine
  modified_base 11: mod_base = OTHER; note = 2'-Omethylcytosine
  modified_base 12: mod_base = OTHER; note = 2'-Omethylguanosine
  modified_base 13: mod_base = OTHER; note = 2'-Omethylcytosine
  modified_base 22: mod_base = OTHER; note = 2'-Omethylguanosine
  modified_base 23: mod_base = OTHER; note = 2'-Omethylcytosine
  modified_base 24: mod_base = OTHER; note = 2'-Omethylguanosine
  modified_base 25: mod_base = OTHER; note = 2'-Omethylcytosine
  modified_base 61: mod_base = OTHER; note = 2'-Omethylcytosine
  modified_base 62: mod_base = OTHER; note = 2'-Omethylcytosine
  modified_base 63: mod_base = OTHER; note = 2'-Omethylcytosine
  modified_base 64: mod_base = OTHER; note = 2'-Omethylguanosine
  modified_base 65: mod_base = OTHER; note = 2'-Omethylguanosine
  modified_base 66: mod_base = OTHER; note = 2'-Omethylcytosine
  modified_base 67: mod_base = OTHER; note = 2'-Omethylguanosine
  modified_base 68: mod_base = OTHER; note = 2'-Omethylguanosine
  modified_base 69: mod_base = OTHER; note = 2'-Omethyladenosine

SEQ ID NO: 5122 - RNA, 86 nt, synthetic construct; identical to SEQ ID NO: 3290
  source 1..86: mol_type = other RNA
  modified_base 1: mod_base = OTHER; note = 2'-Omethyladenosine phosphorothiorate
  modified_base 2: mod_base = OTHER; note = 2'-Omethylcytosine
  modified_base 3: mod_base = OTHER; note = 2'-Omethylcytosine
  modified_base 4: mod_base = OTHER; note = 2'-Omethyladenosine
  modified_base 5: mod_base = OTHER; note = 2'-Omethylguanosine
  modified_base 6: mod_base = OTHER; note = 2'-Omethylguanosine
  modified_base 27: mod_base = OTHER; note = 2'-Omethyluridine
  modified_base 28: mod_base = OTHER; note = 2'-Omethyluridine
  modified_base 29: mod_base = OTHER; note = 2'-fluoroguanosine
  modified_base 30: mod_base = OTHER; note = 2'-Omethylguanosine
  modified_base 40: mod_base = OTHER; note = 2'-fluorocytosine
  modified_base 41: mod_base = OTHER; note = 2'-Omethylcytosine
  modified_base 42: mod_base = OTHER; note = 2'-Omethyladenosine
  modified_base 43: mod_base = OTHER; note = 2'-Omethyladenosine
  modified_base 83: mod_base = OTHER; note = 2'-Omethyladenosine

SEQ ID NO: 5123 - RNA, 86 nt, synthetic construct; identical to SEQ ID NO: 3290
  source 1..86: mol_type = other RNA
  modified_base 1: mod_base = OTHER; note = 2'-Omethyladenosine phosphorothiorate
  modified_base 2: mod_base = OTHER; note = 2'-Omethylcytosine phosphorothiorate
  modified_base 3: mod_base = OTHER; note = 2'-Omethylcytosine
  modified_base 4: mod_base = OTHER; note = 2'-Omethyladenosine
  modified_base 5: mod_base = OTHER; note = 2'-Omethylguanosine
  modified_base 6: mod_base = OTHER; note = 2'-Omethylguanosine
  modified_base 10: mod_base = OTHER; note = 2'-Omethylguanosine
  modified_base 11: mod_base = OTHER; note = 2'-Omethylcytosine
  modified_base 12: mod_base = OTHER; note = 2'-Omethylcytosine
  modified_base 13: mod_base = OTHER; note = 2'-Omethylguanosine
  modified_base 16: mod_base = OTHER; note = 2'-Omethyluridine
  modified_base 17: mod_base = OTHER; note = 2'-Omethylguanosine
  modified_base 18: mod_base = OTHER; note = 2'-Omethylguanosine
  modified_base 33: mod_base = OTHER; note = 2'-fluorouridine
  modified_base 35: mod_base = OTHER; note = Cytosine phosphorothiorate
  modified_base 37: mod_base = OTHER; note = Guanosine phosphorothiorate
  modified_base 38: mod_base = OTHER; note = Adenosine phosphorothiorate
  modified_base 44: mod_base = OTHER; note = 2'-Omethyluridine
  modified_base 57: mod_base = OTHER; note = 2'-fluoroguanosine
  modified_base 58: mod_base = OTHER; note = 2'-fluorocytosine
  modified_base 59: mod_base = OTHER; note = 2'-Omethylguanosine
  modified_base 60: mod_base = OTHER; note = 2'-Omethyluridine
  modified_base 61: mod_base = OTHER; note = 2'-Omethylguanosine
  modified_base 62: mod_base = OTHER; note = 2'-Omethylguanosine
  modified_base 63: mod_base = OTHER; note = 2'-Omethylguanosine
  modified_base 64: mod_base = OTHER; note = 2'-Omethyluridine
  modified_base 66: mod_base = OTHER; note = 2'-Omethylcytosine
  modified_base 69: mod_base = OTHER; note = 2'-Omethyladenosine
  modified_base 71: mod_base = OTHER; note = 2'-Omethylcytosine
  modified_base 72: mod_base = OTHER; note = 2'-Omethylcytosine
  modified_base 73: mod_base = OTHER; note = 2'-fluorocytosine
  modified_base 74: mod_base = OTHER; note = 2'-Omethyladenosine
  modified_base 75: mod_base = OTHER; note = 2'-Omethylcytosine
  modified_base 76: mod_base = OTHER; note = 2'-Omethyluridine
  modified_base 77: mod_base = OTHER; note = 2'-Omethylcytosine
  modified_base 78: mod_base = OTHER; note = 2'-Omethylcytosine
  modified_base 83: mod_base = OTHER; note = 2'-Omethyladenosine

SEQ ID NO: 5124 - RNA, 76 nt, synthetic construct; identical to SEQ ID NO: 625
  source 1..76: mol_type = other RNA
  modified_base 1: mod_base = OTHER; note = 2'-Omethylguanosine
  modified_base 2: mod_base = OTHER; note = 2'-Omethylguanosine
  modified_base 3: mod_base = OTHER; note = 2'-Omethylcytosine
  modified_base 4: mod_base = OTHER; note = 2'-Omethyluridine
  modified_base 5: mod_base = OTHER; note = 2'-Omethylcytosine
  modified_base 6: mod_base = OTHER; note = 2'-Omethylcytosine
  modified_base 10: mod_base = OTHER; note = 2'-Omethylguanosine
  modified_base 11: mod_base = OTHER; note = 2'-Omethylcytosine phosphorothiorate
  modified_base 12: mod_base = OTHER; note = 2'-Omethylguanosine phosphorothiorate
  modified_base 13: mod_base = OTHER; note = 2'-Omethylcytosine
  modified_base 14: mod_base = OTHER; note = 2'-Omethyladenosine
  modified_base 15: mod_base = OTHER; note = 2'-Omethyladenosine
  modified_base 16: mod_base = OTHER; note = 2'-fluorouridine phosphorothiorate
  modified_base 17: mod_base = OTHER; note = 2'-Omethylguanosine
  modified_base 18: mod_base = OTHER; note = 2'-fluoroguanosine phosphorothiorate
  modified_base 20: mod_base = OTHER; note = Uridine phosphorothiorate
  modified_base 21: mod_base = OTHER; note = 2'-Omethyladenosine phosphorothiorate
  modified_base 22: mod_base = OTHER; note = 2'-fluoroguanosine phosphorothiorate
  modified_base 23: mod_base = OTHER; note = 2'-Omethylcytosine
  modified_base 24: mod_base = OTHER; note = 2'-Omethylguanosine
  modified_base 25: mod_base = OTHER; note = 2'-Omethylcytosine
  modified_base 26: mod_base = OTHER; note = Adenosine phosphorothiorate
  modified_base 28: mod_base = OTHER; note = 2'-Omethyluridine phosphorothiorate
  modified_base 29: mod_base = OTHER; note = 2'-fluoroguanosine
  modified_base 30: mod_base = OTHER; note = 2'-fluoroguanosine phosphorothiorate
  modified_base 33: mod_base = OTHER; note = 2'-fluorouridine
  modified_base 34: mod_base = OTHER; note = 2'-Omethyluridine phosphorothiorate
  modified_base 35: mod_base = OTHER; note = 2'-Omethylcytosine phosphorothiorate
  modified_base 37: mod_base = OTHER; note = Adenosine phosphorothiorate
  modified_base 38: mod_base = OTHER; note = Adenosine phosphorothiorate
  modified_base 40: mod_base = OTHER; note = 2'-fluorouridine
  modified_base 41: mod_base = OTHER; note = 2'-fluorocytosine
  modified_base 42: mod_base = OTHER; note = Adenosine phosphorothiorate
  modified_base 43: mod_base = OTHER; note = Adenosine phosphorothiorate
  modified_base 44: mod_base = OTHER; note = 2'-Omethyladenosine
  modified_base 45: mod_base = OTHER; note = 2'-fluoroguanosine
  modified_base 48: mod_base = OTHER; note = 2'-fluorouridine
  modified_base 50: mod_base = OTHER; note = 2'-Omethylcytosine phosphorothiorate
  modified_base 52: mod_base = OTHER; note = 2'-Omethylguanosine phosphorothiorate
  modified_base 53: mod_base = OTHER; note = 2'-fluoroguanosine
  modified_base 54: mod_base = OTHER; note = Uridine phosphorothiorate
  modified_base 55: mod_base = OTHER; note = Uridine phosphorothiorate
  modified_base 59: mod_base = OTHER; note = 2'-Omethylguanosine
  modified_base 61: mod_base = OTHER; note = 2'-Omethylcytosine
  modified_base 62: mod_base = OTHER; note = 2'-Omethylcytosine
  modified_base 64: mod_base = OTHER; note = 2'-Omethylguanosine
  modified_base 65: mod_base = OTHER; note = 2'-Omethylguanosine
  modified_base 66: mod_base = OTHER; note = 2'-Omethylcytosine phosphorothiorate
  modified_base 67: mod_base = OTHER; note = 2'-fluoroguanosine
  modified_base 68: mod_base = OTHER; note = 2'-Omethylguanosine phosphorothiorate
  modified_base 69: mod_base = OTHER; note = 2'-fluoroadenosine
  modified_base 72: mod_base = OTHER; note = 2'-fluorocytosine phosphorothiorate
  modified_base 73: mod_base = OTHER; note = 2'-Omethylguanosine
  modified_base 74: mod_base = OTHER; note = 2'-fluorocytosine phosphorothiorate
  modified_base 75: mod_base = OTHER; note = 2'-fluorocytosine phosphorothiorate
  modified_base 76: mod_base = OTHER; note = 2'-Omethyladenosine

SEQ ID NO: 5125 - RNA, 85 nt, synthetic construct; identical to SEQ ID NO: 3286
  source 1..85: mol_type = other RNA
  modified_base 1: mod_base = OTHER; note = 2'-Omethylcytosine
  modified_base 26: mod_base = OTHER; note = 2'-fluorouridine
  modified_base 34: mod_base = OTHER; note = 2'-fluorouridine
  modified_base 51: mod_base = OTHER; note = 2'-Omethyluridine
  modified_base 57: mod_base = OTHER; note = 2'-Omethylcytosine
  modified_base 65: mod_base = OTHER; note = Cytosine phosphorothiorate
  modified_base 83: mod_base = OTHER; note = 2'-Omethylcytosine

SEQ ID NO: 5126 - RNA, 76 nt, synthetic construct; identical to SEQ ID NO: 3447
  source 1..76: mol_type = other RNA
  modified_base 1: mod_base = OTHER; note = 2'-Omethylguanosine
  modified_base 2: mod_base = OTHER; note = 2'-Omethylcytosine
  modified_base 3: mod_base = OTHER; note = 2'-Omethylcytosine
  modified_base 4: mod_base = OTHER; note = 2'-Omethylcytosine
  modified_base 5: mod_base = OTHER; note = 2'-Omethylguanosine
  modified_base 6: mod_base = OTHER; note = 2'-Omethyladenosine
  modified_base 13: mod_base = OTHER; note = 2'-Omethylcytosine
  modified_base 14: mod_base = OTHER; note = 2'-Omethyladenosine
  modified_base 15: mod_base = OTHER; note = 2'-Omethyladenosine
  modified_base 16: mod_base = OTHER; note = 2'-Omethyluridine
  modified_base 17: mod_base = OTHER; note = 2'-Omethylguanosine
  modified_base 18: mod_base = OTHER; note = 2'-Omethylguanosine
  modified_base 19: mod_base = OTHER; note = Adenosine phosphorothiorate
  modified_base 20: mod_base = OTHER; note = 2'-Omethyluridine
  modified_base 21: mod_base = OTHER; note = Adenosine phosphorothiorate
  modified_base 25: mod_base = OTHER; note = 2'-Omethylcytosine
  modified_base 33: mod_base = OTHER; note = Uridine phosphorothiorate
  modified_base 34: mod_base = OTHER; note = 2'-Omethyluridine
  modified_base 35: mod_base = OTHER; note = Cytosine phosphorothiorate
  modified_base 37: mod_base = OTHER; note = Adenosine phosphorothiorate
  modified_base 38: mod_base = OTHER; note = Adenosine phosphorothiorate
  modified_base 49: mod_base = OTHER; note = 2'-Omethylcytosine
  modified_base 50: mod_base = OTHER; note = 2'-Omethylcytosine
  modified_base 51: mod_base = OTHER; note = 2'-Omethylguanosine
  modified_base 52: mod_base = OTHER; note = 2'-Omethylguanosine
  modified_base 53: mod_base = OTHER; note = 2'-Omethylguanosine
  modified_base 54: mod_base = OTHER; note = Uridine phosphorothiorate
  modified_base 55: mod_base = OTHER; note = Uridine phosphorothiorate
  modified_base 61: mod_base = OTHER; note = 2'-Omethylcytosine
  modified_base 65: mod_base = OTHER; note = 2'-Omethylguanosine
  modified_base 73: mod_base = OTHER; note = 2'-Omethylguanosine

SEQ ID NO: 5127 - RNA, 74 nt, synthetic construct; identical to SEQ ID NO: 766
  source 1..74: mol_type = other RNA
  modified_base 1: mod_base = OTHER; note = 2'-Omethylguanosine
  modified_base 14: mod_base = OTHER; note = 2'-Omethyladenosine
  modified_base 15: mod_base = OTHER; note = 2'-fluoroadenosine
  modified_base 16: mod_base = OTHER; note = 2'-Omethyluridine
  modified_base 17: mod_base = OTHER; note = 2'-Omethylguanosine
  modified_base 18: mod_base = OTHER; note = 2'-Omethylguanosine
  modified_base 19: mod_base = OTHER; note = 2'-fluoroadenosine
  modified_base 20: mod_base = OTHER; note = 2'-Omethyluridine
  modified_base 73: mod_base = OTHER; note = 2'-Omethylguanosine

SEQ ID NO: 5128 - DNA, 76 bp, synthetic construct; identical to SEQ ID NO: 1924
  source 1..76: mol_type = other DNA
  modified_base 1: mod_base = OTHER; note = 2'-Omethylguanosine
  modified_base 2: mod_base = OTHER; note = Guanosine phosphorothiorate
  modified_base 4: mod_base = OTHER; note = Uridine phosphorothiorate
  modified_base 9: mod_base = OTHER; note = 2'-Omethylguanosine phosphorothiorate
  modified_base 12: mod_base = OTHER; note = Guanosine phosphorothiorate
  modified_base 13: mod_base = OTHER; note = 2'-Omethylcytosine
  modified_base 14: mod_base = OTHER; note = 2'-O-(2-Methoxyethyl) adenosine
  modified_base 15: mod_base = OTHER; note = 2'-O-(2-Methoxyethyl) adenosine phosphorothiorate
  modified_base 20: mod_base = OTHER; note = 2'-fluorouridine
  modified_base 23: mod_base = OTHER; note = 2'-O-(2-Methoxyethyl) 5-methylcytosine
  modified_base 28: mod_base = OTHER; note = 2'-Omethyluridine
  modified_base 29: mod_base = OTHER; note = Guanosine phosphorothiorate
  modified_base 30: mod_base = OTHER; note = 2'-fluoroguanosine
  modified_base 32: mod_base = OTHER; note = Cytosine phosphorothiorate
  modified_base 33: mod_base = OTHER; note = 2'-O-(2-Methoxyethyl) thymine
  modified_base 38: mod_base = OTHER; note = 2'-Omethyladenosine
  modified_base 40: mod_base = OTHER; note = 2'-O-(2-Methoxyethyl) thymine
  modified_base 45: mod_base = OTHER; note = 2'-fluoroguanosine phosphorothiorate
  modified_base 46: mod_base = OTHER; note = 2'-fluoroguanosine
  modified_base 50: mod_base = OTHER; note = 2'-fluorocytosine
  modified_base 51: mod_base = OTHER; note = Guanosine phosphorothiorate
  modified_base 53: mod_base = OTHER; note = 2'-O-(2-Methoxyethyl) guanosine
  modified_base 55: mod_base = OTHER; note = 2'-fluorouridine
  modified_base 56: mod_base = OTHER; note = Cytosine phosphorothiorate
  modified_base 57: mod_base = OTHER; note = 2'-O-(2-Methoxyethyl) guanosine
  modified_base 63: mod_base = OTHER; note = Cytosine phosphorothiorate
  modified_base 65: mod_base = OTHER; note = Guanosine phosphorothiorate
  modified_base 66: mod_base = OTHER; note = 2'-O-(2-Methoxyethyl) 5-methylcytosine phosphorothiorate
  modified_base 69: mod_base = OTHER; note = 2'-Omethyladenosine phosphorothiorate
  modified_base 70: mod_base = OTHER; note = 2'-Omethylguanosine
  modified_base 73: mod_base = OTHER; note = Guanosine phosphorothiorate
  modified_base 74: mod_base = OTHER; note = Cytosine phosphorothiorate
  modified_base 75: mod_base = OTHER; note = 2'-O-(2-Methoxyethyl) 5-methylcytosine phosphorothiorate
  modified_base 76: mod_base = OTHER; note = 2'-Omethyladenosine
  misc_feature 1..4: note = RNA
  misc_feature 5..6: note = DNA
  misc_feature 7..41: note = RNA
  misc_feature 42: note = DNA
  misc_feature 43..51: note = RNA
  misc_feature 52: note = DNA
  misc_feature 53..76: note = RNA

SEQ ID NO: 5129 - RNA, 75 nt, synthetic construct; identical to SEQ ID NO: 1045
  source 1..75: mol_type = other RNA
  modified_base 1: mod_base = OTHER; note = 2'-Omethylguanosine
  modified_base 4: mod_base = OTHER; note = 2'-Omethyluridine
  modified_base 10: mod_base = OTHER; note = 2'-Omethylguanosine
  modified_base 11: mod_base = OTHER; note = 2'-Omethyluridine
  modified_base 12: mod_base = OTHER; note = 2'-Omethylguanosine
  modified_base 13: mod_base = OTHER; note = 2'-Omethyluridine
  modified_base 17: mod_base = OTHER; note = 2'-Omethylguanosine
  modified_base 18: mod_base = OTHER; note = 2'-Omethylguanosine
  modified_base 20: mod_base = OTHER; note = 2'-Omethyladenosine
  modified_base 25: mod_base = OTHER; note = 2'-Omethylcytosine
  modified_base 29: mod_base = OTHER; note = 2'-Omethylguanosine
  modified_base 30: mod_base = OTHER; note = 2'-Omethylguanosine
  modified_base 45: mod_base = OTHER; note = 2'-Omethylguanosine
  modified_base 48: mod_base = OTHER; note = 2'-Omethylcytosine
  modified_base 49: mod_base = OTHER; note = 2'-Omethylcytosine
  modified_base 51: mod_base = OTHER; note = 2'-Omethyladenosine
  modified_base 55: mod_base = OTHER; note = 2'-Omethylcytosine
  modified_base 58: mod_base = OTHER; note = 2'-Omethylguanosine
  modified_base 60: mod_base = OTHER; note = 2'-Omethylcytosine
  modified_base 64: mod_base = OTHER; note = 2'-Omethylguanosine
  modified_base 65: mod_base = OTHER; note = 2'-Omethyluridine
  modified_base 67: mod_base = OTHER; note = 2'-Omethylguanosine
  modified_base 68: mod_base = OTHER; note = 2'-Omethyladenosine
  modified_base 70: mod_base = OTHER; note = 2'-Omethylcytosine
  modified_base 71: mod_base = OTHER; note = 2'-Omethylcytosine
  modified_base 72: mod_base = OTHER; note = 2'-Omethyluridine

SEQ ID NO: 5130 - RNA, 76 nt, synthetic construct; identical to SEQ ID NO: 3295
  source 1..76: mol_type = other RNA
  modified_base 1: mod_base = OTHER; note = 2'-fluorocytosine
  modified_base 2: mod_base = OTHER; note = 2'-Omethylcytosine
  modified_base 4: mod_base = OTHER; note = 2'-Omethyluridine
  modified_base 13: mod_base = OTHER; note = 2'-Omethylcytosine phosphorothiorate
  modified_base 15: mod_base = OTHER; note = 2'-fluoroguanosine phosphorothiorate
  modified_base 20: mod_base = OTHER; note = 2'-fluorouridine phosphorothiorate
  modified_base 54: mod_base = OTHER; note = 2'-Omethyluridine
  modified_base 70: mod_base = OTHER; note = 2'-fluoroadenosine

SEQ ID NO: 5131 - RNA, 85 nt, synthetic construct; identical to SEQ ID NO: 3288
  source 1..85: mol_type = other RNA
  modified_base 1: mod_base = OTHER; note = 2'-Omethylcytosine phosphorothiorate
  modified_base 2: mod_base = OTHER; note = 2'-fluorocytosine
  modified_base 3: mod_base = OTHER; note = 2'-fluoroadenosine
  modified_base 14: mod_base = OTHER; note = 2'-Omethylguanosine
  modified_base 25: mod_base = OTHER; note = Guanosine phosphorothiorate
  modified_base 26: mod_base = OTHER; note = 2'-fluorouridine
  modified_base 27: mod_base = OTHER; note = 2'-fluorouridine
  modified_base 30: mod_base = OTHER; note = 2'-fluoroadenosine
  modified_base 34: mod_base = OTHER; note = 2'-fluorocytosine
  modified_base 39: mod_base = OTHER; note = Cytosine phosphorothiorate
  modified_base 40: mod_base = OTHER; note = Cytosine phosphorothiorate
  modified_base 43: mod_base = OTHER; note = Uridine phosphorothiorate
  modified_base 51: mod_base = OTHER; note = 2'-Omethyluridine
  modified_base 53: mod_base = OTHER; note = 2'-fluorouridine
  modified_base 54: mod_base = OTHER; note = 2'-Omethylcytosine
  modified_base 56: mod_base = OTHER; note = 2'-fluoroguanosine
  modified_base 57: mod_base = OTHER; note = 2'-Omethylcytosine
  modified_base 58: mod_base = OTHER; note = 2'-Omethylguanosine
  modified_base 69: mod_base = OTHER; note = Cytosine phosphorothiorate
  modified_base 74: mod_base = OTHER; note = 2'-fluorocytosine
  modified_base 75: mod_base = OTHER; note = 2'-fluorouridine
  modified_base 79: mod_base = OTHER; note = 2'-Omethylguanosine
  modified_base 84: mod_base = OTHER; note = 2'-fluorocytosine phosphorothiorate

SEQ ID NO: 5132 - RNA, 76 nt, synthetic construct; identical to SEQ ID NO: 625
  source 1..76: mol_type = other RNA
  modified_base 1: mod_base = OTHER; note = 2'-Omethylguanosine
  modified_base 4: mod_base = OTHER; note = 2'-Omethyluridine
  modified_base 10: mod_base = OTHER; note = 2'-Omethylguanosine
  modified_base 13: mod_base = OTHER; note = 2'-Omethylcytosine
  modified_base 17: mod_base = OTHER; note = Guanosine phosphorothiorate
  modified_base 18: mod_base = OTHER; note = 2'-Omethylguanosine
  modified_base 19: mod_base = OTHER; note = Adenosine phosphorothiorate
  modified_base 20: mod_base = OTHER; note = 2'-Omethyluridine
  modified_base 25: mod_base = OTHER; note = 2'-Omethylcytosine
  modified_base 29: mod_base = OTHER; note = 2'-Omethylguanosine
  modified_base 33: mod_base = OTHER; note = 2'-fluorouridine
  modified_base 35: mod_base = OTHER; note = Cytosine phosphorothiorate
  modified_base 37: mod_base = OTHER; note = Adenosine phosphorothiorate
  modified_base 38: mod_base = OTHER; note = Adenosine phosphorothiorate
  modified_base 43: mod_base = OTHER; note = 2'-Omethyladenosine
  modified_base 44: mod_base = OTHER; note = 2'-fluoroadenosine
  modified_base 46: mod_base = OTHER; note = Guanosine phosphorothiorate
  modified_base 50: mod_base = OTHER; note = 2'-Omethylcytosine
  modified_base 52: mod_base = OTHER; note = 2'-Omethylguanosine
  modified_base 54: mod_base = OTHER; note = Uridine phosphorothiorate
  modified_base 55: mod_base = OTHER; note = Uridine phosphorothiorate
  modified_base 56: mod_base = OTHER; note = 2'-Omethylcytosine
  modified_base 57: mod_base = OTHER; note = Guanosine phosphorothiorate
  modified_base 62: mod_base = OTHER; note = 2'-Omethylcytosine
  modified_base 63: mod_base = OTHER; note = 2'-fluorocytosine
  modified_base 65: mod_base = OTHER; note = 2'-Omethylguanosine
  modified_base 71: mod_base = OTHER; note = 2'-Omethyluridine
  modified_base 73: mod_base = OTHER; note = 2'-Omethylguanosine

SEQ ID NO: 5133 - RNA, 75 nt, synthetic construct; identical to SEQ ID NO: 1045
  source 1..75: mol_type = other RNA
  modified_base 2: mod_base = OTHER; note = 2'-Omethylguanosine phosphorothiorate
  modified_base 4: mod_base = OTHER; note = Uridine phosphorothiorate
  modified_base 16: mod_base = OTHER; note = 2'-Omethyluridine phosphorothiorate
  modified_base 17: mod_base = OTHER; note = 2'-Omethylguanosine phosphorothiorate
  modified_base 18: mod_base = OTHER; note = 2'-Omethylguanosine phosphorothiorate
  modified_base 25: mod_base = OTHER; note = 2'-Omethylcytosine phosphorothiorate
  modified_base 26: mod_base = OTHER; note = 2'-Omethyluridine
  modified_base 28: mod_base = OTHER; note = 2'-fluorouridine
  modified_base 30: mod_base = OTHER; note = 2'-Omethylguanosine
  modified_base 32: mod_base = OTHER; note = 2'-fluorocytosine
  modified_base 43: mod_base = OTHER; note = 2'-Omethylguanosine phosphorothiorate
  modified_base 55: mod_base = OTHER; note = 2'-Omethylcytosine phosphorothiorate
  modified_base 67: mod_base = OTHER; note = 2'-Omethylguanosine
  modified_base 72: mod_base = OTHER; note = 2'-Omethyluridine
  modified_base 74: mod_base = OTHER; note = 2'-Omethylcytosine phosphorothiorate
  modified_base 75: mod_base = OTHER; note = 2'-Omethyladenosine

SEQ ID NO: 5134 - RNA, 76 nt, synthetic construct; identical to SEQ ID NO: 625
  source 1..76: mol_type = other RNA
  modified_base 72: mod_base = OTHER; note = 2'-O-(2-Methoxyethyl) 5-methylcytosine

SEQ ID NO: 5135 - RNA, 85 nt, synthetic construct; identical to SEQ ID NO: 3286
  source 1..85: mol_type = other RNA
  modified_base 4: mod_base = OTHER; note = 2'-Omethylguanosine
  modified_base 24: mod_base = OTHER; note = 2'-fluorocytosine
  modified_base 25: mod_base = OTHER; note = 2'-fluoroguanosine phosphorothiorate
  modified_base 30: mod_base = OTHER; note = 2'-fluoroadenosine
  modified_base 33: mod_base = OTHER; note = 2'-fluorouridine
  modified_base 40: mod_base = OTHER; note = 2'-Omethylcytosine
  modified_base 46: mod_base = OTHER; note = 2'-Omethyladenosine
  modified_base 48: mod_base = OTHER; note = 2'-Omethyladenosine
  modified_base 56: mod_base = OTHER; note = Guanosine phosphorothiorate
  modified_base 59: mod_base = OTHER; note = 2'-fluorouridine
  modified_base 71: mod_base = OTHER; note = 2'-fluorocytosine
  modified_base 80: mod_base = OTHER; note = Guanosine phosphorothiorate
  modified_base 84: mod_base = OTHER; note = Cytosine phosphorothiorate

SEQ ID NO: 5136 - RNA, 76 nt, synthetic construct; identical to SEQ ID NO: 625
  source 1..76: mol_type = other RNA
  modified_base 4: mod_base = OTHER; note = 2'-Omethyluridine
  modified_base 5: mod_base = OTHER; note = 2'-Omethylcytosine
  modified_base 11: mod_base = OTHER; note = 2'-fluorocytosine
  modified_base 12: mod_base = OTHER; note = 2'-fluoroguanosine phosphorothiorate
  modified_base 13: mod_base = OTHER; note = 2'-Omethylcytosine
  modified_base 16: mod_base = OTHER; note = 2'-fluorouridine
  modified_base 18: mod_base = OTHER; note = Guanosine phosphorothiorate
  modified_base 20: mod_base = OTHER; note = 2'-fluorouridine
  modified_base 22: mod_base = OTHER; note = Guanosine phosphorothiorate
  modified_base 23: mod_base = OTHER; note = 2'-Omethylcytosine
  modified_base 24: mod_base = OTHER; note = 2'-fluoroguanosine phosphorothiorate
  modified_base 27: mod_base = OTHER; note = 2'-fluorouridine
  modified_base 28: mod_base = OTHER; note = 2'-fluorouridine
  modified_base 39: mod_base = OTHER; note = Uridine phosphorothiorate
  modified_base 41: mod_base = OTHER; note = Cytosine phosphorothiorate
  modified_base 42: mod_base = OTHER; note = 2'-Omethyladenosine
  modified_base 44: mod_base = OTHER; note = 2'-Omethyladenosine
  modified_base 45: mod_base = OTHER; note = Guanosine phosphorothiorate
  modified_base 46: mod_base = OTHER; note = 2'-fluoroguanosine
  modified_base 47: mod_base = OTHER; note = Uridine phosphorothiorate
  modified_base 49: mod_base = OTHER; note = 2'-fluorocytosine
  modified_base 50: mod_base = OTHER; note = 2'-Omethylcytosine phosphorothiorate
  modified_base 51: mod_base = OTHER; note = 2'-Omethylguanosine
  modified_base 52: mod_base = OTHER; note = 2'-Omethylguanosine
  modified_base 56: mod_base = OTHER; note = 2'-fluorocytosine phosphorothiorate
  modified_base 57: mod_base = OTHER; note = 2'-fluoroguanosine
  modified_base 59: mod_base = OTHER; note = 2'-Omethylguanosine phosphorothiorate
  modified_base 60: mod_base = OTHER; note = 2'-fluorouridine
  modified_base 61: mod_base = OTHER; note = 2'-Omethylcytosine
  modified_base 66: mod_base = OTHER; note = 2'-fluorocytosine phosphorothiorate
  modified_base 67: mod_base = OTHER; note = Guanosine phosphorothiorate
  modified_base 68: mod_base = OTHER; note = 2'-fluoroguanosine
  modified_base 69: mod_base = OTHER; note = 2'-fluoroadenosine
  modified_base 72: mod_base = OTHER; note = 2'-fluorocytosine
  modified_base 75: mod_base = OTHER; note = 2'-Omethylcytosine

SEQ ID NO: 5137 - RNA, 76 nt, synthetic construct; identical to SEQ ID NO: 625
  source 1..76: mol_type = other RNA
  modified_base 4: mod_base = OTHER; note = Thymine
  modified_base 54: mod_base = OTHER; note = Thymine
  modified_base 55: mod_base = OTHER; note = Thymine
  modified_base 71: mod_base = OTHER; note = Thymine

SEQ ID NO: 5138 - RNA, 85 nt, synthetic construct; identical to SEQ ID NO: 3286
  source 1..85: mol_type = other RNA
  modified_base 1: mod_base = OTHER; note = 2'-Omethylcytosine
  modified_base 14: mod_base = OTHER; note = Guanosine phosphorothiorate
  modified_base 42: mod_base = OTHER; note = 2'-Omethyladenosine
  modified_base 53: mod_base = OTHER; note = 2'-Omethyluridine
  modified_base 57: mod_base = OTHER; note = Cytosine phosphorothiorate
  modified_base 81: mod_base = OTHER; note = Uridine phosphorothiorate

SEQ ID NO: 5139 - RNA, 75 nt, synthetic construct; identical to SEQ ID NO: 3306
  source 1..75: mol_type = other RNA
  modified_base 1: mod_base = OTHER; note = 2'-Omethylguanosine phosphorothiorate
  modified_base 2: mod_base = OTHER; note = 2'-Omethyladenosine phosphorothiorate
  modified_base 9: mod_base = OTHER; note = Guanosine phosphorothiorate
  modified_base 10: mod_base = OTHER; note = 2'-fluoroguanosine
  modified_base 28: mod_base = OTHER; note = Uridine phosphorothiorate
  modified_base 29: mod_base = OTHER; note = 2'-Omethylguanosine
  modified_base 63: mod_base = OTHER; note = Guanosine phosphorothiorate
  modified_base 73: mod_base = OTHER; note = Cytosine phosphorothiorate
  modified_base 74: mod_base = OTHER; note = 2'-Omethylcytosine

SEQ ID NO: 5140 - RNA, 75 nt, synthetic construct; identical to SEQ ID NO: 3306
  source 1..75: mol_type = other RNA
  modified_base 1: mod_base = OTHER; note = 2'-Omethylguanosine
  modified_base 16: mod_base = OTHER; note = 2'-Omethylcytosine
  modified_base 17: mod_base = OTHER; note = 2'-Omethylguanosine
  modified_base 18: mod_base = OTHER; note = 2'-Omethylguanosine
  modified_base 53: mod_base = OTHER; note = 2'-Omethyluridine phosphorothiorate
  modified_base 54: mod_base = OTHER; note = Uridine phosphorothiorate
  modified_base 55: mod_base = OTHER; note = 2'-Omethylcytosine
  modified_base 56: mod_base = OTHER; note = 2'-fluoroadenosine
  modified_base 57: mod_base = OTHER; note = 2'-fluoroadenosine
  modified_base 58: mod_base = OTHER; note = 2'-Omethyladenosine
  modified_base 59: mod_base = OTHER; note = 2'-Omethyluridine
  modified_base 72: mod_base = OTHER; note = 2'-Omethyladenosine

SEQ ID NO: 5141 - RNA, 76 nt, synthetic construct; identical to SEQ ID NO: 625
  source 1..76: mol_type = other RNA
  modified_base 1: mod_base = OTHER; note = 2'-Omethylguanosine
  modified_base 2: mod_base = OTHER; note = 2'-Omethylguanosine
  modified_base 3: mod_base = OTHER; note = 2'-Omethylcytosine
  modified_base 4: mod_base = OTHER; note = 2'-Omethyluridine
  modified_base 5: mod_base = OTHER; note = 2'-Omethylcytosine
  modified_base 6: mod_base = OTHER; note = 2'-Omethylcytosine
  modified_base 10: mod_base = OTHER; note = 2'-Omethylguanosine
  modified_base 11: mod_base = OTHER; note = 2'-Omethylcytosine
  modified_base 14: mod_base = OTHER; note = 2'-Omethyladenosine
  modified_base 15: mod_base = OTHER; note = 2'-fluoroadenosine
  modified_base 17: mod_base = OTHER; note = 2'-Omethylguanosine
  modified_base 18: mod_base = OTHER; note = 2'-Omethylguanosine
  modified_base 19: mod_base = OTHER; note = 2'-fluoroadenosine
  modified_base 23: mod_base = OTHER; note = 2'-Omethylcytosine
  modified_base 24: mod_base = OTHER; note = 2'-Omethylguanosine
  modified_base 26: mod_base = OTHER; note = Adenosine phosphorothiorate
  modified_base 29: mod_base = OTHER; note = 2'-fluoroguanosine phosphorothiorate
  modified_base 30: mod_base = OTHER; note = 2'-fluoroguanosine
  modified_base 33: mod_base = OTHER; note = 2'-fluorouridine
  modified_base 35: mod_base = OTHER; note = Cytosine phosphorothiorate
  modified_base 37: mod_base = OTHER; note = 2'-fluoroadenosine phosphorothiorate
  modified_base 38: mod_base = OTHER; note = 2'-fluoroadenosine phosphorothiorate
  modified_base 40: mod_base = OTHER; note = 2'-Omethyluridine
  modified_base 41: mod_base = OTHER; note = 2'-fluorocytosine
  modified_base 49: mod_base = OTHER; note = 2'-Omethylcytosine phosphorothiorate
  modified_base 50: mod_base = OTHER; note = 2'-Omethylcytosine
  modified_base 51: mod_base = OTHER; note = 2'-Omethylguanosine
  modified_base 52: mod_base = OTHER; note = 2'-Omethylguanosine
  modified_base 53: mod_base = OTHER; note = 2'-Omethylguanosine phosphorothiorate
  modified_base 54: mod_base = OTHER; note = 2'-Omethyluridine
  modified_base 55: mod_base = OTHER; note = Uridine phosphorothiorate
  modified_base 56: mod_base = OTHER; note = 2'-Omethylcytosine phosphorothiorate
  modified_base 57: mod_base = OTHER; note = 2'-Omethylguanosine
  modified_base 60: mod_base = OTHER; note = 2'-fluorouridine phosphorothiorate
  modified_base 61: mod_base = OTHER; note = 2'-Omethylcytosine phosphorothiorate
  modified_base 63: mod_base = OTHER; note = 2'-fluorocytosine
  modified_base 64: mod_base = OTHER; note = 2'-Omethylguanosine
  modified_base 65: mod_base = OTHER; note = 2'-fluoroguanosine
  modified_base 66: mod_base = OTHER; note = 2'-fluorocytosine
  modified_base 67: mod_base = OTHER; note = 2'-fluoroguanosine
  modified_base 68: mod_base = OTHER; note = 2'-Omethylguanosine phosphorothiorate
  modified_base 69: mod_base = OTHER; note = 2'-fluoroadenosine
  modified_base 70: mod_base = OTHER; note = Guanosine phosphorothiorate
  modified_base 72: mod_base = OTHER; note = 2'-Omethylcytosine
  modified_base 73: mod_base = OTHER; note = 2'-Omethylguanosine
  modified_base 74: mod_base = OTHER; note = 2'-fluorocytosine phosphorothiorate
  modified_base 75: mod_base = OTHER; note = 2'-fluorocytosine phosphorothiorate
  modified_base 76: mod_base = OTHER; note = 2'-fluoroadenosine

SEQ ID NO: 5142 - RNA, 75 nt, synthetic construct; identical to SEQ ID NO: 3336
  source 1..75: mol_type = other RNA
  modified_base 10: mod_base = OTHER; note = 2'-Omethylcytosine
  modified_base 14: mod_base = OTHER; note = 2'-Omethylguanosine
  modified_base 17: mod_base = OTHER; note = 2'-fluoroguanosine
  modified_base 18: mod_base = OTHER; note = 2'-fluoroguanosine
  modified_base 19: mod_base = OTHER; note = 2'-fluorouridine
  modified_base 28: mod_base = OTHER; note = 2'-fluoroadenosine
  modified_base 30: mod_base = OTHER; note = 2'-fluoroadenosine phosphorothiorate
  modified_base 39: mod_base = OTHER; note = 2'-Omethylcytosine
  modified_base 46: mod_base = OTHER; note = 2'-fluorouridine
  modified_base 47: mod_base = OTHER; note = 2'-Omethylcytosine phosphorothiorate
  modified_base 48: mod_base = OTHER; note = Cytosine phosphorothiorate
  modified_base 49: mod_base = OTHER; note = 2'-fluoroadenosine
  modified_base 57: mod_base = OTHER; note = 2'-fluoroadenosine phosphorothiorate
  modified_base 61: mod_base = OTHER; note = 2'-fluorocytosine
  modified_base 64: mod_base = OTHER; note = 2'-fluoroguanosine phosphorothiorate
  modified_base 74: mod_base = OTHER; note = Cytosine phosphorothiorate
  modified_base 75: mod_base = OTHER; note = 2'-fluoroadenosine

SEQ ID NO: 5143 - RNA, 76 nt, synthetic construct; identical to SEQ ID NO: 625
  source 1..76: mol_type = other RNA
  modified_base 5: mod_base = OTHER; note = 2'-O-(2-Methoxyethyl) 5-methylcytosine

SEQ ID NO: 5144 - RNA, 76 nt, synthetic construct; identical to SEQ ID NO: 625
  source 1..76: mol_type = other RNA
  modified_base 1: mod_base = OTHER; note = 2'-Omethylguanosine phosphorothiorate
  modified_base 2: mod_base = OTHER; note = 2'-Omethylguanosine phosphorothiorate
  modified_base 3: mod_base = OTHER; note = 2'-Omethylcytosine
  modified_base 4: mod_base = OTHER; note = 2'-Omethyluridine
  modified_base 5: mod_base = OTHER; note = 2'-Omethylcytosine
  modified_base 6: mod_base = OTHER; note = 2'-Omethylcytosine
  modified_base 16: mod_base = OTHER; note = 2'-Omethyluridine
  modified_base 17: mod_base = OTHER; note = 2'-Omethylguanosine
  modified_base 18: mod_base = OTHER; note = 2'-Omethylguanosine
  modified_base 20: mod_base = OTHER; note = 2'-Omethyluridine
  modified_base 22: mod_base = OTHER; note = 2'-Omethylguanosine
  modified_base 23: mod_base = OTHER; note = 2'-Omethylcytosine
  modified_base 24: mod_base = OTHER; note = 2'-Omethylguanosine
  modified_base 25: mod_base = OTHER; note = 2'-Omethylcytosine
  modified_base 33: mod_base = OTHER; note = 2'-fluorouridine
  modified_base 35: mod_base = OTHER; note = Cytosine phosphorothiorate
  modified_base 37: mod_base = OTHER; note = Adenosine phosphorothiorate
  modified_base 38: mod_base = OTHER; note = Adenosine phosphorothiorate
  modified_base 41: mod_base = OTHER; note = 2'-Omethylcytosine
  modified_base 42: mod_base = OTHER; note = 2'-Omethyladenosine
  modified_base 43: mod_base = OTHER; note = 2'-Omethyladenosine
  modified_base 44: mod_base = OTHER; note = 2'-Omethyladenosine
  modified_base 49: mod_base = OTHER; note = 2'-Omethylcytosine
  modified_base 50: mod_base = OTHER; note = 2'-Omethylcytosine
  modified_base 52: mod_base = OTHER; note = 2'-Omethylguanosine
  modified_base 54: mod_base = OTHER; note = 2'-Omethyluridine
  modified_base 55: mod_base = OTHER; note = Uridine phosphorothiorate
  modified_base 56: mod_base = OTHER; note = 2'-Omethylcytosine
  modified_base 57: mod_base = OTHER; note = 2'-fluoroguanosine
  modified_base 59: mod_base = OTHER; note = 2'-Omethylguanosine
  modified_base 61: mod_base = OTHER; note = 2'-Omethylcytosine
  modified_base 62: mod_base = OTHER; note = 2'-Omethylcytosine
  modified_base 63: mod_base = OTHER; note = 2'-fluorocytosine
  modified_base 64: mod_base = OTHER; note = 2'-Omethylguanosine
  modified_base 65: mod_base = OTHER; note = 2'-Omethylguanosine
  modified_base 74: mod_base = OTHER; note = Cytosine phosphorothiorate
  modified_base 75: mod_base = OTHER; note = 2'-Omethylcytosine phosphorothiorate

SEQ ID NO: 5145 - RNA, 76 nt, synthetic construct; identical to SEQ ID NO: 625
  source 1..76: mol_type = other RNA
  modified_base 1: mod_base = OTHER; note = 2'-fluoroguanosine
  modified_base 2: mod_base = OTHER; note = Guanosine phosphorothiorate
  modified_base 3: mod_base = OTHER; note = 2'-Omethylcytosine
  modified_base 4: mod_base = OTHER; note = Uridine phosphorothiorate
  modified_base 5: mod_base = OTHER; note = 2'-fluorocytosine
  modified_base 6: mod_base = OTHER; note = Cytosine phosphorothiorate
  modified_base 7: mod_base = OTHER; note = Guanosine phosphorothiorate
  modified_base 9: mod_base = OTHER; note = Guanosine phosphorothiorate
  modified_base 10: mod_base = OTHER; note = 2'-fluoroguanosine
  modified_base 11: mod_base = OTHER; note = 2'-fluorocytosine
  modified_base 15: mod_base = OTHER; note = 2'-fluoroadenosine phosphorothiorate
  modified_base 17: mod_base = OTHER; note = 2'-Omethylguanosine
  modified_base 18: mod_base = OTHER; note = Guanosine phosphorothiorate
  modified_base 24: mod_base = OTHER; note = 2'-fluoroguanosine
  modified_base 25: mod_base = OTHER; note = 2'-Omethylcytosine
  modified_base 26: mod_base = OTHER; note = Adenosine phosphorothiorate
  modified_base 27: mod_base = OTHER; note = 2'-Omethyluridine phosphorothiorate
  modified_base 28: mod_base = OTHER; note = 2'-fluorouridine
  modified_base 31: mod_base = OTHER; note = 2'-Omethyladenosine
  modified_base 40: mod_base = OTHER; note = Uridine phosphorothiorate
  modified_base 41: mod_base = OTHER; note = 2'-fluorocytosine
  modified_base 43: mod_base = OTHER; note = 2'-fluoroadenosine
  modified_base 46: mod_base = OTHER; note = 2'-fluoroguanosine
  modified_base 47: mod_base = OTHER; note = 2'-Omethyluridine
  modified_base 48: mod_base = OTHER; note = 2'-fluorouridine
  modified_base 50: mod_base = OTHER; note = Cytosine phosphorothiorate
  modified_base 54: mod_base = OTHER; note = 2'-Omethyluridine
  modified_base 57: mod_base = OTHER; note = Guanosine phosphorothiorate
  modified_base 58: mod_base = OTHER; note = 2'-fluoroadenosine
  modified_base 60: mod_base = OTHER; note = 2'-fluorouridine
  modified_base 61: mod_base = OTHER; note = 2'-Omethylcytosine
  modified_base 64: mod_base = OTHER; note = 2'-fluoroguanosine
  modified_base 65: mod_base = OTHER; note = Guanosine phosphorothiorate
  modified_base 66: mod_base = OTHER; note = 2'-Omethylcytosine
  modified_base 69: mod_base = OTHER; note = 2'-Omethyladenosine
  modified_base 72: mod_base = OTHER; note = 2'-fluorocytosine
  modified_base 73: mod_base = OTHER; note = 2'-Omethylguanosine

SEQ ID NO: 5146 - RNA, 76 nt, synthetic construct; identical to SEQ ID NO: 625
  source 1..76: mol_type = other RNA
  modified_base 1: mod_base = OTHER; note = 2'-Omethylguanosine phosphorothiorate
  modified_base 2: mod_base = OTHER; note = 2'-Omethylguanosine
  modified_base 3: mod_base = OTHER; note = 2'-Omethylcytosine
  modified_base 4: mod_base = OTHER; note = 2'-Omethyluridine
  modified_base 5: mod_base = OTHER; note = 2'-Omethylcytosine
  modified_base 6: mod_base = OTHER; note = 2'-Omethylcytosine
  modified_base 10: mod_base = OTHER; note = 2'-Omethylguanosine
  modified_base 11: mod_base = OTHER; note = 2'-Omethylcytosine
  modified_base 12: mod_base = OTHER; note = 2'-Omethylguanosine
  modified_base 13: mod_base = OTHER; note = 2'-Omethylcytosine
  modified_base 16: mod_base = OTHER; note = 2'-Omethyluridine
  modified_base 17: mod_base = OTHER; note = 2'-Omethylguanosine
  modified_base 18: mod_base = OTHER; note = 2'-Omethylguanosine
  modified_base 22: mod_base = OTHER; note = 2'-Omethylguanosine
  modified_base 23: mod_base = OTHER; note = 2'-Omethylcytosine
  modified_base 24: mod_base = OTHER; note = 2'-Omethylguanosine
  modified_base 25: mod_base = OTHER; note = 2'-Omethylcytosine
  modified_base 44: mod_base = OTHER; note = 2'-Omethyladenosine
  modified_base 45: mod_base = OTHER; note = 2'-Omethylguanosine
  modified_base 46: mod_base = OTHER; note = 2'-Omethylguanosine
  modified_base 54: mod_base = OTHER; note = 2'-Omethyluridine phosphorothiorate
  modified_base 55: mod_base = OTHER; note = Uridine phosphorothiorate
  modified_base 56: mod_base = OTHER; note = 2'-Omethylcytosine
  modified_base 57: mod_base = OTHER; note = 2'-fluoroguanosine
  modified_base 59: mod_base = OTHER; note = 2'-Omethylguanosine
  modified_base 61: mod_base = OTHER; note = 2'-Omethylcytosine
  modified_base 62: mod_base = OTHER; note = 2'-Omethylcytosine
  modified_base 63: mod_base = OTHER; note = 2'-Omethylcytosine
  modified_base 64: mod_base = OTHER; note = 2'-Omethylguanosine
  modified_base 65: mod_base = OTHER; note = 2'-Omethylguanosine
  modified_base 66: mod_base = OTHER; note = 2'-Omethylcytosine
  modified_base 67: mod_base = OTHER; note = 2'-Omethylguanosine
  modified_base 68: mod_base = OTHER; note = 2'-Omethylguanosine
  modified_base 69: mod_base = OTHER; note = 2'-Omethyladenosine
  modified_base 73: mod_base = OTHER; note = 2'-Omethylguanosine

SEQ ID NO: 5147 - RNA, 76 nt, synthetic construct; identical to SEQ ID NO: 625
  source 1..76: mol_type = other RNA
  modified_base 2: mod_base = OTHER; note = Guanosine phosphorothiorate
  modified_base 4: mod_base = OTHER; note = 2'-fluorouridine
  modified_base 6: mod_base = OTHER; note = Cytosine phosphorothiorate
  modified_base 11: mod_base = OTHER; note = 2'-fluorocytosine
  modified_base 13: mod_base = OTHER; note = 2'-fluorocytosine
  modified_base 14: mod_base = OTHER; note = 2'-Omethyladenosine
  modified_base 16: mod_base = OTHER; note = 2'-fluorouridine
  modified_base 18: mod_base = OTHER; note = Guanosine phosphorothiorate
  modified_base 22: mod_base = OTHER; note = 2'-fluoroguanosine
  modified_base 26: mod_base = OTHER; note = 2'-Omethyladenosine phosphorothiorate
  modified_base 27: mod_base = OTHER; note = 2'-fluorouridine
  modified_base 28: mod_base = OTHER; note = 2'-Omethyluridine
  modified_base 30: mod_base = OTHER; note = 2'-fluoroguanosine
  modified_base 33: mod_base = OTHER; note = 2'-fluorouridine
  modified_base 36: mod_base = OTHER; note = Adenosine phosphorothiorate
  modified_base 38: mod_base = OTHER; note = Adenosine phosphorothiorate
  modified_base 39: mod_base = OTHER; note = 2'-Omethyluridine phosphorothiorate
  modified_base 42: mod_base = OTHER; note = Adenosine phosphorothiorate
  modified_base 43: mod_base = OTHER; note = 2'-Omethyladenosine
  modified_base 48: mod_base = OTHER; note = 2'-fluorouridine
  modified_base 49: mod_base = OTHER; note = 2'-Omethylcytosine
  modified_base 51: mod_base = OTHER; note = 2'-Omethylguanosine
  modified_base 53: mod_base = OTHER; note = Guanosine phosphorothiorate
  modified_base 54: mod_base = OTHER; note = 2'-fluorouridine
  modified_base 56: mod_base = OTHER; note = 2'-Omethylcytosine
  modified_base 60: mod_base = OTHER; note = 2'-fluorouridine
  modified_base 65: mod_base = OTHER; note = 2'-Omethylguanosine
  modified_base 66: mod_base = OTHER; note = Cytosine phosphorothiorate
  modified_base 67: mod_base = OTHER; note = 2'-fluoroguanosine
  modified_base 68: mod_base = OTHER; note = 2'-fluoroguanosine phosphorothiorate
  modified_base 69: mod_base = OTHER; note = 2'-fluoroadenosine
  modified_base 70: mod_base = OTHER; note = 2'-fluoroguanosine
  modified_base 73: mod_base = OTHER; note = 2'-Omethylguanosine phosphorothiorate

SEQ ID NO: 5148 - DNA, 76 bp, synthetic construct; identical to SEQ ID NO: 1924
  source 1..76: mol_type = other DNA
  modified_base 1: mod_base = OTHER; note = 2'-Omethylguanosine phosphorothiorate
  modified_base 2: mod_base = OTHER; note = 2'-Omethylguanosine
  modified_base 3: mod_base = OTHER; note = 2'-Omethylcytosine
  modified_base 4: mod_base = OTHER; note = 2'-Omethyluridine
  modified_base 5: mod_base = OTHER; note = 2'-Omethylcytosine
  modified_base 6: mod_base = OTHER; note = 2'-Omethylcytosine
  modified_base 44: mod_base = OTHER; note = 2'-Omethyladenosine
  modified_base 45: mod_base = OTHER; note = 2'-Omethylguanosine
  modified_base 46: mod_base = OTHER; note = 2'-fluoroguanosine
  modified_base 48: mod_base = OTHER; note = 2'-Omethyluridine
  modified_base 49: mod_base = OTHER; note = 2'-Omethylcytosine
  modified_base 73: mod_base = OTHER; note = 2'-Omethylguanosine
  misc_feature 1..46: note = RNA
  misc_feature 47: note = DNA
  misc_feature 48..76: note = RNA

SEQ ID NO: 5149 - RNA, 76 nt, synthetic construct
  source 1..76: mol_type = other RNA
ggctccgtggccggtgggatacggcattggacttcaaattcaaaggttccgggttcgagtcccggcggagtcgcca

SEQ ID NO: 5150 - RNA, 76 nt, synthetic construct; identical to SEQ ID NO: 625
  source 1..76: mol_type = other RNA
  modified_base 1: mod_base = OTHER; note = 2'-Omethylguanosine
  modified_base 10: mod_base = OTHER; note = 2'-Omethylguanosine
  modified_base 13: mod_base = OTHER; note = 2'-Omethylcytosine
  modified_base 17: mod_base = OTHER; note = Guanosine phosphorothiorate
  modified_base 18: mod_base = OTHER; note = 2'-Omethylguanosine
  modified_base 19: mod_base = OTHER; note = Adenosine phosphorothiorate
  modified_base 20: mod_base = OTHER; note = 2'-Omethyluridine
  modified_base 25: mod_base = OTHER; note = 2'-Omethylcytosine
  modified_base 29: mod_base = OTHER; note = 2'-Omethylguanosine
  modified_base 33: mod_base = OTHER; note = 2'-fluorouridine
  modified_base 35: mod_base = OTHER; note = Cytosine phosphorothiorate
  modified_base 37: mod_base = OTHER; note = Adenosine phosphorothiorate
  modified_base 38: mod_base = OTHER; note = Adenosine phosphorothiorate
  modified_base 41: mod_base = OTHER; note = 2'-fluorocytosine
  modified_base 43: mod_base = OTHER; note = 2'-Omethyladenosine
  modified_base 44: mod_base = OTHER; note = 2'-fluoroadenosine
  modified_base 46: mod_base = OTHER; note = Guanosine phosphorothiorate
  modified_base 50: mod_base = OTHER; note = 2'-Omethylcytosine
  modified_base 52: mod_base = OTHER; note = 2'-Omethylguanosine
  modified_base 54: mod_base = OTHER; note = 2'-Omethyluridine
  modified_base 55: mod_base = OTHER; note = Uridine phosphorothiorate
  modified_base 56: mod_base = OTHER; note = 2'-Omethylcytosine
  modified_base 57: mod_base = OTHER; note = Guanosine phosphorothiorate
  modified_base 62: mod_base = OTHER; note = 2'-Omethylcytosine
  modified_base 63: mod_base = OTHER; note = 2'-fluorocytosine
  modified_base 65: mod_base = OTHER; note = 2'-Omethylguanosine
  modified_base 71: mod_base = OTHER; note = 2'-Omethyluridine
  modified_base 73: mod_base = OTHER; note = 2'-Omethylguanosine

SEQ ID NO: 5151 - RNA, 86 nt, synthetic construct; identical to SEQ ID NO: 3290
  source 1..86: mol_type = other RNA
  modified_base 1: mod_base = OTHER; note = 2'-Omethyladenosine
  modified_base 13: mod_base = OTHER; note = 2'-Omethylguanosine
  modified_base 14: mod_base = OTHER; note = 2'-Omethyladenosine
  modified_base 15: mod_base = OTHER; note = 2'-Omethylguanosine
  modified_base 16: mod_base = OTHER; note = 2'-Omethyluridine
  modified_base 17: mod_base = OTHER; note = 2'-Omethylguanosine
  modified_base 18: mod_base = OTHER; note = 2'-Omethylguanosine
  modified_base 19: mod_base = OTHER; note = Uridine phosphorothiorate
  modified_base 20: mod_base = OTHER; note = 2'-Omethyluridine
  modified_base 21: mod_base = OTHER; note = Adenosine phosphorothiorate
  modified_base 25: mod_base = OTHER; note = 2'-Omethylcytosine
  modified_base 41: mod_base = OTHER; note = 2'-fluorocytosine
  modified_base 42: mod_base = OTHER; note = 2'-Omethyladenosine
  modified_base 43: mod_base = OTHER; note = 2'-Omethyladenosine
  modified_base 44: mod_base = OTHER; note = 2'-fluorouridine
  modified_base 59: mod_base = OTHER; note = 2'-Omethylguanosine
  modified_base 60: mod_base = OTHER; note = 2'-Omethyluridine
  modified_base 62: mod_base = OTHER; note = 2'-Omethylguanosine
  modified_base 64: mod_base = OTHER; note = Uridine phosphorothiorate
  modified_base 65: mod_base = OTHER; note = Uridine phosphorothiorate
  modified_base 71: mod_base = OTHER; note = 2'-Omethylcytosine
  modified_base 75: mod_base = OTHER; note = 2'-Omethylcytosine
  modified_base 83: mod_base = OTHER; note = 2'-Omethyladenosine

SEQ ID NO: 5152 - RNA, 86 nt, synthetic construct; identical to SEQ ID NO: 3290
  source 1..86: mol_type = other RNA
  modified_base 1: mod_base = OTHER; note = 2'-Omethyladenosine
  modified_base 2: mod_base = OTHER; note = 2'-Omethylcytosine
  modified_base 3: mod_base = OTHER; note = 2'-Omethylcytosine
  modified_base 4: mod_base = OTHER; note = 2'-Omethyladenosine
  modified_base 5: mod_base = OTHER; note = 2'-Omethylguanosine
  modified_base 6: mod_base = OTHER; note = 2'-Omethylguanosine
  modified_base 10: mod_base = OTHER; note = 2'-Omethylguanosine
  modified_base 11: mod_base = OTHER; note = 2'-Omethylcytosine
  modified_base 12: mod_base = OTHER; note = 2'-Omethylcytosine
  modified_base 13: mod_base = OTHER; note = 2'-Omethylguanosine
  modified_base 22: mod_base = OTHER; note = 2'-Omethyladenosine
  modified_base 23: mod_base = OTHER; note = 2'-Omethylguanosine
  modified_base 24: mod_base = OTHER; note = 2'-Omethylguanosine
  modified_base 25: mod_base = OTHER; note = 2'-Omethylcytosine
  modified_base 59: mod_base = OTHER; note = 2'-Omethylguanosine
  modified_base 60: mod_base = OTHER; note = 2'-Omethyluridine
  modified_base 61: mod_base = OTHER; note = 2'-Omethylguanosine
  modified_base 62: mod_base = OTHER; note = 2'-Omethylguanosine
  modified_base 63: mod_base = OTHER; note = 2'-Omethylguanosine
  modified_base 71: mod_base = OTHER; note = 2'-Omethylcytosine
  modified_base 72: mod_base = OTHER; note = 2'-Omethylcytosine
  modified_base 73: mod_base = OTHER; note = 2'-fluorocytosine
  modified_base 74: mod_base = OTHER; note = 2'-Omethyladenosine
  modified_base 75: mod_base = OTHER; note = 2'-Omethylcytosine
  modified_base 76: mod_base = OTHER; note = 2'-Omethyluridine
  modified_base 77: mod_base = OTHER; note = 2'-Omethylcytosine
  modified_base 78: mod_base = OTHER; note = 2'-Omethylcytosine
  modified_base 83: mod_base = OTHER; note = 2'-Omethyladenosine

SEQ ID NO: 5153 - RNA, 85 nt, synthetic construct; identical to SEQ ID NO: 3297
  source 1..85: mol_type = other RNA
  modified_base 1: mod_base = OTHER; note = 2'-Omethylguanosine
  modified_base 59: mod_base = OTHER; note = 2'-Omethylcytosine

SEQ ID NO: 5154 - RNA, 76 nt, synthetic construct; identical to SEQ ID NO: 3318
  source 1..76: mol_type = other RNA
  modified_base 1: mod_base = OTHER; note = 2'-Omethylcytosine
  modified_base 2: mod_base = OTHER; note = 2'-Omethylcytosine
  modified_base 3: mod_base = OTHER; note = 2'-Omethyluridine
  modified_base 4: mod_base = OTHER; note = 2'-Omethyluridine
  modified_base 5: mod_base = OTHER; note = 2'-Omethylcytosine
  modified_base 6: mod_base = OTHER; note = 2'-Omethylguanosine
  modified_base 10: mod_base = OTHER; note = 2'-Omethylguanosine
  modified_base 11: mod_base = OTHER; note = 2'-Omethylcytosine
  modified_base 12: mod_base = OTHER; note = 2'-Omethyluridine
  modified_base 13: mod_base = OTHER; note = 2'-Omethylcytosine
  modified_base 22: mod_base = OTHER; note = 2'-Omethylguanosine
  modified_base 23: mod_base = OTHER; note = 2'-Omethyladenosine
  modified_base 24: mod_base = OTHER; note = 2'-Omethylguanosine
  modified_base 25: mod_base = OTHER; note = 2'-Omethylcytosine
  modified_base 49: mod_base = OTHER; note = 2'-Omethylguanosine
  modified_base 50: mod_base = OTHER; note = 2'-Omethylcytosine
  modified_base 51: mod_base = OTHER; note = 2'-Omethyluridine
  modified_base 52: mod_base = OTHER; note = 2'-Omethylguanosine
  modified_base 53: mod_base = OTHER; note = 2'-Omethylguanosine
  modified_base 66: mod_base = OTHER; note = 2'-Omethyluridine
  modified_base 67: mod_base = OTHER; note = 2'-Omethylcytosine
  modified_base 68: mod_base = OTHER; note = 2'-Omethylguanosine
  modified_base 73: mod_base = OTHER; note = 2'-Omethyladenosine

SEQ ID NO: 5155 - RNA, 76 nt, synthetic construct; identical to SEQ ID NO: 3289
  source 1..76: mol_type = other RNA
  modified_base 1: mod_base = OTHER; note = 2'-Omethylguanosine
  modified_base 2: mod_base = OTHER; note = 2'-Omethylcytosine
  modified_base 3: mod_base = OTHER; note = 2'-Omethylcytosine
  modified_base 4: mod_base = OTHER; note = 2'-Omethyluridine
  modified_base 5: mod_base = OTHER; note = 2'-Omethylguanosine

SEQ ID NO: 5156 - RNA, 75 nt, synthetic construct; identical to SEQ ID NO: 3311
  source 1..75: mol_type = other RNA
  modified_base 1: mod_base = OTHER; note = 2'-Omethylguanosine phosphorothiorate
  modified_base 2: mod_base = OTHER; note = Guanosine phosphorothiorate
  modified_base 18: mod_base = OTHER; note = Guanosine phosphorothiorate
  modified_base 19: mod_base = OTHER; note = 2'-fluorouridine
  modified_base 28: mod_base = OTHER; note = 2'-fluorouridine
  modified_base 36: mod_base = OTHER; note = 2'-fluoroadenosine
  modified_base 39: mod_base = OTHER; note = 2'-fluorouridine phosphorothiorate
  modified_base 58: mod_base = OTHER; note = 2'-fluoroguanosine
  modified_base 73: mod_base = OTHER; note = Cytosine phosphorothiorate
  modified_base 74: mod_base = OTHER; note = 2'-Omethylcytosine

SEQ ID NO: 5157 - RNA, 76 nt, synthetic construct; identical to SEQ ID NO: 3419
  source 1..76: mol_type = other RNA
  modified_base 1: mod_base = OTHER; note = 2'-Omethylguanosine
  modified_base 2: mod_base = OTHER; note = 2'-Omethylguanosine
  modified_base 3: mod_base = OTHER; note = 2'-Omethylcytosine
  modified_base 4: mod_base = OTHER; note = 2'-Omethyluridine
  modified_base 5: mod_base = OTHER; note = 2'-Omethylcytosine
  modified_base 6: mod_base = OTHER; note = 2'-Omethylcytosine
  modified_base 16: mod_base = OTHER; note = 2'-Omethyluridine
  modified_base 17: mod_base = OTHER; note = 2'-Omethylguanosine
  modified_base 18: mod_base = OTHER; note = 2'-Omethylguanosine
  modified_base 33: mod_base = OTHER; note = 2'-fluorouridine
  modified_base 35: mod_base = OTHER; note = Cytosine phosphorothiorate
  modified_base 37: mod_base = OTHER; note = Adenosine phosphorothiorate
  modified_base 38: mod_base = OTHER; note = Adenosine phosphorothiorate
  modified_base 44: mod_base = OTHER; note = 2'-Omethyladenosine
  modified_base 45: mod_base = OTHER; note = 2'-Omethylguanosine
  modified_base 46: mod_base = OTHER; note = 2'-fluoroguanosine
  modified_base 47: mod_base = OTHER; note = 2'-fluorouridine
  modified_base 48: mod_base = OTHER; note = 2'-fluorouridine
  modified_base 56: mod_base = OTHER; note = 2'-Omethylcytosine
  modified_base 59: mod_base = OTHER; note = 2'-Omethylguanosine
  modified_base 61: mod_base = OTHER; note = 2'-Omethylcytosine
  modified_base 62: mod_base = OTHER; note = 2'-Omethylcytosine
  modified_base 63: mod_base = OTHER; note = 2'-fluorocytosine
  modified_base 64: mod_base = OTHER; note = 2'-Omethylguanosine
  modified_base 65: mod_base = OTHER; note = 2'-Omethylguanosine
  modified_base 66: mod_base = OTHER; note = 2'-Omethylcytosine
  modified_base 67: mod_base = OTHER; note = 2'-Omethylguanosine
  modified_base 68: mod_base = OTHER; note = 2'-Omethylguanosine
  modified_base 73: mod_base = OTHER; note = 2'-Omethylguanosine

SEQ ID NO: 5158 - RNA, 76 nt, synthetic construct; identical to SEQ ID NO: 625
  source 1..76: mol_type = other RNA
  modified_base 1: mod_base = OTHER; note = 2'-Omethylguanosine phosphorothiorate
  modified_base 2: mod_base = OTHER; note = 2'-Omethylguanosine
  modified_base 3: mod_base = OTHER; note = 2'-Omethylcytosine
  modified_base 4: mod_base = OTHER; note = 2'-Omethyluridine
  modified_base 5: mod_base = OTHER; note = 2'-Omethylcytosine
  modified_base 6: mod_base = OTHER; note = 2'-Omethylcytosine
  modified_base 10: mod_base = OTHER; note = 2'-Omethylguanosine
  modified_base 11: mod_base = OTHER; note = 2'-Omethylcytosine
  modified_base 12: mod_base = OTHER; note = 2'-Omethylguanosine
  modified_base 13: mod_base = OTHER; note = 2'-Omethylcytosine
  modified_base 16: mod_base = OTHER; note = 2'-Omethyluridine
  modified_base 17: mod_base = OTHER; note = 2'-Omethylguanosine
  modified_base 18: mod_base = OTHER; note = 2'-Omethylguanosine
  modified_base 22: mod_base = OTHER; note = 2'-Omethylguanosine
  modified_base 23: mod_base = OTHER; note = 2'-Omethylcytosine
  modified_base 24: mod_base = OTHER; note = 2'-Omethylguanosine
  modified_base 25: mod_base = OTHER; note = 2'-Omethylcytosine
  modified_base 40: mod_base = OTHER; note = 2'-fluorouridine
  modified_base 41: mod_base = OTHER; note = 2'-fluorocytosine
  modified_base 42: mod_base = OTHER; note = 2'-fluoroadenosine
  modified_base 43: mod_base = OTHER; note = 2'-fluoroadenosine
  modified_base 49: mod_base = OTHER; note = 2'-Omethylcytosine
  modified_base 50: mod_base = OTHER; note = 2'-Omethylcytosine
  modified_base 51: mod_base = OTHER; note = 2'-Omethylguanosine
  modified_base 52: mod_base = OTHER; note = 2'-Omethylguanosine
  modified_base 53: mod_base = OTHER; note = 2'-Omethylguanosine
  modified_base 54: mod_base = OTHER; note = 2'-Omethyluridine phosphorothiorate
  modified_base 55: mod_base = OTHER; note = Uridine phosphorothiorate
  modified_base 56: mod_base = OTHER; note = 2'-Omethylcytosine
  modified_base 57: mod_base = OTHER; note = 2'-fluoroguanosine
  modified_base 59: mod_base = OTHER; note = 2'-Omethylguanosine
  modified_base 73: mod_base = OTHER; note = 2'-Omethylguanosine

SEQ ID NO: 5159 - RNA, 73 nt, synthetic construct; identical to SEQ ID NO: 935
  source 1..73: mol_type = other RNA
  modified_base 1: mod_base = OTHER; note = 2'-Omethylguanosine phosphorothiorate
  modified_base 2: mod_base = OTHER; note = 2'-Omethylguanosine phosphorothiorate
  modified_base 19: mod_base = OTHER; note = Adenosine phosphorothiorate
  modified_base 39: mod_base = OTHER; note = 2'-fluorouridine
  modified_base 49: mod_base = OTHER; note = 2'-fluorocytosine
  modified_base 52: mod_base = OTHER; note = Guanosine phosphorothiorate
  modified_base 73: mod_base = OTHER; note = 2'-Omethylguanosine

SEQ ID NO: 5160 - RNA, 85 nt, synthetic construct; identical to SEQ ID NO: 3297
  source 1..85: mol_type = other RNA
  modified_base 1: mod_base = OTHER; note = 2'-Omethylguanosine phosphorothiorate
  modified_base 6: mod_base = OTHER; note = Guanosine phosphorothiorate
  modified_base 17: mod_base = OTHER; note = 2'-Omethylguanosine
  modified_base 48: mod_base = OTHER; note = 2'-Omethylguanosine phosphorothiorate
  modified_base 51: mod_base = OTHER; note = 2'-fluorouridine
  modified_base 61: mod_base = OTHER; note = 2'-fluoroguanosine phosphorothiorate
  modified_base 85: mod_base = OTHER; note = 2'-fluoroadenosine

SEQ ID NO: 5161 - RNA, 85 nt, synthetic construct; identical to SEQ ID NO: 3301
  source 1..85: mol_type = other RNA
  modified_base 1: mod_base = OTHER; note = 2'-Omethylguanosine phosphorothiorate
  modified_base 2: mod_base = OTHER; note = 2'-Omethylcytosine phosphorothiorate
  modified_base 9: mod_base = OTHER; note = 2'-fluoroguanosine
  modified_base 14: mod_base = OTHER; note = Adenosine phosphorothiorate
  modified_base 16: mod_base = OTHER; note = 2'-Omethyluridine phosphorothiorate
  modified_base 20: mod_base = OTHER; note = Uridine phosphorothiorate
  modified_base 36: mod_base = OTHER; note = 2'-Omethyladenosine
  modified_base 38: mod_base = OTHER; note = 2'-fluoroadenosine phosphorothiorate
  modified_base 41: mod_base = OTHER; note = 2'-Omethylcytosine phosphorothiorate
  modified_base 45: mod_base = OTHER; note = 2'-fluoroguanosine
  modified_base 51: mod_base = OTHER; note = 2'-fluorouridine
  modified_base 52: mod_base = OTHER; note = 2'-Omethylcytosine phosphorothiorate
  modified_base 57: mod_base = OTHER; note = Cytosine phosphorothiorate
  modified_base 59: mod_base = OTHER; note = Cytosine phosphorothiorate
  modified_base 82: mod_base = OTHER; note = 2'-Omethylguanosine
  modified_base 85: mod_base = OTHER; note = 2'-fluoroadenosine

SEQ ID NO: 5162 - RNA, 85 nt, synthetic construct; identical to SEQ ID NO: 3286
  source 1..85: mol_type = other RNA
  modified_base 1: mod_base = OTHER; note = 2'-Omethylcytosine
  modified_base 9: mod_base = OTHER; note = Guanosine phosphorothiorate
  modified_base 15: mod_base = OTHER; note = 2'-Omethyluridine
  modified_base 30: mod_base = OTHER; note = 2'-fluoroadenosine
  modified_base 36: mod_base = OTHER; note = 2'-fluoroguanosine
  modified_base 44: mod_base = OTHER; note = Guanosine phosphorothiorate
  modified_base 45: mod_base = OTHER; note = Guanosine phosphorothiorate
  modified_base 48: mod_base = OTHER; note = 2'-Omethyladenosine
  modified_base 51: mod_base = OTHER; note = 2'-Omethyluridine
  modified_base 55: mod_base = OTHER; note = Cytosine phosphorothiorate
  modified_base 57: mod_base = OTHER; note = 2'-Omethylcytosine
  modified_base 64: mod_base = OTHER; note = Uridine phosphorothiorate
  modified_base 68: mod_base = OTHER; note = 2'-Omethyladenosine
  modified_base 72: mod_base = OTHER; note = Cytosine phosphorothiorate
  modified_base 83: mod_base = OTHER; note = Cytosine phosphorothiorate
  modified_base 84: mod_base = OTHER; note = 2'-Omethylcytosine

SEQ ID NO: 5163 - RNA, 75 nt, synthetic construct; identical to SEQ ID NO: 1045
  source 1..75: mol_type = other RNA
  modified_base 2: mod_base = OTHER; note = 2'-Omethylguanosine phosphorothiorate
  modified_base 3: mod_base = OTHER; note = 2'-Omethyluridine phosphorothiorate
  modified_base 16: mod_base = OTHER; note = 2'-Omethyluridine phosphorothiorate
  modified_base 38: mod_base = OTHER; note = 2'-Omethyladenosine phosphorothiorate
  modified_base 41: mod_base = OTHER; note = 2'-Omethylcytosine phosphorothiorate
  modified_base 44: mod_base = OTHER; note = 2'-Omethylcytosine
  modified_base 47: mod_base = OTHER; note = 2'-fluorouridine
  modified_base 50: mod_base = OTHER; note = 2'-Omethylguanosine
  modified_base 51: mod_base = OTHER; note = 2'-Omethyladenosine
  modified_base 52: mod_base = OTHER; note = 2'-Omethylguanosine phosphorothiorate
  modified_base 53: mod_base = OTHER; note = 2'-Omethyluridine
  modified_base 57: mod_base = OTHER; note = Adenosine phosphorothiorate
  modified_base 58: mod_base = OTHER; note = 2'-Omethylguanosine
  modified_base 59: mod_base = OTHER; note = 2'-fluorouridine phosphorothiorate
  modified_base 60: mod_base = OTHER; note = 2'-Omethylcytosine
  modified_base 67: mod_base = OTHER; note = 2'-Omethylguanosine
  modified_base 72: mod_base = OTHER; note = 2'-Omethyluridine
  modified_base 74: mod_base = OTHER; note = 2'-Omethylcytosine phosphorothiorate
  modified_base 75: mod_base = OTHER; note = 2'-Omethyladenosine

SEQ ID NO: 5164 - RNA, 85 nt, synthetic construct; identical to SEQ ID NO: 3310
  source 1..85: mol_type = other RNA
  modified_base 1: mod_base = OTHER; note = 2'-Omethylcytosine
  modified_base 3: mod_base = OTHER; note = 2'-fluoroadenosine
  modified_base 11: mod_base = OTHER; note = Cytosine phosphorothiorate
  modified_base 30: mod_base = OTHER; note = 2'-fluoroadenosine
  modified_base 46: mod_base = OTHER; note = 2'-Omethyladenosine
  modified_base 49: mod_base = OTHER; note = Uridine phosphorothiorate
  modified_base 54: mod_base = OTHER; note = 2'-fluorocytosine
  modified_base 55: mod_base = OTHER; note = 2'-Omethylcytosine
  modified_base 58: mod_base = OTHER; note = Guanosine phosphorothiorate
  modified_base 72: mod_base = OTHER; note = 2'-fluorocytosine
  modified_base 84: mod_base = OTHER; note = 2'-fluorocytosine phosphorothiorate

SEQ ID NO: 5165 - RNA, 75 nt, synthetic construct; identical to SEQ ID NO: 3336
  source 1..75: mol_type = other RNA
  modified_base 2: mod_base = OTHER; note = 2'-Omethylcytosine
  modified_base 6: mod_base = OTHER; note = 2'-Omethylguanosine phosphorothiorate
  modified_base 19: mod_base = OTHER; note = 2'-fluorouridine phosphorothiorate
  modified_base 34: mod_base = OTHER; note = 2'-Omethyluridine phosphorothiorate
  modified_base 50: mod_base = OTHER; note = Guanosine phosphorothiorate

SEQ ID NO: 5166 - RNA, 76 nt, synthetic construct; identical to SEQ ID NO: 625
  source 1..76: mol_type = other RNA
  modified_base 1: mod_base = OTHER; note = 2'-Omethylguanosine phosphorothiorate
  modified_base 2: mod_base = OTHER; note = 2'-Omethylguanosine
  modified_base 18: mod_base = OTHER; note = 2'-Omethylguanosine
  modified_base 33: mod_base = OTHER; note = 2'-fluorouridine
  modified_base 35: mod_base = OTHER; note = Cytosine phosphorothiorate
  modified_base 37: mod_base = OTHER; note = Adenosine phosphorothiorate
  modified_base 38: mod_base = OTHER; note = Adenosine phosphorothiorate
  modified_base 52: mod_base = OTHER; note = 2'-Omethylguanosine
  modified_base 57: mod_base = OTHER; note = 2'-Omethylguanosine
  modified_base 62: mod_base = OTHER; note = 2'-Omethylcytosine
  modified_base 68: mod_base = OTHER; note = 2'-Omethylguanosine
  modified_base 73: mod_base = OTHER; note = 2'-Omethylguanosine
  modified_base 75: mod_base = OTHER; note = 2'-fluorocytosine phosphorothiorate

SEQ ID NO: 5167 - RNA, 76 nt, synthetic construct
  source 1..76: mol_type = other RNA
ggctccgtggcaagtcggatattgcattggacttcaaattcaaaggttccgggttcgagtcccggcggagtcgcca

SEQ ID NO: 5168 - RNA, 86 nt, synthetic construct; identical to SEQ ID NO: 3290
  source 1..86: mol_type = other RNA
  modified_base 1: mod_base = OTHER; note = 2'-Omethyladenosine
  modified_base 2: mod_base = OTHER; note = 2'-Omethylcytosine
  modified_base 3: mod_base = OTHER; note = 2'-Omethylcytosine
  modified_base 4: mod_base = OTHER; note = 2'-Omethyladenosine
  modified_base 5: mod_base = OTHER; note = 2'-Omethylguanosine
  modified_base 6: mod_base = OTHER; note = 2'-Omethylguanosine
  modified_base 75: mod_base = OTHER; note = 2'-Omethylcytosine
  modified_base 76: mod_base = OTHER; note = 2'-Omethyluridine
  modified_base 77: mod_base = OTHER; note = 2'-Omethylcytosine
  modified_base 78: mod_base = OTHER; note = 2'-Omethylcytosine
  modified_base 83: mod_base = OTHER; note = 2'-Omethyladenosine

SEQ ID NO: 5169 - RNA, 76 nt, synthetic construct; identical to SEQ ID NO: 625
  source 1..76: mol_type = other RNA
  modified_base 1: mod_base = OTHER; note = 2'-Omethylguanosine phosphorothiorate
  modified_base 2: mod_base = OTHER; note = 2'-Omethylguanosine
  modified_base 17: mod_base = OTHER; note = 2'-Omethylguanosine
  modified_base 33: mod_base = OTHER; note = 2'-fluorouridine
  modified_base 35: mod_base = OTHER; note = Cytosine phosphorothiorate
  modified_base 37: mod_base = OTHER; note = Adenosine phosphorothiorate
  modified_base 38: mod_base = OTHER; note = Adenosine phosphorothiorate
  modified_base 52: mod_base = OTHER; note = 2'-fluoroguanosine
  modified_base 54: mod_base = OTHER; note = 2'-Omethyluridine
  modified_base 57: mod_base = OTHER; note = 2'-fluoroguanosine
  modified_base 73: mod_base = OTHER; note = 2'-Omethylguanosine
  modified_base 75: mod_base = OTHER; note = 2'-fluorocytosine phosphorothiorate

SEQ ID NO: 5170 - RNA, 76 nt, synthetic construct; identical to SEQ ID NO: 3318
  source 1..76: mol_type = other RNA
  modified_base 1: mod_base = OTHER; note = 2'-Omethylcytosine
  modified_base 4: mod_base = OTHER; note = 2'-Omethyluridine
  modified_base 6: mod_base = OTHER; note = 2'-Omethylguanosine
  modified_base 10: mod_base = OTHER; note = 2'-Omethylguanosine
  modified_base 11: mod_base = OTHER; note = 2'-Omethylcytosine
  modified_base 12: mod_base = OTHER; note = 2'-Omethyluridine
  modified_base 13: mod_base = OTHER; note = 2'-Omethylcytosine
  modified_base 18: mod_base = OTHER; note = 2'-Omethylguanosine
  modified_base 19: mod_base = OTHER; note = 2'-Omethylguanosine
  modified_base 22: mod_base = OTHER; note = 2'-Omethylguanosine
  modified_base 25: mod_base = OTHER; note = 2'-Omethylcytosine
  modified_base 29: mod_base = OTHER; note = 2'-Omethylguanosine
  modified_base 30: mod_base = OTHER; note = 2'-Omethylguanosine
  modified_base 41: mod_base = OTHER; note = 2'-Omethylcytosine
  modified_base 42: mod_base = OTHER; note = 2'-Omethyluridine
  modified_base 43: mod_base = OTHER; note = 2'-Omethyluridine
  modified_base 45: mod_base = OTHER; note = 2'-Omethylguanosine
  modified_base 49: mod_base = OTHER; note = 2'-Omethylguanosine
  modified_base 50: mod_base = OTHER; note = 2'-Omethylcytosine
  modified_base 52: mod_base = OTHER; note = 2'-Omethylguanosine
  modified_base 56: mod_base = OTHER; note = 2'-Omethylcytosine
  modified_base 59: mod_base = OTHER; note = 2'-Omethyladenosine
  modified_base 61: mod_base = OTHER; note = 2'-Omethylcytosine
  modified_base 62: mod_base = OTHER; note = 2'-Omethylcytosine
  modified_base 65: mod_base = OTHER; note = 2'-Omethylcytosine
  modified_base 66: mod_base = OTHER; note = 2'-Omethyluridine
  modified_base 67: mod_base = OTHER; note = 2'-Omethylcytosine
  modified_base 68: mod_base = OTHER; note = 2'-Omethylguanosine
  modified_base 69: mod_base = OTHER; note = 2'-Omethyladenosine
  modified_base 71: mod_base = OTHER; note = 2'-Omethylguanosine
  modified_base 72: mod_base = OTHER; note = 2'-Omethylguanosine
  modified_base 73: mod_base = OTHER; note = 2'-Omethyladenosine
  modified_base 76: mod_base = OTHER; note = 2'-Omethyladenosine

SEQ ID NO: 5171 - RNA, 76 nt, synthetic construct; identical to SEQ ID NO: 625
  source 1..76: mol_type = other RNA
  modified_base 1: mod_base = OTHER; note = 2'-Omethylguanosine phosphorothiorate
  modified_base 2: mod_base = OTHER; note = 2'-Omethylguanosine phosphorothiorate
  modified_base 4: mod_base = OTHER; note = Uridine phosphorothiorate
  modified_base 5: mod_base = OTHER; note = 2'-fluorocytosine
  modified_base 13: mod_base = OTHER; note = 2'-Omethylcytosine
  modified_base 22: mod_base = OTHER; note = 2'-fluoroguanosine
  modified_base 49: mod_base = OTHER; note = 2'-O-(2-Methoxyethyl) 5-methylcytosine

SEQ ID NO: 5172 - RNA, 75 nt, synthetic construct; identical to SEQ ID NO: 3306
  source 1..75: mol_type = other RNA
  modified_base 1: mod_base = OTHER; note = 2'-Omethylguanosine phosphorothiorate
  modified_base 2: mod_base = OTHER; note = 2'-Omethyladenosine phosphorothiorate
  modified_base 51: mod_base = OTHER; note = Uridine phosphorothiorate
  modified_base 73: mod_base = OTHER; note = Cytosine phosphorothiorate
  modified_base 74: mod_base = OTHER; note = 2'-Omethylcytosine

SEQ ID NO: 5173 - RNA, 75 nt, synthetic construct; identical to SEQ ID NO: 3311
  source 1..75: mol_type = other RNA
  modified_base 1: mod_base = OTHER; note = 2'-Omethylguanosine phosphorothiorate
  modified_base 11: mod_base = OTHER; note = Uridine phosphorothiorate
  modified_base 15: mod_base = OTHER; note = Adenosine phosphorothiorate
  modified_base 21: mod_base = OTHER; note = Adenosine phosphorothiorate
  modified_base 22: mod_base = OTHER; note = 2'-fluoroguanosine
  modified_base 29: mod_base = OTHER; note = 2'-fluoroguanosine
  modified_base 46: mod_base = OTHER; note = 2'-fluoroadenosine
  modified_base 57: mod_base = OTHER; note = 2'-fluoroadenosine
  modified_base 59: mod_base = OTHER; note = 2'-Omethyluridine
  modified_base 73: mod_base = OTHER; note = Cytosine phosphorothiorate
  modified_base 74: mod_base = OTHER; note = 2'-Omethylcytosine
  modified_base 75: mod_base = OTHER; note = 2'-fluoroadenosine

SEQ ID NO: 5174 - RNA, 75 nt, synthetic construct; identical to SEQ ID NO: 3299
  source 1..75: mol_type = other RNA
  modified_base 11: mod_base = OTHER; note = Uridine phosphorothiorate
  modified_base 21: mod_base = OTHER; note = 2'-fluoroguanosine phosphorothiorate
  modified_base 46: mod_base = OTHER; note = 2'-fluorouridine
  modified_base 50: mod_base = OTHER; note = 2'-fluoroguanosine
  modified_base 51: mod_base = OTHER; note = 2'-fluoroguanosine
  modified_base 62: mod_base = OTHER; note = 2'-Omethylcytosine
  modified_base 73: mod_base = OTHER; note = Cytosine phosphorothiorate
  modified_base 74: mod_base = OTHER; note = 2'-fluorocytosine phosphorothiorate

SEQ ID NO: 5175 - RNA, 76 nt, synthetic construct; identical to SEQ ID NO: 3675
  source 1..76: mol_type = other RNA
  modified_base 1: mod_base = OTHER; note = 2'-Omethylguanosine
  modified_base 2: mod_base = OTHER; note = 2'-Omethylcytosine
  modified_base 3: mod_base = OTHER; note = 2'-Omethylcytosine
  modified_base 4: mod_base = OTHER; note = 2'-Omethyluridine
  modified_base 5: mod_base = OTHER; note = 2'-Omethylcytosine
  modified_base 6: mod_base = OTHER; note = 2'-Omethylcytosine
  modified_base 14: mod_base = OTHER; note = 2'-Omethyladenosine
  modified_base 15: mod_base = OTHER; note = 2'-Omethyladenosine
  modified_base 16: mod_base = OTHER; note = 2'-Omethyluridine
  modified_base 17: mod_base = OTHER; note = 2'-Omethylguanosine
  modified_base 18: mod_base = OTHER; note = 2'-Omethylguanosine
  modified_base 20: mod_base = OTHER; note = 2'-Omethyluridine
  modified_base 25: mod_base = OTHER; note = 2'-Omethylcytosine
  modified_base 33: mod_base = OTHER; note = 2'-fluorouridine
  modified_base 35: mod_base = OTHER; note = Cytosine phosphorothiorate
  modified_base 37: mod_base = OTHER; note = Adenosine phosphorothiorate
  modified_base 38: mod_base = OTHER; note = Adenosine phosphorothiorate
  modified_base 41: mod_base = OTHER; note = 2'-fluorocytosine
  modified_base 42: mod_base = OTHER; note = 2'-Omethyladenosine
  modified_base 43: mod_base = OTHER; note = 2'-Omethylcytosine
  modified_base 44: mod_base = OTHER; note = 2'-fluoroadenosine
  modified_base 49: mod_base = OTHER; note = 2'-Omethylcytosine
  modified_base 50: mod_base = OTHER; note = 2'-Omethylcytosine
  modified_base 52: mod_base = OTHER; note = 2'-Omethylguanosine
  modified_base 54: mod_base = OTHER; note = 2'-Omethyluridine
  modified_base 55: mod_base = OTHER; note = Uridine phosphorothiorate
  modified_base 56: mod_base = OTHER; note = 2'-Omethylcytosine
  modified_base 57: mod_base = OTHER; note = 2'-fluoroguanosine
  modified_base 59: mod_base = OTHER; note = 2'-Omethylguanosine
  modified_base 61: mod_base = OTHER; note = 2'-Omethylcytosine
  modified_base 62: mod_base = OTHER; note = 2'-Omethylcytosine
  modified_base 63: mod_base = OTHER; note = 2'-fluorocytosine
  modified_base 64: mod_base = OTHER; note = 2'-Omethylguanosine
  modified_base 65: mod_base = OTHER; note = 2'-Omethylguanosine
  modified_base 73: mod_base = OTHER; note = 2'-Omethylguanosine

SEQ ID NO: 5176 - RNA, 76 nt, synthetic construct; identical to SEQ ID NO: 625
  source 1..76: mol_type = other RNA
  modified_base 2: mod_base = OTHER; note = 2'-fluoroguanosine phosphorothiorate
  modified_base 3: mod_base = OTHER; note = 2'-fluorocytosine
  modified_base 4: mod_base = OTHER; note = 2'-fluorouridine
  modified_base 10: mod_base = OTHER; note = 2'-fluoroguanosine
  modified_base 11: mod_base = OTHER; note = 2'-fluorocytosine
  modified_base 12: mod_base = OTHER; note = 2'-Omethylguanosine
  modified_base 13: mod_base = OTHER; note = Cytosine phosphorothiorate
  modified_base 14: mod_base = OTHER; note = 2'-fluoroadenosine
  modified_base 15: mod_base = OTHER; note = 2'-Omethyladenosine
  modified_base 17: mod_base = OTHER; note = 2'-Omethylguanosine
  modified_base 19: mod_base = OTHER; note = Adenosine phosphorothiorate
  modified_base 25: mod_base = OTHER; note = 2'-fluorocytosine
  modified_base 30: mod_base = OTHER; note = 2'-Omethylguanosine phosphorothiorate
  modified_base 32: mod_base = OTHER; note = 2'-fluorocytosine
  modified_base 33: mod_base = OTHER; note = 2'-fluorouridine
  modified_base 34: mod_base = OTHER; note = Uridine phosphorothiorate
  modified_base 38: mod_base = OTHER; note = 2'-fluoroadenosine phosphorothiorate
  modified_base 39: mod_base = OTHER; note = 2'-fluorouridine
  modified_base 41: mod_base = OTHER; note = 2'-Omethylcytosine
  modified_base 43: mod_base = OTHER; note = Adenosine phosphorothiorate
  modified_base 44: mod_base = OTHER; note = Adenosine phosphorothiorate
  modified_base 45: mod_base = OTHER; note = Guanosine phosphorothiorate
  modified_base 46: mod_base = OTHER; note = 2'-fluoroguanosine
  modified_base 50: mod_base = OTHER; note = 2'-fluorocytosine phosphorothiorate
  modified_base 51: mod_base = OTHER; note = 2'-Omethylguanosine
  modified_base 52: mod_base = OTHER; note = 2'-fluoroguanosine
  modified_base 54: mod_base = OTHER; note = Uridine phosphorothiorate
  modified_base 56: mod_base = OTHER; note = 2'-fluorocytosine
  modified_base 58: mod_base = OTHER; note = Adenosine phosphorothiorate
  modified_base 59: mod_base = OTHER; note = 2'-fluoroguanosine
  modified_base 61: mod_base = OTHER; note = 2'-fluorocytosine
  modified_base 62: mod_base = OTHER; note = 2'-fluorocytosine phosphorothiorate
  modified_base 63: mod_base = OTHER; note = 2'-Omethylcytosine
  modified_base 65: mod_base = OTHER; note = 2'-Omethylguanosine
  modified_base 73: mod_base = OTHER; note = 2'-fluoroguanosine
  modified_base 74: mod_base = OTHER; note = Cytosine phosphorothiorate
  modified_base 75: mod_base = OTHER; note = 2'-fluorocytosine phosphorothiorate
  modified_base 76: mod_base = OTHER; note = 2'-fluoroadenosine

SEQ ID NO: 5177 - RNA, 76 nt, synthetic construct; identical to SEQ ID NO: 625
  source 1..76: mol_type = other RNA
  modified_base 1: mod_base = OTHER; note = 2'-Omethylguanosine phosphorothiorate
  modified_base 2: mod_base = OTHER; note = 2'-fluoroguanosine
  modified_base 10: mod_base = OTHER; note = 2'-fluoroguanosine
  modified_base 11: mod_base = OTHER; note = 2'-Omethylcytosine phosphorothiorate
  modified_base 12: mod_base = OTHER; note = 2'-fluoroguanosine
  modified_base 13: mod_base = OTHER; note = 2'-Omethylcytosine
  modified_base 16: mod_base = OTHER; note = 2'-Omethyluridine
  modified_base 17: mod_base = OTHER; note = 2'-Omethylguanosine
  modified_base 20: mod_base = OTHER; note = 2'-fluorouridine phosphorothiorate
  modified_base 21: mod_base = OTHER; note = Adenosine phosphorothiorate
  modified_base 25: mod_base = OTHER; note = Cytosine phosphorothiorate
  modified_base 26: mod_base = OTHER; note = 2'-fluoroadenosine
  modified_base 27: mod_base = OTHER; note = 2'-Omethyluridine
  modified_base 30: mod_base = OTHER; note = 2'-Omethylguanosine
  modified_base 36: mod_base = OTHER; note = Adenosine phosphorothiorate
  modified_base 42: mod_base = OTHER; note = Adenosine phosphorothiorate
  modified_base 43: mod_base = OTHER; note = 2'-fluoroadenosine
  modified_base 48: mod_base = OTHER; note = 2'-fluorouridine
  modified_base 49: mod_base = OTHER; note = Cytosine phosphorothiorate
  modified_base 50: mod_base = OTHER; note = 2'-Omethylcytosine
  modified_base 52: mod_base = OTHER; note = 2'-fluoroguanosine
  modified_base 54: mod_base = OTHER; note = 2'-Omethyluridine
  modified_base 57: mod_base = OTHER; note = 2'-fluoroguanosine
  modified_base 59: mod_base = OTHER; note = 2'-fluoroguanosine
  modified_base 60: mod_base = OTHER; note = 2'-Omethyluridine phosphorothiorate
  modified_base 64: mod_base = OTHER; note = 2'-fluoroguanosine
  modified_base 66: mod_base = OTHER; note = 2'-fluorocytosine
  modified_base 70: mod_base = OTHER; note = Guanosine phosphorothiorate
  modified_base 71: mod_base = OTHER; note = 2'-fluorouridine
  modified_base 73: mod_base = OTHER; note = Guanosine phosphorothiorate
  modified_base 74: mod_base = OTHER; note = 2'-fluorocytosine

SEQ ID NO: 5178 - RNA, 76 nt, synthetic construct; identical to SEQ ID NO: 625
  source 1..76: mol_type = other RNA
  modified_base 4: mod_base = OTHER; note = 2'-fluorouridine
  modified_base 12: mod_base = OTHER; note = 2'-Omethylguanosine
  modified_base 13: mod_base = OTHER; note = 2'-fluorocytosine phosphorothiorate
  modified_base 14: mod_base = OTHER; note = 2'-Omethyladenosine
  modified_base 15: mod_base = OTHER; note = 2'-fluoroadenosine
  modified_base 21: mod_base = OTHER; note = Adenosine phosphorothiorate
  modified_base 22: mod_base = OTHER; note = 2'-fluoroguanosine phosphorothiorate
  modified_base 23: mod_base = OTHER; note = 2'-fluorocytosine phosphorothiorate
  modified_base 24: mod_base = OTHER; note = 2'-Omethylguanosine
  modified_base 25: mod_base = OTHER; note = 2'-Omethylcytosine
  modified_base 29: mod_base = OTHER; note = 2'-Omethylguanosine
  modified_base 31: mod_base = OTHER; note = 2'-Omethyladenosine
  modified_base 33: mod_base = OTHER; note = 2'-fluorouridine
  modified_base 34: mod_base = OTHER; note = 2'-fluorouridine
  modified_base 39: mod_base = OTHER; note = Uridine phosphorothiorate
  modified_base 41: mod_base = OTHER; note = 2'-Omethylcytosine
  modified_base 42: mod_base = OTHER; note = 2'-Omethyladenosine phosphorothiorate
  modified_base 43: mod_base = OTHER; note = Adenosine phosphorothiorate
  modified_base 50: mod_base = OTHER; note = 2'-fluorocytosine
  modified_base 52: mod_base = OTHER; note = 2'-Omethylguanosine
  modified_base 53: mod_base = OTHER; note = Guanosine phosphorothiorate
  modified_base 54: mod_base = OTHER; note = 2'-fluorouridine
  modified_base 56: mod_base = OTHER; note = 2'-fluorocytosine phosphorothiorate
  modified_base 57: mod_base = OTHER; note = 2'-Omethylguanosine
  modified_base 58: mod_base = OTHER; note = 2'-fluoroadenosine phosphorothiorate
  modified_base 59: mod_base = OTHER; note = 2'-fluoroguanosine phosphorothiorate
  modified_base 60: mod_base = OTHER; note = 2'-fluorouridine
  modified_base 61: mod_base = OTHER; note = 2'-Omethylcytosine
  modified_base 64: mod_base = OTHER; note = 2'-fluoroguanosine
  modified_base 66: mod_base = OTHER; note = 2'-Omethylcytosine phosphorothiorate
  modified_base 67: mod_base = OTHER; note = 2'-fluoroguanosine
  modified_base 71: mod_base = OTHER; note = Uridine phosphorothiorate
  modified_base 72: mod_base = OTHER; note = 2'-Omethylcytosine phosphorothiorate
  modified_base 73: mod_base = OTHER; note = 2'-fluoroguanosine
  modified_base 76: mod_base = OTHER; note = 2'-fluoroadenosine

SEQ ID NO: 5179 - RNA, 75 nt, synthetic construct; identical to SEQ ID NO: 3306
  source 1..75: mol_type = other RNA
  modified_base 1: mod_base = OTHER; note = 2'-Omethylguanosine
  modified_base 2: mod_base = OTHER; note = 2'-Omethyladenosine
  modified_base 3: mod_base = OTHER; note = 2'-Omethylcytosine
  modified_base 4: mod_base = OTHER; note = 2'-Omethylcytosine
  modified_base 5: mod_base = OTHER; note = 2'-Omethyluridine
  modified_base 6: mod_base = OTHER; note = 2'-Omethylcytosine
  modified_base 16: mod_base = OTHER; note = 2'-Omethylcytosine
  modified_base 17: mod_base = OTHER; note = 2'-Omethylguanosine
  modified_base 18: mod_base = OTHER; note = 2'-Omethylguanosine
  modified_base 21: mod_base = OTHER; note = 2'-Omethylguanosine
  modified_base 22: mod_base = OTHER; note = 2'-Omethylcytosine
  modified_base 23: mod_base = OTHER; note = 2'-Omethylguanosine
  modified_base 24: mod_base = OTHER; note = 2'-Omethylcytosine
  modified_base 32: mod_base = OTHER; note = 2'-fluorouridine
  modified_base 34: mod_base = OTHER; note = Uridine phosphorothiorate
  modified_base 36: mod_base = OTHER; note = Guanosine phosphorothiorate
  modified_base 37: mod_base = OTHER; note = Adenosine phosphorothiorate
  modified_base 40: mod_base = OTHER; note = 2'-Omethyladenosine
  modified_base 41: mod_base = OTHER; note = 2'-Omethylguanosine
  modified_base 42: mod_base = OTHER; note = 2'-Omethyladenosine
  modified_base 43: mod_base = OTHER; note = 2'-Omethyladenosine
  modified_base 44: mod_base = OTHER; note = 2'-Omethylguanosine
  modified_base 45: mod_base = OTHER; note = 2'-fluoroguanosine
  modified_base 47: mod_base = OTHER; note = 2'-fluorouridine
  modified_base 48: mod_base = OTHER; note = 2'-Omethylguanosine
  modified_base 49: mod_base = OTHER; note = 2'-Omethylcytosine
  modified_base 51: mod_base = OTHER; note = 2'-Omethyluridine
  modified_base 53: mod_base = OTHER; note = 2'-Omethyluridine
  modified_base 54: mod_base = OTHER; note = Uridine phosphorothiorate
  modified_base 55: mod_base = OTHER; note = 2'-Omethylcytosine
  modified_base 56: mod_base = OTHER; note = 2'-fluoroadenosine
  modified_base 58: mod_base = OTHER; note = 2'-Omethyladenosine
  modified_base 60: mod_base = OTHER; note = 2'-Omethylcytosine
  modified_base 64: mod_base = OTHER; note = 2'-Omethyluridine
  modified_base 72: mod_base = OTHER; note = 2'-Omethyladenosine

SEQ ID NO: 5180 - RNA, 85 nt, synthetic construct; identical to SEQ ID NO: 3288
  source 1..85: mol_type = other RNA
  modified_base 1: mod_base = OTHER; note = 2'-Omethylcytosine
  modified_base 26: mod_base = OTHER; note = 2'-fluorouridine
  modified_base 34: mod_base = OTHER; note = 2'-fluorocytosine
  modified_base 51: mod_base = OTHER; note = 2'-Omethyluridine
  modified_base 57: mod_base = OTHER; note = 2'-Omethylcytosine
  modified_base 65: mod_base = OTHER; note = Cytosine phosphorothiorate
  modified_base 83: mod_base = OTHER; note = 2'-Omethylcytosine

SEQ ID NO: 5181 - RNA, 75 nt, synthetic construct; identical to SEQ ID NO: 3299
  source 1..75: mol_type = other RNA
  modified_base 1: mod_base = OTHER; note = 2'-Omethylcytosine phosphorothiorate
  modified_base 3: mod_base = OTHER; note = 2'-fluorouridine phosphorothiorate
  modified_base 8: mod_base = OTHER; note = Adenosine phosphorothiorate
  modified_base 11: mod_base = OTHER; note = Uridine phosphorothiorate
  modified_base 16: mod_base = OTHER; note = Cytosine phosphorothiorate
  modified_base 21: mod_base = OTHER; note = 2'-Omethylguanosine phosphorothiorate
  modified_base 22: mod_base = OTHER; note = 2'-Omethyladenosine phosphorothiorate
  modified_base 23: mod_base = OTHER; note = 2'-fluoroguanosine
  modified_base 25: mod_base = OTHER; note = Adenosine phosphorothiorate
  modified_base 26: mod_base = OTHER; note = Uridine phosphorothiorate
  modified_base 28: mod_base = OTHER; note = 2'-fluoroadenosine
  modified_base 29: mod_base = OTHER; note = 2'-Omethylguanosine phosphorothiorate
  modified_base 38: mod_base = OTHER; note = 2'-fluorouridine
  modified_base 40: mod_base = OTHER; note = 2'-fluorouridine
  modified_base 41: mod_base = OTHER; note = 2'-fluoroguanosine
  modified_base 46: mod_base = OTHER; note = 2'-fluorouridine phosphorothiorate
  modified_base 52: mod_base = OTHER; note = 2'-fluoroguanosine phosphorothiorate
  modified_base 53: mod_base = OTHER; note = 2'-fluorouridine
  modified_base 59: mod_base = OTHER; note = Uridine phosphorothiorate
  modified_base 62: mod_base = OTHER; note = 2'-Omethylcytosine phosphorothiorate
  modified_base 72: mod_base = OTHER; note = Guanosine phosphorothiorate
  modified_base 73: mod_base = OTHER; note = Cytosine phosphorothiorate
  modified_base 74: mod_base = OTHER; note = 2'-Omethylcytosine

SEQ ID NO: 5182 - RNA, 76 nt, synthetic construct; identical to SEQ ID NO: 625
  source 1..76: mol_type = other RNA
  modified_base 1: mod_base = OTHER; note = 2'-Omethylguanosine phosphorothiorate
  modified_base 2: mod_base = OTHER; note = 2'-Omethylguanosine
  modified_base 17: mod_base = OTHER; note = 2'-fluoroguanosine phosphorothiorate
  modified_base 33: mod_base = OTHER; note = 2'-fluorouridine
  modified_base 35: mod_base = OTHER; note = Cytosine phosphorothiorate
  modified_base 37: mod_base = OTHER; note = Adenosine phosphorothiorate
  modified_base 38: mod_base = OTHER; note = Adenosine phosphorothiorate
  modified_base 52: mod_base = OTHER; note = 2'-Omethylguanosine
  modified_base 56: mod_base = OTHER; note = 2'-Omethylcytosine
  modified_base 62: mod_base = OTHER; note = 2'-Omethylcytosine
  modified_base 63: mod_base = OTHER; note = 2'-fluorocytosine
  modified_base 73: mod_base = OTHER; note = 2'-Omethylguanosine

SEQ ID NO: 5183 - RNA, 75 nt, synthetic construct; identical to SEQ ID NO: 3336
  source 1..75: mol_type = other RNA
  modified_base 15: mod_base = OTHER; note = 2'-fluorouridine
  modified_base 26: mod_base = OTHER; note = Uridine phosphorothiorate
  modified_base 29: mod_base = OTHER; note = 2'-fluoroguanosine
  modified_base 38: mod_base = OTHER; note = Uridine phosphorothiorate
  modified_base 42: mod_base = OTHER; note = 2'-fluoroadenosine
  modified_base 47: mod_base = OTHER; note = 2'-fluorocytosine
  modified_base 72: mod_base = OTHER; note = Guanosine phosphorothiorate
  modified_base 74: mod_base = OTHER; note = Cytosine phosphorothiorate

SEQ ID NO: 5184 - RNA, 74 nt, synthetic construct; identical to SEQ ID NO: 3293
  source 1..74: mol_type = other RNA
  modified_base 1: mod_base = OTHER; note = 2'-fluoroadenosine
  modified_base 2: mod_base = OTHER; note = 2'-fluorocytosine
  modified_base 3: mod_base = OTHER; note = 2'-Omethylcytosine
  modified_base 11: mod_base = OTHER; note = Guanosine phosphorothiorate
  modified_base 24: mod_base = OTHER; note = 2'-fluoroguanosine
  modified_base 46: mod_base = OTHER; note = Uridine phosphorothiorate
  modified_base 73: mod_base = OTHER; note = 2'-Omethylcytosine phosphorothiorate
  modified_base 74: mod_base = OTHER; note = 2'-fluoroadenosine

SEQ ID NO: 5185 - RNA, 86 nt, synthetic construct; identical to SEQ ID NO: 3290
  source 1..86: mol_type = other RNA
  modified_base 67: mod_base = OTHER; note = 2'-fluoroguanosine

SEQ ID NO: 5186 - RNA, 76 nt, synthetic construct; identical to SEQ ID NO: 625
  source 1..76: mol_type = other RNA
  modified_base 1: mod_base = OTHER; note = 2'-Omethylguanosine phosphorothiorate
  modified_base 2: mod_base = OTHER; note = 2'-Omethylguanosine
  modified_base 17: mod_base = OTHER; note = 2'-Omethylguanosine
  modified_base 33: mod_base = OTHER; note = 2'-fluorouridine
  modified_base 35: mod_base = OTHER; note = Cytosine phosphorothiorate
  modified_base 37: mod_base = OTHER; note = Adenosine phosphorothiorate
  modified_base 38: mod_base = OTHER; note = Adenosine phosphorothiorate
  modified_base 52: mod_base = OTHER; note = 2'-fluoroguanosine
  modified_base 56: mod_base = OTHER; note = 2'-Omethylcytosine
  modified_base 62: mod_base = OTHER; note = 2'-Omethylcytosine
  modified_base 68: mod_base = OTHER; note = 2'-Omethylguanosine
  modified_base 73: mod_base = OTHER; note = 2'-Omethylguanosine
  modified_base 75: mod_base = OTHER; note = 2'-fluorocytosine phosphorothiorate

SEQ ID NO: 5187 - RNA, 85 nt, synthetic construct; identical to SEQ ID NO: 3297
  source 1..85: mol_type = other RNA
  modified_base 1: mod_base = OTHER; note = 2'-Omethylguanosine
  modified_base 2: mod_base = OTHER; note = 2'-Omethylcytosine
  modified_base 3: mod_base = OTHER; note = 2'-Omethyluridine
  modified_base 4: mod_base = OTHER; note = 2'-Omethylguanosine
  modified_base 5: mod_base = OTHER; note = 2'-Omethyluridine
  modified_base 6: mod_base = OTHER; note = 2'-Omethylguanosine
  modified_base 10: mod_base = OTHER; note = 2'-Omethylguanosine
  modified_base 11: mod_base = OTHER; note = 2'-Omethylcytosine
  modified_base 12: mod_base = OTHER; note = 2'-Omethylcytosine
  modified_base 13: mod_base = OTHER; note = 2'-Omethylguanosine
  modified_base 22: mod_base = OTHER; note = 2'-Omethyladenosine
  modified_base 23: mod_base = OTHER; note = 2'-Omethylguanosine
  modified_base 24: mod_base = OTHER; note = 2'-Omethylguanosine
  modified_base 25: mod_base = OTHER; note = 2'-Omethylcytosine
  modified_base 58: mod_base = OTHER; note = 2'-Omethylguanosine
  modified_base 59: mod_base = OTHER; note = 2'-Omethylcytosine
  modified_base 60: mod_base = OTHER; note = 2'-Omethyladenosine
  modified_base 61: mod_base = OTHER; note = 2'-Omethylguanosine
  modified_base 62: mod_base = OTHER; note = 2'-Omethylguanosine
  modified_base 70: mod_base = OTHER; note = 2'-Omethylcytosine
  modified_base 71: mod_base = OTHER; note = 2'-Omethylcytosine
  modified_base 72: mod_base = OTHER; note = 2'-fluorouridine
  modified_base 73: mod_base = OTHER; note = 2'-Omethylguanosine
  modified_base 74: mod_base = OTHER; note = 2'-Omethylcytosine
  modified_base 75: mod_base = OTHER; note = 2'-Omethyluridine
  modified_base 76: mod_base = OTHER; note = 2'-Omethylcytosine
  modified_base 77: mod_base = OTHER; note = 2'-Omethyladenosine
  modified_base 82: mod_base = OTHER; note = 2'-Omethylguanosine

SEQ ID NO: 5188 - RNA, 85 nt, synthetic construct; identical to SEQ ID NO: 3297
  source 1..85: mol_type = other RNA
  modified_base 1: mod_base = OTHER; note = 2'-Omethylguanosine phosphorothiorate
  modified_base 2: mod_base = OTHER; note = Cytosine phosphorothiorate
  modified_base 84: mod_base = OTHER; note = 2'-Omethylcytosine phosphorothiorate
  modified_base 85: mod_base = OTHER; note = 2'-Omethyladenosine

SEQ ID NO: 5189 - RNA, 76 nt, synthetic construct; identical to SEQ ID NO: 625
  source 1..76: mol_type = other RNA
  modified_base 3: mod_base = OTHER; note = Cytosine phosphorothiorate
  modified_base 4: mod_base = OTHER; note = 2'-Omethyluridine
  modified_base 5: mod_base = OTHER; note = 2'-Omethylcytosine
  modified_base 7: mod_base = OTHER; note = Guanosine phosphorothiorate
  modified_base 8: mod_base = OTHER; note = Uridine phosphorothiorate
  modified_base 10: mod_base = OTHER; note = Guanosine phosphorothiorate
  modified_base 11: mod_base = OTHER; note = 2'-Omethylcytosine
  modified_base 12: mod_base = OTHER; note = 2'-Omethylguanosine
  modified_base 14: mod_base = OTHER; note = 2'-Omethyladenosine phosphorothiorate
  modified_base 18: mod_base = OTHER; note = 2'-Omethylguanosine
  modified_base 20: mod_base = OTHER; note = 2'-Omethyluridine
  modified_base 22: mod_base = OTHER; note = Guanosine phosphorothiorate
  modified_base 23: mod_base = OTHER; note = 2'-Omethylcytosine
  modified_base 26: mod_base = OTHER; note = 2'-Omethyladenosine
  modified_base 27: mod_base = OTHER; note = Uridine phosphorothiorate
  modified_base 29: mod_base = OTHER; note = 2'-Omethylguanosine
  modified_base 30: mod_base = OTHER; note = Guanosine phosphorothiorate
  modified_base 32: mod_base = OTHER; note = 2'-fluorocytosine
  modified_base 34: mod_base = OTHER; note = Uridine phosphorothiorate
  modified_base 37: mod_base = OTHER; note = Adenosine phosphorothiorate
  modified_base 38: mod_base = OTHER; note = 2'-Omethyladenosine
  modified_base 39: mod_base = OTHER; note = 2'-fluorouridine phosphorothiorate
  modified_base 40: mod_base = OTHER; note = 2'-Omethyluridine
  modified_base 43: mod_base = OTHER; note = 2'-fluoroadenosine phosphorothiorate
  modified_base 44: mod_base = OTHER; note = 2'-Omethyladenosine phosphorothiorate
  modified_base 45: mod_base = OTHER; note = 2'-fluoroguanosine
  modified_base 47: mod_base = OTHER; note = 2'-Omethyluridine
  modified_base 49: mod_base = OTHER; note = 2'-fluorocytosine phosphorothiorate
  modified_base 56: mod_base = OTHER; note = 2'-Omethylcytosine
  modified_base 57: mod_base = OTHER; note = 2'-fluoroguanosine
  modified_base 59: mod_base = OTHER; note = 2'-fluoroguanosine
  modified_base 60: mod_base = OTHER; note = Uridine phosphorothiorate
  modified_base 61: mod_base = OTHER; note = 2'-fluorocytosine
  modified_base 64: mod_base = OTHER; note = Guanosine phosphorothiorate
  modified_base 70: mod_base = OTHER; note = 2'-Omethylguanosine
  modified_base 73: mod_base = OTHER; note = Guanosine phosphorothiorate
  modified_base 74: mod_base = OTHER; note = 2'-fluorocytosine
  modified_base 75: mod_base = OTHER; note = Cytosine phosphorothiorate
  modified_base 76: mod_base = OTHER; note = 2'-Omethyladenosine

SEQ ID NO: 5190 - RNA, 76 nt, synthetic construct; identical to SEQ ID NO: 625
  source 1..76: mol_type = other RNA
  modified_base 4: mod_base = OTHER; note = Thymine
  modified_base 54: mod_base = OTHER; note = Thymine
  modified_base 55: mod_base = OTHER; note = Thymine
  modified_base 60: mod_base = OTHER; note = Thymine
  modified_base 71: mod_base = OTHER; note = Thymine

SEQ ID NO: 5191 - RNA, 85 nt, synthetic construct; identical to SEQ ID NO: 3301
  source 1..85: mol_type = other RNA
  modified_base 1: mod_base = OTHER; note = 2'-Omethylguanosine phosphorothiorate
  modified_base 2: mod_base = OTHER; note = 2'-Omethylcytosine
  modified_base 3: mod_base = OTHER; note = 2'-Omethyluridine
  modified_base 5: mod_base = OTHER; note = 2'-Omethyluridine phosphorothiorate
  modified_base 14: mod_base = OTHER; note = 2'-Omethyladenosine phosphorothiorate
  modified_base 20: mod_base = OTHER; note = Uridine phosphorothiorate
  modified_base 27: mod_base = OTHER; note = 2'-fluorouridine phosphorothiorate
  modified_base 33: mod_base = OTHER; note = 2'-fluorouridine
  modified_base 37: mod_base = OTHER; note = 2'-Omethyladenosine
  modified_base 41: mod_base = OTHER; note = 2'-Omethylcytosine phosphorothiorate
  modified_base 44: mod_base = OTHER; note = 2'-Omethyluridine
  modified_base 46: mod_base = OTHER; note = 2'-Omethylguanosine
  modified_base 49: mod_base = OTHER; note = 2'-Omethyluridine phosphorothiorate
  modified_base 52: mod_base = OTHER; note = 2'-Omethylcytosine phosphorothiorate
  modified_base 57: mod_base = OTHER; note = 2'-Omethylcytosine
  modified_base 59: mod_base = OTHER; note = 2'-Omethylcytosine
  modified_base 71: mod_base = OTHER; note = 2'-fluorocytosine
  modified_base 73: mod_base = OTHER; note = 2'-fluoroguanosine
  modified_base 74: mod_base = OTHER; note = 2'-fluorocytosine
  modified_base 82: mod_base = OTHER; note = Guanosine phosphorothiorate

SEQ ID NO: 5192 - RNA, 86 nt, synthetic construct; identical to SEQ ID NO: 3290
  source 1..86: mol_type = other RNA
  modified_base 1: mod_base = OTHER; note = 2'-Omethyladenosine phosphorothiorate
  modified_base 2: mod_base = OTHER; note = 2'-Omethylcytosine phosphorothiorate
  modified_base 14: mod_base = OTHER; note = 2'-Omethyladenosine
  modified_base 17: mod_base = OTHER; note = 2'-Omethylguanosine
  modified_base 18: mod_base = OTHER; note = 2'-Omethylguanosine
  modified_base 20: mod_base = OTHER; note = 2'-Omethyluridine phosphorothiorate
  modified_base 22: mod_base = OTHER; note = 2'-Omethyladenosine
  modified_base 25: mod_base = OTHER; note = 2'-Omethylcytosine
  modified_base 27: mod_base = OTHER; note = 2'-Omethyluridine
  modified_base 33: mod_base = OTHER; note = 2'-fluorouridine
  modified_base 41: mod_base = OTHER; note = 2'-Omethylcytosine phosphorothiorate
  modified_base 44: mod_base = OTHER; note = 2'-Omethyluridine phosphorothiorate
  modified_base 57: mod_base = OTHER; note = 2'-fluoroguanosine
  modified_base 58: mod_base = OTHER; note = 2'-fluorocytosine
  modified_base 62: mod_base = OTHER; note = 2'-Omethylguanosine
  modified_base 65: mod_base = OTHER; note = Uridine phosphorothiorate
  modified_base 81: mod_base = OTHER; note = 2'-Omethylguanosine
  modified_base 83: mod_base = OTHER; note = 2'-Omethyladenosine

SEQ ID NO: 5193 - RNA, 75 nt, synthetic construct; identical to SEQ ID NO: 1045
  source 1..75: mol_type = other RNA
  modified_base 1: mod_base = OTHER; note = 2'-Omethylguanosine phosphorothiorate
  modified_base 2: mod_base = OTHER; note = 2'-Omethylguanosine
  modified_base 7: mod_base = OTHER; note = 2'-Omethyladenosine
  modified_base 9: mod_base = OTHER; note = 2'-fluoroguanosine
  modified_base 20: mod_base = OTHER; note = 2'-fluoroadenosine
  modified_base 23: mod_base = OTHER; note = 2'-fluorocytosine
  modified_base 27: mod_base = OTHER; note = Cytosine phosphorothiorate
  modified_base 35: mod_base = OTHER; note = 2'-fluorouridine
  modified_base 50: mod_base = OTHER; note = 2'-fluoroguanosine phosphorothiorate
  modified_base 54: mod_base = OTHER; note = 2'-Omethyluridine
  modified_base 59: mod_base = OTHER; note = 2'-fluorouridine
  modified_base 60: mod_base = OTHER; note = Cytosine phosphorothiorate
  modified_base 64: mod_base = OTHER; note = Guanosine phosphorothiorate
  modified_base 66: mod_base = OTHER; note = Guanosine phosphorothiorate
  modified_base 72: mod_base = OTHER; note = Uridine phosphorothiorate
  modified_base 73: mod_base = OTHER; note = Cytosine phosphorothiorate

SEQ ID NO: 5194 - RNA, 86 nt, synthetic construct; identical to SEQ ID NO: 3290
  source 1..86: mol_type = other RNA
  modified_base 29: mod_base = OTHER; note = 2'-fluoroguanosine

SEQ ID NO: 5195 - RNA, 73 nt, synthetic construct; identical to SEQ ID NO: 935
  source 1..73: mol_type = other RNA
  modified_base 1: mod_base = OTHER; note = 2'-Omethylguanosine phosphorothiorate
  modified_base 2: mod_base = OTHER; note = 2'-Omethylguanosine
  modified_base 71: mod_base = OTHER; note = Uridine phosphorothiorate
  modified_base 72: mod_base = OTHER; note = 2'-Omethylcytosine

SEQ ID NO: 5196 - RNA, 76 nt, synthetic construct
  source 1..76: mol_type = other RNA
gcctccgtggcgcaatggatagcgcattggacttcaaattcaatggttccgggttcgagtcccggcggaggcgcca

SEQ ID NO: 5197 - RNA, 75 nt, synthetic construct; identical to SEQ ID NO: 1045
  source 1..75: mol_type = other RNA
  modified_base 1: mod_base = OTHER; note = 2'-Omethylguanosine phosphorothiorate
  modified_base 2: mod_base = OTHER; note = 2'-Omethylguanosine phosphorothiorate
  modified_base 3: mod_base = OTHER; note = 2'-Omethyluridine
  modified_base 4: mod_base = OTHER; note = 2'-Omethyluridine
  modified_base 5: mod_base = OTHER; note = 2'-Omethylcytosine
  modified_base 6: mod_base = OTHER; note = 2'-Omethylcytosine
  modified_base 10: mod_base = OTHER; note = 2'-Omethylguanosine
  modified_base 11: mod_base = OTHER; note = 2'-Omethyluridine
  modified_base 12: mod_base = OTHER; note = 2'-Omethylguanosine
  modified_base 13: mod_base = OTHER; note = 2'-Omethyluridine
  modified_base 14: mod_base = OTHER; note = 2'-Omethyladenosine
  modified_base 15: mod_base = OTHER; note = 2'-fluoroadenosine
  modified_base 16: mod_base = OTHER; note = 2'-Omethyluridine
  modified_base 17: mod_base = OTHER; note = 2'-Omethylguanosine
  modified_base 18: mod_base = OTHER; note = 2'-Omethylguanosine
  modified_base 19: mod_base = OTHER; note = 2'-fluorouridine
  modified_base 20: mod_base = OTHER; note = 2'-Omethyladenosine
  modified_base 22: mod_base = OTHER; note = 2'-Omethylguanosine
  modified_base 23: mod_base = OTHER; note = 2'-Omethylcytosine
  modified_base 24: mod_base = OTHER; note = 2'-Omethyladenosine
  modified_base 25: mod_base = OTHER; note = 2'-Omethylcytosine
  modified_base 48: mod_base = OTHER; note = 2'-Omethylcytosine
  modified_base 49: mod_base = OTHER; note = 2'-Omethylcytosine
  modified_base 50: mod_base = OTHER; note = 2'-Omethylguanosine
  modified_base 51: mod_base = OTHER; note = 2'-Omethyladenosine
  modified_base 52: mod_base = OTHER; note = 2'-Omethylguanosine
  modified_base 53: mod_base = OTHER; note = 2'-Omethyluridine
  modified_base 60: mod_base = OTHER; note = 2'-Omethylcytosine
  modified_base 61: mod_base = OTHER; note = 2'-Omethyluridine
  modified_base 62: mod_base = OTHER; note = 2'-fluorocytosine
  modified_base 63: mod_base = OTHER; note = 2'-Omethylguanosine
  modified_base 64: mod_base = OTHER; note = 2'-Omethylguanosine
  modified_base 65: mod_base = OTHER; note = 2'-Omethyluridine
  modified_base 66: mod_base = OTHER; note = 2'-Omethylguanosine
  modified_base 67: mod_base = OTHER; note = 2'-Omethylguanosine
  modified_base 72: mod_base = OTHER; note = 2'-Omethyluridine

SEQ ID NO: 5198 - RNA, 75 nt, synthetic construct; identical to SEQ ID NO: 3311
  source 1..75: mol_type = other RNA
  modified_base 1: mod_base = OTHER; note = 2'-Omethylguanosine
  modified_base 2: mod_base = OTHER; note = 2'-Omethylguanosine phosphorothiorate
  modified_base 7: mod_base = OTHER; note = Adenosine phosphorothiorate
  modified_base 14: mod_base = OTHER; note = 2'-fluoroadenosine
  modified_base 15: mod_base = OTHER; note = 2'-fluoroadenosine phosphorothiorate
  modified_base 22: mod_base = OTHER; note = 2'-fluoroguanosine
  modified_base 25: mod_base = OTHER; note = 2'-fluorocytosine
  modified_base 33: mod_base = OTHER; note = 2'-fluorouridine
  modified_base 40: mod_base = OTHER; note = 2'-Omethylcytosine
  modified_base 41: mod_base = OTHER; note = 2'-fluorocytosine
  modified_base 49: mod_base = OTHER; note = 2'-fluorocytosine
  modified_base 50: mod_base = OTHER; note = Guanosine phosphorothiorate
  modified_base 51: mod_base = OTHER; note = 2'-fluoroadenosine phosphorothiorate
  modified_base 54: mod_base = OTHER; note = 2'-Omethyluridine
  modified_base 61: mod_base = OTHER; note = 2'-fluorouridine
  modified_base 65: mod_base = OTHER; note = Uridine phosphorothiorate
  modified_base 66: mod_base = OTHER; note = 2'-fluoroguanosine

SEQ ID NO: 5199 - RNA, 75 nt, synthetic construct; identical to SEQ ID NO: 1045
  source 1..75: mol_type = other RNA
  modified_base 1: mod_base = OTHER; note = 2'-Omethylguanosine phosphorothiorate
  modified_base 2: mod_base = OTHER; note = 2'-Omethylguanosine phosphorothiorate
  modified_base 11: mod_base = OTHER; note = 2'-fluorouridine
  modified_base 12: mod_base = OTHER; note = Guanosine phosphorothiorate
  modified_base 13: mod_base = OTHER; note = Uridine phosphorothiorate
  modified_base 19: mod_base = OTHER; note = 2'-fluorouridine
  modified_base 23: mod_base = OTHER; note = 2'-fluorocytosine
  modified_base 39: mod_base = OTHER; note = 2'-fluorouridine
  modified_base 45: mod_base = OTHER; note = 2'-fluoroguanosine
  modified_base 66: mod_base = OTHER; note = 2'-fluoroguanosine
  modified_base 67: mod_base = OTHER; note = 2'-fluoroguanosine
  modified_base 72: mod_base = OTHER; note = Uridine phosphorothiorate
  modified_base 73: mod_base = OTHER; note = Cytosine phosphorothiorate

SEQ ID NO: 5200 - RNA, 76 nt, synthetic construct; identical to SEQ ID NO: 625
  source 1..76: mol_type = other RNA
  modified_base 1: mod_base = OTHER; note = 2'-Omethylguanosine phosphorothiorate
  modified_base 2: mod_base = OTHER; note = 2'-Omethylguanosine
  modified_base 3: mod_base = OTHER; note = 2'-Omethylcytosine
  modified_base 10: mod_base = OTHER; note = 2'-Omethylguanosine
  modified_base 11: mod_base = OTHER; note = 2'-Omethylcytosine
  modified_base 12: mod_base = OTHER; note = 2'-Omethylguanosine
  modified_base 13: mod_base = OTHER; note = 2'-Omethylcytosine
  modified_base 14: mod_base = OTHER; note = 2'-Omethyladenosine
  modified_base 15: mod_base = OTHER; note = 2'-fluoroadenosine
  modified_base 16: mod_base = OTHER; note = 2'-Omethyluridine
  modified_base 17: mod_base = OTHER; note = 2'-Omethylguanosine
  modified_base 18: mod_base = OTHER; note = 2'-Omethylguanosine
  modified_base 19: mod_base = OTHER; note = 2'-fluoroadenosine
  modified_base 20: mod_base = OTHER; note = 2'-Omethyluridine
  modified_base 21: mod_base = OTHER; note = 2'-fluoroadenosine
  modified_base 22: mod_base = OTHER; note = 2'-Omethylguanosine
  modified_base 23: mod_base = OTHER; note = 2'-Omethylcytosine
  modified_base 24: mod_base = OTHER; note = 2'-Omethylguanosine
  modified_base 25: mod_base = OTHER; note = 2'-Omethylcytosine
  modified_base 38: mod_base = OTHER; note = Adenosine phosphorothiorate
  modified_base 39: mod_base = OTHER; note = Uridine phosphorothiorate
  modified_base 40: mod_base = OTHER; note = 2'-fluorouridine
  modified_base 43: mod_base = OTHER; note = 2'-Omethyladenosine
  modified_base 44: mod_base = OTHER; note = 2'-Omethyladenosine
  modified_base 45: mod_base = OTHER; note = 2'-Omethylguanosine
  modified_base 46: mod_base = OTHER; note = 2'-fluoroguanosine
  modified_base 48: mod_base = OTHER; note = 2'-fluorouridine
  modified_base 49: mod_base = OTHER; note = 2'-Omethylcytosine
  modified_base 50: mod_base = OTHER; note = 2'-Omethylcytosine
  modified_base 51: mod_base = OTHER; note = 2'-Omethylguanosine
  modified_base 52: mod_base = OTHER; note = 2'-Omethylguanosine
  modified_base 53: mod_base = OTHER; note = 2'-Omethylguanosine
  modified_base 54: mod_base = OTHER; note = 2'-Omethyluridine
  modified_base 61: mod_base = OTHER; note = 2'-Omethylcytosine
  modified_base 62: mod_base = OTHER; note = 2'-Omethylcytosine
  modified_base 63: mod_base = OTHER; note = 2'-fluorocytosine
  modified_base 64: mod_base = OTHER; note = 2'-Omethylguanosine
  modified_base 65: mod_base = OTHER; note = 2'-Omethylguanosine
  modified_base 66: mod_base = OTHER; note = 2'-Omethylcytosine
  modified_base 67: mod_base = OTHER; note = 2'-Omethylguanosine
  modified_base 68: mod_base = OTHER; note = 2'-Omethylguanosine

SEQ ID NO: 5201 - RNA, 86 nt, synthetic construct; identical to SEQ ID NO: 3290
  source 1..86: mol_type = other RNA
  modified_base 66: mod_base = OTHER; note = 2'-fluorocytosine

SEQ ID NO: 5202 - RNA, 76 nt, synthetic construct; identical to SEQ ID NO: 625
  source 1..76: mol_type = other RNA
  modified_base 10: mod_base = OTHER; note = 2'-Omethylguanosine
  modified_base 11: mod_base = OTHER; note = 2'-Omethylcytosine
  modified_base 12: mod_base = OTHER; note = 2'-Omethylguanosine
  modified_base 13: mod_base = OTHER; note = 2'-Omethylcytosine
  modified_base 14: mod_base = OTHER; note = 2'-Omethyladenosine
  modified_base 15: mod_base = OTHER; note = 2'-Omethyladenosine
  modified_base 16: mod_base = OTHER; note = 2'-Omethyluridine
  modified_base 17: mod_base = OTHER; note = 2'-Omethylguanosine
  modified_base 18: mod_base = OTHER; note = 2'-Omethylguanosine
  modified_base 19: mod_base = OTHER; note = 2'-Omethyladenosine
  modified_base 20: mod_base = OTHER; note = 2'-Omethyluridine
  modified_base 22: mod_base = OTHER; note = 2'-Omethylguanosine
  modified_base 23: mod_base = OTHER; note = 2'-Omethylcytosine
  modified_base 24: mod_base = OTHER; note = 2'-Omethylguanosine
  modified_base 25: mod_base = OTHER; note = 2'-Omethylcytosine
  modified_base 40: mod_base = OTHER; note = 2'-fluorouridine
  modified_base 41: mod_base = OTHER; note = 2'-fluorocytosine
  modified_base 42: mod_base = OTHER; note = 2'-fluoroadenosine
  modified_base 43: mod_base = OTHER; note = 2'-fluoroadenosine
  modified_base 44: mod_base = OTHER; note = 2'-Omethyladenosine
  modified_base 45: mod_base = OTHER; note = 2'-Omethylguanosine
  modified_base 46: mod_base = OTHER; note = 2'-Omethylguanosine
  modified_base 49: mod_base = OTHER; note = 2'-Omethylcytosine
  modified_base 50: mod_base = OTHER; note = 2'-Omethylcytosine
  modified_base 51: mod_base = OTHER; note = 2'-Omethylguanosine
  modified_base 52: mod_base = OTHER; note = 2'-Omethylguanosine
  modified_base 53: mod_base = OTHER; note = 2'-Omethylguanosine
  modified_base 54: mod_base = OTHER; note = Uridine phosphorothiorate
  modified_base 55: mod_base = OTHER; note = Uridine phosphorothiorate
  modified_base 56: mod_base = OTHER; note = Cytosine phosphorothiorate
  modified_base 57: mod_base = OTHER; note = Guanosine phosphorothiorate
  modified_base 61: mod_base = OTHER; note = 2'-Omethylcytosine
  modified_base 62: mod_base = OTHER; note = 2'-Omethylcytosine
  modified_base 63: mod_base = OTHER; note = 2'-Omethylcytosine
  modified_base 64: mod_base = OTHER; note = 2'-Omethylguanosine
  modified_base 65: mod_base = OTHER; note = 2'-Omethylguanosine
  modified_base 66: mod_base = OTHER; note = 2'-Omethylcytosine
  modified_base 67: mod_base = OTHER; note = 2'-Omethylguanosine
  modified_base 68: mod_base = OTHER; note = 2'-Omethylguanosine
  modified_base 69: mod_base = OTHER; note = 2'-Omethyladenosine

SEQ ID NO: 5203 - RNA, 86 nt, synthetic construct; identical to SEQ ID NO: 3290
  source 1..86: mol_type = other RNA
  modified_base 1: mod_base = OTHER; note = 2'-Omethyladenosine
  modified_base 10: mod_base = OTHER; note = 2'-Omethylguanosine
  modified_base 11: mod_base = OTHER; note = 2'-Omethylcytosine
  modified_base 12: mod_base = OTHER; note = 2'-Omethylcytosine
  modified_base 13: mod_base = OTHER; note = 2'-Omethylguanosine
  modified_base 14: mod_base = OTHER; note = 2'-Omethyladenosine
  modified_base 15: mod_base = OTHER; note = 2'-Omethylguanosine
  modified_base 16: mod_base = OTHER; note = 2'-Omethyluridine
  modified_base 17: mod_base = OTHER; note = 2'-Omethylguanosine
  modified_base 18: mod_base = OTHER; note = 2'-Omethylguanosine
  modified_base 19: mod_base = OTHER; note = Uridine phosphorothiorate
  modified_base 20: mod_base = OTHER; note = 2'-Omethyluridine
  modified_base 21: mod_base = OTHER; note = Adenosine phosphorothiorate
  modified_base 22: mod_base = OTHER; note = 2'-Omethyladenosine
  modified_base 23: mod_base = OTHER; note = 2'-Omethylguanosine
  modified_base 24: mod_base = OTHER; note = 2'-Omethylguanosine
  modified_base 25: mod_base = OTHER; note = 2'-Omethylcytosine
  modified_base 33: mod_base = OTHER; note = Uridine phosphorothiorate
  modified_base 34: mod_base = OTHER; note = 2'-Omethyluridine
  modified_base 35: mod_base = OTHER; note = Cytosine phosphorothiorate
  modified_base 37: mod_base = OTHER; note = Guanosine phosphorothiorate
  modified_base 38: mod_base = OTHER; note = Adenosine phosphorothiorate
  modified_base 59: mod_base = OTHER; note = 2'-Omethylguanosine
  modified_base 60: mod_base = OTHER; note = 2'-Omethyluridine
  modified_base 62: mod_base = OTHER; note = 2'-Omethylguanosine
  modified_base 64: mod_base = OTHER; note = Uridine phosphorothiorate
  modified_base 65: mod_base = OTHER; note = Uridine phosphorothiorate
  modified_base 71: mod_base = OTHER; note = 2'-Omethylcytosine
  modified_base 75: mod_base = OTHER; note = 2'-Omethylcytosine
  modified_base 83: mod_base = OTHER; note = 2'-Omethyladenosine

SEQ ID NO: 5204 - RNA, 86 nt, synthetic construct; identical to SEQ ID NO: 3290
  source 1..86: mol_type = other RNA
  modified_base 1: mod_base = OTHER; note = 2'-Omethyladenosine phosphorothiorate
  modified_base 2: mod_base = OTHER; note = 2'-Omethylcytosine
  modified_base 13: mod_base = OTHER; note = Guanosine phosphorothiorate
  modified_base 14: mod_base = OTHER; note = 2'-Omethyladenosine
  modified_base 65: mod_base = OTHER; note = Uridine phosphorothiorate
  modified_base 84: mod_base = OTHER; note = Cytosine phosphorothiorate
  modified_base 85: mod_base = OTHER; note = 2'-Omethylcytosine

SEQ ID NO: 5205 - RNA, 76 nt, synthetic construct; identical to SEQ ID NO: 625
  source 1..76: mol_type = other RNA
  modified_base 54: mod_base = OTHER; note = Uridine phosphorothiorate
  modified_base 55: mod_base = OTHER; note = Uridine phosphorothiorate
  modified_base 56: mod_base = OTHER; note = Cytosine phosphorothiorate
  modified_base 57: mod_base = OTHER; note = Guanosine phosphorothiorate
  modified_base 61: mod_base = OTHER; note = 2'-Omethylcytosine
  modified_base 62: mod_base = OTHER; note = 2'-Omethylcytosine
  modified_base 63: mod_base = OTHER; note = 2'-Omethylcytosine
  modified_base 64: mod_base = OTHER; note = 2'-Omethylguanosine
  modified_base 65: mod_base = OTHER; note = 2'-Omethylguanosine
  modified_base 66: mod_base = OTHER; note = 2'-Omethylcytosine
  modified_base 67: mod_base = OTHER; note = 2'-Omethylguanosine
  modified_base 68: mod_base = OTHER; note = 2'-Omethylguanosine
  modified_base 69: mod_base = OTHER; note = 2'-Omethyladenosine

SEQ ID NO: 5206 - RNA, 76 nt, synthetic construct; identical to SEQ ID NO: 3289
  source 1..76: mol_type = other RNA
  modified_base 1: mod_base = OTHER; note = 2'-Omethylguanosine
  modified_base 2: mod_base = OTHER; note = 2'-Omethylcytosine
  modified_base 3: mod_base = OTHER; note = 2'-Omethylcytosine
  modified_base 4: mod_base = OTHER; note = 2'-Omethyluridine
  modified_base 5: mod_base = OTHER; note = 2'-Omethylguanosine
  modified_base 6: mod_base = OTHER; note = 2'-Omethylguanosine
  modified_base 10: mod_base = OTHER; note = 2'-Omethylguanosine
  modified_base 11: mod_base = OTHER; note = 2'-Omethylcytosine
  modified_base 12: mod_base = OTHER; note = 2'-Omethyluridine
  modified_base 13: mod_base = OTHER; note = 2'-Omethylcytosine

SEQ ID NO: 5207 - RNA, 74 nt, synthetic construct; identical to SEQ ID NO: 3293
  source 1..74: mol_type = other RNA
  modified_base 1: mod_base = OTHER; note = 2'-Omethyladenosine
  modified_base 2: mod_base = OTHER; note = Cytosine phosphorothiorate
  modified_base 3: mod_base = OTHER; note = Cytosine phosphorothiorate
  modified_base 4: mod_base = OTHER; note = 2'-fluorouridine
  modified_base 6: mod_base = OTHER; note = 2'-fluoroguanosine
  modified_base 8: mod_base = OTHER; note = 2'-Omethylguanosine phosphorothiorate
  modified_base 12: mod_base = OTHER; note = 2'-fluorocytosine
  modified_base 21: mod_base = OTHER; note = 2'-fluorocytosine
  modified_base 24: mod_base = OTHER; note = 2'-fluoroguanosine
  modified_base 27: mod_base = OTHER; note = 2'-Omethyluridine
  modified_base 34: mod_base = OTHER; note = 2'-fluoroadenosine phosphorothiorate
  modified_base 43: mod_base = OTHER; note = 2'-fluoroguanosine
  modified_base 47: mod_base = OTHER; note = Guanosine phosphorothiorate
  modified_base 50: mod_base = OTHER; note = Uridine phosphorothiorate
  modified_base 51: mod_base = OTHER; note = 2'-fluoroguanosine
  modified_base 62: mod_base = OTHER; note = Guanosine phosphorothiorate
  modified_base 73: mod_base = OTHER; note = 2'-Omethylcytosine phosphorothiorate
  modified_base 74: mod_base = OTHER; note = 2'-Omethyladenosine

SEQ ID NO: 5208 - RNA, 85 nt, synthetic construct; identical to SEQ ID NO: 3288
  source 1..85: mol_type = other RNA
  modified_base 1: mod_base = OTHER; note = 2'-Omethylcytosine phosphorothiorate
  modified_base 2: mod_base = OTHER; note = 2'-fluorocytosine phosphorothiorate
  modified_base 3: mod_base = OTHER; note = 2'-fluoroadenosine phosphorothiorate
  modified_base 10: mod_base = OTHER; note = Cytosine phosphorothiorate
  modified_base 13: mod_base = OTHER; note = 2'-Omethyladenosine
  modified_base 22: mod_base = OTHER; note = 2'-fluoroguanosine phosphorothiorate
  modified_base 30: mod_base = OTHER; note = 2'-fluoroadenosine
  modified_base 34: mod_base = OTHER; note = 2'-fluorocytosine
  modified_base 36: mod_base = OTHER; note = 2'-fluoroguanosine
  modified_base 52: mod_base = OTHER; note = Guanosine phosphorothiorate
  modified_base 57: mod_base = OTHER; note = 2'-Omethylcytosine
  modified_base 59: mod_base = OTHER; note = 2'-Omethyluridine
  modified_base 65: mod_base = OTHER; note = Cytosine phosphorothiorate
  modified_base 69: mod_base = OTHER; note = 2'-fluorocytosine phosphorothiorate
  modified_base 77: mod_base = OTHER; note = 2'-Omethylcytosine
  modified_base 84: mod_base = OTHER; note = Cytosine phosphorothiorate
  modified_base 85: mod_base = OTHER; note = 2'-Omethyladenosine

SEQ ID NO: 5209 - RNA, 76 nt, synthetic construct; identical to SEQ ID NO: 625
  source 1..76: mol_type = other RNA
  modified_base 16: mod_base = OTHER; note = Thymine
  modified_base 20: mod_base = OTHER; note = Thymine
  modified_base 27: mod_base = OTHER; note = Thymine
  modified_base 28: mod_base = OTHER; note = Thymine
  modified_base 39: mod_base = OTHER; note = Thymine
  modified_base 40: mod_base = OTHER; note = Thymine

SEQ ID NO: 5210 - RNA, 76 nt, synthetic construct; identical to SEQ ID NO: 3332
  source 1..76: mol_type = other RNA
  modified_base 1: mod_base = OTHER; note = 2'-Omethylguanosine
  modified_base 2: mod_base = OTHER; note = 2'-Omethylguanosine
  modified_base 3: mod_base = OTHER; note = 2'-Omethylcytosine
  modified_base 4: mod_base = OTHER; note = 2'-Omethylcytosine
  modified_base 5: mod_base = OTHER; note = 2'-Omethylcytosine
  modified_base 6: mod_base = OTHER; note = 2'-Omethylcytosine
  modified_base 16: mod_base = OTHER; note = 2'-Omethyluridine
  modified_base 17: mod_base = OTHER; note = 2'-Omethylguanosine
  modified_base 18: mod_base = OTHER; note = 2'-Omethylguanosine
  modified_base 20: mod_base = OTHER; note = 2'-Omethyluridine
  modified_base 22: mod_base = OTHER; note = 2'-Omethylguanosine
  modified_base 23: mod_base = OTHER; note = 2'-Omethylcytosine
  modified_base 24: mod_base = OTHER; note = 2'-Omethylguanosine
  modified_base 25: mod_base = OTHER; note = 2'-Omethylcytosine
  modified_base 33: mod_base = OTHER; note = 2'-fluorouridine
  modified_base 35: mod_base = OTHER; note = Cytosine phosphorothiorate
  modified_base 37: mod_base = OTHER; note = Adenosine phosphorothiorate
  modified_base 38: mod_base = OTHER; note = Adenosine phosphorothiorate
  modified_base 41: mod_base = OTHER; note = 2'-Omethylcytosine
  modified_base 42: mod_base = OTHER; note = 2'-Omethyladenosine
  modified_base 43: mod_base = OTHER; note = 2'-Omethyladenosine
  modified_base 44: mod_base = OTHER; note = 2'-Omethyladenosine
  modified_base 45: mod_base = OTHER; note = 2'-Omethylguanosine
  modified_base 46: mod_base = OTHER; note = 2'-fluoroguanosine
  modified_base 48: mod_base = OTHER; note = 2'-fluorouridine
  modified_base 49: mod_base = OTHER; note = 2'-Omethylguanosine
  modified_base 50: mod_base = OTHER; note = 2'-Omethylcytosine
  modified_base 52: mod_base = OTHER; note = 2'-Omethylguanosine
  modified_base 54: mod_base = OTHER; note = 2'-Omethyluridine
  modified_base 55: mod_base = OTHER; note = Uridine phosphorothiorate
  modified_base 56: mod_base = OTHER; note = 2'-Omethylcytosine
  modified_base 57: mod_base = OTHER; note = 2'-fluoroguanosine
  modified_base 59: mod_base = OTHER; note = 2'-Omethylguanosine
  modified_base 61: mod_base = OTHER; note = 2'-Omethylcytosine
  modified_base 65: mod_base = OTHER; note = 2'-Omethylcytosine
  modified_base 73: mod_base = OTHER; note = 2'-Omethylguanosine

SEQ ID NO: 5211 - RNA, 76 nt, synthetic construct; identical to SEQ ID NO: 625
  source 1..76: mol_type = other RNA
  modified_base 1: mod_base = OTHER; note = 2'-Omethylguanosine phosphorothiorate
  modified_base 2: mod_base = OTHER; note = 2'-Omethylguanosine
  modified_base 13: mod_base = OTHER; note = 2'-Omethylcytosine
  modified_base 33: mod_base = OTHER; note = 2'-fluorouridine
  modified_base 35: mod_base = OTHER; note = Cytosine phosphorothiorate
  modified_base 37: mod_base = OTHER; note = Adenosine phosphorothiorate
  modified_base 52: mod_base = OTHER; note = 2'-Omethylguanosine
  modified_base 57: mod_base = OTHER; note = 2'-Omethylguanosine
  modified_base 62: mod_base = OTHER; note = 2'-Omethylcytosine
  modified_base 73: mod_base = OTHER; note = 2'-Omethylguanosine
  modified_base 75: mod_base = OTHER; note = 2'-fluorocytosine phosphorothiorate

SEQ ID NO: 5212 - RNA, 76 nt, synthetic construct; identical to SEQ ID NO: 3318
  source 1..76: mol_type = other RNA
  modified_base 1: mod_base = OTHER; note = 2'-Omethylcytosine
  modified_base 2: mod_base = OTHER; note = 2'-Omethylcytosine
  modified_base 3: mod_base = OTHER; note = 2'-Omethyluridine
  modified_base 4: mod_base = OTHER; note = 2'-Omethyluridine
  modified_base 5: mod_base = OTHER; note = 2'-Omethylcytosine
  modified_base 6: mod_base = OTHER; note = 2'-Omethylguanosine
  modified_base 10: mod_base = OTHER; note = 2'-Omethylguanosine
  modified_base 11: mod_base = OTHER; note = 2'-Omethylcytosine
  modified_base 12: mod_base = OTHER; note = 2'-Omethyluridine
  modified_base 13: mod_base = OTHER; note = 2'-Omethylcytosine
  modified_base 16: mod_base = OTHER; note = 2'-Omethyluridine
  modified_base 18: mod_base = OTHER; note = 2'-Omethylguanosine
  modified_base 19: mod_base = OTHER; note = 2'-Omethylguanosine
  modified_base 25: mod_base = OTHER; note = 2'-Omethylcytosine
  modified_base 33: mod_base = OTHER; note = 2'-fluorouridine
  modified_base 35: mod_base = OTHER; note = Uridine phosphorothiorate
  modified_base 37: mod_base = OTHER; note = Guanosine phosphorothiorate
  modified_base 38: mod_base = OTHER; note = Adenosine phosphorothiorate
  modified_base 41: mod_base = OTHER; note = 2'-fluorocytosine
  modified_base 42: mod_base = OTHER; note = 2'-Omethyluridine
  modified_base 43: mod_base = OTHER; note = 2'-Omethyluridine
  modified_base 44: mod_base = OTHER; note = 2'-fluoroadenosine
  modified_base 49: mod_base = OTHER; note = 2'-Omethylguanosine
  modified_base 50: mod_base = OTHER; note = 2'-Omethylcytosine
  modified_base 52: mod_base = OTHER; note = 2'-Omethylguanosine
  modified_base 54: mod_base = OTHER; note = 2'-Omethyluridine
  modified_base 55: mod_base = OTHER; note = Uridine phosphorothiorate
  modified_base 56: mod_base = OTHER; note = 2'-Omethylcytosine
  modified_base 57: mod_base = OTHER; note = 2'-fluoroguanosine
  modified_base 59: mod_base = OTHER; note = 2'-Omethyladenosine
  modified_base 61: mod_base = OTHER; note = 2'-Omethylcytosine
  modified_base 65: mod_base = OTHER; note = 2'-Omethylcytosine
  modified_base 73: mod_base = OTHER; note = 2'-Omethyladenosine

SEQ ID NO: 5213 - RNA, 76 nt, synthetic construct; identical to SEQ ID NO: 625
  source 1..76: mol_type = other RNA
  modified_base 1: mod_base = OTHER; note = 2'-Omethylguanosine phosphorothiorate
  modified_base 2: mod_base = OTHER; note = 2'-Omethylguanosine
  modified_base 3: mod_base = OTHER; note = 2'-Omethylcytosine
  modified_base 4: mod_base = OTHER; note = 2'-Omethyluridine
  modified_base 5: mod_base = OTHER; note = 2'-Omethylcytosine
  modified_base 6: mod_base = OTHER; note = 2'-Omethylcytosine
  modified_base 13: mod_base = OTHER; note = 2'-Omethylcytosine
  modified_base 17: mod_base = OTHER; note = 2'-Omethylguanosine
  modified_base 25: mod_base = OTHER; note = 2'-Omethylcytosine
  modified_base 33: mod_base = OTHER; note = 2'-fluorouridine
  modified_base 35: mod_base = OTHER; note = Cytosine phosphorothiorate
  modified_base 37: mod_base = OTHER; note = Adenosine phosphorothiorate
  modified_base 38: mod_base = OTHER; note = Adenosine phosphorothiorate
  modified_base 49: mod_base = OTHER; note = 2'-Omethylcytosine
  modified_base 50: mod_base = OTHER; note = 2'-Omethylcytosine
  modified_base 51: mod_base = OTHER; note = 2'-Omethylguanosine
  modified_base 52: mod_base = OTHER; note = 2'-Omethylguanosine
  modified_base 53: mod_base = OTHER; note = 2'-Omethylguanosine
  modified_base 54: mod_base = OTHER; note = 2'-Omethyluridine
  modified_base 56: mod_base = OTHER; note = 2'-Omethylcytosine
  modified_base 61: mod_base = OTHER; note = 2'-Omethylcytosine
  modified_base 62: mod_base = OTHER; note = 2'-Omethylcytosine
  modified_base 63: mod_base = OTHER; note = 2'-fluorocytosine
  modified_base 64: mod_base = OTHER; note = 2'-Omethylguanosine
  modified_base 65: mod_base = OTHER; note = 2'-Omethylguanosine
  modified_base 66: mod_base = OTHER; note = 2'-Omethylcytosine
  modified_base 67: mod_base = OTHER; note = 2'-Omethylguanosine
  modified_base 68: mod_base = OTHER; note = 2'-Omethylguanosine
  modified_base 69: mod_base = OTHER; note = 2'-fluoroadenosine
  modified_base 71: mod_base = OTHER; note = 2'-Omethyluridine
  modified_base 73: mod_base = OTHER; note = 2'-Omethylguanosine
  modified_base 75: mod_base = OTHER; note = 2'-fluorocytosine phosphorothiorate

SEQ ID NO: 5214 - RNA, 76 nt, synthetic construct
  source 1..76: mol_type = other RNA
ggctccttggcgcaatggacagcgcattggacttcaaattcaaaggttccgggttcgagtcccggaggagtcgcca

SEQ ID NO: 5215 - RNA, 86 nt, synthetic construct; identical to SEQ ID NO: 3290
  source 1..86: mol_type = other RNA
  modified_base 50: mod_base = OTHER; note = 2'-Omethyluridine

SEQ ID NO: 5216 - RNA, 75 nt, synthetic construct; identical to SEQ ID NO: 3306
  source 1..75: mol_type = other RNA
  modified_base 1: mod_base = OTHER; note = 2'-Omethylguanosine phosphorothiorate
  modified_base 2: mod_base = OTHER; note = 2'-Omethyladenosine
  modified_base 3: mod_base = OTHER; note = 2'-Omethylcytosine
  modified_base 4: mod_base = OTHER; note = 2'-Omethylcytosine
  modified_base 5: mod_base = OTHER; note = 2'-Omethyluridine
  modified_base 6: mod_base = OTHER; note = 2'-Omethylcytosine
  modified_base 43: mod_base = OTHER; note = 2'-Omethyladenosine
  modified_base 44: mod_base = OTHER; note = 2'-Omethylguanosine
  modified_base 45: mod_base = OTHER; note = 2'-fluoroguanosine
  modified_base 46: mod_base = OTHER; note = 2'-fluorouridine
  modified_base 47: mod_base = OTHER; note = 2'-fluorouridine
  modified_base 48: mod_base = OTHER; note = 2'-Omethylguanosine
  modified_base 72: mod_base = OTHER; note = 2'-Omethyladenosine

SEQ ID NO: 5217 - RNA, 76 nt, synthetic construct; identical to SEQ ID NO: 3615
  source 1..76: mol_type = other RNA
  modified_base 1: mod_base = OTHER; note = 2'-Omethylguanosine phosphorothiorate
  modified_base 2: mod_base = OTHER; note = 2'-Omethylguanosine phosphorothiorate
  modified_base 3: mod_base = OTHER; note = 2'-Omethylcytosine
  modified_base 4: mod_base = OTHER; note = 2'-Omethyluridine
  modified_base 5: mod_base = OTHER; note = 2'-Omethylcytosine
  modified_base 6: mod_base = OTHER; note = 2'-Omethylcytosine
  modified_base 10: mod_base = OTHER; note = 2'-Omethylguanosine
  modified_base 11: mod_base = OTHER; note = 2'-Omethylcytosine
  modified_base 12: mod_base = OTHER; note = 2'-Omethylguanosine
  modified_base 13: mod_base = OTHER; note = 2'-Omethylcytosine
  modified_base 14: mod_base = OTHER; note = 2'-Omethyladenosine
  modified_base 15: mod_base = OTHER; note = 2'-fluoroadenosine
  modified_base 16: mod_base = OTHER; note = 2'-Omethyluridine
  modified_base 17: mod_base = OTHER; note = 2'-Omethylguanosine
  modified_base 18: mod_base = OTHER; note = 2'-Omethylguanosine
  modified_base 19: mod_base = OTHER; note = 2'-fluoroadenosine
  modified_base 20: mod_base = OTHER; note = 2'-Omethyluridine
  modified_base 22: mod_base = OTHER; note = 2'-Omethylguanosine
  modified_base 23: mod_base = OTHER; note = 2'-Omethylcytosine
  modified_base 24: mod_base = OTHER; note = 2'-Omethylguanosine
  modified_base 25: mod_base = OTHER; note = 2'-Omethylcytosine
  modified_base 33: mod_base = OTHER; note = 2'-fluorouridine
  modified_base 35: mod_base = OTHER; note = Cytosine phosphorothiorate
  modified_base 37: mod_base = OTHER; note = Adenosine phosphorothiorate
  modified_base 38: mod_base = OTHER; note = Adenosine phosphorothiorate
  modified_base 44: mod_base = OTHER; note = 2'-Omethylguanosine
  modified_base 45: mod_base = OTHER; note = 2'-Omethylguanosine
  modified_base 46: mod_base = OTHER; note = 2'-fluoroguanosine
  modified_base 47: mod_base = OTHER; note = 2'-fluorouridine
  modified_base 48: mod_base = OTHER; note = 2'-fluorouridine
  modified_base 56: mod_base = OTHER; note = 2'-Omethylcytosine
  modified_base 59: mod_base = OTHER; note = 2'-Omethylguanosine
  modified_base 61: mod_base = OTHER; note = 2'-Omethylcytosine
  modified_base 62: mod_base = OTHER; note = 2'-Omethylcytosine
  modified_base 63: mod_base = OTHER; note = 2'-fluorocytosine
  modified_base 64: mod_base = OTHER; note = 2'-Omethylguanosine
  modified_base 65: mod_base = OTHER; note = 2'-Omethylguanosine
  modified_base 66: mod_base = OTHER; note = 2'-Omethylcytosine
  modified_base 67: mod_base = OTHER; note = 2'-Omethylguanosine
  modified_base 68: mod_base = OTHER; note = 2'-Omethylguanosine
  modified_base 73: mod_base = OTHER; note = 2'-Omethylguanosine

SEQ ID NO: 5218 - RNA, 86 nt, synthetic construct; identical to SEQ ID NO: 3290
  source 1..86: mol_type = other RNA
  modified_base 1: mod_base = OTHER; note = 2'-Omethyladenosine phosphorothiorate
  modified_base 2: mod_base = OTHER; note = 2'-Omethylcytosine phosphorothiorate
  modified_base 8: mod_base = OTHER; note = Uridine phosphorothiorate
  modified_base 14: mod_base = OTHER; note = Adenosine phosphorothiorate
  modified_base 18: mod_base = OTHER; note = Guanosine phosphorothiorate
  modified_base 20: mod_base = OTHER; note = 2'-Omethyluridine phosphorothiorate
  modified_base 22: mod_base = OTHER; note = Adenosine phosphorothiorate
  modified_base 25: mod_base = OTHER; note = Cytosine phosphorothiorate
  modified_base 27: mod_base = OTHER; note = Uridine phosphorothiorate
  modified_base 41: mod_base = OTHER; note = 2'-Omethylcytosine phosphorothiorate
  modified_base 57: mod_base = OTHER; note = Guanosine phosphorothiorate
  modified_base 58: mod_base = OTHER; note = 2'-fluorocytosine
  modified_base 59: mod_base = OTHER; note = Guanosine phosphorothiorate
  modified_base 81: mod_base = OTHER; note = Guanosine phosphorothiorate
  modified_base 83: mod_base = OTHER; note = 2'-Omethyladenosine phosphorothiorate

SEQ ID NO: 5219 - RNA, 75 nt, synthetic construct; identical to SEQ ID NO: 3311
  source 1..75: mol_type = other RNA
  modified_base 2: mod_base = OTHER; note = 2'-Omethylguanosine phosphorothiorate
  modified_base 12: mod_base = OTHER; note = Guanosine phosphorothiorate
  modified_base 13: mod_base = OTHER; note = 2'-fluorouridine
  modified_base 20: mod_base = OTHER; note = 2'-fluoroadenosine phosphorothiorate
  modified_base 21: mod_base = OTHER; note = 2'-fluoroadenosine
  modified_base 25: mod_base = OTHER; note = Cytosine phosphorothiorate
  modified_base 40: mod_base = OTHER; note = 2'-Omethylcytosine
  modified_base 48: mod_base = OTHER; note = 2'-fluorocytosine
  modified_base 65: mod_base = OTHER; note = Uridine phosphorothiorate
  modified_base 66: mod_base = OTHER; note = 2'-fluoroguanosine
  modified_base 67: mod_base = OTHER; note = 2'-fluoroguanosine
  modified_base 73: mod_base = OTHER; note = Cytosine phosphorothiorate

SEQ ID NO: 5220 - RNA, 76 nt, synthetic construct; identical to SEQ ID NO: 625
  source 1..76: mol_type = other RNA
  modified_base 1: mod_base = OTHER; note = 2'-Omethylguanosine phosphorothiorate
  modified_base 2: mod_base = OTHER; note = 2'-Omethylguanosine
  modified_base 3: mod_base = OTHER; note = 2'-Omethylcytosine
  modified_base 4: mod_base = OTHER; note = 2'-Omethyluridine
  modified_base 5: mod_base = OTHER; note = 2'-Omethylcytosine
  modified_base 6: mod_base = OTHER; note = 2'-Omethylcytosine
  modified_base 10: mod_base = OTHER; note = 2'-Omethylguanosine
  modified_base 11: mod_base = OTHER; note = 2'-Omethylcytosine
  modified_base 12: mod_base = OTHER; note = 2'-Omethylguanosine
  modified_base 13: mod_base = OTHER; note = 2'-Omethylcytosine
  modified_base 14: mod_base = OTHER; note = 2'-Omethyladenosine
  modified_base 15: mod_base = OTHER; note = 2'-fluoroadenosine
  modified_base 16: mod_base = OTHER; note = 2'-Omethyluridine
  modified_base 17: mod_base = OTHER; note = 2'-Omethylguanosine
  modified_base 18: mod_base = OTHER; note = 2'-Omethylguanosine
  modified_base 19: mod_base = OTHER; note = 2'-fluoroadenosine
  modified_base 20: mod_base = OTHER; note = 2'-Omethyluridine
  modified_base 22: mod_base = OTHER; note = 2'-Omethylguanosine
  modified_base 23: mod_base = OTHER; note = 2'-Omethylcytosine
  modified_base 24: mod_base = OTHER; note = 2'-Omethylguanosine
  modified_base 25: mod_base = OTHER; note = 2'-Omethylcytosine
  modified_base 33: mod_base = OTHER; note = 2'-fluorouridine
  modified_base 35: mod_base = OTHER; note = Cytosine phosphorothiorate
  modified_base 37: mod_base = OTHER; note = Adenosine phosphorothiorate
  modified_base 38: mod_base = OTHER; note = Adenosine phosphorothiorate
  modified_base 48: mod_base = OTHER; note = 2'-fluorouridine
  modified_base 49: mod_base = OTHER; note = 2'-Omethylcytosine
  modified_base 50: mod_base = OTHER; note = 2'-Omethylcytosine
  modified_base 51: mod_base = OTHER; note = 2'-Omethylguanosine
  modified_base 52: mod_base = OTHER; note = 2'-Omethylguanosine
  modified_base 53: mod_base = OTHER; note = 2'-Omethylguanosine
  modified_base 54: mod_base = OTHER; note = 2'-Omethyluridine
  modified_base 57: mod_base = OTHER; note = 2'-Omethylguanosine
  modified_base 61: mod_base = OTHER; note = 2'-Omethylcytosine
  modified_base 62: mod_base = OTHER; note = 2'-Omethylcytosine
  modified_base 63: mod_base = OTHER; note = 2'-fluorocytosine
  modified_base 64: mod_base = OTHER; note = 2'-Omethylguanosine
  modified_base 65: mod_base = OTHER; note = 2'-Omethylguanosine
  modified_base 66: mod_base = OTHER; note = 2'-Omethylcytosine
  modified_base 67: mod_base = OTHER; note = 2'-Omethylguanosine
  modified_base 68: mod_base = OTHER; note = 2'-Omethylguanosine
  modified_base 73: mod_base = OTHER; note = 2'-Omethylguanosine
  modified_base 75: mod_base = OTHER; note = 2'-fluorocytosine phosphorothiorate

SEQ ID NO: 5221 - RNA, 76 nt, synthetic construct; identical to SEQ ID NO: 625
  source 1..76: mol_type = other RNA
  modified_base 2: mod_base = OTHER; note = 2'-fluoroguanosine
  modified_base 3: mod_base = OTHER; note = 2'-Omethylcytosine
  modified_base 4: mod_base = OTHER; note = 2'-Omethyluridine
  modified_base 6: mod_base = OTHER; note = 2'-Omethylcytosine phosphorothiorate
  modified_base 10: mod_base = OTHER; note = 2'-fluoroguanosine
  modified_base 11: mod_base = OTHER; note = Cytosine phosphorothiorate
  modified_base 12: mod_base = OTHER; note = 2'-Omethylguanosine
  modified_base 19: mod_base = OTHER; note = Adenosine phosphorothiorate
  modified_base 20: mod_base = OTHER; note = 2'-fluorouridine
  modified_base 22: mod_base = OTHER; note = 2'-fluoroguanosine
  modified_base 24: mod_base = OTHER; note = Guanosine phosphorothiorate
  modified_base 26: mod_base = OTHER; note = Adenosine phosphorothiorate
  modified_base 27: mod_base = OTHER; note = 2'-fluorouridine
  modified_base 29: mod_base = OTHER; note = 2'-Omethylguanosine
  modified_base 30: mod_base = OTHER; note = 2'-Omethylguanosine
  modified_base 38: mod_base = OTHER; note = 2'-Omethyladenosine
  modified_base 39: mod_base = OTHER; note = 2'-fluorouridine phosphorothiorate
  modified_base 42: mod_base = OTHER; note = 2'-fluoroadenosine
  modified_base 44: mod_base = OTHER; note = Adenosine phosphorothiorate
  modified_base 48: mod_base = OTHER; note = Uridine phosphorothiorate
  modified_base 49: mod_base = OTHER; note = 2'-Omethylcytosine
  modified_base 51: mod_base = OTHER; note = 2'-Omethylguanosine phosphorothiorate
  modified_base 52: mod_base = OTHER; note = 2'-fluoroguanosine
  modified_base 56: mod_base = OTHER; note = Cytosine phosphorothiorate
  modified_base 57: mod_base = OTHER; note = 2'-fluoroguanosine
  modified_base 60: mod_base = OTHER; note = 2'-Omethyluridine
  modified_base 61: mod_base = OTHER; note = 2'-fluorocytosine
  modified_base 67: mod_base = OTHER; note = 2'-Omethylguanosine
  modified_base 69: mod_base = OTHER; note = Adenosine phosphorothiorate
  modified_base 70: mod_base = OTHER; note = Guanosine phosphorothiorate
  modified_base 71: mod_base = OTHER; note = 2'-Omethyluridine
  modified_base 72: mod_base = OTHER; note = 2'-Omethylcytosine phosphorothiorate
  modified_base 73: mod_base = OTHER; note = 2'-Omethylguanosine phosphorothiorate
  modified_base 76: mod_base = OTHER; note = 2'-Omethyladenosine

SEQ ID NO: 5222 - RNA, 76 nt, synthetic construct; identical to SEQ ID NO: 625
  source 1..76: mol_type = other RNA
  modified_base 1: mod_base = OTHER; note = 2'-fluoroguanosine
  modified_base 3: mod_base = OTHER; note = 2'-fluorocytosine
  modified_base 6: mod_base = OTHER; note = Cytosine phosphorothiorate
  modified_base 7: mod_base = OTHER; note = Guanosine phosphorothiorate
  modified_base 10: mod_base = OTHER; note = 2'-fluoroguanosine
  modified_base 14: mod_base = OTHER; note = 2'-fluoroadenosine
  modified_base 15: mod_base = OTHER; note = 2'-Omethyladenosine phosphorothiorate
  modified_base 16: mod_base = OTHER; note = 2'-Omethyluridine
  modified_base 17: mod_base = OTHER; note = 2'-Omethylguanosine
  modified_base 21: mod_base = OTHER; note = Adenosine phosphorothiorate
  modified_base 22: mod_base = OTHER; note = 2'-Omethylguanosine phosphorothiorate
  modified_base 23: mod_base = OTHER; note = 2'-fluorocytosine
  modified_base 25: mod_base = OTHER; note = 2'-Omethylcytosine
  modified_base 28: mod_base = OTHER; note = 2'-fluorouridine
  modified_base 30: mod_base = OTHER; note = 2'-Omethylguanosine
  modified_base 33: mod_base = OTHER; note = 2'-fluorouridine
  modified_base 34: mod_base = OTHER; note = 2'-fluorouridine
  modified_base 38: mod_base = OTHER; note = Adenosine phosphorothiorate
  modified_base 39: mod_base = OTHER; note = 2'-fluorouridine
  modified_base 41: mod_base = OTHER; note = 2'-fluorocytosine
  modified_base 43: mod_base = OTHER; note = 2'-Omethyladenosine
  modified_base 44: mod_base = OTHER; note = 2'-fluoroadenosine
  modified_base 45: mod_base = OTHER; note = Guanosine phosphorothiorate
  modified_base 52: mod_base = OTHER; note = 2'-fluoroguanosine
  modified_base 54: mod_base = OTHER; note = 2'-fluorouridine phosphorothiorate
  modified_base 56: mod_base = OTHER; note = 2'-fluorocytosine phosphorothiorate
  modified_base 57: mod_base = OTHER; note = 2'-fluoroguanosine
  modified_base 60: mod_base = OTHER; note = 2'-fluorouridine
  modified_base 61: mod_base = OTHER; note = Cytosine phosphorothiorate
  modified_base 63: mod_base = OTHER; note = Cytosine phosphorothiorate
  modified_base 64: mod_base = OTHER; note = 2'-fluoroguanosine
  modified_base 65: mod_base = OTHER; note = 2'-Omethylguanosine phosphorothiorate
  modified_base 67: mod_base = OTHER; note = 2'-fluoroguanosine
  modified_base 71: mod_base = OTHER; note = Uridine phosphorothiorate
  modified_base 76: mod_base = OTHER; note = 2'-fluoroadenosine

SEQ ID NO: 5223 - RNA, 85 nt, synthetic construct; identical to SEQ ID NO: 3317
  source 1..85: mol_type = other RNA
  modified_base 1: mod_base = OTHER; note = 2'-Omethylguanosine phosphorothiorate
  modified_base 2: mod_base = OTHER; note = Cytosine phosphorothiorate
  modified_base 3: mod_base = OTHER; note = 2'-Omethyluridine phosphorothiorate
  modified_base 4: mod_base = OTHER; note = 2'-Omethylguanosine phosphorothiorate
  modified_base 11: mod_base = OTHER; note = 2'-fluorocytosine
  modified_base 13: mod_base = OTHER; note = 2'-fluoroguanosine
  modified_base 14: mod_base = OTHER; note = Adenosine phosphorothiorate
  modified_base 23: mod_base = OTHER; note = 2'-Omethylguanosine phosphorothiorate
  modified_base 27: mod_base = OTHER; note = 2'-fluorouridine
  modified_base 28: mod_base = OTHER; note = Uridine phosphorothiorate
  modified_base 33: mod_base = OTHER; note = 2'-fluorouridine
  modified_base 35: mod_base = OTHER; note = 2'-fluorouridine
  modified_base 36: mod_base = OTHER; note = 2'-fluoroadenosine
  modified_base 40: mod_base = OTHER; note = 2'-Omethylcytosine
  modified_base 46: mod_base = OTHER; note = 2'-Omethylguanosine phosphorothiorate
  modified_base 54: mod_base = OTHER; note = 2'-Omethylcytosine
  modified_base 56: mod_base = OTHER; note = 2'-Omethylguanosine
  modified_base 71: mod_base = OTHER; note = Cytosine phosphorothiorate
  modified_base 73: mod_base = OTHER; note = 2'-fluoroguanosine
  modified_base 82: mod_base = OTHER; note = 2'-Omethylguanosine
  modified_base 84: mod_base = OTHER; note = 2'-Omethylcytosine

SEQ ID NO: 5224 - RNA, 76 nt, synthetic construct; identical to SEQ ID NO: 3295
  source 1..76: mol_type = other RNA
  modified_base 1: mod_base = OTHER; note = 2'-Omethylcytosine
  modified_base 2: mod_base = OTHER; note = 2'-fluorocytosine phosphorothiorate
  modified_base 3: mod_base = OTHER; note = 2'-fluorouridine phosphorothiorate
  modified_base 4: mod_base = OTHER; note = 2'-Omethyluridine
  modified_base 6: mod_base = OTHER; note = 2'-Omethylguanosine phosphorothiorate
  modified_base 9: mod_base = OTHER; note = 2'-Omethyladenosine
  modified_base 11: mod_base = OTHER; note = 2'-fluorocytosine
  modified_base 15: mod_base = OTHER; note = 2'-fluoroguanosine phosphorothiorate
  modified_base 16: mod_base = OTHER; note = 2'-Omethyluridine
  modified_base 24: mod_base = OTHER; note = Guanosine phosphorothiorate
  modified_base 25: mod_base = OTHER; note = 2'-Omethylcytosine phosphorothiorate
  modified_base 45: mod_base = OTHER; note = 2'-fluoroguanosine phosphorothiorate
  modified_base 48: mod_base = OTHER; note = 2'-Omethylcytosine
  modified_base 52: mod_base = OTHER; note = Guanosine phosphorothiorate
  modified_base 53: mod_base = OTHER; note = 2'-Omethylguanosine
  modified_base 59: mod_base = OTHER; note = Adenosine phosphorothiorate
  modified_base 66: mod_base = OTHER; note = 2'-fluorouridine
  modified_base 70: mod_base = OTHER; note = 2'-fluoroadenosine
  modified_base 74: mod_base = OTHER; note = 2'-Omethylcytosine phosphorothiorate
  modified_base 75: mod_base = OTHER; note = Cytosine phosphorothiorate
  modified_base 76: mod_base = OTHER; note = 2'-fluoroadenosine

SEQ ID NO: 5225 - RNA, 86 nt, synthetic construct; identical to SEQ ID NO: 3290
  source 1..86: mol_type = other RNA
  modified_base 1: mod_base = OTHER; note = 2'-Omethyladenosine
  modified_base 16: mod_base = OTHER; note = 2'-Omethyluridine
  modified_base 17: mod_base = OTHER; note = 2'-Omethylguanosine
  modified_base 18: mod_base = OTHER; note = 2'-Omethylguanosine
  modified_base 64: mod_base = OTHER; note = 2'-Omethyluridine phosphorothiorate
  modified_base 65: mod_base = OTHER; note = Uridine phosphorothiorate
  modified_base 66: mod_base = OTHER; note = 2'-Omethylcytosine
  modified_base 67: mod_base = OTHER; note = 2'-fluoroguanosine
  modified_base 68: mod_base = OTHER; note = 2'-fluoroadenosine
  modified_base 69: mod_base = OTHER; note = 2'-Omethyladenosine
  modified_base 70: mod_base = OTHER; note = 2'-Omethylcytosine
  modified_base 83: mod_base = OTHER; note = 2'-Omethyladenosine

SEQ ID NO: 5226 - RNA, 86 nt, synthetic construct
  source 1..86: mol_type = other RNA
accaggatggccgagtggttaaggcgttggacttcagatccaatggacatgtgtcctcgtgggttcgaaccccactcctggtacca

SEQ ID NO: 5227 - RNA, 76 nt, synthetic construct
  source 1..76: mol_type = other RNA
gccccagtggcctaatggataaggcattggccttcaaagccagggattgtgggttcgagtcccatctggggtacca

SEQ ID NO: 5228 - RNA, 76 nt, synthetic construct; identical to SEQ ID NO: 625
  source 1..76: mol_type = other RNA
  modified_base 1: mod_base = OTHER; note = 2'-fluoroguanosine
  modified_base 2: mod_base = OTHER; note = 2'-Omethylguanosine
  modified_base 3: mod_base = OTHER; note = Cytosine phosphorothiorate
  modified_base 4: mod_base = OTHER; note = 2'-Omethyluridine phosphorothiorate
  modified_base 5: mod_base = OTHER; note = 2'-Omethylcytosine
  modified_base 6: mod_base = OTHER; note = Cytosine phosphorothiorate
  modified_base 8: mod_base = OTHER; note = Uridine phosphorothiorate
  modified_base 11: mod_base = OTHER; note = 2'-Omethylcytosine
  modified_base 14: mod_base = OTHER; note = 2'-Omethyladenosine
  modified_base 15: mod_base = OTHER; note = 2'-Omethyladenosine
  modified_base 18: mod_base = OTHER; note = 2'-fluoroguanosine
  modified_base 20: mod_base = OTHER; note = 2'-fluorouridine
  modified_base 22: mod_base = OTHER; note = 2'-Omethylguanosine
  modified_base 23: mod_base = OTHER; note = 2'-fluorocytosine
  modified_base 26: mod_base = OTHER; note = 2'-Omethyladenosine phosphorothiorate
  modified_base 27: mod_base = OTHER; note = 2'-Omethyluridine
  modified_base 30: mod_base = OTHER; note = 2'-fluoroguanosine
  modified_base 34: mod_base = OTHER; note = 2'-Omethyluridine
  modified_base 36: mod_base = OTHER; note = Adenosine phosphorothiorate
  modified_base 37: mod_base = OTHER; note = Adenosine phosphorothiorate
  modified_base 38: mod_base = OTHER; note = 2'-Omethyladenosine
  modified_base 39: mod_base = OTHER; note = 2'-Omethyluridine
  modified_base 41: mod_base = OTHER; note = Cytosine phosphorothiorate
  modified_base 42: mod_base = OTHER; note = 2'-fluoroadenosine
  modified_base 48: mod_base = OTHER; note = Uridine phosphorothiorate
  modified_base 49: mod_base = OTHER; note = 2'-fluorocytosine
  modified_base 50: mod_base = OTHER; note = Cytosine phosphorothiorate
  modified_base 51: mod_base = OTHER; note = 2'-Omethylguanosine
  modified_base 61: mod_base = OTHER; note = Cytosine phosphorothiorate
  modified_base 62: mod_base = OTHER; note = 2'-Omethylcytosine
  modified_base 63: mod_base = OTHER; note = 2'-Omethylcytosine
  modified_base 65: mod_base = OTHER; note = Guanosine phosphorothiorate
  modified_base 67: mod_base = OTHER; note = 2'-fluoroguanosine
  modified_base 68: mod_base = OTHER; note = 2'-fluoroguanosine
  modified_base 71: mod_base = OTHER; note = 2'-Omethyluridine
  modified_base 75: mod_base = OTHER; note = 2'-fluorocytosine
  modified_base 76: mod_base = OTHER; note = 2'-Omethyladenosine

SEQ ID NO: 5229 - RNA, 85 nt, synthetic construct; identical to SEQ ID NO: 3310
  source 1..85: mol_type = other RNA
  modified_base 1: mod_base = OTHER; note = 2'-fluorocytosine phosphorothiorate
  modified_base 32: mod_base = OTHER; note = 2'-fluorouridine
  modified_base 44: mod_base = OTHER; note = Guanosine phosphorothiorate
  modified_base 48: mod_base = OTHER; note = 2'-fluoroadenosine
  modified_base 57: mod_base = OTHER; note = 2'-fluorocytosine
  modified_base 60: mod_base = OTHER; note = Guanosine phosphorothiorate

SEQ ID NO: 5230 - RNA, 76 nt, synthetic construct; identical to SEQ ID NO: 625
  source 1..76: mol_type = other RNA
  modified_base 1: mod_base = OTHER; note = 2'-Omethylguanosine
  modified_base 2: mod_base = OTHER; note = 2'-Omethylguanosine
  modified_base 3: mod_base = OTHER; note = 2'-Omethylcytosine
  modified_base 4: mod_base = OTHER; note = 2'-Omethyluridine
  modified_base 5: mod_base = OTHER; note = 2'-Omethylcytosine
  modified_base 6: mod_base = OTHER; note = 2'-Omethylcytosine
  modified_base 13: mod_base = OTHER; note = 2'-Omethylcytosine
  modified_base 14: mod_base = OTHER; note = 2'-Omethyladenosine
  modified_base 16: mod_base = OTHER; note = 2'-fluorouridine phosphorothiorate
  modified_base 17: mod_base = OTHER; note = 2'-Omethylguanosine
  modified_base 18: mod_base = OTHER; note = 2'-fluoroguanosine phosphorothiorate
  modified_base 22: mod_base = OTHER; note = 2'-Omethylguanosine phosphorothiorate
  modified_base 23: mod_base = OTHER; note = 2'-Omethylcytosine
  modified_base 24: mod_base = OTHER; note = 2'-Omethylguanosine phosphorothiorate
  modified_base 25: mod_base = OTHER; note = 2'-Omethylcytosine
  modified_base 26: mod_base = OTHER; note = Adenosine phosphorothiorate
  modified_base 29: mod_base = OTHER; note = 2'-Omethylguanosine
  modified_base 30: mod_base = OTHER; note = 2'-fluoroguanosine phosphorothiorate
  modified_base 31: mod_base = OTHER; note = 2'-Omethyladenosine phosphorothiorate
  modified_base 33: mod_base = OTHER; note = 2'-fluorouridine
  modified_base 35: mod_base = OTHER; note = Cytosine phosphorothiorate
  modified_base 37: mod_base = OTHER; note = Adenosine phosphorothiorate
  modified_base 38: mod_base = OTHER; note = Adenosine phosphorothiorate
  modified_base 40: mod_base = OTHER; note = 2'-Omethyluridine
  modified_base 41: mod_base = OTHER; note = 2'-Omethylcytosine
  modified_base 42: mod_base = OTHER; note = Adenosine phosphorothiorate
  modified_base 43: mod_base = OTHER; note = Adenosine phosphorothiorate
  modified_base 44: mod_base = OTHER; note = 2'-Omethyladenosine
  modified_base 45: mod_base = OTHER; note = 2'-Omethylguanosine phosphorothiorate
  modified_base 49: mod_base = OTHER; note = 2'-Omethylcytosine phosphorothiorate
  modified_base 50: mod_base = OTHER; note = 2'-Omethylcytosine
  modified_base 52: mod_base = OTHER; note = 2'-Omethylguanosine
  modified_base 54: mod_base = OTHER; note = Uridine phosphorothiorate
  modified_base 55: mod_base = OTHER; note = Uridine phosphorothiorate
  modified_base 59: mod_base = OTHER; note = 2'-Omethylguanosine
  modified_base 61: mod_base = OTHER; note = 2'-Omethylcytosine
  modified_base 62: mod_base = OTHER; note = 2'-Omethylcytosine
  modified_base 63: mod_base = OTHER; note = 2'-fluorocytosine
  modified_base 65: mod_base = OTHER; note = 2'-Omethylguanosine
  modified_base 66: mod_base = OTHER; note = 2'-Omethylcytosine phosphorothiorate
  modified_base 67: mod_base = OTHER; note = 2'-Omethylguanosine
  modified_base 69: mod_base = OTHER; note = 2'-Omethyladenosine phosphorothiorate
  modified_base 70: mod_base = OTHER; note = 2'-fluoroguanosine
  modified_base 71: mod_base = OTHER; note = 2'-Omethyluridine phosphorothiorate
  modified_base 73: mod_base = OTHER; note = 2'-Omethylguanosine phosphorothiorate
  modified_base 74: mod_base = OTHER; note = 2'-fluorocytosine
  modified_base 75: mod_base = OTHER; note = 2'-fluorocytosine
  modified_base 76: mod_base = OTHER; note = 2'-Omethyladenosine

SEQ ID NO: 5231 - RNA, 76 nt, synthetic construct; identical to SEQ ID NO: 625
  source 1..76: mol_type = other RNA
  modified_base 1: mod_base = OTHER; note = 2'-Omethylguanosine
  modified_base 10: mod_base = OTHER; note = 2'-Omethylguanosine
  modified_base 13: mod_base = OTHER; note = 2'-Omethylcytosine
  modified_base 17: mod_base = OTHER; note = Guanosine phosphorothiorate
  modified_base 18: mod_base = OTHER; note = 2'-Omethylguanosine
  modified_base 19: mod_base = OTHER; note = Adenosine phosphorothiorate
  modified_base 20: mod_base = OTHER; note = 2'-Omethyluridine
  modified_base 25: mod_base = OTHER; note = 2'-Omethylcytosine
  modified_base 29: mod_base = OTHER; note = 2'-Omethylguanosine
  modified_base 33: mod_base = OTHER; note = 2'-fluorouridine
  modified_base 35: mod_base = OTHER; note = Cytosine phosphorothiorate
  modified_base 37: mod_base = OTHER; note = Adenosine phosphorothiorate
  modified_base 38: mod_base = OTHER; note = 2'-fluoroadenosine phosphorothiorate
  modified_base 43: mod_base = OTHER; note = 2'-Omethyladenosine
  modified_base 44: mod_base = OTHER; note = 2'-fluoroadenosine
  modified_base 46: mod_base = OTHER; note = Guanosine phosphorothiorate
  modified_base 50: mod_base = OTHER; note = 2'-Omethylcytosine
  modified_base 52: mod_base = OTHER; note = 2'-Omethylguanosine
  modified_base 54: mod_base = OTHER; note = Uridine phosphorothiorate
  modified_base 55: mod_base = OTHER; note = Uridine phosphorothiorate
  modified_base 56: mod_base = OTHER; note = 2'-Omethylcytosine
  modified_base 57: mod_base = OTHER; note = Guanosine phosphorothiorate
  modified_base 62: mod_base = OTHER; note = 2'-Omethylcytosine
  modified_base 63: mod_base = OTHER; note = 2'-fluorocytosine
  modified_base 65: mod_base = OTHER; note = 2'-Omethylguanosine
  modified_base 71: mod_base = OTHER; note = 2'-Omethyluridine
  modified_base 73: mod_base = OTHER; note = 2'-Omethylguanosine

SEQ ID NO: 5232 - RNA, 76 nt, synthetic construct; identical to SEQ ID NO: 625
  source 1..76: mol_type = other RNA
  modified_base 1: mod_base = OTHER; note = 2'-Omethylguanosine phosphorothiorate
  modified_base 2: mod_base = OTHER; note = 2'-Omethylguanosine
  modified_base 3: mod_base = OTHER; note = 2'-Omethylcytosine
  modified_base 4: mod_base = OTHER; note = 2'-Omethyluridine
  modified_base 5: mod_base = OTHER; note = 2'-Omethylcytosine
  modified_base 6: mod_base = OTHER; note = 2'-Omethylcytosine
  modified_base 10: mod_base = OTHER; note = 2'-Omethylguanosine
  modified_base 11: mod_base = OTHER; note = 2'-Omethylcytosine
  modified_base 12: mod_base = OTHER; note = 2'-Omethylguanosine
  modified_base 13: mod_base = OTHER; note = 2'-Omethylcytosine
  modified_base 49: mod_base = OTHER; note = 2'-Omethylcytosine
  modified_base 50: mod_base = OTHER; note = 2'-Omethylcytosine
  modified_base 51: mod_base = OTHER; note = 2'-Omethylguanosine
  modified_base 52: mod_base = OTHER; note = 2'-Omethylguanosine
  modified_base 53: mod_base = OTHER; note = 2'-Omethylguanosine
  modified_base 61: mod_base = OTHER; note = 2'-Omethylcytosine
  modified_base 62: mod_base = OTHER; note = 2'-Omethylcytosine
  modified_base 63: mod_base = OTHER; note = 2'-fluorocytosine
  modified_base 64: mod_base = OTHER; note = 2'-Omethylguanosine
  modified_base 65: mod_base = OTHER; note = 2'-Omethylguanosine
  modified_base 66: mod_base = OTHER; note = 2'-Omethylcytosine
  modified_base 67: mod_base = OTHER; note = 2'-Omethylguanosine
  modified_base 68: mod_base = OTHER; note = 2'-Omethylguanosine
  modified_base 69: mod_base = OTHER; note = 2'-Omethyladenosine
  modified_base 70: mod_base = OTHER; note = 2'-fluoroguanosine

SEQ ID NO: 5233 - RNA, 76 nt, synthetic construct; identical to SEQ ID NO: 625
  source 1..76: mol_type = other RNA
  modified_base 1: mod_base = OTHER; note = 2'-Omethylguanosine phosphorothiorate
  modified_base 2: mod_base = OTHER; note = 2'-Omethylguanosine
  modified_base 3: mod_base = OTHER; note = 2'-Omethylcytosine
  modified_base 4: mod_base = OTHER; note = 2'-Omethyluridine
  modified_base 5: mod_base = OTHER; note = 2'-Omethylcytosine
  modified_base 6: mod_base = OTHER; note = 2'-Omethylcytosine
  modified_base 10: mod_base = OTHER; note = 2'-Omethylguanosine
  modified_base 11: mod_base = OTHER; note = 2'-Omethylcytosine
  modified_base 12: mod_base = OTHER; note = 2'-Omethylguanosine
  modified_base 13: mod_base = OTHER; note = 2'-Omethylcytosine
  modified_base 16: mod_base = OTHER; note = 2'-Omethyluridine
  modified_base 17: mod_base = OTHER; note = 2'-Omethylguanosine
  modified_base 18: mod_base = OTHER; note = 2'-Omethylguanosine
  modified_base 22: mod_base = OTHER; note = 2'-Omethylguanosine
  modified_base 23: mod_base = OTHER; note = 2'-Omethylcytosine
  modified_base 24: mod_base = OTHER; note = 2'-Omethylguanosine
  modified_base 25: mod_base = OTHER; note = 2'-Omethylcytosine
  modified_base 49: mod_base = OTHER; note = 2'-Omethylcytosine
  modified_base 50: mod_base = OTHER; note = 2'-Omethylcytosine
  modified_base 51: mod_base = OTHER; note = 2'-Omethylguanosine
  modified_base 52: mod_base = OTHER; note = 2'-Omethylguanosine
  modified_base 53: mod_base = OTHER; note = 2'-Omethylguanosine
  modified_base 54: mod_base = OTHER; note = 2'-Omethyluridine phosphorothiorate
  modified_base 56: mod_base = OTHER; note = 2'-Omethylcytosine
  modified_base 57: mod_base = OTHER; note = 2'-fluoroguanosine
  modified_base 59: mod_base = OTHER; note = 2'-Omethylguanosine
  modified_base 73: mod_base = OTHER; note = 2'-Omethylguanosine

SEQ ID NO: 5234 - RNA, 76 nt, synthetic construct; identical to SEQ ID NO: 625
  source 1..76: mol_type = other RNA
  modified_base 1: mod_base = OTHER; note = 2'-Omethylguanosine phosphorothiorate
  modified_base 2: mod_base = OTHER; note = 2'-Omethylguanosine
  modified_base 13: mod_base = OTHER; note = 2'-Omethylcytosine
  modified_base 33: mod_base = OTHER; note = 2'-fluorouridine
  modified_base 35: mod_base = OTHER; note = Cytosine phosphorothiorate
  modified_base 37: mod_base = OTHER; note = Adenosine phosphorothiorate
  modified_base 38: mod_base = OTHER; note = Adenosine phosphorothiorate
  modified_base 52: mod_base = OTHER; note = 2'-Omethylguanosine
  modified_base 57: mod_base = OTHER; note = 2'-Omethylguanosine
  modified_base 62: mod_base = OTHER; note = 2'-Omethylcytosine
  modified_base 73: mod_base = OTHER; note = 2'-Omethylguanosine
  modified_base 75: mod_base = OTHER; note = 2'-fluorocytosine phosphorothiorate
  modified_base 76: mod_base = OTHER; note = 2'-Omethyladenosine

SEQ ID NO: 5235 - RNA, 85 nt, synthetic construct; identical to SEQ ID NO: 3301
  source 1..85: mol_type = other RNA
  modified_base 1: mod_base = OTHER; note = 2'-Omethylguanosine phosphorothiorate
  modified_base 2: mod_base = OTHER; note = Cytosine phosphorothiorate
  modified_base 11: mod_base = OTHER; note = 2'-fluorocytosine phosphorothiorate
  modified_base 16: mod_base = OTHER; note = 2'-Omethyluridine
  modified_base 18: mod_base = OTHER; note = 2'-Omethylguanosine
  modified_base 29: mod_base = OTHER; note = Guanosine phosphorothiorate
  modified_base 35: mod_base = OTHER; note = 2'-fluorouridine
  modified_base 36: mod_base = OTHER; note = 2'-fluoroadenosine
  modified_base 45: mod_base = OTHER; note = 2'-Omethylguanosine phosphorothiorate
  modified_base 47: mod_base = OTHER; note = 2'-Omethylguanosine
  modified_base 48: mod_base = OTHER; note = 2'-Omethylguanosine
  modified_base 50: mod_base = OTHER; note = 2'-Omethylcytosine
  modified_base 51: mod_base = OTHER; note = Uridine phosphorothiorate
  modified_base 53: mod_base = OTHER; note = 2'-fluorocytosine
  modified_base 57: mod_base = OTHER; note = 2'-Omethylcytosine
  modified_base 59: mod_base = OTHER; note = 2'-fluorocytosine
  modified_base 64: mod_base = OTHER; note = Uridine phosphorothiorate
  modified_base 74: mod_base = OTHER; note = 2'-fluorocytosine
  modified_base 82: mod_base = OTHER; note = 2'-Omethylguanosine

SEQ ID NO: 5236 - RNA, 76 nt, synthetic construct; identical to SEQ ID NO: 625
  source 1..76: mol_type = other RNA
  modified_base 1: mod_base = OTHER; note = 2'-Omethylguanosine phosphorothiorate
  modified_base 2: mod_base = OTHER; note = 2'-Omethylguanosine
  modified_base 33: mod_base = OTHER; note = 2'-fluorouridine
  modified_base 35: mod_base = OTHER; note = Cytosine phosphorothiorate
  modified_base 37: mod_base = OTHER; note = Adenosine phosphorothiorate
  modified_base 52: mod_base = OTHER; note = 2'-Omethylguanosine
  modified_base 57: mod_base = OTHER; note = 2'-Omethylguanosine
  modified_base 62: mod_base = OTHER; note = 2'-Omethylcytosine
  modified_base 73: mod_base = OTHER; note = 2'-Omethylguanosine
  modified_base 75: mod_base = OTHER; note = 2'-fluorocytosine phosphorothiorate

SEQ ID NO: 5237 - RNA, 76 nt, synthetic construct; identical to SEQ ID NO: 625
  source 1..76: mol_type = other RNA
  modified_base 1: mod_base = OTHER; note = 2'-Omethylguanosine phosphorothiorate
  modified_base 2: mod_base = OTHER; note = 2'-Omethylguanosine
  modified_base 3: mod_base = OTHER; note = 2'-Omethylcytosine
  modified_base 4: mod_base = OTHER; note = 2'-Omethyluridine
  modified_base 5: mod_base = OTHER; note = 2'-Omethylcytosine
  modified_base 6: mod_base = OTHER; note = 2'-Omethylcytosine
  modified_base 10: mod_base = OTHER; note = 2'-Omethylguanosine
  modified_base 11: mod_base = OTHER; note = 2'-Omethylcytosine
  modified_base 12: mod_base = OTHER; note = 2'-Omethylguanosine
  modified_base 13: mod_base = OTHER; note = 2'-Omethylcytosine
  modified_base 16: mod_base = OTHER; note = 2'-Omethyluridine
  modified_base 17: mod_base = OTHER; note = 2'-Omethylguanosine
  modified_base 18: mod_base = OTHER; note = 2'-Omethylguanosine
  modified_base 22: mod_base = OTHER; note = 2'-Omethylguanosine
  modified_base 23: mod_base = OTHER; note = 2'-Omethylcytosine
  modified_base 24: mod_base = OTHER; note = 2'-Omethylguanosine
  modified_base 25: mod_base = OTHER; note = 2'-Omethylcytosine
  modified_base 40: mod_base = OTHER; note = 2'-fluorouridine
  modified_base 41: mod_base = OTHER; note = 2'-fluorocytosine
  modified_base 42: mod_base = OTHER; note = 2'-fluoroadenosine
  modified_base 43: mod_base = OTHER; note = 2'-fluoroadenosine
  modified_base 49: mod_base = OTHER; note = 2'-Omethylcytosine
  modified_base 50: mod_base = OTHER; note = 2'-Omethylcytosine
  modified_base 51: mod_base = OTHER; note = 2'-Omethylguanosine
  modified_base 52: mod_base = OTHER; note = 2'-Omethylguanosine
  modified_base 53: mod_base = OTHER; note = 2'-Omethylguanosine
  modified_base 54: mod_base = OTHER; note = 2'-Omethyluridine phosphorothiorate
  modified_base 56: mod_base = OTHER; note = 2'-Omethylcytosine
  modified_base 57: mod_base = OTHER; note = 2'-fluoroguanosine
  modified_base 59: mod_base = OTHER; note = 2'-Omethylguanosine
  modified_base 73: mod_base = OTHER; note = 2'-Omethylguanosine

SEQ ID NO: 5238 - RNA, 86 nt, synthetic construct; identical to SEQ ID NO: 3290
  source 1..86: mol_type = other RNA
  modified_base 1: mod_base = OTHER; note = 2'-Omethyladenosine
  modified_base 13: mod_base = OTHER; note = 2'-Omethylguanosine
  modified_base 17: mod_base = OTHER; note = 2'-Omethylguanosine
  modified_base 18: mod_base = OTHER; note = 2'-Omethylguanosine
  modified_base 25: mod_base = OTHER; note = 2'-Omethylcytosine
  modified_base 33: mod_base = OTHER; note = 2'-fluorouridine
  modified_base 34: mod_base = OTHER; note = 2'-Omethyluridine
  modified_base 35: mod_base = OTHER; note = Cytosine phosphorothiorate
  modified_base 37: mod_base = OTHER; note = Guanosine phosphorothiorate
  modified_base 38: mod_base = OTHER; note = Adenosine phosphorothiorate
  modified_base 41: mod_base = OTHER; note = 2'-fluorocytosine
  modified_base 42: mod_base = OTHER; note = 2'-Omethyladenosine
  modified_base 43: mod_base = OTHER; note = 2'-Omethyladenosine
  modified_base 44: mod_base = OTHER; note = 2'-fluorouridine
  modified_base 59: mod_base = OTHER; note = 2'-Omethylguanosine
  modified_base 60: mod_base = OTHER; note = 2'-Omethyluridine
  modified_base 61: mod_base = OTHER; note = 2'-Omethylguanosine
  modified_base 62: mod_base = OTHER; note = 2'-Omethylguanosine
  modified_base 63: mod_base = OTHER; note = 2'-Omethylguanosine
  modified_base 64: mod_base = OTHER; note = Uridine phosphorothiorate
  modified_base 65: mod_base = OTHER; note = Uridine phosphorothiorate
  modified_base 71: mod_base = OTHER; note = 2'-Omethylcytosine
  modified_base 75: mod_base = OTHER; note = 2'-Omethylcytosine
  modified_base 83: mod_base = OTHER; note = 2'-Omethyladenosine

SEQ ID NO: 5239 - RNA, 76 nt, synthetic construct; identical to SEQ ID NO: 625
  source 1..76: mol_type = other RNA
  modified_base 1: mod_base = OTHER; note = 2'-Omethylguanosine
  modified_base 6: mod_base = OTHER; note = 2'-fluorocytosine phosphorothiorate
  modified_base 7: mod_base = OTHER; note = Guanosine phosphorothiorate
  modified_base 8: mod_base = OTHER; note = Uridine phosphorothiorate
  modified_base 12: mod_base = OTHER; note = 2'-fluoroguanosine
  modified_base 14: mod_base = OTHER; note = 2'-Omethyladenosine phosphorothiorate
  modified_base 15: mod_base = OTHER; note = 2'-Omethyladenosine
  modified_base 16: mod_base = OTHER; note = 2'-Omethyluridine phosphorothiorate
  modified_base 17: mod_base = OTHER; note = 2'-Omethylguanosine
  modified_base 18: mod_base = OTHER; note = 2'-fluoroguanosine
  modified_base 20: mod_base = OTHER; note = 2'-Omethyluridine
  modified_base 25: mod_base = OTHER; note = 2'-fluorocytosine
  modified_base 28: mod_base = OTHER; note = 2'-Omethyluridine
  modified_base 29: mod_base = OTHER; note = Guanosine phosphorothiorate
  modified_base 30: mod_base = OTHER; note = 2'-Omethylguanosine
  modified_base 31: mod_base = OTHER; note = 2'-Omethyladenosine
  modified_base 33: mod_base = OTHER; note = 2'-fluorouridine
  modified_base 37: mod_base = OTHER; note = Adenosine phosphorothiorate
  modified_base 38: mod_base = OTHER; note = 2'-fluoroadenosine
  modified_base 39: mod_base = OTHER; note = Uridine phosphorothiorate
  modified_base 40: mod_base = OTHER; note = 2'-fluorouridine
  modified_base 41: mod_base = OTHER; note = 2'-Omethylcytosine
  modified_base 46: mod_base = OTHER; note = Guanosine phosphorothiorate
  modified_base 48: mod_base = OTHER; note = 2'-fluorouridine
  modified_base 49: mod_base = OTHER; note = 2'-Omethylcytosine
  modified_base 50: mod_base = OTHER; note = 2'-fluorocytosine
  modified_base 53: mod_base = OTHER; note = 2'-fluoroguanosine
  modified_base 56: mod_base = OTHER; note = Cytosine phosphorothiorate
  modified_base 57: mod_base = OTHER; note = 2'-fluoroguanosine
  modified_base 58: mod_base = OTHER; note = Adenosine phosphorothiorate
  modified_base 59: mod_base = OTHER; note = 2'-Omethylguanosine phosphorothiorate
  modified_base 61: mod_base = OTHER; note = Cytosine phosphorothiorate
  modified_base 62: mod_base = OTHER; note = 2'-Omethylcytosine
  modified_base 63: mod_base = OTHER; note = 2'-Omethylcytosine
  modified_base 64: mod_base = OTHER; note = 2'-fluoroguanosine
  modified_base 67: mod_base = OTHER; note = 2'-Omethylguanosine
  modified_base 68: mod_base = OTHER; note = 2'-Omethylguanosine
  modified_base 72: mod_base = OTHER; note = 2'-Omethylcytosine phosphorothiorate
  modified_base 73: mod_base = OTHER; note = 2'-Omethylguanosine
  modified_base 74: mod_base = OTHER; note = 2'-Omethylcytosine
  modified_base 75: mod_base = OTHER; note = Cytosine phosphorothiorate
  modified_base 76: mod_base = OTHER; note = 2'-Omethyladenosine

SEQ ID NO: 5240 - RNA, 75 nt, synthetic construct; identical to SEQ ID NO: 3299
  source 1..75: mol_type = other RNA
  modified_base 1: mod_base = OTHER; note = 2'-Omethylcytosine phosphorothiorate
  modified_base 2: mod_base = OTHER; note = 2'-fluorocytosine
  modified_base 4: mod_base = OTHER; note = 2'-Omethylguanosine phosphorothiorate
  modified_base 9: mod_base = OTHER; note = Guanosine phosphorothiorate
  modified_base 13: mod_base = OTHER; note = Adenosine phosphorothiorate
  modified_base 16: mod_base = OTHER; note = 2'-Omethylcytosine
  modified_base 20: mod_base = OTHER; note = 2'-fluoroadenosine
  modified_base 21: mod_base = OTHER; note = 2'-fluoroguanosine
  modified_base 22: mod_base = OTHER; note = 2'-Omethyladenosine
  modified_base 27: mod_base = OTHER; note = 2'-Omethylcytosine phosphorothiorate
  modified_base 39: mod_base = OTHER; note = 2'-Omethylcytosine
  modified_base 40: mod_base = OTHER; note = Uridine phosphorothiorate
  modified_base 48: mod_base = OTHER; note = 2'-fluorocytosine
  modified_base 49: mod_base = OTHER; note = 2'-fluoroadenosine
  modified_base 53: mod_base = OTHER; note = 2'-Omethyluridine phosphorothiorate
  modified_base 55: mod_base = OTHER; note = 2'-Omethylcytosine
  modified_base 61: mod_base = OTHER; note = 2'-Omethylcytosine phosphorothiorate
  modified_base 72: mod_base = OTHER; note = Guanosine phosphorothiorate
  modified_base 73: mod_base = OTHER; note = Cytosine phosphorothiorate
  modified_base 74: mod_base = OTHER; note = Cytosine phosphorothiorate

SEQ ID NO: 5241 - RNA, 76 nt, synthetic construct; identical to SEQ ID NO: 625
  source 1..76: mol_type = other RNA
  modified_base 1: mod_base = OTHER; note = 2'-Omethylguanosine
  modified_base 17: mod_base = OTHER; note = 2'-Omethylguanosine
  modified_base 18: mod_base = OTHER; note = 2'-Omethylguanosine
  modified_base 33: mod_base = OTHER; note = 2'-fluorouridine
  modified_base 47: mod_base = OTHER; note = Thymine
  modified_base 50: mod_base = OTHER; note = 2'-Omethylcytosine
  modified_base 52: mod_base = OTHER; note = 2'-Omethylguanosine
  modified_base 55: mod_base = OTHER; note = Uridine phosphorothiorate
  modified_base 73: mod_base = OTHER; note = 2'-Omethylguanosine

SEQ ID NO: 5242 - RNA, 76 nt, synthetic construct; identical to SEQ ID NO: 625
  source 1..76: mol_type = other RNA
  modified_base 1: mod_base = OTHER; note = Guanosine phosphorothiorate
  modified_base 2: mod_base = OTHER; note = 2'-fluoroguanosine
  modified_base 3: mod_base = OTHER; note = 2'-fluorocytosine
  modified_base 8: mod_base = OTHER; note = Uridine phosphorothiorate
  modified_base 11: mod_base = OTHER; note = 2'-fluorocytosine
  modified_base 14: mod_base = OTHER; note = 2'-Omethyladenosine phosphorothiorate
  modified_base 18: mod_base = OTHER; note = 2'-Omethylguanosine phosphorothiorate
  modified_base 19: mod_base = OTHER; note = Adenosine phosphorothiorate
  modified_base 22: mod_base = OTHER; note = 2'-Omethylguanosine phosphorothiorate
  modified_base 26: mod_base = OTHER; note = 2'-Omethyladenosine
  modified_base 27: mod_base = OTHER; note = 2'-fluorouridine
  modified_base 29: mod_base = OTHER; note = 2'-Omethylguanosine
  modified_base 31: mod_base = OTHER; note = 2'-fluoroadenosine
  modified_base 39: mod_base = OTHER; note = 2'-Omethyluridine
  modified_base 41: mod_base = OTHER; note = 2'-fluorocytosine phosphorothiorate
  modified_base 42: mod_base = OTHER; note = 2'-Omethyladenosine
  modified_base 43: mod_base = OTHER; note = 2'-Omethyladenosine phosphorothiorate
  modified_base 49: mod_base = OTHER; note = 2'-Omethylcytosine phosphorothiorate
  modified_base 50: mod_base = OTHER; note = 2'-Omethylcytosine
  modified_base 51: mod_base = OTHER; note = 2'-Omethylguanosine
  modified_base 52: mod_base = OTHER; note = 2'-Omethylguanosine phosphorothiorate
  modified_base 53: mod_base = OTHER; note = 2'-fluoroguanosine phosphorothiorate
  modified_base 54: mod_base = OTHER; note = 2'-fluorouridine
  modified_base 62: mod_base = OTHER; note = 2'-fluorocytosine phosphorothiorate
  modified_base 63: mod_base = OTHER; note = 2'-Omethylcytosine
  modified_base 64: mod_base = OTHER; note = Guanosine phosphorothiorate
  modified_base 65: mod_base = OTHER; note = 2'-Omethylguanosine
  modified_base 66: mod_base = OTHER; note = 2'-fluorocytosine
  modified_base 67: mod_base = OTHER; note = 2'-fluoroguanosine
  modified_base 72: mod_base = OTHER; note = 2'-fluorocytosine phosphorothiorate
  modified_base 73: mod_base = OTHER; note = 2'-Omethylguanosine

SEQ ID NO: 5243 - RNA, 75 nt, synthetic construct; identical to SEQ ID NO: 1045
  source 1..75: mol_type = other RNA
  modified_base 2: mod_base = OTHER; note = 2'-Omethylguanosine phosphorothiorate
  modified_base 6: mod_base = OTHER; note = Cytosine phosphorothiorate
  modified_base 18: mod_base = OTHER; note = 2'-Omethylguanosine phosphorothiorate
  modified_base 19: mod_base = OTHER; note = 2'-Omethyluridine phosphorothiorate
  modified_base 20: mod_base = OTHER; note = 2'-Omethyladenosine
  modified_base 26: mod_base = OTHER; note = Uridine phosphorothiorate
  modified_base 34: mod_base = OTHER; note = 2'-Omethyluridine phosphorothiorate
  modified_base 38: mod_base = OTHER; note = 2'-Omethyladenosine
  modified_base 40: mod_base = OTHER; note = 2'-fluorocytosine
  modified_base 43: mod_base = OTHER; note = 2'-fluoroguanosine
  modified_base 44: mod_base = OTHER; note = 2'-Omethylcytosine
  modified_base 45: mod_base = OTHER; note = 2'-Omethylguanosine
  modified_base 48: mod_base = OTHER; note = 2'-fluorocytosine
  modified_base 53: mod_base = OTHER; note = 2'-Omethyluridine phosphorothiorate
  modified_base 65: mod_base = OTHER; note = 2'-Omethyluridine
  modified_base 72: mod_base = OTHER; note = 2'-Omethyluridine
  modified_base 74: mod_base = OTHER; note = 2'-Omethylcytosine phosphorothiorate
  modified_base 75: mod_base = OTHER; note = 2'-Omethyladenosine

SEQ ID NO: 5244 - RNA, 76 nt, synthetic construct; identical to SEQ ID NO: 625
  source 1..76: mol_type = other RNA
  modified_base 1: mod_base = OTHER; note = 2'-Omethylguanosine phosphorothiorate
  modified_base 33: mod_base = OTHER; note = 2'-fluorouridine
  modified_base 52: mod_base = OTHER; note = 2'-O-(2-Methoxyethyl) guanosine
  modified_base 54: mod_base = OTHER; note = Uridine phosphorothiorate
  modified_base 55: mod_base = OTHER; note = Uridine phosphorothiorate

SEQ ID NO: 5245 - RNA, 75 nt, synthetic construct; identical to SEQ ID NO: 1045
  source 1..75: mol_type = other RNA
  modified_base 1: mod_base = OTHER; note = 2'-fluoroguanosine phosphorothiorate
  modified_base 2: mod_base = OTHER; note = 2'-Omethylguanosine phosphorothiorate
  modified_base 12: mod_base = OTHER; note = Guanosine phosphorothiorate
  modified_base 23: mod_base = OTHER; note = Cytosine phosphorothiorate
  modified_base 24: mod_base = OTHER; note = 2'-fluoroadenosine
  modified_base 29: mod_base = OTHER; note = 2'-Omethylguanosine phosphorothiorate
  modified_base 40: mod_base = OTHER; note = 2'-fluorocytosine phosphorothiorate
  modified_base 41: mod_base = OTHER; note = 2'-fluorocytosine
  modified_base 44: mod_base = OTHER; note = 2'-fluorocytosine
  modified_base 55: mod_base = OTHER; note = Cytosine phosphorothiorate
  modified_base 65: mod_base = OTHER; note = Uridine phosphorothiorate
  modified_base 73: mod_base = OTHER; note = Cytosine phosphorothiorate
  modified_base 74: mod_base = OTHER; note = Cytosine phosphorothiorate

SEQ ID NO: 5246 - RNA, 85 nt, synthetic construct; identical to SEQ ID NO: 3288
  source 1..85: mol_type = other RNA
  modified_base 1: mod_base = OTHER; note = 2'-Omethylcytosine
  modified_base 2: mod_base = OTHER; note = 2'-Omethylcytosine phosphorothiorate
  modified_base 12: mod_base = OTHER; note = Guanosine phosphorothiorate
  modified_base 16: mod_base = OTHER; note = Guanosine phosphorothiorate
  modified_base 27: mod_base = OTHER; note = 2'-fluorouridine
  modified_base 29: mod_base = OTHER; note = 2'-fluoroguanosine
  modified_base 32: mod_base = OTHER; note = 2'-fluorouridine
  modified_base 33: mod_base = OTHER; note = 2'-fluorouridine
  modified_base 36: mod_base = OTHER; note = Guanosine phosphorothiorate
  modified_base 42: mod_base = OTHER; note = Adenosine phosphorothiorate
  modified_base 45: mod_base = OTHER; note = Guanosine phosphorothiorate
  modified_base 48: mod_base = OTHER; note = 2'-Omethyladenosine
  modified_base 55: mod_base = OTHER; note = Cytosine phosphorothiorate
  modified_base 57: mod_base = OTHER; note = 2'-Omethylcytosine
  modified_base 84: mod_base = OTHER; note = 2'-Omethylcytosine
  modified_base 85: mod_base = OTHER; note = 2'-Omethyladenosine

SEQ ID NO: 5247 - RNA, 85 nt, synthetic construct; identical to SEQ ID NO: 3286
  source 1..85: mol_type = other RNA
  modified_base 1: mod_base = OTHER; note = 2'-fluorocytosine phosphorothiorate
  modified_base 32: mod_base = OTHER; note = 2'-fluorouridine
  modified_base 36: mod_base = OTHER; note = Guanosine phosphorothiorate
  modified_base 46: mod_base = OTHER; note = 2'-Omethyladenosine
  modified_base 57: mod_base = OTHER; note = Cytosine phosphorothiorate
  modified_base 58: mod_base = OTHER; note = Guanosine phosphorothiorate
  modified_base 64: mod_base = OTHER; note = Uridine phosphorothiorate

SEQ ID NO: 5248 - RNA, 75 nt, synthetic construct; identical to SEQ ID NO: 3299
  source 1..75: mol_type = other RNA
  modified_base 15: mod_base = OTHER; note = 2'-fluorouridine
  modified_base 19: mod_base = OTHER; note = 2'-Omethyluridine phosphorothiorate
  modified_base 20: mod_base = OTHER; note = Adenosine phosphorothiorate
  modified_base 26: mod_base = OTHER; note = 2'-fluorouridine
  modified_base 28: mod_base = OTHER; note = Adenosine phosphorothiorate
  modified_base 36: mod_base = OTHER; note = 2'-fluoroadenosine
  modified_base 42: mod_base = OTHER; note = 2'-fluoroadenosine
  modified_base 46: mod_base = OTHER; note = 2'-fluorouridine
  modified_base 49: mod_base = OTHER; note = 2'-fluoroadenosine
  modified_base 55: mod_base = OTHER; note = 2'-Omethylcytosine phosphorothiorate
  modified_base 72: mod_base = OTHER; note = Guanosine phosphorothiorate

SEQ ID NO: 5249 - RNA, 75 nt, synthetic construct; identical to SEQ ID NO: 3311
  source 1..75: mol_type = other RNA
  modified_base 1: mod_base = OTHER; note = Guanosine phosphorothiorate
  modified_base 2: mod_base = OTHER; note = Guanosine phosphorothiorate
  modified_base 12: mod_base = OTHER; note = 2'-Omethylguanosine
  modified_base 19: mod_base = OTHER; note = 2'-fluorouridine
  modified_base 25: mod_base = OTHER; note = 2'-fluorocytosine
  modified_base 33: mod_base = OTHER; note = 2'-Omethyluridine
  modified_base 44: mod_base = OTHER; note = 2'-fluorocytosine
  modified_base 51: mod_base = OTHER; note = 2'-fluoroadenosine phosphorothiorate
  modified_base 74: mod_base = OTHER; note = Cytosine phosphorothiorate

SEQ ID NO: 5250 - RNA, 76 nt, synthetic construct; identical to SEQ ID NO: 625
  source 1..76: mol_type = other RNA
  modified_base 1: mod_base = OTHER; note = 2'-Omethylguanosine phosphorothiorate
  modified_base 2: mod_base = OTHER; note = 2'-Omethylguanosine
  modified_base 3: mod_base = OTHER; note = 2'-Omethylcytosine
  modified_base 4: mod_base = OTHER; note = 2'-Omethyluridine
  modified_base 5: mod_base = OTHER; note = 2'-Omethylcytosine
  modified_base 6: mod_base = OTHER; note = 2'-Omethylcytosine
  modified_base 10: mod_base = OTHER; note = 2'-Omethylguanosine
  modified_base 11: mod_base = OTHER; note = 2'-Omethylcytosine
  modified_base 12: mod_base = OTHER; note = 2'-Omethylguanosine
  modified_base 13: mod_base = OTHER; note = 2'-Omethylcytosine
  modified_base 14: mod_base = OTHER; note = 2'-Omethyladenosine
  modified_base 15: mod_base = OTHER; note = 2'-fluoroadenosine
  modified_base 16: mod_base = OTHER; note = 2'-Omethyluridine
  modified_base 17: mod_base = OTHER; note = 2'-Omethylguanosine
  modified_base 18: mod_base = OTHER; note = 2'-Omethylguanosine
  modified_base 19: mod_base = OTHER; note = 2'-fluoroadenosine
  modified_base 20: mod_base = OTHER; note = 2'-Omethyluridine
  modified_base 22: mod_base = OTHER; note = 2'-Omethylguanosine
  modified_base 23: mod_base = OTHER; note = 2'-Omethylcytosine
  modified_base 24: mod_base = OTHER; note = 2'-Omethylguanosine
  modified_base 25: mod_base = OTHER; note = 2'-Omethylcytosine
  modified_base 38: mod_base = OTHER; note = Adenosine phosphorothiorate
  modified_base 39: mod_base = OTHER; note = Uridine phosphorothiorate
  modified_base 40: mod_base = OTHER; note = 2'-fluorouridine
  modified_base 43: mod_base = OTHER; note = 2'-Omethyladenosine
  modified_base 44: mod_base = OTHER; note = 2'-Omethyladenosine
  modified_base 45: mod_base = OTHER; note = 2'-Omethylguanosine
  modified_base 46: mod_base = OTHER; note = 2'-fluoroguanosine
  modified_base 48: mod_base = OTHER; note = 2'-fluorouridine
  modified_base 49: mod_base = OTHER; note = 2'-Omethylcytosine
  modified_base 50: mod_base = OTHER; note = 2'-Omethylcytosine
  modified_base 54: mod_base = OTHER; note = 2'-Omethyluridine phosphorothiorate
  modified_base 55: mod_base = OTHER; note = Uridine phosphorothiorate
  modified_base 56: mod_base = OTHER; note = 2'-Omethylcytosine
  modified_base 57: mod_base = OTHER; note = 2'-fluoroguanosine
  modified_base 61: mod_base = OTHER; note = 2'-Omethylcytosine
  modified_base 62: mod_base = OTHER; note = 2'-Omethylcytosine
  modified_base 63: mod_base = OTHER; note = 2'-fluorocytosine
  modified_base 64: mod_base = OTHER; note = 2'-Omethylguanosine
  modified_base 65: mod_base = OTHER; note = 2'-Omethylguanosine
  modified_base 66: mod_base = OTHER; note = 2'-Omethylcytosine
  modified_base 67: mod_base = OTHER; note = 2'-Omethylguanosine
  modified_base 68: mod_base = OTHER; note = 2'-Omethylguanosine

SEQ ID NO: 5251 - RNA, 85 nt, synthetic construct; identical to SEQ ID NO: 3286
  source 1..85: mol_type = other RNA
  modified_base 1: mod_base = OTHER; note = 2'-fluorocytosine
  modified_base 2: mod_base = OTHER; note = 2'-fluorocytosine
  modified_base 8: mod_base = OTHER; note = Guanosine phosphorothiorate
  modified_base 11: mod_base = OTHER; note = Cytosine phosphorothiorate
  modified_base 14: mod_base = OTHER; note = Guanosine phosphorothiorate
  modified_base 25: mod_base = OTHER; note = 2'-fluoroguanosine phosphorothiorate
  modified_base 34: mod_base = OTHER; note = Uridine phosphorothiorate
  modified_base 41: mod_base = OTHER; note = Adenosine phosphorothiorate
  modified_base 45: mod_base = OTHER; note = 2'-Omethylguanosine
  modified_base 51: mod_base = OTHER; note = Uridine phosphorothiorate
  modified_base 53: mod_base = OTHER; note = 2'-fluorouridine
  modified_base 62: mod_base = OTHER; note = 2'-fluoroguanosine
  modified_base 64: mod_base = OTHER; note = Uridine phosphorothiorate
  modified_base 84: mod_base = OTHER; note = 2'-fluorocytosine phosphorothiorate
  modified_base 85: mod_base = OTHER; note = 2'-Omethyladenosine

SEQ ID NO: 5252 - RNA, 85 nt, synthetic construct; identical to SEQ ID NO: 3297
  source 1..85: mol_type = other RNA
  modified_base 1: mod_base = OTHER; note = 2'-Omethylguanosine phosphorothiorate
  modified_base 2: mod_base = OTHER; note = Cytosine phosphorothiorate
  modified_base 12: mod_base = OTHER; note = 2'-Omethylcytosine
  modified_base 22: mod_base = OTHER; note = 2'-Omethyladenosine
  modified_base 26: mod_base = OTHER; note = 2'-fluoroguanosine
  modified_base 34: mod_base = OTHER; note = 2'-fluorouridine
  modified_base 35: mod_base = OTHER; note = 2'-fluorocytosine
  modified_base 45: mod_base = OTHER; note = 2'-Omethylguanosine
  modified_base 48: mod_base = OTHER; note = 2'-Omethylguanosine phosphorothiorate
  modified_base 82: mod_base = OTHER; note = 2'-fluoroguanosine phosphorothiorate

SEQ ID NO: 5253 - RNA, 76 nt, synthetic construct; identical to SEQ ID NO: 625
  source 1..76: mol_type = other RNA
  modified_base 50: mod_base = OTHER; note = 2'-O-(2-Methoxyethyl) 5-methylcytosine

SEQ ID NO: 5254 - RNA, 75 nt, synthetic construct; identical to SEQ ID NO: 3306
  source 1..75: mol_type = other RNA
  modified_base 48: mod_base = OTHER; note = 2'-Omethylguanosine
  modified_base 49: mod_base = OTHER; note = 2'-Omethylcytosine
  modified_base 50: mod_base = OTHER; note = 2'-Omethylguanosine
  modified_base 51: mod_base = OTHER; note = 2'-Omethyluridine
  modified_base 52: mod_base = OTHER; note = 2'-Omethylguanosine
  modified_base 72: mod_base = OTHER; note = 2'-Omethyladenosine

SEQ ID NO: 5255 - RNA, 86 nt, synthetic construct; identical to SEQ ID NO: 3290
  source 1..86: mol_type = other RNA
  modified_base 65: mod_base = OTHER; note = Uridine phosphorothiorate

SEQ ID NO: 5256 - RNA, 85 nt, synthetic construct; identical to SEQ ID NO: 3297
  source 1..85: mol_type = other RNA
  modified_base 18: mod_base = OTHER; note = 2'-Omethylguanosine
  modified_base 82: mod_base = OTHER; note = 2'-Omethylguanosine

SEQ ID NO: 5257 - RNA, 85 nt, synthetic construct; identical to SEQ ID NO: 3317
  source 1..85: mol_type = other RNA
  modified_base 1: mod_base = OTHER; note = 2'-Omethylguanosine phosphorothiorate
  modified_base 2: mod_base = OTHER; note = Cytosine phosphorothiorate
  modified_base 4: mod_base = OTHER; note = 2'-Omethylguanosine
  modified_base 14: mod_base = OTHER; note = 2'-Omethyladenosine phosphorothiorate
  modified_base 20: mod_base = OTHER; note = 2'-fluorouridine
  modified_base 34: mod_base = OTHER; note = 2'-fluorocytosine
  modified_base 35: mod_base = OTHER; note = 2'-fluorouridine
  modified_base 44: mod_base = OTHER; note = Uridine phosphorothiorate
  modified_base 58: mod_base = OTHER; note = 2'-Omethylguanosine phosphorothiorate
  modified_base 61: mod_base = OTHER; note = 2'-fluoroguanosine phosphorothiorate
  modified_base 82: mod_base = OTHER; note = 2'-Omethylguanosine

SEQ ID NO: 5258 - RNA, 76 nt, synthetic construct; identical to SEQ ID NO: 3332
  source 1..76: mol_type = other RNA
  modified_base 1: mod_base = OTHER; note = 2'-Omethylguanosine phosphorothiorate
  modified_base 2: mod_base = OTHER; note = 2'-Omethylguanosine phosphorothiorate
  modified_base 3: mod_base = OTHER; note = 2'-Omethylcytosine
  modified_base 4: mod_base = OTHER; note = 2'-Omethylcytosine
  modified_base 5: mod_base = OTHER; note = 2'-Omethylcytosine
  modified_base 6: mod_base = OTHER; note = 2'-Omethylcytosine
  modified_base 10: mod_base = OTHER; note = 2'-Omethylguanosine
  modified_base 11: mod_base = OTHER; note = 2'-Omethylcytosine
  modified_base 12: mod_base = OTHER; note = 2'-Omethylguanosine
  modified_base 13: mod_base = OTHER; note = 2'-Omethylcytosine
  modified_base 17: mod_base = OTHER; note = 2'-Omethylguanosine
  modified_base 18: mod_base = OTHER; note = 2'-Omethylguanosine
  modified_base 22: mod_base = OTHER; note = 2'-Omethylguanosine
  modified_base 23: mod_base = OTHER; note = 2'-Omethylcytosine
  modified_base 24: mod_base = OTHER; note = 2'-Omethylguanosine
  modified_base 25: mod_base = OTHER; note = 2'-Omethylcytosine
  modified_base 33: mod_base = OTHER; note = 2'-fluorouridine
  modified_base 35: mod_base = OTHER; note = Cytosine phosphorothiorate
  modified_base 37: mod_base = OTHER; note = Adenosine phosphorothiorate
  modified_base 38: mod_base = OTHER; note = Adenosine phosphorothiorate
  modified_base 41: mod_base = OTHER; note = 2'-fluorocytosine
  modified_base 42: mod_base = OTHER; note = 2'-Omethyladenosine
  modified_base 43: mod_base = OTHER; note = 2'-Omethyladenosine
  modified_base 44: mod_base = OTHER; note = 2'-fluoroadenosine
  modified_base 49: mod_base = OTHER; note = 2'-Omethylguanosine
  modified_base 50: mod_base = OTHER; note = 2'-Omethylcytosine
  modified_base 51: mod_base = OTHER; note = 2'-Omethylguanosine
  modified_base 52: mod_base = OTHER; note = 2'-Omethylguanosine
  modified_base 53: mod_base = OTHER; note = 2'-Omethylguanosine
  modified_base 54: mod_base = OTHER; note = Uridine phosphorothiorate
  modified_base 55: mod_base = OTHER; note = Uridine phosphorothiorate
  modified_base 61: mod_base = OTHER; note = 2'-Omethylcytosine
  modified_base 62: mod_base = OTHER; note = 2'-Omethylcytosine
  modified_base 63: mod_base = OTHER; note = 2'-fluorocytosine
  modified_base 64: mod_base = OTHER; note = 2'-Omethylguanosine
  modified_base 65: mod_base = OTHER; note = 2'-Omethylcytosine
  modified_base 66: mod_base = OTHER; note = 2'-Omethylcytosine
  modified_base 67: mod_base = OTHER; note = 2'-Omethylguanosine
  modified_base 68: mod_base = OTHER; note = 2'-Omethylguanosine
  modified_base 73: mod_base = OTHER; note = 2'-Omethylguanosine

SEQ ID NO: 5259 - RNA, 85 nt, synthetic construct; identical to SEQ ID NO: 3286
  source 1..85: mol_type = other RNA
  modified_base 1: mod_base = OTHER; note = 2'-Omethylcytosine
  modified_base 5: mod_base = OTHER; note = 2'-fluoroguanosine phosphorothiorate
  modified_base 17: mod_base = OTHER; note = 2'-Omethylguanosine
  modified_base 25: mod_base = OTHER; note = Guanosine phosphorothiorate
  modified_base 26: mod_base = OTHER; note = 2'-fluorouridine
  modified_base 28: mod_base = OTHER; note = 2'-fluoroguanosine
  modified_base 30: mod_base = OTHER; note = 2'-fluoroadenosine
  modified_base 34: mod_base = OTHER; note = 2'-fluorouridine
  modified_base 39: mod_base = OTHER; note = Cytosine phosphorothiorate
  modified_base 43: mod_base = OTHER; note = 2'-Omethyluridine
  modified_base 46: mod_base = OTHER; note = Adenosine phosphorothiorate
  modified_base 47: mod_base = OTHER; note = 2'-fluorocytosine
  modified_base 48: mod_base = OTHER; note = 2'-Omethyladenosine
  modified_base 51: mod_base = OTHER; note = 2'-Omethyluridine
  modified_base 53: mod_base = OTHER; note = 2'-fluorouridine
  modified_base 54: mod_base = OTHER; note = 2'-Omethylcytosine
  modified_base 56: mod_base = OTHER; note = 2'-fluoroguanosine
  modified_base 57: mod_base = OTHER; note = 2'-Omethylcytosine
  modified_base 58: mod_base = OTHER; note = 2'-Omethylguanosine
  modified_base 66: mod_base = OTHER; note = Guanosine phosphorothiorate
  modified_base 71: mod_base = OTHER; note = Cytosine phosphorothiorate
  modified_base 73: mod_base = OTHER; note = 2'-fluoroadenosine phosphorothiorate
  modified_base 79: mod_base = OTHER; note = Guanosine phosphorothiorate
  modified_base 84: mod_base = OTHER; note = Cytosine phosphorothiorate
  modified_base 85: mod_base = OTHER; note = 2'-Omethyladenosine

SEQ ID NO: 5260 - RNA, 76 nt, synthetic construct; identical to SEQ ID NO: 625
  source 1..76: mol_type = other RNA
  modified_base 1: mod_base = OTHER; note = 2'-Omethylguanosine phosphorothiorate
  modified_base 2: mod_base = OTHER; note = 2'-Omethylguanosine phosphorothiorate
  modified_base 3: mod_base = OTHER; note = 2'-Omethylcytosine phosphorothiorate
  modified_base 4: mod_base = OTHER; note = 2'-Omethyluridine phosphorothiorate
  modified_base 5: mod_base = OTHER; note = 2'-Omethylcytosine phosphorothiorate
  modified_base 6: mod_base = OTHER; note = 2'-Omethylcytosine phosphorothiorate
  modified_base 10: mod_base = OTHER; note = 2'-Omethylguanosine
  modified_base 11: mod_base = OTHER; note = 2'-Omethylcytosine
  modified_base 12: mod_base = OTHER; note = 2'-Omethylguanosine
  modified_base 13: mod_base = OTHER; note = 2'-Omethylcytosine
  modified_base 14: mod_base = OTHER; note = 2'-Omethyladenosine
  modified_base 15: mod_base = OTHER; note = 2'-Omethyladenosine
  modified_base 16: mod_base = OTHER; note = 2'-Omethyluridine
  modified_base 17: mod_base = OTHER; note = 2'-Omethylguanosine
  modified_base 18: mod_base = OTHER; note = 2'-Omethylguanosine
  modified_base 19: mod_base = OTHER; note = 2'-Omethyladenosine
  modified_base 20: mod_base = OTHER; note = 2'-Omethyluridine
  modified_base 22: mod_base = OTHER; note = 2'-Omethylguanosine
  modified_base 23: mod_base = OTHER; note = 2'-Omethylcytosine
  modified_base 24: mod_base = OTHER; note = 2'-Omethylguanosine
  modified_base 25: mod_base = OTHER; note = 2'-Omethylcytosine
  modified_base 40: mod_base = OTHER; note = 2'-fluorouridine
  modified_base 41: mod_base = OTHER; note = 2'-fluorocytosine
  modified_base 42: mod_base = OTHER; note = 2'-fluoroadenosine
  modified_base 43: mod_base = OTHER; note = 2'-fluoroadenosine
  modified_base 44: mod_base = OTHER; note = 2'-Omethyladenosine
  modified_base 45: mod_base = OTHER; note = 2'-Omethylguanosine
  modified_base 46: mod_base = OTHER; note = 2'-Omethylguanosine
  modified_base 49: mod_base = OTHER; note = 2'-Omethylcytosine
  modified_base 50: mod_base = OTHER; note = 2'-Omethylcytosine
  modified_base 51: mod_base = OTHER; note = 2'-Omethylguanosine
  modified_base 52: mod_base = OTHER; note = 2'-Omethylguanosine
  modified_base 53: mod_base = OTHER; note = 2'-Omethylguanosine
  modified_base 61: mod_base = OTHER; note = 2'-Omethylcytosine
  modified_base 62: mod_base = OTHER; note = 2'-Omethylcytosine
  modified_base 63: mod_base = OTHER; note = 2'-Omethylcytosine
  modified_base 64: mod_base = OTHER; note = 2'-Omethylguanosine
  modified_base 65: mod_base = OTHER; note = 2'-Omethylguanosine
  modified_base 66: mod_base = OTHER; note = 2'-Omethylcytosine
  modified_base 67: mod_base = OTHER; note = 2'-Omethylguanosine
  modified_base 68: mod_base = OTHER; note = 2'-Omethylguanosine
  modified_base 69: mod_base = OTHER; note = 2'-Omethyladenosine

SEQ ID NO: 5261 - RNA, 86 nt, synthetic construct; identical to SEQ ID NO: 3290
  source 1..86: mol_type = other RNA
  modified_base 1: mod_base = OTHER; note = 2'-Omethyladenosine
  modified_base 13: mod_base = OTHER; note = 2'-Omethylguanosine
  modified_base 14: mod_base = OTHER; note = 2'-Omethyladenosine
  modified_base 15: mod_base = OTHER; note = 2'-Omethylguanosine
  modified_base 16: mod_base = OTHER; note = 2'-Omethyluridine
  modified_base 17: mod_base = OTHER; note = 2'-Omethylguanosine
  modified_base 18: mod_base = OTHER; note = 2'-Omethylguanosine
  modified_base 19: mod_base = OTHER; note = Uridine phosphorothiorate
  modified_base 20: mod_base = OTHER; note = 2'-Omethyluridine
  modified_base 21: mod_base = OTHER; note = Adenosine phosphorothiorate
  modified_base 25: mod_base = OTHER; note = 2'-Omethylcytosine
  modified_base 33: mod_base = OTHER; note = 2'-fluorouridine
  modified_base 34: mod_base = OTHER; note = 2'-Omethyluridine
  modified_base 35: mod_base = OTHER; note = Cytosine phosphorothiorate
  modified_base 37: mod_base = OTHER; note = Guanosine phosphorothiorate
  modified_base 38: mod_base = OTHER; note = Adenosine phosphorothiorate
  modified_base 59: mod_base = OTHER; note = 2'-Omethylguanosine
  modified_base 60: mod_base = OTHER; note = 2'-Omethyluridine
  modified_base 62: mod_base = OTHER; note = 2'-Omethylguanosine
  modified_base 64: mod_base = OTHER; note = Uridine phosphorothiorate
  modified_base 65: mod_base = OTHER; note = Uridine phosphorothiorate
  modified_base 66: mod_base = OTHER; note = 2'-Omethylcytosine
  modified_base 67: mod_base = OTHER; note = Guanosine phosphorothiorate
  modified_base 68: mod_base = OTHER; note = Adenosine phosphorothiorate
  modified_base 69: mod_base = OTHER; note = 2'-Omethyladenosine
  modified_base 71: mod_base = OTHER; note = 2'-Omethylcytosine
  modified_base 75: mod_base = OTHER; note = 2'-Omethylcytosine
  modified_base 83: mod_base = OTHER; note = 2'-Omethyladenosine

SEQ ID NO: 5262 - RNA, 76 nt, synthetic construct; identical to SEQ ID NO: 625
  source 1..76: mol_type = other RNA
  modified_base 1: mod_base = OTHER; note = 2'-Omethylguanosine
  modified_base 10: mod_base = OTHER; note = 2'-Omethylguanosine
  modified_base 13: mod_base = OTHER; note = 2'-Omethylcytosine
  modified_base 17: mod_base = OTHER; note = Guanosine phosphorothiorate
  modified_base 18: mod_base = OTHER; note = 2'-Omethylguanosine
  modified_base 19: mod_base = OTHER; note = Adenosine phosphorothiorate
  modified_base 20: mod_base = OTHER; note = 2'-Omethyluridine
  modified_base 25: mod_base = OTHER; note = 2'-Omethylcytosine
  modified_base 29: mod_base = OTHER; note = 2'-Omethylguanosine
  modified_base 33: mod_base = OTHER; note = 2'-fluorouridine
  modified_base 35: mod_base = OTHER; note = Cytosine phosphorothiorate
  modified_base 37: mod_base = OTHER; note = Adenosine phosphorothiorate
  modified_base 38: mod_base = OTHER; note = Adenosine phosphorothiorate
  modified_base 43: mod_base = OTHER; note = 2'-Omethyladenosine
  modified_base 44: mod_base = OTHER; note = 2'-fluoroadenosine
  modified_base 46: mod_base = OTHER; note = Guanosine phosphorothiorate
  modified_base 50: mod_base = OTHER; note = 2'-Omethylcytosine
  modified_base 52: mod_base = OTHER; note = 2'-Omethylguanosine
  modified_base 54: mod_base = OTHER; note = Uridine phosphorothiorate
  modified_base 55: mod_base = OTHER; note = Uridine phosphorothiorate
  modified_base 56: mod_base = OTHER; note = 2'-Omethylcytosine
  modified_base 57: mod_base = OTHER; note = Guanosine phosphorothiorate
  modified_base 62: mod_base = OTHER; note = 2'-Omethylcytosine
  modified_base 63: mod_base = OTHER; note = 2'-fluorocytosine
  modified_base 71: mod_base = OTHER; note = 2'-Omethyluridine
  modified_base 73: mod_base = OTHER; note = 2'-Omethylguanosine

SEQ ID NO: 5263 - RNA, 76 nt, synthetic construct; identical to SEQ ID NO: 625
  source 1..76: mol_type = other RNA
  modified_base 1: mod_base = OTHER; note = Guanosine phosphorothiorate
  modified_base 2: mod_base = OTHER; note = 2'-fluoroguanosine
  modified_base 5: mod_base = OTHER; note = Cytosine phosphorothiorate
  modified_base 6: mod_base = OTHER; note = Cytosine phosphorothiorate
  modified_base 8: mod_base = OTHER; note = Uridine phosphorothiorate
  modified_base 9: mod_base = OTHER; note = Guanosine phosphorothiorate
  modified_base 10: mod_base = OTHER; note = Guanosine phosphorothiorate
  modified_base 11: mod_base = OTHER; note = 2'-Omethylcytosine
  modified_base 14: mod_base = OTHER; note = Adenosine phosphorothiorate
  modified_base 15: mod_base = OTHER; note = 2'-fluoroadenosine
  modified_base 20: mod_base = OTHER; note = 2'-Omethyluridine
  modified_base 25: mod_base = OTHER; note = 2'-Omethylcytosine
  modified_base 40: mod_base = OTHER; note = 2'-fluorouridine phosphorothiorate
  modified_base 42: mod_base = OTHER; note = 2'-fluoroadenosine phosphorothiorate
  modified_base 43: mod_base = OTHER; note = 2'-fluoroadenosine
  modified_base 45: mod_base = OTHER; note = 2'-fluoroguanosine
  modified_base 46: mod_base = OTHER; note = Guanosine phosphorothiorate
  modified_base 47: mod_base = OTHER; note = 2'-fluorouridine
  modified_base 50: mod_base = OTHER; note = 2'-Omethylcytosine
  modified_base 52: mod_base = OTHER; note = Guanosine phosphorothiorate
  modified_base 53: mod_base = OTHER; note = 2'-fluoroguanosine
  modified_base 54: mod_base = OTHER; note = 2'-Omethyluridine
  modified_base 55: mod_base = OTHER; note = Uridine phosphorothiorate
  modified_base 56: mod_base = OTHER; note = 2'-fluorocytosine
  modified_base 57: mod_base = OTHER; note = 2'-Omethylguanosine
  modified_base 59: mod_base = OTHER; note = 2'-fluoroguanosine
  modified_base 60: mod_base = OTHER; note = 2'-Omethyluridine phosphorothiorate
  modified_base 61: mod_base = OTHER; note = 2'-fluorocytosine
  modified_base 63: mod_base = OTHER; note = 2'-fluorocytosine phosphorothiorate
  modified_base 65: mod_base = OTHER; note = 2'-Omethylguanosine
  modified_base 66: mod_base = OTHER; note = 2'-Omethylcytosine
  modified_base 68: mod_base = OTHER; note = 2'-fluoroguanosine
  modified_base 70: mod_base = OTHER; note = Guanosine phosphorothiorate
  modified_base 71: mod_base = OTHER; note = 2'-fluorouridine
  modified_base 75: mod_base = OTHER; note = 2'-fluorocytosine
  modified_base 76: mod_base = OTHER; note = 2'-Omethyladenosine

SEQ ID NO: 5264 - RNA, 76 nt, synthetic construct; identical to SEQ ID NO: 3289
  source 1..76: mol_type = other RNA
  modified_base 1: mod_base = OTHER; note = 2'-Omethylguanosine phosphorothiorate
  modified_base 2: mod_base = OTHER; note = 2'-Omethylcytosine
  modified_base 3: mod_base = OTHER; note = 2'-Omethylcytosine
  modified_base 4: mod_base = OTHER; note = 2'-Omethyluridine
  modified_base 5: mod_base = OTHER; note = 2'-Omethylguanosine
  modified_base 6: mod_base = OTHER; note = 2'-Omethylguanosine
  modified_base 54: mod_base = OTHER; note = 2'-Omethyluridine phosphorothiorate
  modified_base 55: mod_base = OTHER; note = Uridine phosphorothiorate
  modified_base 56: mod_base = OTHER; note = 2'-Omethylcytosine
  modified_base 57: mod_base = OTHER; note = 2'-fluoroadenosine
  modified_base 58: mod_base = OTHER; note = Adenosine phosphorothiorate
  modified_base 59: mod_base = OTHER; note = 2'-Omethylguanosine
  modified_base 60: mod_base = OTHER; note = 2'-fluorouridine
  modified_base 73: mod_base = OTHER; note = 2'-Omethylguanosine

SEQ ID NO: 5265 - RNA, 76 nt, synthetic construct; identical to SEQ ID NO: 3295
  source 1..76: mol_type = other RNA
  modified_base 1: mod_base = OTHER; note = 2'-Omethylcytosine
  modified_base 3: mod_base = OTHER; note = Uridine phosphorothiorate
  modified_base 10: mod_base = OTHER; note = 2'-Omethylguanosine
  modified_base 15: mod_base = OTHER; note = 2'-Omethylguanosine phosphorothiorate
  modified_base 26: mod_base = OTHER; note = 2'-fluoroguanosine phosphorothiorate
  modified_base 37: mod_base = OTHER; note = 2'-fluoroguanosine
  modified_base 48: mod_base = OTHER; note = 2'-fluorocytosine phosphorothiorate
  modified_base 52: mod_base = OTHER; note = 2'-Omethylguanosine
  modified_base 75: mod_base = OTHER; note = 2'-Omethylcytosine phosphorothiorate
  modified_base 76: mod_base = OTHER; note = 2'-Omethyladenosine

SEQ ID NO: 5266 - RNA, 74 nt, synthetic construct; identical to SEQ ID NO: 766
  source 1..74: mol_type = other RNA
  modified_base 1: mod_base = OTHER; note = 2'-Omethylguanosine phosphorothiorate
  modified_base 2: mod_base = OTHER; note = 2'-Omethylguanosine
  modified_base 3: mod_base = OTHER; note = 2'-Omethylcytosine
  modified_base 4: mod_base = OTHER; note = 2'-Omethyluridine
  modified_base 5: mod_base = OTHER; note = 2'-Omethylcytosine
  modified_base 6: mod_base = OTHER; note = 2'-Omethylcytosine
  modified_base 16: mod_base = OTHER; note = 2'-Omethyluridine
  modified_base 17: mod_base = OTHER; note = 2'-Omethylguanosine
  modified_base 18: mod_base = OTHER; note = 2'-Omethylguanosine
  modified_base 20: mod_base = OTHER; note = 2'-Omethyluridine
  modified_base 25: mod_base = OTHER; note = 2'-Omethylcytosine
  modified_base 33: mod_base = OTHER; note = 2'-fluorouridine
  modified_base 35: mod_base = OTHER; note = Cytosine phosphorothiorate
  modified_base 37: mod_base = OTHER; note = Adenosine phosphorothiorate
  modified_base 38: mod_base = OTHER; note = Adenosine phosphorothiorate
  modified_base 41: mod_base = OTHER; note = 2'-fluorocytosine
  modified_base 42: mod_base = OTHER; note = 2'-Omethyladenosine
  modified_base 43: mod_base = OTHER; note = 2'-Omethyladenosine
  modified_base 44: mod_base = OTHER; note = 2'-fluoroadenosine
  modified_base 49: mod_base = OTHER; note = 2'-Omethylcytosine
  modified_base 50: mod_base = OTHER; note = 2'-Omethylcytosine
  modified_base 52: mod_base = OTHER; note = 2'-Omethylguanosine
  modified_base 54: mod_base = OTHER; note = 2'-Omethyluridine
  modified_base 55: mod_base = OTHER; note = Uridine phosphorothiorate
  modified_base 56: mod_base = OTHER; note = 2'-Omethylcytosine
  modified_base 57: mod_base = OTHER; note = 2'-fluoroguanosine
  modified_base 59: mod_base = OTHER; note = 2'-Omethylguanosine
  modified_base 61: mod_base = OTHER; note = 2'-Omethylcytosine
  modified_base 62: mod_base = OTHER; note = 2'-Omethylcytosine
  modified_base 63: mod_base = OTHER; note = 2'-fluorocytosine
  modified_base 64: mod_base = OTHER; note = 2'-Omethylguanosine
  modified_base 65: mod_base = OTHER; note = 2'-Omethylguanosine
  modified_base 73: mod_base = OTHER; note = 2'-Omethylguanosine

SEQ ID NO: 5267 - RNA, 76 nt, synthetic construct; identical to SEQ ID NO: 3447
  source 1..76: mol_type = other RNA
  modified_base 1: mod_base = OTHER; note = 2'-Omethylguanosine phosphorothiorate
  modified_base 2: mod_base = OTHER; note = 2'-Omethylcytosine phosphorothiorate
  modified_base 3: mod_base = OTHER; note = 2'-Omethylcytosine
  modified_base 4: mod_base = OTHER; note = 2'-Omethylcytosine
  modified_base 5: mod_base = OTHER; note = 2'-Omethylguanosine
  modified_base 6: mod_base = OTHER; note = 2'-Omethyladenosine
  modified_base 16: mod_base = OTHER; note = 2'-Omethyluridine
  modified_base 17: mod_base = OTHER; note = 2'-Omethylguanosine
  modified_base 18: mod_base = OTHER; note = 2'-Omethylguanosine
  modified_base 20: mod_base = OTHER; note = 2'-Omethyluridine
  modified_base 25: mod_base = OTHER; note = 2'-Omethylcytosine
  modified_base 33: mod_base = OTHER; note = 2'-fluorouridine
  modified_base 35: mod_base = OTHER; note = Cytosine phosphorothiorate
  modified_base 37: mod_base = OTHER; note = Adenosine phosphorothiorate
  modified_base 38: mod_base = OTHER; note = Adenosine phosphorothiorate
  modified_base 41: mod_base = OTHER; note = 2'-Omethylcytosine
  modified_base 44: mod_base = OTHER; note = 2'-Omethyladenosine
  modified_base 45: mod_base = OTHER; note = 2'-Omethylguanosine
  modified_base 46: mod_base = OTHER; note = 2'-fluoroguanosine
  modified_base 47: mod_base = OTHER; note = 2'-fluorouridine
  modified_base 48: mod_base = OTHER; note = 2'-fluorouridine
  modified_base 49: mod_base = OTHER; note = 2'-Omethylcytosine
  modified_base 50: mod_base = OTHER; note = 2'-Omethylcytosine
  modified_base 51: mod_base = OTHER; note = 2'-Omethylguanosine
  modified_base 52: mod_base = OTHER; note = 2'-Omethylguanosine
  modified_base 53: mod_base = OTHER; note = 2'-Omethylguanosine
  modified_base 54: mod_base = OTHER; note = 2'-Omethyluridine
  modified_base 56: mod_base = OTHER; note = 2'-Omethylcytosine
  modified_base 59: mod_base = OTHER; note = 2'-Omethylguanosine
  modified_base 73: mod_base = OTHER; note = 2'-Omethylguanosine

SEQ ID NO: 5268 - RNA, 75 nt, synthetic construct; identical to SEQ ID NO: 1045
  source 1..75: mol_type = other RNA
  modified_base 1: mod_base = OTHER; note = Guanosine phosphorothiorate
  modified_base 2: mod_base = OTHER; note = 2'-Omethylguanosine phosphorothiorate
  modified_base 9: mod_base = OTHER; note = Guanosine phosphorothiorate
  modified_base 11: mod_base = OTHER; note = Uridine phosphorothiorate
  modified_base 20: mod_base = OTHER; note = 2'-fluoroadenosine
  modified_base 23: mod_base = OTHER; note = 2'-Omethylcytosine
  modified_base 24: mod_base = OTHER; note = 2'-fluoroadenosine
  modified_base 27: mod_base = OTHER; note = 2'-fluorocytosine
  modified_base 28: mod_base = OTHER; note = 2'-fluorouridine
  modified_base 29: mod_base = OTHER; note = 2'-Omethylguanosine
  modified_base 36: mod_base = OTHER; note = 2'-fluoroadenosine
  modified_base 43: mod_base = OTHER; note = Guanosine phosphorothiorate
  modified_base 44: mod_base = OTHER; note = 2'-fluorocytosine
  modified_base 57: mod_base = OTHER; note = 2'-Omethyladenosine
  modified_base 64: mod_base = OTHER; note = 2'-fluoroguanosine phosphorothiorate
  modified_base 67: mod_base = OTHER; note = Guanosine phosphorothiorate
  modified_base 68: mod_base = OTHER; note = 2'-fluoroadenosine
  modified_base 71: mod_base = OTHER; note = Cytosine phosphorothiorate
  modified_base 72: mod_base = OTHER; note = 2'-fluorouridine
  modified_base 74: mod_base = OTHER; note = Cytosine phosphorothiorate

SEQ ID NO: 5269 - RNA, 86 nt, synthetic construct; identical to SEQ ID NO: 3290
  source 1..86: mol_type = other RNA
  modified_base 1: mod_base = OTHER; note = 2'-Omethyladenosine
  modified_base 13: mod_base = OTHER; note = 2'-Omethylguanosine
  modified_base 17: mod_base = OTHER; note = 2'-Omethylguanosine
  modified_base 18: mod_base = OTHER; note = 2'-Omethylguanosine
  modified_base 25: mod_base = OTHER; note = 2'-Omethylcytosine
  modified_base 33: mod_base = OTHER; note = Uridine phosphorothiorate
  modified_base 34: mod_base = OTHER; note = 2'-Omethyluridine
  modified_base 35: mod_base = OTHER; note = Cytosine phosphorothiorate
  modified_base 37: mod_base = OTHER; note = Guanosine phosphorothiorate
  modified_base 38: mod_base = OTHER; note = Adenosine phosphorothiorate
  modified_base 41: mod_base = OTHER; note = 2'-fluorocytosine
  modified_base 42: mod_base = OTHER; note = 2'-Omethyladenosine
  modified_base 43: mod_base = OTHER; note = 2'-Omethyladenosine
  modified_base 44: mod_base = OTHER; note = 2'-fluorouridine
  modified_base 59: mod_base = OTHER; note = 2'-Omethylguanosine
  modified_base 60: mod_base = OTHER; note = 2'-Omethyluridine
  modified_base 62: mod_base = OTHER; note = 2'-Omethylguanosine
  modified_base 64: mod_base = OTHER; note = Uridine phosphorothiorate
  modified_base 65: mod_base = OTHER; note = Uridine phosphorothiorate
  modified_base 66: mod_base = OTHER; note = 2'-Omethylcytosine
  modified_base 67: mod_base = OTHER; note = Guanosine phosphorothiorate
  modified_base 68: mod_base = OTHER; note = Adenosine phosphorothiorate
  modified_base 69: mod_base = OTHER; note = 2'-Omethyladenosine
  modified_base 71: mod_base = OTHER; note = 2'-Omethylcytosine
  modified_base 75: mod_base = OTHER; note = 2'-Omethylcytosine
  modified_base 83: mod_base = OTHER; note = 2'-Omethyladenosine

SEQ ID NO: 5270 - RNA, 76 nt, synthetic construct; identical to SEQ ID NO: 625
  source 1..76: mol_type = other RNA
  modified_base 1: mod_base = OTHER; note = 2'-fluoroguanosine
  modified_base 5: mod_base = OTHER; note = 2'-Omethylcytosine
  modified_base 10: mod_base = OTHER; note = 2'-Omethylguanosine
  modified_base 17: mod_base = OTHER; note = 2'-Omethylguanosine phosphorothiorate
  modified_base 24: mod_base = OTHER; note = 2'-Omethylguanosine
  modified_base 25: mod_base = OTHER; note = Cytosine phosphorothiorate
  modified_base 27: mod_base = OTHER; note = 2'-fluorouridine
  modified_base 29: mod_base = OTHER; note = 2'-Omethylguanosine
  modified_base 33: mod_base = OTHER; note = 2'-fluorouridine
  modified_base 34: mod_base = OTHER; note = Uridine phosphorothiorate
  modified_base 38: mod_base = OTHER; note = 2'-Omethyladenosine phosphorothiorate
  modified_base 40: mod_base = OTHER; note = 2'-Omethyluridine
  modified_base 43: mod_base = OTHER; note = 2'-Omethyladenosine
  modified_base 44: mod_base = OTHER; note = 2'-Omethyladenosine
  modified_base 47: mod_base = OTHER; note = 2'-Omethyluridine
  modified_base 53: mod_base = OTHER; note = Guanosine phosphorothiorate
  modified_base 57: mod_base = OTHER; note = Guanosine phosphorothiorate
  modified_base 59: mod_base = OTHER; note = 2'-fluoroguanosine
  modified_base 61: mod_base = OTHER; note = 2'-Omethylcytosine
  modified_base 65: mod_base = OTHER; note = 2'-Omethylguanosine phosphorothiorate
  modified_base 67: mod_base = OTHER; note = 2'-Omethylguanosine phosphorothiorate
  modified_base 68: mod_base = OTHER; note = Guanosine phosphorothiorate
  modified_base 69: mod_base = OTHER; note = 2'-fluoroadenosine
  modified_base 70: mod_base = OTHER; note = Guanosine phosphorothiorate
  modified_base 71: mod_base = OTHER; note = 2'-Omethyluridine
  modified_base 72: mod_base = OTHER; note = 2'-Omethylcytosine

SEQ ID NO: 5271 - RNA, 76 nt, synthetic construct; identical to SEQ ID NO: 3295
  source 1..76: mol_type = other RNA
  modified_base 1: mod_base = OTHER; note = 2'-Omethylcytosine
  modified_base 2: mod_base = OTHER; note = 2'-Omethylcytosine
  modified_base 5: mod_base = OTHER; note = 2'-Omethylcytosine phosphorothiorate
  modified_base 6: mod_base = OTHER; note = 2'-fluoroguanosine
  modified_base 8: mod_base = OTHER; note = 2'-fluorouridine
  modified_base 9: mod_base = OTHER; note = 2'-fluoroadenosine
  modified_base 10: mod_base = OTHER; note = 2'-fluoroguanosine
  modified_base 12: mod_base = OTHER; note = 2'-fluorouridine
  modified_base 15: mod_base = OTHER; note = 2'-Omethylguanosine
  modified_base 18: mod_base = OTHER; note = 2'-fluoroguanosine phosphorothiorate
  modified_base 22: mod_base = OTHER; note = 2'-Omethylguanosine
  modified_base 27: mod_base = OTHER; note = 2'-fluoroguanosine phosphorothiorate
  modified_base 34: mod_base = OTHER; note = 2'-fluorouridine phosphorothiorate
  modified_base 39: mod_base = OTHER; note = 2'-Omethyluridine
  modified_base 49: mod_base = OTHER; note = 2'-Omethylguanosine
  modified_base 52: mod_base = OTHER; note = 2'-Omethylguanosine
  modified_base 59: mod_base = OTHER; note = 2'-fluoroadenosine phosphorothiorate

SEQ ID NO: 5272 - RNA, 76 nt, synthetic construct; identical to SEQ ID NO: 625
  source 1..76: mol_type = other RNA
  modified_base 1: mod_base = OTHER; note = 2'-Omethylguanosine phosphorothiorate
  modified_base 2: mod_base = OTHER; note = 2'-Omethylguanosine
  modified_base 3: mod_base = OTHER; note = 2'-Omethylcytosine
  modified_base 4: mod_base = OTHER; note = 2'-Omethyluridine
  modified_base 5: mod_base = OTHER; note = 2'-Omethylcytosine
  modified_base 6: mod_base = OTHER; note = 2'-Omethylcytosine
  modified_base 10: mod_base = OTHER; note = 2'-Omethylguanosine
  modified_base 11: mod_base = OTHER; note = 2'-Omethylcytosine
  modified_base 12: mod_base = OTHER; note = 2'-Omethylguanosine
  modified_base 13: mod_base = OTHER; note = 2'-Omethylcytosine
  modified_base 14: mod_base = OTHER; note = 2'-Omethyladenosine
  modified_base 15: mod_base = OTHER; note = Adenosine phosphorothiorate
  modified_base 17: mod_base = OTHER; note = 2'-Omethylguanosine
  modified_base 18: mod_base = OTHER; note = 2'-Omethylguanosine
  modified_base 19: mod_base = OTHER; note = 2'-Omethyladenosine
  modified_base 21: mod_base = OTHER; note = 2'-fluoroadenosine phosphorothiorate
  modified_base 22: mod_base = OTHER; note = 2'-Omethylguanosine
  modified_base 23: mod_base = OTHER; note = 2'-Omethylcytosine
  modified_base 24: mod_base = OTHER; note = 2'-Omethylguanosine
  modified_base 25: mod_base = OTHER; note = 2'-Omethylcytosine
  modified_base 26: mod_base = OTHER; note = Adenosine phosphorothiorate
  modified_base 28: mod_base = OTHER; note = 2'-Omethyluridine
  modified_base 29: mod_base = OTHER; note = 2'-fluoroguanosine phosphorothiorate
  modified_base 30: mod_base = OTHER; note = 2'-Omethylguanosine phosphorothiorate
  modified_base 33: mod_base = OTHER; note = 2'-fluorouridine
  modified_base 35: mod_base = OTHER; note = 2'-Omethylcytosine phosphorothiorate
  modified_base 37: mod_base = OTHER; note = Adenosine phosphorothiorate
  modified_base 38: mod_base = OTHER; note = Adenosine phosphorothiorate
  modified_base 39: mod_base = OTHER; note = 2'-Omethyluridine phosphorothiorate
  modified_base 40: mod_base = OTHER; note = 2'-Omethyluridine
  modified_base 41: mod_base = OTHER; note = 2'-Omethylcytosine
  modified_base 42: mod_base = OTHER; note = Adenosine phosphorothiorate
  modified_base 44: mod_base = OTHER; note = 2'-Omethyladenosine
  modified_base 48: mod_base = OTHER; note = 2'-fluorouridine
  modified_base 49: mod_base = OTHER; note = 2'-Omethylcytosine
  modified_base 50: mod_base = OTHER; note = 2'-Omethylcytosine
  modified_base 51: mod_base = OTHER; note = 2'-Omethylguanosine
  modified_base 53: mod_base = OTHER; note = 2'-fluoroguanosine
  modified_base 54: mod_base = OTHER; note = 2'-Omethyluridine
  modified_base 55: mod_base = OTHER; note = Uridine phosphorothiorate
  modified_base 56: mod_base = OTHER; note = Cytosine phosphorothiorate
  modified_base 57: mod_base = OTHER; note = 2'-Omethylguanosine
  modified_base 61: mod_base = OTHER; note = 2'-Omethylcytosine
  modified_base 62: mod_base = OTHER; note = 2'-Omethylcytosine
  modified_base 63: mod_base = OTHER; note = 2'-fluorocytosine
  modified_base 64: mod_base = OTHER; note = 2'-Omethylguanosine
  modified_base 65: mod_base = OTHER; note = 2'-Omethylguanosine
  modified_base 66: mod_base = OTHER; note = 2'-Omethylcytosine
  modified_base 67: mod_base = OTHER; note = 2'-Omethylguanosine phosphorothiorate
  modified_base 68: mod_base = OTHER; note = 2'-Omethylguanosine
  modified_base 69: mod_base = OTHER; note = 2'-fluoroadenosine
  modified_base 70: mod_base = OTHER; note = Guanosine phosphorothiorate
  modified_base 72: mod_base = OTHER; note = 2'-Omethylcytosine
  modified_base 73: mod_base = OTHER; note = 2'-Omethylguanosine
  modified_base 74: mod_base = OTHER; note = 2'-fluorocytosine phosphorothiorate
  modified_base 75: mod_base = OTHER; note = 2'-fluorocytosine phosphorothiorate
  modified_base 76: mod_base = OTHER; note = 2'-Omethyladenosine

SEQ ID NO: 5273 - RNA, 75 nt, synthetic construct; identical to SEQ ID NO: 3299
  source 1..75: mol_type = other RNA
  modified_base 21: mod_base = OTHER; note = 2'-fluoroguanosine
  modified_base 22: mod_base = OTHER; note = 2'-fluoroadenosine
  modified_base 30: mod_base = OTHER; note = 2'-fluoroadenosine
  modified_base 40: mod_base = OTHER; note = 2'-Omethyluridine phosphorothiorate
  modified_base 44: mod_base = OTHER; note = 2'-fluoroguanosine
  modified_base 72: mod_base = OTHER; note = Guanosine phosphorothiorate
  modified_base 74: mod_base = OTHER; note = Cytosine phosphorothiorate

SEQ ID NO: 5274 - RNA, 76 nt, synthetic construct; identical to SEQ ID NO: 625
  source 1..76: mol_type = other RNA
  modified_base 1: mod_base = OTHER; note = 2'-Omethylguanosine phosphorothiorate
  modified_base 2: mod_base = OTHER; note = 2'-Omethylguanosine
  modified_base 17: mod_base = OTHER; note = 2'-Omethylguanosine
  modified_base 25: mod_base = OTHER; note = 2'-Omethylcytosine
  modified_base 33: mod_base = OTHER; note = 2'-fluorouridine
  modified_base 35: mod_base = OTHER; note = Cytosine phosphorothiorate
  modified_base 37: mod_base = OTHER; note = Adenosine phosphorothiorate
  modified_base 38: mod_base = OTHER; note = Adenosine phosphorothiorate
  modified_base 52: mod_base = OTHER; note = 2'-fluoroguanosine
  modified_base 56: mod_base = OTHER; note = 2'-Omethylcytosine
  modified_base 73: mod_base = OTHER; note = 2'-Omethylguanosine
  modified_base 75: mod_base = OTHER; note = 2'-fluorocytosine phosphorothiorate

SEQ ID NO: 5275 - RNA, 73 nt, synthetic construct; identical to SEQ ID NO: 935
  source 1..73: mol_type = other RNA
  modified_base 1: mod_base = OTHER; note = 2'-Omethylguanosine phosphorothiorate
  modified_base 2: mod_base = OTHER; note = 2'-Omethylguanosine phosphorothiorate

SEQ ID NO: 5276 - DNA, 76 bp, synthetic construct; identical to SEQ ID NO: 1924
  source 1..76: mol_type = other DNA
  modified_base 1: mod_base = OTHER; note = 2'-Omethylguanosine
  modified_base 5: mod_base = OTHER; note = 2'-Omethylcytosine
  modified_base 7: mod_base = OTHER; note = Guanosine phosphorothiorate
  modified_base 8: mod_base = OTHER; note = 2'-fluorouridine phosphorothiorate
  modified_base 9: mod_base = OTHER; note = Guanosine phosphorothiorate
  modified_base 10: mod_base = OTHER; note = Guanosine phosphorothiorate
  modified_base 15: mod_base = OTHER; note = Adenosine phosphorothiorate
  modified_base 19: mod_base = OTHER; note = Adenosine phosphorothiorate
  modified_base 21: mod_base = OTHER; note = Adenosine phosphorothiorate
  modified_base 22: mod_base = OTHER; note = 2'-Omethylguanosine
  modified_base 23: mod_base = OTHER; note = Cytosine phosphorothiorate
  modified_base 24: mod_base = OTHER; note = 2'-Omethylguanosine
  modified_base 27: mod_base = OTHER; note = 2'-O-(2-Methoxyethyl) thymine
  modified_base 31: mod_base = OTHER; note = 2'-fluoroadenosine phosphorothiorate
  modified_base 32: mod_base = OTHER; note = 2'-Omethylcytosine
  modified_base 37: mod_base = OTHER; note = Adenosine phosphorothiorate
  modified_base 40: mod_base = OTHER; note = Uridine phosphorothiorate
  modified_base 41: mod_base = OTHER; note = 2'-fluorocytosine phosphorothiorate
  modified_base 42: mod_base = OTHER; note = 2'-Omethyladenosine
  modified_base 44: mod_base = OTHER; note = 2'-Omethyladenosine
  modified_base 46: mod_base = OTHER; note = 2'-Omethylguanosine
  modified_base 48: mod_base = OTHER; note = Uridine phosphorothiorate
  modified_base 49: mod_base = OTHER; note = 2'-Omethylcytosine
  modified_base 52: mod_base = OTHER; note = 2'-fluoroguanosine
  modified_base 57: mod_base = OTHER; note = 2'-Omethylguanosine
  modified_base 62: mod_base = OTHER; note = 2'-O-(2-Methoxyethyl) 5-methylcytosine
  modified_base 63: mod_base = OTHER; note = Cytosine phosphorothiorate
  modified_base 65: mod_base = OTHER; note = Guanosine phosphorothiorate
  modified_base 66: mod_base = OTHER; note = Cytosine phosphorothiorate
  modified_base 67: mod_base = OTHER; note = 2'-Omethylguanosine
  modified_base 73: mod_base = OTHER; note = Guanosine phosphorothiorate
  modified_base 74: mod_base = OTHER; note = 2'-Omethylcytosine phosphorothiorate
  modified_base 76: mod_base = OTHER; note = 2'-O-(2-Methoxyethyl) adenosine
  misc_feature 1..33: note = RNA
  misc_feature 34: note = DNA
  misc_feature 35..37: note = RNA
  misc_feature 38: note = DNA
  misc_feature 39..59: note = RNA
  misc_feature 60: note = DNA
  misc_feature 61..76: note = RNA

SEQ ID NO: 5277 - RNA, 76 nt, synthetic construct; identical to SEQ ID NO: 3289
  source 1..76: mol_type = other RNA
  modified_base 1: mod_base = OTHER; note = 2'-Omethylguanosine phosphorothiorate
  modified_base 2: mod_base = OTHER; note = 2'-Omethylcytosine phosphorothiorate
  modified_base 74: mod_base = OTHER; note = 2'-Omethylcytosine phosphorothiorate
  modified_base 75: mod_base = OTHER; note = 2'-Omethylcytosine phosphorothiorate

SEQ ID NO: 5278 - RNA, 75 nt, synthetic construct; identical to SEQ ID NO: 3336
  source 1..75: mol_type = other RNA
  modified_base 11: mod_base = OTHER; note = 2'-Omethyluridine
  modified_base 15: mod_base = OTHER; note = 2'-fluorouridine phosphorothiorate
  modified_base 23: mod_base = OTHER; note = Guanosine phosphorothiorate
  modified_base 35: mod_base = OTHER; note = 2'-fluoroadenosine phosphorothiorate
  modified_base 37: mod_base = OTHER; note = 2'-fluoroadenosine
  modified_base 62: mod_base = OTHER; note = 2'-fluorocytosine phosphorothiorate
  modified_base 74: mod_base = OTHER; note = 2'-Omethylcytosine

SEQ ID NO: 5279 - RNA, 76 nt, synthetic construct; identical to SEQ ID NO: 3329
  source 1..76: mol_type = other RNA
  modified_base 1: mod_base = OTHER; note = 2'-Omethylguanosine
  modified_base 2: mod_base = OTHER; note = 2'-Omethylguanosine
  modified_base 3: mod_base = OTHER; note = 2'-Omethylcytosine
  modified_base 4: mod_base = OTHER; note = 2'-Omethylcytosine
  modified_base 5: mod_base = OTHER; note = 2'-Omethylcytosine
  modified_base 6: mod_base = OTHER; note = 2'-Omethylcytosine
  modified_base 16: mod_base = OTHER; note = 2'-Omethyluridine
  modified_base 17: mod_base = OTHER; note = 2'-Omethylguanosine
  modified_base 18: mod_base = OTHER; note = 2'-Omethylguanosine
  modified_base 20: mod_base = OTHER; note = 2'-Omethyluridine
  modified_base 22: mod_base = OTHER; note = 2'-Omethylguanosine
  modified_base 23: mod_base = OTHER; note = 2'-Omethylcytosine
  modified_base 24: mod_base = OTHER; note = 2'-Omethylguanosine
  modified_base 25: mod_base = OTHER; note = 2'-Omethylcytosine
  modified_base 33: mod_base = OTHER; note = 2'-fluorouridine
  modified_base 35: mod_base = OTHER; note = Cytosine phosphorothiorate
  modified_base 37: mod_base = OTHER; note = Adenosine phosphorothiorate
  modified_base 38: mod_base = OTHER; note = Adenosine phosphorothiorate
  modified_base 41: mod_base = OTHER; note = 2'-Omethylcytosine
  modified_base 42: mod_base = OTHER; note = 2'-Omethyladenosine
  modified_base 43: mod_base = OTHER; note = 2'-Omethyladenosine
  modified_base 44: mod_base = OTHER; note = 2'-Omethyladenosine
  modified_base 45: mod_base = OTHER; note = 2'-Omethylguanosine
  modified_base 46: mod_base = OTHER; note = 2'-fluoroguanosine
  modified_base 48: mod_base = OTHER; note = 2'-fluorouridine
  modified_base 49: mod_base = OTHER; note = 2'-Omethylcytosine
  modified_base 50: mod_base = OTHER; note = 2'-Omethylcytosine
  modified_base 52: mod_base = OTHER; note = 2'-Omethylguanosine
  modified_base 54: mod_base = OTHER; note = 2'-Omethyluridine
  modified_base 55: mod_base = OTHER; note = Uridine phosphorothiorate
  modified_base 56: mod_base = OTHER; note = 2'-Omethylcytosine
  modified_base 57: mod_base = OTHER; note = 2'-fluoroguanosine
  modified_base 59: mod_base = OTHER; note = 2'-Omethylguanosine
  modified_base 61: mod_base = OTHER; note = 2'-Omethylcytosine
  modified_base 65: mod_base = OTHER; note = 2'-Omethylguanosine
  modified_base 73: mod_base = OTHER; note = 2'-Omethylguanosine

SEQ ID NO: 5280 - RNA, 75 nt, synthetic construct; identical to SEQ ID NO: 1045
  source 1..75: mol_type = other RNA
  modified_base 1: mod_base = OTHER; note = 2'-Omethylguanosine phosphorothiorate
  modified_base 2: mod_base = OTHER; note = 2'-Omethylguanosine phosphorothiorate
  modified_base 3: mod_base = OTHER; note = 2'-Omethyluridine
  modified_base 4: mod_base = OTHER; note = 2'-Omethyluridine
  modified_base 5: mod_base = OTHER; note = 2'-Omethylcytosine
  modified_base 6: mod_base = OTHER; note = 2'-Omethylcytosine
  modified_base 16: mod_base = OTHER; note = 2'-Omethyluridine
  modified_base 17: mod_base = OTHER; note = 2'-Omethylguanosine
  modified_base 18: mod_base = OTHER; note = 2'-Omethylguanosine
  modified_base 33: mod_base = OTHER; note = 2'-fluorouridine
  modified_base 35: mod_base = OTHER; note = Uridine phosphorothiorate
  modified_base 37: mod_base = OTHER; note = Adenosine phosphorothiorate
  modified_base 38: mod_base = OTHER; note = Adenosine phosphorothiorate
  modified_base 44: mod_base = OTHER; note = 2'-Omethylcytosine
  modified_base 45: mod_base = OTHER; note = 2'-Omethylguanosine
  modified_base 46: mod_base = OTHER; note = 2'-fluoroadenosine
  modified_base 47: mod_base = OTHER; note = 2'-fluorouridine
  modified_base 55: mod_base = OTHER; note = 2'-Omethylcytosine
  modified_base 58: mod_base = OTHER; note = 2'-Omethylguanosine
  modified_base 60: mod_base = OTHER; note = 2'-Omethylcytosine
  modified_base 61: mod_base = OTHER; note = 2'-Omethyluridine
  modified_base 62: mod_base = OTHER; note = 2'-fluorocytosine
  modified_base 63: mod_base = OTHER; note = 2'-Omethylguanosine
  modified_base 64: mod_base = OTHER; note = 2'-Omethylguanosine
  modified_base 65: mod_base = OTHER; note = 2'-Omethyluridine
  modified_base 66: mod_base = OTHER; note = 2'-Omethylguanosine
  modified_base 67: mod_base = OTHER; note = 2'-Omethylguanosine
  modified_base 72: mod_base = OTHER; note = 2'-Omethyluridine

SEQ ID NO: 5281 - DNA, 76 bp, synthetic construct; identical to SEQ ID NO: 1924
  source 1..76: mol_type = other DNA
  modified_base 1: mod_base = OTHER; note = 2'-Omethylguanosine
  modified_base 2: mod_base = OTHER; note = 2'-O-(2-Methoxyethyl) guanosine phosphorothiorate
  modified_base 4: mod_base = OTHER; note = 2'-O-(2-Methoxyethyl) thymine
  modified_base 5: mod_base = OTHER; note = deoxycytosine phosphorothiorate
  modified_base 10: mod_base = OTHER; note = 2'-fluoroguanosine
  modified_base 17: mod_base = OTHER; note = Guanosine phosphorothiorate
  modified_base 18: mod_base = OTHER; note = 2'-Omethylguanosine
  modified_base 19: mod_base = OTHER; note = 2'-fluoroadenosine
  modified_base 22: mod_base = OTHER; note = 2'-Omethylguanosine
  modified_base 23: mod_base = OTHER; note = deoxycytosine phosphorothiorate
  modified_base 25: mod_base = OTHER; note = Cytosine phosphorothiorate
  modified_base 26: mod_base = OTHER; note = 2'-Omethyladenosine
  modified_base 28: mod_base = OTHER; note = 2'-fluorouridine
  modified_base 31: mod_base = OTHER; note = 2'-O-(2-Methoxyethyl) adenosine
  modified_base 32: mod_base = OTHER; note = Cytosine phosphorothiorate
  modified_base 33: mod_base = OTHER; note = 2'-fluorouridine
  modified_base 40: mod_base = OTHER; note = 2'-O-(2-Methoxyethyl) thymine
  modified_base 45: mod_base = OTHER; note = Guanosine phosphorothiorate
  modified_base 46: mod_base = OTHER; note = 2'-Omethylguanosine
  modified_base 53: mod_base = OTHER; note = 2'-fluoroguanosine
  modified_base 54: mod_base = OTHER; note = 2'-O-(2-Methoxyethyl) thymine
  modified_base 55: mod_base = OTHER; note = Uridine phosphorothiorate
  modified_base 56: mod_base = OTHER; note = 2'-Omethylcytosine
  modified_base 63: mod_base = OTHER; note = 2'-fluorocytosine
  modified_base 64: mod_base = OTHER; note = 2'-fluoroguanosine
  modified_base 66: mod_base = OTHER; note = Cytosine phosphorothiorate
  modified_base 67: mod_base = OTHER; note = 2'-O-(2-Methoxyethyl) guanosine
  modified_base 71: mod_base = OTHER; note = 2'-O-(2-Methoxyethyl) thymine
  modified_base 72: mod_base = OTHER; note = Cytosine phosphorothiorate
  modified_base 73: mod_base = OTHER; note = Guanosine phosphorothiorate
  modified_base 74: mod_base = OTHER; note = Cytosine phosphorothiorate
  modified_base 75: mod_base = OTHER; note = 2'-Omethylcytosine
  misc_feature 1..4: note = RNA
  misc_feature 5: note = DNA
  misc_feature 6..12: note = RNA
  misc_feature 13: note = DNA
  misc_feature 14: note = RNA
  misc_feature 15: note = DNA
  misc_feature 16..19: note = RNA
  misc_feature 20: note = DNA
  misc_feature 21..22: note = RNA
  misc_feature 23..24: note = DNA
  misc_feature 25..48: note = RNA
  misc_feature 49: note = DNA
  misc_feature 50..75: note = RNA
  misc_feature 76: note = DNA

SEQ ID NO: 5282 - RNA, 75 nt, synthetic construct; identical to SEQ ID NO: 1045
  source 1..75: mol_type = other RNA
  modified_base 2: mod_base = OTHER; note = 2'-Omethylguanosine
  modified_base 27: mod_base = OTHER; note = 2'-Omethylcytosine
  modified_base 42: mod_base = OTHER; note = 2'-fluoroadenosine
  modified_base 47: mod_base = OTHER; note = 2'-fluorouridine
  modified_base 48: mod_base = OTHER; note = 2'-fluorocytosine
  modified_base 61: mod_base = OTHER; note = 2'-fluorouridine
  modified_base 65: mod_base = OTHER; note = 2'-fluorouridine
  modified_base 73: mod_base = OTHER; note = Cytosine phosphorothiorate
  modified_base 74: mod_base = OTHER; note = Cytosine phosphorothiorate

SEQ ID NO: 5283 - RNA, 75 nt, synthetic construct; identical to SEQ ID NO: 3306
  source 1..75: mol_type = other RNA
  modified_base 1: mod_base = OTHER; note = 2'-Omethylguanosine phosphorothiorate
  modified_base 2: mod_base = OTHER; note = 2'-Omethyladenosine phosphorothiorate
  modified_base 3: mod_base = OTHER; note = 2'-Omethylcytosine
  modified_base 4: mod_base = OTHER; note = 2'-Omethylcytosine
  modified_base 5: mod_base = OTHER; note = 2'-Omethyluridine
  modified_base 6: mod_base = OTHER; note = 2'-Omethylcytosine
  modified_base 10: mod_base = OTHER; note = 2'-Omethylguanosine
  modified_base 11: mod_base = OTHER; note = 2'-Omethylcytosine
  modified_base 12: mod_base = OTHER; note = 2'-Omethylguanosine
  modified_base 13: mod_base = OTHER; note = 2'-Omethylcytosine
  modified_base 21: mod_base = OTHER; note = 2'-Omethylguanosine
  modified_base 22: mod_base = OTHER; note = 2'-Omethylcytosine
  modified_base 23: mod_base = OTHER; note = 2'-Omethylguanosine
  modified_base 24: mod_base = OTHER; note = 2'-Omethylcytosine
  modified_base 48: mod_base = OTHER; note = 2'-Omethylguanosine
  modified_base 49: mod_base = OTHER; note = 2'-Omethylcytosine
  modified_base 50: mod_base = OTHER; note = 2'-Omethylguanosine
  modified_base 51: mod_base = OTHER; note = 2'-Omethyluridine
  modified_base 52: mod_base = OTHER; note = 2'-Omethylguanosine
  modified_base 53: mod_base = OTHER; note = 2'-Omethyluridine
  modified_base 60: mod_base = OTHER; note = 2'-Omethylcytosine
  modified_base 61: mod_base = OTHER; note = 2'-Omethyladenosine
  modified_base 62: mod_base = OTHER; note = 2'-fluorocytosine
  modified_base 63: mod_base = OTHER; note = 2'-Omethylguanosine
  modified_base 64: mod_base = OTHER; note = 2'-Omethyluridine
  modified_base 65: mod_base = OTHER; note = 2'-Omethylcytosine
  modified_base 66: mod_base = OTHER; note = 2'-Omethylguanosine
  modified_base 67: mod_base = OTHER; note = 2'-Omethylguanosine
  modified_base 72: mod_base = OTHER; note = 2'-Omethyladenosine

SEQ ID NO: 5284 - RNA, 85 nt, synthetic construct; identical to SEQ ID NO: 3286
  source 1..85: mol_type = other RNA
  modified_base 1: mod_base = OTHER; note = 2'-Omethylcytosine
  modified_base 25: mod_base = OTHER; note = Guanosine phosphorothiorate
  modified_base 26: mod_base = OTHER; note = 2'-fluorouridine
  modified_base 27: mod_base = OTHER; note = 2'-fluorouridine
  modified_base 29: mod_base = OTHER; note = 2'-fluoroguanosine
  modified_base 30: mod_base = OTHER; note = 2'-fluoroadenosine
  modified_base 33: mod_base = OTHER; note = 2'-fluorouridine
  modified_base 34: mod_base = OTHER; note = 2'-Omethyluridine
  modified_base 35: mod_base = OTHER; note = 2'-fluoroadenosine phosphorothiorate
  modified_base 43: mod_base = OTHER; note = 2'-Omethyluridine
  modified_base 46: mod_base = OTHER; note = 2'-Omethyladenosine
  modified_base 53: mod_base = OTHER; note = 2'-fluorouridine
  modified_base 54: mod_base = OTHER; note = 2'-Omethylcytosine
  modified_base 55: mod_base = OTHER; note = 2'-Omethylcytosine
  modified_base 57: mod_base = OTHER; note = 2'-Omethylcytosine
  modified_base 59: mod_base = OTHER; note = 2'-Omethyluridine
  modified_base 75: mod_base = OTHER; note = 2'-fluorouridine
  modified_base 76: mod_base = OTHER; note = 2'-fluorocytosine
  modified_base 77: mod_base = OTHER; note = Cytosine phosphorothiorate
  modified_base 79: mod_base = OTHER; note = 2'-Omethylguanosine
  modified_base 84: mod_base = OTHER; note = Cytosine phosphorothiorate

SEQ ID NO: 5285 - RNA, 75 nt, synthetic construct; identical to SEQ ID NO: 1045
  source 1..75: mol_type = other RNA
  modified_base 1: mod_base = OTHER; note = 2'-Omethylguanosine phosphorothiorate
  modified_base 2: mod_base = OTHER; note = 2'-Omethylguanosine phosphorothiorate
  modified_base 9: mod_base = OTHER; note = Guanosine phosphorothiorate
  modified_base 10: mod_base = OTHER; note = 2'-fluoroguanosine
  modified_base 29: mod_base = OTHER; note = Guanosine phosphorothiorate
  modified_base 30: mod_base = OTHER; note = 2'-Omethylguanosine
  modified_base 63: mod_base = OTHER; note = Guanosine phosphorothiorate
  modified_base 73: mod_base = OTHER; note = Cytosine phosphorothiorate
  modified_base 74: mod_base = OTHER; note = 2'-Omethylcytosine

SEQ ID NO: 5286 - RNA, 76 nt, synthetic construct; identical to SEQ ID NO: 625
  source 1..76: mol_type = other RNA
  modified_base 1: mod_base = OTHER; note = 2'-O-(2-Methoxyethyl) guanosine phosphorothiorate
  modified_base 2: mod_base = OTHER; note = 2'-O-(2-Methoxyethyl) guanosine phosphorothiorate
  modified_base 3: mod_base = OTHER; note = 2'-O-(2-Methoxyethyl) cytosine phosphorothiorate
  modified_base 4: mod_base = OTHER; note = 2'-O-(2-Methoxyethyl) thymine phosphorothiorate
  modified_base 5: mod_base = OTHER; note = 2'-O-(2-Methoxyethyl) cytosine phosphorothiorate
  modified_base 6: mod_base = OTHER; note = 2'-O-(2-Methoxyethyl) cytosine phosphorothiorate
  modified_base 10: mod_base = OTHER; note = 2'-O-(2-Methoxyethyl) guanosine phosphorothiorate
  modified_base 11: mod_base = OTHER; note = 2'-O-(2-Methoxyethyl) cytosine phosphorothiorate
  modified_base 12: mod_base = OTHER; note = 2'-O-(2-Methoxyethyl) guanosine phosphorothiorate
  modified_base 13: mod_base = OTHER; note = 2'-O-(2-Methoxyethyl) cytosine phosphorothiorate
  modified_base 14: mod_base = OTHER; note = 2'-O-(2-Methoxyethyl) adenosine phosphorothiorate
  modified_base 15: mod_base = OTHER; note = 2'-O-(2-Methoxyethyl) adenosine phosphorothiorate
  modified_base 16: mod_base = OTHER; note = 2'-O-(2-Methoxyethyl) thymine phosphorothiorate
  modified_base 17: mod_base = OTHER; note = 2'-O-(2-Methoxyethyl) guanosine phosphorothiorate
  modified_base 18: mod_base = OTHER; note = 2'-O-(2-Methoxyethyl) guanosine phosphorothiorate
  modified_base 19: mod_base = OTHER; note = 2'-O-(2-Methoxyethyl) adenosine phosphorothiorate
  modified_base 20: mod_base = OTHER; note = 2'-O-(2-Methoxyethyl) thymine phosphorothiorate
  modified_base 21: mod_base = OTHER; note = 2'-O-(2-Methoxyethyl) adenosine phosphorothiorate
  modified_base 22: mod_base = OTHER; note = 2'-O-(2-Methoxyethyl) guanosine phosphorothiorate
  modified_base 23: mod_base = OTHER; note = 2'-O-(2-Methoxyethyl) cytosine phosphorothiorate
  modified_base 24: mod_base = OTHER; note = 2'-O-(2-Methoxyethyl) guanosine phosphorothiorate
  modified_base 25: mod_base = OTHER; note = 2'-O-(2-Methoxyethyl) cytosine phosphorothiorate
  modified_base 26: mod_base = OTHER; note = 2'-O-(2-Methoxyethyl) adenosine phosphorothiorate
  modified_base 27: mod_base = OTHER; note = 2'-O-(2-Methoxyethyl) thymine phosphorothiorate
  modified_base 28: mod_base = OTHER; note = 2'-O-(2-Methoxyethyl) thymine phosphorothiorate
  modified_base 29: mod_base = OTHER; note = 2'-O-(2-Methoxyethyl) guanosine phosphorothiorate
  modified_base 30: mod_base = OTHER; note = 2'-O-(2-Methoxyethyl) guanosine phosphorothiorate
  modified_base 31: mod_base = OTHER; note = 2'-O-(2-Methoxyethyl) adenosine phosphorothiorate
  modified_base 32: mod_base = OTHER; note = 2'-O-(2-Methoxyethyl) cytosine phosphorothiorate
  modified_base 33: mod_base = OTHER; note = 2'-O-(2-Methoxyethyl) thymine phosphorothiorate
  modified_base 34: mod_base = OTHER; note = 2'-O-(2-Methoxyethyl) thymine phosphorothiorate
  modified_base 35: mod_base = OTHER; note = 2'-O-(2-Methoxyethyl) cytosine phosphorothiorate
  modified_base 36: mod_base = OTHER; note = 2'-O-(2-Methoxyethyl) adenosine phosphorothiorate
  modified_base 37: mod_base = OTHER; note = 2'-O-(2-Methoxyethyl) adenosine phosphorothiorate
  modified_base 38: mod_base = OTHER; note = 2'-O-(2-Methoxyethyl) adenosine phosphorothiorate
  modified_base 41: mod_base = OTHER; note = 2'-O-(2-Methoxyethyl) cytosine phosphorothiorate
  modified_base 42: mod_base = OTHER; note = 2'-O-(2-Methoxyethyl) adenosine phosphorothiorate
  modified_base 43: mod_base = OTHER; note = 2'-O-(2-Methoxyethyl) adenosine phosphorothiorate
  modified_base 44: mod_base = OTHER; note = 2'-O-(2-Methoxyethyl) adenosine phosphorothiorate
  modified_base 45: mod_base = OTHER; note = 2'-O-(2-Methoxyethyl) guanosine phosphorothiorate
  modified_base 46: mod_base = OTHER; note = 2'-O-(2-Methoxyethyl) guanosine phosphorothiorate
  modified_base 47: mod_base = OTHER; note = 2'-O-(2-Methoxyethyl) thymine phosphorothiorate
  modified_base 48: mod_base = OTHER; note = 2'-O-(2-Methoxyethyl) thymine phosphorothiorate
  modified_base 49: mod_base = OTHER; note = 2'-O-(2-Methoxyethyl) cytosine phosphorothiorate
  modified_base 50: mod_base = OTHER; note = 2'-O-(2-Methoxyethyl) cytosine phosphorothiorate
  modified_base 51: mod_base = OTHER; note = 2'-O-(2-Methoxyethyl) guanosine phosphorothiorate
  modified_base 52: mod_base = OTHER; note = 2'-O-(2-Methoxyethyl) guanosine phosphorothiorate
  modified_base 53: mod_base = OTHER; note = 2'-O-(2-Methoxyethyl) guanosine phosphorothiorate
  modified_base 54: mod_base = OTHER; note = 2'-O-(2-Methoxyethyl) thymine phosphorothiorate
  modified_base 55: mod_base = OTHER; note = 2'-O-(2-Methoxyethyl) thymine phosphorothiorate
  modified_base 56: mod_base = OTHER; note = 2'-O-(2-Methoxyethyl) cytosine phosphorothiorate
  modified_base 57: mod_base = OTHER; note = 2'-O-(2-Methoxyethyl) guanosine phosphorothiorate
  modified_base 58: mod_base = OTHER; note = 2'-O-(2-Methoxyethyl) adenosine phosphorothiorate
  modified_base 59: mod_base = OTHER; note = 2'-O-(2-Methoxyethyl) guanosine phosphorothiorate
  modified_base 60: mod_base = OTHER; note = 2'-O-(2-Methoxyethyl) thymine phosphorothiorate
  modified_base 61: mod_base = OTHER; note = 2'-O-(2-Methoxyethyl) cytosine phosphorothiorate
  modified_base 62: mod_base = OTHER; note = 2'-O-(2-Methoxyethyl) cytosine phosphorothiorate
  modified_base 63: mod_base = OTHER; note = 2'-O-(2-Methoxyethyl) cytosine phosphorothiorate
  modified_base 65: mod_base = OTHER; note = 2'-O-(2-Methoxyethyl) guanosine phosphorothiorate
  modified_base 66: mod_base = OTHER; note = 2'-O-(2-Methoxyethyl) cytosine phosphorothiorate
  modified_base 67: mod_base = OTHER; note = 2'-O-(2-Methoxyethyl) guanosine phosphorothiorate
  modified_base 68: mod_base = OTHER; note = 2'-O-(2-Methoxyethyl) guanosine phosphorothiorate
  modified_base 71: mod_base = OTHER; note = 2'-O-(2-Methoxyethyl) thymine phosphorothiorate
  modified_base 72: mod_base = OTHER; note = 2'-O-(2-Methoxyethyl) cytosine phosphorothiorate
  modified_base 73: mod_base = OTHER; note = 2'-O-(2-Methoxyethyl) guanosine phosphorothiorate
  modified_base 74: mod_base = OTHER; note = 2'-O-(2-Methoxyethyl) cytosine phosphorothiorate
  modified_base 75: mod_base = OTHER; note = 2'-O-(2-Methoxyethyl) cytosine phosphorothiorate

SEQ ID NO: 5287 - RNA, 76 nt, synthetic construct; identical to SEQ ID NO: 3325
  source 1..76: mol_type = other RNA
  modified_base 1: mod_base = OTHER; note = 2'-Omethyluridine
  modified_base 2: mod_base = OTHER; note = 2'-Omethyladenosine
  modified_base 3: mod_base = OTHER; note = 2'-Omethylcytosine
  modified_base 4: mod_base = OTHER; note = 2'-Omethyladenosine
  modified_base 5: mod_base = OTHER; note = 2'-Omethylcytosine
  modified_base 6: mod_base = OTHER; note = 2'-Omethylcytosine
  modified_base 16: mod_base = OTHER; note = 2'-Omethyluridine
  modified_base 17: mod_base = OTHER; note = 2'-Omethylguanosine
  modified_base 18: mod_base = OTHER; note = 2'-Omethylguanosine
  modified_base 20: mod_base = OTHER; note = 2'-Omethyluridine
  modified_base 22: mod_base = OTHER; note = 2'-Omethylguanosine
  modified_base 23: mod_base = OTHER; note = 2'-Omethylcytosine
  modified_base 24: mod_base = OTHER; note = 2'-Omethylguanosine
  modified_base 25: mod_base = OTHER; note = 2'-Omethylcytosine
  modified_base 33: mod_base = OTHER; note = 2'-fluorouridine
  modified_base 35: mod_base = OTHER; note = Cytosine phosphorothiorate
  modified_base 37: mod_base = OTHER; note = Adenosine phosphorothiorate
  modified_base 38: mod_base = OTHER; note = Adenosine phosphorothiorate
  modified_base 41: mod_base = OTHER; note = 2'-Omethylcytosine
  modified_base 42: mod_base = OTHER; note = 2'-Omethyladenosine
  modified_base 43: mod_base = OTHER; note = 2'-Omethyladenosine
  modified_base 44: mod_base = OTHER; note = 2'-Omethyladenosine
  modified_base 45: mod_base = OTHER; note = 2'-Omethylguanosine
  modified_base 46: mod_base = OTHER; note = 2'-fluoroguanosine
  modified_base 48: mod_base = OTHER; note = 2'-fluorouridine
  modified_base 49: mod_base = OTHER; note = 2'-Omethylcytosine
  modified_base 50: mod_base = OTHER; note = 2'-Omethylcytosine
  modified_base 52: mod_base = OTHER; note = 2'-Omethylguanosine
  modified_base 54: mod_base = OTHER; note = 2'-Omethyluridine
  modified_base 55: mod_base = OTHER; note = Uridine phosphorothiorate
  modified_base 56: mod_base = OTHER; note = 2'-Omethylcytosine
  modified_base 57: mod_base = OTHER; note = 2'-fluoroguanosine
  modified_base 59: mod_base = OTHER; note = 2'-Omethylguanosine
  modified_base 61: mod_base = OTHER; note = 2'-Omethylcytosine
  modified_base 65: mod_base = OTHER; note = 2'-Omethylguanosine
  modified_base 73: mod_base = OTHER; note = 2'-Omethylguanosine

SEQ ID NO: 5288 - RNA, 76 nt, synthetic construct; identical to SEQ ID NO: 625
  source 1..76: mol_type = other RNA
  modified_base 1: mod_base = OTHER; note = 2'-Omethylguanosine phosphorothiorate
  modified_base 2: mod_base = OTHER; note = 2'-Omethylguanosine
  modified_base 18: mod_base = OTHER; note = 2'-Omethylguanosine
  modified_base 33: mod_base = OTHER; note = 2'-fluorouridine
  modified_base 35: mod_base = OTHER; note = Cytosine phosphorothiorate
  modified_base 37: mod_base = OTHER; note = Adenosine phosphorothiorate
  modified_base 38: mod_base = OTHER; note = Adenosine phosphorothiorate
  modified_base 52: mod_base = OTHER; note = 2'-fluoroguanosine
  modified_base 57: mod_base = OTHER; note = 2'-Omethylguanosine
  modified_base 62: mod_base = OTHER; note = 2'-Omethylcytosine
  modified_base 73: mod_base = OTHER; note = 2'-Omethylguanosine
  modified_base 75: mod_base = OTHER; note = 2'-fluorocytosine phosphorothiorate

SEQ ID NO: 5289 - RNA, 76 nt, synthetic construct; identical to SEQ ID NO: 3318
  source 1..76: mol_type = other RNA
  modified_base 1: mod_base = OTHER; note = 2'-Omethylcytosine
  modified_base 2: mod_base = OTHER; note = 2'-Omethylcytosine
  modified_base 3: mod_base = OTHER; note = 2'-Omethyluridine
  modified_base 4: mod_base = OTHER; note = 2'-Omethyluridine
  modified_base 5: mod_base = OTHER; note = 2'-Omethylcytosine
  modified_base 6: mod_base = OTHER; note = 2'-Omethylguanosine
  modified_base 22: mod_base = OTHER; note = 2'-Omethylguanosine
  modified_base 23: mod_base = OTHER; note = 2'-Omethyladenosine
  modified_base 24: mod_base = OTHER; note = 2'-Omethylguanosine
  modified_base 25: mod_base = OTHER; note = 2'-Omethylcytosine

SEQ ID NO: 5290 - RNA, 76 nt, synthetic construct; identical to SEQ ID NO: 3490
  source 1..76: mol_type = other RNA
  modified_base 1: mod_base = OTHER; note = 2'-Omethylguanosine
  modified_base 13: mod_base = OTHER; note = 2'-Omethylcytosine
  modified_base 14: mod_base = OTHER; note = 2'-Omethyladenosine
  modified_base 15: mod_base = OTHER; note = 2'-Omethyladenosine
  modified_base 16: mod_base = OTHER; note = 2'-Omethyluridine
  modified_base 17: mod_base = OTHER; note = 2'-Omethylguanosine
  modified_base 18: mod_base = OTHER; note = 2'-Omethylguanosine
  modified_base 19: mod_base = OTHER; note = Adenosine phosphorothiorate
  modified_base 20: mod_base = OTHER; note = 2'-Omethyluridine
  modified_base 21: mod_base = OTHER; note = Adenosine phosphorothiorate
  modified_base 25: mod_base = OTHER; note = 2'-Omethylcytosine
  modified_base 41: mod_base = OTHER; note = 2'-fluorocytosine
  modified_base 42: mod_base = OTHER; note = 2'-Omethyladenosine
  modified_base 43: mod_base = OTHER; note = 2'-Omethyladenosine
  modified_base 44: mod_base = OTHER; note = 2'-fluoroadenosine
  modified_base 49: mod_base = OTHER; note = 2'-Omethylguanosine
  modified_base 50: mod_base = OTHER; note = 2'-Omethylcytosine
  modified_base 51: mod_base = OTHER; note = 2'-Omethylguanosine
  modified_base 52: mod_base = OTHER; note = 2'-Omethylguanosine
  modified_base 53: mod_base = OTHER; note = 2'-Omethylguanosine
  modified_base 54: mod_base = OTHER; note = Uridine phosphorothiorate
  modified_base 55: mod_base = OTHER; note = Uridine phosphorothiorate
  modified_base 61: mod_base = OTHER; note = 2'-Omethylcytosine
  modified_base 65: mod_base = OTHER; note = 2'-Omethylcytosine
  modified_base 73: mod_base = OTHER; note = 2'-Omethylguanosine

SEQ ID NO: 5291 - RNA, 85 nt, synthetic construct; identical to SEQ ID NO: 3288
  source 1..85: mol_type = other RNA
  modified_base 8: mod_base = OTHER; note = Guanosine phosphorothiorate
  modified_base 33: mod_base = OTHER; note = Uridine phosphorothiorate
  modified_base 45: mod_base = OTHER; note = 2'-Omethylguanosine
  modified_base 56: mod_base = OTHER; note = 2'-fluoroguanosine
  modified_base 77: mod_base = OTHER; note = 2'-fluorocytosine
  modified_base 85: mod_base = OTHER; note = 2'-Omethyladenosine

SEQ ID NO: 5292 - RNA, 76 nt, synthetic construct; identical to SEQ ID NO: 625
  source 1..76: mol_type = other RNA
  modified_base 1: mod_base = OTHER; note = 2'-Omethylguanosine
  modified_base 2: mod_base = OTHER; note = 2'-Omethylguanosine
  modified_base 3: mod_base = OTHER; note = 2'-Omethylcytosine
  modified_base 4: mod_base = OTHER; note = 2'-Omethyluridine
  modified_base 5: mod_base = OTHER; note = 2'-Omethylcytosine
  modified_base 6: mod_base = OTHER; note = 2'-Omethylcytosine
  modified_base 10: mod_base = OTHER; note = 2'-Omethylguanosine
  modified_base 11: mod_base = OTHER; note = 2'-Omethylcytosine
  modified_base 12: mod_base = OTHER; note = Guanosine phosphorothiorate
  modified_base 13: mod_base = OTHER; note = 2'-Omethylcytosine
  modified_base 17: mod_base = OTHER; note = Guanosine phosphorothiorate
  modified_base 18: mod_base = OTHER; note = 2'-Omethylguanosine
  modified_base 19: mod_base = OTHER; note = Adenosine phosphorothiorate
  modified_base 20: mod_base = OTHER; note = 2'-Omethyluridine
  modified_base 22: mod_base = OTHER; note = 2'-Omethylguanosine
  modified_base 23: mod_base = OTHER; note = 2'-Omethylcytosine
  modified_base 24: mod_base = OTHER; note = 2'-Omethylguanosine
  modified_base 25: mod_base = OTHER; note = 2'-Omethylcytosine
  modified_base 29: mod_base = OTHER; note = 2'-Omethylguanosine
  modified_base 33: mod_base = OTHER; note = 2'-fluorouridine
  modified_base 35: mod_base = OTHER; note = Cytosine phosphorothiorate
  modified_base 37: mod_base = OTHER; note = Adenosine phosphorothiorate
  modified_base 38: mod_base = OTHER; note = Adenosine phosphorothiorate
  modified_base 40: mod_base = OTHER; note = 2'-fluorouridine
  modified_base 41: mod_base = OTHER; note = 2'-Omethylcytosine
  modified_base 42: mod_base = OTHER; note = 2'-Omethyladenosine
  modified_base 43: mod_base = OTHER; note = 2'-Omethyladenosine
  modified_base 44: mod_base = OTHER; note = 2'-fluoroadenosine
  modified_base 45: mod_base = OTHER; note = 2'-O-(2-Methoxyethyl) guanosine
  modified_base 46: mod_base = OTHER; note = Guanosine phosphorothiorate
  modified_base 49: mod_base = OTHER; note = 2'-Omethylcytosine
  modified_base 50: mod_base = OTHER; note = 2'-Omethylcytosine
  modified_base 51: mod_base = OTHER; note = 2'-Omethylguanosine
  modified_base 52: mod_base = OTHER; note = 2'-Omethylguanosine
  modified_base 53: mod_base = OTHER; note = 2'-Omethylguanosine
  modified_base 54: mod_base = OTHER; note = Uridine phosphorothiorate
  modified_base 55: mod_base = OTHER; note = Uridine phosphorothiorate
  modified_base 56: mod_base = OTHER; note = 2'-Omethylcytosine
  modified_base 57: mod_base = OTHER; note = Guanosine phosphorothiorate
  modified_base 61: mod_base = OTHER; note = 2'-Omethylcytosine
  modified_base 62: mod_base = OTHER; note = 2'-Omethylcytosine
  modified_base 63: mod_base = OTHER; note = 2'-fluorocytosine
  modified_base 64: mod_base = OTHER; note = 2'-Omethylguanosine
  modified_base 65: mod_base = OTHER; note = 2'-Omethylguanosine
  modified_base 66: mod_base = OTHER; note = 2'-Omethylcytosine
  modified_base 67: mod_base = OTHER; note = 2'-Omethylguanosine
  modified_base 68: mod_base = OTHER; note = 2'-Omethylguanosine
  modified_base 69: mod_base = OTHER; note = 2'-fluoroadenosine
  modified_base 70: mod_base = OTHER; note = 2'-fluoroguanosine
  modified_base 71: mod_base = OTHER; note = 2'-Omethyluridine
  modified_base 73: mod_base = OTHER; note = 2'-Omethylguanosine
  modified_base 75: mod_base = OTHER; note = 2'-fluorocytosine phosphorothiorate

SEQ ID NO: 5293 - RNA, 74 nt, synthetic construct; identical to SEQ ID NO: 3293
  source 1..74: mol_type = other RNA
  modified_base 1: mod_base = OTHER; note = Adenosine phosphorothiorate
  modified_base 2: mod_base = OTHER; note = 2'-Omethylcytosine
  modified_base 3: mod_base = OTHER; note = 2'-Omethylcytosine
  modified_base 4: mod_base = OTHER; note = Uridine phosphorothiorate
  modified_base 10: mod_base = OTHER; note = 2'-Omethylcytosine
  modified_base 12: mod_base = OTHER; note = 2'-Omethylcytosine
  modified_base 26: mod_base = OTHER; note = Cytosine phosphorothiorate
  modified_base 33: mod_base = OTHER; note = Uridine phosphorothiorate
  modified_base 35: mod_base = OTHER; note = 2'-fluoroguanosine phosphorothiorate
  modified_base 39: mod_base = OTHER; note = 2'-fluoroadenosine
  modified_base 42: mod_base = OTHER; note = Adenosine phosphorothiorate
  modified_base 48: mod_base = OTHER; note = 2'-fluorocytosine
  modified_base 50: mod_base = OTHER; note = Uridine phosphorothiorate
  modified_base 51: mod_base = OTHER; note = 2'-fluoroguanosine
  modified_base 62: mod_base = OTHER; note = Guanosine phosphorothiorate
  modified_base 72: mod_base = OTHER; note = 2'-fluorocytosine
  modified_base 73: mod_base = OTHER; note = 2'-fluorocytosine phosphorothiorate

SEQ ID NO: 5294 - RNA, 76 nt, synthetic construct; identical to SEQ ID NO: 625
  source 1..76: mol_type = other RNA
  modified_base 1: mod_base = OTHER; note = 2'-Omethylguanosine
  modified_base 10: mod_base = OTHER; note = 2'-Omethylguanosine
  modified_base 13: mod_base = OTHER; note = 2'-Omethylcytosine
  modified_base 18: mod_base = OTHER; note = 2'-Omethylguanosine
  modified_base 25: mod_base = OTHER; note = 2'-Omethylcytosine
  modified_base 29: mod_base = OTHER; note = 2'-Omethylguanosine
  modified_base 33: mod_base = OTHER; note = 2'-fluorouridine
  modified_base 35: mod_base = OTHER; note = Cytosine phosphorothiorate
  modified_base 37: mod_base = OTHER; note = Adenosine phosphorothiorate
  modified_base 38: mod_base = OTHER; note = Adenosine phosphorothiorate
  modified_base 41: mod_base = OTHER; note = 2'-fluorocytosine phosphorothiorate
  modified_base 43: mod_base = OTHER; note = 2'-Omethyladenosine
  modified_base 44: mod_base = OTHER; note = 2'-fluoroadenosine
  modified_base 46: mod_base = OTHER; note = Guanosine phosphorothiorate
  modified_base 50: mod_base = OTHER; note = 2'-Omethylcytosine
  modified_base 52: mod_base = OTHER; note = 2'-Omethylguanosine
  modified_base 54: mod_base = OTHER; note = Uridine phosphorothiorate
  modified_base 55: mod_base = OTHER; note = Uridine phosphorothiorate
  modified_base 56: mod_base = OTHER; note = 2'-Omethylcytosine
  modified_base 57: mod_base = OTHER; note = Guanosine phosphorothiorate
  modified_base 62: mod_base = OTHER; note = 2'-Omethylcytosine
  modified_base 63: mod_base = OTHER; note = 2'-fluorocytosine
  modified_base 65: mod_base = OTHER; note = 2'-Omethylguanosine
  modified_base 71: mod_base = OTHER; note = 2'-Omethyluridine
  modified_base 73: mod_base = OTHER; note = 2'-Omethylguanosine

SEQ ID NO: 5295 - RNA, 86 nt, synthetic construct; identical to SEQ ID NO: 3290
  source 1..86: mol_type = other RNA
  modified_base 21: mod_base = OTHER; note = 2'-Omethyladenosine

SEQ ID NO: 5296 - RNA, 85 nt, synthetic construct; identical to SEQ ID NO: 3288
  source 1..85: mol_type = other RNA
  modified_base 1: mod_base = OTHER; note = 2'-Omethylcytosine
  modified_base 3: mod_base = OTHER; note = 2'-fluoroadenosine
  modified_base 11: mod_base = OTHER; note = Cytosine phosphorothiorate
  modified_base 30: mod_base = OTHER; note = 2'-fluoroadenosine
  modified_base 52: mod_base = OTHER; note = Guanosine phosphorothiorate
  modified_base 56: mod_base = OTHER; note = 2'-Omethylguanosine
  modified_base 58: mod_base = OTHER; note = 2'-Omethylguanosine
  modified_base 73: mod_base = OTHER; note = 2'-fluoroadenosine
  modified_base 84: mod_base = OTHER; note = 2'-Omethylcytosine

SEQ ID NO: 5297 - RNA, 76 nt, synthetic construct; identical to SEQ ID NO: 625
  source 1..76: mol_type = other RNA
  modified_base 2: mod_base = OTHER; note = Guanosine phosphorothiorate
  modified_base 4: mod_base = OTHER; note = 2'-fluorouridine
  modified_base 6: mod_base = OTHER; note = 2'-Omethylcytosine phosphorothiorate
  modified_base 8: mod_base = OTHER; note = Uridine phosphorothiorate
  modified_base 13: mod_base = OTHER; note = Cytosine phosphorothiorate
  modified_base 15: mod_base = OTHER; note = 2'-fluoroadenosine phosphorothiorate
  modified_base 16: mod_base = OTHER; note = 2'-fluorouridine
  modified_base 17: mod_base = OTHER; note = 2'-Omethylguanosine phosphorothiorate
  modified_base 18: mod_base = OTHER; note = 2'-Omethylguanosine
  modified_base 20: mod_base = OTHER; note = Uridine phosphorothiorate
  modified_base 22: mod_base = OTHER; note = 2'-fluoroguanosine
  modified_base 23: mod_base = OTHER; note = 2'-Omethylcytosine phosphorothiorate
  modified_base 24: mod_base = OTHER; note = 2'-fluoroguanosine
  modified_base 26: mod_base = OTHER; note = 2'-fluoroadenosine
  modified_base 29: mod_base = OTHER; note = 2'-fluoroguanosine
  modified_base 30: mod_base = OTHER; note = 2'-Omethylguanosine phosphorothiorate
  modified_base 38: mod_base = OTHER; note = 2'-fluoroadenosine
  modified_base 41: mod_base = OTHER; note = 2'-Omethylcytosine
  modified_base 42: mod_base = OTHER; note = 2'-fluoroadenosine
  modified_base 46: mod_base = OTHER; note = Guanosine phosphorothiorate
  modified_base 47: mod_base = OTHER; note = 2'-fluorouridine
  modified_base 48: mod_base = OTHER; note = 2'-fluorouridine
  modified_base 51: mod_base = OTHER; note = 2'-Omethylguanosine phosphorothiorate
  modified_base 52: mod_base = OTHER; note = 2'-Omethylguanosine
  modified_base 53: mod_base = OTHER; note = 2'-Omethylguanosine
  modified_base 54: mod_base = OTHER; note = 2'-fluorouridine
  modified_base 57: mod_base = OTHER; note = 2'-Omethylguanosine
  modified_base 59: mod_base = OTHER; note = 2'-Omethylguanosine
  modified_base 70: mod_base = OTHER; note = 2'-Omethylguanosine
  modified_base 72: mod_base = OTHER; note = 2'-Omethylcytosine
  modified_base 73: mod_base = OTHER; note = 2'-fluoroguanosine phosphorothiorate

SEQ ID NO: 5298 - RNA, 76 nt, synthetic construct; identical to SEQ ID NO: 3318
  source 1..76: mol_type = other RNA
  modified_base 1: mod_base = OTHER; note = 2'-Omethylcytosine phosphorothiorate
  modified_base 2: mod_base = OTHER; note = 2'-Omethylcytosine
  modified_base 3: mod_base = OTHER; note = 2'-Omethyluridine
  modified_base 4: mod_base = OTHER; note = 2'-Omethyluridine
  modified_base 5: mod_base = OTHER; note = 2'-Omethylcytosine
  modified_base 6: mod_base = OTHER; note = 2'-Omethylguanosine
  modified_base 49: mod_base = OTHER; note = 2'-Omethylguanosine
  modified_base 50: mod_base = OTHER; note = 2'-Omethylcytosine
  modified_base 51: mod_base = OTHER; note = 2'-Omethyluridine
  modified_base 52: mod_base = OTHER; note = 2'-Omethylguanosine
  modified_base 53: mod_base = OTHER; note = 2'-Omethylguanosine
  modified_base 61: mod_base = OTHER; note = 2'-Omethylcytosine
  modified_base 62: mod_base = OTHER; note = 2'-Omethylcytosine
  modified_base 63: mod_base = OTHER; note = 2'-fluoroguanosine
  modified_base 64: mod_base = OTHER; note = 2'-Omethylguanosine
  modified_base 65: mod_base = OTHER; note = 2'-Omethylcytosine
  modified_base 66: mod_base = OTHER; note = 2'-Omethyluridine
  modified_base 67: mod_base = OTHER; note = 2'-Omethylcytosine
  modified_base 68: mod_base = OTHER; note = 2'-Omethylguanosine
  modified_base 69: mod_base = OTHER; note = 2'-Omethyladenosine
  modified_base 71: mod_base = OTHER; note = 2'-Omethylguanosine
  modified_base 72: mod_base = OTHER; note = 2'-Omethylguanosine

SEQ ID NO: 5299 - RNA, 76 nt, synthetic construct; identical to SEQ ID NO: 3419
  source 1..76: mol_type = other RNA
  modified_base 1: mod_base = OTHER; note = 2'-Omethylguanosine phosphorothiorate
  modified_base 2: mod_base = OTHER; note = 2'-Omethylguanosine phosphorothiorate
  modified_base 3: mod_base = OTHER; note = 2'-Omethylcytosine
  modified_base 4: mod_base = OTHER; note = 2'-Omethyluridine
  modified_base 5: mod_base = OTHER; note = 2'-Omethylcytosine
  modified_base 6: mod_base = OTHER; note = 2'-Omethylcytosine
  modified_base 16: mod_base = OTHER; note = 2'-Omethyluridine
  modified_base 17: mod_base = OTHER; note = 2'-Omethylguanosine
  modified_base 18: mod_base = OTHER; note = 2'-Omethylguanosine
  modified_base 20: mod_base = OTHER; note = 2'-Omethyluridine
  modified_base 25: mod_base = OTHER; note = 2'-Omethylcytosine
  modified_base 33: mod_base = OTHER; note = 2'-fluorouridine
  modified_base 35: mod_base = OTHER; note = Cytosine phosphorothiorate
  modified_base 37: mod_base = OTHER; note = Adenosine phosphorothiorate
  modified_base 38: mod_base = OTHER; note = Adenosine phosphorothiorate
  modified_base 41: mod_base = OTHER; note = 2'-Omethylguanosine
  modified_base 44: mod_base = OTHER; note = 2'-Omethyladenosine
  modified_base 45: mod_base = OTHER; note = 2'-Omethylguanosine
  modified_base 46: mod_base = OTHER; note = 2'-fluoroguanosine
  modified_base 47: mod_base = OTHER; note = 2'-fluorouridine
  modified_base 48: mod_base = OTHER; note = 2'-fluorouridine
  modified_base 56: mod_base = OTHER; note = 2'-Omethylcytosine
  modified_base 59: mod_base = OTHER; note = 2'-Omethylguanosine
  modified_base 73: mod_base = OTHER; note = 2'-Omethylguanosine

SEQ ID NO: 5300 - RNA, 74 nt, synthetic construct; identical to SEQ ID NO: 3293
  source 1..74: mol_type = other RNA
  modified_base 1: mod_base = OTHER; note = 2'-Omethyladenosine phosphorothiorate
  modified_base 4: mod_base = OTHER; note = Uridine phosphorothiorate
  modified_base 35: mod_base = OTHER; note = 2'-fluoroguanosine
  modified_base 43: mod_base = OTHER; note = Guanosine phosphorothiorate
  modified_base 48: mod_base = OTHER; note = 2'-fluorocytosine
  modified_base 53: mod_base = OTHER; note = 2'-fluorouridine
  modified_base 73: mod_base = OTHER; note = Cytosine phosphorothiorate
  modified_base 74: mod_base = OTHER; note = 2'-Omethyladenosine

SEQ ID NO: 5301 - RNA, 76 nt, synthetic construct; identical to SEQ ID NO: 625
  source 1..76: mol_type = other RNA
  modified_base 1: mod_base = OTHER; note = 2'-Omethylguanosine phosphorothiorate
  modified_base 2: mod_base = OTHER; note = 2'-Omethylguanosine
  modified_base 3: mod_base = OTHER; note = 2'-Omethylcytosine
  modified_base 4: mod_base = OTHER; note = 2'-Omethyluridine
  modified_base 5: mod_base = OTHER; note = 2'-Omethylcytosine
  modified_base 6: mod_base = OTHER; note = 2'-Omethylcytosine
  modified_base 17: mod_base = OTHER; note = 2'-Omethylguanosine
  modified_base 25: mod_base = OTHER; note = 2'-Omethylcytosine
  modified_base 33: mod_base = OTHER; note = 2'-fluorouridine
  modified_base 35: mod_base = OTHER; note = Cytosine phosphorothiorate
  modified_base 37: mod_base = OTHER; note = Adenosine phosphorothiorate
  modified_base 38: mod_base = OTHER; note = Adenosine phosphorothiorate
  modified_base 49: mod_base = OTHER; note = 2'-Omethylcytosine
  modified_base 50: mod_base = OTHER; note = 2'-Omethylcytosine
  modified_base 51: mod_base = OTHER; note = 2'-Omethylguanosine
  modified_base 52: mod_base = OTHER; note = 2'-Omethylguanosine
  modified_base 53: mod_base = OTHER; note = 2'-Omethylguanosine
  modified_base 56: mod_base = OTHER; note = 2'-Omethylcytosine
  modified_base 57: mod_base = OTHER; note = 2'-Omethylguanosine
  modified_base 61: mod_base = OTHER; note = 2'-Omethylcytosine
  modified_base 62: mod_base = OTHER; note = 2'-Omethylcytosine
  modified_base 63: mod_base = OTHER; note = 2'-fluorocytosine
  modified_base 64: mod_base = OTHER; note = 2'-Omethylguanosine
  modified_base 65: mod_base = OTHER; note = 2'-Omethylguanosine
  modified_base 66: mod_base = OTHER; note = 2'-Omethylcytosine
  modified_base 67: mod_base = OTHER; note = 2'-Omethylguanosine
  modified_base 68: mod_base = OTHER; note = 2'-Omethylguanosine
  modified_base 69: mod_base = OTHER; note = 2'-fluoroadenosine
  modified_base 71: mod_base = OTHER; note = 2'-Omethyluridine
  modified_base 73: mod_base = OTHER; note = 2'-Omethylguanosine
  modified_base 75: mod_base = OTHER; note = 2'-fluorocytosine phosphorothiorate

SEQ ID NO: 5302 - DNA, 76 bp, synthetic construct; identical to SEQ ID NO: 1924
  source 1..76: mol_type = other DNA
  modified_base 1: mod_base = OTHER; note = 2'-Omethylguanosine phosphorothiorate
  modified_base 2: mod_base = OTHER; note = 2'-Omethylguanosine
  modified_base 15: mod_base = OTHER; note = Adenosine phosphorothiorate
  modified_base 43: mod_base = OTHER; note = Adenosine phosphorothiorate
  modified_base 44: mod_base = OTHER; note = 2'-Omethyladenosine
  modified_base 49: mod_base = OTHER; note = 2'-fluorocytosine
  modified_base 62: mod_base = OTHER; note = Cytosine phosphorothiorate
  modified_base 63: mod_base = OTHER; note = 2'-O-(2-Methoxyethyl) 5-methylcytosine
  modified_base 73: mod_base = OTHER; note = 2'-O-(2-Methoxyethyl) guanosine phosphorothiorate
  misc_feature 1..37: note = RNA
  misc_feature 38: note = DNA
  misc_feature 39..76: note = RNA

SEQ ID NO: 5303 - RNA, 76 nt, synthetic construct; identical to SEQ ID NO: 3295
  source 1..76: mol_type = other RNA
  modified_base 1: mod_base = OTHER; note = 2'-Omethylcytosine
  modified_base 4: mod_base = OTHER; note = Uridine phosphorothiorate
  modified_base 5: mod_base = OTHER; note = 2'-Omethylcytosine phosphorothiorate
  modified_base 8: mod_base = OTHER; note = 2'-Omethyluridine
  modified_base 9: mod_base = OTHER; note = 2'-fluoroadenosine phosphorothiorate
  modified_base 26: mod_base = OTHER; note = 2'-fluoroguanosine phosphorothiorate
  modified_base 47: mod_base = OTHER; note = 2'-fluorouridine phosphorothiorate
  modified_base 60: mod_base = OTHER; note = 2'-fluorouridine

SEQ ID NO: 5304 - RNA, 74 nt, synthetic construct; identical to SEQ ID NO: 766
  source 1..74: mol_type = other RNA
  modified_base 1: mod_base = OTHER; note = 2'-Omethylguanosine phosphorothiorate
  modified_base 2: mod_base = OTHER; note = 2'-Omethylguanosine
  modified_base 25: mod_base = OTHER; note = 2'-fluorocytosine
  modified_base 73: mod_base = OTHER; note = 2'-Omethylguanosine

SEQ ID NO: 5305 - RNA, 76 nt, synthetic construct; identical to SEQ ID NO: 3289
  source 1..76: mol_type = other RNA
  modified_base 1: mod_base = OTHER; note = 2'-Omethylguanosine
  modified_base 2: mod_base = OTHER; note = 2'-Omethylcytosine
  modified_base 3: mod_base = OTHER; note = 2'-Omethylcytosine
  modified_base 4: mod_base = OTHER; note = 2'-Omethyluridine
  modified_base 5: mod_base = OTHER; note = 2'-Omethylguanosine
  modified_base 6: mod_base = OTHER; note = 2'-Omethylguanosine
  modified_base 49: mod_base = OTHER; note = 2'-Omethylcytosine
  modified_base 50: mod_base = OTHER; note = 2'-Omethyladenosine
  modified_base 51: mod_base = OTHER; note = 2'-Omethylguanosine
  modified_base 52: mod_base = OTHER; note = 2'-Omethylguanosine
  modified_base 53: mod_base = OTHER; note = 2'-Omethylguanosine
  modified_base 73: mod_base = OTHER; note = 2'-Omethylguanosine

SEQ ID NO: 5306 - RNA, 76 nt, synthetic construct; identical to SEQ ID NO: 625
  source 1..76: mol_type = other RNA
  modified_base 1: mod_base = OTHER; note = 2'-Omethylguanosine phosphorothiorate
  modified_base 2: mod_base = OTHER; note = 2'-Omethylguanosine
  modified_base 3: mod_base = OTHER; note = 2'-Omethylcytosine
  modified_base 4: mod_base = OTHER; note = 2'-Omethyluridine
  modified_base 5: mod_base = OTHER; note = 2'-Omethylcytosine
  modified_base 6: mod_base = OTHER; note = 2'-Omethylcytosine
  modified_base 16: mod_base = OTHER; note = 2'-Omethyluridine
  modified_base 17: mod_base = OTHER; note = 2'-Omethylguanosine
  modified_base 18: mod_base = OTHER; note = 2'-Omethylguanosine
  modified_base 20: mod_base = OTHER; note = 2'-Omethyluridine
  modified_base 25: mod_base = OTHER; note = 2'-Omethylcytosine
  modified_base 33: mod_base = OTHER; note = 2'-fluorouridine
  modified_base 35: mod_base = OTHER; note = Cytosine phosphorothiorate
  modified_base 37: mod_base = OTHER; note = Adenosine phosphorothiorate
  modified_base 38: mod_base = OTHER; note = Adenosine phosphorothiorate
  modified_base 41: mod_base = OTHER; note = 2'-fluorocytosine
  modified_base 42: mod_base = OTHER; note = 2'-Omethyladenosine
  modified_base 43: mod_base = OTHER; note = 2'-Omethyladenosine
  modified_base 44: mod_base = OTHER; note = 2'-fluoroadenosine
  modified_base 49: mod_base = OTHER; note = 2'-Omethylcytosine
  modified_base 50: mod_base = OTHER; note = 2'-Omethylcytosine
  modified_base 52: mod_base = OTHER; note = 2'-Omethylguanosine
  modified_base 54: mod_base = OTHER; note = 2'-Omethyluridine
  modified_base 55: mod_base = OTHER; note = Uridine phosphorothiorate
  modified_base 56: mod_base = OTHER; note = 2'-Omethylcytosine
  modified_base 57: mod_base = OTHER; note = 2'-fluoroguanosine
  modified_base 59: mod_base = OTHER; note = 2'-Omethylguanosine
  modified_base 61: mod_base = OTHER; note = 2'-Omethylcytosine
  modified_base 62: mod_base = OTHER; note = 2'-Omethylcytosine
  modified_base 63: mod_base = OTHER; note = 2'-fluorocytosine
  modified_base 64: mod_base = OTHER; note = 2'-Omethylguanosine
  modified_base 65: mod_base = OTHER; note = 2'-Omethylguanosine
  modified_base 73: mod_base = OTHER; note = 2'-Omethylguanosine

SEQ ID NO: 5307 - RNA, 85 nt, synthetic construct; identical to SEQ ID NO: 3310
  source 1..85: mol_type = other RNA

SEQ ID NO: 5308 - RNA, 85 nt, synthetic construct; identical to SEQ ID NO: 3297
  source 1..85: mol_type = other RNA
  modified_base 1: mod_base = OTHER; note = 2'-Omethylguanosine phosphorothiorate
  modified_base 2: mod_base = OTHER; note = 2'-Omethylcytosine phosphorothiorate
  modified_base 3: mod_base = OTHER; note = 2'-Omethyluridine
  modified_base 4: mod_base = OTHER; note = 2'-Omethylguanosine
  modified_base 5: mod_base = OTHER; note = 2'-Omethyluridine
  modified_base 6: mod_base = OTHER; note = 2'-Omethylguanosine
  modified_base 13: mod_base = OTHER; note = 2'-Omethylguanosine
  modified_base 16: mod_base = OTHER; note = 2'-Omethyluridine
  modified_base 17: mod_base = OTHER; note = 2'-Omethylguanosine
  modified_base 18: mod_base = OTHER; note = 2'-Omethylguanosine
  modified_base 20: mod_base = OTHER; note = 2'-Omethyluridine phosphorothiorate
  modified_base 25: mod_base = OTHER; note = 2'-Omethylcytosine
  modified_base 33: mod_base = OTHER; note = 2'-fluorouridine
  modified_base 35: mod_base = OTHER; note = Cytosine phosphorothiorate
  modified_base 37: mod_base = OTHER; note = Adenosine phosphorothiorate
  modified_base 38: mod_base = OTHER; note = Adenosine phosphorothiorate
  modified_base 41: mod_base = OTHER; note = 2'-fluorocytosine phosphorothiorate
  modified_base 42: mod_base = OTHER; note = 2'-Omethyladenosine
  modified_base 43: mod_base = OTHER; note = 2'-Omethyladenosine
  modified_base 44: mod_base = OTHER; note = 2'-fluorouridine
  modified_base 56: mod_base = OTHER; note = 2'-fluoroguanosine
  modified_base 57: mod_base = OTHER; note = 2'-fluorocytosine
  modified_base 65: mod_base = OTHER; note = 2'-Omethylcytosine
  modified_base 68: mod_base = OTHER; note = 2'-Omethyladenosine
  modified_base 70: mod_base = OTHER; note = 2'-Omethylcytosine
  modified_base 71: mod_base = OTHER; note = 2'-Omethylcytosine
  modified_base 72: mod_base = OTHER; note = 2'-fluorouridine
  modified_base 73: mod_base = OTHER; note = 2'-Omethylguanosine
  modified_base 74: mod_base = OTHER; note = 2'-Omethylcytosine
  modified_base 75: mod_base = OTHER; note = 2'-Omethyluridine
  modified_base 76: mod_base = OTHER; note = 2'-Omethylcytosine
  modified_base 77: mod_base = OTHER; note = 2'-Omethyladenosine
  modified_base 80: mod_base = OTHER; note = 2'-Omethylguanosine
  modified_base 82: mod_base = OTHER; note = 2'-Omethylguanosine

SEQ ID NO: 5309 - RNA, 85 nt, synthetic construct; identical to SEQ ID NO: 3286
  source 1..85: mol_type = other RNA
  modified_base 1: mod_base = OTHER; note = 2'-Omethylcytosine
  modified_base 12: mod_base = OTHER; note = Guanosine phosphorothiorate
  modified_base 17: mod_base = OTHER; note = 2'-Omethylguanosine
  modified_base 26: mod_base = OTHER; note = Uridine phosphorothiorate
  modified_base 30: mod_base = OTHER; note = 2'-fluoroadenosine
  modified_base 34: mod_base = OTHER; note = 2'-fluorouridine
  modified_base 39: mod_base = OTHER; note = Cytosine phosphorothiorate
  modified_base 45: mod_base = OTHER; note = 2'-fluoroguanosine phosphorothiorate
  modified_base 48: mod_base = OTHER; note = Adenosine phosphorothiorate
  modified_base 56: mod_base = OTHER; note = 2'-fluoroguanosine
  modified_base 57: mod_base = OTHER; note = 2'-Omethylcytosine
  modified_base 58: mod_base = OTHER; note = 2'-Omethylguanosine
  modified_base 60: mod_base = OTHER; note = 2'-fluoroguanosine phosphorothiorate
  modified_base 65: mod_base = OTHER; note = Cytosine phosphorothiorate
  modified_base 72: mod_base = OTHER; note = 2'-fluorocytosine
  modified_base 76: mod_base = OTHER; note = 2'-fluorocytosine phosphorothiorate
  modified_base 79: mod_base = OTHER; note = 2'-Omethylguanosine
  modified_base 84: mod_base = OTHER; note = Cytosine phosphorothiorate
  modified_base 85: mod_base = OTHER; note = 2'-Omethyladenosine

SEQ ID NO: 5310 - RNA, 85 nt, synthetic construct; identical to SEQ ID NO: 3297
  source 1..85: mol_type = other RNA
  modified_base 74: mod_base = OTHER; note = 2'-Omethylcytosine
  modified_base 82: mod_base = OTHER; note = 2'-Omethylguanosine

SEQ ID NO: 5311 - RNA, 76 nt, synthetic construct; identical to SEQ ID NO: 3318
  source 1..76: mol_type = other RNA
  modified_base 1: mod_base = OTHER; note = 2'-Omethylcytosine phosphorothiorate
  modified_base 2: mod_base = OTHER; note = 2'-Omethylcytosine phosphorothiorate
  modified_base 3: mod_base = OTHER; note = 2'-Omethyluridine
  modified_base 4: mod_base = OTHER; note = 2'-Omethyluridine
  modified_base 5: mod_base = OTHER; note = 2'-Omethylcytosine
  modified_base 6: mod_base = OTHER; note = 2'-Omethylguanosine
  modified_base 16: mod_base = OTHER; note = 2'-Omethyluridine
  modified_base 18: mod_base = OTHER; note = 2'-Omethylguanosine
  modified_base 19: mod_base = OTHER; note = 2'-Omethylguanosine
  modified_base 22: mod_base = OTHER; note = 2'-Omethylguanosine
  modified_base 24: mod_base = OTHER; note = 2'-Omethylguanosine
  modified_base 25: mod_base = OTHER; note = 2'-Omethylcytosine
  modified_base 33: mod_base = OTHER; note = 2'-fluorouridine
  modified_base 35: mod_base = OTHER; note = Uridine phosphorothiorate
  modified_base 37: mod_base = OTHER; note = Guanosine phosphorothiorate
  modified_base 38: mod_base = OTHER; note = Adenosine phosphorothiorate
  modified_base 44: mod_base = OTHER; note = 2'-Omethyladenosine
  modified_base 45: mod_base = OTHER; note = 2'-Omethylguanosine
  modified_base 46: mod_base = OTHER; note = 2'-fluoroguanosine
  modified_base 47: mod_base = OTHER; note = 2'-fluorouridine
  modified_base 48: mod_base = OTHER; note = 2'-fluorocytosine
  modified_base 49: mod_base = OTHER; note = 2'-Omethylguanosine
  modified_base 50: mod_base = OTHER; note = 2'-Omethylcytosine
  modified_base 51: mod_base = OTHER; note = 2'-Omethyluridine
  modified_base 52: mod_base = OTHER; note = 2'-Omethylguanosine
  modified_base 53: mod_base = OTHER; note = 2'-Omethylguanosine
  modified_base 54: mod_base = OTHER; note = 2'-Omethyluridine
  modified_base 56: mod_base = OTHER; note = 2'-Omethylcytosine
  modified_base 59: mod_base = OTHER; note = 2'-Omethyladenosine
  modified_base 61: mod_base = OTHER; note = 2'-Omethylcytosine
  modified_base 62: mod_base = OTHER; note = 2'-Omethylcytosine
  modified_base 63: mod_base = OTHER; note = 2'-fluoroguanosine
  modified_base 64: mod_base = OTHER; note = 2'-Omethylguanosine
  modified_base 65: mod_base = OTHER; note = 2'-Omethylcytosine
  modified_base 66: mod_base = OTHER; note = 2'-Omethyluridine
  modified_base 67: mod_base = OTHER; note = 2'-Omethylcytosine
  modified_base 68: mod_base = OTHER; note = 2'-Omethylguanosine
  modified_base 73: mod_base = OTHER; note = 2'-Omethyladenosine

SEQ ID NO: 5312 - RNA, 76 nt, synthetic construct; identical to SEQ ID NO: 625
  source 1..76: mol_type = other RNA
  modified_base 1: mod_base = OTHER; note = 2'-Omethylguanosine
  modified_base 2: mod_base = OTHER; note = 2'-Omethylguanosine
  modified_base 33: mod_base = OTHER; note = 2'-fluorouridine
  modified_base 35: mod_base = OTHER; note = Cytosine phosphorothiorate
  modified_base 37: mod_base = OTHER; note = Adenosine phosphorothiorate
  modified_base 52: mod_base = OTHER; note = 2'-Omethylguanosine
  modified_base 57: mod_base = OTHER; note = 2'-Omethylguanosine
  modified_base 62: mod_base = OTHER; note = 2'-Omethylcytosine
  modified_base 73: mod_base = OTHER; note = 2'-Omethylguanosine
  modified_base 75: mod_base = OTHER; note = 2'-fluorocytosine phosphorothiorate

SEQ ID NO: 5313 - RNA, 85 nt, synthetic construct; identical to SEQ ID NO: 3297
  source 1..85: mol_type = other RNA
  modified_base 1: mod_base = OTHER; note = 2'-Omethylguanosine phosphorothiorate
  modified_base 2: mod_base = OTHER; note = 2'-Omethylcytosine phosphorothiorate
  modified_base 3: mod_base = OTHER; note = 2'-Omethyluridine
  modified_base 4: mod_base = OTHER; note = 2'-Omethylguanosine
  modified_base 5: mod_base = OTHER; note = 2'-Omethyluridine
  modified_base 6: mod_base = OTHER; note = 2'-Omethylguanosine
  modified_base 10: mod_base = OTHER; note = 2'-Omethylguanosine
  modified_base 11: mod_base = OTHER; note = 2'-Omethylcytosine
  modified_base 12: mod_base = OTHER; note = 2'-Omethylcytosine
  modified_base 13: mod_base = OTHER; note = 2'-Omethylguanosine
  modified_base 17: mod_base = OTHER; note = 2'-Omethylguanosine
  modified_base 18: mod_base = OTHER; note = 2'-Omethylguanosine
  modified_base 22: mod_base = OTHER; note = 2'-Omethyladenosine
  modified_base 23: mod_base = OTHER; note = 2'-Omethylguanosine
  modified_base 24: mod_base = OTHER; note = 2'-Omethylguanosine
  modified_base 25: mod_base = OTHER; note = 2'-Omethylcytosine
  modified_base 33: mod_base = OTHER; note = 2'-fluorouridine
  modified_base 35: mod_base = OTHER; note = Cytosine phosphorothiorate
  modified_base 37: mod_base = OTHER; note = Adenosine phosphorothiorate
  modified_base 38: mod_base = OTHER; note = Adenosine phosphorothiorate
  modified_base 41: mod_base = OTHER; note = 2'-fluorocytosine
  modified_base 42: mod_base = OTHER; note = 2'-Omethyladenosine
  modified_base 43: mod_base = OTHER; note = 2'-Omethyladenosine
  modified_base 44: mod_base = OTHER; note = 2'-fluorouridine
  modified_base 58: mod_base = OTHER; note = 2'-Omethylguanosine
  modified_base 59: mod_base = OTHER; note = 2'-Omethylcytosine
  modified_base 60: mod_base = OTHER; note = 2'-Omethyladenosine
  modified_base 61: mod_base = OTHER; note = 2'-Omethylguanosine
  modified_base 62: mod_base = OTHER; note = 2'-Omethylguanosine
  modified_base 63: mod_base = OTHER; note = Uridine phosphorothiorate
  modified_base 64: mod_base = OTHER; note = Uridine phosphorothiorate
  modified_base 70: mod_base = OTHER; note = 2'-Omethylcytosine
  modified_base 71: mod_base = OTHER; note = 2'-Omethylcytosine
  modified_base 72: mod_base = OTHER; note = 2'-fluorouridine
  modified_base 73: mod_base = OTHER; note = 2'-Omethylguanosine
  modified_base 74: mod_base = OTHER; note = 2'-Omethylcytosine
  modified_base 75: mod_base = OTHER; note = 2'-Omethyluridine
  modified_base 76: mod_base = OTHER; note = 2'-Omethylcytosine
  modified_base 77: mod_base = OTHER; note = 2'-Omethyladenosine
  modified_base 82: mod_base = OTHER; note = 2'-Omethylguanosine

SEQ ID NO: 5314 - RNA, 76 nt, synthetic construct; identical to SEQ ID NO: 3289
  source 1..76: mol_type = other RNA
  modified_base 1: mod_base = OTHER; note = 2'-Omethylguanosine phosphorothiorate
  modified_base 2: mod_base = OTHER; note = 2'-Omethylcytosine
  modified_base 46: mod_base = OTHER; note = 2'-fluoroguanosine
  modified_base 59: mod_base = OTHER; note = 2'-Omethylguanosine
  modified_base 75: mod_base = OTHER; note = Cytosine phosphorothiorate
  modified_base 76: mod_base = OTHER; note = 2'-Omethyladenosine

SEQ ID NO: 5315 - RNA, 76 nt, synthetic construct; identical to SEQ ID NO: 3325
  source 1..76: mol_type = other RNA
  modified_base 1: mod_base = OTHER; note = 2'-Omethyluridine phosphorothiorate
  modified_base 2: mod_base = OTHER; note = 2'-Omethyladenosine phosphorothiorate
  modified_base 3: mod_base = OTHER; note = 2'-Omethylcytosine
  modified_base 4: mod_base = OTHER; note = 2'-Omethyladenosine
  modified_base 5: mod_base = OTHER; note = 2'-Omethylcytosine
  modified_base 6: mod_base = OTHER; note = 2'-Omethylcytosine
  modified_base 16: mod_base = OTHER; note = 2'-Omethyluridine
  modified_base 17: mod_base = OTHER; note = 2'-Omethylguanosine
  modified_base 18: mod_base = OTHER; note = 2'-Omethylguanosine
  modified_base 20: mod_base = OTHER; note = 2'-Omethyluridine
  modified_base 25: mod_base = OTHER; note = 2'-Omethylcytosine
  modified_base 33: mod_base = OTHER; note = 2'-fluorouridine
  modified_base 35: mod_base = OTHER; note = Cytosine phosphorothiorate
  modified_base 37: mod_base = OTHER; note = Adenosine phosphorothiorate
  modified_base 38: mod_base = OTHER; note = Adenosine phosphorothiorate
  modified_base 41: mod_base = OTHER; note = 2'-Omethylcytosine
  modified_base 44: mod_base = OTHER; note = 2'-Omethyladenosine
  modified_base 45: mod_base = OTHER; note = 2'-Omethylguanosine
  modified_base 46: mod_base = OTHER; note = 2'-fluoroguanosine
  modified_base 47: mod_base = OTHER; note = 2'-fluorouridine
  modified_base 48: mod_base = OTHER; note = 2'-fluorouridine
  modified_base 49: mod_base = OTHER; note = 2'-Omethylcytosine
  modified_base 50: mod_base = OTHER; note = 2'-Omethylcytosine
  modified_base 51: mod_base = OTHER; note = 2'-Omethylguanosine
  modified_base 52: mod_base = OTHER; note = 2'-Omethylguanosine
  modified_base 53: mod_base = OTHER; note = 2'-Omethylguanosine
  modified_base 54: mod_base = OTHER; note = 2'-Omethyluridine
  modified_base 56: mod_base = OTHER; note = 2'-Omethylcytosine
  modified_base 59: mod_base = OTHER; note = 2'-Omethylguanosine
  modified_base 73: mod_base = OTHER; note = 2'-Omethylguanosine

SEQ ID NO: 5316 - RNA, 76 nt, synthetic construct; identical to SEQ ID NO: 625
  source 1..76: mol_type = other RNA
  modified_base 5: mod_base = OTHER; note = 2'-fluorocytosine
  modified_base 6: mod_base = OTHER; note = 2'-fluorocytosine
  modified_base 7: mod_base = OTHER; note = Guanosine phosphorothiorate
  modified_base 10: mod_base = OTHER; note = Guanosine phosphorothiorate
  modified_base 13: mod_base = OTHER; note = 2'-fluorocytosine
  modified_base 14: mod_base = OTHER; note = 2'-Omethyladenosine
  modified_base 15: mod_base = OTHER; note = 2'-fluoroadenosine
  modified_base 17: mod_base = OTHER; note = Guanosine phosphorothiorate
  modified_base 18: mod_base = OTHER; note = 2'-fluoroguanosine phosphorothiorate
  modified_base 20: mod_base = OTHER; note = 2'-fluorouridine
  modified_base 25: mod_base = OTHER; note = 2'-Omethylcytosine phosphorothiorate
  modified_base 26: mod_base = OTHER; note = 2'-fluoroadenosine
  modified_base 31: mod_base = OTHER; note = 2'-Omethyladenosine
  modified_base 40: mod_base = OTHER; note = Uridine phosphorothiorate
  modified_base 41: mod_base = OTHER; note = 2'-Omethylcytosine
  modified_base 44: mod_base = OTHER; note = 2'-fluoroadenosine
  modified_base 45: mod_base = OTHER; note = 2'-Omethylguanosine
  modified_base 46: mod_base = OTHER; note = 2'-fluoroguanosine
  modified_base 47: mod_base = OTHER; note = 2'-Omethyluridine
  modified_base 48: mod_base = OTHER; note = 2'-Omethyluridine
  modified_base 49: mod_base = OTHER; note = 2'-fluorocytosine
  modified_base 52: mod_base = OTHER; note = Guanosine phosphorothiorate
  modified_base 53: mod_base = OTHER; note = 2'-fluoroguanosine
  modified_base 54: mod_base = OTHER; note = 2'-Omethyluridine
  modified_base 56: mod_base = OTHER; note = 2'-fluorocytosine
  modified_base 57: mod_base = OTHER; note = 2'-fluoroguanosine phosphorothiorate
  modified_base 58: mod_base = OTHER; note = 2'-fluoroadenosine
  modified_base 60: mod_base = OTHER; note = 2'-Omethyluridine
  modified_base 61: mod_base = OTHER; note = 2'-fluorocytosine
  modified_base 63: mod_base = OTHER; note = Cytosine phosphorothiorate
  modified_base 64: mod_base = OTHER; note = 2'-fluoroguanosine phosphorothiorate
  modified_base 66: mod_base = OTHER; note = Cytosine phosphorothiorate
  modified_base 68: mod_base = OTHER; note = 2'-Omethylguanosine
  modified_base 72: mod_base = OTHER; note = Cytosine phosphorothiorate
  modified_base 73: mod_base = OTHER; note = 2'-Omethylguanosine
  modified_base 74: mod_base = OTHER; note = 2'-fluorocytosine
  modified_base 76: mod_base = OTHER; note = 2'-fluoroadenosine

SEQ ID NO: 5317 - RNA, 76 nt, synthetic construct; identical to SEQ ID NO: 625
  source 1..76: mol_type = other RNA
  modified_base 4: mod_base = OTHER; note = 2'-fluorouridine phosphorothiorate
  modified_base 5: mod_base = OTHER; note = 2'-fluorocytosine
  modified_base 8: mod_base = OTHER; note = Uridine phosphorothiorate
  modified_base 10: mod_base = OTHER; note = 2'-fluoroguanosine
  modified_base 12: mod_base = OTHER; note = 2'-Omethylguanosine phosphorothiorate
  modified_base 15: mod_base = OTHER; note = 2'-Omethyladenosine
  modified_base 17: mod_base = OTHER; note = 2'-Omethylguanosine
  modified_base 18: mod_base = OTHER; note = 2'-Omethylguanosine
  modified_base 20: mod_base = OTHER; note = Uridine phosphorothiorate
  modified_base 22: mod_base = OTHER; note = 2'-fluoroguanosine
  modified_base 23: mod_base = OTHER; note = Cytosine phosphorothiorate
  modified_base 24: mod_base = OTHER; note = 2'-fluoroguanosine
  modified_base 25: mod_base = OTHER; note = Cytosine phosphorothiorate
  modified_base 26: mod_base = OTHER; note = 2'-Omethyladenosine phosphorothiorate
  modified_base 29: mod_base = OTHER; note = 2'-Omethylguanosine
  modified_base 38: mod_base = OTHER; note = Adenosine phosphorothiorate
  modified_base 39: mod_base = OTHER; note = 2'-Omethyluridine
  modified_base 40: mod_base = OTHER; note = 2'-Omethyluridine phosphorothiorate
  modified_base 41: mod_base = OTHER; note = 2'-Omethylcytosine
  modified_base 44: mod_base = OTHER; note = 2'-Omethyladenosine
  modified_base 47: mod_base = OTHER; note = 2'-fluorouridine
  modified_base 51: mod_base = OTHER; note = Guanosine phosphorothiorate
  modified_base 52: mod_base = OTHER; note = Guanosine phosphorothiorate
  modified_base 53: mod_base = OTHER; note = 2'-Omethylguanosine
  modified_base 56: mod_base = OTHER; note = 2'-Omethylcytosine
  modified_base 60: mod_base = OTHER; note = 2'-Omethyluridine phosphorothiorate
  modified_base 65: mod_base = OTHER; note = 2'-Omethylguanosine phosphorothiorate
  modified_base 69: mod_base = OTHER; note = 2'-fluoroadenosine phosphorothiorate
  modified_base 70: mod_base = OTHER; note = 2'-fluoroguanosine
  modified_base 71: mod_base = OTHER; note = Uridine phosphorothiorate
  modified_base 72: mod_base = OTHER; note = 2'-Omethylcytosine phosphorothiorate
  modified_base 73: mod_base = OTHER; note = 2'-Omethylguanosine phosphorothiorate
  modified_base 74: mod_base = OTHER; note = 2'-Omethylcytosine

SEQ ID NO: 5318 - RNA, 76 nt, synthetic construct; identical to SEQ ID NO: 3332
  source 1..76: mol_type = other RNA
  modified_base 1: mod_base = OTHER; note = 2'-Omethylguanosine phosphorothiorate
  modified_base 2: mod_base = OTHER; note = 2'-Omethylguanosine
  modified_base 3: mod_base = OTHER; note = 2'-Omethylcytosine
  modified_base 4: mod_base = OTHER; note = 2'-Omethylcytosine
  modified_base 5: mod_base = OTHER; note = 2'-Omethylcytosine
  modified_base 6: mod_base = OTHER; note = 2'-Omethylcytosine
  modified_base 49: mod_base = OTHER; note = 2'-Omethylguanosine
  modified_base 50: mod_base = OTHER; note = 2'-Omethylcytosine
  modified_base 51: mod_base = OTHER; note = 2'-Omethylguanosine
  modified_base 52: mod_base = OTHER; note = 2'-Omethylguanosine
  modified_base 53: mod_base = OTHER; note = 2'-Omethylguanosine
  modified_base 61: mod_base = OTHER; note = 2'-Omethylcytosine
  modified_base 62: mod_base = OTHER; note = 2'-Omethylcytosine
  modified_base 63: mod_base = OTHER; note = 2'-fluorocytosine
  modified_base 64: mod_base = OTHER; note = 2'-Omethylguanosine
  modified_base 65: mod_base = OTHER; note = 2'-Omethylcytosine
  modified_base 66: mod_base = OTHER; note = 2'-Omethylcytosine
  modified_base 67: mod_base = OTHER; note = 2'-Omethylguanosine
  modified_base 68: mod_base = OTHER; note = 2'-Omethylguanosine
  modified_base 69: mod_base = OTHER; note = 2'-Omethylguanosine
  modified_base 71: mod_base = OTHER; note = 2'-Omethyluridine
  modified_base 72: mod_base = OTHER; note = 2'-Omethylcytosine

SEQ ID NO: 5319 - RNA, 85 nt, synthetic construct
  source 1..85: mol_type = other RNA
gtagtcgtggccgagtggttaaggcgatggacttcaaatccattggggtttccccgcgcaggttcgagtcctgccggctacgcca

SEQ ID NO: 5320 - RNA, 76 nt, synthetic construct; identical to SEQ ID NO: 625
  source 1..76: mol_type = other RNA
  modified_base 1: mod_base = OTHER; note = 2'-Omethylguanosine
  modified_base 4: mod_base = OTHER; note = 2'-fluorouridine
  modified_base 6: mod_base = OTHER; note = 2'-Omethylcytosine
  modified_base 8: mod_base = OTHER; note = Uridine phosphorothiorate
  modified_base 10: mod_base = OTHER; note = 2'-fluoroguanosine phosphorothiorate
  modified_base 11: mod_base = OTHER; note = Cytosine phosphorothiorate
  modified_base 16: mod_base = OTHER; note = 2'-Omethyluridine
  modified_base 18: mod_base = OTHER; note = 2'-Omethylguanosine phosphorothiorate
  modified_base 19: mod_base = OTHER; note = Adenosine phosphorothiorate
  modified_base 20: mod_base = OTHER; note = 2'-fluorouridine
  modified_base 21: mod_base = OTHER; note = Adenosine phosphorothiorate
  modified_base 22: mod_base = OTHER; note = 2'-Omethylguanosine phosphorothiorate
  modified_base 24: mod_base = OTHER; note = 2'-Omethylguanosine
  modified_base 27: mod_base = OTHER; note = 2'-fluorouridine
  modified_base 28: mod_base = OTHER; note = 2'-fluorouridine
  modified_base 29: mod_base = OTHER; note = 2'-Omethylguanosine phosphorothiorate
  modified_base 30: mod_base = OTHER; note = 2'-fluoroguanosine
  modified_base 33: mod_base = OTHER; note = 2'-fluorouridine
  modified_base 37: mod_base = OTHER; note = Adenosine phosphorothiorate
  modified_base 38: mod_base = OTHER; note = 2'-Omethyladenosine
  modified_base 39: mod_base = OTHER; note = 2'-fluorouridine
  modified_base 41: mod_base = OTHER; note = 2'-fluorocytosine
  modified_base 42: mod_base = OTHER; note = 2'-Omethyladenosine
  modified_base 45: mod_base = OTHER; note = 2'-fluoroguanosine
  modified_base 47: mod_base = OTHER; note = 2'-fluorouridine
  modified_base 48: mod_base = OTHER; note = 2'-Omethyluridine
  modified_base 52: mod_base = OTHER; note = Guanosine phosphorothiorate
  modified_base 53: mod_base = OTHER; note = 2'-fluoroguanosine
  modified_base 56: mod_base = OTHER; note = Cytosine phosphorothiorate
  modified_base 57: mod_base = OTHER; note = 2'-Omethylguanosine phosphorothiorate
  modified_base 58: mod_base = OTHER; note = 2'-fluoroadenosine
  modified_base 62: mod_base = OTHER; note = Cytosine phosphorothiorate
  modified_base 63: mod_base = OTHER; note = Cytosine phosphorothiorate
  modified_base 64: mod_base = OTHER; note = 2'-fluoroguanosine
  modified_base 67: mod_base = OTHER; note = 2'-fluoroguanosine
  modified_base 70: mod_base = OTHER; note = Guanosine phosphorothiorate
  modified_base 71: mod_base = OTHER; note = 2'-fluorouridine
  modified_base 72: mod_base = OTHER; note = Cytosine phosphorothiorate
  modified_base 73: mod_base = OTHER; note = 2'-fluoroguanosine phosphorothiorate
  modified_base 74: mod_base = OTHER; note = 2'-fluorocytosine
  modified_base 75: mod_base = OTHER; note = 2'-Omethylcytosine

SEQ ID NO: 5321 - RNA, 76 nt, synthetic construct; identical to SEQ ID NO: 625
  source 1..76: mol_type = other RNA
  modified_base 3: mod_base = OTHER; note = Cytosine phosphorothiorate
  modified_base 5: mod_base = OTHER; note = 2'-fluorocytosine
  modified_base 10: mod_base = OTHER; note = 2'-fluoroguanosine phosphorothiorate
  modified_base 11: mod_base = OTHER; note = 2'-fluorocytosine phosphorothiorate
  modified_base 12: mod_base = OTHER; note = Guanosine phosphorothiorate
  modified_base 13: mod_base = OTHER; note = 2'-Omethylcytosine
  modified_base 14: mod_base = OTHER; note = 2'-fluoroadenosine
  modified_base 15: mod_base = OTHER; note = 2'-fluoroadenosine
  modified_base 18: mod_base = OTHER; note = 2'-Omethylguanosine
  modified_base 20: mod_base = OTHER; note = Uridine phosphorothiorate
  modified_base 24: mod_base = OTHER; note = Guanosine phosphorothiorate
  modified_base 25: mod_base = OTHER; note = 2'-fluorocytosine
  modified_base 26: mod_base = OTHER; note = 2'-Omethyladenosine
  modified_base 30: mod_base = OTHER; note = 2'-fluoroguanosine
  modified_base 31: mod_base = OTHER; note = 2'-fluoroadenosine
  modified_base 34: mod_base = OTHER; note = 2'-Omethyluridine
  modified_base 40: mod_base = OTHER; note = 2'-Omethyluridine
  modified_base 41: mod_base = OTHER; note = 2'-fluorocytosine
  modified_base 42: mod_base = OTHER; note = 2'-fluoroadenosine
  modified_base 47: mod_base = OTHER; note = 2'-fluorouridine phosphorothiorate
  modified_base 48: mod_base = OTHER; note = 2'-Omethyluridine
  modified_base 49: mod_base = OTHER; note = 2'-Omethylcytosine
  modified_base 52: mod_base = OTHER; note = 2'-Omethylguanosine
  modified_base 53: mod_base = OTHER; note = 2'-Omethylguanosine
  modified_base 54: mod_base = OTHER; note = 2'-Omethyluridine
  modified_base 58: mod_base = OTHER; note = Adenosine phosphorothiorate
  modified_base 61: mod_base = OTHER; note = Cytosine phosphorothiorate
  modified_base 62: mod_base = OTHER; note = Cytosine phosphorothiorate
  modified_base 64: mod_base = OTHER; note = 2'-fluoroguanosine
  modified_base 65: mod_base = OTHER; note = 2'-fluoroguanosine
  modified_base 66: mod_base = OTHER; note = 2'-Omethylcytosine
  modified_base 68: mod_base = OTHER; note = 2'-Omethylguanosine
  modified_base 71: mod_base = OTHER; note = 2'-fluorouridine
  modified_base 76: mod_base = OTHER; note = 2'-fluoroadenosine

SEQ ID NO: 5322 - RNA, 76 nt, synthetic construct; identical to SEQ ID NO: 3318
  source 1..76: mol_type = other RNA
  modified_base 1: mod_base = OTHER; note = 2'-Omethylcytosine
  modified_base 16: mod_base = OTHER; note = 2'-Omethyluridine

SEQ ID NO: 5323 - RNA, 75 nt, synthetic construct; identical to SEQ ID NO: 3311
  source 1..75: mol_type = other RNA
  modified_base 1: mod_base = OTHER; note = 2'-Omethylguanosine phosphorothiorate
  modified_base 3: mod_base = OTHER; note = 2'-fluorouridine phosphorothiorate
  modified_base 13: mod_base = OTHER; note = 2'-fluorouridine
  modified_base 17: mod_base = OTHER; note = 2'-fluoroguanosine phosphorothiorate
  modified_base 18: mod_base = OTHER; note = 2'-Omethylguanosine
  modified_base 21: mod_base = OTHER; note = 2'-fluoroadenosine
  modified_base 31: mod_base = OTHER; note = 2'-fluoroadenosine
  modified_base 40: mod_base = OTHER; note = 2'-fluorocytosine
  modified_base 49: mod_base = OTHER; note = 2'-fluorocytosine
  modified_base 61: mod_base = OTHER; note = 2'-fluorouridine
  modified_base 64: mod_base = OTHER; note = 2'-fluoroguanosine phosphorothiorate
  modified_base 70: mod_base = OTHER; note = Cytosine phosphorothiorate
  modified_base 71: mod_base = OTHER; note = 2'-fluorocytosine

SEQ ID NO: 5324 - RNA, 76 nt, synthetic construct; identical to SEQ ID NO: 625
  source 1..76: mol_type = other RNA
  modified_base 1: mod_base = OTHER; note = 2'-Omethylguanosine phosphorothiorate
  modified_base 2: mod_base = OTHER; note = 2'-Omethylguanosine
  modified_base 3: mod_base = OTHER; note = 2'-Omethylcytosine
  modified_base 4: mod_base = OTHER; note = 2'-Omethyluridine
  modified_base 5: mod_base = OTHER; note = 2'-Omethylcytosine
  modified_base 6: mod_base = OTHER; note = 2'-Omethylcytosine
  modified_base 10: mod_base = OTHER; note = 2'-Omethylguanosine
  modified_base 11: mod_base = OTHER; note = 2'-Omethylcytosine
  modified_base 12: mod_base = OTHER; note = 2'-Omethylguanosine
  modified_base 13: mod_base = OTHER; note = 2'-Omethylcytosine
  modified_base 14: mod_base = OTHER; note = 2'-Omethyladenosine
  modified_base 15: mod_base = OTHER; note = 2'-Omethyladenosine
  modified_base 16: mod_base = OTHER; note = 2'-Omethyluridine
  modified_base 17: mod_base = OTHER; note = 2'-Omethylguanosine
  modified_base 18: mod_base = OTHER; note = 2'-Omethylguanosine
  modified_base 19: mod_base = OTHER; note = 2'-Omethyladenosine
  modified_base 20: mod_base = OTHER; note = 2'-Omethyluridine
  modified_base 22: mod_base = OTHER; note = 2'-Omethylguanosine
  modified_base 23: mod_base = OTHER; note = 2'-Omethylcytosine
  modified_base 24: mod_base = OTHER; note = 2'-Omethylguanosine
  modified_base 25: mod_base = OTHER; note = 2'-Omethylcytosine
  modified_base 40: mod_base = OTHER; note = 2'-fluorouridine
  modified_base 41: mod_base = OTHER; note = 2'-fluorocytosine
  modified_base 42: mod_base = OTHER; note = 2'-fluoroadenosine
  modified_base 43: mod_base = OTHER; note = 2'-fluoroadenosine
  modified_base 44: mod_base = OTHER; note = 2'-Omethyladenosine
  modified_base 45: mod_base = OTHER; note = 2'-Omethylguanosine
  modified_base 46: mod_base = OTHER; note = 2'-Omethylguanosine
  modified_base 49: mod_base = OTHER; note = 2'-Omethylcytosine
  modified_base 50: mod_base = OTHER; note = 2'-Omethylcytosine
  modified_base 51: mod_base = OTHER; note = 2'-Omethylguanosine
  modified_base 52: mod_base = OTHER; note = 2'-Omethylguanosine
  modified_base 53: mod_base = OTHER; note = 2'-Omethylguanosine
  modified_base 54: mod_base = OTHER; note = Uridine phosphorothiorate
  modified_base 55: mod_base = OTHER; note = Uridine phosphorothiorate
  modified_base 56: mod_base = OTHER; note = Cytosine phosphorothiorate
  modified_base 57: mod_base = OTHER; note = Guanosine phosphorothiorate
  modified_base 61: mod_base = OTHER; note = 2'-Omethylcytosine
  modified_base 62: mod_base = OTHER; note = 2'-Omethylcytosine
  modified_base 63: mod_base = OTHER; note = 2'-fluorocytosine
  modified_base 64: mod_base = OTHER; note = 2'-Omethylguanosine
  modified_base 65: mod_base = OTHER; note = 2'-Omethylguanosine
  modified_base 66: mod_base = OTHER; note = 2'-Omethylcytosine
  modified_base 67: mod_base = OTHER; note = 2'-Omethylguanosine
  modified_base 68: mod_base = OTHER; note = 2'-Omethylguanosine
  modified_base 69: mod_base = OTHER; note = 2'-Omethyladenosine
  modified_base 70: mod_base = OTHER; note = 2'-fluoroguanosine

SEQ ID NO: 5325 - RNA, 85 nt, synthetic construct; identical to SEQ ID NO: 3310
  source 1..85: mol_type = other RNA
  modified_base 1: mod_base = OTHER; note = 2'-Omethylcytosine
  modified_base 11: mod_base = OTHER; note = Cytosine phosphorothiorate
  modified_base 17: mod_base = OTHER; note = 2'-Omethylguanosine
  modified_base 26: mod_base = OTHER; note = 2'-Omethyluridine
  modified_base 28: mod_base = OTHER; note = 2'-fluoroguanosine
  modified_base 32: mod_base = OTHER; note = 2'-fluorouridine
  modified_base 36: mod_base = OTHER; note = Guanosine phosphorothiorate
  modified_base 42: mod_base = OTHER; note = Adenosine phosphorothiorate
  modified_base 64: mod_base = OTHER; note = Uridine phosphorothiorate
  modified_base 84: mod_base = OTHER; note = 2'-Omethylcytosine

SEQ ID NO: 5326 - RNA, 76 nt, synthetic construct; identical to SEQ ID NO: 3318
  source 1..76: mol_type = other RNA
  modified_base 1: mod_base = OTHER; note = 2'-Omethylcytosine
  modified_base 2: mod_base = OTHER; note = 2'-Omethylcytosine
  modified_base 3: mod_base = OTHER; note = 2'-Omethyluridine
  modified_base 4: mod_base = OTHER; note = 2'-Omethyluridine
  modified_base 5: mod_base = OTHER; note = 2'-Omethylcytosine
  modified_base 6: mod_base = OTHER; note = 2'-Omethylguanosine
  modified_base 73: mod_base = OTHER; note = 2'-Omethyladenosine

SEQ ID NO: 5327 - RNA, 85 nt, synthetic construct; identical to SEQ ID NO: 3288
  source 1..85: mol_type = other RNA
  modified_base 1: mod_base = OTHER; note = 2'-Omethylcytosine
  modified_base 2: mod_base = OTHER; note = 2'-fluorocytosine
  modified_base 11: mod_base = OTHER; note = Cytosine phosphorothiorate
  modified_base 25: mod_base = OTHER; note = 2'-fluoroguanosine
  modified_base 27: mod_base = OTHER; note = 2'-fluorouridine
  modified_base 28: mod_base = OTHER; note = 2'-fluoroguanosine
  modified_base 29: mod_base = OTHER; note = 2'-fluoroguanosine
  modified_base 30: mod_base = OTHER; note = 2'-fluoroadenosine
  modified_base 32: mod_base = OTHER; note = 2'-fluorouridine
  modified_base 33: mod_base = OTHER; note = Uridine phosphorothiorate
  modified_base 34: mod_base = OTHER; note = 2'-fluorocytosine
  modified_base 36: mod_base = OTHER; note = Guanosine phosphorothiorate
  modified_base 40: mod_base = OTHER; note = Cytosine phosphorothiorate
  modified_base 43: mod_base = OTHER; note = 2'-Omethyluridine
  modified_base 44: mod_base = OTHER; note = Guanosine phosphorothiorate
  modified_base 48: mod_base = OTHER; note = 2'-Omethyladenosine
  modified_base 51: mod_base = OTHER; note = 2'-Omethyluridine
  modified_base 54: mod_base = OTHER; note = 2'-Omethylcytosine
  modified_base 56: mod_base = OTHER; note = 2'-fluoroguanosine
  modified_base 57: mod_base = OTHER; note = 2'-Omethylcytosine
  modified_base 58: mod_base = OTHER; note = 2'-Omethylguanosine
  modified_base 61: mod_base = OTHER; note = 2'-fluoroguanosine
  modified_base 64: mod_base = OTHER; note = Uridine phosphorothiorate
  modified_base 70: mod_base = OTHER; note = 2'-fluorocytosine
  modified_base 71: mod_base = OTHER; note = 2'-fluorocytosine
  modified_base 75: mod_base = OTHER; note = 2'-fluorouridine
  modified_base 84: mod_base = OTHER; note = Cytosine phosphorothiorate

SEQ ID NO: 5328 - RNA, 86 nt, synthetic construct; identical to SEQ ID NO: 3290
  source 1..86: mol_type = other RNA
  modified_base 1: mod_base = OTHER; note = 2'-Omethyladenosine
  modified_base 10: mod_base = OTHER; note = 2'-Omethylguanosine
  modified_base 11: mod_base = OTHER; note = 2'-Omethylcytosine
  modified_base 12: mod_base = OTHER; note = 2'-Omethylcytosine
  modified_base 13: mod_base = OTHER; note = 2'-Omethylguanosine
  modified_base 17: mod_base = OTHER; note = 2'-Omethylguanosine
  modified_base 18: mod_base = OTHER; note = 2'-Omethylguanosine
  modified_base 25: mod_base = OTHER; note = 2'-Omethylcytosine
  modified_base 33: mod_base = OTHER; note = 2'-fluorouridine
  modified_base 34: mod_base = OTHER; note = 2'-Omethyluridine
  modified_base 35: mod_base = OTHER; note = Cytosine phosphorothiorate
  modified_base 37: mod_base = OTHER; note = Guanosine phosphorothiorate
  modified_base 38: mod_base = OTHER; note = Adenosine phosphorothiorate
  modified_base 41: mod_base = OTHER; note = 2'-Omethylcytosine
  modified_base 42: mod_base = OTHER; note = 2'-Omethyladenosine
  modified_base 43: mod_base = OTHER; note = 2'-Omethyladenosine
  modified_base 44: mod_base = OTHER; note = 2'-Omethyluridine
  modified_base 59: mod_base = OTHER; note = 2'-Omethylguanosine
  modified_base 60: mod_base = OTHER; note = 2'-Omethyluridine
  modified_base 62: mod_base = OTHER; note = 2'-Omethylguanosine
  modified_base 64: mod_base = OTHER; note = Uridine phosphorothiorate
  modified_base 65: mod_base = OTHER; note = Uridine phosphorothiorate
  modified_base 71: mod_base = OTHER; note = 2'-Omethylcytosine
  modified_base 75: mod_base = OTHER; note = 2'-Omethylcytosine
  modified_base 83: mod_base = OTHER; note = 2'-Omethyladenosine

SEQ ID NO: 5329 - DNA, 76 bp, synthetic construct; identical to SEQ ID NO: 1924
  source 1..76: mol_type = other DNA
  modified_base 1: mod_base = OTHER; note = 2'-Omethylguanosine phosphorothiorate
  modified_base 2: mod_base = OTHER; note = 2'-Omethylguanosine phosphorothiorate
  modified_base 52: mod_base = OTHER; note = 2'-Omethylguanosine
  modified_base 63: mod_base = OTHER; note = Cytosine phosphorothiorate
  modified_base 73: mod_base = OTHER; note = Guanosine phosphorothiorate
  modified_base 74: mod_base = OTHER; note = Cytosine phosphorothiorate
  modified_base 75: mod_base = OTHER; note = 2'-Omethylcytosine phosphorothiorate
  modified_base 76: mod_base = OTHER; note = 2'-Omethyladenosine
  misc_feature 1..63: note = RNA
  misc_feature 64: note = DNA
  misc_feature 65..76: note = RNA

SEQ ID NO: 5330 - RNA, 76 nt, synthetic construct; identical to SEQ ID NO: 625
  source 1..76: mol_type = other RNA
  modified_base 1: mod_base = OTHER; note = 2'-Omethylguanosine phosphorothiorate
  modified_base 2: mod_base = OTHER; note = 2'-Omethylguanosine
  modified_base 33: mod_base = OTHER; note = 2'-fluorouridine
  modified_base 35: mod_base = OTHER; note = Cytosine phosphorothiorate
  modified_base 37: mod_base = OTHER; note = Adenosine phosphorothiorate
  modified_base 38: mod_base = OTHER; note = Adenosine phosphorothiorate
  modified_base 52: mod_base = OTHER; note = 2'-fluoroguanosine
  modified_base 62: mod_base = OTHER; note = 2'-Omethylcytosine
  modified_base 73: mod_base = OTHER; note = 2'-Omethylguanosine
  modified_base 75: mod_base = OTHER; note = 2'-fluorocytosine phosphorothiorate

SEQ ID NO: 5331 - RNA, 76 nt, synthetic construct; identical to SEQ ID NO: 3318
  source 1..76: mol_type = other RNA
  modified_base 1: mod_base = OTHER; note = 2'-Omethylcytosine
  modified_base 44: mod_base = OTHER; note = 2'-Omethyladenosine
  modified_base 45: mod_base = OTHER; note = 2'-Omethylguanosine
  modified_base 46: mod_base = OTHER; note = 2'-fluoroguanosine
  modified_base 48: mod_base = OTHER; note = 2'-fluorocytosine
  modified_base 73: mod_base = OTHER; note = 2'-Omethyladenosine

SEQ ID NO: 5332 - RNA, 85 nt, synthetic construct; identical to SEQ ID NO: 3317
  source 1..85: mol_type = other RNA
  modified_base 1: mod_base = OTHER; note = 2'-Omethylguanosine phosphorothiorate
  modified_base 2: mod_base = OTHER; note = Cytosine phosphorothiorate
  modified_base 3: mod_base = OTHER; note = 2'-Omethyluridine phosphorothiorate
  modified_base 4: mod_base = OTHER; note = 2'-Omethylguanosine phosphorothiorate
  modified_base 11: mod_base = OTHER; note = 2'-fluorocytosine
  modified_base 12: mod_base = OTHER; note = 2'-fluorocytosine
  modified_base 13: mod_base = OTHER; note = 2'-fluoroguanosine phosphorothiorate
  modified_base 19: mod_base = OTHER; note = 2'-fluorouridine
  modified_base 23: mod_base = OTHER; note = 2'-Omethylguanosine
  modified_base 25: mod_base = OTHER; note = 2'-Omethylcytosine phosphorothiorate
  modified_base 27: mod_base = OTHER; note = 2'-Omethyluridine
  modified_base 33: mod_base = OTHER; note = 2'-fluorouridine
  modified_base 41: mod_base = OTHER; note = 2'-fluorocytosine
  modified_base 42: mod_base = OTHER; note = 2'-Omethyladenosine
  modified_base 44: mod_base = OTHER; note = 2'-fluorouridine phosphorothiorate
  modified_base 50: mod_base = OTHER; note = 2'-fluorocytosine
  modified_base 51: mod_base = OTHER; note = Uridine phosphorothiorate
  modified_base 59: mod_base = OTHER; note = 2'-Omethylcytosine
  modified_base 61: mod_base = OTHER; note = 2'-Omethylguanosine
  modified_base 72: mod_base = OTHER; note = 2'-fluorouridine
  modified_base 80: mod_base = OTHER; note = Guanosine phosphorothiorate
  modified_base 84: mod_base = OTHER; note = 2'-Omethylcytosine phosphorothiorate

SEQ ID NO: 5333 - RNA, 75 nt, synthetic construct; identical to SEQ ID NO: 1045
  source 1..75: mol_type = other RNA
  modified_base 1: mod_base = OTHER; note = 2'-Omethylguanosine
  modified_base 2: mod_base = OTHER; note = 2'-Omethylguanosine
  modified_base 3: mod_base = OTHER; note = 2'-Omethyluridine
  modified_base 4: mod_base = OTHER; note = 2'-Omethyluridine
  modified_base 5: mod_base = OTHER; note = 2'-Omethylcytosine
  modified_base 6: mod_base = OTHER; note = 2'-Omethylcytosine
  modified_base 10: mod_base = OTHER; note = 2'-Omethylguanosine
  modified_base 11: mod_base = OTHER; note = 2'-Omethyluridine
  modified_base 12: mod_base = OTHER; note = 2'-Omethylguanosine
  modified_base 13: mod_base = OTHER; note = 2'-Omethyluridine
  modified_base 22: mod_base = OTHER; note = 2'-Omethylguanosine
  modified_base 23: mod_base = OTHER; note = 2'-Omethylcytosine
  modified_base 24: mod_base = OTHER; note = 2'-Omethyladenosine
  modified_base 25: mod_base = OTHER; note = 2'-Omethylcytosine
  modified_base 48: mod_base = OTHER; note = 2'-Omethylcytosine
  modified_base 49: mod_base = OTHER; note = 2'-Omethylcytosine
  modified_base 50: mod_base = OTHER; note = 2'-Omethylguanosine
  modified_base 51: mod_base = OTHER; note = 2'-Omethyladenosine
  modified_base 52: mod_base = OTHER; note = 2'-Omethylguanosine
  modified_base 72: mod_base = OTHER; note = 2'-Omethyluridine

SEQ ID NO: 5334 - RNA, 76 nt, synthetic construct; identical to SEQ ID NO: 625
  source 1..76: mol_type = other RNA
  modified_base 1: mod_base = OTHER; note = 2'-Omethylguanosine phosphorothiorate
  modified_base 2: mod_base = OTHER; note = 2'-Omethylguanosine phosphorothiorate
  modified_base 3: mod_base = OTHER; note = 2'-Omethylcytosine phosphorothiorate
  modified_base 4: mod_base = OTHER; note = 2'-Omethyluridine phosphorothiorate
  modified_base 5: mod_base = OTHER; note = 2'-Omethylcytosine phosphorothiorate
  modified_base 6: mod_base = OTHER; note = 2'-Omethylcytosine phosphorothiorate
  modified_base 10: mod_base = OTHER; note = 2'-Omethylguanosine
  modified_base 11: mod_base = OTHER; note = 2'-Omethylcytosine
  modified_base 12: mod_base = OTHER; note = 2'-Omethylguanosine
  modified_base 13: mod_base = OTHER; note = 2'-Omethylcytosine
  modified_base 22: mod_base = OTHER; note = 2'-Omethylguanosine
  modified_base 23: mod_base = OTHER; note = 2'-Omethylcytosine
  modified_base 24: mod_base = OTHER; note = 2'-Omethylguanosine
  modified_base 25: mod_base = OTHER; note = 2'-Omethylcytosine
  modified_base 49: mod_base = OTHER; note = 2'-Omethylcytosine
  modified_base 50: mod_base = OTHER; note = 2'-Omethylcytosine
  modified_base 51: mod_base = OTHER; note = 2'-Omethylguanosine
  modified_base 52: mod_base = OTHER; note = 2'-Omethylguanosine
  modified_base 53: mod_base = OTHER; note = 2'-Omethylguanosine
  modified_base 54: mod_base = OTHER; note = Uridine phosphorothiorate
  modified_base 55: mod_base = OTHER; note = Uridine phosphorothiorate
  modified_base 56: mod_base = OTHER; note = Cytosine phosphorothiorate
  modified_base 57: mod_base = OTHER; note = Guanosine phosphorothiorate
  modified_base 61: mod_base = OTHER; note = 2'-Omethylcytosine
  modified_base 62: mod_base = OTHER; note = 2'-Omethylcytosine
  modified_base 63: mod_base = OTHER; note = 2'-Omethylcytosine
  modified_base 64: mod_base = OTHER; note = 2'-Omethylguanosine
  modified_base 65: mod_base = OTHER; note = 2'-Omethylguanosine
  modified_base 66: mod_base = OTHER; note = 2'-Omethylcytosine
  modified_base 67: mod_base = OTHER; note = 2'-Omethylguanosine
  modified_base 68: mod_base = OTHER; note = 2'-Omethylguanosine
  modified_base 69: mod_base = OTHER; note = 2'-Omethyladenosine

SEQ ID NO: 5335 - RNA, 86 nt, synthetic construct; identical to SEQ ID NO: 3290
  source 1..86: mol_type = other RNA
  modified_base 1: mod_base = OTHER; note = 2'-Omethyladenosine phosphorothiorate
  modified_base 2: mod_base = OTHER; note = 2'-Omethylcytosine phosphorothiorate
  modified_base 3: mod_base = OTHER; note = 2'-Omethylcytosine
  modified_base 4: mod_base = OTHER; note = 2'-Omethyladenosine
  modified_base 5: mod_base = OTHER; note = 2'-Omethylguanosine
  modified_base 6: mod_base = OTHER; note = 2'-Omethylguanosine
  modified_base 16: mod_base = OTHER; note = 2'-Omethyluridine
  modified_base 17: mod_base = OTHER; note = 2'-Omethylguanosine
  modified_base 18: mod_base = OTHER; note = 2'-Omethylguanosine
  modified_base 33: mod_base = OTHER; note = 2'-fluorouridine
  modified_base 35: mod_base = OTHER; note = Cytosine phosphorothiorate
  modified_base 37: mod_base = OTHER; note = Guanosine phosphorothiorate
  modified_base 38: mod_base = OTHER; note = Adenosine phosphorothiorate
  modified_base 44: mod_base = OTHER; note = 2'-Omethyluridine
  modified_base 57: mod_base = OTHER; note = 2'-fluoroguanosine
  modified_base 58: mod_base = OTHER; note = 2'-fluorocytosine
  modified_base 59: mod_base = OTHER; note = 2'-Omethylguanosine
  modified_base 60: mod_base = OTHER; note = 2'-Omethyluridine
  modified_base 61: mod_base = OTHER; note = 2'-Omethylguanosine
  modified_base 64: mod_base = OTHER; note = 2'-Omethyluridine
  modified_base 66: mod_base = OTHER; note = 2'-Omethylcytosine
  modified_base 69: mod_base = OTHER; note = 2'-Omethyladenosine
  modified_base 71: mod_base = OTHER; note = 2'-Omethylcytosine
  modified_base 72: mod_base = OTHER; note = 2'-Omethylcytosine
  modified_base 73: mod_base = OTHER; note = 2'-fluorocytosine
  modified_base 74: mod_base = OTHER; note = 2'-Omethyladenosine
  modified_base 75: mod_base = OTHER; note = 2'-Omethylcytosine
  modified_base 76: mod_base = OTHER; note = 2'-Omethyluridine
  modified_base 77: mod_base = OTHER; note = 2'-Omethylcytosine
  modified_base 78: mod_base = OTHER; note = 2'-Omethylcytosine
  modified_base 83: mod_base = OTHER; note = 2'-Omethyladenosine

SEQ ID NO: 5336 - RNA, 75 nt, synthetic construct; identical to SEQ ID NO: 3336
  source 1..75: mol_type = other RNA
  modified_base 1: mod_base = OTHER; note = 2'-fluorocytosine
  modified_base 2: mod_base = OTHER; note = 2'-fluorocytosine phosphorothiorate
  modified_base 3: mod_base = OTHER; note = 2'-Omethyluridine
  modified_base 11: mod_base = OTHER; note = 2'-Omethyluridine phosphorothiorate
  modified_base 15: mod_base = OTHER; note = 2'-fluorouridine
  modified_base 18: mod_base = OTHER; note = 2'-fluoroguanosine
  modified_base 19: mod_base = OTHER; note = 2'-Omethyluridine phosphorothiorate
  modified_base 20: mod_base = OTHER; note = Adenosine phosphorothiorate
  modified_base 25: mod_base = OTHER; note = 2'-Omethyladenosine phosphorothiorate
  modified_base 27: mod_base = OTHER; note = 2'-fluorocytosine
  modified_base 29: mod_base = OTHER; note = Guanosine phosphorothiorate
  modified_base 37: mod_base = OTHER; note = 2'-fluoroadenosine
  modified_base 38: mod_base = OTHER; note = Uridine phosphorothiorate
  modified_base 39: mod_base = OTHER; note = 2'-Omethylcytosine phosphorothiorate
  modified_base 46: mod_base = OTHER; note = 2'-fluorouridine
  modified_base 47: mod_base = OTHER; note = 2'-fluorocytosine
  modified_base 49: mod_base = OTHER; note = Adenosine phosphorothiorate
  modified_base 50: mod_base = OTHER; note = 2'-fluoroguanosine
  modified_base 69: mod_base = OTHER; note = Guanosine phosphorothiorate
  modified_base 72: mod_base = OTHER; note = 2'-fluoroguanosine
  modified_base 73: mod_base = OTHER; note = Cytosine phosphorothiorate
  modified_base 74: mod_base = OTHER; note = Cytosine phosphorothiorate

SEQ ID NO: 5337 - RNA, 75 nt, synthetic construct; identical to SEQ ID NO: 1045
  source 1..75: mol_type = other RNA
  modified_base 1: mod_base = OTHER; note = 2'-Omethylguanosine
  modified_base 14: mod_base = OTHER; note = 2'-Omethyladenosine
  modified_base 15: mod_base = OTHER; note = 2'-fluoroadenosine
  modified_base 16: mod_base = OTHER; note = 2'-Omethyluridine
  modified_base 17: mod_base = OTHER; note = 2'-Omethylguanosine
  modified_base 18: mod_base = OTHER; note = 2'-Omethylguanosine
  modified_base 19: mod_base = OTHER; note = 2'-fluorouridine
  modified_base 20: mod_base = OTHER; note = 2'-Omethyladenosine
  modified_base 53: mod_base = OTHER; note = 2'-Omethyluridine phosphorothiorate
  modified_base 54: mod_base = OTHER; note = Uridine phosphorothiorate
  modified_base 55: mod_base = OTHER; note = 2'-Omethylcytosine
  modified_base 56: mod_base = OTHER; note = 2'-Omethylguanosine
  modified_base 58: mod_base = OTHER; note = 2'-Omethylguanosine
  modified_base 72: mod_base = OTHER; note = 2'-Omethyluridine

SEQ ID NO: 5338 - RNA, 76 nt, synthetic construct; identical to SEQ ID NO: 625
  source 1..76: mol_type = other RNA
  modified_base 1: mod_base = OTHER; note = 2'-fluoroguanosine
  modified_base 2: mod_base = OTHER; note = 2'-fluoroguanosine
  modified_base 3: mod_base = OTHER; note = 2'-fluorocytosine phosphorothiorate
  modified_base 4: mod_base = OTHER; note = 2'-fluorouridine
  modified_base 5: mod_base = OTHER; note = Cytosine phosphorothiorate
  modified_base 6: mod_base = OTHER; note = 2'-Omethylcytosine phosphorothiorate
  modified_base 10: mod_base = OTHER; note = 2'-fluoroguanosine
  modified_base 12: mod_base = OTHER; note = 2'-Omethylguanosine
  modified_base 14: mod_base = OTHER; note = 2'-Omethyladenosine
  modified_base 15: mod_base = OTHER; note = 2'-Omethyladenosine
  modified_base 17: mod_base = OTHER; note = 2'-Omethylguanosine
  modified_base 20: mod_base = OTHER; note = 2'-fluorouridine
  modified_base 22: mod_base = OTHER; note = 2'-fluoroguanosine
  modified_base 23: mod_base = OTHER; note = 2'-fluorocytosine
  modified_base 24: mod_base = OTHER; note = Guanosine phosphorothiorate
  modified_base 25: mod_base = OTHER; note = 2'-fluorocytosine
  modified_base 27: mod_base = OTHER; note = 2'-Omethyluridine
  modified_base 29: mod_base = OTHER; note = 2'-fluoroguanosine
  modified_base 30: mod_base = OTHER; note = 2'-fluoroguanosine
  modified_base 32: mod_base = OTHER; note = 2'-fluorocytosine
  modified_base 38: mod_base = OTHER; note = 2'-Omethyladenosine
  modified_base 39: mod_base = OTHER; note = Uridine phosphorothiorate
  modified_base 40: mod_base = OTHER; note = 2'-Omethyluridine phosphorothiorate
  modified_base 46: mod_base = OTHER; note = 2'-Omethylguanosine
  modified_base 48: mod_base = OTHER; note = 2'-fluorouridine
  modified_base 49: mod_base = OTHER; note = Cytosine phosphorothiorate
  modified_base 50: mod_base = OTHER; note = 2'-fluorocytosine
  modified_base 56: mod_base = OTHER; note = 2'-Omethylcytosine phosphorothiorate
  modified_base 57: mod_base = OTHER; note = 2'-fluoroguanosine
  modified_base 58: mod_base = OTHER; note = Adenosine phosphorothiorate
  modified_base 62: mod_base = OTHER; note = 2'-fluorocytosine
  modified_base 64: mod_base = OTHER; note = 2'-Omethylguanosine
  modified_base 66: mod_base = OTHER; note = 2'-Omethylcytosine
  modified_base 69: mod_base = OTHER; note = Adenosine phosphorothiorate

SEQ ID NO: 5339 - RNA, 76 nt, synthetic construct; identical to SEQ ID NO: 625
  source 1..76: mol_type = other RNA
  modified_base 1: mod_base = OTHER; note = 2'-Omethylguanosine phosphorothiorate
  modified_base 2: mod_base = OTHER; note = 2'-Omethylguanosine
  modified_base 3: mod_base = OTHER; note = 2'-Omethylcytosine
  modified_base 10: mod_base = OTHER; note = 2'-Omethylguanosine
  modified_base 11: mod_base = OTHER; note = 2'-Omethylcytosine
  modified_base 12: mod_base = OTHER; note = 2'-Omethylguanosine
  modified_base 13: mod_base = OTHER; note = 2'-Omethylcytosine
  modified_base 14: mod_base = OTHER; note = 2'-Omethyladenosine
  modified_base 15: mod_base = OTHER; note = 2'-fluoroadenosine
  modified_base 16: mod_base = OTHER; note = 2'-Omethyluridine
  modified_base 17: mod_base = OTHER; note = 2'-Omethylguanosine
  modified_base 18: mod_base = OTHER; note = 2'-Omethylguanosine
  modified_base 19: mod_base = OTHER; note = 2'-fluoroadenosine
  modified_base 20: mod_base = OTHER; note = 2'-Omethyluridine
  modified_base 22: mod_base = OTHER; note = 2'-Omethylguanosine
  modified_base 23: mod_base = OTHER; note = 2'-Omethylcytosine
  modified_base 24: mod_base = OTHER; note = 2'-Omethylguanosine
  modified_base 25: mod_base = OTHER; note = 2'-Omethylcytosine
  modified_base 38: mod_base = OTHER; note = Adenosine phosphorothiorate
  modified_base 39: mod_base = OTHER; note = Uridine phosphorothiorate
  modified_base 40: mod_base = OTHER; note = 2'-fluorouridine
  modified_base 43: mod_base = OTHER; note = 2'-Omethyladenosine
  modified_base 44: mod_base = OTHER; note = 2'-Omethyladenosine
  modified_base 45: mod_base = OTHER; note = 2'-Omethylguanosine
  modified_base 46: mod_base = OTHER; note = 2'-fluoroguanosine
  modified_base 48: mod_base = OTHER; note = 2'-fluorouridine
  modified_base 49: mod_base = OTHER; note = 2'-Omethylcytosine
  modified_base 50: mod_base = OTHER; note = 2'-Omethylcytosine
  modified_base 54: mod_base = OTHER; note = 2'-Omethyluridine phosphorothiorate
  modified_base 55: mod_base = OTHER; note = Uridine phosphorothiorate
  modified_base 56: mod_base = OTHER; note = 2'-Omethylcytosine
  modified_base 57: mod_base = OTHER; note = 2'-fluoroguanosine
  modified_base 61: mod_base = OTHER; note = 2'-Omethylcytosine
  modified_base 62: mod_base = OTHER; note = 2'-Omethylcytosine
  modified_base 63: mod_base = OTHER; note = 2'-fluorocytosine
  modified_base 64: mod_base = OTHER; note = 2'-Omethylguanosine
  modified_base 65: mod_base = OTHER; note = 2'-Omethylguanosine
  modified_base 66: mod_base = OTHER; note = 2'-Omethylcytosine
  modified_base 67: mod_base = OTHER; note = 2'-Omethylguanosine
  modified_base 68: mod_base = OTHER; note = 2'-Omethylguanosine
  modified_base 69: mod_base = OTHER; note = 2'-Omethyladenosine
  modified_base 70: mod_base = OTHER; note = 2'-fluoroguanosine

SEQ ID NO: 5340 - RNA, 75 nt, synthetic construct; identical to SEQ ID NO: 1045
  source 1..75: mol_type = other RNA
  modified_base 1: mod_base = OTHER; note = 2'-Omethylguanosine
  modified_base 14: mod_base = OTHER; note = 2'-Omethyladenosine
  modified_base 15: mod_base = OTHER; note = 2'-Omethyladenosine
  modified_base 16: mod_base = OTHER; note = 2'-Omethyluridine
  modified_base 17: mod_base = OTHER; note = 2'-Omethylguanosine
  modified_base 18: mod_base = OTHER; note = 2'-Omethylguanosine
  modified_base 19: mod_base = OTHER; note = Uridine phosphorothiorate
  modified_base 20: mod_base = OTHER; note = 2'-Omethyladenosine
  modified_base 21: mod_base = OTHER; note = Adenosine phosphorothiorate
  modified_base 33: mod_base = OTHER; note = Uridine phosphorothiorate
  modified_base 34: mod_base = OTHER; note = 2'-Omethyluridine
  modified_base 35: mod_base = OTHER; note = Uridine phosphorothiorate
  modified_base 37: mod_base = OTHER; note = Adenosine phosphorothiorate
  modified_base 38: mod_base = OTHER; note = Adenosine phosphorothiorate
  modified_base 41: mod_base = OTHER; note = 2'-Omethylcytosine
  modified_base 42: mod_base = OTHER; note = 2'-Omethyladenosine
  modified_base 43: mod_base = OTHER; note = 2'-Omethylguanosine
  modified_base 44: mod_base = OTHER; note = 2'-Omethylcytosine
  modified_base 49: mod_base = OTHER; note = 2'-Omethylcytosine
  modified_base 51: mod_base = OTHER; note = 2'-Omethyladenosine
  modified_base 72: mod_base = OTHER; note = 2'-Omethyluridine

SEQ ID NO: 5341 - RNA, 75 nt, synthetic construct; identical to SEQ ID NO: 3306
  source 1..75: mol_type = other RNA
  modified_base 1: mod_base = OTHER; note = 2'-Omethylguanosine
  modified_base 16: mod_base = OTHER; note = 2'-Omethylcytosine
  modified_base 17: mod_base = OTHER; note = 2'-Omethylguanosine
  modified_base 18: mod_base = OTHER; note = 2'-Omethylguanosine
  modified_base 53: mod_base = OTHER; note = 2'-Omethyluridine phosphorothiorate
  modified_base 55: mod_base = OTHER; note = 2'-Omethylcytosine
  modified_base 58: mod_base = OTHER; note = 2'-Omethyladenosine
  modified_base 72: mod_base = OTHER; note = 2'-Omethyladenosine

SEQ ID NO: 5342 - RNA, 76 nt, synthetic construct; identical to SEQ ID NO: 625
  source 1..76: mol_type = other RNA
  modified_base 1: mod_base = OTHER; note = 2'-Omethylguanosine phosphorothiorate
  modified_base 2: mod_base = OTHER; note = 2'-Omethylguanosine
  modified_base 3: mod_base = OTHER; note = 2'-fluorocytosine phosphorothiorate
  modified_base 4: mod_base = OTHER; note = 2'-Omethyluridine
  modified_base 10: mod_base = OTHER; note = 2'-Omethylguanosine phosphorothiorate
  modified_base 11: mod_base = OTHER; note = 2'-fluorocytosine
  modified_base 12: mod_base = OTHER; note = Guanosine phosphorothiorate
  modified_base 13: mod_base = OTHER; note = 2'-fluorocytosine
  modified_base 15: mod_base = OTHER; note = 2'-Omethyladenosine
  modified_base 16: mod_base = OTHER; note = 2'-fluorouridine
  modified_base 18: mod_base = OTHER; note = Guanosine phosphorothiorate
  modified_base 23: mod_base = OTHER; note = 2'-fluorocytosine
  modified_base 25: mod_base = OTHER; note = 2'-Omethylcytosine
  modified_base 29: mod_base = OTHER; note = 2'-Omethylguanosine
  modified_base 36: mod_base = OTHER; note = Adenosine phosphorothiorate
  modified_base 42: mod_base = OTHER; note = 2'-fluoroadenosine
  modified_base 43: mod_base = OTHER; note = 2'-fluoroadenosine
  modified_base 44: mod_base = OTHER; note = 2'-fluoroadenosine
  modified_base 45: mod_base = OTHER; note = 2'-Omethylguanosine
  modified_base 46: mod_base = OTHER; note = 2'-Omethylguanosine phosphorothiorate
  modified_base 47: mod_base = OTHER; note = 2'-fluorouridine phosphorothiorate
  modified_base 48: mod_base = OTHER; note = Uridine phosphorothiorate
  modified_base 49: mod_base = OTHER; note = 2'-fluorocytosine phosphorothiorate
  modified_base 50: mod_base = OTHER; note = 2'-Omethylcytosine
  modified_base 52: mod_base = OTHER; note = 2'-fluoroguanosine
  modified_base 53: mod_base = OTHER; note = 2'-Omethylguanosine
  modified_base 55: mod_base = OTHER; note = Uridine phosphorothiorate
  modified_base 56: mod_base = OTHER; note = 2'-Omethylcytosine
  modified_base 57: mod_base = OTHER; note = 2'-Omethylguanosine
  modified_base 59: mod_base = OTHER; note = Guanosine phosphorothiorate
  modified_base 60: mod_base = OTHER; note = 2'-Omethyluridine
  modified_base 65: mod_base = OTHER; note = 2'-fluoroguanosine
  modified_base 67: mod_base = OTHER; note = 2'-Omethylguanosine
  modified_base 69: mod_base = OTHER; note = 2'-fluoroadenosine
  modified_base 71: mod_base = OTHER; note = Uridine phosphorothiorate
  modified_base 72: mod_base = OTHER; note = 2'-Omethylcytosine
  modified_base 74: mod_base = OTHER; note = 2'-Omethylcytosine
  modified_base 75: mod_base = OTHER; note = 2'-Omethylcytosine

SEQ ID NO: 5343 - RNA, 85 nt, synthetic construct; identical to SEQ ID NO: 3297
  source 1..85: mol_type = other RNA
  modified_base 1: mod_base = OTHER; note = 2'-Omethylguanosine phosphorothiorate
  modified_base 2: mod_base = OTHER; note = 2'-Omethylcytosine phosphorothiorate
  modified_base 15: mod_base = OTHER; note = Guanosine phosphorothiorate
  modified_base 55: mod_base = OTHER; note = 2'-fluorocytosine
  modified_base 80: mod_base = OTHER; note = 2'-fluoroguanosine
  modified_base 84: mod_base = OTHER; note = 2'-Omethylcytosine

SEQ ID NO: 5344 - RNA, 76 nt, synthetic construct; identical to SEQ ID NO: 625
  source 1..76: mol_type = other RNA
  modified_base 1: mod_base = OTHER; note = 2'-Omethylguanosine
  modified_base 2: mod_base = OTHER; note = 2'-Omethylguanosine
  modified_base 3: mod_base = OTHER; note = 2'-Omethylcytosine
  modified_base 4: mod_base = OTHER; note = 2'-Omethyluridine
  modified_base 5: mod_base = OTHER; note = 2'-Omethylcytosine
  modified_base 6: mod_base = OTHER; note = 2'-Omethylcytosine
  modified_base 7: mod_base = OTHER; note = 2'-Omethylguanosine phosphorothiorate
  modified_base 9: mod_base = OTHER; note = 2'-Omethylguanosine phosphorothiorate
  modified_base 10: mod_base = OTHER; note = 2'-Omethylguanosine
  modified_base 11: mod_base = OTHER; note = 2'-Omethylcytosine
  modified_base 12: mod_base = OTHER; note = 2'-Omethylguanosine
  modified_base 13: mod_base = OTHER; note = 2'-Omethylcytosine
  modified_base 14: mod_base = OTHER; note = 2'-Omethyladenosine
  modified_base 16: mod_base = OTHER; note = 2'-fluorouridine
  modified_base 17: mod_base = OTHER; note = 2'-Omethylguanosine
  modified_base 18: mod_base = OTHER; note = 2'-Omethylguanosine
  modified_base 19: mod_base = OTHER; note = 2'-Omethyladenosine
  modified_base 20: mod_base = OTHER; note = 2'-Omethyluridine
  modified_base 21: mod_base = OTHER; note = 2'-fluoroadenosine phosphorothiorate
  modified_base 22: mod_base = OTHER; note = 2'-Omethylguanosine phosphorothiorate
  modified_base 23: mod_base = OTHER; note = 2'-Omethylcytosine
  modified_base 24: mod_base = OTHER; note = 2'-Omethylguanosine
  modified_base 25: mod_base = OTHER; note = 2'-fluorocytosine
  modified_base 26: mod_base = OTHER; note = Adenosine phosphorothiorate
  modified_base 28: mod_base = OTHER; note = 2'-Omethyluridine
  modified_base 29: mod_base = OTHER; note = 2'-fluoroguanosine
  modified_base 30: mod_base = OTHER; note = 2'-Omethylguanosine
  modified_base 31: mod_base = OTHER; note = 2'-Omethyladenosine
  modified_base 33: mod_base = OTHER; note = 2'-Omethyluridine
  modified_base 34: mod_base = OTHER; note = Uridine phosphorothiorate
  modified_base 35: mod_base = OTHER; note = Cytosine phosphorothiorate
  modified_base 36: mod_base = OTHER; note = 2'-Omethyladenosine phosphorothiorate
  modified_base 37: mod_base = OTHER; note = Adenosine phosphorothiorate
  modified_base 38: mod_base = OTHER; note = Adenosine phosphorothiorate
  modified_base 40: mod_base = OTHER; note = 2'-Omethyluridine
  modified_base 41: mod_base = OTHER; note = 2'-fluorocytosine
  modified_base 42: mod_base = OTHER; note = 2'-Omethyladenosine
  modified_base 43: mod_base = OTHER; note = 2'-Omethyladenosine
  modified_base 44: mod_base = OTHER; note = 2'-Omethyladenosine
  modified_base 45: mod_base = OTHER; note = Guanosine phosphorothiorate
  modified_base 48: mod_base = OTHER; note = 2'-fluorouridine
  modified_base 49: mod_base = OTHER; note = 2'-Omethylcytosine
  modified_base 50: mod_base = OTHER; note = 2'-Omethylcytosine
  modified_base 51: mod_base = OTHER; note = 2'-Omethylguanosine phosphorothiorate
  modified_base 52: mod_base = OTHER; note = 2'-Omethylguanosine
  modified_base 53: mod_base = OTHER; note = 2'-fluoroguanosine
  modified_base 54: mod_base = OTHER; note = 2'-Omethyluridine
  modified_base 55: mod_base = OTHER; note = Uridine phosphorothiorate
  modified_base 56: mod_base = OTHER; note = 2'-Omethylcytosine
  modified_base 57: mod_base = OTHER; note = 2'-Omethylguanosine
  modified_base 58: mod_base = OTHER; note = 2'-Omethyladenosine
  modified_base 59: mod_base = OTHER; note = 2'-Omethylguanosine
  modified_base 60: mod_base = OTHER; note = 2'-fluorouridine
  modified_base 61: mod_base = OTHER; note = 2'-Omethylcytosine
  modified_base 62: mod_base = OTHER; note = 2'-Omethylcytosine
  modified_base 63: mod_base = OTHER; note = 2'-Omethylcytosine
  modified_base 64: mod_base = OTHER; note = 2'-Omethylguanosine
  modified_base 65: mod_base = OTHER; note = 2'-Omethylguanosine
  modified_base 66: mod_base = OTHER; note = Cytosine phosphorothiorate
  modified_base 67: mod_base = OTHER; note = 2'-Omethylguanosine
  modified_base 68: mod_base = OTHER; note = 2'-fluoroguanosine
  modified_base 69: mod_base = OTHER; note = 2'-Omethyladenosine
  modified_base 70: mod_base = OTHER; note = 2'-Omethylguanosine
  modified_base 71: mod_base = OTHER; note = 2'-fluorouridine
  modified_base 72: mod_base = OTHER; note = 2'-Omethylcytosine
  modified_base 73: mod_base = OTHER; note = 2'-Omethylguanosine
  modified_base 74: mod_base = OTHER; note = 2'-fluorocytosine phosphorothiorate
  modified_base 75: mod_base = OTHER; note = 2'-fluorocytosine phosphorothiorate

SEQ ID NO: 5345 - RNA, 85 nt, synthetic construct; identical to SEQ ID NO: 3310
  source 1..85: mol_type = other RNA
  modified_base 1: mod_base = OTHER; note = Cytosine phosphorothiorate
  modified_base 25: mod_base = OTHER; note = 2'-fluoroguanosine
  modified_base 43: mod_base = OTHER; note = 2'-Omethyluridine
  modified_base 46: mod_base = OTHER; note = Adenosine phosphorothiorate
  modified_base 54: mod_base = OTHER; note = 2'-fluorocytosine
  modified_base 59: mod_base = OTHER; note = 2'-fluorouridine
  modified_base 76: mod_base = OTHER; note = 2'-fluorocytosine

SEQ ID NO: 5346 - RNA, 86 nt, synthetic construct; identical to SEQ ID NO: 3290
  source 1..86: mol_type = other RNA
  modified_base 1: mod_base = OTHER; note = 2'-Omethyladenosine
  modified_base 17: mod_base = OTHER; note = 2'-Omethylguanosine
  modified_base 18: mod_base = OTHER; note = 2'-Omethylguanosine
  modified_base 60: mod_base = OTHER; note = 2'-Omethyluridine
  modified_base 62: mod_base = OTHER; note = 2'-Omethylguanosine
  modified_base 83: mod_base = OTHER; note = 2'-Omethyladenosine

SEQ ID NO: 5347 - RNA, 76 nt, synthetic construct; identical to SEQ ID NO: 625
  source 1..76: mol_type = other RNA
  modified_base 1: mod_base = OTHER; note = 2'-Omethylguanosine
  modified_base 2: mod_base = OTHER; note = 2'-Omethylguanosine
  modified_base 3: mod_base = OTHER; note = 2'-Omethylcytosine
  modified_base 4: mod_base = OTHER; note = 2'-Omethyluridine
  modified_base 5: mod_base = OTHER; note = 2'-Omethylcytosine
  modified_base 6: mod_base = OTHER; note = 2'-Omethylcytosine
  modified_base 7: mod_base = OTHER; note = Guanosine phosphorothiorate
  modified_base 9: mod_base = OTHER; note = 2'-Omethylguanosine phosphorothiorate
  modified_base 10: mod_base = OTHER; note = 2'-Omethylguanosine
  modified_base 11: mod_base = OTHER; note = 2'-Omethylcytosine
  modified_base 12: mod_base = OTHER; note = 2'-Omethylguanosine
  modified_base 13: mod_base = OTHER; note = 2'-Omethylcytosine
  modified_base 14: mod_base = OTHER; note = 2'-Omethyladenosine
  modified_base 15: mod_base = OTHER; note = 2'-fluoroadenosine phosphorothiorate
  modified_base 16: mod_base = OTHER; note = 2'-fluorouridine
  modified_base 17: mod_base = OTHER; note = 2'-Omethylguanosine
  modified_base 18: mod_base = OTHER; note = 2'-fluoroguanosine
  modified_base 19: mod_base = OTHER; note = 2'-fluoroadenosine phosphorothiorate
  modified_base 20: mod_base = OTHER; note = Uridine phosphorothiorate
  modified_base 21: mod_base = OTHER; note = 2'-fluoroadenosine phosphorothiorate
  modified_base 22: mod_base = OTHER; note = 2'-Omethylguanosine
  modified_base 23: mod_base = OTHER; note = 2'-Omethylcytosine
  modified_base 24: mod_base = OTHER; note = 2'-Omethylguanosine
  modified_base 25: mod_base = OTHER; note = 2'-Omethylcytosine
  modified_base 26: mod_base = OTHER; note = Adenosine phosphorothiorate
  modified_base 28: mod_base = OTHER; note = 2'-Omethyluridine
  modified_base 29: mod_base = OTHER; note = 2'-fluoroguanosine phosphorothiorate
  modified_base 30: mod_base = OTHER; note = 2'-Omethylguanosine phosphorothiorate
  modified_base 31: mod_base = OTHER; note = 2'-Omethyladenosine phosphorothiorate
  modified_base 33: mod_base = OTHER; note = 2'-fluorouridine
  modified_base 34: mod_base = OTHER; note = 2'-Omethyluridine phosphorothiorate
  modified_base 35: mod_base = OTHER; note = 2'-Omethylcytosine phosphorothiorate
  modified_base 36: mod_base = OTHER; note = 2'-Omethyladenosine phosphorothiorate
  modified_base 37: mod_base = OTHER; note = 2'-Omethyladenosine phosphorothiorate
  modified_base 38: mod_base = OTHER; note = Adenosine phosphorothiorate
  modified_base 40: mod_base = OTHER; note = 2'-fluorouridine
  modified_base 41: mod_base = OTHER; note = 2'-fluorocytosine
  modified_base 42: mod_base = OTHER; note = Adenosine phosphorothiorate
  modified_base 44: mod_base = OTHER; note = 2'-fluoroadenosine phosphorothiorate
  modified_base 45: mod_base = OTHER; note = Guanosine phosphorothiorate
  modified_base 48: mod_base = OTHER; note = 2'-fluorouridine
  modified_base 49: mod_base = OTHER; note = 2'-Omethylcytosine
  modified_base 50: mod_base = OTHER; note = 2'-Omethylcytosine
  modified_base 51: mod_base = OTHER; note = 2'-Omethylguanosine
  modified_base 52: mod_base = OTHER; note = 2'-Omethylguanosine
  modified_base 53: mod_base = OTHER; note = 2'-fluoroguanosine phosphorothiorate
  modified_base 54: mod_base = OTHER; note = 2'-fluorouridine
  modified_base 55: mod_base = OTHER; note = Uridine phosphorothiorate
  modified_base 57: mod_base = OTHER; note = 2'-Omethylguanosine
  modified_base 59: mod_base = OTHER; note = 2'-Omethylguanosine
  modified_base 60: mod_base = OTHER; note = 2'-Omethyluridine phosphorothiorate
  modified_base 61: mod_base = OTHER; note = 2'-Omethylcytosine phosphorothiorate
  modified_base 62: mod_base = OTHER; note = 2'-Omethylcytosine
  modified_base 63: mod_base = OTHER; note = 2'-fluorocytosine
  modified_base 64: mod_base = OTHER; note = 2'-fluoroguanosine
  modified_base 65: mod_base = OTHER; note = 2'-Omethylguanosine phosphorothiorate
  modified_base 66: mod_base = OTHER; note = 2'-Omethylcytosine phosphorothiorate
  modified_base 67: mod_base = OTHER; note = 2'-Omethylguanosine phosphorothiorate
  modified_base 68: mod_base = OTHER; note = 2'-fluoroguanosine
  modified_base 69: mod_base = OTHER; note = 2'-fluoroadenosine phosphorothiorate
  modified_base 70: mod_base = OTHER; note = Guanosine phosphorothiorate
  modified_base 71: mod_base = OTHER; note = 2'-Omethyluridine phosphorothiorate
  modified_base 72: mod_base = OTHER; note = 2'-fluorocytosine phosphorothiorate
  modified_base 73: mod_base = OTHER; note = 2'-Omethylguanosine
  modified_base 74: mod_base = OTHER; note = 2'-fluorocytosine phosphorothiorate
  modified_base 75: mod_base = OTHER; note = 2'-fluorocytosine phosphorothiorate

SEQ ID NO: 5348 - RNA, 85 nt, synthetic construct; identical to SEQ ID NO: 3288
  source 1..85: mol_type = other RNA
  modified_base 1: mod_base = OTHER; note = 2'-Omethylcytosine
  modified_base 17: mod_base = OTHER; note = 2'-Omethylguanosine
  modified_base 26: mod_base = OTHER; note = 2'-Omethyluridine
  modified_base 28: mod_base = OTHER; note = 2'-fluoroguanosine
  modified_base 32: mod_base = OTHER; note = 2'-fluorouridine
  modified_base 36: mod_base = OTHER; note = Guanosine phosphorothiorate
  modified_base 43: mod_base = OTHER; note = 2'-Omethyluridine
  modified_base 46: mod_base = OTHER; note = Adenosine phosphorothiorate
  modified_base 54: mod_base = OTHER; note = 2'-fluorocytosine
  modified_base 58: mod_base = OTHER; note = 2'-Omethylguanosine
  modified_base 61: mod_base = OTHER; note = Guanosine phosphorothiorate
  modified_base 73: mod_base = OTHER; note = Adenosine phosphorothiorate
  modified_base 84: mod_base = OTHER; note = 2'-Omethylcytosine

SEQ ID NO: 5349 - RNA, 76 nt, synthetic construct; identical to SEQ ID NO: 3289
  source 1..76: mol_type = other RNA
  modified_base 1: mod_base = OTHER; note = 2'-Omethylguanosine
  modified_base 16: mod_base = OTHER; note = 2'-Omethyluridine
  modified_base 18: mod_base = OTHER; note = 2'-Omethylguanosine
  modified_base 19: mod_base = OTHER; note = 2'-Omethylguanosine
  modified_base 54: mod_base = OTHER; note = 2'-Omethyluridine
  modified_base 56: mod_base = OTHER; note = 2'-Omethylcytosine
  modified_base 59: mod_base = OTHER; note = 2'-Omethylguanosine
  modified_base 73: mod_base = OTHER; note = 2'-Omethylguanosine

SEQ ID NO: 5350 - RNA, 75 nt, synthetic construct; identical to SEQ ID NO: 1045
  source 1..75: mol_type = other RNA
  modified_base 1: mod_base = OTHER; note = 2'-Omethylguanosine phosphorothiorate
  modified_base 13: mod_base = OTHER; note = 2'-fluorouridine phosphorothiorate
  modified_base 19: mod_base = OTHER; note = Uridine phosphorothiorate
  modified_base 20: mod_base = OTHER; note = 2'-fluoroadenosine
  modified_base 28: mod_base = OTHER; note = 2'-fluorouridine
  modified_base 40: mod_base = OTHER; note = 2'-fluorocytosine
  modified_base 42: mod_base = OTHER; note = 2'-fluoroadenosine
  modified_base 52: mod_base = OTHER; note = 2'-fluoroguanosine phosphorothiorate
  modified_base 67: mod_base = OTHER; note = 2'-fluoroguanosine
  modified_base 74: mod_base = OTHER; note = Cytosine phosphorothiorate
  modified_base 75: mod_base = OTHER; note = 2'-fluoroadenosine

SEQ ID NO: 5351 - RNA, 75 nt, synthetic construct; identical to SEQ ID NO: 3311
  source 1..75: mol_type = other RNA
  modified_base 11: mod_base = OTHER; note = 2'-fluorouridine
  modified_base 23: mod_base = OTHER; note = 2'-fluorocytosine
  modified_base 28: mod_base = OTHER; note = 2'-Omethyluridine
  modified_base 29: mod_base = OTHER; note = 2'-fluoroguanosine
  modified_base 42: mod_base = OTHER; note = 2'-Omethyladenosine
  modified_base 53: mod_base = OTHER; note = 2'-fluorouridine phosphorothiorate
  modified_base 54: mod_base = OTHER; note = 2'-Omethyluridine
  modified_base 56: mod_base = OTHER; note = Guanosine phosphorothiorate
  modified_base 64: mod_base = OTHER; note = 2'-fluoroguanosine
  modified_base 65: mod_base = OTHER; note = 2'-fluorouridine
  modified_base 72: mod_base = OTHER; note = Uridine phosphorothiorate
  modified_base 73: mod_base = OTHER; note = Cytosine phosphorothiorate
  modified_base 75: mod_base = OTHER; note = 2'-fluoroadenosine

SEQ ID NO: 5352 - RNA, 73 nt, synthetic construct; identical to SEQ ID NO: 4767
  source 1..73: mol_type = other RNA
  modified_base 1: mod_base = OTHER; note = 2'-Omethylguanosine
  modified_base 18: mod_base = OTHER; note = 2'-Omethylguanosine
  modified_base 19: mod_base = OTHER; note = 2'-Omethylguanosine
  modified_base 50: mod_base = OTHER; note = 2'-Omethyladenosine
  modified_base 52: mod_base = OTHER; note = 2'-Omethylguanosine

SEQ ID NO: 5353 - RNA, 76 nt, synthetic construct; identical to SEQ ID NO: 625
  source 1..76: mol_type = other RNA
  modified_base 1: mod_base = OTHER; note = 2'-Omethylguanosine
  modified_base 10: mod_base = OTHER; note = 2'-Omethylguanosine
  modified_base 13: mod_base = OTHER; note = 2'-Omethylcytosine
  modified_base 17: mod_base = OTHER; note = Guanosine phosphorothiorate
  modified_base 18: mod_base = OTHER; note = 2'-Omethylguanosine
  modified_base 19: mod_base = OTHER; note = Adenosine phosphorothiorate
  modified_base 20: mod_base = OTHER; note = 2'-Omethyluridine
  modified_base 25: mod_base = OTHER; note = 2'-Omethylcytosine
  modified_base 29: mod_base = OTHER; note = 2'-Omethylguanosine
  modified_base 33: mod_base = OTHER; note = 2'-fluorouridine
  modified_base 35: mod_base = OTHER; note = Cytosine phosphorothiorate
  modified_base 37: mod_base = OTHER; note = Adenosine phosphorothiorate
  modified_base 41: mod_base = OTHER; note = 2'-fluorocytosine phosphorothiorate
  modified_base 43: mod_base = OTHER; note = 2'-Omethyladenosine
  modified_base 44: mod_base = OTHER; note = 2'-fluoroadenosine
  modified_base 50: mod_base = OTHER; note = 2'-Omethylcytosine
  modified_base 52: mod_base = OTHER; note = 2'-Omethylguanosine
  modified_base 54: mod_base = OTHER; note = Uridine phosphorothiorate
  modified_base 55: mod_base = OTHER; note = Uridine phosphorothiorate
  modified_base 56: mod_base = OTHER; note = 2'-Omethylcytosine
  modified_base 57: mod_base = OTHER; note = Guanosine phosphorothiorate
  modified_base 62: mod_base = OTHER; note = 2'-Omethylcytosine
  modified_base 63: mod_base = OTHER; note = 2'-fluorocytosine
  modified_base 65: mod_base = OTHER; note = 2'-Omethylguanosine
  modified_base 71: mod_base = OTHER; note = 2'-Omethyluridine
  modified_base 73: mod_base = OTHER; note = 2'-Omethylguanosine

SEQ ID NO: 5354 - RNA, 76 nt, synthetic construct; identical to SEQ ID NO: 625
  source 1..76: mol_type = other RNA
  modified_base 1: mod_base = OTHER; note = 2'-Omethylguanosine phosphorothiorate
  modified_base 2: mod_base = OTHER; note = 2'-Omethylguanosine
  modified_base 13: mod_base = OTHER; note = 2'-Omethylcytosine
  modified_base 33: mod_base = OTHER; note = 2'-fluorouridine
  modified_base 35: mod_base = OTHER; note = Cytosine phosphorothiorate
  modified_base 37: mod_base = OTHER; note = Adenosine phosphorothiorate
  modified_base 38: mod_base = OTHER; note = Adenosine phosphorothiorate
  modified_base 52: mod_base = OTHER; note = 2'-fluoroguanosine
  modified_base 56: mod_base = OTHER; note = 2'-Omethylcytosine
  modified_base 62: mod_base = OTHER; note = 2'-Omethylcytosine
  modified_base 63: mod_base = OTHER; note = 2'-fluorocytosine
  modified_base 73: mod_base = OTHER; note = 2'-Omethylguanosine
  modified_base 75: mod_base = OTHER; note = 2'-fluorocytosine phosphorothiorate

SEQ ID NO: 5355 - RNA, 85 nt, synthetic construct; identical to SEQ ID NO: 3317
  source 1..85: mol_type = other RNA
  modified_base 1: mod_base = OTHER; note = 2'-Omethylguanosine phosphorothiorate
  modified_base 2: mod_base = OTHER; note = 2'-Omethylcytosine
  modified_base 3: mod_base = OTHER; note = 2'-Omethyluridine phosphorothiorate
  modified_base 4: mod_base = OTHER; note = 2'-Omethylguanosine phosphorothiorate
  modified_base 15: mod_base = OTHER; note = 2'-Omethylguanosine phosphorothiorate
  modified_base 18: mod_base = OTHER; note = 2'-fluoroguanosine
  modified_base 20: mod_base = OTHER; note = 2'-Omethyluridine
  modified_base 26: mod_base = OTHER; note = 2'-Omethylguanosine phosphorothiorate
  modified_base 27: mod_base = OTHER; note = 2'-fluorouridine
  modified_base 29: mod_base = OTHER; note = 2'-fluoroguanosine
  modified_base 34: mod_base = OTHER; note = 2'-fluorocytosine
  modified_base 44: mod_base = OTHER; note = 2'-Omethyluridine
  modified_base 45: mod_base = OTHER; note = 2'-fluoroguanosine
  modified_base 47: mod_base = OTHER; note = Guanosine phosphorothiorate
  modified_base 54: mod_base = OTHER; note = 2'-Omethylcytosine
  modified_base 56: mod_base = OTHER; note = 2'-Omethylguanosine
  modified_base 63: mod_base = OTHER; note = Uridine phosphorothiorate
  modified_base 71: mod_base = OTHER; note = Cytosine phosphorothiorate
  modified_base 73: mod_base = OTHER; note = 2'-fluoroguanosine
  modified_base 82: mod_base = OTHER; note = 2'-Omethylguanosine

SEQ ID NO: 5356 - RNA, 74 nt, synthetic construct; identical to SEQ ID NO: 3293
  source 1..74: mol_type = other RNA
  modified_base 1: mod_base = OTHER; note = 2'-Omethyladenosine phosphorothiorate
  modified_base 2: mod_base = OTHER; note = Cytosine phosphorothiorate
  modified_base 10: mod_base = OTHER; note = 2'-fluorocytosine
  modified_base 21: mod_base = OTHER; note = 2'-fluorocytosine
  modified_base 25: mod_base = OTHER; note = 2'-fluorouridine
  modified_base 43: mod_base = OTHER; note = 2'-fluoroguanosine
  modified_base 48: mod_base = OTHER; note = 2'-fluorocytosine
  modified_base 67: mod_base = OTHER; note = Guanosine phosphorothiorate
  modified_base 73: mod_base = OTHER; note = 2'-Omethylcytosine phosphorothiorate

SEQ ID NO: 5357 - RNA, 75 nt, synthetic construct; identical to SEQ ID NO: 3306
  source 1..75: mol_type = other RNA
  modified_base 1: mod_base = OTHER; note = 2'-Omethylguanosine
  modified_base 60: mod_base = OTHER; note = 2'-Omethylcytosine
  modified_base 61: mod_base = OTHER; note = 2'-Omethyladenosine
  modified_base 63: mod_base = OTHER; note = 2'-Omethylguanosine
  modified_base 64: mod_base = OTHER; note = 2'-Omethyluridine
  modified_base 65: mod_base = OTHER; note = 2'-Omethylcytosine
  modified_base 66: mod_base = OTHER; note = 2'-Omethylguanosine
  modified_base 67: mod_base = OTHER; note = 2'-Omethylguanosine
  modified_base 68: mod_base = OTHER; note = 2'-Omethylguanosine
  modified_base 69: mod_base = OTHER; note = 2'-fluoroguanosine
  modified_base 70: mod_base = OTHER; note = 2'-Omethyluridine
  modified_base 71: mod_base = OTHER; note = 2'-Omethylcytosine
  modified_base 72: mod_base = OTHER; note = 2'-Omethyladenosine

SEQ ID NO: 5358 - RNA, 75 nt, synthetic construct; identical to SEQ ID NO: 1045
  source 1..75: mol_type = other RNA
  modified_base 1: mod_base = OTHER; note = 2'-Omethylguanosine phosphorothiorate
  modified_base 2: mod_base = OTHER; note = 2'-Omethylguanosine
  modified_base 3: mod_base = OTHER; note = 2'-Omethyluridine
  modified_base 4: mod_base = OTHER; note = 2'-Omethyluridine
  modified_base 5: mod_base = OTHER; note = 2'-Omethylcytosine
  modified_base 6: mod_base = OTHER; note = 2'-Omethylcytosine
  modified_base 16: mod_base = OTHER; note = 2'-Omethyluridine
  modified_base 17: mod_base = OTHER; note = 2'-Omethylguanosine
  modified_base 18: mod_base = OTHER; note = 2'-Omethylguanosine
  modified_base 53: mod_base = OTHER; note = 2'-Omethyluridine phosphorothiorate
  modified_base 54: mod_base = OTHER; note = Uridine phosphorothiorate
  modified_base 55: mod_base = OTHER; note = 2'-Omethylcytosine
  modified_base 56: mod_base = OTHER; note = 2'-fluoroguanosine
  modified_base 58: mod_base = OTHER; note = 2'-Omethylguanosine
  modified_base 72: mod_base = OTHER; note = 2'-Omethyluridine

SEQ ID NO: 5359 - RNA, 85 nt, synthetic construct; identical to SEQ ID NO: 3317
  source 1..85: mol_type = other RNA
  modified_base 1: mod_base = OTHER; note = 2'-Omethylguanosine phosphorothiorate
  modified_base 7: mod_base = OTHER; note = 2'-fluoroadenosine
  modified_base 14: mod_base = OTHER; note = 2'-Omethyladenosine phosphorothiorate
  modified_base 29: mod_base = OTHER; note = 2'-fluoroguanosine
  modified_base 49: mod_base = OTHER; note = 2'-fluorouridine
  modified_base 58: mod_base = OTHER; note = Guanosine phosphorothiorate

SEQ ID NO: 5360 - RNA, 75 nt, synthetic construct; identical to SEQ ID NO: 3299
  source 1..75: mol_type = other RNA
  modified_base 3: mod_base = OTHER; note = 2'-Omethyluridine phosphorothiorate
  modified_base 16: mod_base = OTHER; note = 2'-fluorocytosine
  modified_base 35: mod_base = OTHER; note = 2'-fluoroadenosine
  modified_base 52: mod_base = OTHER; note = 2'-Omethylguanosine phosphorothiorate
  modified_base 58: mod_base = OTHER; note = 2'-Omethylguanosine phosphorothiorate
  modified_base 72: mod_base = OTHER; note = Guanosine phosphorothiorate

SEQ ID NO: 5361 - RNA, 76 nt, synthetic construct; identical to SEQ ID NO: 3329
  source 1..76: mol_type = other RNA
  modified_base 1: mod_base = OTHER; note = 2'-Omethylguanosine
  modified_base 13: mod_base = OTHER; note = 2'-Omethylcytosine
  modified_base 14: mod_base = OTHER; note = 2'-Omethyladenosine
  modified_base 15: mod_base = OTHER; note = 2'-Omethyladenosine
  modified_base 16: mod_base = OTHER; note = 2'-Omethyluridine
  modified_base 17: mod_base = OTHER; note = 2'-Omethylguanosine
  modified_base 18: mod_base = OTHER; note = 2'-Omethylguanosine
  modified_base 19: mod_base = OTHER; note = Adenosine phosphorothiorate
  modified_base 20: mod_base = OTHER; note = 2'-Omethyluridine
  modified_base 21: mod_base = OTHER; note = Adenosine phosphorothiorate
  modified_base 25: mod_base = OTHER; note = 2'-Omethylcytosine
  modified_base 41: mod_base = OTHER; note = 2'-fluorocytosine
  modified_base 42: mod_base = OTHER; note = 2'-Omethyladenosine
  modified_base 43: mod_base = OTHER; note = 2'-Omethyladenosine
  modified_base 44: mod_base = OTHER; note = 2'-fluoroadenosine
  modified_base 49: mod_base = OTHER; note = 2'-Omethylcytosine
  modified_base 50: mod_base = OTHER; note = 2'-Omethylcytosine
  modified_base 51: mod_base = OTHER; note = 2'-Omethylguanosine
  modified_base 52: mod_base = OTHER; note = 2'-Omethylguanosine
  modified_base 53: mod_base = OTHER; note = 2'-Omethylguanosine
  modified_base 54: mod_base = OTHER; note = Uridine phosphorothiorate
  modified_base 55: mod_base = OTHER; note = Uridine phosphorothiorate
  modified_base 61: mod_base = OTHER; note = 2'-Omethylcytosine
  modified_base 65: mod_base = OTHER; note = 2'-Omethylguanosine
  modified_base 73: mod_base = OTHER; note = 2'-Omethylguanosine

SEQ ID NO: 5362 - RNA, 76 nt, synthetic construct; identical to SEQ ID NO: 3289
  source 1..76: mol_type = other RNA
  modified_base 1: mod_base = OTHER; note = 2'-Omethylguanosine
  modified_base 2: mod_base = OTHER; note = 2'-Omethylcytosine
  modified_base 3: mod_base = OTHER; note = 2'-Omethylcytosine
  modified_base 4: mod_base = OTHER; note = 2'-Omethyluridine
  modified_base 5: mod_base = OTHER; note = 2'-Omethylguanosine
  modified_base 6: mod_base = OTHER; note = 2'-Omethylguanosine
  modified_base 33: mod_base = OTHER; note = 2'-fluorouridine
  modified_base 41: mod_base = OTHER; note = 2'-Omethyluridine
  modified_base 44: mod_base = OTHER; note = 2'-Omethylguanosine
  modified_base 45: mod_base = OTHER; note = 2'-Omethylguanosine
  modified_base 46: mod_base = OTHER; note = 2'-fluoroguanosine
  modified_base 47: mod_base = OTHER; note = 2'-fluorouridine
  modified_base 48: mod_base = OTHER; note = 2'-fluorocytosine
  modified_base 52: mod_base = OTHER; note = 2'-Omethylguanosine
  modified_base 55: mod_base = OTHER; note = Uridine phosphorothiorate
  modified_base 71: mod_base = OTHER; note = 2'-Omethylguanosine
  modified_base 73: mod_base = OTHER; note = 2'-Omethylguanosine

SEQ ID NO: 5363 - RNA, 76 nt, synthetic construct
  source 1..76: mol_type = other RNA
ggctccgtggcgcaatggatagcgcactggtcttcaaaatcagaggttccgggttcgagtcccggcggagtcgcca

SEQ ID NO: 5364 - RNA, 76 nt, synthetic construct; identical to SEQ ID NO: 625
  source 1..76: mol_type = other RNA
  modified_base 2: mod_base = OTHER; note = Guanosine phosphorothiorate
  modified_base 3: mod_base = OTHER; note = 2'-Omethylcytosine
  modified_base 4: mod_base = OTHER; note = 2'-fluorouridine
  modified_base 5: mod_base = OTHER; note = 2'-Omethylcytosine
  modified_base 12: mod_base = OTHER; note = 2'-fluoroguanosine
  modified_base 15: mod_base = OTHER; note = 2'-fluoroadenosine
  modified_base 22: mod_base = OTHER; note = 2'-Omethylguanosine
  modified_base 23: mod_base = OTHER; note = 2'-Omethylcytosine
  modified_base 24: mod_base = OTHER; note = 2'-Omethylguanosine phosphorothiorate
  modified_base 25: mod_base = OTHER; note = 2'-fluorocytosine
  modified_base 29: mod_base = OTHER; note = 2'-Omethylguanosine
  modified_base 30: mod_base = OTHER; note = Guanosine phosphorothiorate
  modified_base 31: mod_base = OTHER; note = 2'-fluoroadenosine
  modified_base 33: mod_base = OTHER; note = Uridine phosphorothiorate
  modified_base 34: mod_base = OTHER; note = 2'-Omethyluridine
  modified_base 38: mod_base = OTHER; note = 2'-fluoroadenosine phosphorothiorate
  modified_base 39: mod_base = OTHER; note = 2'-Omethyluridine phosphorothiorate
  modified_base 43: mod_base = OTHER; note = 2'-Omethyladenosine
  modified_base 48: mod_base = OTHER; note = Uridine phosphorothiorate
  modified_base 49: mod_base = OTHER; note = 2'-Omethylcytosine
  modified_base 52: mod_base = OTHER; note = Guanosine phosphorothiorate
  modified_base 53: mod_base = OTHER; note = 2'-Omethylguanosine
  modified_base 54: mod_base = OTHER; note = Uridine phosphorothiorate
  modified_base 55: mod_base = OTHER; note = Uridine phosphorothiorate
  modified_base 56: mod_base = OTHER; note = 2'-Omethylcytosine
  modified_base 59: mod_base = OTHER; note = 2'-fluoroguanosine
  modified_base 60: mod_base = OTHER; note = 2'-fluorouridine phosphorothiorate
  modified_base 61: mod_base = OTHER; note = 2'-fluorocytosine
  modified_base 62: mod_base = OTHER; note = Cytosine phosphorothiorate
  modified_base 63: mod_base = OTHER; note = 2'-Omethylcytosine phosphorothiorate
  modified_base 64: mod_base = OTHER; note = 2'-fluoroguanosine
  modified_base 66: mod_base = OTHER; note = Cytosine phosphorothiorate
  modified_base 67: mod_base = OTHER; note = 2'-fluoroguanosine
  modified_base 69: mod_base = OTHER; note = 2'-Omethyladenosine
  modified_base 71: mod_base = OTHER; note = Uridine phosphorothiorate
  modified_base 72: mod_base = OTHER; note = 2'-fluorocytosine phosphorothiorate
  modified_base 73: mod_base = OTHER; note = Guanosine phosphorothiorate

SEQ ID NO: 5365 - RNA, 76 nt, synthetic construct; identical to SEQ ID NO: 3615
  source 1..76: mol_type = other RNA
  modified_base 1: mod_base = OTHER; note = 2'-Omethylguanosine
  modified_base 10: mod_base = OTHER; note = 2'-Omethylguanosine
  modified_base 13: mod_base = OTHER; note = 2'-Omethylcytosine
  modified_base 17: mod_base = OTHER; note = Guanosine phosphorothiorate
  modified_base 18: mod_base = OTHER; note = 2'-Omethylguanosine
  modified_base 19: mod_base = OTHER; note = Adenosine phosphorothiorate
  modified_base 20: mod_base = OTHER; note = 2'-Omethyluridine
  modified_base 25: mod_base = OTHER; note = 2'-Omethylcytosine
  modified_base 29: mod_base = OTHER; note = 2'-Omethylguanosine
  modified_base 33: mod_base = OTHER; note = 2'-fluorouridine
  modified_base 35: mod_base = OTHER; note = Cytosine phosphorothiorate
  modified_base 37: mod_base = OTHER; note = Adenosine phosphorothiorate
  modified_base 38: mod_base = OTHER; note = Adenosine phosphorothiorate
  modified_base 41: mod_base = OTHER; note = 2'-fluorocytosine phosphorothiorate
  modified_base 43: mod_base = OTHER; note = 2'-Omethyladenosine
  modified_base 44: mod_base = OTHER; note = 2'-fluoroguanosine
  modified_base 46: mod_base = OTHER; note = Guanosine phosphorothiorate
  modified_base 50: mod_base = OTHER; note = 2'-Omethylcytosine
  modified_base 52: mod_base = OTHER; note = 2'-Omethylguanosine
  modified_base 54: mod_base = OTHER; note = Uridine phosphorothiorate
  modified_base 55: mod_base = OTHER; note = Uridine phosphorothiorate
  modified_base 56: mod_base = OTHER; note = 2'-Omethylcytosine
  modified_base 57: mod_base = OTHER; note = Guanosine phosphorothiorate
  modified_base 62: mod_base = OTHER; note = 2'-Omethylcytosine
  modified_base 63: mod_base = OTHER; note = 2'-fluorocytosine
  modified_base 65: mod_base = OTHER; note = 2'-Omethylguanosine
  modified_base 71: mod_base = OTHER; note = 2'-Omethyluridine
  modified_base 73: mod_base = OTHER; note = 2'-Omethylguanosine

SEQ ID NO: 5366 - RNA, 86 nt, synthetic construct; identical to SEQ ID NO: 3290
  source 1..86: mol_type = other RNA
  modified_base 1: mod_base = OTHER; note = 2'-Omethyladenosine phosphorothiorate
  modified_base 2: mod_base = OTHER; note = 2'-Omethylcytosine phosphorothiorate
  modified_base 8: mod_base = OTHER; note = Uridine phosphorothiorate
  modified_base 14: mod_base = OTHER; note = 2'-Omethyladenosine
  modified_base 17: mod_base = OTHER; note = 2'-Omethylguanosine
  modified_base 18: mod_base = OTHER; note = 2'-Omethylguanosine
  modified_base 20: mod_base = OTHER; note = 2'-Omethyluridine phosphorothiorate
  modified_base 22: mod_base = OTHER; note = 2'-Omethyladenosine
  modified_base 25: mod_base = OTHER; note = 2'-Omethylcytosine
  modified_base 27: mod_base = OTHER; note = 2'-Omethyluridine
  modified_base 33: mod_base = OTHER; note = 2'-fluorouridine
  modified_base 41: mod_base = OTHER; note = 2'-Omethylcytosine phosphorothiorate
  modified_base 44: mod_base = OTHER; note = 2'-Omethyluridine phosphorothiorate
  modified_base 57: mod_base = OTHER; note = 2'-fluoroguanosine
  modified_base 58: mod_base = OTHER; note = 2'-fluorocytosine
  modified_base 65: mod_base = OTHER; note = Uridine phosphorothiorate
  modified_base 81: mod_base = OTHER; note = 2'-Omethylguanosine
  modified_base 83: mod_base = OTHER; note = 2'-Omethyladenosine

SEQ ID NO: 5367 - RNA, 76 nt, synthetic construct; identical to SEQ ID NO: 625
  source 1..76: mol_type = other RNA
  modified_base 1: mod_base = OTHER; note = 2'-Omethylguanosine phosphorothiorate
  modified_base 2: mod_base = OTHER; note = 2'-Omethylguanosine phosphorothiorate
  modified_base 3: mod_base = OTHER; note = 2'-Omethylcytosine
  modified_base 4: mod_base = OTHER; note = 2'-Omethyluridine
  modified_base 5: mod_base = OTHER; note = 2'-Omethylcytosine
  modified_base 6: mod_base = OTHER; note = 2'-Omethylcytosine
  modified_base 10: mod_base = OTHER; note = 2'-Omethylguanosine
  modified_base 11: mod_base = OTHER; note = 2'-Omethylcytosine
  modified_base 12: mod_base = OTHER; note = 2'-Omethylguanosine
  modified_base 13: mod_base = OTHER; note = 2'-Omethylcytosine
  modified_base 16: mod_base = OTHER; note = 2'-Omethyluridine
  modified_base 17: mod_base = OTHER; note = 2'-Omethylguanosine
  modified_base 18: mod_base = OTHER; note = 2'-Omethylguanosine
  modified_base 20: mod_base = OTHER; note = 2'-Omethyluridine
  modified_base 22: mod_base = OTHER; note = 2'-Omethylguanosine
  modified_base 23: mod_base = OTHER; note = 2'-Omethylcytosine
  modified_base 24: mod_base = OTHER; note = 2'-Omethylguanosine
  modified_base 25: mod_base = OTHER; note = 2'-Omethylcytosine
  modified_base 33: mod_base = OTHER; note = 2'-fluorouridine
  modified_base 35: mod_base = OTHER; note = Cytosine phosphorothiorate
  modified_base 37: mod_base = OTHER; note = Adenosine phosphorothiorate
  modified_base 38: mod_base = OTHER; note = Adenosine phosphorothiorate
  modified_base 41: mod_base = OTHER; note = 2'-fluorocytosine
  modified_base 42: mod_base = OTHER; note = 2'-Omethyladenosine
  modified_base 43: mod_base = OTHER; note = 2'-Omethyladenosine
  modified_base 44: mod_base = OTHER; note = 2'-fluoroadenosine
  modified_base 49: mod_base = OTHER; note = 2'-Omethylcytosine
  modified_base 50: mod_base = OTHER; note = 2'-Omethylcytosine
  modified_base 52: mod_base = OTHER; note = 2'-Omethylguanosine
  modified_base 54: mod_base = OTHER; note = 2'-Omethyluridine
  modified_base 55: mod_base = OTHER; note = Uridine phosphorothiorate
  modified_base 56: mod_base = OTHER; note = 2'-Omethylcytosine
  modified_base 57: mod_base = OTHER; note = 2'-fluoroguanosine
  modified_base 59: mod_base = OTHER; note = 2'-Omethylguanosine
  modified_base 61: mod_base = OTHER; note = 2'-Omethylcytosine
  modified_base 65: mod_base = OTHER; note = 2'-Omethylguanosine
  modified_base 74: mod_base = OTHER; note = Cytosine phosphorothiorate
  modified_base 75: mod_base = OTHER; note = 2'-Omethylcytosine phosphorothiorate

SEQ ID NO: 5368 - RNA, 76 nt, synthetic construct; identical to SEQ ID NO: 625
  source 1..76: mol_type = other RNA
  modified_base 1: mod_base = OTHER; note = 2'-Omethylguanosine phosphorothiorate
  modified_base 2: mod_base = OTHER; note = 2'-Omethylguanosine
  modified_base 43: mod_base = OTHER; note = Adenosine phosphorothiorate
  modified_base 44: mod_base = OTHER; note = 2'-O-(2-Methoxyethyl) adenosine
  modified_base 45: mod_base = OTHER; note = Guanosine phosphorothiorate
  modified_base 46: mod_base = OTHER; note = 2'-fluoroguanosine
  modified_base 49: mod_base = OTHER; note = 2'-O-(2-Methoxyethyl) 5-methylcytosine
  modified_base 63: mod_base = OTHER; note = 2'-fluorocytosine
  modified_base 64: mod_base = OTHER; note = 2'-O-(2-Methoxyethyl) guanosine
  modified_base 73: mod_base = OTHER; note = 2'-Omethylguanosine

SEQ ID NO: 5369 - RNA, 86 nt, synthetic construct
  source 1..86: mol_type = other RNA
gctggtttgcccgagtggttaagggggaagacttcagatcttctgcacagaagtgcgcgtgggttcgaaccccacagccagcacca

SEQ ID NO: 5370 - RNA, 85 nt, synthetic construct; identical to SEQ ID NO: 3286
  source 1..85: mol_type = other RNA
  modified_base 1: mod_base = OTHER; note = 2'-Omethylcytosine
  modified_base 6: mod_base = OTHER; note = 2'-Omethyladenosine
  modified_base 12: mod_base = OTHER; note = Guanosine phosphorothiorate
  modified_base 16: mod_base = OTHER; note = Guanosine phosphorothiorate
  modified_base 29: mod_base = OTHER; note = 2'-fluoroguanosine
  modified_base 33: mod_base = OTHER; note = 2'-fluorouridine
  modified_base 53: mod_base = OTHER; note = 2'-Omethyluridine
  modified_base 58: mod_base = OTHER; note = Guanosine phosphorothiorate
  modified_base 59: mod_base = OTHER; note = 2'-fluorouridine
  modified_base 65: mod_base = OTHER; note = Cytosine phosphorothiorate
  modified_base 75: mod_base = OTHER; note = 2'-fluorouridine
  modified_base 76: mod_base = OTHER; note = 2'-fluorocytosine phosphorothiorate
  modified_base 79: mod_base = OTHER; note = Guanosine phosphorothiorate

SEQ ID NO: 5371 - RNA, 75 nt, synthetic construct; identical to SEQ ID NO: 3336
  source 1..75: mol_type = other RNA
  modified_base 5: mod_base = OTHER; note = 2'-Omethylguanosine phosphorothiorate
  modified_base 14: mod_base = OTHER; note = 2'-fluoroguanosine
  modified_base 15: mod_base = OTHER; note = 2'-fluorouridine phosphorothiorate
  modified_base 19: mod_base = OTHER; note = 2'-fluorouridine phosphorothiorate
  modified_base 20: mod_base = OTHER; note = 2'-fluoroadenosine
  modified_base 21: mod_base = OTHER; note = 2'-fluoroguanosine
  modified_base 40: mod_base = OTHER; note = 2'-fluorouridine
  modified_base 41: mod_base = OTHER; note = 2'-fluoroguanosine
  modified_base 42: mod_base = OTHER; note = 2'-fluoroadenosine
  modified_base 50: mod_base = OTHER; note = Guanosine phosphorothiorate
  modified_base 51: mod_base = OTHER; note = Guanosine phosphorothiorate
  modified_base 56: mod_base = OTHER; note = 2'-Omethyladenosine phosphorothiorate
  modified_base 58: mod_base = OTHER; note = 2'-Omethylguanosine phosphorothiorate
  modified_base 64: mod_base = OTHER; note = 2'-fluoroguanosine phosphorothiorate
  modified_base 72: mod_base = OTHER; note = 2'-fluoroguanosine phosphorothiorate
  modified_base 73: mod_base = OTHER; note = Cytosine phosphorothiorate
  modified_base 74: mod_base = OTHER; note = 2'-fluorocytosine phosphorothiorate

SEQ ID NO: 5372 - RNA, 76 nt, synthetic construct
  source 1..76: mol_type = other RNA
ggctccgtggcgtaatggatagcgcattggacttcaaattcaaaggctccgggttcgagtcccggcggagtcgcca

SEQ ID NO: 5373 - RNA, 76 nt, synthetic construct; identical to SEQ ID NO: 3289
  source 1..76: mol_type = other RNA
  modified_base 1: mod_base = OTHER; note = 2'-Omethylguanosine phosphorothiorate
  modified_base 2: mod_base = OTHER; note = Cytosine phosphorothiorate
  modified_base 75: mod_base = OTHER; note = 2'-Omethylcytosine phosphorothiorate
  modified_base 76: mod_base = OTHER; note = 2'-Omethyladenosine

SEQ ID NO: 5374 - RNA, 75 nt, synthetic construct; identical to SEQ ID NO: 3306
  source 1..75: mol_type = other RNA
  modified_base 1: mod_base = OTHER; note = 2'-Omethylguanosine
  modified_base 43: mod_base = OTHER; note = 2'-Omethyladenosine
  modified_base 44: mod_base = OTHER; note = 2'-Omethylguanosine
  modified_base 45: mod_base = OTHER; note = 2'-fluoroguanosine
  modified_base 47: mod_base = OTHER; note = 2'-fluorouridine
  modified_base 72: mod_base = OTHER; note = 2'-Omethyladenosine

SEQ ID NO: 5375 - RNA, 74 nt, synthetic construct; identical to SEQ ID NO: 3293
  source 1..74: mol_type = other RNA
  modified_base 1: mod_base = OTHER; note = 2'-Omethyladenosine
  modified_base 2: mod_base = OTHER; note = 2'-Omethylcytosine
  modified_base 3: mod_base = OTHER; note = Cytosine phosphorothiorate
  modified_base 4: mod_base = OTHER; note = Uridine phosphorothiorate
  modified_base 6: mod_base = OTHER; note = Guanosine phosphorothiorate
  modified_base 8: mod_base = OTHER; note = Guanosine phosphorothiorate
  modified_base 9: mod_base = OTHER; note = 2'-fluoroguanosine
  modified_base 12: mod_base = OTHER; note = 2'-Omethylcytosine
  modified_base 24: mod_base = OTHER; note = Guanosine phosphorothiorate
  modified_base 27: mod_base = OTHER; note = 2'-Omethyluridine
  modified_base 34: mod_base = OTHER; note = 2'-fluoroadenosine
  modified_base 42: mod_base = OTHER; note = Adenosine phosphorothiorate
  modified_base 43: mod_base = OTHER; note = 2'-fluoroguanosine
  modified_base 46: mod_base = OTHER; note = Uridine phosphorothiorate
  modified_base 48: mod_base = OTHER; note = 2'-fluorocytosine
  modified_base 51: mod_base = OTHER; note = 2'-fluoroguanosine
  modified_base 62: mod_base = OTHER; note = Guanosine phosphorothiorate
  modified_base 73: mod_base = OTHER; note = Cytosine phosphorothiorate
  modified_base 74: mod_base = OTHER; note = 2'-fluoroadenosine

SEQ ID NO: 5376 - RNA, 86 nt, synthetic construct; identical to SEQ ID NO: 3290
  source 1..86: mol_type = other RNA
  modified_base 49: mod_base = OTHER; note = 2'-Omethyladenosine

SEQ ID NO: 5377 - RNA, 73 nt, synthetic construct; identical to SEQ ID NO: 935
  source 1..73: mol_type = other RNA
  modified_base 1: mod_base = OTHER; note = 2'-Omethylguanosine phosphorothiorate
  modified_base 2: mod_base = OTHER; note = 2'-Omethylguanosine
  modified_base 20: mod_base = OTHER; note = Uridine phosphorothiorate
  modified_base 21: mod_base = OTHER; note = 2'-fluoroadenosine
  modified_base 33: mod_base = OTHER; note = 2'-fluorouridine
  modified_base 54: mod_base = OTHER; note = 2'-Omethyluridine
  modified_base 68: mod_base = OTHER; note = 2'-fluoroguanosine

SEQ ID NO: 5378 - RNA, 85 nt, synthetic construct; identical to SEQ ID NO: 3288
  source 1..85: mol_type = other RNA
  modified_base 1: mod_base = OTHER; note = 2'-Omethylcytosine phosphorothiorate
  modified_base 16: mod_base = OTHER; note = Guanosine phosphorothiorate
  modified_base 42: mod_base = OTHER; note = Adenosine phosphorothiorate
  modified_base 57: mod_base = OTHER; note = 2'-Omethylcytosine
  modified_base 60: mod_base = OTHER; note = Guanosine phosphorothiorate
  modified_base 67: mod_base = OTHER; note = Adenosine phosphorothiorate
  modified_base 84: mod_base = OTHER; note = 2'-Omethylcytosine

SEQ ID NO: 5379 - RNA, 75 nt, synthetic construct; identical to SEQ ID NO: 3306
  source 1..75: mol_type = other RNA
  modified_base 1: mod_base = OTHER; note = 2'-Omethylguanosine
  modified_base 14: mod_base = OTHER; note = 2'-Omethyladenosine phosphorothiorate
  modified_base 15: mod_base = OTHER; note = 2'-Omethyladenosine phosphorothiorate
  modified_base 16: mod_base = OTHER; note = 2'-Omethylcytosine phosphorothiorate
  modified_base 17: mod_base = OTHER; note = 2'-Omethylguanosine phosphorothiorate
  modified_base 18: mod_base = OTHER; note = 2'-Omethylguanosine phosphorothiorate
  modified_base 19: mod_base = OTHER; note = 2'-fluorouridine phosphorothiorate
  modified_base 20: mod_base = OTHER; note = 2'-fluoroadenosine phosphorothiorate
  modified_base 49: mod_base = OTHER; note = 2'-Omethylcytosine
  modified_base 51: mod_base = OTHER; note = 2'-Omethyluridine
  modified_base 72: mod_base = OTHER; note = 2'-Omethyladenosine

SEQ ID NO: 5380 - RNA, 85 nt, synthetic construct; identical to SEQ ID NO: 3317
  source 1..85: mol_type = other RNA
  modified_base 1: mod_base = OTHER; note = 2'-Omethylguanosine phosphorothiorate
  modified_base 2: mod_base = OTHER; note = 2'-Omethylcytosine
  modified_base 4: mod_base = OTHER; note = 2'-Omethylguanosine
  modified_base 14: mod_base = OTHER; note = Adenosine phosphorothiorate
  modified_base 19: mod_base = OTHER; note = 2'-Omethyluridine
  modified_base 34: mod_base = OTHER; note = 2'-Omethylcytosine
  modified_base 35: mod_base = OTHER; note = 2'-fluorouridine
  modified_base 36: mod_base = OTHER; note = 2'-fluoroadenosine
  modified_base 41: mod_base = OTHER; note = 2'-fluorocytosine phosphorothiorate
  modified_base 42: mod_base = OTHER; note = 2'-fluoroadenosine
  modified_base 44: mod_base = OTHER; note = 2'-Omethyluridine
  modified_base 46: mod_base = OTHER; note = 2'-Omethylguanosine
  modified_base 47: mod_base = OTHER; note = 2'-fluoroguanosine phosphorothiorate
  modified_base 50: mod_base = OTHER; note = Cytosine phosphorothiorate
  modified_base 59: mod_base = OTHER; note = 2'-fluorocytosine
  modified_base 60: mod_base = OTHER; note = 2'-fluoroadenosine
  modified_base 62: mod_base = OTHER; note = 2'-Omethylguanosine
  modified_base 82: mod_base = OTHER; note = 2'-Omethylguanosine

SEQ ID NO: 5381 - RNA, 76 nt, synthetic construct; identical to SEQ ID NO: 625
  source 1..76: mol_type = other RNA
  modified_base 1: mod_base = OTHER; note = 2'-Omethylguanosine phosphorothiorate
  modified_base 2: mod_base = OTHER; note = 2'-Omethylguanosine
  modified_base 13: mod_base = OTHER; note = 2'-Omethylcytosine
  modified_base 33: mod_base = OTHER; note = 2'-fluorouridine
  modified_base 35: mod_base = OTHER; note = Cytosine phosphorothiorate
  modified_base 37: mod_base = OTHER; note = Adenosine phosphorothiorate
  modified_base 52: mod_base = OTHER; note = 2'-Omethylguanosine
  modified_base 62: mod_base = OTHER; note = 2'-Omethylcytosine
  modified_base 73: mod_base = OTHER; note = 2'-Omethylguanosine
  modified_base 75: mod_base = OTHER; note = 2'-fluorocytosine phosphorothiorate

SEQ ID NO: 5382 - DNA, 76 bp, synthetic construct; identical to SEQ ID NO: 1924
  source 1..76: mol_type = other DNA
  modified_base 1: mod_base = OTHER; note = 2'-Omethylguanosine
  modified_base 2: mod_base = OTHER; note = deoxyguanosine phosphorothiorate
  modified_base 4: mod_base = OTHER; note = Uridine phosphorothiorate
  modified_base 5: mod_base = OTHER; note = 2'-Omethylcytosine
  modified_base 10: mod_base = OTHER; note = Guanosine phosphorothiorate
  modified_base 11: mod_base = OTHER; note = 2'-fluorocytosine
  modified_base 12: mod_base = OTHER; note = Guanosine phosphorothiorate
  modified_base 14: mod_base = OTHER; note = Adenosine phosphorothiorate
  modified_base 15: mod_base = OTHER; note = 2'-Omethyladenosine
  modified_base 20: mod_base = OTHER; note = Uridine phosphorothiorate
  modified_base 21: mod_base = OTHER; note = 2'-fluoroadenosine phosphorothiorate
  modified_base 22: mod_base = OTHER; note = Guanosine phosphorothiorate
  modified_base 23: mod_base = OTHER; note = deoxycytosine phosphorothiorate
  modified_base 26: mod_base = OTHER; note = Adenosine phosphorothiorate
  modified_base 27: mod_base = OTHER; note = 2'-O-(2-Methoxyethyl) thymine
  modified_base 29: mod_base = OTHER; note = Guanosine phosphorothiorate
  modified_base 32: mod_base = OTHER; note = Cytosine phosphorothiorate
  modified_base 33: mod_base = OTHER; note = 2'-O-(2-Methoxyethyl) thymine phosphorothiorate
  modified_base 39: mod_base = OTHER; note = Uridine phosphorothiorate
  modified_base 40: mod_base = OTHER; note = 2'-Omethyluridine
  modified_base 41: mod_base = OTHER; note = 2'-fluorocytosine
  modified_base 42: mod_base = OTHER; note = Adenosine phosphorothiorate
  modified_base 43: mod_base = OTHER; note = Adenosine phosphorothiorate
  modified_base 44: mod_base = OTHER; note = Adenosine phosphorothiorate
  modified_base 45: mod_base = OTHER; note = Guanosine phosphorothiorate
  modified_base 46: mod_base = OTHER; note = 2'-O-(2-Methoxyethyl) guanosine phosphorothiorate
  modified_base 47: mod_base = OTHER; note = 2'-Omethyluridine phosphorothiorate
  modified_base 51: mod_base = OTHER; note = 2'-O-(2-Methoxyethyl) guanosine phosphorothiorate
  modified_base 52: mod_base = OTHER; note = 2'-Omethylguanosine
  modified_base 54: mod_base = OTHER; note = Uridine phosphorothiorate
  modified_base 55: mod_base = OTHER; note = 2'-Omethyluridine phosphorothiorate
  modified_base 57: mod_base = OTHER; note = 2'-O-(2-Methoxyethyl) guanosine
  modified_base 60: mod_base = OTHER; note = Uridine phosphorothiorate
  modified_base 61: mod_base = OTHER; note = 2'-Omethylcytosine
  modified_base 63: mod_base = OTHER; note = Cytosine phosphorothiorate
  modified_base 64: mod_base = OTHER; note = 2'-O-(2-Methoxyethyl) guanosine
  modified_base 65: mod_base = OTHER; note = 2'-fluoroguanosine phosphorothiorate
  modified_base 74: mod_base = OTHER; note = Cytosine phosphorothiorate
  modified_base 75: mod_base = OTHER; note = 2'-Omethylcytosine phosphorothiorate
  modified_base 76: mod_base = OTHER; note = 2'-Omethyladenosine
  misc_feature 1: note = RNA
  misc_feature 2: note = DNA
  misc_feature 3..12: note = RNA
  misc_feature 13: note = DNA
  misc_feature 14..15: note = RNA
  misc_feature 16: note = DNA
  misc_feature 17..22: note = RNA
  misc_feature 23..24: note = DNA
  misc_feature 25..29: note = RNA
  misc_feature 30: note = DNA
  misc_feature 31..68: note = RNA
  misc_feature 69: note = DNA
  misc_feature 70..76: note = RNA

SEQ ID NO: 5383 - RNA, 86 nt, synthetic construct; identical to SEQ ID NO: 3290
  source 1..86: mol_type = other RNA
  modified_base 28: mod_base = OTHER; note = 2'-Omethyluridine

SEQ ID NO: 5384 - RNA, 76 nt, synthetic construct; identical to SEQ ID NO: 3490
  source 1..76: mol_type = other RNA
  modified_base 1: mod_base = OTHER; note = 2'-Omethylguanosine
  modified_base 2: mod_base = OTHER; note = 2'-Omethylguanosine
  modified_base 3: mod_base = OTHER; note = 2'-Omethylcytosine
  modified_base 4: mod_base = OTHER; note = 2'-Omethyluridine
  modified_base 5: mod_base = OTHER; note = 2'-Omethylcytosine
  modified_base 6: mod_base = OTHER; note = 2'-Omethylcytosine
  modified_base 13: mod_base = OTHER; note = 2'-Omethylcytosine
  modified_base 14: mod_base = OTHER; note = 2'-Omethyladenosine
  modified_base 15: mod_base = OTHER; note = 2'-Omethyladenosine
  modified_base 16: mod_base = OTHER; note = 2'-Omethyluridine
  modified_base 17: mod_base = OTHER; note = 2'-Omethylguanosine
  modified_base 18: mod_base = OTHER; note = 2'-Omethylguanosine
  modified_base 19: mod_base = OTHER; note = Adenosine phosphorothiorate
  modified_base 20: mod_base = OTHER; note = 2'-Omethyluridine
  modified_base 21: mod_base = OTHER; note = Adenosine phosphorothiorate
  modified_base 25: mod_base = OTHER; note = 2'-Omethylcytosine
  modified_base 33: mod_base = OTHER; note = Uridine phosphorothiorate
  modified_base 34: mod_base = OTHER; note = 2'-Omethyluridine
  modified_base 35: mod_base = OTHER; note = Cytosine phosphorothiorate
  modified_base 37: mod_base = OTHER; note = Adenosine phosphorothiorate
  modified_base 38: mod_base = OTHER; note = Adenosine phosphorothiorate
  modified_base 49: mod_base = OTHER; note = 2'-Omethylguanosine
  modified_base 50: mod_base = OTHER; note = 2'-Omethylcytosine
  modified_base 51: mod_base = OTHER; note = 2'-Omethylguanosine
  modified_base 52: mod_base = OTHER; note = 2'-Omethylguanosine
  modified_base 53: mod_base = OTHER; note = 2'-Omethylguanosine
  modified_base 54: mod_base = OTHER; note = Uridine phosphorothiorate
  modified_base 55: mod_base = OTHER; note = Uridine phosphorothiorate
  modified_base 61: mod_base = OTHER; note = 2'-Omethylcytosine
  modified_base 65: mod_base = OTHER; note = 2'-Omethylcytosine
  modified_base 73: mod_base = OTHER; note = 2'-Omethylguanosine

SEQ ID NO: 5385 - RNA, 76 nt, synthetic construct; identical to SEQ ID NO: 3295
  source 1..76: mol_type = other RNA
  modified_base 1: mod_base = OTHER; note = 2'-Omethylcytosine phosphorothiorate
  modified_base 2: mod_base = OTHER; note = 2'-Omethylcytosine phosphorothiorate
  modified_base 4: mod_base = OTHER; note = 2'-Omethyluridine phosphorothiorate
  modified_base 5: mod_base = OTHER; note = 2'-Omethylcytosine
  modified_base 11: mod_base = OTHER; note = Cytosine phosphorothiorate
  modified_base 17: mod_base = OTHER; note = 2'-Omethyluridine
  modified_base 23: mod_base = OTHER; note = 2'-fluoroadenosine phosphorothiorate
  modified_base 26: mod_base = OTHER; note = 2'-Omethylguanosine phosphorothiorate
  modified_base 34: mod_base = OTHER; note = 2'-fluorouridine
  modified_base 37: mod_base = OTHER; note = 2'-fluoroguanosine
  modified_base 38: mod_base = OTHER; note = 2'-Omethyladenosine
  modified_base 42: mod_base = OTHER; note = 2'-fluorouridine phosphorothiorate
  modified_base 46: mod_base = OTHER; note = 2'-Omethylguanosine
  modified_base 52: mod_base = OTHER; note = 2'-fluoroguanosine phosphorothiorate
  modified_base 54: mod_base = OTHER; note = Uridine phosphorothiorate
  modified_base 58: mod_base = OTHER; note = Adenosine phosphorothiorate
  modified_base 75: mod_base = OTHER; note = 2'-Omethylcytosine phosphorothiorate
  modified_base 76: mod_base = OTHER; note = 2'-Omethyladenosine

SEQ ID NO: 5386 - RNA, 76 nt, synthetic construct; identical to SEQ ID NO: 3289
  source 1..76: mol_type = other RNA
  modified_base 13: mod_base = OTHER; note = 2'-Omethylcytosine
  modified_base 52: mod_base = OTHER; note = 2'-Omethylguanosine

SEQ ID NO: 5387 - RNA, 75 nt, synthetic construct; identical to SEQ ID NO: 1045
  source 1..75: mol_type = other RNA
  modified_base 2: mod_base = OTHER; note = 2'-Omethylguanosine
  modified_base 3: mod_base = OTHER; note = 2'-Omethyluridine phosphorothiorate
  modified_base 4: mod_base = OTHER; note = 2'-Omethyluridine phosphorothiorate
  modified_base 13: mod_base = OTHER; note = 2'-Omethyluridine phosphorothiorate
  modified_base 26: mod_base = OTHER; note = 2'-Omethyluridine phosphorothiorate
  modified_base 31: mod_base = OTHER; note = 2'-Omethyladenosine phosphorothiorate
  modified_base 41: mod_base = OTHER; note = 2'-fluorocytosine
  modified_base 47: mod_base = OTHER; note = 2'-fluorouridine
  modified_base 58: mod_base = OTHER; note = 2'-Omethylguanosine
  modified_base 59: mod_base = OTHER; note = 2'-fluorouridine phosphorothiorate
  modified_base 61: mod_base = OTHER; note = 2'-Omethyluridine
  modified_base 62: mod_base = OTHER; note = Cytosine phosphorothiorate
  modified_base 64: mod_base = OTHER; note = 2'-Omethylguanosine
  modified_base 72: mod_base = OTHER; note = 2'-Omethyluridine
  modified_base 74: mod_base = OTHER; note = 2'-Omethylcytosine phosphorothiorate

SEQ ID NO: 5388 - RNA, 86 nt, synthetic construct
  source 1..86: mol_type = other RNA
gctggtttgcccgagtggttaagggggaagacttcagatcttctgcactgcagtgcgcgtgggttcgaaccccacagccagcacca

SEQ ID NO: 5389 - RNA, 86 nt, synthetic construct; identical to SEQ ID NO: 3290
  source 1..86: mol_type = other RNA
  modified_base 1: mod_base = OTHER; note = 2'-Omethyladenosine
  modified_base 2: mod_base = OTHER; note = 2'-Omethylcytosine
  modified_base 3: mod_base = OTHER; note = 2'-Omethylcytosine
  modified_base 4: mod_base = OTHER; note = 2'-Omethyladenosine
  modified_base 5: mod_base = OTHER; note = 2'-Omethylguanosine
  modified_base 6: mod_base = OTHER; note = 2'-Omethylguanosine
  modified_base 59: mod_base = OTHER; note = 2'-Omethylguanosine
  modified_base 60: mod_base = OTHER; note = 2'-Omethyluridine
  modified_base 61: mod_base = OTHER; note = 2'-Omethylguanosine
  modified_base 62: mod_base = OTHER; note = 2'-Omethylguanosine
  modified_base 63: mod_base = OTHER; note = 2'-Omethylguanosine
  modified_base 83: mod_base = OTHER; note = 2'-Omethyladenosine

SEQ ID NO: 5390 - RNA, 75 nt, synthetic construct; identical to SEQ ID NO: 1045
  source 1..75: mol_type = other RNA
  modified_base 1: mod_base = OTHER; note = 2'-Omethylguanosine
  modified_base 65: mod_base = OTHER; note = 2'-Omethyluridine
  modified_base 66: mod_base = OTHER; note = 2'-Omethylguanosine
  modified_base 67: mod_base = OTHER; note = 2'-Omethylguanosine
  modified_base 68: mod_base = OTHER; note = 2'-Omethyladenosine
  modified_base 70: mod_base = OTHER; note = 2'-Omethylcytosine
  modified_base 71: mod_base = OTHER; note = 2'-Omethylcytosine
  modified_base 72: mod_base = OTHER; note = 2'-Omethyluridine

SEQ ID NO: 5391 - DNA, 76 bp, synthetic construct; identical to SEQ ID NO: 1924
  source 1..76: mol_type = other DNA
  modified_base 1: mod_base = OTHER; note = 2'-Omethylguanosine phosphorothiorate
  modified_base 2: mod_base = OTHER; note = 2'-Omethylguanosine phosphorothiorate
  modified_base 3: mod_base = OTHER; note = Cytosine phosphorothiorate
  modified_base 4: mod_base = OTHER; note = Uridine phosphorothiorate
  modified_base 5: mod_base = OTHER; note = 2'-O-(2-Methoxyethyl) 5-methylcytosine
  modified_base 6: mod_base = OTHER; note = 2'-O-(2-Methoxyethyl) 5-methylcytosine
  modified_base 7: mod_base = OTHER; note = deoxyguanosine phosphorothiorate
  modified_base 8: mod_base = OTHER; note = 2'-fluorouridine phosphorothiorate
  modified_base 9: mod_base = OTHER; note = 2'-fluoroguanosine
  modified_base 11: mod_base = OTHER; note = 2'-fluorocytosine phosphorothiorate
  modified_base 12: mod_base = OTHER; note = 2'-O-(2-Methoxyethyl) guanosine phosphorothiorate
  modified_base 13: mod_base = OTHER; note = deoxycytosine phosphorothiorate
  modified_base 15: mod_base = OTHER; note = 2'-Omethyladenosine
  modified_base 17: mod_base = OTHER; note = Guanosine phosphorothiorate
  modified_base 18: mod_base = OTHER; note = 2'-O-(2-Methoxyethyl) guanosine
  modified_base 19: mod_base = OTHER; note = 2'-Omethyladenosine phosphorothiorate
  modified_base 20: mod_base = OTHER; note = 2'-fluorouridine
  modified_base 21: mod_base = OTHER; note = Adenosine phosphorothiorate
  modified_base 22: mod_base = OTHER; note = 2'-Omethylguanosine phosphorothiorate
  modified_base 27: mod_base = OTHER; note = 2'-O-(2-Methoxyethyl) thymine phosphorothiorate
  modified_base 28: mod_base = OTHER; note = 2'-fluorouridine phosphorothiorate
  modified_base 30: mod_base = OTHER; note = 2'-fluoroguanosine
  modified_base 33: mod_base = OTHER; note = Uridine phosphorothiorate
  modified_base 34: mod_base = OTHER; note = 2'-O-(2-Methoxyethyl) thymine
  modified_base 37: mod_base = OTHER; note = Adenosine phosphorothiorate
  modified_base 38: mod_base = OTHER; note = 2'-fluoroadenosine
  modified_base 39: mod_base = OTHER; note = Uridine phosphorothiorate
  modified_base 40: mod_base = OTHER; note = Uridine phosphorothiorate
  modified_base 41: mod_base = OTHER; note = 2'-O-(2-Methoxyethyl) 5-methylcytosine
  modified_base 43: mod_base = OTHER; note = Adenosine phosphorothiorate
  modified_base 44: mod_base = OTHER; note = 2'-O-(2-Methoxyethyl) adenosine
  modified_base 47: mod_base = OTHER; note = 2'-O-(2-Methoxyethyl) thymine phosphorothiorate
  modified_base 48: mod_base = OTHER; note = 2'-fluorouridine phosphorothiorate
  modified_base 49: mod_base = OTHER; note = 2'-Omethylcytosine
  modified_base 50: mod_base = OTHER; note = Cytosine phosphorothiorate
  modified_base 53: mod_base = OTHER; note = Guanosine phosphorothiorate
  modified_base 54: mod_base = OTHER; note = 2'-Omethyluridine
  modified_base 56: mod_base = OTHER; note = Cytosine phosphorothiorate
  modified_base 58: mod_base = OTHER; note = Adenosine phosphorothiorate
  modified_base 60: mod_base = OTHER; note = Uridine phosphorothiorate
  modified_base 63: mod_base = OTHER; note = Cytosine phosphorothiorate
  modified_base 70: mod_base = OTHER; note = 2'-fluoroguanosine
  modified_base 75: mod_base = OTHER; note = 2'-fluorocytosine
  modified_base 76: mod_base = OTHER; note = 2'-O-(2-Methoxyethyl) adenosine
  misc_feature 1..6: note = RNA
  misc_feature 7: note = DNA
  misc_feature 8..12: note = RNA
  misc_feature 13: note = DNA
  misc_feature 14..28: note = RNA
  misc_feature 29: note = DNA
  misc_feature 30..56: note = RNA
  misc_feature 57: note = DNA
  misc_feature 58..63: note = RNA
  misc_feature 64: note = DNA
  misc_feature 65..76: note = RNA

SEQ ID NO: 5392 - RNA, 85 nt, synthetic construct; identical to SEQ ID NO: 3310
  source 1..85: mol_type = other RNA
  modified_base 1: mod_base = OTHER; note = 2'-Omethylcytosine phosphorothiorate
  modified_base 3: mod_base = OTHER; note = 2'-Omethyladenosine
  modified_base 13: mod_base = OTHER; note = Adenosine phosphorothiorate
  modified_base 27: mod_base = OTHER; note = 2'-fluorouridine
  modified_base 45: mod_base = OTHER; note = 2'-Omethylguanosine
  modified_base 58: mod_base = OTHER; note = 2'-Omethylguanosine
  modified_base 64: mod_base = OTHER; note = 2'-fluorouridine
  modified_base 84: mod_base = OTHER; note = 2'-Omethylcytosine

SEQ ID NO: 5393 - RNA, 76 nt, synthetic construct; identical to SEQ ID NO: 625
  source 1..76: mol_type = other RNA
  modified_base 1: mod_base = OTHER; note = 2'-Omethylguanosine phosphorothiorate
  modified_base 2: mod_base = OTHER; note = 2'-Omethylguanosine
  modified_base 3: mod_base = OTHER; note = 2'-Omethylcytosine
  modified_base 4: mod_base = OTHER; note = 2'-Omethyluridine
  modified_base 5: mod_base = OTHER; note = 2'-Omethylcytosine
  modified_base 6: mod_base = OTHER; note = 2'-Omethylcytosine
  modified_base 17: mod_base = OTHER; note = Guanosine phosphorothiorate
  modified_base 25: mod_base = OTHER; note = 2'-fluorocytosine
  modified_base 33: mod_base = OTHER; note = 2'-fluorouridine
  modified_base 35: mod_base = OTHER; note = Cytosine phosphorothiorate
  modified_base 37: mod_base = OTHER; note = Adenosine phosphorothiorate
  modified_base 38: mod_base = OTHER; note = Adenosine phosphorothiorate
  modified_base 49: mod_base = OTHER; note = 2'-Omethylcytosine
  modified_base 50: mod_base = OTHER; note = 2'-Omethylcytosine
  modified_base 51: mod_base = OTHER; note = 2'-Omethylguanosine
  modified_base 52: mod_base = OTHER; note = 2'-fluoroguanosine
  modified_base 53: mod_base = OTHER; note = 2'-Omethylguanosine
  modified_base 56: mod_base = OTHER; note = 2'-Omethylcytosine
  modified_base 57: mod_base = OTHER; note = 2'-O-(2-Methoxyethyl) guanosine
  modified_base 61: mod_base = OTHER; note = 2'-Omethylcytosine
  modified_base 62: mod_base = OTHER; note = 2'-Omethylcytosine
  modified_base 63: mod_base = OTHER; note = 2'-fluorocytosine
  modified_base 64: mod_base = OTHER; note = 2'-Omethylguanosine
  modified_base 65: mod_base = OTHER; note = 2'-Omethylguanosine
  modified_base 66: mod_base = OTHER; note = 2'-Omethylcytosine
  modified_base 67: mod_base = OTHER; note = 2'-Omethylguanosine
  modified_base 68: mod_base = OTHER; note = 2'-Omethylguanosine
  modified_base 69: mod_base = OTHER; note = 2'-fluoroadenosine
  modified_base 71: mod_base = OTHER; note = 2'-Omethyluridine
  modified_base 73: mod_base = OTHER; note = 2'-Omethylguanosine
  modified_base 74: mod_base = OTHER; note = Cytosine phosphorothiorate
  modified_base 75: mod_base = OTHER; note = 2'-fluorocytosine phosphorothiorate

SEQ ID NO: 5394 - RNA, 76 nt, synthetic construct; identical to SEQ ID NO: 625
  source 1..76: mol_type = other RNA
  modified_base 38: mod_base = OTHER; note = Adenosine phosphorothiorate
  modified_base 39: mod_base = OTHER; note = Uridine phosphorothiorate
  modified_base 40: mod_base = OTHER; note = 2'-fluorouridine

SEQ ID NO: 5395 - RNA, 85 nt, synthetic construct; identical to SEQ ID NO: 3286
  source 1..85: mol_type = other RNA
  modified_base 1: mod_base = OTHER; note = 2'-Omethylcytosine
  modified_base 11: mod_base = OTHER; note = Cytosine phosphorothiorate
  modified_base 17: mod_base = OTHER; note = 2'-Omethylguanosine
  modified_base 28: mod_base = OTHER; note = 2'-fluoroguanosine
  modified_base 30: mod_base = OTHER; note = 2'-fluoroadenosine
  modified_base 51: mod_base = OTHER; note = 2'-fluorouridine
  modified_base 53: mod_base = OTHER; note = 2'-fluorouridine
  modified_base 60: mod_base = OTHER; note = 2'-Omethylguanosine
  modified_base 84: mod_base = OTHER; note = Cytosine phosphorothiorate

SEQ ID NO: 5396 - RNA, 76 nt, synthetic construct
  source 1..76: mol_type = other RNA
ggctgcgtggcgcaatggatagcgcatgggacttcaaattccaaggttccgggttcgagtcccggcgcagtcgcca

SEQ ID NO: 5397 - RNA, 76 nt, synthetic construct; identical to SEQ ID NO: 3490
  source 1..76: mol_type = other RNA

SEQ ID NO: 5398 - RNA, 76 nt, synthetic construct; identical to SEQ ID NO: 625
  source 1..76: mol_type = other RNA
  modified_base 1: mod_base = OTHER; note = 2'-Omethylguanosine phosphorothiorate
  modified_base 2: mod_base = OTHER; note = 2'-Omethylguanosine
  modified_base 10: mod_base = OTHER; note = 2'-Omethylguanosine
  modified_base 11: mod_base = OTHER; note = 2'-Omethylcytosine
  modified_base 12: mod_base = OTHER; note = 2'-Omethylguanosine
  modified_base 13: mod_base = OTHER; note = 2'-Omethylcytosine
  modified_base 17: mod_base = OTHER; note = 2'-Omethylguanosine
  modified_base 33: mod_base = OTHER; note = 2'-fluorouridine
  modified_base 35: mod_base = OTHER; note = Cytosine phosphorothiorate
  modified_base 37: mod_base = OTHER; note = Adenosine phosphorothiorate
  modified_base 38: mod_base = OTHER; note = Adenosine phosphorothiorate
  modified_base 44: mod_base = OTHER; note = 2'-Omethyladenosine
  modified_base 45: mod_base = OTHER; note = 2'-Omethylguanosine
  modified_base 46: mod_base = OTHER; note = 2'-Omethylguanosine
  modified_base 52: mod_base = OTHER; note = 2'-Omethylguanosine
  modified_base 54: mod_base = OTHER; note = Uridine phosphorothiorate
  modified_base 55: mod_base = OTHER; note = Uridine phosphorothiorate
  modified_base 56: mod_base = OTHER; note = Cytosine phosphorothiorate
  modified_base 57: mod_base = OTHER; note = Guanosine phosphorothiorate
  modified_base 62: mod_base = OTHER; note = 2'-Omethylcytosine
  modified_base 63: mod_base = OTHER; note = 2'-fluorocytosine
  modified_base 65: mod_base = OTHER; note = 2'-Omethylguanosine
  modified_base 68: mod_base = OTHER; note = 2'-Omethylguanosine
  modified_base 73: mod_base = OTHER; note = 2'-Omethylguanosine
  modified_base 75: mod_base = OTHER; note = 2'-fluorocytosine phosphorothiorate

SEQ ID NO: 5399 - RNA, 76 nt, synthetic construct; identical to SEQ ID NO: 3615
  source 1..76: mol_type = other RNA
  modified_base 1: mod_base = OTHER; note = 2'-Omethylguanosine phosphorothiorate
  modified_base 2: mod_base = OTHER; note = 2'-Omethylguanosine phosphorothiorate
  modified_base 3: mod_base = OTHER; note = 2'-Omethylcytosine
  modified_base 4: mod_base = OTHER; note = 2'-Omethyluridine
  modified_base 5: mod_base = OTHER; note = 2'-Omethylcytosine
  modified_base 6: mod_base = OTHER; note = 2'-Omethylcytosine
  modified_base 10: mod_base = OTHER; note = 2'-Omethylguanosine
  modified_base 11: mod_base = OTHER; note = 2'-Omethylcytosine
  modified_base 12: mod_base = OTHER; note = 2'-Omethylguanosine
  modified_base 13: mod_base = OTHER; note = 2'-Omethylcytosine
  modified_base 22: mod_base = OTHER; note = 2'-Omethylguanosine
  modified_base 23: mod_base = OTHER; note = 2'-Omethylcytosine
  modified_base 24: mod_base = OTHER; note = 2'-Omethylguanosine
  modified_base 25: mod_base = OTHER; note = 2'-Omethylcytosine
  modified_base 49: mod_base = OTHER; note = 2'-Omethylcytosine
  modified_base 50: mod_base = OTHER; note = 2'-Omethylcytosine
  modified_base 51: mod_base = OTHER; note = 2'-Omethylguanosine
  modified_base 52: mod_base = OTHER; note = 2'-Omethylguanosine
  modified_base 53: mod_base = OTHER; note = 2'-Omethylguanosine
  modified_base 54: mod_base = OTHER; note = 2'-Omethyluridine
  modified_base 61: mod_base = OTHER; note = 2'-Omethylcytosine
  modified_base 62: mod_base = OTHER; note = 2'-Omethylcytosine
  modified_base 63: mod_base = OTHER; note = 2'-fluorocytosine
  modified_base 64: mod_base = OTHER; note = 2'-Omethylguanosine
  modified_base 65: mod_base = OTHER; note = 2'-Omethylguanosine
  modified_base 66: mod_base = OTHER; note = 2'-Omethylcytosine
  modified_base 67: mod_base = OTHER; note = 2'-Omethylguanosine
  modified_base 68: mod_base = OTHER; note = 2'-Omethylguanosine
  modified_base 73: mod_base = OTHER; note = 2'-Omethylguanosine

SEQ ID NO: 5400 - RNA, 76 nt, synthetic construct; identical to SEQ ID NO: 3329
  source 1..76: mol_type = other RNA
  modified_base 1: mod_base = OTHER; note = 2'-Omethylguanosine phosphorothiorate
  modified_base 2: mod_base = OTHER; note = 2'-Omethylguanosine
  modified_base 3: mod_base = OTHER; note = 2'-Omethylcytosine
  modified_base 4: mod_base = OTHER; note = 2'-Omethylcytosine
  modified_base 5: mod_base = OTHER; note = 2'-Omethylcytosine
  modified_base 6: mod_base = OTHER; note = 2'-Omethylcytosine
  modified_base 49: mod_base = OTHER; note = 2'-Omethylcytosine
  modified_base 50: mod_base = OTHER; note = 2'-Omethylcytosine
  modified_base 51: mod_base = OTHER; note = 2'-Omethylguanosine
  modified_base 52: mod_base = OTHER; note = 2'-Omethylguanosine
  modified_base 53: mod_base = OTHER; note = 2'-Omethylguanosine
  modified_base 61: mod_base = OTHER; note = 2'-Omethylcytosine
  modified_base 62: mod_base = OTHER; note = 2'-Omethylcytosine
  modified_base 63: mod_base = OTHER; note = 2'-fluorocytosine
  modified_base 64: mod_base = OTHER; note = 2'-Omethylguanosine
  modified_base 65: mod_base = OTHER; note = 2'-Omethylguanosine
  modified_base 66: mod_base = OTHER; note = 2'-Omethyluridine
  modified_base 67: mod_base = OTHER; note = 2'-Omethylguanosine
  modified_base 68: mod_base = OTHER; note = 2'-Omethylguanosine
  modified_base 69: mod_base = OTHER; note = 2'-Omethylguanosine
  modified_base 71: mod_base = OTHER; note = 2'-Omethyluridine
  modified_base 72: mod_base = OTHER; note = 2'-Omethylcytosine

SEQ ID NO: 5401 - RNA, 76 nt, synthetic construct; identical to SEQ ID NO: 625
  source 1..76: mol_type = other RNA
  modified_base 2: mod_base = OTHER; note = Guanosine phosphorothiorate
  modified_base 6: mod_base = OTHER; note = 2'-Omethylcytosine
  modified_base 10: mod_base = OTHER; note = Guanosine phosphorothiorate
  modified_base 11: mod_base = OTHER; note = 2'-fluorocytosine
  modified_base 12: mod_base = OTHER; note = Guanosine phosphorothiorate
  modified_base 14: mod_base = OTHER; note = 2'-fluoroadenosine
  modified_base 15: mod_base = OTHER; note = Adenosine phosphorothiorate
  modified_base 16: mod_base = OTHER; note = 2'-Omethyluridine
  modified_base 17: mod_base = OTHER; note = 2'-Omethylguanosine
  modified_base 18: mod_base = OTHER; note = 2'-Omethylguanosine
  modified_base 29: mod_base = OTHER; note = 2'-fluoroguanosine
  modified_base 30: mod_base = OTHER; note = 2'-fluoroguanosine
  modified_base 31: mod_base = OTHER; note = 2'-Omethyladenosine
  modified_base 33: mod_base = OTHER; note = 2'-fluorouridine
  modified_base 37: mod_base = OTHER; note = Adenosine phosphorothiorate
  modified_base 38: mod_base = OTHER; note = Adenosine phosphorothiorate
  modified_base 39: mod_base = OTHER; note = 2'-Omethyluridine
  modified_base 41: mod_base = OTHER; note = 2'-Omethylcytosine
  modified_base 42: mod_base = OTHER; note = 2'-fluoroadenosine
  modified_base 43: mod_base = OTHER; note = Adenosine phosphorothiorate
  modified_base 50: mod_base = OTHER; note = 2'-fluorocytosine phosphorothiorate
  modified_base 51: mod_base = OTHER; note = 2'-Omethylguanosine
  modified_base 53: mod_base = OTHER; note = 2'-fluoroguanosine phosphorothiorate
  modified_base 54: mod_base = OTHER; note = 2'-Omethyluridine
  modified_base 61: mod_base = OTHER; note = Cytosine phosphorothiorate
  modified_base 63: mod_base = OTHER; note = 2'-Omethylcytosine
  modified_base 66: mod_base = OTHER; note = 2'-Omethylcytosine
  modified_base 67: mod_base = OTHER; note = 2'-Omethylguanosine phosphorothiorate
  modified_base 68: mod_base = OTHER; note = 2'-fluoroguanosine
  modified_base 74: mod_base = OTHER; note = Cytosine phosphorothiorate
  modified_base 75: mod_base = OTHER; note = 2'-Omethylcytosine phosphorothiorate

SEQ ID NO: 5402 - RNA, 75 nt, synthetic construct; identical to SEQ ID NO: 1045
  source 1..75: mol_type = other RNA
  modified_base 1: mod_base = OTHER; note = 2'-Omethylguanosine
  modified_base 10: mod_base = OTHER; note = 2'-Omethylguanosine
  modified_base 11: mod_base = OTHER; note = 2'-Omethyluridine
  modified_base 12: mod_base = OTHER; note = 2'-Omethylguanosine
  modified_base 13: mod_base = OTHER; note = 2'-Omethyluridine
  modified_base 14: mod_base = OTHER; note = 2'-Omethyladenosine
  modified_base 15: mod_base = OTHER; note = 2'-Omethyladenosine
  modified_base 16: mod_base = OTHER; note = 2'-Omethyluridine
  modified_base 17: mod_base = OTHER; note = 2'-Omethylguanosine
  modified_base 18: mod_base = OTHER; note = 2'-Omethylguanosine
  modified_base 19: mod_base = OTHER; note = Uridine phosphorothiorate
  modified_base 20: mod_base = OTHER; note = 2'-Omethyladenosine
  modified_base 21: mod_base = OTHER; note = Adenosine phosphorothiorate
  modified_base 22: mod_base = OTHER; note = 2'-Omethylguanosine
  modified_base 23: mod_base = OTHER; note = 2'-Omethylcytosine
  modified_base 24: mod_base = OTHER; note = 2'-Omethyladenosine
  modified_base 25: mod_base = OTHER; note = 2'-Omethylcytosine
  modified_base 33: mod_base = OTHER; note = 2'-fluorouridine
  modified_base 34: mod_base = OTHER; note = 2'-Omethyluridine
  modified_base 35: mod_base = OTHER; note = Uridine phosphorothiorate
  modified_base 37: mod_base = OTHER; note = Adenosine phosphorothiorate
  modified_base 38: mod_base = OTHER; note = Adenosine phosphorothiorate
  modified_base 48: mod_base = OTHER; note = 2'-Omethylcytosine
  modified_base 49: mod_base = OTHER; note = 2'-Omethylcytosine
  modified_base 51: mod_base = OTHER; note = 2'-Omethyladenosine
  modified_base 53: mod_base = OTHER; note = Uridine phosphorothiorate
  modified_base 54: mod_base = OTHER; note = Uridine phosphorothiorate
  modified_base 60: mod_base = OTHER; note = 2'-Omethylcytosine
  modified_base 64: mod_base = OTHER; note = 2'-Omethylguanosine
  modified_base 72: mod_base = OTHER; note = 2'-Omethyluridine

SEQ ID NO: 5403 - RNA, 76 nt, synthetic construct; identical to SEQ ID NO: 625
  source 1..76: mol_type = other RNA
  modified_base 1: mod_base = OTHER; note = 2'-Omethylguanosine phosphorothiorate
  modified_base 2: mod_base = OTHER; note = 2'-Omethylguanosine phosphorothiorate
  modified_base 3: mod_base = OTHER; note = 2'-Omethylcytosine
  modified_base 4: mod_base = OTHER; note = 2'-Omethyluridine
  modified_base 5: mod_base = OTHER; note = 2'-Omethylcytosine
  modified_base 6: mod_base = OTHER; note = 2'-Omethylcytosine
  modified_base 16: mod_base = OTHER; note = 2'-Omethyluridine
  modified_base 17: mod_base = OTHER; note = 2'-Omethylguanosine
  modified_base 18: mod_base = OTHER; note = 2'-Omethylguanosine
  modified_base 20: mod_base = OTHER; note = 2'-Omethyluridine
  modified_base 25: mod_base = OTHER; note = 2'-Omethylcytosine
  modified_base 33: mod_base = OTHER; note = 2'-fluorouridine
  modified_base 35: mod_base = OTHER; note = Cytosine phosphorothiorate
  modified_base 37: mod_base = OTHER; note = Adenosine phosphorothiorate
  modified_base 38: mod_base = OTHER; note = Adenosine phosphorothiorate
  modified_base 41: mod_base = OTHER; note = 2'-fluorocytosine
  modified_base 42: mod_base = OTHER; note = 2'-Omethyladenosine
  modified_base 43: mod_base = OTHER; note = 2'-Omethyladenosine
  modified_base 44: mod_base = OTHER; note = 2'-fluoroadenosine
  modified_base 49: mod_base = OTHER; note = 2'-Omethylcytosine
  modified_base 50: mod_base = OTHER; note = 2'-Omethylcytosine
  modified_base 52: mod_base = OTHER; note = 2'-Omethylguanosine
  modified_base 54: mod_base = OTHER; note = 2'-Omethyluridine
  modified_base 55: mod_base = OTHER; note = Uridine phosphorothiorate
  modified_base 56: mod_base = OTHER; note = 2'-Omethylcytosine
  modified_base 57: mod_base = OTHER; note = 2'-fluoroguanosine
  modified_base 59: mod_base = OTHER; note = 2'-Omethylguanosine
  modified_base 61: mod_base = OTHER; note = 2'-Omethylcytosine
  modified_base 62: mod_base = OTHER; note = 2'-Omethylcytosine
  modified_base 63: mod_base = OTHER; note = 2'-fluorocytosine
  modified_base 64: mod_base = OTHER; note = 2'-Omethylguanosine
  modified_base 65: mod_base = OTHER; note = 2'-Omethylguanosine
  modified_base 74: mod_base = OTHER; note = Cytosine phosphorothiorate
  modified_base 75: mod_base = OTHER; note = 2'-Omethylcytosine phosphorothiorate

SEQ ID NO: 5404 - RNA, 76 nt, synthetic construct; identical to SEQ ID NO: 3325
  source 1..76: mol_type = other RNA
  modified_base 1: mod_base = OTHER; note = 2'-Omethyluridine phosphorothiorate
  modified_base 2: mod_base = OTHER; note = 2'-Omethyladenosine
  modified_base 3: mod_base = OTHER; note = 2'-Omethylcytosine
  modified_base 4: mod_base = OTHER; note = 2'-Omethyladenosine
  modified_base 5: mod_base = OTHER; note = 2'-Omethylcytosine
  modified_base 6: mod_base = OTHER; note = 2'-Omethylcytosine
  modified_base 27: mod_base = OTHER; note = 2'-Omethyluridine
  modified_base 28: mod_base = OTHER; note = 2'-Omethyluridine
  modified_base 29: mod_base = OTHER; note = 2'-fluoroguanosine
  modified_base 30: mod_base = OTHER; note = 2'-Omethylguanosine
  modified_base 40: mod_base = OTHER; note = 2'-fluorouridine
  modified_base 41: mod_base = OTHER; note = 2'-Omethylcytosine
  modified_base 42: mod_base = OTHER; note = 2'-Omethyladenosine
  modified_base 43: mod_base = OTHER; note = 2'-Omethyladenosine
  modified_base 73: mod_base = OTHER; note = 2'-Omethylguanosine

SEQ ID NO: 5405 - RNA, 76 nt, synthetic construct; identical to SEQ ID NO: 625
  source 1..76: mol_type = other RNA
  modified_base 1: mod_base = OTHER; note = 2'-Omethylguanosine
  modified_base 2: mod_base = OTHER; note = 2'-Omethylguanosine
  modified_base 3: mod_base = OTHER; note = 2'-Omethylcytosine
  modified_base 4: mod_base = OTHER; note = 2'-Omethyluridine
  modified_base 10: mod_base = OTHER; note = 2'-Omethylguanosine
  modified_base 13: mod_base = OTHER; note = 2'-Omethylcytosine
  modified_base 17: mod_base = OTHER; note = Guanosine phosphorothiorate
  modified_base 18: mod_base = OTHER; note = 2'-Omethylguanosine
  modified_base 19: mod_base = OTHER; note = Adenosine phosphorothiorate
  modified_base 20: mod_base = OTHER; note = 2'-Omethyluridine
  modified_base 25: mod_base = OTHER; note = 2'-Omethylcytosine
  modified_base 29: mod_base = OTHER; note = 2'-Omethylguanosine
  modified_base 33: mod_base = OTHER; note = 2'-fluorouridine
  modified_base 35: mod_base = OTHER; note = Cytosine phosphorothiorate
  modified_base 37: mod_base = OTHER; note = Adenosine phosphorothiorate
  modified_base 38: mod_base = OTHER; note = Adenosine phosphorothiorate
  modified_base 41: mod_base = OTHER; note = 2'-fluorocytosine phosphorothiorate
  modified_base 43: mod_base = OTHER; note = 2'-Omethyladenosine
  modified_base 44: mod_base = OTHER; note = 2'-fluoroadenosine
  modified_base 46: mod_base = OTHER; note = Guanosine phosphorothiorate
  modified_base 50: mod_base = OTHER; note = 2'-Omethylcytosine
  modified_base 52: mod_base = OTHER; note = 2'-Omethylguanosine
  modified_base 54: mod_base = OTHER; note = Uridine phosphorothiorate
  modified_base 55: mod_base = OTHER; note = Uridine phosphorothiorate
  modified_base 56: mod_base = OTHER; note = 2'-Omethylcytosine
  modified_base 57: mod_base = OTHER; note = Guanosine phosphorothiorate
  modified_base 62: mod_base = OTHER; note = 2'-Omethylcytosine
  modified_base 63: mod_base = OTHER; note = 2'-fluorocytosine
  modified_base 65: mod_base = OTHER; note = 2'-Omethylguanosine
  modified_base 71: mod_base = OTHER; note = 2'-Omethyluridine
  modified_base 73: mod_base = OTHER; note = 2'-Omethylguanosine

SEQ ID NO: 5406 - RNA, 75 nt, synthetic construct; identical to SEQ ID NO: 3306
  source 1..75: mol_type = other RNA
  modified_base 1: mod_base = OTHER; note = 2'-Omethylguanosine
  modified_base 2: mod_base = OTHER; note = 2'-Omethyladenosine
  modified_base 3: mod_base = OTHER; note = 2'-Omethylcytosine
  modified_base 4: mod_base = OTHER; note = 2'-Omethylcytosine

SEQ ID NO: 5407 - RNA, 76 nt, synthetic construct; identical to SEQ ID NO: 625
  source 1..76: mol_type = other RNA
  modified_base 61: mod_base = OTHER; note = Cytosine phosphorothiorate
  modified_base 62: mod_base = OTHER; note = Cytosine phosphorothiorate
  modified_base 63: mod_base = OTHER; note = Cytosine phosphorothiorate
  modified_base 64: mod_base = OTHER; note = Guanosine phosphorothiorate
  modified_base 65: mod_base = OTHER; note = Guanosine phosphorothiorate

SEQ ID NO: 5408 - RNA, 86 nt, synthetic construct; identical to SEQ ID NO: 3290
  source 1..86: mol_type = other RNA
  modified_base 1: mod_base = OTHER; note = 2'-Omethyladenosine
  modified_base 10: mod_base = OTHER; note = 2'-Omethylguanosine
  modified_base 11: mod_base = OTHER; note = 2'-Omethylcytosine
  modified_base 12: mod_base = OTHER; note = 2'-Omethylcytosine
  modified_base 13: mod_base = OTHER; note = 2'-Omethylguanosine
  modified_base 14: mod_base = OTHER; note = 2'-Omethyladenosine
  modified_base 15: mod_base = OTHER; note = 2'-Omethylguanosine
  modified_base 16: mod_base = OTHER; note = 2'-Omethyluridine
  modified_base 17: mod_base = OTHER; note = 2'-Omethylguanosine
  modified_base 18: mod_base = OTHER; note = 2'-Omethylguanosine
  modified_base 19: mod_base = OTHER; note = Uridine phosphorothiorate
  modified_base 20: mod_base = OTHER; note = 2'-Omethyluridine
  modified_base 21: mod_base = OTHER; note = Adenosine phosphorothiorate
  modified_base 22: mod_base = OTHER; note = 2'-Omethyladenosine
  modified_base 23: mod_base = OTHER; note = 2'-Omethylguanosine
  modified_base 24: mod_base = OTHER; note = 2'-Omethylguanosine
  modified_base 25: mod_base = OTHER; note = 2'-Omethylcytosine
  modified_base 33: mod_base = OTHER; note = 2'-fluorouridine
  modified_base 34: mod_base = OTHER; note = 2'-Omethyluridine
  modified_base 35: mod_base = OTHER; note = Cytosine phosphorothiorate
  modified_base 37: mod_base = OTHER; note = Guanosine phosphorothiorate
  modified_base 38: mod_base = OTHER; note = Adenosine phosphorothiorate
  modified_base 41: mod_base = OTHER; note = 2'-Omethylcytosine
  modified_base 42: mod_base = OTHER; note = 2'-Omethyladenosine
  modified_base 43: mod_base = OTHER; note = 2'-Omethyladenosine
  modified_base 44: mod_base = OTHER; note = 2'-Omethyluridine
  modified_base 59: mod_base = OTHER; note = 2'-Omethylguanosine
  modified_base 60: mod_base = OTHER; note = 2'-Omethyluridine
  modified_base 62: mod_base = OTHER; note = 2'-Omethylguanosine
  modified_base 64: mod_base = OTHER; note = Uridine phosphorothiorate
  modified_base 65: mod_base = OTHER; note = Uridine phosphorothiorate
  modified_base 71: mod_base = OTHER; note = 2'-Omethylcytosine
  modified_base 75: mod_base = OTHER; note = 2'-Omethylcytosine
  modified_base 83: mod_base = OTHER; note = 2'-Omethyladenosine

SEQ ID NO: 5409 - RNA, 74 nt, synthetic construct; identical to SEQ ID NO: 3293
  source 1..74: mol_type = other RNA
  modified_base 2: mod_base = OTHER; note = 2'-fluorocytosine
  modified_base 10: mod_base = OTHER; note = 2'-fluorocytosine

SEQ ID NO: 5410 - RNA, 76 nt, synthetic construct; identical to SEQ ID NO: 3289
  source 1..76: mol_type = other RNA
  modified_base 1: mod_base = OTHER; note = 2'-Omethylguanosine phosphorothiorate
  modified_base 2: mod_base = OTHER; note = 2'-Omethylcytosine phosphorothiorate
  modified_base 3: mod_base = OTHER; note = 2'-Omethylcytosine
  modified_base 4: mod_base = OTHER; note = 2'-Omethyluridine
  modified_base 5: mod_base = OTHER; note = 2'-Omethylguanosine
  modified_base 6: mod_base = OTHER; note = 2'-Omethylguanosine
  modified_base 13: mod_base = OTHER; note = 2'-Omethylcytosine
  modified_base 16: mod_base = OTHER; note = 2'-Omethyluridine
  modified_base 18: mod_base = OTHER; note = 2'-Omethylguanosine
  modified_base 19: mod_base = OTHER; note = 2'-Omethylguanosine
  modified_base 25: mod_base = OTHER; note = 2'-Omethylcytosine
  modified_base 33: mod_base = OTHER; note = 2'-fluorouridine
  modified_base 35: mod_base = OTHER; note = Uridine phosphorothiorate
  modified_base 37: mod_base = OTHER; note = Adenosine phosphorothiorate
  modified_base 38: mod_base = OTHER; note = Adenosine phosphorothiorate
  modified_base 41: mod_base = OTHER; note = 2'-fluorouridine phosphorothiorate
  modified_base 42: mod_base = OTHER; note = 2'-Omethylguanosine
  modified_base 43: mod_base = OTHER; note = 2'-Omethyladenosine
  modified_base 44: mod_base = OTHER; note = 2'-fluoroguanosine
  modified_base 45: mod_base = OTHER; note = 2'-Omethylguanosine
  modified_base 46: mod_base = OTHER; note = 2'-fluoroguanosine
  modified_base 47: mod_base = OTHER; note = 2'-fluorouridine
  modified_base 48: mod_base = OTHER; note = 2'-fluorocytosine
  modified_base 56: mod_base = OTHER; note = 2'-Omethylcytosine
  modified_base 59: mod_base = OTHER; note = 2'-Omethylguanosine
  modified_base 61: mod_base = OTHER; note = 2'-Omethylcytosine
  modified_base 62: mod_base = OTHER; note = 2'-Omethylcytosine
  modified_base 63: mod_base = OTHER; note = 2'-fluorocytosine
  modified_base 64: mod_base = OTHER; note = 2'-Omethyluridine
  modified_base 65: mod_base = OTHER; note = 2'-Omethylguanosine
  modified_base 66: mod_base = OTHER; note = 2'-Omethyluridine
  modified_base 67: mod_base = OTHER; note = 2'-Omethylcytosine
  modified_base 68: mod_base = OTHER; note = 2'-Omethylcytosine
  modified_base 71: mod_base = OTHER; note = 2'-Omethylguanosine
  modified_base 73: mod_base = OTHER; note = 2'-Omethylguanosine

SEQ ID NO: 5411 - RNA, 86 nt, synthetic construct; identical to SEQ ID NO: 3290
  source 1..86: mol_type = other RNA
  modified_base 1: mod_base = OTHER; note = 2'-Omethyladenosine
  modified_base 17: mod_base = OTHER; note = 2'-Omethylguanosine
  modified_base 18: mod_base = OTHER; note = 2'-Omethylguanosine
  modified_base 33: mod_base = OTHER; note = Uridine phosphorothiorate
  modified_base 34: mod_base = OTHER; note = 2'-Omethyluridine
  modified_base 35: mod_base = OTHER; note = Cytosine phosphorothiorate
  modified_base 37: mod_base = OTHER; note = Guanosine phosphorothiorate
  modified_base 38: mod_base = OTHER; note = Adenosine phosphorothiorate
  modified_base 41: mod_base = OTHER; note = 2'-Omethylcytosine
  modified_base 42: mod_base = OTHER; note = 2'-Omethyladenosine
  modified_base 43: mod_base = OTHER; note = 2'-Omethyladenosine
  modified_base 44: mod_base = OTHER; note = 2'-Omethyluridine
  modified_base 60: mod_base = OTHER; note = 2'-Omethyluridine
  modified_base 62: mod_base = OTHER; note = 2'-Omethylguanosine
  modified_base 83: mod_base = OTHER; note = 2'-Omethyladenosine

SEQ ID NO: 5412 - RNA, 76 nt, synthetic construct; identical to SEQ ID NO: 625
  source 1..76: mol_type = other RNA
  modified_base 10: mod_base = OTHER; note = 2'-Omethylguanosine
  modified_base 11: mod_base = OTHER; note = 2'-Omethylcytosine
  modified_base 12: mod_base = OTHER; note = 2'-Omethylguanosine
  modified_base 13: mod_base = OTHER; note = 2'-Omethylcytosine
  modified_base 14: mod_base = OTHER; note = 2'-Omethyladenosine
  modified_base 15: mod_base = OTHER; note = 2'-Omethyladenosine
  modified_base 16: mod_base = OTHER; note = 2'-Omethyluridine
  modified_base 17: mod_base = OTHER; note = 2'-Omethylguanosine
  modified_base 18: mod_base = OTHER; note = 2'-Omethylguanosine
  modified_base 19: mod_base = OTHER; note = 2'-Omethyladenosine
  modified_base 20: mod_base = OTHER; note = 2'-Omethyluridine
  modified_base 54: mod_base = OTHER; note = Uridine phosphorothiorate
  modified_base 55: mod_base = OTHER; note = Uridine phosphorothiorate
  modified_base 56: mod_base = OTHER; note = Cytosine phosphorothiorate
  modified_base 57: mod_base = OTHER; note = Guanosine phosphorothiorate
  modified_base 61: mod_base = OTHER; note = 2'-Omethylcytosine
  modified_base 62: mod_base = OTHER; note = 2'-Omethylcytosine
  modified_base 63: mod_base = OTHER; note = 2'-Omethylcytosine
  modified_base 64: mod_base = OTHER; note = 2'-Omethylguanosine
  modified_base 65: mod_base = OTHER; note = 2'-Omethylguanosine
  modified_base 66: mod_base = OTHER; note = 2'-Omethylcytosine
  modified_base 67: mod_base = OTHER; note = 2'-Omethylguanosine
  modified_base 68: mod_base = OTHER; note = 2'-Omethylguanosine
  modified_base 69: mod_base = OTHER; note = 2'-Omethyladenosine

SEQ ID NO: 5413 - RNA, 76 nt, synthetic construct; identical to SEQ ID NO: 3289
  source 1..76: mol_type = other RNA
  modified_base 1: mod_base = OTHER; note = 2'-Omethylguanosine
  modified_base 10: mod_base = OTHER; note = 2'-Omethylguanosine
  modified_base 11: mod_base = OTHER; note = 2'-Omethylcytosine
  modified_base 12: mod_base = OTHER; note = 2'-Omethyluridine
  modified_base 13: mod_base = OTHER; note = 2'-Omethylcytosine
  modified_base 14: mod_base = OTHER; note = 2'-Omethyladenosine
  modified_base 15: mod_base = OTHER; note = 2'-Omethylguanosine
  modified_base 16: mod_base = OTHER; note = 2'-Omethyluridine
  modified_base 18: mod_base = OTHER; note = 2'-Omethylguanosine
  modified_base 19: mod_base = OTHER; note = 2'-Omethylguanosine
  modified_base 20: mod_base = OTHER; note = Uridine phosphorothiorate
  modified_base 21: mod_base = OTHER; note = Adenosine phosphorothiorate
  modified_base 22: mod_base = OTHER; note = 2'-Omethylguanosine
  modified_base 23: mod_base = OTHER; note = 2'-Omethyladenosine
  modified_base 24: mod_base = OTHER; note = 2'-Omethylguanosine
  modified_base 25: mod_base = OTHER; note = 2'-Omethylcytosine
  modified_base 41: mod_base = OTHER; note = 2'-Omethyluridine
  modified_base 42: mod_base = OTHER; note = 2'-Omethylguanosine
  modified_base 43: mod_base = OTHER; note = 2'-Omethyladenosine
  modified_base 44: mod_base = OTHER; note = 2'-Omethylguanosine
  modified_base 49: mod_base = OTHER; note = 2'-Omethylcytosine
  modified_base 50: mod_base = OTHER; note = 2'-Omethyladenosine
  modified_base 52: mod_base = OTHER; note = 2'-Omethylguanosine
  modified_base 54: mod_base = OTHER; note = Uridine phosphorothiorate
  modified_base 55: mod_base = OTHER; note = Uridine phosphorothiorate
  modified_base 61: mod_base = OTHER; note = 2'-Omethylcytosine
  modified_base 65: mod_base = OTHER; note = 2'-Omethylguanosine
  modified_base 73: mod_base = OTHER; note = 2'-Omethylguanosine

SEQ ID NO: 5414 - RNA, 76 nt, synthetic construct; identical to SEQ ID NO: 625
  source 1..76: mol_type = other RNA
  modified_base 1: mod_base = OTHER; note = 2'-Omethylguanosine phosphorothiorate
  modified_base 2: mod_base = OTHER; note = 2'-Omethylguanosine
  modified_base 17: mod_base = OTHER; note = 2'-Omethylguanosine
  modified_base 33: mod_base = OTHER; note = 2'-fluorouridine
  modified_base 35: mod_base = OTHER; note = Cytosine phosphorothiorate
  modified_base 37: mod_base = OTHER; note = Adenosine phosphorothiorate
  modified_base 38: mod_base = OTHER; note = Adenosine phosphorothiorate
  modified_base 52: mod_base = OTHER; note = 2'-Omethylguanosine
  modified_base 62: mod_base = OTHER; note = 2'-Omethylcytosine
  modified_base 63: mod_base = OTHER; note = 2'-fluorocytosine
  modified_base 73: mod_base = OTHER; note = 2'-Omethylguanosine
  modified_base 75: mod_base = OTHER; note = 2'-fluorocytosine phosphorothiorate

SEQ ID NO: 5415 - RNA, 74 nt, synthetic construct; identical to SEQ ID NO: 3293
  source 1..74: mol_type = other RNA
  modified_base 1: mod_base = OTHER; note = 2'-fluoroadenosine
  modified_base 2: mod_base = OTHER; note = 2'-Omethylcytosine
  modified_base 10: mod_base = OTHER; note = 2'-fluorocytosine
  modified_base 12: mod_base = OTHER; note = 2'-fluorocytosine
  modified_base 26: mod_base = OTHER; note = 2'-fluorocytosine
  modified_base 42: mod_base = OTHER; note = Adenosine phosphorothiorate
  modified_base 51: mod_base = OTHER; note = 2'-fluoroguanosine
  modified_base 73: mod_base = OTHER; note = 2'-Omethylcytosine phosphorothiorate

SEQ ID NO: 5416 - RNA, 76 nt, synthetic construct; identical to SEQ ID NO: 3289
  source 1..76: mol_type = other RNA
  modified_base 1: mod_base = OTHER; note = 2'-Omethylguanosine
  modified_base 2: mod_base = OTHER; note = 2'-Omethylcytosine
  modified_base 3: mod_base = OTHER; note = 2'-Omethylcytosine
  modified_base 4: mod_base = OTHER; note = 2'-Omethyluridine
  modified_base 5: mod_base = OTHER; note = 2'-Omethylguanosine
  modified_base 6: mod_base = OTHER; note = 2'-Omethylguanosine
  modified_base 10: mod_base = OTHER; note = 2'-Omethylguanosine
  modified_base 11: mod_base = OTHER; note = 2'-Omethylcytosine
  modified_base 12: mod_base = OTHER; note = 2'-Omethyluridine
  modified_base 13: mod_base = OTHER; note = 2'-Omethylcytosine
  modified_base 16: mod_base = OTHER; note = 2'-Omethyluridine
  modified_base 18: mod_base = OTHER; note = 2'-Omethylguanosine
  modified_base 19: mod_base = OTHER; note = 2'-Omethylguanosine
  modified_base 25: mod_base = OTHER; note = 2'-Omethylcytosine
  modified_base 33: mod_base = OTHER; note = 2'-fluorouridine
  modified_base 35: mod_base = OTHER; note = Uridine phosphorothiorate
  modified_base 37: mod_base = OTHER; note = Adenosine phosphorothiorate
  modified_base 38: mod_base = OTHER; note = Adenosine phosphorothiorate
  modified_base 41: mod_base = OTHER; note = 2'-fluorouridine
  modified_base 42: mod_base = OTHER; note = 2'-Omethylguanosine
  modified_base 43: mod_base = OTHER; note = 2'-Omethyladenosine
  modified_base 44: mod_base = OTHER; note = 2'-fluoroguanosine
  modified_base 49: mod_base = OTHER; note = 2'-Omethylcytosine
  modified_base 50: mod_base = OTHER; note = 2'-Omethyladenosine
  modified_base 52: mod_base = OTHER; note = 2'-Omethylguanosine
  modified_base 54: mod_base = OTHER; note = 2'-Omethyluridine
  modified_base 55: mod_base = OTHER; note = Uridine phosphorothiorate
  modified_base 56: mod_base = OTHER; note = 2'-Omethylcytosine
  modified_base 57: mod_base = OTHER; note = 2'-fluoroadenosine
  modified_base 59: mod_base = OTHER; note = 2'-Omethylguanosine
  modified_base 61: mod_base = OTHER; note = 2'-Omethylcytosine
  modified_base 65: mod_base = OTHER; note = 2'-Omethylguanosine
  modified_base 73: mod_base = OTHER; note = 2'-Omethylguanosine

SEQ ID NO: 5417 - RNA, 76 nt, synthetic construct; identical to SEQ ID NO: 625
  source 1..76: mol_type = other RNA
  modified_base 1: mod_base = OTHER; note = 2'-Omethylguanosine phosphorothiorate
  modified_base 2: mod_base = OTHER; note = 2'-Omethylguanosine phosphorothiorate
  modified_base 43: mod_base = OTHER; note = Adenosine phosphorothiorate
  modified_base 55: mod_base = OTHER; note = Uridine phosphorothiorate
  modified_base 73: mod_base = OTHER; note = 2'-Omethylguanosine phosphorothiorate
  modified_base 74: mod_base = OTHER; note = Cytosine phosphorothiorate
  modified_base 75: mod_base = OTHER; note = 2'-Omethylcytosine

SEQ ID NO: 5418 - RNA, 85 nt, synthetic construct; identical to SEQ ID NO: 3317
  source 1..85: mol_type = other RNA
  modified_base 1: mod_base = OTHER; note = 2'-Omethylguanosine phosphorothiorate
  modified_base 2: mod_base = OTHER; note = 2'-Omethylcytosine phosphorothiorate
  modified_base 8: mod_base = OTHER; note = 2'-fluorouridine
  modified_base 14: mod_base = OTHER; note = 2'-Omethyladenosine phosphorothiorate
  modified_base 24: mod_base = OTHER; note = Guanosine phosphorothiorate
  modified_base 30: mod_base = OTHER; note = 2'-fluoroguanosine phosphorothiorate
  modified_base 61: mod_base = OTHER; note = Guanosine phosphorothiorate
  modified_base 63: mod_base = OTHER; note = 2'-Omethyluridine

SEQ ID NO: 5419 - RNA, 75 nt, synthetic construct; identical to SEQ ID NO: 1045
  source 1..75: mol_type = other RNA
  modified_base 1: mod_base = OTHER; note = Guanosine phosphorothiorate
  modified_base 2: mod_base = OTHER; note = 2'-Omethylguanosine phosphorothiorate
  modified_base 5: mod_base = OTHER; note = 2'-Omethylcytosine
  modified_base 20: mod_base = OTHER; note = 2'-fluoroadenosine
  modified_base 39: mod_base = OTHER; note = 2'-fluorouridine
  modified_base 41: mod_base = OTHER; note = 2'-fluorocytosine
  modified_base 53: mod_base = OTHER; note = 2'-fluorouridine phosphorothiorate
  modified_base 64: mod_base = OTHER; note = Guanosine phosphorothiorate
  modified_base 65: mod_base = OTHER; note = 2'-fluorouridine

SEQ ID NO: 5420 - RNA, 76 nt, synthetic construct; identical to SEQ ID NO: 625
  source 1..76: mol_type = other RNA
  modified_base 39: mod_base = OTHER; note = Thymine

SEQ ID NO: 5421 - RNA, 76 nt, synthetic construct; identical to SEQ ID NO: 3318
  source 1..76: mol_type = other RNA
  modified_base 1: mod_base = OTHER; note = 2'-Omethylcytosine
  modified_base 28: mod_base = OTHER; note = 2'-Omethyladenosine
  modified_base 29: mod_base = OTHER; note = 2'-Omethylguanosine
  modified_base 30: mod_base = OTHER; note = 2'-Omethylguanosine
  modified_base 40: mod_base = OTHER; note = 2'-fluorocytosine
  modified_base 41: mod_base = OTHER; note = 2'-fluorocytosine
  modified_base 42: mod_base = OTHER; note = 2'-Omethyluridine phosphorothiorate
  modified_base 43: mod_base = OTHER; note = 2'-Omethyluridine
  modified_base 73: mod_base = OTHER; note = 2'-Omethyladenosine

SEQ ID NO: 5422 - RNA, 85 nt, synthetic construct; identical to SEQ ID NO: 3297
  source 1..85: mol_type = other RNA
  modified_base 1: mod_base = OTHER; note = 2'-Omethylguanosine
  modified_base 3: mod_base = OTHER; note = Uridine phosphorothiorate
  modified_base 13: mod_base = OTHER; note = 2'-fluoroguanosine
  modified_base 17: mod_base = OTHER; note = 2'-Omethylguanosine
  modified_base 45: mod_base = OTHER; note = 2'-fluoroguanosine phosphorothiorate
  modified_base 61: mod_base = OTHER; note = 2'-Omethylguanosine

SEQ ID NO: 5423 - RNA, 76 nt, synthetic construct; identical to SEQ ID NO: 3318
  source 1..76: mol_type = other RNA
  modified_base 18: mod_base = OTHER; note = 2'-Omethylguanosine
  modified_base 73: mod_base = OTHER; note = 2'-Omethyladenosine

SEQ ID NO: 5424 - RNA, 85 nt, synthetic construct; identical to SEQ ID NO: 3288
  source 1..85: mol_type = other RNA
  modified_base 1: mod_base = OTHER; note = 2'-fluorocytosine
  modified_base 3: mod_base = OTHER; note = 2'-fluoroadenosine phosphorothiorate
  modified_base 12: mod_base = OTHER; note = 2'-Omethylguanosine
  modified_base 13: mod_base = OTHER; note = Adenosine phosphorothiorate
  modified_base 26: mod_base = OTHER; note = 2'-fluorouridine
  modified_base 30: mod_base = OTHER; note = 2'-fluoroadenosine
  modified_base 32: mod_base = OTHER; note = 2'-fluorouridine
  modified_base 40: mod_base = OTHER; note = 2'-Omethylcytosine
  modified_base 43: mod_base = OTHER; note = Uridine phosphorothiorate
  modified_base 48: mod_base = OTHER; note = Adenosine phosphorothiorate
  modified_base 50: mod_base = OTHER; note = 2'-Omethyladenosine
  modified_base 55: mod_base = OTHER; note = Cytosine phosphorothiorate
  modified_base 57: mod_base = OTHER; note = 2'-Omethylcytosine
  modified_base 73: mod_base = OTHER; note = 2'-fluoroadenosine
  modified_base 85: mod_base = OTHER; note = 2'-Omethyladenosine

SEQ ID NO: 5425 - RNA, 76 nt, synthetic construct; identical to SEQ ID NO: 3316
  source 1..76: mol_type = other RNA
  modified_base 1: mod_base = OTHER; note = 2'-Omethyladenosine phosphorothiorate
  modified_base 2: mod_base = OTHER; note = 2'-Omethylcytosine phosphorothiorate
  modified_base 3: mod_base = OTHER; note = 2'-Omethylcytosine
  modified_base 4: mod_base = OTHER; note = 2'-Omethyladenosine
  modified_base 5: mod_base = OTHER; note = 2'-Omethyladenosine
  modified_base 6: mod_base = OTHER; note = 2'-Omethylcytosine
  modified_base 10: mod_base = OTHER; note = 2'-Omethylguanosine
  modified_base 11: mod_base = OTHER; note = 2'-Omethylcytosine
  modified_base 12: mod_base = OTHER; note = 2'-Omethylguanosine
  modified_base 13: mod_base = OTHER; note = 2'-Omethylcytosine
  modified_base 14: mod_base = OTHER; note = 2'-Omethyladenosine
  modified_base 15: mod_base = OTHER; note = 2'-fluoroadenosine
  modified_base 16: mod_base = OTHER; note = 2'-Omethyluridine
  modified_base 17: mod_base = OTHER; note = 2'-Omethylguanosine
  modified_base 18: mod_base = OTHER; note = 2'-Omethylguanosine
  modified_base 19: mod_base = OTHER; note = 2'-fluoroadenosine
  modified_base 20: mod_base = OTHER; note = 2'-Omethyluridine
  modified_base 22: mod_base = OTHER; note = 2'-Omethylguanosine
  modified_base 23: mod_base = OTHER; note = 2'-Omethylcytosine
  modified_base 24: mod_base = OTHER; note = 2'-Omethylguanosine
  modified_base 25: mod_base = OTHER; note = 2'-Omethylcytosine
  modified_base 33: mod_base = OTHER; note = 2'-fluorouridine
  modified_base 35: mod_base = OTHER; note = Cytosine phosphorothiorate
  modified_base 37: mod_base = OTHER; note = Adenosine phosphorothiorate
  modified_base 38: mod_base = OTHER; note = Adenosine phosphorothiorate
  modified_base 44: mod_base = OTHER; note = 2'-Omethyladenosine
  modified_base 45: mod_base = OTHER; note = 2'-Omethylguanosine
  modified_base 46: mod_base = OTHER; note = 2'-fluoroguanosine
  modified_base 47: mod_base = OTHER; note = 2'-fluorouridine
  modified_base 48: mod_base = OTHER; note = 2'-fluorouridine
  modified_base 56: mod_base = OTHER; note = 2'-Omethylcytosine
  modified_base 59: mod_base = OTHER; note = 2'-Omethylguanosine
  modified_base 61: mod_base = OTHER; note = 2'-Omethylcytosine
  modified_base 62: mod_base = OTHER; note = 2'-Omethylcytosine
  modified_base 63: mod_base = OTHER; note = 2'-fluorocytosine
  modified_base 64: mod_base = OTHER; note = 2'-Omethylguanosine
  modified_base 65: mod_base = OTHER; note = 2'-Omethylguanosine
  modified_base 66: mod_base = OTHER; note = 2'-Omethylcytosine
  modified_base 67: mod_base = OTHER; note = 2'-Omethylguanosine
  modified_base 68: mod_base = OTHER; note = 2'-Omethyluridine
  modified_base 73: mod_base = OTHER; note = 2'-Omethylguanosine

SEQ ID NO: 5426 - RNA, 74 nt, synthetic construct; identical to SEQ ID NO: 766
  source 1..74: mol_type = other RNA
  modified_base 1: mod_base = OTHER; note = 2'-Omethylguanosine phosphorothiorate
  modified_base 2: mod_base = OTHER; note = 2'-Omethylguanosine phosphorothiorate
  modified_base 3: mod_base = OTHER; note = 2'-Omethylcytosine
  modified_base 4: mod_base = OTHER; note = 2'-Omethyluridine
  modified_base 5: mod_base = OTHER; note = 2'-Omethylcytosine
  modified_base 6: mod_base = OTHER; note = 2'-Omethylcytosine
  modified_base 16: mod_base = OTHER; note = 2'-Omethyluridine
  modified_base 17: mod_base = OTHER; note = 2'-Omethylguanosine
  modified_base 18: mod_base = OTHER; note = 2'-Omethylguanosine
  modified_base 20: mod_base = OTHER; note = 2'-Omethyluridine
  modified_base 25: mod_base = OTHER; note = 2'-Omethylcytosine
  modified_base 33: mod_base = OTHER; note = 2'-fluorouridine
  modified_base 35: mod_base = OTHER; note = Cytosine phosphorothiorate
  modified_base 37: mod_base = OTHER; note = Adenosine phosphorothiorate
  modified_base 38: mod_base = OTHER; note = Adenosine phosphorothiorate
  modified_base 41: mod_base = OTHER; note = 2'-fluorocytosine
  modified_base 42: mod_base = OTHER; note = 2'-Omethyladenosine
  modified_base 43: mod_base = OTHER; note = 2'-Omethyladenosine
  modified_base 44: mod_base = OTHER; note = 2'-fluoroadenosine
  modified_base 49: mod_base = OTHER; note = 2'-Omethylcytosine
  modified_base 50: mod_base = OTHER; note = 2'-Omethylcytosine
  modified_base 52: mod_base = OTHER; note = 2'-Omethylguanosine
  modified_base 54: mod_base = OTHER; note = 2'-Omethyluridine
  modified_base 55: mod_base = OTHER; note = Uridine phosphorothiorate
  modified_base 56: mod_base = OTHER; note = 2'-Omethylcytosine
  modified_base 57: mod_base = OTHER; note = 2'-fluoroguanosine
  modified_base 59: mod_base = OTHER; note = 2'-Omethylguanosine
  modified_base 61: mod_base = OTHER; note = 2'-Omethylcytosine
  modified_base 62: mod_base = OTHER; note = 2'-Omethylcytosine
  modified_base 63: mod_base = OTHER; note = 2'-fluorocytosine
  modified_base 64: mod_base = OTHER; note = 2'-Omethylguanosine
  modified_base 65: mod_base = OTHER; note = 2'-Omethylguanosine
  modified_base 73: mod_base = OTHER; note = 2'-Omethylguanosine

SEQ ID NO: 5427 - RNA, 76 nt, synthetic construct; identical to SEQ ID NO: 3295
  source 1..76: mol_type = other RNA
  modified_base 1: mod_base = OTHER; note = 2'-Omethylcytosine
  modified_base 2: mod_base = OTHER; note = 2'-Omethylcytosine
  modified_base 12: mod_base = OTHER; note = Uridine phosphorothiorate
  modified_base 15: mod_base = OTHER; note = 2'-fluoroguanosine phosphorothiorate
  modified_base 40: mod_base = OTHER; note = 2'-fluorocytosine
  modified_base 47: mod_base = OTHER; note = 2'-fluorouridine phosphorothiorate
  modified_base 54: mod_base = OTHER; note = 2'-fluorouridine phosphorothiorate
  modified_base 75: mod_base = OTHER; note = 2'-fluorocytosine

SEQ ID NO: 5428 - RNA, 86 nt, synthetic construct; identical to SEQ ID NO: 3290
  source 1..86: mol_type = other RNA
  modified_base 64: mod_base = OTHER; note = Uridine phosphorothiorate

SEQ ID NO: 5429 - RNA, 75 nt, synthetic construct; identical to SEQ ID NO: 1045
  source 1..75: mol_type = other RNA
  modified_base 2: mod_base = OTHER; note = 2'-Omethylguanosine phosphorothiorate
  modified_base 3: mod_base = OTHER; note = Uridine phosphorothiorate
  modified_base 11: mod_base = OTHER; note = Uridine phosphorothiorate
  modified_base 20: mod_base = OTHER; note = 2'-fluoroadenosine phosphorothiorate
  modified_base 29: mod_base = OTHER; note = 2'-fluoroguanosine
  modified_base 30: mod_base = OTHER; note = 2'-Omethylguanosine phosphorothiorate
  modified_base 36: mod_base = OTHER; note = 2'-fluoroadenosine
  modified_base 37: mod_base = OTHER; note = Adenosine phosphorothiorate
  modified_base 39: mod_base = OTHER; note = Uridine phosphorothiorate
  modified_base 42: mod_base = OTHER; note = 2'-fluoroadenosine
  modified_base 55: mod_base = OTHER; note = 2'-fluorocytosine phosphorothiorate
  modified_base 61: mod_base = OTHER; note = 2'-fluorouridine
  modified_base 67: mod_base = OTHER; note = Guanosine phosphorothiorate
  modified_base 68: mod_base = OTHER; note = 2'-fluoroadenosine
  modified_base 73: mod_base = OTHER; note = Cytosine phosphorothiorate

SEQ ID NO: 5430 - RNA, 75 nt, synthetic construct; identical to SEQ ID NO: 1045
  source 1..75: mol_type = other RNA
  modified_base 2: mod_base = OTHER; note = 2'-Omethylguanosine phosphorothiorate
  modified_base 3: mod_base = OTHER; note = 2'-fluorouridine
  modified_base 6: mod_base = OTHER; note = 2'-Omethylcytosine phosphorothiorate
  modified_base 7: mod_base = OTHER; note = Adenosine phosphorothiorate
  modified_base 15: mod_base = OTHER; note = 2'-Omethyladenosine
  modified_base 17: mod_base = OTHER; note = 2'-fluoroguanosine phosphorothiorate
  modified_base 31: mod_base = OTHER; note = 2'-Omethyladenosine
  modified_base 42: mod_base = OTHER; note = Adenosine phosphorothiorate
  modified_base 43: mod_base = OTHER; note = 2'-Omethylguanosine
  modified_base 47: mod_base = OTHER; note = 2'-fluorouridine
  modified_base 49: mod_base = OTHER; note = 2'-Omethylcytosine
  modified_base 50: mod_base = OTHER; note = 2'-Omethylguanosine phosphorothiorate
  modified_base 72: mod_base = OTHER; note = 2'-Omethyluridine
  modified_base 73: mod_base = OTHER; note = Cytosine phosphorothiorate
  modified_base 74: mod_base = OTHER; note = 2'-Omethylcytosine phosphorothiorate

SEQ ID NO: 5431 - RNA, 76 nt, synthetic construct
  source 1..76: mol_type = other RNA
cgccccgtggcgcaatggatagcgcattggacttcaaattcaaaggttccgggttcgagtcccggcggggtggcca

SEQ ID NO: 5432 - DNA, 76 bp, synthetic construct; identical to SEQ ID NO: 1924
  source 1..76: mol_type = other DNA
  modified_base 1: mod_base = OTHER; note = 2'-Omethylguanosine phosphorothiorate
  modified_base 2: mod_base = OTHER; note = 2'-Omethylguanosine phosphorothiorate
  modified_base 9: mod_base = OTHER; note = Guanosine phosphorothiorate
  modified_base 52: mod_base = OTHER; note = 2'-Omethylguanosine
  modified_base 59: mod_base = OTHER; note = 2'-O-(2-Methoxyethyl) guanosine
  modified_base 73: mod_base = OTHER; note = Guanosine phosphorothiorate
  modified_base 74: mod_base = OTHER; note = Cytosine phosphorothiorate
  modified_base 75: mod_base = OTHER; note = 2'-Omethylcytosine
  misc_feature 1..9: note = RNA
  misc_feature 10: note = DNA
  misc_feature 11..76: note = RNA

SEQ ID NO: 5433 - RNA, 85 nt, synthetic construct; identical to SEQ ID NO: 3310
  source 1..85: mol_type = other RNA
  modified_base 1: mod_base = OTHER; note = 2'-fluorocytosine
  modified_base 11: mod_base = OTHER; note = Cytosine phosphorothiorate
  modified_base 52: mod_base = OTHER; note = Guanosine phosphorothiorate
  modified_base 58: mod_base = OTHER; note = 2'-Omethylguanosine
  modified_base 71: mod_base = OTHER; note = 2'-fluorocytosine
  modified_base 79: mod_base = OTHER; note = Guanosine phosphorothiorate

SEQ ID NO: 5434 - RNA, 86 nt, synthetic construct; identical to SEQ ID NO: 3290
  source 1..86: mol_type = other RNA
  modified_base 7: mod_base = OTHER; note = Adenosine phosphorothiorate

SEQ ID NO: 5435 - RNA, 75 nt, synthetic construct; identical to SEQ ID NO: 3336
  source 1..75: mol_type = other RNA
  modified_base 1: mod_base = OTHER; note = 2'-Omethylcytosine
  modified_base 3: mod_base = OTHER; note = Uridine phosphorothiorate
  modified_base 8: mod_base = OTHER; note = 2'-fluoroadenosine phosphorothiorate
  modified_base 16: mod_base = OTHER; note = 2'-Omethylcytosine phosphorothiorate
  modified_base 33: mod_base = OTHER; note = 2'-Omethylcytosine phosphorothiorate
  modified_base 37: mod_base = OTHER; note = 2'-Omethyladenosine phosphorothiorate
  modified_base 47: mod_base = OTHER; note = 2'-fluorocytosine
  modified_base 48: mod_base = OTHER; note = 2'-fluorocytosine
  modified_base 60: mod_base = OTHER; note = Cytosine phosphorothiorate
  modified_base 73: mod_base = OTHER; note = Cytosine phosphorothiorate

SEQ ID NO: 5436 - RNA, 85 nt, synthetic construct; identical to SEQ ID NO: 3317
  source 1..85: mol_type = other RNA
  modified_base 1: mod_base = OTHER; note = 2'-Omethylguanosine phosphorothiorate
  modified_base 2: mod_base = OTHER; note = 2'-Omethylcytosine phosphorothiorate
  modified_base 5: mod_base = OTHER; note = 2'-fluorouridine
  modified_base 12: mod_base = OTHER; note = 2'-Omethylcytosine
  modified_base 14: mod_base = OTHER; note = 2'-Omethyladenosine
  modified_base 25: mod_base = OTHER; note = 2'-fluorocytosine phosphorothiorate
  modified_base 28: mod_base = OTHER; note = Uridine phosphorothiorate
  modified_base 30: mod_base = OTHER; note = 2'-fluoroguanosine
  modified_base 48: mod_base = OTHER; note = 2'-Omethylguanosine
  modified_base 50: mod_base = OTHER; note = 2'-fluorocytosine
  modified_base 56: mod_base = OTHER; note = 2'-fluoroguanosine
  modified_base 59: mod_base = OTHER; note = 2'-Omethylcytosine phosphorothiorate
  modified_base 61: mod_base = OTHER; note = 2'-fluoroguanosine phosphorothiorate
  modified_base 72: mod_base = OTHER; note = Uridine phosphorothiorate
  modified_base 79: mod_base = OTHER; note = 2'-fluoroadenosine phosphorothiorate

SEQ ID NO: 5437 - RNA, 75 nt, synthetic construct; identical to SEQ ID NO: 3311
  source 1..75: mol_type = other RNA
  modified_base 2: mod_base = OTHER; note = 2'-Omethylguanosine phosphorothiorate
  modified_base 20: mod_base = OTHER; note = Adenosine phosphorothiorate
  modified_base 21: mod_base = OTHER; note = 2'-fluoroadenosine
  modified_base 40: mod_base = OTHER; note = Cytosine phosphorothiorate
  modified_base 41: mod_base = OTHER; note = 2'-fluorocytosine
  modified_base 43: mod_base = OTHER; note = 2'-fluoroguanosine
  modified_base 44: mod_base = OTHER; note = 2'-fluorocytosine
  modified_base 51: mod_base = OTHER; note = Adenosine phosphorothiorate
  modified_base 57: mod_base = OTHER; note = 2'-fluoroadenosine
  modified_base 60: mod_base = OTHER; note = 2'-fluorocytosine
  modified_base 61: mod_base = OTHER; note = 2'-fluorouridine
  modified_base 74: mod_base = OTHER; note = Cytosine phosphorothiorate
  modified_base 75: mod_base = OTHER; note = 2'-Omethyladenosine

SEQ ID NO: 5438 - RNA, 85 nt, synthetic construct; identical to SEQ ID NO: 3286
  source 1..85: mol_type = other RNA
  modified_base 1: mod_base = OTHER; note = 2'-Omethylcytosine
  modified_base 3: mod_base = OTHER; note = 2'-fluoroadenosine
  modified_base 6: mod_base = OTHER; note = Adenosine phosphorothiorate
  modified_base 13: mod_base = OTHER; note = Adenosine phosphorothiorate
  modified_base 20: mod_base = OTHER; note = 2'-fluoroadenosine phosphorothiorate
  modified_base 26: mod_base = OTHER; note = Uridine phosphorothiorate
  modified_base 34: mod_base = OTHER; note = 2'-fluorouridine
  modified_base 48: mod_base = OTHER; note = Adenosine phosphorothiorate
  modified_base 52: mod_base = OTHER; note = 2'-fluoroguanosine
  modified_base 57: mod_base = OTHER; note = 2'-fluorocytosine
  modified_base 58: mod_base = OTHER; note = 2'-Omethylguanosine
  modified_base 62: mod_base = OTHER; note = 2'-fluoroguanosine phosphorothiorate
  modified_base 68: mod_base = OTHER; note = Adenosine phosphorothiorate
  modified_base 70: mod_base = OTHER; note = 2'-fluorocytosine phosphorothiorate
  modified_base 84: mod_base = OTHER; note = 2'-fluorocytosine phosphorothiorate

SEQ ID NO: 5439 - RNA, 86 nt, synthetic construct; identical to SEQ ID NO: 3290
  source 1..86: mol_type = other RNA
  modified_base 1: mod_base = OTHER; note = 2'-Omethyladenosine phosphorothiorate
  modified_base 2: mod_base = OTHER; note = 2'-Omethylcytosine phosphorothiorate
  modified_base 13: mod_base = OTHER; note = 2'-fluoroguanosine
  modified_base 14: mod_base = OTHER; note = 2'-fluoroadenosine
  modified_base 64: mod_base = OTHER; note = 2'-fluorouridine
  modified_base 69: mod_base = OTHER; note = 2'-Omethyladenosine
  modified_base 85: mod_base = OTHER; note = Cytosine phosphorothiorate
  modified_base 86: mod_base = OTHER; note = 2'-Omethyladenosine

SEQ ID NO: 5440 - RNA, 85 nt, synthetic construct; identical to SEQ ID NO: 3297
  source 1..85: mol_type = other RNA
  modified_base 1: mod_base = OTHER; note = 2'-Omethylguanosine phosphorothiorate
  modified_base 2: mod_base = OTHER; note = 2'-Omethylcytosine phosphorothiorate
  modified_base 5: mod_base = OTHER; note = 2'-Omethyluridine
  modified_base 20: mod_base = OTHER; note = 2'-Omethyluridine
  modified_base 27: mod_base = OTHER; note = 2'-fluorouridine phosphorothiorate
  modified_base 33: mod_base = OTHER; note = 2'-fluorouridine
  modified_base 44: mod_base = OTHER; note = Uridine phosphorothiorate
  modified_base 50: mod_base = OTHER; note = 2'-Omethylcytosine
  modified_base 59: mod_base = OTHER; note = 2'-fluorocytosine
  modified_base 83: mod_base = OTHER; note = 2'-Omethylcytosine phosphorothiorate

SEQ ID NO: 5441 - DNA, 74 bp, synthetic construct; identical to SEQ ID NO: 3384
  source 1..74: mol_type = other DNA
  modified_base 1: mod_base = OTHER; note = 2'-Omethylguanosine phosphorothiorate
  modified_base 2: mod_base = OTHER; note = 2'-Omethylguanosine phosphorothiorate
  modified_base 25: mod_base = OTHER; note = Cytosine phosphorothiorate
  modified_base 43: mod_base = OTHER; note = 2'-fluoroadenosine
  modified_base 55: mod_base = OTHER; note = Uridine phosphorothiorate
  modified_base 73: mod_base = OTHER; note = 2'-Omethylguanosine
  misc_feature 1..71: note = RNA
  misc_feature 72: note = DNA
  misc_feature 73..74: note = RNA

SEQ ID NO: 5442 - RNA, 76 nt, synthetic construct; identical to SEQ ID NO: 3325
  source 1..76: mol_type = other RNA
  modified_base 1: mod_base = OTHER; note = 2'-Omethyluridine phosphorothiorate
  modified_base 2: mod_base = OTHER; note = 2'-Omethyladenosine phosphorothiorate
  modified_base 3: mod_base = OTHER; note = 2'-Omethylcytosine
  modified_base 4: mod_base = OTHER; note = 2'-Omethyladenosine
  modified_base 5: mod_base = OTHER; note = 2'-Omethylcytosine
  modified_base 6: mod_base = OTHER; note = 2'-Omethylcytosine
  modified_base 10: mod_base = OTHER; note = 2'-Omethylguanosine
  modified_base 11: mod_base = OTHER; note = 2'-Omethylcytosine
  modified_base 12: mod_base = OTHER; note = 2'-Omethylguanosine
  modified_base 13: mod_base = OTHER; note = 2'-Omethylcytosine
  modified_base 22: mod_base = OTHER; note = 2'-Omethylguanosine
  modified_base 23: mod_base = OTHER; note = 2'-Omethylcytosine
  modified_base 24: mod_base = OTHER; note = 2'-Omethylguanosine
  modified_base 25: mod_base = OTHER; note = 2'-Omethylcytosine
  modified_base 49: mod_base = OTHER; note = 2'-Omethylcytosine
  modified_base 50: mod_base = OTHER; note = 2'-Omethylcytosine
  modified_base 51: mod_base = OTHER; note = 2'-Omethylguanosine
  modified_base 52: mod_base = OTHER; note = 2'-Omethylguanosine
  modified_base 53: mod_base = OTHER; note = 2'-Omethylguanosine
  modified_base 54: mod_base = OTHER; note = 2'-Omethyluridine
  modified_base 61: mod_base = OTHER; note = 2'-Omethylcytosine
  modified_base 62: mod_base = OTHER; note = 2'-Omethylcytosine
  modified_base 63: mod_base = OTHER; note = 2'-fluorocytosine
  modified_base 64: mod_base = OTHER; note = 2'-Omethylguanosine
  modified_base 65: mod_base = OTHER; note = 2'-Omethylguanosine
  modified_base 66: mod_base = OTHER; note = 2'-Omethylcytosine
  modified_base 67: mod_base = OTHER; note = 2'-Omethylguanosine
  modified_base 68: mod_base = OTHER; note = 2'-Omethylguanosine
  modified_base 73: mod_base = OTHER; note = 2'-Omethylguanosine

SEQ ID NO: 5443 - RNA, 76 nt, synthetic construct; identical to SEQ ID NO: 3289
  source 1..76: mol_type = other RNA
  modified_base 1: mod_base = OTHER; note = 2'-Omethylguanosine
  modified_base 2: mod_base = OTHER; note = 2'-Omethylcytosine
  modified_base 3: mod_base = OTHER; note = 2'-Omethylcytosine
  modified_base 4: mod_base = OTHER; note = 2'-Omethyluridine
  modified_base 5: mod_base = OTHER; note = 2'-Omethylguanosine
  modified_base 6: mod_base = OTHER; note = 2'-Omethylguanosine
  modified_base 14: mod_base = OTHER; note = 2'-Omethyladenosine
  modified_base 15: mod_base = OTHER; note = 2'-Omethylguanosine
  modified_base 16: mod_base = OTHER; note = 2'-Omethyluridine
  modified_base 18: mod_base = OTHER; note = 2'-Omethylguanosine
  modified_base 19: mod_base = OTHER; note = 2'-Omethylguanosine
  modified_base 25: mod_base = OTHER; note = 2'-Omethylcytosine
  modified_base 33: mod_base = OTHER; note = 2'-fluorouridine
  modified_base 35: mod_base = OTHER; note = Uridine phosphorothiorate
  modified_base 37: mod_base = OTHER; note = Adenosine phosphorothiorate
  modified_base 38: mod_base = OTHER; note = Adenosine phosphorothiorate
  modified_base 49: mod_base = OTHER; note = 2'-Omethylcytosine
  modified_base 50: mod_base = OTHER; note = 2'-Omethyladenosine
  modified_base 52: mod_base = OTHER; note = 2'-Omethylguanosine
  modified_base 54: mod_base = OTHER; note = 2'-Omethyluridine
  modified_base 55: mod_base = OTHER; note = Uridine phosphorothiorate
  modified_base 56: mod_base = OTHER; note = 2'-Omethylcytosine
  modified_base 57: mod_base = OTHER; note = 2'-fluoroadenosine
  modified_base 59: mod_base = OTHER; note = 2'-Omethylguanosine
  modified_base 61: mod_base = OTHER; note = 2'-Omethylcytosine
  modified_base 62: mod_base = OTHER; note = 2'-Omethylcytosine
  modified_base 63: mod_base = OTHER; note = 2'-fluorocytosine
  modified_base 64: mod_base = OTHER; note = 2'-Omethyluridine
  modified_base 65: mod_base = OTHER; note = 2'-Omethylguanosine
  modified_base 73: mod_base = OTHER; note = 2'-Omethylguanosine

SEQ ID NO: 5444 - RNA, 76 nt, synthetic construct; identical to SEQ ID NO: 625
  source 1..76: mol_type = other RNA
  modified_base 1: mod_base = OTHER; note = 2'-Omethylguanosine
  modified_base 2: mod_base = OTHER; note = 2'-Omethylguanosine
  modified_base 33: mod_base = OTHER; note = 2'-fluorouridine
  modified_base 37: mod_base = OTHER; note = Adenosine phosphorothiorate
  modified_base 52: mod_base = OTHER; note = 2'-fluoroguanosine
  modified_base 57: mod_base = OTHER; note = 2'-Omethylguanosine
  modified_base 62: mod_base = OTHER; note = 2'-Omethylcytosine
  modified_base 73: mod_base = OTHER; note = 2'-Omethylguanosine
  modified_base 75: mod_base = OTHER; note = 2'-fluorocytosine phosphorothiorate

SEQ ID NO: 5445 - RNA, 75 nt, synthetic construct; identical to SEQ ID NO: 3311
  source 1..75: mol_type = other RNA
  modified_base 2: mod_base = OTHER; note = Guanosine phosphorothiorate
  modified_base 3: mod_base = OTHER; note = 2'-fluorouridine phosphorothiorate
  modified_base 10: mod_base = OTHER; note = Guanosine phosphorothiorate
  modified_base 12: mod_base = OTHER; note = 2'-fluoroguanosine
  modified_base 22: mod_base = OTHER; note = 2'-fluoroguanosine
  modified_base 23: mod_base = OTHER; note = 2'-fluorocytosine
  modified_base 24: mod_base = OTHER; note = 2'-fluoroadenosine
  modified_base 27: mod_base = OTHER; note = 2'-fluorocytosine
  modified_base 38: mod_base = OTHER; note = Adenosine phosphorothiorate
  modified_base 41: mod_base = OTHER; note = 2'-fluorocytosine
  modified_base 56: mod_base = OTHER; note = 2'-fluoroguanosine
  modified_base 62: mod_base = OTHER; note = 2'-fluorocytosine
  modified_base 66: mod_base = OTHER; note = Guanosine phosphorothiorate
  modified_base 67: mod_base = OTHER; note = 2'-fluoroguanosine
  modified_base 68: mod_base = OTHER; note = Adenosine phosphorothiorate
  modified_base 73: mod_base = OTHER; note = Cytosine phosphorothiorate
  modified_base 74: mod_base = OTHER; note = 2'-fluorocytosine phosphorothiorate

SEQ ID NO: 5446 - RNA, 75 nt, synthetic construct; identical to SEQ ID NO: 1045
  source 1..75: mol_type = other RNA
  modified_base 1: mod_base = OTHER; note = 2'-Omethylguanosine
  modified_base 2: mod_base = OTHER; note = 2'-Omethylguanosine phosphorothiorate
  modified_base 3: mod_base = OTHER; note = 2'-fluorouridine
  modified_base 8: mod_base = OTHER; note = 2'-fluorouridine
  modified_base 15: mod_base = OTHER; note = 2'-fluoroadenosine phosphorothiorate
  modified_base 16: mod_base = OTHER; note = 2'-fluorouridine
  modified_base 19: mod_base = OTHER; note = 2'-fluorouridine
  modified_base 22: mod_base = OTHER; note = Guanosine phosphorothiorate
  modified_base 23: mod_base = OTHER; note = 2'-fluorocytosine
  modified_base 28: mod_base = OTHER; note = 2'-fluorouridine
  modified_base 34: mod_base = OTHER; note = 2'-Omethyluridine phosphorothiorate
  modified_base 35: mod_base = OTHER; note = 2'-fluorouridine
  modified_base 38: mod_base = OTHER; note = 2'-fluoroadenosine
  modified_base 39: mod_base = OTHER; note = 2'-fluorouridine
  modified_base 40: mod_base = OTHER; note = 2'-Omethylcytosine phosphorothiorate
  modified_base 52: mod_base = OTHER; note = Guanosine phosphorothiorate
  modified_base 54: mod_base = OTHER; note = 2'-Omethyluridine
  modified_base 62: mod_base = OTHER; note = Cytosine phosphorothiorate
  modified_base 63: mod_base = OTHER; note = Guanosine phosphorothiorate
  modified_base 64: mod_base = OTHER; note = 2'-fluoroguanosine
  modified_base 73: mod_base = OTHER; note = 2'-fluorocytosine
  modified_base 75: mod_base = OTHER; note = 2'-fluoroadenosine

SEQ ID NO: 5447 - RNA, 85 nt, synthetic construct; identical to SEQ ID NO: 3297
  source 1..85: mol_type = other RNA
  modified_base 1: mod_base = OTHER; note = 2'-Omethylguanosine phosphorothiorate
  modified_base 2: mod_base = OTHER; note = 2'-Omethylcytosine phosphorothiorate
  modified_base 14: mod_base = OTHER; note = 2'-Omethyladenosine
  modified_base 17: mod_base = OTHER; note = 2'-Omethylguanosine
  modified_base 18: mod_base = OTHER; note = 2'-Omethylguanosine
  modified_base 20: mod_base = OTHER; note = 2'-Omethyluridine phosphorothiorate
  modified_base 22: mod_base = OTHER; note = 2'-Omethyladenosine
  modified_base 25: mod_base = OTHER; note = 2'-Omethylcytosine
  modified_base 27: mod_base = OTHER; note = 2'-Omethyluridine
  modified_base 33: mod_base = OTHER; note = 2'-fluorouridine
  modified_base 41: mod_base = OTHER; note = 2'-Omethylcytosine phosphorothiorate
  modified_base 44: mod_base = OTHER; note = 2'-Omethyluridine
  modified_base 56: mod_base = OTHER; note = 2'-fluoroguanosine
  modified_base 57: mod_base = OTHER; note = 2'-fluorocytosine
  modified_base 61: mod_base = OTHER; note = 2'-Omethylguanosine
  modified_base 64: mod_base = OTHER; note = Uridine phosphorothiorate
  modified_base 80: mod_base = OTHER; note = 2'-Omethylguanosine
  modified_base 82: mod_base = OTHER; note = 2'-Omethylguanosine

SEQ ID NO: 5448 - RNA, 76 nt, synthetic construct; identical to SEQ ID NO: 3295
  source 1..76: mol_type = other RNA
  modified_base 1: mod_base = OTHER; note = 2'-Omethylcytosine phosphorothiorate
  modified_base 2: mod_base = OTHER; note = 2'-Omethylcytosine
  modified_base 3: mod_base = OTHER; note = 2'-fluorouridine
  modified_base 7: mod_base = OTHER; note = 2'-Omethyladenosine phosphorothiorate
  modified_base 9: mod_base = OTHER; note = 2'-Omethyladenosine
  modified_base 13: mod_base = OTHER; note = 2'-fluorocytosine phosphorothiorate
  modified_base 20: mod_base = OTHER; note = 2'-Omethyluridine
  modified_base 27: mod_base = OTHER; note = 2'-fluoroguanosine
  modified_base 39: mod_base = OTHER; note = 2'-fluorouridine phosphorothiorate
  modified_base 40: mod_base = OTHER; note = 2'-fluorocytosine phosphorothiorate
  modified_base 45: mod_base = OTHER; note = 2'-fluoroguanosine
  modified_base 49: mod_base = OTHER; note = 2'-Omethylguanosine
  modified_base 53: mod_base = OTHER; note = 2'-Omethylguanosine
  modified_base 54: mod_base = OTHER; note = Uridine phosphorothiorate
  modified_base 58: mod_base = OTHER; note = Adenosine phosphorothiorate
  modified_base 60: mod_base = OTHER; note = 2'-fluorouridine
  modified_base 69: mod_base = OTHER; note = 2'-fluoroadenosine
  modified_base 76: mod_base = OTHER; note = 2'-Omethyladenosine

SEQ ID NO: 5449 - RNA, 85 nt, synthetic construct; identical to SEQ ID NO: 3317
  source 1..85: mol_type = other RNA
  modified_base 1: mod_base = OTHER; note = 2'-Omethylguanosine phosphorothiorate
  modified_base 2: mod_base = OTHER; note = Cytosine phosphorothiorate
  modified_base 3: mod_base = OTHER; note = 2'-Omethyluridine phosphorothiorate
  modified_base 4: mod_base = OTHER; note = Guanosine phosphorothiorate
  modified_base 12: mod_base = OTHER; note = 2'-fluorocytosine
  modified_base 15: mod_base = OTHER; note = 2'-Omethylguanosine phosphorothiorate
  modified_base 19: mod_base = OTHER; note = 2'-fluorouridine
  modified_base 23: mod_base = OTHER; note = 2'-Omethylguanosine
  modified_base 25: mod_base = OTHER; note = 2'-Omethylcytosine phosphorothiorate
  modified_base 27: mod_base = OTHER; note = 2'-fluorouridine
  modified_base 28: mod_base = OTHER; note = 2'-fluorouridine
  modified_base 30: mod_base = OTHER; note = 2'-fluoroguanosine
  modified_base 34: mod_base = OTHER; note = 2'-fluorocytosine
  modified_base 35: mod_base = OTHER; note = 2'-fluorouridine
  modified_base 36: mod_base = OTHER; note = Adenosine phosphorothiorate
  modified_base 44: mod_base = OTHER; note = 2'-Omethyluridine
  modified_base 46: mod_base = OTHER; note = 2'-Omethylguanosine
  modified_base 56: mod_base = OTHER; note = 2'-fluoroguanosine
  modified_base 57: mod_base = OTHER; note = 2'-fluorocytosine
  modified_base 61: mod_base = OTHER; note = 2'-Omethylguanosine
  modified_base 71: mod_base = OTHER; note = 2'-fluorocytosine
  modified_base 73: mod_base = OTHER; note = Guanosine phosphorothiorate
  modified_base 74: mod_base = OTHER; note = 2'-fluorocytosine
  modified_base 76: mod_base = OTHER; note = Cytosine phosphorothiorate
  modified_base 80: mod_base = OTHER; note = 2'-fluoroguanosine
  modified_base 82: mod_base = OTHER; note = 2'-Omethylguanosine

SEQ ID NO: 5450 - RNA, 76 nt, synthetic construct; identical to SEQ ID NO: 625
  source 1..76: mol_type = other RNA
  modified_base 2: mod_base = OTHER; note = 2'-fluoroguanosine phosphorothiorate
  modified_base 3: mod_base = OTHER; note = 2'-Omethylcytosine
  modified_base 4: mod_base = OTHER; note = Uridine phosphorothiorate
  modified_base 5: mod_base = OTHER; note = 2'-Omethylcytosine
  modified_base 10: mod_base = OTHER; note = 2'-Omethylguanosine phosphorothiorate
  modified_base 12: mod_base = OTHER; note = 2'-Omethylguanosine
  modified_base 13: mod_base = OTHER; note = 2'-fluorocytosine
  modified_base 14: mod_base = OTHER; note = 2'-fluoroadenosine
  modified_base 20: mod_base = OTHER; note = 2'-fluorouridine
  modified_base 22: mod_base = OTHER; note = 2'-Omethylguanosine
  modified_base 24: mod_base = OTHER; note = Guanosine phosphorothiorate
  modified_base 25: mod_base = OTHER; note = Cytosine phosphorothiorate
  modified_base 26: mod_base = OTHER; note = 2'-Omethyladenosine
  modified_base 28: mod_base = OTHER; note = Uridine phosphorothiorate
  modified_base 29: mod_base = OTHER; note = 2'-Omethylguanosine
  modified_base 30: mod_base = OTHER; note = Guanosine phosphorothiorate
  modified_base 34: mod_base = OTHER; note = 2'-fluorouridine
  modified_base 38: mod_base = OTHER; note = 2'-fluoroadenosine
  modified_base 40: mod_base = OTHER; note = 2'-Omethyluridine
  modified_base 41: mod_base = OTHER; note = 2'-fluorocytosine
  modified_base 42: mod_base = OTHER; note = 2'-fluoroadenosine
  modified_base 44: mod_base = OTHER; note = 2'-fluoroadenosine
  modified_base 46: mod_base = OTHER; note = 2'-Omethylguanosine
  modified_base 48: mod_base = OTHER; note = 2'-fluorouridine
  modified_base 49: mod_base = OTHER; note = 2'-Omethylcytosine
  modified_base 50: mod_base = OTHER; note = Cytosine phosphorothiorate
  modified_base 52: mod_base = OTHER; note = 2'-fluoroguanosine phosphorothiorate
  modified_base 53: mod_base = OTHER; note = 2'-Omethylguanosine
  modified_base 59: mod_base = OTHER; note = 2'-fluoroguanosine
  modified_base 60: mod_base = OTHER; note = 2'-fluorouridine
  modified_base 61: mod_base = OTHER; note = 2'-fluorocytosine
  modified_base 66: mod_base = OTHER; note = 2'-fluorocytosine
  modified_base 69: mod_base = OTHER; note = Adenosine phosphorothiorate
  modified_base 70: mod_base = OTHER; note = 2'-Omethylguanosine
  modified_base 73: mod_base = OTHER; note = 2'-fluoroguanosine phosphorothiorate
  modified_base 74: mod_base = OTHER; note = 2'-Omethylcytosine
  modified_base 75: mod_base = OTHER; note = 2'-Omethylcytosine

SEQ ID NO: 5451 - RNA, 75 nt, synthetic construct; identical to SEQ ID NO: 1045
  source 1..75: mol_type = other RNA
  modified_base 1: mod_base = OTHER; note = 2'-Omethylguanosine phosphorothiorate
  modified_base 2: mod_base = OTHER; note = 2'-Omethylguanosine phosphorothiorate
  modified_base 74: mod_base = OTHER; note = Cytosine phosphorothiorate
  modified_base 75: mod_base = OTHER; note = 2'-Omethyladenosine

SEQ ID NO: 5452 - RNA, 75 nt, synthetic construct; identical to SEQ ID NO: 3336
  source 1..75: mol_type = other RNA
  modified_base 19: mod_base = OTHER; note = 2'-fluorouridine
  modified_base 20: mod_base = OTHER; note = 2'-fluoroadenosine
  modified_base 27: mod_base = OTHER; note = 2'-fluorocytosine
  modified_base 38: mod_base = OTHER; note = Uridine phosphorothiorate
  modified_base 47: mod_base = OTHER; note = Cytosine phosphorothiorate
  modified_base 51: mod_base = OTHER; note = Guanosine phosphorothiorate
  modified_base 53: mod_base = OTHER; note = 2'-fluorouridine
  modified_base 59: mod_base = OTHER; note = 2'-Omethyluridine phosphorothiorate
  modified_base 73: mod_base = OTHER; note = Cytosine phosphorothiorate
  modified_base 74: mod_base = OTHER; note = Cytosine phosphorothiorate

SEQ ID NO: 5453 - RNA, 76 nt, synthetic construct; identical to SEQ ID NO: 3289
  source 1..76: mol_type = other RNA
  modified_base 1: mod_base = OTHER; note = 2'-Omethylguanosine
  modified_base 10: mod_base = OTHER; note = 2'-Omethylguanosine
  modified_base 11: mod_base = OTHER; note = 2'-Omethylcytosine
  modified_base 12: mod_base = OTHER; note = 2'-Omethyluridine
  modified_base 13: mod_base = OTHER; note = 2'-Omethylcytosine
  modified_base 14: mod_base = OTHER; note = 2'-Omethyladenosine
  modified_base 15: mod_base = OTHER; note = 2'-Omethylguanosine
  modified_base 16: mod_base = OTHER; note = 2'-Omethyluridine
  modified_base 18: mod_base = OTHER; note = 2'-Omethylguanosine
  modified_base 19: mod_base = OTHER; note = 2'-Omethylguanosine
  modified_base 20: mod_base = OTHER; note = Uridine phosphorothiorate
  modified_base 21: mod_base = OTHER; note = Adenosine phosphorothiorate
  modified_base 22: mod_base = OTHER; note = 2'-Omethylguanosine
  modified_base 23: mod_base = OTHER; note = 2'-Omethyladenosine
  modified_base 24: mod_base = OTHER; note = 2'-Omethylguanosine
  modified_base 25: mod_base = OTHER; note = 2'-Omethylcytosine
  modified_base 33: mod_base = OTHER; note = Uridine phosphorothiorate
  modified_base 34: mod_base = OTHER; note = 2'-Omethyluridine
  modified_base 35: mod_base = OTHER; note = Uridine phosphorothiorate
  modified_base 37: mod_base = OTHER; note = Adenosine phosphorothiorate
  modified_base 38: mod_base = OTHER; note = Adenosine phosphorothiorate
  modified_base 49: mod_base = OTHER; note = 2'-Omethylcytosine
  modified_base 50: mod_base = OTHER; note = 2'-Omethyladenosine
  modified_base 52: mod_base = OTHER; note = 2'-Omethylguanosine
  modified_base 54: mod_base = OTHER; note = Uridine phosphorothiorate
  modified_base 55: mod_base = OTHER; note = Uridine phosphorothiorate
  modified_base 61: mod_base = OTHER; note = 2'-Omethylcytosine
  modified_base 65: mod_base = OTHER; note = 2'-Omethylguanosine
  modified_base 73: mod_base = OTHER; note = 2'-Omethylguanosine

SEQ ID NO: 5454 - RNA, 76 nt, synthetic construct; identical to SEQ ID NO: 625
  source 1..76: mol_type = other RNA
  modified_base 1: mod_base = OTHER; note = 2'-Omethylguanosine
  modified_base 2: mod_base = OTHER; note = 2'-Omethylguanosine
  modified_base 3: mod_base = OTHER; note = 2'-Omethylcytosine
  modified_base 4: mod_base = OTHER; note = 2'-Omethyluridine
  modified_base 5: mod_base = OTHER; note = 2'-Omethylcytosine
  modified_base 6: mod_base = OTHER; note = 2'-Omethylcytosine
  modified_base 7: mod_base = OTHER; note = 2'-Omethylguanosine phosphorothiorate
  modified_base 9: mod_base = OTHER; note = 2'-Omethylguanosine phosphorothiorate
  modified_base 10: mod_base = OTHER; note = 2'-Omethylguanosine
  modified_base 11: mod_base = OTHER; note = 2'-Omethylcytosine
  modified_base 12: mod_base = OTHER; note = 2'-Omethylguanosine
  modified_base 13: mod_base = OTHER; note = 2'-Omethylcytosine
  modified_base 14: mod_base = OTHER; note = 2'-Omethyladenosine phosphorothiorate
  modified_base 15: mod_base = OTHER; note = 2'-Omethyladenosine
  modified_base 16: mod_base = OTHER; note = 2'-Omethyluridine
  modified_base 17: mod_base = OTHER; note = 2'-Omethylguanosine
  modified_base 18: mod_base = OTHER; note = 2'-Omethylguanosine
  modified_base 19: mod_base = OTHER; note = 2'-Omethyladenosine
  modified_base 20: mod_base = OTHER; note = 2'-Omethyluridine
  modified_base 21: mod_base = OTHER; note = 2'-fluoroadenosine phosphorothiorate
  modified_base 22: mod_base = OTHER; note = 2'-Omethylguanosine
  modified_base 23: mod_base = OTHER; note = 2'-Omethylcytosine
  modified_base 24: mod_base = OTHER; note = 2'-Omethylguanosine
  modified_base 25: mod_base = OTHER; note = 2'-fluorocytosine
  modified_base 26: mod_base = OTHER; note = Adenosine phosphorothiorate
  modified_base 27: mod_base = OTHER; note = 2'-Omethyluridine
  modified_base 28: mod_base = OTHER; note = 2'-Omethyluridine
  modified_base 29: mod_base = OTHER; note = 2'-fluoroguanosine
  modified_base 31: mod_base = OTHER; note = 2'-Omethyladenosine
  modified_base 33: mod_base = OTHER; note = 2'-Omethyluridine
  modified_base 34: mod_base = OTHER; note = 2'-Omethyluridine phosphorothiorate
  modified_base 35: mod_base = OTHER; note = Cytosine phosphorothiorate
  modified_base 36: mod_base = OTHER; note = 2'-Omethyladenosine phosphorothiorate
  modified_base 37: mod_base = OTHER; note = Adenosine phosphorothiorate
  modified_base 38: mod_base = OTHER; note = Adenosine phosphorothiorate
  modified_base 40: mod_base = OTHER; note = 2'-Omethyluridine
  modified_base 41: mod_base = OTHER; note = 2'-fluorocytosine
  modified_base 42: mod_base = OTHER; note = 2'-Omethyladenosine
  modified_base 43: mod_base = OTHER; note = 2'-Omethyladenosine
  modified_base 44: mod_base = OTHER; note = 2'-Omethyladenosine
  modified_base 45: mod_base = OTHER; note = Guanosine phosphorothiorate
  modified_base 47: mod_base = OTHER; note = 2'-Omethyluridine
  modified_base 48: mod_base = OTHER; note = 2'-Omethyluridine
  modified_base 50: mod_base = OTHER; note = 2'-Omethylcytosine
  modified_base 51: mod_base = OTHER; note = 2'-Omethylguanosine
  modified_base 52: mod_base = OTHER; note = 2'-Omethylguanosine
  modified_base 53: mod_base = OTHER; note = 2'-fluoroguanosine
  modified_base 55: mod_base = OTHER; note = Uridine phosphorothiorate
  modified_base 56: mod_base = OTHER; note = 2'-Omethylcytosine
  modified_base 57: mod_base = OTHER; note = 2'-Omethylguanosine
  modified_base 58: mod_base = OTHER; note = 2'-Omethyladenosine
  modified_base 59: mod_base = OTHER; note = 2'-Omethylguanosine
  modified_base 60: mod_base = OTHER; note = 2'-fluorouridine
  modified_base 61: mod_base = OTHER; note = 2'-Omethylcytosine
  modified_base 62: mod_base = OTHER; note = 2'-Omethylcytosine
  modified_base 63: mod_base = OTHER; note = 2'-fluorocytosine
  modified_base 64: mod_base = OTHER; note = 2'-Omethylguanosine
  modified_base 65: mod_base = OTHER; note = 2'-Omethylguanosine phosphorothiorate
  modified_base 66: mod_base = OTHER; note = 2'-Omethylcytosine
  modified_base 67: mod_base = OTHER; note = 2'-fluoroguanosine
  modified_base 68: mod_base = OTHER; note = 2'-Omethylguanosine
  modified_base 69: mod_base = OTHER; note = 2'-Omethyladenosine
  modified_base 70: mod_base = OTHER; note = 2'-Omethylguanosine
  modified_base 71: mod_base = OTHER; note = 2'-Omethyluridine
  modified_base 72: mod_base = OTHER; note = 2'-Omethylcytosine
  modified_base 73: mod_base = OTHER; note = 2'-Omethylguanosine
  modified_base 74: mod_base = OTHER; note = 2'-fluorocytosine phosphorothiorate
  modified_base 75: mod_base = OTHER; note = 2'-fluorocytosine phosphorothiorate

SEQ ID NO: 5455 - RNA, 76 nt, synthetic construct; identical to SEQ ID NO: 3675
  source 1..76: mol_type = other RNA
  modified_base 1: mod_base = OTHER; note = 2'-Omethylguanosine
  modified_base 19: mod_base = OTHER; note = 2'-Omethyladenosine
  modified_base 20: mod_base = OTHER; note = 2'-Omethyluridine
  modified_base 21: mod_base = OTHER; note = 2'-fluoroadenosine
  modified_base 22: mod_base = OTHER; note = 2'-Omethylguanosine
  modified_base 40: mod_base = OTHER; note = 2'-fluorouridine
  modified_base 41: mod_base = OTHER; note = 2'-Omethylcytosine
  modified_base 42: mod_base = OTHER; note = 2'-Omethyladenosine
  modified_base 43: mod_base = OTHER; note = 2'-Omethylcytosine
  modified_base 73: mod_base = OTHER; note = 2'-Omethylguanosine

SEQ ID NO: 5456 - RNA, 86 nt, synthetic construct
  source 1..86: mol_type = other RNA
accaggatggccgagtggttaaggcgttggacttcagatccaatggacgtatgtctgcgtgggttcgaaccccactcctggtacca

SEQ ID NO: 5457 - RNA, 75 nt, synthetic construct; identical to SEQ ID NO: 3306
  source 1..75: mol_type = other RNA
  modified_base 1: mod_base = OTHER; note = 2'-Omethylguanosine
  modified_base 13: mod_base = OTHER; note = 2'-Omethylcytosine
  modified_base 14: mod_base = OTHER; note = 2'-Omethyladenosine
  modified_base 15: mod_base = OTHER; note = 2'-Omethyladenosine
  modified_base 16: mod_base = OTHER; note = 2'-Omethylcytosine
  modified_base 17: mod_base = OTHER; note = 2'-Omethylguanosine
  modified_base 18: mod_base = OTHER; note = 2'-Omethylguanosine
  modified_base 19: mod_base = OTHER; note = Uridine phosphorothiorate
  modified_base 20: mod_base = OTHER; note = Adenosine phosphorothiorate
  modified_base 24: mod_base = OTHER; note = 2'-Omethylcytosine
  modified_base 32: mod_base = OTHER; note = Uridine phosphorothiorate
  modified_base 33: mod_base = OTHER; note = 2'-Omethylcytosine
  modified_base 34: mod_base = OTHER; note = Uridine phosphorothiorate
  modified_base 36: mod_base = OTHER; note = Guanosine phosphorothiorate
  modified_base 37: mod_base = OTHER; note = Adenosine phosphorothiorate
  modified_base 48: mod_base = OTHER; note = 2'-Omethylguanosine
  modified_base 49: mod_base = OTHER; note = 2'-Omethylcytosine
  modified_base 51: mod_base = OTHER; note = 2'-Omethyluridine
  modified_base 53: mod_base = OTHER; note = Uridine phosphorothiorate
  modified_base 54: mod_base = OTHER; note = Uridine phosphorothiorate
  modified_base 55: mod_base = OTHER; note = 2'-Omethylcytosine
  modified_base 56: mod_base = OTHER; note = Adenosine phosphorothiorate
  modified_base 57: mod_base = OTHER; note = Adenosine phosphorothiorate
  modified_base 58: mod_base = OTHER; note = 2'-Omethyladenosine
  modified_base 60: mod_base = OTHER; note = 2'-Omethylcytosine
  modified_base 64: mod_base = OTHER; note = 2'-Omethyluridine
  modified_base 72: mod_base = OTHER; note = 2'-Omethyladenosine

SEQ ID NO: 5458 - RNA, 76 nt, synthetic construct; identical to SEQ ID NO: 3318
  source 1..76: mol_type = other RNA
  modified_base 1: mod_base = OTHER; note = 2'-Omethylcytosine phosphorothiorate

SEQ ID NO: 5459 - RNA, 85 nt, synthetic construct; identical to SEQ ID NO: 3297
  source 1..85: mol_type = other RNA
  modified_base 71: mod_base = OTHER; note = 2'-Omethylcytosine
  modified_base 72: mod_base = OTHER; note = 2'-Omethyluridine

SEQ ID NO: 5460 - RNA, 76 nt, synthetic construct; identical to SEQ ID NO: 625
  source 1..76: mol_type = other RNA
  modified_base 1: mod_base = OTHER; note = 2'-Omethylguanosine phosphorothiorate
  modified_base 2: mod_base = OTHER; note = 2'-Omethylguanosine
  modified_base 3: mod_base = OTHER; note = 2'-Omethylcytosine
  modified_base 4: mod_base = OTHER; note = 2'-Omethyluridine
  modified_base 5: mod_base = OTHER; note = 2'-Omethylcytosine
  modified_base 6: mod_base = OTHER; note = 2'-Omethylcytosine
  modified_base 10: mod_base = OTHER; note = 2'-Omethylguanosine
  modified_base 11: mod_base = OTHER; note = 2'-Omethylcytosine
  modified_base 12: mod_base = OTHER; note = 2'-Omethylguanosine
  modified_base 13: mod_base = OTHER; note = 2'-Omethylcytosine
  modified_base 49: mod_base = OTHER; note = 2'-Omethylcytosine
  modified_base 50: mod_base = OTHER; note = 2'-Omethylcytosine
  modified_base 51: mod_base = OTHER; note = 2'-Omethylguanosine
  modified_base 52: mod_base = OTHER; note = 2'-Omethylguanosine
  modified_base 53: mod_base = OTHER; note = 2'-Omethylguanosine
  modified_base 61: mod_base = OTHER; note = 2'-Omethylcytosine
  modified_base 62: mod_base = OTHER; note = 2'-Omethylcytosine
  modified_base 63: mod_base = OTHER; note = 2'-fluorocytosine
  modified_base 64: mod_base = OTHER; note = 2'-Omethylguanosine
  modified_base 65: mod_base = OTHER; note = 2'-Omethylguanosine
  modified_base 66: mod_base = OTHER; note = 2'-Omethylcytosine
  modified_base 67: mod_base = OTHER; note = 2'-Omethylguanosine
  modified_base 68: mod_base = OTHER; note = 2'-Omethylguanosine
  modified_base 69: mod_base = OTHER; note = 2'-fluoroadenosine
  modified_base 70: mod_base = OTHER; note = 2'-fluoroguanosine

SEQ ID NO: 5461 - RNA, 75 nt, synthetic construct; identical to SEQ ID NO: 3336
  source 1..75: mol_type = other RNA
  modified_base 10: mod_base = OTHER; note = Cytosine phosphorothiorate
  modified_base 15: mod_base = OTHER; note = 2'-Omethyluridine phosphorothiorate
  modified_base 21: mod_base = OTHER; note = Guanosine phosphorothiorate
  modified_base 22: mod_base = OTHER; note = 2'-Omethyladenosine phosphorothiorate
  modified_base 24: mod_base = OTHER; note = 2'-fluorocytosine
  modified_base 25: mod_base = OTHER; note = 2'-fluoroadenosine phosphorothiorate
  modified_base 28: mod_base = OTHER; note = 2'-fluoroadenosine
  modified_base 38: mod_base = OTHER; note = Uridine phosphorothiorate
  modified_base 39: mod_base = OTHER; note = Cytosine phosphorothiorate
  modified_base 40: mod_base = OTHER; note = 2'-fluorouridine
  modified_base 41: mod_base = OTHER; note = 2'-Omethylguanosine phosphorothiorate
  modified_base 48: mod_base = OTHER; note = 2'-fluorocytosine phosphorothiorate
  modified_base 49: mod_base = OTHER; note = 2'-Omethyladenosine phosphorothiorate
  modified_base 56: mod_base = OTHER; note = Adenosine phosphorothiorate
  modified_base 60: mod_base = OTHER; note = 2'-Omethylcytosine phosphorothiorate
  modified_base 62: mod_base = OTHER; note = 2'-fluorocytosine
  modified_base 69: mod_base = OTHER; note = Guanosine phosphorothiorate
  modified_base 73: mod_base = OTHER; note = Cytosine phosphorothiorate
  modified_base 74: mod_base = OTHER; note = Cytosine phosphorothiorate

SEQ ID NO: 5462 - RNA, 75 nt, synthetic construct; identical to SEQ ID NO: 1045
  source 1..75: mol_type = other RNA
  modified_base 1: mod_base = OTHER; note = Guanosine phosphorothiorate
  modified_base 2: mod_base = OTHER; note = 2'-Omethylguanosine phosphorothiorate
  modified_base 19: mod_base = OTHER; note = 2'-Omethyluridine phosphorothiorate
  modified_base 20: mod_base = OTHER; note = 2'-fluoroadenosine
  modified_base 22: mod_base = OTHER; note = 2'-fluoroguanosine
  modified_base 23: mod_base = OTHER; note = Cytosine phosphorothiorate
  modified_base 36: mod_base = OTHER; note = 2'-fluoroadenosine
  modified_base 42: mod_base = OTHER; note = Adenosine phosphorothiorate
  modified_base 44: mod_base = OTHER; note = 2'-fluorocytosine
  modified_base 63: mod_base = OTHER; note = Guanosine phosphorothiorate
  modified_base 73: mod_base = OTHER; note = Cytosine phosphorothiorate
  modified_base 74: mod_base = OTHER; note = 2'-Omethylcytosine

SEQ ID NO: 5463 - RNA, 85 nt, synthetic construct; identical to SEQ ID NO: 3297
  source 1..85: mol_type = other RNA
  modified_base 1: mod_base = OTHER; note = 2'-Omethylguanosine phosphorothiorate
  modified_base 2: mod_base = OTHER; note = 2'-Omethylcytosine phosphorothiorate
  modified_base 3: mod_base = OTHER; note = 2'-Omethyluridine
  modified_base 4: mod_base = OTHER; note = 2'-Omethylguanosine
  modified_base 5: mod_base = OTHER; note = 2'-Omethyluridine
  modified_base 6: mod_base = OTHER; note = 2'-Omethylguanosine
  modified_base 16: mod_base = OTHER; note = 2'-Omethyluridine
  modified_base 17: mod_base = OTHER; note = 2'-Omethylguanosine
  modified_base 18: mod_base = OTHER; note = 2'-Omethylguanosine
  modified_base 33: mod_base = OTHER; note = 2'-fluorouridine
  modified_base 35: mod_base = OTHER; note = Cytosine phosphorothiorate
  modified_base 37: mod_base = OTHER; note = Adenosine phosphorothiorate
  modified_base 38: mod_base = OTHER; note = Adenosine phosphorothiorate
  modified_base 44: mod_base = OTHER; note = 2'-Omethyluridine
  modified_base 56: mod_base = OTHER; note = 2'-fluoroguanosine
  modified_base 57: mod_base = OTHER; note = 2'-fluorocytosine
  modified_base 58: mod_base = OTHER; note = 2'-Omethylguanosine
  modified_base 59: mod_base = OTHER; note = 2'-Omethylcytosine
  modified_base 60: mod_base = OTHER; note = 2'-Omethyladenosine
  modified_base 61: mod_base = OTHER; note = 2'-Omethylguanosine
  modified_base 62: mod_base = OTHER; note = 2'-Omethylguanosine
  modified_base 63: mod_base = OTHER; note = 2'-Omethyluridine
  modified_base 65: mod_base = OTHER; note = 2'-Omethylcytosine
  modified_base 68: mod_base = OTHER; note = 2'-Omethyladenosine
  modified_base 70: mod_base = OTHER; note = 2'-Omethylcytosine
  modified_base 71: mod_base = OTHER; note = 2'-Omethylcytosine
  modified_base 72: mod_base = OTHER; note = 2'-fluorouridine
  modified_base 73: mod_base = OTHER; note = 2'-Omethylguanosine
  modified_base 74: mod_base = OTHER; note = 2'-Omethylcytosine
  modified_base 75: mod_base = OTHER; note = 2'-Omethyluridine
  modified_base 76: mod_base = OTHER; note = 2'-Omethylcytosine
  modified_base 77: mod_base = OTHER; note = 2'-Omethyladenosine
  modified_base 82: mod_base = OTHER; note = 2'-Omethylguanosine

SEQ ID NO: 5464 - RNA, 76 nt, synthetic construct; identical to SEQ ID NO: 3289
  source 1..76: mol_type = other RNA
  modified_base 1: mod_base = OTHER; note = 2'-Omethylguanosine phosphorothiorate
  modified_base 2: mod_base = OTHER; note = 2'-Omethylcytosine phosphorothiorate
  modified_base 3: mod_base = OTHER; note = 2'-Omethylcytosine
  modified_base 4: mod_base = OTHER; note = 2'-Omethyluridine
  modified_base 5: mod_base = OTHER; note = 2'-Omethylguanosine
  modified_base 6: mod_base = OTHER; note = 2'-Omethylguanosine
  modified_base 10: mod_base = OTHER; note = 2'-Omethylguanosine
  modified_base 11: mod_base = OTHER; note = 2'-Omethylcytosine
  modified_base 12: mod_base = OTHER; note = 2'-Omethyluridine
  modified_base 13: mod_base = OTHER; note = 2'-Omethylcytosine
  modified_base 14: mod_base = OTHER; note = 2'-Omethyladenosine
  modified_base 15: mod_base = OTHER; note = 2'-fluoroguanosine
  modified_base 16: mod_base = OTHER; note = 2'-Omethyluridine
  modified_base 18: mod_base = OTHER; note = 2'-Omethylguanosine
  modified_base 19: mod_base = OTHER; note = 2'-Omethylguanosine
  modified_base 20: mod_base = OTHER; note = 2'-fluorouridine
  modified_base 22: mod_base = OTHER; note = 2'-Omethylguanosine
  modified_base 23: mod_base = OTHER; note = 2'-Omethyladenosine
  modified_base 24: mod_base = OTHER; note = 2'-Omethylguanosine
  modified_base 25: mod_base = OTHER; note = 2'-Omethylcytosine
  modified_base 33: mod_base = OTHER; note = 2'-fluorouridine
  modified_base 35: mod_base = OTHER; note = Uridine phosphorothiorate
  modified_base 37: mod_base = OTHER; note = Adenosine phosphorothiorate
  modified_base 38: mod_base = OTHER; note = Adenosine phosphorothiorate
  modified_base 49: mod_base = OTHER; note = 2'-Omethylcytosine
  modified_base 50: mod_base = OTHER; note = 2'-Omethyladenosine
  modified_base 51: mod_base = OTHER; note = 2'-Omethylguanosine
  modified_base 52: mod_base = OTHER; note = 2'-Omethylguanosine
  modified_base 53: mod_base = OTHER; note = 2'-Omethylguanosine
  modified_base 54: mod_base = OTHER; note = 2'-Omethyluridine
  modified_base 56: mod_base = OTHER; note = 2'-Omethylcytosine
  modified_base 59: mod_base = OTHER; note = 2'-Omethylguanosine
  modified_base 61: mod_base = OTHER; note = 2'-Omethylcytosine
  modified_base 62: mod_base = OTHER; note = 2'-Omethylcytosine
  modified_base 63: mod_base = OTHER; note = 2'-fluorocytosine
  modified_base 64: mod_base = OTHER; note = 2'-Omethyluridine
  modified_base 65: mod_base = OTHER; note = 2'-Omethylguanosine
  modified_base 66: mod_base = OTHER; note = 2'-Omethyluridine
  modified_base 67: mod_base = OTHER; note = 2'-Omethylcytosine
  modified_base 68: mod_base = OTHER; note = 2'-Omethylcytosine
  modified_base 73: mod_base = OTHER; note = 2'-Omethylguanosine

SEQ ID NO: 5465 - RNA, 75 nt, synthetic construct; identical to SEQ ID NO: 1045
  source 1..75: mol_type = other RNA
  modified_base 1: mod_base = OTHER; note = 2'-Omethylguanosine phosphorothiorate
  modified_base 2: mod_base = OTHER; note = 2'-Omethylguanosine phosphorothiorate
  modified_base 14: mod_base = OTHER; note = 2'-fluoroadenosine
  modified_base 16: mod_base = OTHER; note = 2'-fluorouridine
  modified_base 22: mod_base = OTHER; note = 2'-fluoroguanosine
  modified_base 24: mod_base = OTHER; note = 2'-fluoroadenosine
  modified_base 40: mod_base = OTHER; note = Cytosine phosphorothiorate
  modified_base 43: mod_base = OTHER; note = 2'-fluoroguanosine
  modified_base 44: mod_base = OTHER; note = 2'-fluorocytosine
  modified_base 45: mod_base = OTHER; note = 2'-fluoroguanosine phosphorothiorate
  modified_base 51: mod_base = OTHER; note = 2'-fluoroadenosine
  modified_base 60: mod_base = OTHER; note = 2'-fluorocytosine
  modified_base 73: mod_base = OTHER; note = Cytosine phosphorothiorate

SEQ ID NO: 5466 - RNA, 76 nt, synthetic construct; identical to SEQ ID NO: 625
  source 1..76: mol_type = other RNA
  modified_base 1: mod_base = OTHER; note = Guanosine phosphorothiorate
  modified_base 2: mod_base = OTHER; note = 2'-Omethylguanosine
  modified_base 4: mod_base = OTHER; note = 2'-fluorouridine
  modified_base 10: mod_base = OTHER; note = 2'-Omethylguanosine phosphorothiorate
  modified_base 11: mod_base = OTHER; note = 2'-Omethylcytosine phosphorothiorate
  modified_base 12: mod_base = OTHER; note = 2'-Omethylguanosine
  modified_base 15: mod_base = OTHER; note = 2'-Omethyladenosine
  modified_base 16: mod_base = OTHER; note = 2'-fluorouridine
  modified_base 18: mod_base = OTHER; note = 2'-fluoroguanosine
  modified_base 19: mod_base = OTHER; note = Adenosine phosphorothiorate
  modified_base 20: mod_base = OTHER; note = Uridine phosphorothiorate
  modified_base 26: mod_base = OTHER; note = 2'-fluoroadenosine
  modified_base 30: mod_base = OTHER; note = 2'-Omethylguanosine
  modified_base 32: mod_base = OTHER; note = 2'-fluorocytosine
  modified_base 34: mod_base = OTHER; note = 2'-fluorouridine
  modified_base 39: mod_base = OTHER; note = 2'-Omethyluridine
  modified_base 41: mod_base = OTHER; note = Cytosine phosphorothiorate
  modified_base 42: mod_base = OTHER; note = 2'-Omethyladenosine
  modified_base 43: mod_base = OTHER; note = 2'-fluoroadenosine
  modified_base 44: mod_base = OTHER; note = 2'-Omethyladenosine
  modified_base 49: mod_base = OTHER; note = 2'-fluorocytosine phosphorothiorate
  modified_base 50: mod_base = OTHER; note = 2'-Omethylcytosine
  modified_base 58: mod_base = OTHER; note = 2'-fluoroadenosine
  modified_base 59: mod_base = OTHER; note = 2'-fluoroguanosine
  modified_base 62: mod_base = OTHER; note = 2'-fluorocytosine phosphorothiorate
  modified_base 63: mod_base = OTHER; note = 2'-fluorocytosine
  modified_base 64: mod_base = OTHER; note = Guanosine phosphorothiorate
  modified_base 65: mod_base = OTHER; note = 2'-fluoroguanosine
  modified_base 66: mod_base = OTHER; note = 2'-fluorocytosine
  modified_base 69: mod_base = OTHER; note = 2'-Omethyladenosine
  modified_base 73: mod_base = OTHER; note = 2'-Omethylguanosine
  modified_base 74: mod_base = OTHER; note = 2'-fluorocytosine
  modified_base 75: mod_base = OTHER; note = 2'-fluorocytosine
  modified_base 76: mod_base = OTHER; note = 2'-fluoroadenosine

SEQ ID NO: 5467 - RNA, 76 nt, synthetic construct; identical to SEQ ID NO: 625
  source 1..76: mol_type = other RNA
  modified_base 1: mod_base = OTHER; note = 2'-Omethylguanosine phosphorothiorate
  modified_base 2: mod_base = OTHER; note = 2'-Omethylguanosine
  modified_base 13: mod_base = OTHER; note = 2'-Omethylcytosine
  modified_base 33: mod_base = OTHER; note = 2'-fluorouridine
  modified_base 35: mod_base = OTHER; note = Cytosine phosphorothiorate
  modified_base 37: mod_base = OTHER; note = Adenosine phosphorothiorate
  modified_base 38: mod_base = OTHER; note = Adenosine phosphorothiorate
  modified_base 52: mod_base = OTHER; note = 2'-fluoroguanosine
  modified_base 56: mod_base = OTHER; note = 2'-Omethylcytosine
  modified_base 62: mod_base = OTHER; note = 2'-Omethylcytosine
  modified_base 73: mod_base = OTHER; note = 2'-Omethylguanosine
  modified_base 75: mod_base = OTHER; note = 2'-fluorocytosine phosphorothiorate

SEQ ID NO: 5468 - RNA, 76 nt, synthetic construct; identical to SEQ ID NO: 625
  source 1..76: mol_type = other RNA
  modified_base 1: mod_base = OTHER; note = 2'-fluoroguanosine phosphorothiorate
  modified_base 2: mod_base = OTHER; note = 2'-fluoroguanosine
  modified_base 3: mod_base = OTHER; note = Cytosine phosphorothiorate
  modified_base 4: mod_base = OTHER; note = 2'-fluorouridine phosphorothiorate
  modified_base 5: mod_base = OTHER; note = 2'-Omethylcytosine
  modified_base 6: mod_base = OTHER; note = 2'-Omethylcytosine
  modified_base 7: mod_base = OTHER; note = Guanosine phosphorothiorate
  modified_base 9: mod_base = OTHER; note = Guanosine phosphorothiorate
  modified_base 13: mod_base = OTHER; note = 2'-fluorocytosine
  modified_base 22: mod_base = OTHER; note = 2'-Omethylguanosine phosphorothiorate
  modified_base 24: mod_base = OTHER; note = 2'-Omethylguanosine
  modified_base 26: mod_base = OTHER; note = 2'-Omethyladenosine
  modified_base 29: mod_base = OTHER; note = 2'-Omethylguanosine
  modified_base 34: mod_base = OTHER; note = Uridine phosphorothiorate
  modified_base 39: mod_base = OTHER; note = 2'-Omethyluridine phosphorothiorate
  modified_base 40: mod_base = OTHER; note = 2'-fluorouridine
  modified_base 41: mod_base = OTHER; note = 2'-fluorocytosine
  modified_base 44: mod_base = OTHER; note = 2'-Omethyladenosine
  modified_base 47: mod_base = OTHER; note = 2'-fluorouridine
  modified_base 48: mod_base = OTHER; note = 2'-Omethyluridine
  modified_base 49: mod_base = OTHER; note = 2'-fluorocytosine
  modified_base 52: mod_base = OTHER; note = 2'-Omethylguanosine
  modified_base 54: mod_base = OTHER; note = 2'-fluorouridine
  modified_base 56: mod_base = OTHER; note = 2'-Omethylcytosine phosphorothiorate
  modified_base 57: mod_base = OTHER; note = 2'-Omethylguanosine
  modified_base 59: mod_base = OTHER; note = 2'-fluoroguanosine
  modified_base 63: mod_base = OTHER; note = Cytosine phosphorothiorate
  modified_base 64: mod_base = OTHER; note = 2'-fluoroguanosine
  modified_base 65: mod_base = OTHER; note = 2'-fluoroguanosine
  modified_base 67: mod_base = OTHER; note = 2'-fluoroguanosine
  modified_base 69: mod_base = OTHER; note = 2'-fluoroadenosine
  modified_base 70: mod_base = OTHER; note = 2'-Omethylguanosine
  modified_base 73: mod_base = OTHER; note = 2'-fluoroguanosine
  modified_base 74: mod_base = OTHER; note = 2'-Omethylcytosine phosphorothiorate
  modified_base 75: mod_base = OTHER; note = 2'-fluorocytosine

SEQ ID NO: 5469 - RNA, 85 nt, synthetic construct; identical to SEQ ID NO: 3286
  source 1..85: mol_type = other RNA
  modified_base 4: mod_base = OTHER; note = Guanosine phosphorothiorate
  modified_base 46: mod_base = OTHER; note = 2'-Omethyladenosine
  modified_base 58: mod_base = OTHER; note = Guanosine phosphorothiorate
  modified_base 59: mod_base = OTHER; note = 2'-fluorouridine
  modified_base 69: mod_base = OTHER; note = Cytosine phosphorothiorate
  modified_base 83: mod_base = OTHER; note = 2'-fluorocytosine phosphorothiorate

SEQ ID NO: 5470 - RNA, 76 nt, synthetic construct; identical to SEQ ID NO: 3295
  source 1..76: mol_type = other RNA
  modified_base 1: mod_base = OTHER; note = Cytosine phosphorothiorate
  modified_base 2: mod_base = OTHER; note = 2'-Omethylcytosine
  modified_base 12: mod_base = OTHER; note = 2'-Omethyluridine
  modified_base 23: mod_base = OTHER; note = 2'-Omethyladenosine
  modified_base 38: mod_base = OTHER; note = 2'-fluoroadenosine phosphorothiorate
  modified_base 50: mod_base = OTHER; note = 2'-Omethylcytosine
  modified_base 57: mod_base = OTHER; note = 2'-fluoroguanosine phosphorothiorate
  modified_base 67: mod_base = OTHER; note = Cytosine phosphorothiorate

SEQ ID NO: 5471 - RNA, 76 nt, synthetic construct; identical to SEQ ID NO: 625
  source 1..76: mol_type = other RNA
  modified_base 1: mod_base = OTHER; note = 2'-Omethylguanosine phosphorothiorate
  modified_base 2: mod_base = OTHER; note = 2'-Omethylguanosine
  modified_base 17: mod_base = OTHER; note = 2'-Omethylguanosine
  modified_base 33: mod_base = OTHER; note = 2'-fluorouridine
  modified_base 35: mod_base = OTHER; note = Cytosine phosphorothiorate
  modified_base 37: mod_base = OTHER; note = Adenosine phosphorothiorate
  modified_base 38: mod_base = OTHER; note = Adenosine phosphorothiorate
  modified_base 52: mod_base = OTHER; note = 2'-fluoroguanosine
  modified_base 59: mod_base = OTHER; note = 2'-Omethylguanosine
  modified_base 62: mod_base = OTHER; note = 2'-Omethylcytosine
  modified_base 63: mod_base = OTHER; note = 2'-fluorocytosine
  modified_base 73: mod_base = OTHER; note = 2'-Omethylguanosine
  modified_base 75: mod_base = OTHER; note = 2'-fluorocytosine phosphorothiorate

SEQ ID NO: 5472 - RNA, 76 nt, synthetic construct; identical to SEQ ID NO: 625
  source 1..76: mol_type = other RNA
  modified_base 1: mod_base = OTHER; note = 2'-Omethylguanosine
  modified_base 8: mod_base = OTHER; note = Uridine phosphorothiorate
  modified_base 11: mod_base = OTHER; note = 2'-Omethylcytosine
  modified_base 12: mod_base = OTHER; note = Guanosine phosphorothiorate
  modified_base 13: mod_base = OTHER; note = 2'-Omethylcytosine
  modified_base 15: mod_base = OTHER; note = 2'-fluoroadenosine
  modified_base 16: mod_base = OTHER; note = Uridine phosphorothiorate
  modified_base 18: mod_base = OTHER; note = 2'-Omethylguanosine
  modified_base 22: mod_base = OTHER; note = Guanosine phosphorothiorate
  modified_base 27: mod_base = OTHER; note = 2'-Omethyluridine phosphorothiorate
  modified_base 28: mod_base = OTHER; note = 2'-fluorouridine
  modified_base 29: mod_base = OTHER; note = 2'-fluoroguanosine
  modified_base 30: mod_base = OTHER; note = 2'-fluoroguanosine
  modified_base 31: mod_base = OTHER; note = 2'-Omethyladenosine
  modified_base 34: mod_base = OTHER; note = 2'-fluorouridine
  modified_base 37: mod_base = OTHER; note = Adenosine phosphorothiorate
  modified_base 38: mod_base = OTHER; note = 2'-fluoroadenosine phosphorothiorate
  modified_base 39: mod_base = OTHER; note = 2'-Omethyluridine
  modified_base 45: mod_base = OTHER; note = 2'-Omethylguanosine
  modified_base 49: mod_base = OTHER; note = 2'-fluorocytosine
  modified_base 50: mod_base = OTHER; note = 2'-Omethylcytosine
  modified_base 53: mod_base = OTHER; note = 2'-Omethylguanosine
  modified_base 57: mod_base = OTHER; note = 2'-Omethylguanosine
  modified_base 59: mod_base = OTHER; note = 2'-fluoroguanosine
  modified_base 62: mod_base = OTHER; note = 2'-Omethylcytosine
  modified_base 63: mod_base = OTHER; note = 2'-fluorocytosine
  modified_base 65: mod_base = OTHER; note = Guanosine phosphorothiorate
  modified_base 67: mod_base = OTHER; note = 2'-fluoroguanosine
  modified_base 68: mod_base = OTHER; note = 2'-fluoroguanosine phosphorothiorate
  modified_base 70: mod_base = OTHER; note = Guanosine phosphorothiorate
  modified_base 71: mod_base = OTHER; note = 2'-Omethyluridine
  modified_base 72: mod_base = OTHER; note = 2'-Omethylcytosine
  modified_base 73: mod_base = OTHER; note = 2'-fluoroguanosine phosphorothiorate
  modified_base 74: mod_base = OTHER; note = 2'-Omethylcytosine
  modified_base 75: mod_base = OTHER; note = 2'-Omethylcytosine
  modified_base 76: mod_base = OTHER; note = 2'-fluoroadenosine

SEQ ID NO: 5473 - RNA, 86 nt, synthetic construct; identical to SEQ ID NO: 3290
  source 1..86: mol_type = other RNA
  modified_base 1: mod_base = OTHER; note = 2'-Omethyladenosine
  modified_base 9: mod_base = OTHER; note = 2'-fluoroguanosine
  modified_base 10: mod_base = OTHER; note = 2'-Omethylguanosine
  modified_base 13: mod_base = OTHER; note = 2'-Omethylguanosine
  modified_base 17: mod_base = OTHER; note = Guanosine phosphorothiorate
  modified_base 18: mod_base = OTHER; note = 2'-Omethylguanosine
  modified_base 19: mod_base = OTHER; note = Uridine phosphorothiorate
  modified_base 20: mod_base = OTHER; note = 2'-Omethyluridine
  modified_base 25: mod_base = OTHER; note = 2'-Omethylcytosine
  modified_base 29: mod_base = OTHER; note = 2'-Omethylguanosine
  modified_base 33: mod_base = OTHER; note = 2'-fluorouridine
  modified_base 35: mod_base = OTHER; note = Cytosine phosphorothiorate
  modified_base 37: mod_base = OTHER; note = Guanosine phosphorothiorate
  modified_base 38: mod_base = OTHER; note = Adenosine phosphorothiorate
  modified_base 41: mod_base = OTHER; note = 2'-fluorocytosine
  modified_base 43: mod_base = OTHER; note = 2'-Omethyladenosine
  modified_base 44: mod_base = OTHER; note = 2'-fluorouridine
  modified_base 57: mod_base = OTHER; note = Guanosine phosphorothiorate
  modified_base 60: mod_base = OTHER; note = 2'-Omethyluridine
  modified_base 62: mod_base = OTHER; note = 2'-Omethylguanosine
  modified_base 64: mod_base = OTHER; note = Uridine phosphorothiorate
  modified_base 65: mod_base = OTHER; note = Uridine phosphorothiorate
  modified_base 66: mod_base = OTHER; note = 2'-Omethylcytosine
  modified_base 67: mod_base = OTHER; note = Guanosine phosphorothiorate
  modified_base 72: mod_base = OTHER; note = 2'-Omethylcytosine
  modified_base 73: mod_base = OTHER; note = 2'-fluorocytosine
  modified_base 75: mod_base = OTHER; note = 2'-Omethylcytosine
  modified_base 81: mod_base = OTHER; note = 2'-Omethylguanosine
  modified_base 83: mod_base = OTHER; note = 2'-Omethyladenosine

SEQ ID NO: 5474 - RNA, 75 nt, synthetic construct; identical to SEQ ID NO: 1045
  source 1..75: mol_type = other RNA
  modified_base 1: mod_base = OTHER; note = 2'-Omethylguanosine
  modified_base 2: mod_base = OTHER; note = 2'-Omethylguanosine
  modified_base 3: mod_base = OTHER; note = 2'-Omethyluridine
  modified_base 4: mod_base = OTHER; note = 2'-Omethyluridine
  modified_base 5: mod_base = OTHER; note = 2'-Omethylcytosine
  modified_base 6: mod_base = OTHER; note = 2'-Omethylcytosine
  modified_base 10: mod_base = OTHER; note = 2'-Omethylguanosine
  modified_base 11: mod_base = OTHER; note = 2'-Omethyluridine
  modified_base 12: mod_base = OTHER; note = 2'-Omethylguanosine
  modified_base 13: mod_base = OTHER; note = 2'-Omethyluridine
  modified_base 22: mod_base = OTHER; note = 2'-Omethylguanosine
  modified_base 23: mod_base = OTHER; note = 2'-Omethylcytosine
  modified_base 24: mod_base = OTHER; note = 2'-Omethyladenosine
  modified_base 25: mod_base = OTHER; note = 2'-Omethylcytosine
  modified_base 48: mod_base = OTHER; note = 2'-Omethylcytosine
  modified_base 49: mod_base = OTHER; note = 2'-Omethylcytosine
  modified_base 50: mod_base = OTHER; note = 2'-Omethylguanosine
  modified_base 51: mod_base = OTHER; note = 2'-Omethyladenosine
  modified_base 52: mod_base = OTHER; note = 2'-Omethylguanosine
  modified_base 60: mod_base = OTHER; note = 2'-Omethylcytosine
  modified_base 61: mod_base = OTHER; note = 2'-Omethyluridine
  modified_base 62: mod_base = OTHER; note = 2'-fluorocytosine
  modified_base 63: mod_base = OTHER; note = 2'-Omethylguanosine
  modified_base 64: mod_base = OTHER; note = 2'-Omethylguanosine
  modified_base 65: mod_base = OTHER; note = 2'-Omethyluridine
  modified_base 66: mod_base = OTHER; note = 2'-Omethylguanosine
  modified_base 67: mod_base = OTHER; note = 2'-Omethylguanosine
  modified_base 72: mod_base = OTHER; note = 2'-Omethyluridine

SEQ ID NO: 5475 - RNA, 76 nt, synthetic construct; identical to SEQ ID NO: 625
  source 1..76: mol_type = other RNA
  modified_base 1: mod_base = OTHER; note = 2'-Omethylguanosine phosphorothiorate
  modified_base 2: mod_base = OTHER; note = 2'-Omethylguanosine phosphorothiorate
  modified_base 3: mod_base = OTHER; note = 2'-Omethylcytosine phosphorothiorate
  modified_base 4: mod_base = OTHER; note = 2'-Omethyluridine phosphorothiorate
  modified_base 5: mod_base = OTHER; note = 2'-Omethylcytosine phosphorothiorate
  modified_base 6: mod_base = OTHER; note = 2'-Omethylcytosine phosphorothiorate
  modified_base 22: mod_base = OTHER; note = 2'-Omethylguanosine
  modified_base 23: mod_base = OTHER; note = 2'-Omethylcytosine
  modified_base 24: mod_base = OTHER; note = 2'-Omethylguanosine
  modified_base 25: mod_base = OTHER; note = 2'-Omethylcytosine
  modified_base 49: mod_base = OTHER; note = 2'-Omethylcytosine
  modified_base 50: mod_base = OTHER; note = 2'-Omethylcytosine
  modified_base 51: mod_base = OTHER; note = 2'-Omethylguanosine
  modified_base 52: mod_base = OTHER; note = 2'-Omethylguanosine
  modified_base 53: mod_base = OTHER; note = 2'-Omethylguanosine

SEQ ID NO: 5476 - RNA, 76 nt, synthetic construct; identical to SEQ ID NO: 625
  source 1..76: mol_type = other RNA
  modified_base 2: mod_base = OTHER; note = 2'-Omethylguanosine
  modified_base 3: mod_base = OTHER; note = 2'-fluorocytosine
  modified_base 4: mod_base = OTHER; note = 2'-Omethyluridine
  modified_base 6: mod_base = OTHER; note = 2'-fluorocytosine
  modified_base 9: mod_base = OTHER; note = Guanosine phosphorothiorate
  modified_base 10: mod_base = OTHER; note = 2'-fluoroguanosine
  modified_base 11: mod_base = OTHER; note = 2'-fluorocytosine
  modified_base 12: mod_base = OTHER; note = 2'-Omethylguanosine
  modified_base 16: mod_base = OTHER; note = 2'-fluorouridine phosphorothiorate
  modified_base 22: mod_base = OTHER; note = Guanosine phosphorothiorate
  modified_base 23: mod_base = OTHER; note = 2'-fluorocytosine
  modified_base 27: mod_base = OTHER; note = 2'-Omethyluridine
  modified_base 28: mod_base = OTHER; note = 2'-Omethyluridine
  modified_base 31: mod_base = OTHER; note = 2'-fluoroadenosine
  modified_base 34: mod_base = OTHER; note = 2'-Omethyluridine phosphorothiorate
  modified_base 37: mod_base = OTHER; note = Adenosine phosphorothiorate
  modified_base 38: mod_base = OTHER; note = 2'-fluoroadenosine
  modified_base 39: mod_base = OTHER; note = Uridine phosphorothiorate
  modified_base 40: mod_base = OTHER; note = 2'-Omethyluridine
  modified_base 41: mod_base = OTHER; note = 2'-Omethylcytosine phosphorothiorate
  modified_base 42: mod_base = OTHER; note = 2'-fluoroadenosine phosphorothiorate
  modified_base 43: mod_base = OTHER; note = 2'-Omethyladenosine
  modified_base 45: mod_base = OTHER; note = 2'-fluoroguanosine
  modified_base 48: mod_base = OTHER; note = 2'-fluorouridine
  modified_base 49: mod_base = OTHER; note = Cytosine phosphorothiorate
  modified_base 53: mod_base = OTHER; note = 2'-Omethylguanosine
  modified_base 54: mod_base = OTHER; note = 2'-fluorouridine phosphorothiorate
  modified_base 57: mod_base = OTHER; note = 2'-Omethylguanosine
  modified_base 64: mod_base = OTHER; note = Guanosine phosphorothiorate
  modified_base 66: mod_base = OTHER; note = 2'-fluorocytosine
  modified_base 67: mod_base = OTHER; note = 2'-fluoroguanosine
  modified_base 68: mod_base = OTHER; note = Guanosine phosphorothiorate
  modified_base 69: mod_base = OTHER; note = 2'-fluoroadenosine
  modified_base 70: mod_base = OTHER; note = 2'-Omethylguanosine
  modified_base 72: mod_base = OTHER; note = Cytosine phosphorothiorate
  modified_base 73: mod_base = OTHER; note = 2'-fluoroguanosine

SEQ ID NO: 5477 - RNA, 85 nt, synthetic construct; identical to SEQ ID NO: 3317
  source 1..85: mol_type = other RNA
  modified_base 1: mod_base = OTHER; note = 2'-Omethylguanosine phosphorothiorate
  modified_base 2: mod_base = OTHER; note = 2'-Omethylcytosine
  modified_base 18: mod_base = OTHER; note = 2'-Omethylguanosine phosphorothiorate
  modified_base 22: mod_base = OTHER; note = 2'-Omethyladenosine phosphorothiorate
  modified_base 24: mod_base = OTHER; note = 2'-Omethylguanosine
  modified_base 35: mod_base = OTHER; note = 2'-fluorouridine
  modified_base 55: mod_base = OTHER; note = 2'-fluorocytosine
  modified_base 56: mod_base = OTHER; note = 2'-Omethylguanosine
  modified_base 60: mod_base = OTHER; note = 2'-fluoroadenosine
  modified_base 80: mod_base = OTHER; note = 2'-Omethylguanosine

SEQ ID NO: 5478 - RNA, 76 nt, synthetic construct
  source 1..76: mol_type = other RNA
gaaaaggtggcgcaatggatagcgcattggacttcaaattcaaaggttccgggttcgagtcccggccttttcgcca

SEQ ID NO: 5479 - RNA, 76 nt, synthetic construct; identical to SEQ ID NO: 625
  source 1..76: mol_type = other RNA
  modified_base 3: mod_base = OTHER; note = 2'-Omethylcytosine
  modified_base 5: mod_base = OTHER; note = 2'-fluorocytosine
  modified_base 11: mod_base = OTHER; note = 2'-fluorocytosine
  modified_base 14: mod_base = OTHER; note = Adenosine phosphorothiorate
  modified_base 15: mod_base = OTHER; note = 2'-fluoroadenosine
  modified_base 17: mod_base = OTHER; note = Guanosine phosphorothiorate
  modified_base 18: mod_base = OTHER; note = 2'-Omethylguanosine
  modified_base 19: mod_base = OTHER; note = Adenosine phosphorothiorate
  modified_base 20: mod_base = OTHER; note = 2'-fluorouridine
  modified_base 24: mod_base = OTHER; note = 2'-fluoroguanosine
  modified_base 25: mod_base = OTHER; note = 2'-Omethylcytosine phosphorothiorate
  modified_base 26: mod_base = OTHER; note = Adenosine phosphorothiorate
  modified_base 27: mod_base = OTHER; note = 2'-Omethyluridine
  modified_base 31: mod_base = OTHER; note = 2'-fluoroadenosine
  modified_base 33: mod_base = OTHER; note = 2'-fluorouridine
  modified_base 34: mod_base = OTHER; note = 2'-fluorouridine
  modified_base 38: mod_base = OTHER; note = 2'-Omethyladenosine
  modified_base 39: mod_base = OTHER; note = 2'-fluorouridine
  modified_base 40: mod_base = OTHER; note = 2'-Omethyluridine phosphorothiorate
  modified_base 41: mod_base = OTHER; note = 2'-Omethylcytosine
  modified_base 42: mod_base = OTHER; note = Adenosine phosphorothiorate
  modified_base 47: mod_base = OTHER; note = 2'-fluorouridine phosphorothiorate
  modified_base 49: mod_base = OTHER; note = 2'-fluorocytosine
  modified_base 50: mod_base = OTHER; note = 2'-Omethylcytosine
  modified_base 51: mod_base = OTHER; note = 2'-Omethylguanosine
  modified_base 53: mod_base = OTHER; note = 2'-fluoroguanosine phosphorothiorate
  modified_base 54: mod_base = OTHER; note = 2'-Omethyluridine
  modified_base 59: mod_base = OTHER; note = 2'-Omethylguanosine
  modified_base 60: mod_base = OTHER; note = 2'-Omethyluridine
  modified_base 61: mod_base = OTHER; note = 2'-fluorocytosine
  modified_base 64: mod_base = OTHER; note = Guanosine phosphorothiorate
  modified_base 68: mod_base = OTHER; note = 2'-fluoroguanosine
  modified_base 69: mod_base = OTHER; note = 2'-Omethyladenosine
  modified_base 74: mod_base = OTHER; note = 2'-Omethylcytosine

SEQ ID NO: 5480 - RNA, 74 nt, synthetic construct; identical to SEQ ID NO: 3293
  source 1..74: mol_type = other RNA
  modified_base 2: mod_base = OTHER; note = 2'-Omethylcytosine
  modified_base 7: mod_base = OTHER; note = Uridine phosphorothiorate
  modified_base 10: mod_base = OTHER; note = 2'-Omethylcytosine
  modified_base 25: mod_base = OTHER; note = 2'-Omethyluridine phosphorothiorate
  modified_base 43: mod_base = OTHER; note = 2'-fluoroguanosine
  modified_base 51: mod_base = OTHER; note = Guanosine phosphorothiorate
  modified_base 73: mod_base = OTHER; note = 2'-Omethylcytosine phosphorothiorate

SEQ ID NO: 5481 - RNA, 75 nt, synthetic construct; identical to SEQ ID NO: 3336
  source 1..75: mol_type = other RNA
  modified_base 3: mod_base = OTHER; note = 2'-fluorouridine phosphorothiorate
  modified_base 7: mod_base = OTHER; note = 2'-fluorouridine phosphorothiorate
  modified_base 10: mod_base = OTHER; note = Cytosine phosphorothiorate
  modified_base 14: mod_base = OTHER; note = 2'-fluoroguanosine phosphorothiorate
  modified_base 15: mod_base = OTHER; note = 2'-fluorouridine
  modified_base 19: mod_base = OTHER; note = 2'-fluorouridine
  modified_base 22: mod_base = OTHER; note = 2'-Omethyladenosine
  modified_base 37: mod_base = OTHER; note = 2'-fluoroadenosine
  modified_base 38: mod_base = OTHER; note = 2'-fluorouridine phosphorothiorate
  modified_base 39: mod_base = OTHER; note = 2'-fluorocytosine
  modified_base 45: mod_base = OTHER; note = Guanosine phosphorothiorate
  modified_base 55: mod_base = OTHER; note = 2'-fluorocytosine
  modified_base 61: mod_base = OTHER; note = 2'-Omethylcytosine phosphorothiorate
  modified_base 64: mod_base = OTHER; note = Guanosine phosphorothiorate
  modified_base 73: mod_base = OTHER; note = Cytosine phosphorothiorate
  modified_base 74: mod_base = OTHER; note = 2'-Omethylcytosine

SEQ ID NO: 5482 - RNA, 85 nt, synthetic construct; identical to SEQ ID NO: 3288
  source 1..85: mol_type = other RNA
  modified_base 1: mod_base = OTHER; note = 2'-fluorocytosine
  modified_base 34: mod_base = OTHER; note = Cytosine phosphorothiorate
  modified_base 36: mod_base = OTHER; note = 2'-fluoroguanosine
  modified_base 45: mod_base = OTHER; note = 2'-Omethylguanosine
  modified_base 57: mod_base = OTHER; note = 2'-fluorocytosine
  modified_base 59: mod_base = OTHER; note = 2'-Omethyluridine
  modified_base 71: mod_base = OTHER; note = 2'-fluorocytosine
  modified_base 75: mod_base = OTHER; note = Uridine phosphorothiorate

SEQ ID NO: 5483 - RNA, 76 nt, synthetic construct; identical to SEQ ID NO: 625
  source 1..76: mol_type = other RNA
  modified_base 1: mod_base = OTHER; note = Guanosine phosphorothiorate
  modified_base 2: mod_base = OTHER; note = 2'-Omethylguanosine phosphorothiorate
  modified_base 4: mod_base = OTHER; note = Uridine phosphorothiorate
  modified_base 5: mod_base = OTHER; note = 2'-fluorocytosine
  modified_base 12: mod_base = OTHER; note = 2'-fluoroguanosine
  modified_base 17: mod_base = OTHER; note = 2'-Omethylguanosine
  modified_base 18: mod_base = OTHER; note = 2'-fluoroguanosine
  modified_base 20: mod_base = OTHER; note = 2'-Omethyluridine phosphorothiorate
  modified_base 25: mod_base = OTHER; note = 2'-Omethylcytosine
  modified_base 26: mod_base = OTHER; note = 2'-fluoroadenosine
  modified_base 28: mod_base = OTHER; note = 2'-fluorouridine
  modified_base 29: mod_base = OTHER; note = 2'-fluoroguanosine
  modified_base 31: mod_base = OTHER; note = 2'-fluoroadenosine
  modified_base 34: mod_base = OTHER; note = 2'-Omethyluridine phosphorothiorate
  modified_base 38: mod_base = OTHER; note = 2'-fluoroadenosine phosphorothiorate
  modified_base 39: mod_base = OTHER; note = 2'-Omethyluridine phosphorothiorate
  modified_base 40: mod_base = OTHER; note = 2'-fluorouridine
  modified_base 41: mod_base = OTHER; note = 2'-fluorocytosine phosphorothiorate
  modified_base 42: mod_base = OTHER; note = 2'-Omethyladenosine
  modified_base 43: mod_base = OTHER; note = 2'-fluoroadenosine
  modified_base 49: mod_base = OTHER; note = 2'-Omethylcytosine
  modified_base 50: mod_base = OTHER; note = Cytosine phosphorothiorate
  modified_base 52: mod_base = OTHER; note = 2'-Omethylguanosine
  modified_base 54: mod_base = OTHER; note = 2'-fluorouridine
  modified_base 57: mod_base = OTHER; note = Guanosine phosphorothiorate
  modified_base 61: mod_base = OTHER; note = 2'-Omethylcytosine
  modified_base 63: mod_base = OTHER; note = 2'-fluorocytosine
  modified_base 65: mod_base = OTHER; note = Guanosine phosphorothiorate
  modified_base 66: mod_base = OTHER; note = 2'-Omethylcytosine phosphorothiorate
  modified_base 67: mod_base = OTHER; note = 2'-fluoroguanosine
  modified_base 69: mod_base = OTHER; note = 2'-Omethyladenosine
  modified_base 74: mod_base = OTHER; note = 2'-Omethylcytosine

SEQ ID NO: 5484 - RNA, 76 nt, synthetic construct; identical to SEQ ID NO: 3318
  source 1..76: mol_type = other RNA
  modified_base 1: mod_base = OTHER; note = 2'-Omethylcytosine
  modified_base 10: mod_base = OTHER; note = 2'-Omethylguanosine
  modified_base 11: mod_base = OTHER; note = 2'-Omethylcytosine
  modified_base 12: mod_base = OTHER; note = 2'-Omethyluridine
  modified_base 13: mod_base = OTHER; note = 2'-Omethylcytosine
  modified_base 14: mod_base = OTHER; note = 2'-Omethyladenosine
  modified_base 15: mod_base = OTHER; note = 2'-Omethylguanosine
  modified_base 16: mod_base = OTHER; note = 2'-Omethyluridine
  modified_base 18: mod_base = OTHER; note = 2'-Omethylguanosine
  modified_base 19: mod_base = OTHER; note = 2'-Omethylguanosine
  modified_base 20: mod_base = OTHER; note = Uridine phosphorothiorate
  modified_base 21: mod_base = OTHER; note = Adenosine phosphorothiorate
  modified_base 22: mod_base = OTHER; note = 2'-Omethylguanosine
  modified_base 23: mod_base = OTHER; note = 2'-Omethyladenosine
  modified_base 24: mod_base = OTHER; note = 2'-Omethylguanosine
  modified_base 25: mod_base = OTHER; note = 2'-Omethylcytosine
  modified_base 33: mod_base = OTHER; note = Uridine phosphorothiorate
  modified_base 34: mod_base = OTHER; note = 2'-Omethylcytosine
  modified_base 35: mod_base = OTHER; note = Uridine phosphorothiorate
  modified_base 37: mod_base = OTHER; note = Guanosine phosphorothiorate
  modified_base 38: mod_base = OTHER; note = Adenosine phosphorothiorate
  modified_base 41: mod_base = OTHER; note = 2'-fluorocytosine
  modified_base 42: mod_base = OTHER; note = 2'-Omethyluridine
  modified_base 43: mod_base = OTHER; note = 2'-Omethyluridine
  modified_base 44: mod_base = OTHER; note = 2'-fluoroadenosine
  modified_base 49: mod_base = OTHER; note = 2'-Omethylguanosine
  modified_base 50: mod_base = OTHER; note = 2'-Omethylcytosine
  modified_base 52: mod_base = OTHER; note = 2'-Omethylguanosine
  modified_base 54: mod_base = OTHER; note = Uridine phosphorothiorate
  modified_base 55: mod_base = OTHER; note = Uridine phosphorothiorate
  modified_base 61: mod_base = OTHER; note = 2'-Omethylcytosine
  modified_base 65: mod_base = OTHER; note = 2'-Omethylcytosine
  modified_base 73: mod_base = OTHER; note = 2'-Omethyladenosine

SEQ ID NO: 5485 - RNA, 75 nt, synthetic construct; identical to SEQ ID NO: 3306
  source 1..75: mol_type = other RNA
  modified_base 48: mod_base = OTHER; note = 2'-Omethylguanosine
  modified_base 72: mod_base = OTHER; note = 2'-Omethyladenosine

SEQ ID NO: 5486 - RNA, 75 nt, synthetic construct; identical to SEQ ID NO: 3311
  source 1..75: mol_type = other RNA
  modified_base 1: mod_base = OTHER; note = 2'-Omethylguanosine phosphorothiorate
  modified_base 14: mod_base = OTHER; note = 2'-Omethyladenosine
  modified_base 19: mod_base = OTHER; note = 2'-fluorouridine
  modified_base 23: mod_base = OTHER; note = 2'-fluorocytosine
  modified_base 30: mod_base = OTHER; note = 2'-Omethylguanosine
  modified_base 41: mod_base = OTHER; note = 2'-fluorocytosine
  modified_base 55: mod_base = OTHER; note = 2'-Omethylcytosine
  modified_base 63: mod_base = OTHER; note = 2'-fluoroguanosine
  modified_base 64: mod_base = OTHER; note = Guanosine phosphorothiorate
  modified_base 65: mod_base = OTHER; note = 2'-fluorouridine
  modified_base 73: mod_base = OTHER; note = Cytosine phosphorothiorate

SEQ ID NO: 5487 - RNA, 75 nt, synthetic construct; identical to SEQ ID NO: 1045
  source 1..75: mol_type = other RNA
  modified_base 1: mod_base = OTHER; note = 2'-Omethylguanosine
  modified_base 10: mod_base = OTHER; note = 2'-Omethylguanosine
  modified_base 11: mod_base = OTHER; note = 2'-Omethyluridine
  modified_base 12: mod_base = OTHER; note = 2'-Omethylguanosine
  modified_base 13: mod_base = OTHER; note = 2'-Omethyluridine
  modified_base 14: mod_base = OTHER; note = 2'-Omethyladenosine
  modified_base 15: mod_base = OTHER; note = 2'-Omethyladenosine
  modified_base 16: mod_base = OTHER; note = 2'-Omethyluridine
  modified_base 17: mod_base = OTHER; note = 2'-Omethylguanosine
  modified_base 18: mod_base = OTHER; note = 2'-Omethylguanosine
  modified_base 19: mod_base = OTHER; note = Uridine phosphorothiorate
  modified_base 20: mod_base = OTHER; note = 2'-Omethyladenosine
  modified_base 21: mod_base = OTHER; note = Adenosine phosphorothiorate
  modified_base 22: mod_base = OTHER; note = 2'-Omethylguanosine
  modified_base 23: mod_base = OTHER; note = 2'-Omethylcytosine
  modified_base 24: mod_base = OTHER; note = 2'-Omethyladenosine
  modified_base 25: mod_base = OTHER; note = 2'-Omethylcytosine
  modified_base 33: mod_base = OTHER; note = 2'-fluorouridine
  modified_base 34: mod_base = OTHER; note = 2'-Omethyluridine
  modified_base 35: mod_base = OTHER; note = Uridine phosphorothiorate
  modified_base 37: mod_base = OTHER; note = Adenosine phosphorothiorate
  modified_base 38: mod_base = OTHER; note = Adenosine phosphorothiorate
  modified_base 41: mod_base = OTHER; note = 2'-Omethylcytosine
  modified_base 42: mod_base = OTHER; note = 2'-Omethyladenosine
  modified_base 43: mod_base = OTHER; note = 2'-Omethylguanosine
  modified_base 44: mod_base = OTHER; note = 2'-Omethylcytosine
  modified_base 48: mod_base = OTHER; note = 2'-Omethylcytosine
  modified_base 49: mod_base = OTHER; note = 2'-Omethylcytosine
  modified_base 51: mod_base = OTHER; note = 2'-Omethyladenosine
  modified_base 53: mod_base = OTHER; note = Uridine phosphorothiorate
  modified_base 54: mod_base = OTHER; note = Uridine phosphorothiorate
  modified_base 60: mod_base = OTHER; note = 2'-Omethylcytosine
  modified_base 64: mod_base = OTHER; note = 2'-Omethylguanosine
  modified_base 72: mod_base = OTHER; note = 2'-Omethyluridine

SEQ ID NO: 5488 - RNA, 75 nt, synthetic construct; identical to SEQ ID NO: 3306
  source 1..75: mol_type = other RNA
  modified_base 1: mod_base = OTHER; note = 2'-Omethylguanosine
  modified_base 2: mod_base = OTHER; note = 2'-Omethyladenosine
  modified_base 3: mod_base = OTHER; note = 2'-Omethylcytosine
  modified_base 4: mod_base = OTHER; note = 2'-Omethylcytosine
  modified_base 5: mod_base = OTHER; note = 2'-Omethyluridine
  modified_base 6: mod_base = OTHER; note = 2'-Omethylcytosine
  modified_base 13: mod_base = OTHER; note = 2'-Omethylcytosine
  modified_base 14: mod_base = OTHER; note = 2'-Omethyladenosine
  modified_base 15: mod_base = OTHER; note = 2'-Omethyladenosine
  modified_base 16: mod_base = OTHER; note = 2'-Omethylcytosine
  modified_base 17: mod_base = OTHER; note = 2'-Omethylguanosine
  modified_base 18: mod_base = OTHER; note = 2'-Omethylguanosine
  modified_base 19: mod_base = OTHER; note = Uridine phosphorothiorate
  modified_base 20: mod_base = OTHER; note = Adenosine phosphorothiorate
  modified_base 24: mod_base = OTHER; note = 2'-Omethylcytosine
  modified_base 32: mod_base = OTHER; note = 2'-fluorouridine
  modified_base 33: mod_base = OTHER; note = 2'-Omethylcytosine
  modified_base 34: mod_base = OTHER; note = Uridine phosphorothiorate
  modified_base 36: mod_base = OTHER; note = Guanosine phosphorothiorate
  modified_base 37: mod_base = OTHER; note = Adenosine phosphorothiorate
  modified_base 48: mod_base = OTHER; note = 2'-Omethylguanosine
  modified_base 49: mod_base = OTHER; note = 2'-Omethylcytosine
  modified_base 50: mod_base = OTHER; note = 2'-Omethylguanosine
  modified_base 51: mod_base = OTHER; note = 2'-Omethyluridine
  modified_base 52: mod_base = OTHER; note = 2'-Omethylguanosine
  modified_base 53: mod_base = OTHER; note = Uridine phosphorothiorate
  modified_base 54: mod_base = OTHER; note = Uridine phosphorothiorate
  modified_base 60: mod_base = OTHER; note = 2'-Omethylcytosine
  modified_base 64: mod_base = OTHER; note = 2'-Omethyluridine
  modified_base 72: mod_base = OTHER; note = 2'-Omethyladenosine

SEQ ID NO: 5489 - RNA, 75 nt, synthetic construct; identical to SEQ ID NO: 1045
  source 1..75: mol_type = other RNA
  modified_base 1: mod_base = OTHER; note = 2'-Omethylguanosine
  modified_base 2: mod_base = OTHER; note = 2'-Omethylguanosine
  modified_base 3: mod_base = OTHER; note = 2'-Omethyluridine
  modified_base 4: mod_base = OTHER; note = 2'-Omethyluridine
  modified_base 5: mod_base = OTHER; note = 2'-Omethylcytosine
  modified_base 6: mod_base = OTHER; note = 2'-Omethylcytosine
  modified_base 10: mod_base = OTHER; note = 2'-Omethylguanosine
  modified_base 11: mod_base = OTHER; note = 2'-Omethyluridine
  modified_base 12: mod_base = OTHER; note = 2'-Omethylguanosine
  modified_base 13: mod_base = OTHER; note = 2'-Omethyluridine
  modified_base 14: mod_base = OTHER; note = 2'-Omethyladenosine
  modified_base 15: mod_base = OTHER; note = 2'-fluoroadenosine
  modified_base 16: mod_base = OTHER; note = 2'-Omethyluridine
  modified_base 17: mod_base = OTHER; note = 2'-Omethylguanosine
  modified_base 18: mod_base = OTHER; note = 2'-Omethylguanosine
  modified_base 19: mod_base = OTHER; note = 2'-fluorouridine
  modified_base 20: mod_base = OTHER; note = 2'-Omethyladenosine
  modified_base 25: mod_base = OTHER; note = 2'-Omethylcytosine
  modified_base 33: mod_base = OTHER; note = 2'-fluorouridine
  modified_base 35: mod_base = OTHER; note = Uridine phosphorothiorate
  modified_base 37: mod_base = OTHER; note = Adenosine phosphorothiorate
  modified_base 38: mod_base = OTHER; note = Adenosine phosphorothiorate
  modified_base 41: mod_base = OTHER; note = 2'-Omethylcytosine
  modified_base 42: mod_base = OTHER; note = 2'-Omethyladenosine
  modified_base 43: mod_base = OTHER; note = 2'-Omethylguanosine
  modified_base 44: mod_base = OTHER; note = 2'-Omethylcytosine
  modified_base 48: mod_base = OTHER; note = 2'-Omethylcytosine
  modified_base 49: mod_base = OTHER; note = 2'-Omethylcytosine
  modified_base 51: mod_base = OTHER; note = 2'-Omethyladenosine
  modified_base 53: mod_base = OTHER; note = 2'-Omethyluridine
  modified_base 54: mod_base = OTHER; note = Uridine phosphorothiorate
  modified_base 55: mod_base = OTHER; note = 2'-Omethylcytosine
  modified_base 56: mod_base = OTHER; note = 2'-fluoroguanosine
  modified_base 58: mod_base = OTHER; note = 2'-Omethylguanosine
  modified_base 60: mod_base = OTHER; note = 2'-Omethylcytosine
  modified_base 64: mod_base = OTHER; note = 2'-Omethylguanosine
  modified_base 72: mod_base = OTHER; note = 2'-Omethyluridine

SEQ ID NO: 5490 - RNA, 75 nt, synthetic construct; identical to SEQ ID NO: 3306
  source 1..75: mol_type = other RNA
  modified_base 1: mod_base = OTHER; note = 2'-Omethylguanosine
  modified_base 10: mod_base = OTHER; note = 2'-Omethylguanosine
  modified_base 13: mod_base = OTHER; note = 2'-Omethylcytosine
  modified_base 16: mod_base = OTHER; note = Cytosine phosphorothiorate
  modified_base 17: mod_base = OTHER; note = Guanosine phosphorothiorate
  modified_base 18: mod_base = OTHER; note = 2'-Omethylguanosine phosphorothiorate
  modified_base 19: mod_base = OTHER; note = Uridine phosphorothiorate
  modified_base 24: mod_base = OTHER; note = 2'-Omethylcytosine
  modified_base 28: mod_base = OTHER; note = 2'-Omethyluridine
  modified_base 32: mod_base = OTHER; note = 2'-fluorouridine phosphorothiorate
  modified_base 34: mod_base = OTHER; note = Uridine phosphorothiorate
  modified_base 36: mod_base = OTHER; note = Guanosine phosphorothiorate
  modified_base 37: mod_base = OTHER; note = Adenosine phosphorothiorate
  modified_base 40: mod_base = OTHER; note = 2'-fluoroadenosine
  modified_base 41: mod_base = OTHER; note = Guanosine phosphorothiorate
  modified_base 42: mod_base = OTHER; note = 2'-Omethyladenosine
  modified_base 43: mod_base = OTHER; note = 2'-fluoroadenosine
  modified_base 45: mod_base = OTHER; note = Guanosine phosphorothiorate
  modified_base 46: mod_base = OTHER; note = Uridine phosphorothiorate
  modified_base 49: mod_base = OTHER; note = 2'-Omethylcytosine
  modified_base 51: mod_base = OTHER; note = 2'-Omethyluridine
  modified_base 53: mod_base = OTHER; note = Uridine phosphorothiorate
  modified_base 54: mod_base = OTHER; note = Uridine phosphorothiorate
  modified_base 55: mod_base = OTHER; note = 2'-Omethylcytosine
  modified_base 56: mod_base = OTHER; note = Adenosine phosphorothiorate
  modified_base 59: mod_base = OTHER; note = Uridine phosphorothiorate
  modified_base 61: mod_base = OTHER; note = 2'-Omethyladenosine
  modified_base 62: mod_base = OTHER; note = 2'-fluorocytosine
  modified_base 64: mod_base = OTHER; note = 2'-Omethyluridine
  modified_base 70: mod_base = OTHER; note = 2'-Omethyluridine
  modified_base 72: mod_base = OTHER; note = 2'-Omethyladenosine

SEQ ID NO: 5491 - RNA, 76 nt, synthetic construct; identical to SEQ ID NO: 3289
  source 1..76: mol_type = other RNA
  modified_base 1: mod_base = OTHER; note = 2'-Omethylguanosine
  modified_base 14: mod_base = OTHER; note = 2'-Omethyladenosine
  modified_base 15: mod_base = OTHER; note = 2'-Omethylguanosine
  modified_base 16: mod_base = OTHER; note = 2'-Omethyluridine
  modified_base 18: mod_base = OTHER; note = 2'-Omethylguanosine
  modified_base 19: mod_base = OTHER; note = 2'-Omethylguanosine
  modified_base 20: mod_base = OTHER; note = Uridine phosphorothiorate
  modified_base 21: mod_base = OTHER; note = Adenosine phosphorothiorate
  modified_base 33: mod_base = OTHER; note = Uridine phosphorothiorate
  modified_base 34: mod_base = OTHER; note = 2'-Omethyluridine
  modified_base 35: mod_base = OTHER; note = Uridine phosphorothiorate
  modified_base 37: mod_base = OTHER; note = Adenosine phosphorothiorate
  modified_base 38: mod_base = OTHER; note = Adenosine phosphorothiorate
  modified_base 41: mod_base = OTHER; note = 2'-Omethyluridine
  modified_base 42: mod_base = OTHER; note = 2'-Omethylguanosine
  modified_base 43: mod_base = OTHER; note = 2'-Omethyladenosine
  modified_base 44: mod_base = OTHER; note = 2'-Omethylguanosine
  modified_base 50: mod_base = OTHER; note = 2'-Omethyladenosine
  modified_base 52: mod_base = OTHER; note = 2'-Omethylguanosine
  modified_base 73: mod_base = OTHER; note = 2'-Omethylguanosine

SEQ ID NO: 5492 - RNA, 76 nt, synthetic construct; identical to SEQ ID NO: 625
  source 1..76: mol_type = other RNA
  modified_base 1: mod_base = OTHER; note = 2'-Omethylguanosine phosphorothiorate
  modified_base 2: mod_base = OTHER; note = 2'-Omethylguanosine phosphorothiorate
  modified_base 3: mod_base = OTHER; note = 2'-Omethylcytosine
  modified_base 4: mod_base = OTHER; note = 2'-Omethyluridine
  modified_base 5: mod_base = OTHER; note = 2'-Omethylcytosine
  modified_base 6: mod_base = OTHER; note = 2'-Omethylcytosine
  modified_base 10: mod_base = OTHER; note = 2'-Omethylguanosine
  modified_base 11: mod_base = OTHER; note = 2'-Omethylcytosine
  modified_base 12: mod_base = OTHER; note = 2'-Omethylguanosine
  modified_base 13: mod_base = OTHER; note = 2'-Omethylcytosine
  modified_base 16: mod_base = OTHER; note = 2'-Omethyluridine
  modified_base 17: mod_base = OTHER; note = 2'-Omethylguanosine
  modified_base 18: mod_base = OTHER; note = 2'-Omethylguanosine
  modified_base 20: mod_base = OTHER; note = 2'-Omethyluridine
  modified_base 22: mod_base = OTHER; note = 2'-Omethylguanosine
  modified_base 23: mod_base = OTHER; note = 2'-Omethylcytosine
  modified_base 24: mod_base = OTHER; note = 2'-Omethylguanosine
  modified_base 25: mod_base = OTHER; note = 2'-Omethylcytosine
  modified_base 33: mod_base = OTHER; note = 2'-fluorouridine
  modified_base 35: mod_base = OTHER; note = Cytosine phosphorothiorate
  modified_base 37: mod_base = OTHER; note = Adenosine phosphorothiorate
  modified_base 38: mod_base = OTHER; note = Adenosine phosphorothiorate
  modified_base 41: mod_base = OTHER; note = 2'-fluorocytosine
  modified_base 42: mod_base = OTHER; note = 2'-Omethyladenosine
  modified_base 43: mod_base = OTHER; note = 2'-Omethyladenosine
  modified_base 44: mod_base = OTHER; note = 2'-fluoroadenosine
  modified_base 49: mod_base = OTHER; note = 2'-Omethylcytosine
  modified_base 50: mod_base = OTHER; note = 2'-Omethylcytosine
  modified_base 52: mod_base = OTHER; note = 2'-Omethylguanosine
  modified_base 54: mod_base = OTHER; note = 2'-Omethyluridine
  modified_base 55: mod_base = OTHER; note = Uridine phosphorothiorate
  modified_base 56: mod_base = OTHER; note = 2'-Omethylcytosine
  modified_base 57: mod_base = OTHER; note = 2'-fluoroguanosine
  modified_base 59: mod_base = OTHER; note = 2'-Omethylguanosine
  modified_base 61: mod_base = OTHER; note = 2'-Omethylcytosine
  modified_base 65: mod_base = OTHER; note = 2'-Omethylguanosine
  modified_base 74: mod_base = OTHER; note = Cytosine phosphorothiorate
  modified_base 75: mod_base = OTHER; note = 2'-Omethylcytosine phosphorothiorate
  modified_base 76: mod_base = OTHER; note = 2'-Omethyladenosine

SEQ ID NO: 5493 - RNA, 85 nt, synthetic construct
  source 1..85: mol_type = other RNA
gctgtgatggccgagtggttaaggcgttggacttcaaatccagtggggtttccctgcgcaggttcaaatcctgctcacagcgcca

SEQ ID NO: 5494 - RNA, 76 nt, synthetic construct; identical to SEQ ID NO: 3289
  source 1..76: mol_type = other RNA
  modified_base 65: mod_base = OTHER; note = 2'-Omethylguanosine
  modified_base 73: mod_base = OTHER; note = 2'-Omethylguanosine

SEQ ID NO: 5495 - RNA, 76 nt, synthetic construct; identical to SEQ ID NO: 625
  source 1..76: mol_type = other RNA
  modified_base 1: mod_base = OTHER; note = 2'-Omethylguanosine phosphorothiorate
  modified_base 2: mod_base = OTHER; note = 2'-Omethylguanosine
  modified_base 17: mod_base = OTHER; note = 2'-Omethylguanosine
  modified_base 33: mod_base = OTHER; note = 2'-fluorouridine
  modified_base 35: mod_base = OTHER; note = Cytosine phosphorothiorate
  modified_base 37: mod_base = OTHER; note = Adenosine phosphorothiorate
  modified_base 38: mod_base = OTHER; note = Adenosine phosphorothiorate
  modified_base 52: mod_base = OTHER; note = 2'-fluoroguanosine
  modified_base 62: mod_base = OTHER; note = 2'-Omethylcytosine
  modified_base 63: mod_base = OTHER; note = 2'-fluorocytosine
  modified_base 65: mod_base = OTHER; note = 2'-Omethylguanosine
  modified_base 73: mod_base = OTHER; note = 2'-Omethylguanosine
  modified_base 75: mod_base = OTHER; note = 2'-fluorocytosine phosphorothiorate

SEQ ID NO: 5496 - RNA, 76 nt, synthetic construct; identical to SEQ ID NO: 625
  source 1..76: mol_type = other RNA
  modified_base 49: mod_base = OTHER; note = 2'-fluorocytosine
  modified_base 50: mod_base = OTHER; note = 2'-fluorocytosine
  modified_base 51: mod_base = OTHER; note = 2'-fluoroguanosine
  modified_base 52: mod_base = OTHER; note = 2'-fluoroguanosine
  modified_base 53: mod_base = OTHER; note = 2'-fluoroguanosine
  modified_base 61: mod_base = OTHER; note = 2'-fluorocytosine
  modified_base 62: mod_base = OTHER; note = 2'-fluorocytosine
  modified_base 63: mod_base = OTHER; note = 2'-fluorocytosine
  modified_base 64: mod_base = OTHER; note = 2'-fluoroguanosine
  modified_base 65: mod_base = OTHER; note = 2'-fluoroguanosine

SEQ ID NO: 5497 - RNA, 76 nt, synthetic construct; identical to SEQ ID NO: 625
  source 1..76: mol_type = other RNA
  modified_base 1: mod_base = OTHER; note = 2'-Omethylguanosine phosphorothiorate
  modified_base 3: mod_base = OTHER; note = Cytosine phosphorothiorate
  modified_base 6: mod_base = OTHER; note = 2'-Omethylcytosine
  modified_base 7: mod_base = OTHER; note = Guanosine phosphorothiorate
  modified_base 11: mod_base = OTHER; note = 2'-fluorocytosine
  modified_base 12: mod_base = OTHER; note = 2'-Omethylguanosine
  modified_base 13: mod_base = OTHER; note = 2'-Omethylcytosine
  modified_base 16: mod_base = OTHER; note = 2'-fluorouridine phosphorothiorate
  modified_base 18: mod_base = OTHER; note = Guanosine phosphorothiorate
  modified_base 20: mod_base = OTHER; note = 2'-fluorouridine
  modified_base 21: mod_base = OTHER; note = Adenosine phosphorothiorate
  modified_base 22: mod_base = OTHER; note = 2'-fluoroguanosine
  modified_base 23: mod_base = OTHER; note = 2'-Omethylcytosine
  modified_base 27: mod_base = OTHER; note = Uridine phosphorothiorate
  modified_base 28: mod_base = OTHER; note = 2'-Omethyluridine
  modified_base 29: mod_base = OTHER; note = 2'-fluoroguanosine
  modified_base 30: mod_base = OTHER; note = 2'-fluoroguanosine
  modified_base 31: mod_base = OTHER; note = 2'-Omethyladenosine
  modified_base 36: mod_base = OTHER; note = Adenosine phosphorothiorate
  modified_base 37: mod_base = OTHER; note = Adenosine phosphorothiorate
  modified_base 38: mod_base = OTHER; note = 2'-Omethyladenosine phosphorothiorate
  modified_base 43: mod_base = OTHER; note = 2'-fluoroadenosine phosphorothiorate
  modified_base 44: mod_base = OTHER; note = 2'-Omethyladenosine
  modified_base 46: mod_base = OTHER; note = 2'-fluoroguanosine
  modified_base 47: mod_base = OTHER; note = 2'-Omethyluridine
  modified_base 48: mod_base = OTHER; note = 2'-fluorouridine
  modified_base 52: mod_base = OTHER; note = 2'-fluoroguanosine
  modified_base 55: mod_base = OTHER; note = Uridine phosphorothiorate
  modified_base 56: mod_base = OTHER; note = 2'-fluorocytosine
  modified_base 65: mod_base = OTHER; note = 2'-Omethylguanosine
  modified_base 67: mod_base = OTHER; note = 2'-Omethylguanosine
  modified_base 68: mod_base = OTHER; note = Guanosine phosphorothiorate
  modified_base 69: mod_base = OTHER; note = 2'-fluoroadenosine
  modified_base 74: mod_base = OTHER; note = 2'-fluorocytosine
  modified_base 75: mod_base = OTHER; note = 2'-Omethylcytosine

SEQ ID NO: 5498 - RNA, 75 nt, synthetic construct; identical to SEQ ID NO: 3306
  source 1..75: mol_type = other RNA
  modified_base 1: mod_base = OTHER; note = 2'-Omethylguanosine
  modified_base 2: mod_base = OTHER; note = 2'-Omethyladenosine
  modified_base 3: mod_base = OTHER; note = 2'-Omethylcytosine
  modified_base 4: mod_base = OTHER; note = 2'-Omethylcytosine
  modified_base 5: mod_base = OTHER; note = 2'-Omethyluridine
  modified_base 6: mod_base = OTHER; note = 2'-Omethylcytosine
  modified_base 16: mod_base = OTHER; note = 2'-Omethylcytosine
  modified_base 17: mod_base = OTHER; note = 2'-Omethylguanosine
  modified_base 18: mod_base = OTHER; note = 2'-Omethylguanosine
  modified_base 24: mod_base = OTHER; note = 2'-Omethylcytosine
  modified_base 32: mod_base = OTHER; note = 2'-fluorouridine
  modified_base 34: mod_base = OTHER; note = Uridine phosphorothiorate
  modified_base 36: mod_base = OTHER; note = Guanosine phosphorothiorate
  modified_base 37: mod_base = OTHER; note = Adenosine phosphorothiorate
  modified_base 40: mod_base = OTHER; note = 2'-fluoroadenosine
  modified_base 41: mod_base = OTHER; note = 2'-Omethylguanosine
  modified_base 42: mod_base = OTHER; note = 2'-Omethyladenosine
  modified_base 43: mod_base = OTHER; note = 2'-fluoroadenosine
  modified_base 48: mod_base = OTHER; note = 2'-Omethylguanosine
  modified_base 49: mod_base = OTHER; note = 2'-Omethylcytosine
  modified_base 51: mod_base = OTHER; note = 2'-Omethyluridine
  modified_base 53: mod_base = OTHER; note = 2'-Omethyluridine
  modified_base 54: mod_base = OTHER; note = Uridine phosphorothiorate
  modified_base 55: mod_base = OTHER; note = 2'-Omethylcytosine
  modified_base 56: mod_base = OTHER; note = 2'-fluoroadenosine
  modified_base 58: mod_base = OTHER; note = 2'-Omethyladenosine
  modified_base 60: mod_base = OTHER; note = 2'-Omethylcytosine
  modified_base 61: mod_base = OTHER; note = 2'-Omethyladenosine
  modified_base 62: mod_base = OTHER; note = 2'-fluorocytosine
  modified_base 63: mod_base = OTHER; note = 2'-Omethylguanosine
  modified_base 64: mod_base = OTHER; note = 2'-Omethyluridine
  modified_base 72: mod_base = OTHER; note = 2'-Omethyladenosine

SEQ ID NO: 5499 - RNA, 85 nt, synthetic construct; identical to SEQ ID NO: 3310
  source 1..85: mol_type = other RNA
  modified_base 23: mod_base = OTHER; note = 2'-Omethylguanosine
  modified_base 25: mod_base = OTHER; note = 2'-fluoroguanosine
  modified_base 29: mod_base = OTHER; note = 2'-fluoroguanosine
  modified_base 33: mod_base = OTHER; note = Cytosine phosphorothiorate
  modified_base 43: mod_base = OTHER; note = 2'-Omethyluridine
  modified_base 46: mod_base = OTHER; note = 2'-Omethyladenosine
  modified_base 54: mod_base = OTHER; note = 2'-fluorocytosine
  modified_base 55: mod_base = OTHER; note = 2'-Omethylcytosine
  modified_base 65: mod_base = OTHER; note = Cytosine phosphorothiorate
  modified_base 84: mod_base = OTHER; note = 2'-fluorocytosine

SEQ ID NO: 5500 - RNA, 76 nt, synthetic construct; identical to SEQ ID NO: 625
  source 1..76: mol_type = other RNA
  modified_base 1: mod_base = OTHER; note = 2'-fluoroguanosine
  modified_base 3: mod_base = OTHER; note = 2'-fluorocytosine
  modified_base 4: mod_base = OTHER; note = 2'-fluorouridine
  modified_base 5: mod_base = OTHER; note = 2'-Omethylcytosine
  modified_base 10: mod_base = OTHER; note = 2'-fluoroguanosine
  modified_base 11: mod_base = OTHER; note = 2'-fluorocytosine
  modified_base 13: mod_base = OTHER; note = 2'-Omethylcytosine
  modified_base 14: mod_base = OTHER; note = 2'-fluoroadenosine
  modified_base 15: mod_base = OTHER; note = 2'-Omethyladenosine
  modified_base 17: mod_base = OTHER; note = 2'-Omethylguanosine
  modified_base 22: mod_base = OTHER; note = 2'-Omethylguanosine
  modified_base 24: mod_base = OTHER; note = Guanosine phosphorothiorate
  modified_base 25: mod_base = OTHER; note = 2'-Omethylcytosine phosphorothiorate
  modified_base 26: mod_base = OTHER; note = 2'-fluoroadenosine
  modified_base 29: mod_base = OTHER; note = 2'-Omethylguanosine
  modified_base 30: mod_base = OTHER; note = Guanosine phosphorothiorate
  modified_base 32: mod_base = OTHER; note = 2'-fluorocytosine
  modified_base 34: mod_base = OTHER; note = Uridine phosphorothiorate
  modified_base 38: mod_base = OTHER; note = 2'-Omethyladenosine
  modified_base 41: mod_base = OTHER; note = Cytosine phosphorothiorate
  modified_base 44: mod_base = OTHER; note = 2'-Omethyladenosine
  modified_base 45: mod_base = OTHER; note = 2'-fluoroguanosine
  modified_base 46: mod_base = OTHER; note = Guanosine phosphorothiorate
  modified_base 47: mod_base = OTHER; note = 2'-fluorouridine
  modified_base 49: mod_base = OTHER; note = 2'-fluorocytosine
  modified_base 52: mod_base = OTHER; note = 2'-Omethylguanosine
  modified_base 54: mod_base = OTHER; note = 2'-Omethyluridine
  modified_base 55: mod_base = OTHER; note = Uridine phosphorothiorate
  modified_base 56: mod_base = OTHER; note = Cytosine phosphorothiorate
  modified_base 57: mod_base = OTHER; note = 2'-Omethylguanosine
  modified_base 58: mod_base = OTHER; note = 2'-fluoroadenosine
  modified_base 61: mod_base = OTHER; note = 2'-Omethylcytosine
  modified_base 62: mod_base = OTHER; note = Cytosine phosphorothiorate
  modified_base 63: mod_base = OTHER; note = 2'-Omethylcytosine phosphorothiorate
  modified_base 66: mod_base = OTHER; note = Cytosine phosphorothiorate
  modified_base 67: mod_base = OTHER; note = 2'-Omethylguanosine
  modified_base 70: mod_base = OTHER; note = 2'-Omethylguanosine
  modified_base 72: mod_base = OTHER; note = Cytosine phosphorothiorate
  modified_base 73: mod_base = OTHER; note = 2'-Omethylguanosine

SEQ ID NO: 5501 - RNA, 76 nt, synthetic construct; identical to SEQ ID NO: 3332
  source 1..76: mol_type = other RNA
  modified_base 1: mod_base = OTHER; note = 2'-Omethylguanosine phosphorothiorate
  modified_base 2: mod_base = OTHER; note = 2'-Omethylguanosine phosphorothiorate
  modified_base 3: mod_base = OTHER; note = 2'-Omethylcytosine
  modified_base 4: mod_base = OTHER; note = 2'-Omethylcytosine
  modified_base 5: mod_base = OTHER; note = 2'-Omethylcytosine
  modified_base 6: mod_base = OTHER; note = 2'-Omethylcytosine
  modified_base 10: mod_base = OTHER; note = 2'-Omethylguanosine
  modified_base 11: mod_base = OTHER; note = 2'-Omethylcytosine
  modified_base 12: mod_base = OTHER; note = 2'-Omethylguanosine
  modified_base 13: mod_base = OTHER; note = 2'-Omethylcytosine
  modified_base 14: mod_base = OTHER; note = 2'-Omethyladenosine
  modified_base 15: mod_base = OTHER; note = 2'-fluoroadenosine
  modified_base 16: mod_base = OTHER; note = 2'-Omethyluridine
  modified_base 17: mod_base = OTHER; note = 2'-Omethylguanosine
  modified_base 18: mod_base = OTHER; note = 2'-Omethylguanosine
  modified_base 19: mod_base = OTHER; note = 2'-fluoroadenosine
  modified_base 20: mod_base = OTHER; note = 2'-Omethyluridine
  modified_base 22: mod_base = OTHER; note = 2'-Omethylguanosine
  modified_base 23: mod_base = OTHER; note = 2'-Omethylcytosine
  modified_base 24: mod_base = OTHER; note = 2'-Omethylguanosine
  modified_base 25: mod_base = OTHER; note = 2'-Omethylcytosine
  modified_base 33: mod_base = OTHER; note = 2'-fluorouridine
  modified_base 35: mod_base = OTHER; note = Cytosine phosphorothiorate
  modified_base 37: mod_base = OTHER; note = Adenosine phosphorothiorate
  modified_base 38: mod_base = OTHER; note = Adenosine phosphorothiorate
  modified_base 44: mod_base = OTHER; note = 2'-Omethyladenosine
  modified_base 45: mod_base = OTHER; note = 2'-Omethylguanosine
  modified_base 46: mod_base = OTHER; note = 2'-fluoroguanosine
  modified_base 47: mod_base = OTHER; note = 2'-fluorouridine
  modified_base 48: mod_base = OTHER; note = 2'-fluorouridine
  modified_base 56: mod_base = OTHER; note = 2'-Omethylcytosine
  modified_base 59: mod_base = OTHER; note = 2'-Omethylguanosine
  modified_base 61: mod_base = OTHER; note = 2'-Omethylcytosine
  modified_base 62: mod_base = OTHER; note = 2'-Omethylcytosine
  modified_base 63: mod_base = OTHER; note = 2'-fluorocytosine
  modified_base 64: mod_base = OTHER; note = 2'-Omethylguanosine
  modified_base 65: mod_base = OTHER; note = 2'-Omethylcytosine
  modified_base 66: mod_base = OTHER; note = 2'-Omethylcytosine
  modified_base 67: mod_base = OTHER; note = 2'-Omethylguanosine
  modified_base 68: mod_base = OTHER; note = 2'-Omethylguanosine
  modified_base 73: mod_base = OTHER; note = 2'-Omethylguanosine

SEQ ID NO: 5502 - RNA, 86 nt, synthetic construct; identical to SEQ ID NO: 3290
  source 1..86: mol_type = other RNA
  modified_base 43: mod_base = OTHER; note = 2'-Omethyladenosine

SEQ ID NO: 5503 - RNA, 76 nt, synthetic construct; identical to SEQ ID NO: 625
  source 1..76: mol_type = other RNA
  modified_base 1: mod_base = OTHER; note = 2'-Omethylguanosine phosphorothiorate
  modified_base 2: mod_base = OTHER; note = 2'-Omethylguanosine phosphorothiorate
  modified_base 22: mod_base = OTHER; note = Guanosine phosphorothiorate
  modified_base 23: mod_base = OTHER; note = 2'-O-(2-Methoxyethyl) 5-methylcytosine
  modified_base 51: mod_base = OTHER; note = Guanosine phosphorothiorate
  modified_base 52: mod_base = OTHER; note = 2'-fluoroguanosine phosphorothiorate
  modified_base 74: mod_base = OTHER; note = Cytosine phosphorothiorate
  modified_base 75: mod_base = OTHER; note = 2'-Omethylcytosine phosphorothiorate
  modified_base 76: mod_base = OTHER; note = 2'-Omethyladenosine

SEQ ID NO: 5504 - RNA, 76 nt, synthetic construct; identical to SEQ ID NO: 3295
  source 1..76: mol_type = other RNA
  modified_base 1: mod_base = OTHER; note = 2'-Omethylcytosine phosphorothiorate
  modified_base 2: mod_base = OTHER; note = 2'-Omethylcytosine
  modified_base 3: mod_base = OTHER; note = 2'-Omethyluridine
  modified_base 4: mod_base = OTHER; note = 2'-fluorouridine
  modified_base 6: mod_base = OTHER; note = 2'-Omethylguanosine
  modified_base 7: mod_base = OTHER; note = 2'-fluoroadenosine phosphorothiorate
  modified_base 9: mod_base = OTHER; note = 2'-Omethyladenosine
  modified_base 15: mod_base = OTHER; note = 2'-Omethylguanosine
  modified_base 17: mod_base = OTHER; note = 2'-fluorouridine phosphorothiorate
  modified_base 22: mod_base = OTHER; note = 2'-fluoroguanosine
  modified_base 25: mod_base = OTHER; note = 2'-fluorocytosine phosphorothiorate
  modified_base 42: mod_base = OTHER; note = 2'-Omethyluridine phosphorothiorate
  modified_base 43: mod_base = OTHER; note = 2'-Omethyluridine
  modified_base 47: mod_base = OTHER; note = 2'-fluorouridine phosphorothiorate
  modified_base 52: mod_base = OTHER; note = 2'-Omethylguanosine
  modified_base 53: mod_base = OTHER; note = 2'-fluoroguanosine phosphorothiorate
  modified_base 72: mod_base = OTHER; note = 2'-fluoroguanosine
  modified_base 74: mod_base = OTHER; note = 2'-fluorocytosine
  modified_base 75: mod_base = OTHER; note = 2'-fluorocytosine
  modified_base 76: mod_base = OTHER; note = 2'-fluoroadenosine

SEQ ID NO: 5505 - RNA, 75 nt, synthetic construct; identical to SEQ ID NO: 1045
  source 1..75: mol_type = other RNA
  modified_base 1: mod_base = OTHER; note = 2'-Omethylguanosine phosphorothiorate
  modified_base 2: mod_base = OTHER; note = 2'-Omethylguanosine
  modified_base 3: mod_base = OTHER; note = 2'-Omethyluridine
  modified_base 4: mod_base = OTHER; note = 2'-Omethyluridine
  modified_base 5: mod_base = OTHER; note = 2'-Omethylcytosine
  modified_base 6: mod_base = OTHER; note = 2'-Omethylcytosine
  modified_base 43: mod_base = OTHER; note = 2'-Omethylguanosine
  modified_base 44: mod_base = OTHER; note = 2'-Omethylcytosine
  modified_base 45: mod_base = OTHER; note = 2'-Omethylguanosine
  modified_base 46: mod_base = OTHER; note = 2'-fluoroadenosine
  modified_base 47: mod_base = OTHER; note = 2'-Omethyluridine
  modified_base 48: mod_base = OTHER; note = 2'-Omethylcytosine
  modified_base 72: mod_base = OTHER; note = 2'-Omethyluridine

SEQ ID NO: 5506 - RNA, 76 nt, synthetic construct; identical to SEQ ID NO: 625
  source 1..76: mol_type = other RNA
  modified_base 2: mod_base = OTHER; note = 2'-Omethylguanosine
  modified_base 4: mod_base = OTHER; note = 2'-Omethyluridine
  modified_base 6: mod_base = OTHER; note = 2'-fluorocytosine phosphorothiorate
  modified_base 9: mod_base = OTHER; note = Guanosine phosphorothiorate
  modified_base 10: mod_base = OTHER; note = 2'-fluoroguanosine
  modified_base 11: mod_base = OTHER; note = 2'-fluorocytosine
  modified_base 16: mod_base = OTHER; note = 2'-Omethyluridine
  modified_base 17: mod_base = OTHER; note = 2'-Omethylguanosine
  modified_base 20: mod_base = OTHER; note = 2'-fluorouridine
  modified_base 23: mod_base = OTHER; note = 2'-fluorocytosine
  modified_base 24: mod_base = OTHER; note = 2'-Omethylguanosine phosphorothiorate
  modified_base 26: mod_base = OTHER; note = 2'-Omethyladenosine
  modified_base 30: mod_base = OTHER; note = 2'-Omethylguanosine
  modified_base 31: mod_base = OTHER; note = 2'-Omethyladenosine
  modified_base 33: mod_base = OTHER; note = Uridine phosphorothiorate
  modified_base 34: mod_base = OTHER; note = 2'-Omethyluridine
  modified_base 36: mod_base = OTHER; note = Adenosine phosphorothiorate
  modified_base 38: mod_base = OTHER; note = 2'-fluoroadenosine
  modified_base 39: mod_base = OTHER; note = 2'-Omethyluridine
  modified_base 40: mod_base = OTHER; note = 2'-Omethyluridine
  modified_base 42: mod_base = OTHER; note = 2'-fluoroadenosine
  modified_base 48: mod_base = OTHER; note = 2'-Omethyluridine
  modified_base 49: mod_base = OTHER; note = 2'-fluorocytosine
  modified_base 53: mod_base = OTHER; note = 2'-fluoroguanosine
  modified_base 60: mod_base = OTHER; note = Uridine phosphorothiorate
  modified_base 61: mod_base = OTHER; note = 2'-fluorocytosine
  modified_base 63: mod_base = OTHER; note = 2'-Omethylcytosine
  modified_base 64: mod_base = OTHER; note = 2'-Omethylguanosine
  modified_base 65: mod_base = OTHER; note = 2'-Omethylguanosine phosphorothiorate
  modified_base 66: mod_base = OTHER; note = 2'-Omethylcytosine
  modified_base 67: mod_base = OTHER; note = Guanosine phosphorothiorate
  modified_base 68: mod_base = OTHER; note = 2'-fluoroguanosine
  modified_base 69: mod_base = OTHER; note = 2'-fluoroadenosine
  modified_base 74: mod_base = OTHER; note = 2'-fluorocytosine
  modified_base 75: mod_base = OTHER; note = 2'-fluorocytosine

SEQ ID NO: 5507 - RNA, 76 nt, synthetic construct; identical to SEQ ID NO: 625
  source 1..76: mol_type = other RNA
  modified_base 1: mod_base = OTHER; note = 2'-Omethylguanosine
  modified_base 16: mod_base = OTHER; note = Thymine
  modified_base 17: mod_base = OTHER; note = 2'-Omethylguanosine
  modified_base 18: mod_base = OTHER; note = 2'-Omethylguanosine
  modified_base 50: mod_base = OTHER; note = 2'-Omethylcytosine
  modified_base 52: mod_base = OTHER; note = 2'-Omethylguanosine
  modified_base 73: mod_base = OTHER; note = 2'-Omethylguanosine

SEQ ID NO: 5508 - RNA, 76 nt, synthetic construct; identical to SEQ ID NO: 3289
  source 1..76: mol_type = other RNA
  modified_base 1: mod_base = OTHER; note = 2'-Omethylguanosine
  modified_base 10: mod_base = OTHER; note = 2'-Omethylguanosine
  modified_base 11: mod_base = OTHER; note = 2'-Omethylcytosine
  modified_base 12: mod_base = OTHER; note = 2'-Omethyluridine
  modified_base 13: mod_base = OTHER; note = 2'-Omethylcytosine
  modified_base 16: mod_base = OTHER; note = 2'-Omethyluridine
  modified_base 18: mod_base = OTHER; note = 2'-Omethylguanosine
  modified_base 19: mod_base = OTHER; note = 2'-Omethylguanosine
  modified_base 22: mod_base = OTHER; note = 2'-Omethylguanosine
  modified_base 23: mod_base = OTHER; note = 2'-Omethyladenosine
  modified_base 24: mod_base = OTHER; note = 2'-Omethylguanosine
  modified_base 25: mod_base = OTHER; note = 2'-Omethylcytosine
  modified_base 44: mod_base = OTHER; note = 2'-Omethylguanosine
  modified_base 45: mod_base = OTHER; note = 2'-Omethylguanosine
  modified_base 46: mod_base = OTHER; note = 2'-fluoroguanosine
  modified_base 47: mod_base = OTHER; note = 2'-fluorouridine
  modified_base 48: mod_base = OTHER; note = 2'-fluorocytosine
  modified_base 73: mod_base = OTHER; note = 2'-Omethylguanosine

SEQ ID NO: 5509 - RNA, 76 nt, synthetic construct
  source 1..76: mol_type = other RNA
ggctccgtgacgcaatggatagcgcattggacttcaaattcagaggttccgggttcgagtcccggcggagtcgcca

SEQ ID NO: 5510 - RNA, 86 nt, synthetic construct; identical to SEQ ID NO: 3290
  source 1..86: mol_type = other RNA
  modified_base 1: mod_base = OTHER; note = 2'-Omethyladenosine
  modified_base 17: mod_base = OTHER; note = 2'-Omethylguanosine
  modified_base 18: mod_base = OTHER; note = 2'-Omethylguanosine
  modified_base 33: mod_base = OTHER; note = 2'-fluorouridine
  modified_base 34: mod_base = OTHER; note = 2'-Omethyluridine
  modified_base 35: mod_base = OTHER; note = Cytosine phosphorothiorate
  modified_base 37: mod_base = OTHER; note = Guanosine phosphorothiorate
  modified_base 38: mod_base = OTHER; note = Adenosine phosphorothiorate
  modified_base 41: mod_base = OTHER; note = 2'-fluorocytosine
  modified_base 42: mod_base = OTHER; note = 2'-Omethyladenosine
  modified_base 43: mod_base = OTHER; note = 2'-Omethyladenosine
  modified_base 44: mod_base = OTHER; note = 2'-fluorouridine
  modified_base 60: mod_base = OTHER; note = 2'-Omethyluridine
  modified_base 62: mod_base = OTHER; note = 2'-Omethylguanosine
  modified_base 83: mod_base = OTHER; note = 2'-Omethyladenosine

SEQ ID NO: 5511 - RNA, 76 nt, synthetic construct; identical to SEQ ID NO: 625
  source 1..76: mol_type = other RNA
  modified_base 2: mod_base = OTHER; note = Guanosine phosphorothiorate
  modified_base 3: mod_base = OTHER; note = 2'-Omethylcytosine
  modified_base 4: mod_base = OTHER; note = Uridine phosphorothiorate
  modified_base 5: mod_base = OTHER; note = 2'-Omethylcytosine
  modified_base 6: mod_base = OTHER; note = 2'-fluorocytosine
  modified_base 8: mod_base = OTHER; note = Uridine phosphorothiorate
  modified_base 11: mod_base = OTHER; note = 2'-Omethylcytosine phosphorothiorate
  modified_base 14: mod_base = OTHER; note = 2'-fluoroadenosine
  modified_base 18: mod_base = OTHER; note = Guanosine phosphorothiorate
  modified_base 22: mod_base = OTHER; note = Guanosine phosphorothiorate
  modified_base 23: mod_base = OTHER; note = 2'-Omethylcytosine
  modified_base 25: mod_base = OTHER; note = 2'-Omethylcytosine
  modified_base 26: mod_base = OTHER; note = Adenosine phosphorothiorate
  modified_base 27: mod_base = OTHER; note = 2'-Omethyluridine
  modified_base 28: mod_base = OTHER; note = 2'-fluorouridine phosphorothiorate
  modified_base 29: mod_base = OTHER; note = 2'-fluoroguanosine
  modified_base 31: mod_base = OTHER; note = 2'-fluoroadenosine
  modified_base 33: mod_base = OTHER; note = 2'-fluorouridine phosphorothiorate
  modified_base 34: mod_base = OTHER; note = 2'-Omethyluridine
  modified_base 38: mod_base = OTHER; note = 2'-Omethyladenosine phosphorothiorate
  modified_base 39: mod_base = OTHER; note = 2'-Omethyluridine
  modified_base 40: mod_base = OTHER; note = 2'-fluorouridine
  modified_base 41: mod_base = OTHER; note = 2'-Omethylcytosine
  modified_base 42: mod_base = OTHER; note = 2'-Omethyladenosine
  modified_base 43: mod_base = OTHER; note = 2'-fluoroadenosine
  modified_base 47: mod_base = OTHER; note = 2'-fluorouridine
  modified_base 50: mod_base = OTHER; note = 2'-Omethylcytosine
  modified_base 52: mod_base = OTHER; note = 2'-Omethylguanosine
  modified_base 53: mod_base = OTHER; note = 2'-Omethylguanosine
  modified_base 54: mod_base = OTHER; note = Uridine phosphorothiorate
  modified_base 56: mod_base = OTHER; note = 2'-fluorocytosine
  modified_base 57: mod_base = OTHER; note = Guanosine phosphorothiorate
  modified_base 62: mod_base = OTHER; note = Cytosine phosphorothiorate
  modified_base 63: mod_base = OTHER; note = 2'-Omethylcytosine
  modified_base 64: mod_base = OTHER; note = 2'-Omethylguanosine
  modified_base 65: mod_base = OTHER; note = Guanosine phosphorothiorate
  modified_base 66: mod_base = OTHER; note = 2'-fluorocytosine
  modified_base 69: mod_base = OTHER; note = 2'-fluoroadenosine
  modified_base 73: mod_base = OTHER; note = 2'-fluoroguanosine
  modified_base 75: mod_base = OTHER; note = 2'-Omethylcytosine

SEQ ID NO: 5512 - RNA, 76 nt, synthetic construct; identical to SEQ ID NO: 3318
  source 1..76: mol_type = other RNA
  modified_base 1: mod_base = OTHER; note = 2'-Omethylcytosine
  modified_base 18: mod_base = OTHER; note = 2'-Omethylguanosine
  modified_base 19: mod_base = OTHER; note = 2'-Omethylguanosine
  modified_base 33: mod_base = OTHER; note = 2'-fluorouridine
  modified_base 34: mod_base = OTHER; note = 2'-Omethylcytosine
  modified_base 35: mod_base = OTHER; note = Uridine phosphorothiorate
  modified_base 37: mod_base = OTHER; note = Guanosine phosphorothiorate
  modified_base 38: mod_base = OTHER; note = Adenosine phosphorothiorate
  modified_base 41: mod_base = OTHER; note = 2'-fluorocytosine
  modified_base 42: mod_base = OTHER; note = 2'-Omethyluridine
  modified_base 43: mod_base = OTHER; note = 2'-Omethyluridine
  modified_base 44: mod_base = OTHER; note = 2'-fluoroadenosine
  modified_base 50: mod_base = OTHER; note = 2'-Omethylcytosine
  modified_base 52: mod_base = OTHER; note = 2'-Omethylguanosine
  modified_base 73: mod_base = OTHER; note = 2'-Omethyladenosine

SEQ ID NO: 5513 - RNA, 86 nt, synthetic construct
  source 1..86: mol_type = other RNA
accaggatggccgagtggttaaggcgttggacttcagatccaatggacgtatgtcttcgtgggttcgaaccccactcctggtacca

SEQ ID NO: 5514 - RNA, 86 nt, synthetic construct; identical to SEQ ID NO: 3290
  source 1..86: mol_type = other RNA
  modified_base 1: mod_base = OTHER; note = 2'-Omethyladenosine phosphorothiorate
  modified_base 2: mod_base = OTHER; note = 2'-Omethylcytosine phosphorothiorate
  modified_base 3: mod_base = OTHER; note = 2'-Omethylcytosine
  modified_base 4: mod_base = OTHER; note = 2'-Omethyladenosine
  modified_base 5: mod_base = OTHER; note = 2'-Omethylguanosine
  modified_base 6: mod_base = OTHER; note = 2'-Omethylguanosine
  modified_base 10: mod_base = OTHER; note = 2'-Omethylguanosine
  modified_base 11: mod_base = OTHER; note = 2'-Omethylcytosine
  modified_base 12: mod_base = OTHER; note = 2'-Omethylcytosine
  modified_base 13: mod_base = OTHER; note = 2'-Omethylguanosine
  modified_base 17: mod_base = OTHER; note = 2'-Omethylguanosine
  modified_base 18: mod_base = OTHER; note = 2'-Omethylguanosine
  modified_base 22: mod_base = OTHER; note = 2'-Omethyladenosine
  modified_base 23: mod_base = OTHER; note = 2'-Omethylguanosine
  modified_base 24: mod_base = OTHER; note = 2'-Omethylguanosine
  modified_base 25: mod_base = OTHER; note = 2'-Omethylcytosine
  modified_base 33: mod_base = OTHER; note = 2'-fluorouridine
  modified_base 34: mod_base = OTHER; note = 2'-Omethyluridine
  modified_base 35: mod_base = OTHER; note = Cytosine phosphorothiorate
  modified_base 37: mod_base = OTHER; note = Guanosine phosphorothiorate
  modified_base 38: mod_base = OTHER; note = Adenosine phosphorothiorate
  modified_base 41: mod_base = OTHER; note = 2'-fluorocytosine
  modified_base 42: mod_base = OTHER; note = 2'-Omethyladenosine
  modified_base 43: mod_base = OTHER; note = 2'-Omethyladenosine
  modified_base 44: mod_base = OTHER; note = 2'-fluorouridine
  modified_base 59: mod_base = OTHER; note = 2'-Omethylguanosine
  modified_base 60: mod_base = OTHER; note = 2'-Omethyluridine
  modified_base 61: mod_base = OTHER; note = 2'-Omethylguanosine
  modified_base 62: mod_base = OTHER; note = 2'-Omethylguanosine
  modified_base 63: mod_base = OTHER; note = 2'-Omethylguanosine
  modified_base 64: mod_base = OTHER; note = Uridine phosphorothiorate
  modified_base 65: mod_base = OTHER; note = Uridine phosphorothiorate
  modified_base 71: mod_base = OTHER; note = 2'-Omethylcytosine
  modified_base 72: mod_base = OTHER; note = 2'-Omethylcytosine
  modified_base 73: mod_base = OTHER; note = 2'-fluorocytosine
  modified_base 74: mod_base = OTHER; note = 2'-Omethyladenosine
  modified_base 75: mod_base = OTHER; note = 2'-Omethylcytosine
  modified_base 76: mod_base = OTHER; note = 2'-Omethyluridine
  modified_base 77: mod_base = OTHER; note = 2'-Omethylcytosine
  modified_base 78: mod_base = OTHER; note = 2'-Omethylcytosine
  modified_base 83: mod_base = OTHER; note = 2'-Omethyladenosine

SEQ ID NO: 5515 - RNA, 76 nt, synthetic construct; identical to SEQ ID NO: 625
  source 1..76: mol_type = other RNA
  modified_base 1: mod_base = OTHER; note = 2'-Omethylguanosine
  modified_base 17: mod_base = OTHER; note = 2'-Omethylguanosine
  modified_base 18: mod_base = OTHER; note = 2'-Omethylguanosine
  modified_base 50: mod_base = OTHER; note = 2'-Omethylcytosine
  modified_base 52: mod_base = OTHER; note = 2'-Omethylguanosine
  modified_base 71: mod_base = OTHER; note = Thymine
  modified_base 73: mod_base = OTHER; note = 2'-Omethylguanosine

SEQ ID NO: 5516 - RNA, 85 nt, synthetic construct; identical to SEQ ID NO: 3297
  source 1..85: mol_type = other RNA
  modified_base 1: mod_base = OTHER; note = 2'-Omethylguanosine phosphorothiorate
  modified_base 2: mod_base = OTHER; note = Cytosine phosphorothiorate
  modified_base 25: mod_base = OTHER; note = 2'-fluorocytosine phosphorothiorate
  modified_base 30: mod_base = OTHER; note = Guanosine phosphorothiorate
  modified_base 52: mod_base = OTHER; note = 2'-Omethylcytosine phosphorothiorate
  modified_base 58: mod_base = OTHER; note = Guanosine phosphorothiorate
  modified_base 62: mod_base = OTHER; note = 2'-Omethylguanosine
  modified_base 80: mod_base = OTHER; note = 2'-Omethylguanosine
  modified_base 83: mod_base = OTHER; note = Cytosine phosphorothiorate

SEQ ID NO: 5517 - RNA, 76 nt, synthetic construct; identical to SEQ ID NO: 625
  source 1..76: mol_type = other RNA
  modified_base 1: mod_base = OTHER; note = 2'-Omethylguanosine phosphorothiorate
  modified_base 2: mod_base = OTHER; note = 2'-Omethylguanosine
  modified_base 25: mod_base = OTHER; note = 2'-Omethylcytosine
  modified_base 33: mod_base = OTHER; note = 2'-fluorouridine
  modified_base 35: mod_base = OTHER; note = Cytosine phosphorothiorate
  modified_base 37: mod_base = OTHER; note = Adenosine phosphorothiorate
  modified_base 38: mod_base = OTHER; note = Adenosine phosphorothiorate
  modified_base 52: mod_base = OTHER; note = 2'-fluoroguanosine
  modified_base 56: mod_base = OTHER; note = 2'-Omethylcytosine
  modified_base 62: mod_base = OTHER; note = 2'-Omethylcytosine
  modified_base 68: mod_base = OTHER; note = 2'-Omethylguanosine
  modified_base 73: mod_base = OTHER; note = 2'-Omethylguanosine
  modified_base 75: mod_base = OTHER; note = 2'-fluorocytosine phosphorothiorate

SEQ ID NO: 5518 - RNA, 76 nt, synthetic construct; identical to SEQ ID NO: 625
  source 1..76: mol_type = other RNA
  modified_base 1: mod_base = OTHER; note = 2'-Omethylguanosine phosphorothiorate
  modified_base 2: mod_base = OTHER; note = 2'-Omethylguanosine
  modified_base 17: mod_base = OTHER; note = 2'-Omethylguanosine
  modified_base 20: mod_base = OTHER; note = 2'-Omethyluridine
  modified_base 33: mod_base = OTHER; note = 2'-fluorouridine
  modified_base 35: mod_base = OTHER; note = Cytosine phosphorothiorate
  modified_base 37: mod_base = OTHER; note = Adenosine phosphorothiorate
  modified_base 52: mod_base = OTHER; note = 2'-fluoroguanosine
  modified_base 57: mod_base = OTHER; note = 2'-Omethylguanosine
  modified_base 62: mod_base = OTHER; note = 2'-Omethylcytosine
  modified_base 73: mod_base = OTHER; note = 2'-Omethylguanosine
  modified_base 75: mod_base = OTHER; note = 2'-fluorocytosine phosphorothiorate

SEQ ID NO: 5519 - RNA, 76 nt, synthetic construct; identical to SEQ ID NO: 625
  source 1..76: mol_type = other RNA
  modified_base 1: mod_base = OTHER; note = 2'-Omethylguanosine phosphorothiorate
  modified_base 2: mod_base = OTHER; note = 2'-Omethylguanosine phosphorothiorate
  modified_base 3: mod_base = OTHER; note = 2'-Omethylcytosine
  modified_base 4: mod_base = OTHER; note = 2'-Omethyluridine
  modified_base 5: mod_base = OTHER; note = 2'-Omethylcytosine
  modified_base 6: mod_base = OTHER; note = 2'-Omethylcytosine
  modified_base 10: mod_base = OTHER; note = 2'-Omethylguanosine
  modified_base 11: mod_base = OTHER; note = 2'-Omethylcytosine
  modified_base 12: mod_base = OTHER; note = 2'-Omethylguanosine
  modified_base 13: mod_base = OTHER; note = 2'-Omethylcytosine
  modified_base 40: mod_base = OTHER; note = 2'-fluorouridine
  modified_base 41: mod_base = OTHER; note = 2'-fluorocytosine
  modified_base 42: mod_base = OTHER; note = 2'-fluoroadenosine
  modified_base 43: mod_base = OTHER; note = 2'-fluoroadenosine
  modified_base 48: mod_base = OTHER; note = 2'-fluorouridine
  modified_base 49: mod_base = OTHER; note = 2'-Omethylcytosine
  modified_base 50: mod_base = OTHER; note = 2'-Omethylcytosine
  modified_base 51: mod_base = OTHER; note = 2'-Omethylguanosine
  modified_base 52: mod_base = OTHER; note = 2'-Omethylguanosine
  modified_base 53: mod_base = OTHER; note = 2'-Omethylguanosine
  modified_base 54: mod_base = OTHER; note = 2'-Omethyluridine
  modified_base 61: mod_base = OTHER; note = 2'-Omethylcytosine
  modified_base 62: mod_base = OTHER; note = 2'-Omethylcytosine
  modified_base 63: mod_base = OTHER; note = 2'-fluorocytosine
  modified_base 64: mod_base = OTHER; note = 2'-Omethylguanosine
  modified_base 65: mod_base = OTHER; note = 2'-Omethylguanosine
  modified_base 66: mod_base = OTHER; note = 2'-Omethylcytosine
  modified_base 67: mod_base = OTHER; note = 2'-Omethylguanosine
  modified_base 68: mod_base = OTHER; note = 2'-Omethylguanosine
  modified_base 73: mod_base = OTHER; note = 2'-Omethylguanosine

SEQ ID NO: 5520 - RNA, 76 nt, synthetic construct; identical to SEQ ID NO: 3289
  source 1..76: mol_type = other RNA
  modified_base 1: mod_base = OTHER; note = 2'-Omethylguanosine phosphorothiorate
  modified_base 2: mod_base = OTHER; note = 2'-Omethylcytosine phosphorothiorate
  modified_base 12: mod_base = OTHER; note = Uridine phosphorothiorate
  modified_base 22: mod_base = OTHER; note = 2'-fluoroguanosine
  modified_base 26: mod_base = OTHER; note = Adenosine phosphorothiorate
  modified_base 27: mod_base = OTHER; note = Uridine phosphorothiorate
  modified_base 45: mod_base = OTHER; note = Guanosine phosphorothiorate
  modified_base 63: mod_base = OTHER; note = 2'-fluorocytosine
  modified_base 74: mod_base = OTHER; note = Cytosine phosphorothiorate
  modified_base 75: mod_base = OTHER; note = 2'-Omethylcytosine phosphorothiorate
  modified_base 76: mod_base = OTHER; note = 2'-Omethyladenosine

SEQ ID NO: 5521 - RNA, 76 nt, synthetic construct
  source 1..76: mol_type = other RNA
ggctccgtggcgcaatggatagcgcattggacttcaaattcaaaggttccgggttcgagtcccggcggagctgcca

SEQ ID NO: 5522 - RNA, 76 nt, synthetic construct; identical to SEQ ID NO: 625
  source 1..76: mol_type = other RNA
  modified_base 61: mod_base = OTHER; note = 2'-O-(2-Methoxyethyl) cytosine
  modified_base 62: mod_base = OTHER; note = 2'-O-(2-Methoxyethyl) cytosine
  modified_base 63: mod_base = OTHER; note = 2'-O-(2-Methoxyethyl) cytosine
  modified_base 64: mod_base = OTHER; note = 2'-O-(2-Methoxyethyl) guanosine
  modified_base 65: mod_base = OTHER; note = 2'-O-(2-Methoxyethyl) guanosine

SEQ ID NO: 5523 - RNA, 76 nt, synthetic construct; identical to SEQ ID NO: 3318
  source 1..76: mol_type = other RNA
  modified_base 1: mod_base = OTHER; note = 2'-Omethylcytosine
  modified_base 49: mod_base = OTHER; note = 2'-Omethylguanosine
  modified_base 50: mod_base = OTHER; note = 2'-Omethylcytosine
  modified_base 51: mod_base = OTHER; note = 2'-Omethyluridine
  modified_base 52: mod_base = OTHER; note = 2'-Omethylguanosine
  modified_base 53: mod_base = OTHER; note = 2'-Omethylguanosine
  modified_base 61: mod_base = OTHER; note = 2'-Omethylcytosine
  modified_base 62: mod_base = OTHER; note = 2'-Omethylcytosine
  modified_base 63: mod_base = OTHER; note = 2'-fluoroguanosine
  modified_base 64: mod_base = OTHER; note = 2'-Omethylguanosine
  modified_base 65: mod_base = OTHER; note = 2'-Omethylcytosine
  modified_base 73: mod_base = OTHER; note = 2'-Omethyladenosine

SEQ ID NO: 5524 - RNA, 76 nt, synthetic construct; identical to SEQ ID NO: 625
  source 1..76: mol_type = other RNA
  modified_base 1: mod_base = OTHER; note = 2'-Omethylguanosine
  modified_base 3: mod_base = OTHER; note = 2'-Omethylcytosine
  modified_base 10: mod_base = OTHER; note = 2'-Omethylguanosine
  modified_base 13: mod_base = OTHER; note = 2'-Omethylcytosine
  modified_base 17: mod_base = OTHER; note = Guanosine phosphorothiorate
  modified_base 18: mod_base = OTHER; note = 2'-Omethylguanosine
  modified_base 19: mod_base = OTHER; note = Adenosine phosphorothiorate
  modified_base 20: mod_base = OTHER; note = 2'-Omethyluridine
  modified_base 25: mod_base = OTHER; note = 2'-Omethylcytosine
  modified_base 29: mod_base = OTHER; note = 2'-Omethylguanosine
  modified_base 33: mod_base = OTHER; note = 2'-fluorouridine
  modified_base 35: mod_base = OTHER; note = Cytosine phosphorothiorate
  modified_base 37: mod_base = OTHER; note = Adenosine phosphorothiorate
  modified_base 38: mod_base = OTHER; note = Adenosine phosphorothiorate
  modified_base 41: mod_base = OTHER; note = 2'-fluorocytosine
  modified_base 43: mod_base = OTHER; note = 2'-Omethyladenosine
  modified_base 44: mod_base = OTHER; note = 2'-fluoroadenosine
  modified_base 46: mod_base = OTHER; note = Guanosine phosphorothiorate
  modified_base 50: mod_base = OTHER; note = 2'-Omethylcytosine
  modified_base 52: mod_base = OTHER; note = 2'-Omethylguanosine
  modified_base 54: mod_base = OTHER; note = Uridine phosphorothiorate
  modified_base 55: mod_base = OTHER; note = Uridine phosphorothiorate
  modified_base 56: mod_base = OTHER; note = 2'-Omethylcytosine
  modified_base 57: mod_base = OTHER; note = Guanosine phosphorothiorate
  modified_base 62: mod_base = OTHER; note = 2'-Omethylcytosine
  modified_base 63: mod_base = OTHER; note = 2'-fluorocytosine
  modified_base 65: mod_base = OTHER; note = 2'-Omethylguanosine
  modified_base 71: mod_base = OTHER; note = 2'-Omethyluridine
  modified_base 73: mod_base = OTHER; note = 2'-Omethylguanosine

SEQ ID NO: 5525 - RNA, 85 nt, synthetic construct; identical to SEQ ID NO: 3301
  source 1..85: mol_type = other RNA
  modified_base 1: mod_base = OTHER; note = 2'-Omethylguanosine phosphorothiorate
  modified_base 2: mod_base = OTHER; note = 2'-Omethylcytosine
  modified_base 3: mod_base = OTHER; note = 2'-Omethyluridine phosphorothiorate
  modified_base 4: mod_base = OTHER; note = Guanosine phosphorothiorate
  modified_base 15: mod_base = OTHER; note = 2'-Omethylguanosine phosphorothiorate
  modified_base 19: mod_base = OTHER; note = Uridine phosphorothiorate
  modified_base 20: mod_base = OTHER; note = Uridine phosphorothiorate
  modified_base 25: mod_base = OTHER; note = 2'-fluorocytosine phosphorothiorate
  modified_base 26: mod_base = OTHER; note = 2'-fluoroguanosine
  modified_base 35: mod_base = OTHER; note = Uridine phosphorothiorate
  modified_base 37: mod_base = OTHER; note = 2'-fluoroadenosine phosphorothiorate
  modified_base 47: mod_base = OTHER; note = 2'-Omethylguanosine
  modified_base 53: mod_base = OTHER; note = 2'-Omethylcytosine phosphorothiorate
  modified_base 57: mod_base = OTHER; note = 2'-fluorocytosine
  modified_base 58: mod_base = OTHER; note = 2'-fluoroguanosine
  modified_base 59: mod_base = OTHER; note = 2'-Omethylcytosine
  modified_base 61: mod_base = OTHER; note = 2'-Omethylguanosine
  modified_base 71: mod_base = OTHER; note = Cytosine phosphorothiorate
  modified_base 80: mod_base = OTHER; note = 2'-fluoroguanosine phosphorothiorate
  modified_base 81: mod_base = OTHER; note = 2'-fluorocytosine
  modified_base 84: mod_base = OTHER; note = 2'-Omethylcytosine phosphorothiorate

SEQ ID NO: 5526 - RNA, 76 nt, synthetic construct; identical to SEQ ID NO: 625
  source 1..76: mol_type = other RNA
  modified_base 1: mod_base = OTHER; note = 2'-Omethylguanosine phosphorothiorate
  modified_base 2: mod_base = OTHER; note = 2'-Omethylguanosine
  modified_base 33: mod_base = OTHER; note = 2'-fluorouridine
  modified_base 35: mod_base = OTHER; note = Cytosine phosphorothiorate
  modified_base 37: mod_base = OTHER; note = Adenosine phosphorothiorate
  modified_base 38: mod_base = OTHER; note = Adenosine phosphorothiorate
  modified_base 52: mod_base = OTHER; note = 2'-fluoroguanosine
  modified_base 62: mod_base = OTHER; note = 2'-Omethylcytosine
  modified_base 63: mod_base = OTHER; note = 2'-fluorocytosine
  modified_base 73: mod_base = OTHER; note = 2'-Omethylguanosine
  modified_base 75: mod_base = OTHER; note = 2'-fluorocytosine phosphorothiorate

SEQ ID NO: 5527 - RNA, 85 nt, synthetic construct; identical to SEQ ID NO: 3297
  source 1..85: mol_type = other RNA
  modified_base 22: mod_base = OTHER; note = 2'-Omethyladenosine
  modified_base 23: mod_base = OTHER; note = 2'-Omethylguanosine
  modified_base 24: mod_base = OTHER; note = 2'-Omethylguanosine
  modified_base 25: mod_base = OTHER; note = 2'-Omethylcytosine
  modified_base 58: mod_base = OTHER; note = 2'-Omethylguanosine
  modified_base 59: mod_base = OTHER; note = 2'-Omethylcytosine
  modified_base 60: mod_base = OTHER; note = 2'-Omethyladenosine
  modified_base 61: mod_base = OTHER; note = 2'-Omethylguanosine
  modified_base 62: mod_base = OTHER; note = 2'-Omethylguanosine
  modified_base 82: mod_base = OTHER; note = 2'-Omethylguanosine

SEQ ID NO: 5528 - RNA, 76 nt, synthetic construct; identical to SEQ ID NO: 3289
  source 1..76: mol_type = other RNA
  modified_base 1: mod_base = OTHER; note = 2'-Omethylguanosine
  modified_base 14: mod_base = OTHER; note = 2'-Omethyladenosine phosphorothiorate
  modified_base 15: mod_base = OTHER; note = 2'-Omethylguanosine phosphorothiorate
  modified_base 16: mod_base = OTHER; note = 2'-Omethyluridine phosphorothiorate
  modified_base 18: mod_base = OTHER; note = 2'-Omethylguanosine phosphorothiorate
  modified_base 19: mod_base = OTHER; note = 2'-Omethylguanosine phosphorothiorate
  modified_base 20: mod_base = OTHER; note = 2'-fluorouridine phosphorothiorate
  modified_base 21: mod_base = OTHER; note = 2'-fluoroadenosine phosphorothiorate
  modified_base 50: mod_base = OTHER; note = 2'-Omethyladenosine
  modified_base 52: mod_base = OTHER; note = 2'-Omethylguanosine
  modified_base 73: mod_base = OTHER; note = 2'-Omethylguanosine

SEQ ID NO: 5529 - RNA, 74 nt, synthetic construct; identical to SEQ ID NO: 3293
  source 1..74: mol_type = other RNA
  modified_base 3: mod_base = OTHER; note = Cytosine phosphorothiorate
  modified_base 12: mod_base = OTHER; note = 2'-fluorocytosine
  modified_base 25: mod_base = OTHER; note = Uridine phosphorothiorate
  modified_base 27: mod_base = OTHER; note = Uridine phosphorothiorate
  modified_base 44: mod_base = OTHER; note = Guanosine phosphorothiorate
  modified_base 46: mod_base = OTHER; note = 2'-fluorouridine
  modified_base 73: mod_base = OTHER; note = 2'-Omethylcytosine phosphorothiorate
  modified_base 74: mod_base = OTHER; note = 2'-Omethyladenosine

SEQ ID NO: 5530 - RNA, 74 nt, synthetic construct; identical to SEQ ID NO: 3293
  source 1..74: mol_type = other RNA
  modified_base 1: mod_base = OTHER; note = Adenosine phosphorothiorate
  modified_base 2: mod_base = OTHER; note = 2'-Omethylcytosine
  modified_base 10: mod_base = OTHER; note = 2'-Omethylcytosine phosphorothiorate
  modified_base 20: mod_base = OTHER; note = 2'-fluoroguanosine phosphorothiorate
  modified_base 32: mod_base = OTHER; note = 2'-Omethylcytosine
  modified_base 41: mod_base = OTHER; note = 2'-fluoroadenosine
  modified_base 44: mod_base = OTHER; note = 2'-fluoroguanosine
  modified_base 50: mod_base = OTHER; note = Uridine phosphorothiorate
  modified_base 56: mod_base = OTHER; note = Adenosine phosphorothiorate
  modified_base 62: mod_base = OTHER; note = 2'-fluoroguanosine phosphorothiorate
  modified_base 73: mod_base = OTHER; note = 2'-Omethylcytosine phosphorothiorate

SEQ ID NO: 5531 - RNA, 75 nt, synthetic construct; identical to SEQ ID NO: 3306
  source 1..75: mol_type = other RNA
  modified_base 1: mod_base = OTHER; note = 2'-Omethylguanosine
  modified_base 16: mod_base = OTHER; note = 2'-Omethylcytosine
  modified_base 17: mod_base = OTHER; note = 2'-Omethylguanosine
  modified_base 18: mod_base = OTHER; note = 2'-Omethylguanosine
  modified_base 53: mod_base = OTHER; note = 2'-Omethyluridine
  modified_base 55: mod_base = OTHER; note = 2'-Omethylcytosine
  modified_base 58: mod_base = OTHER; note = 2'-Omethyladenosine
  modified_base 72: mod_base = OTHER; note = 2'-Omethyladenosine

SEQ ID NO: 5532 - RNA, 85 nt, synthetic construct; identical to SEQ ID NO: 3297
  source 1..85: mol_type = other RNA
  modified_base 1: mod_base = OTHER; note = 2'-Omethylguanosine
  modified_base 58: mod_base = OTHER; note = 2'-Omethylguanosine
  modified_base 59: mod_base = OTHER; note = 2'-Omethylcytosine
  modified_base 60: mod_base = OTHER; note = 2'-Omethyladenosine
  modified_base 61: mod_base = OTHER; note = 2'-Omethylguanosine
  modified_base 62: mod_base = OTHER; note = 2'-Omethylguanosine
  modified_base 70: mod_base = OTHER; note = 2'-Omethylcytosine
  modified_base 71: mod_base = OTHER; note = 2'-Omethylcytosine
  modified_base 72: mod_base = OTHER; note = 2'-fluorouridine
  modified_base 73: mod_base = OTHER; note = 2'-Omethylguanosine
  modified_base 74: mod_base = OTHER; note = 2'-Omethylcytosine
  modified_base 82: mod_base = OTHER; note = 2'-Omethylguanosine

SEQ ID NO: 5533 - RNA, 76 nt, synthetic construct; identical to SEQ ID NO: 3795
  source 1..76: mol_type = other RNA
  modified_base 1: mod_base = OTHER; note = 2'-Omethylguanosine phosphorothiorate
  modified_base 2: mod_base = OTHER; note = 2'-Omethylcytosine phosphorothiorate
  modified_base 3: mod_base = OTHER; note = 2'-Omethylcytosine
  modified_base 4: mod_base = OTHER; note = 2'-Omethyluridine
  modified_base 5: mod_base = OTHER; note = 2'-Omethylcytosine
  modified_base 6: mod_base = OTHER; note = 2'-Omethylcytosine
  modified_base 10: mod_base = OTHER; note = 2'-Omethylguanosine
  modified_base 11: mod_base = OTHER; note = 2'-Omethylcytosine
  modified_base 12: mod_base = OTHER; note = 2'-Omethylcytosine
  modified_base 13: mod_base = OTHER; note = 2'-Omethyluridine
  modified_base 14: mod_base = OTHER; note = 2'-Omethyladenosine
  modified_base 15: mod_base = OTHER; note = 2'-fluoroadenosine
  modified_base 16: mod_base = OTHER; note = 2'-Omethyluridine
  modified_base 17: mod_base = OTHER; note = 2'-Omethylguanosine
  modified_base 18: mod_base = OTHER; note = 2'-Omethylguanosine
  modified_base 19: mod_base = OTHER; note = 2'-fluoroadenosine
  modified_base 20: mod_base = OTHER; note = 2'-Omethyluridine
  modified_base 22: mod_base = OTHER; note = 2'-Omethyladenosine
  modified_base 23: mod_base = OTHER; note = 2'-Omethylguanosine
  modified_base 24: mod_base = OTHER; note = 2'-Omethylguanosine
  modified_base 25: mod_base = OTHER; note = 2'-Omethylcytosine
  modified_base 33: mod_base = OTHER; note = 2'-fluorouridine
  modified_base 35: mod_base = OTHER; note = Cytosine phosphorothiorate
  modified_base 37: mod_base = OTHER; note = Adenosine phosphorothiorate
  modified_base 38: mod_base = OTHER; note = Adenosine phosphorothiorate
  modified_base 44: mod_base = OTHER; note = 2'-Omethylguanosine
  modified_base 45: mod_base = OTHER; note = 2'-Omethylguanosine
  modified_base 46: mod_base = OTHER; note = 2'-fluoroadenosine
  modified_base 47: mod_base = OTHER; note = 2'-fluorouridine
  modified_base 48: mod_base = OTHER; note = 2'-fluorouridine
  modified_base 56: mod_base = OTHER; note = 2'-Omethylcytosine
  modified_base 59: mod_base = OTHER; note = 2'-Omethylguanosine
  modified_base 61: mod_base = OTHER; note = 2'-Omethylcytosine
  modified_base 62: mod_base = OTHER; note = 2'-Omethylcytosine
  modified_base 63: mod_base = OTHER; note = 2'-fluorocytosine
  modified_base 64: mod_base = OTHER; note = 2'-Omethylguanosine
  modified_base 65: mod_base = OTHER; note = 2'-Omethyluridine
  modified_base 66: mod_base = OTHER; note = 2'-Omethylcytosine
  modified_base 67: mod_base = OTHER; note = 2'-Omethylguanosine
  modified_base 68: mod_base = OTHER; note = 2'-Omethylguanosine
  modified_base 73: mod_base = OTHER; note = 2'-Omethylguanosine

SEQ ID NO: 5534 - DNA, 73 bp, synthetic construct; identical to SEQ ID NO: 3380
  source 1..73: mol_type = other DNA
  modified_base 1: mod_base = OTHER; note = 2'-Omethylguanosine phosphorothiorate
  modified_base 2: mod_base = OTHER; note = 2'-Omethylguanosine phosphorothiorate
  modified_base 19: mod_base = OTHER; note = Adenosine phosphorothiorate
  modified_base 29: mod_base = OTHER; note = 2'-O-(2-Methoxyethyl) guanosine
  modified_base 68: mod_base = OTHER; note = 2'-fluoroguanosine
  modified_base 72: mod_base = OTHER; note = 2'-fluorocytosine
  misc_feature 1..19: note = RNA
  misc_feature 20: note = DNA
  misc_feature 21..43: note = RNA
  misc_feature 44: note = DNA
  misc_feature 45..73: note = RNA

SEQ ID NO: 5535 - RNA, 76 nt, synthetic construct; identical to SEQ ID NO: 625
  source 1..76: mol_type = other RNA
  modified_base 2: mod_base = OTHER; note = Guanosine phosphorothiorate
  modified_base 3: mod_base = OTHER; note = 2'-fluorocytosine phosphorothiorate
  modified_base 4: mod_base = OTHER; note = 2'-fluorouridine
  modified_base 8: mod_base = OTHER; note = Uridine phosphorothiorate
  modified_base 10: mod_base = OTHER; note = 2'-Omethylguanosine phosphorothiorate
  modified_base 11: mod_base = OTHER; note = 2'-fluorocytosine
  modified_base 16: mod_base = OTHER; note = 2'-Omethyluridine
  modified_base 17: mod_base = OTHER; note = 2'-Omethylguanosine
  modified_base 18: mod_base = OTHER; note = 2'-fluoroguanosine
  modified_base 20: mod_base = OTHER; note = Uridine phosphorothiorate
  modified_base 27: mod_base = OTHER; note = 2'-Omethyluridine phosphorothiorate
  modified_base 28: mod_base = OTHER; note = 2'-fluorouridine phosphorothiorate
  modified_base 29: mod_base = OTHER; note = Guanosine phosphorothiorate
  modified_base 30: mod_base = OTHER; note = 2'-Omethylguanosine
  modified_base 32: mod_base = OTHER; note = 2'-fluorocytosine
  modified_base 34: mod_base = OTHER; note = 2'-Omethyluridine
  modified_base 36: mod_base = OTHER; note = Adenosine phosphorothiorate
  modified_base 41: mod_base = OTHER; note = 2'-Omethylcytosine
  modified_base 43: mod_base = OTHER; note = 2'-Omethyladenosine
  modified_base 45: mod_base = OTHER; note = 2'-fluoroguanosine
  modified_base 46: mod_base = OTHER; note = Guanosine phosphorothiorate
  modified_base 47: mod_base = OTHER; note = 2'-Omethyluridine
  modified_base 48: mod_base = OTHER; note = 2'-Omethyluridine
  modified_base 49: mod_base = OTHER; note = 2'-fluorocytosine
  modified_base 53: mod_base = OTHER; note = 2'-fluoroguanosine
  modified_base 61: mod_base = OTHER; note = 2'-Omethylcytosine phosphorothiorate
  modified_base 62: mod_base = OTHER; note = 2'-Omethylcytosine
  modified_base 64: mod_base = OTHER; note = 2'-fluoroguanosine
  modified_base 65: mod_base = OTHER; note = Guanosine phosphorothiorate
  modified_base 66: mod_base = OTHER; note = 2'-Omethylcytosine
  modified_base 67: mod_base = OTHER; note = 2'-Omethylguanosine phosphorothiorate
  modified_base 68: mod_base = OTHER; note = 2'-fluoroguanosine
  modified_base 69: mod_base = OTHER; note = Adenosine phosphorothiorate
  modified_base 72: mod_base = OTHER; note = 2'-fluorocytosine phosphorothiorate
  modified_base 75: mod_base = OTHER; note = 2'-Omethylcytosine phosphorothiorate
  modified_base 76: mod_base = OTHER; note = 2'-Omethyladenosine

SEQ ID NO: 5536 - RNA, 76 nt, synthetic construct; identical to SEQ ID NO: 625
  source 1..76: mol_type = other RNA
  modified_base 1: mod_base = OTHER; note = 2'-Omethylguanosine phosphorothiorate
  modified_base 2: mod_base = OTHER; note = 2'-Omethylguanosine phosphorothiorate
  modified_base 3: mod_base = OTHER; note = 2'-Omethylcytosine phosphorothiorate
  modified_base 4: mod_base = OTHER; note = 2'-Omethyluridine phosphorothiorate
  modified_base 5: mod_base = OTHER; note = 2'-Omethylcytosine phosphorothiorate
  modified_base 6: mod_base = OTHER; note = 2'-Omethylcytosine phosphorothiorate
  modified_base 10: mod_base = OTHER; note = 2'-Omethylguanosine
  modified_base 11: mod_base = OTHER; note = 2'-Omethylcytosine
  modified_base 12: mod_base = OTHER; note = 2'-Omethylguanosine
  modified_base 13: mod_base = OTHER; note = 2'-Omethylcytosine
  modified_base 14: mod_base = OTHER; note = 2'-Omethyladenosine
  modified_base 15: mod_base = OTHER; note = 2'-Omethyladenosine
  modified_base 16: mod_base = OTHER; note = 2'-Omethyluridine
  modified_base 17: mod_base = OTHER; note = 2'-Omethylguanosine
  modified_base 18: mod_base = OTHER; note = 2'-Omethylguanosine
  modified_base 19: mod_base = OTHER; note = 2'-Omethyladenosine
  modified_base 20: mod_base = OTHER; note = 2'-Omethyluridine
  modified_base 40: mod_base = OTHER; note = 2'-fluorouridine
  modified_base 41: mod_base = OTHER; note = 2'-fluorocytosine
  modified_base 42: mod_base = OTHER; note = 2'-fluoroadenosine
  modified_base 43: mod_base = OTHER; note = 2'-fluoroadenosine
  modified_base 44: mod_base = OTHER; note = 2'-Omethyladenosine
  modified_base 45: mod_base = OTHER; note = 2'-Omethylguanosine
  modified_base 46: mod_base = OTHER; note = 2'-Omethylguanosine
  modified_base 54: mod_base = OTHER; note = Uridine phosphorothiorate
  modified_base 55: mod_base = OTHER; note = Uridine phosphorothiorate
  modified_base 56: mod_base = OTHER; note = Cytosine phosphorothiorate
  modified_base 57: mod_base = OTHER; note = Guanosine phosphorothiorate
  modified_base 61: mod_base = OTHER; note = 2'-Omethylcytosine
  modified_base 62: mod_base = OTHER; note = 2'-Omethylcytosine
  modified_base 63: mod_base = OTHER; note = 2'-Omethylcytosine
  modified_base 64: mod_base = OTHER; note = 2'-Omethylguanosine
  modified_base 65: mod_base = OTHER; note = 2'-Omethylguanosine
  modified_base 66: mod_base = OTHER; note = 2'-Omethylcytosine
  modified_base 67: mod_base = OTHER; note = 2'-Omethylguanosine
  modified_base 68: mod_base = OTHER; note = 2'-Omethylguanosine
  modified_base 69: mod_base = OTHER; note = 2'-Omethyladenosine

SEQ ID NO: 5537 - RNA, 76 nt, synthetic construct; identical to SEQ ID NO: 625
  source 1..76: mol_type = other RNA
  modified_base 1: mod_base = OTHER; note = 2'-Omethylguanosine
  modified_base 2: mod_base = OTHER; note = 2'-Omethylguanosine
  modified_base 3: mod_base = OTHER; note = 2'-Omethylcytosine
  modified_base 4: mod_base = OTHER; note = 2'-Omethyluridine
  modified_base 5: mod_base = OTHER; note = 2'-Omethylcytosine
  modified_base 6: mod_base = OTHER; note = 2'-Omethylcytosine
  modified_base 7: mod_base = OTHER; note = 2'-Omethylguanosine
  modified_base 66: mod_base = OTHER; note = 2'-Omethylcytosine
  modified_base 67: mod_base = OTHER; note = 2'-Omethylguanosine
  modified_base 68: mod_base = OTHER; note = 2'-Omethylguanosine
  modified_base 69: mod_base = OTHER; note = 2'-Omethyladenosine
  modified_base 70: mod_base = OTHER; note = 2'-Omethylguanosine
  modified_base 71: mod_base = OTHER; note = 2'-Omethyluridine
  modified_base 72: mod_base = OTHER; note = 2'-Omethylcytosine

SEQ ID NO: 5538 - RNA, 75 nt, synthetic construct
  source 1..75: mol_type = other RNA
gcctgggtagctcagtcggtagagcatcagactttaaatctgagggtccaggttcaagtccctgtccaggcgcca

SEQ ID NO: 5539 - RNA, 76 nt, synthetic construct; identical to SEQ ID NO: 625
  source 1..76: mol_type = other RNA
  modified_base 3: mod_base = OTHER; note = 2'-fluorocytosine
  modified_base 7: mod_base = OTHER; note = Guanosine phosphorothiorate
  modified_base 11: mod_base = OTHER; note = Cytosine phosphorothiorate
  modified_base 12: mod_base = OTHER; note = 2'-Omethylguanosine
  modified_base 13: mod_base = OTHER; note = 2'-fluorocytosine
  modified_base 18: mod_base = OTHER; note = 2'-Omethylguanosine
  modified_base 19: mod_base = OTHER; note = Adenosine phosphorothiorate
  modified_base 22: mod_base = OTHER; note = 2'-fluoroguanosine
  modified_base 23: mod_base = OTHER; note = 2'-fluorocytosine
  modified_base 24: mod_base = OTHER; note = 2'-Omethylguanosine
  modified_base 27: mod_base = OTHER; note = 2'-Omethyluridine
  modified_base 28: mod_base = OTHER; note = 2'-fluorouridine phosphorothiorate
  modified_base 29: mod_base = OTHER; note = 2'-Omethylguanosine
  modified_base 30: mod_base = OTHER; note = Guanosine phosphorothiorate
  modified_base 33: mod_base = OTHER; note = 2'-fluorouridine
  modified_base 37: mod_base = OTHER; note = Adenosine phosphorothiorate
  modified_base 38: mod_base = OTHER; note = Adenosine phosphorothiorate
  modified_base 39: mod_base = OTHER; note = 2'-fluorouridine
  modified_base 41: mod_base = OTHER; note = 2'-Omethylcytosine
  modified_base 44: mod_base = OTHER; note = 2'-fluoroadenosine
  modified_base 45: mod_base = OTHER; note = 2'-Omethylguanosine
  modified_base 47: mod_base = OTHER; note = 2'-fluorouridine
  modified_base 48: mod_base = OTHER; note = Uridine phosphorothiorate
  modified_base 49: mod_base = OTHER; note = 2'-Omethylcytosine
  modified_base 50: mod_base = OTHER; note = 2'-fluorocytosine
  modified_base 52: mod_base = OTHER; note = 2'-fluoroguanosine
  modified_base 53: mod_base = OTHER; note = Guanosine phosphorothiorate
  modified_base 56: mod_base = OTHER; note = 2'-Omethylcytosine
  modified_base 58: mod_base = OTHER; note = 2'-fluoroadenosine
  modified_base 59: mod_base = OTHER; note = 2'-fluoroguanosine
  modified_base 62: mod_base = OTHER; note = 2'-Omethylcytosine
  modified_base 67: mod_base = OTHER; note = 2'-Omethylguanosine phosphorothiorate
  modified_base 68: mod_base = OTHER; note = 2'-Omethylguanosine
  modified_base 72: mod_base = OTHER; note = Cytosine phosphorothiorate
  modified_base 73: mod_base = OTHER; note = 2'-Omethylguanosine
  modified_base 74: mod_base = OTHER; note = Cytosine phosphorothiorate
  modified_base 75: mod_base = OTHER; note = 2'-Omethylcytosine
  modified_base 76: mod_base = OTHER; note = 2'-fluoroadenosine

SEQ ID NO: 5540 - RNA, 85 nt, synthetic construct; identical to SEQ ID NO: 3288
  source 1..85: mol_type = other RNA
  modified_base 1: mod_base = OTHER; note = 2'-Omethylcytosine
  modified_base 3: mod_base = OTHER; note = 2'-fluoroadenosine
  modified_base 11: mod_base = OTHER; note = Cytosine phosphorothiorate
  modified_base 19: mod_base = OTHER; note = Uridine phosphorothiorate
  modified_base 27: mod_base = OTHER; note = 2'-fluorouridine
  modified_base 29: mod_base = OTHER; note = 2'-fluoroguanosine
  modified_base 36: mod_base = OTHER; note = Guanosine phosphorothiorate
  modified_base 42: mod_base = OTHER; note = Adenosine phosphorothiorate
  modified_base 46: mod_base = OTHER; note = 2'-Omethyladenosine
  modified_base 50: mod_base = OTHER; note = Adenosine phosphorothiorate
  modified_base 55: mod_base = OTHER; note = 2'-fluorocytosine
  modified_base 56: mod_base = OTHER; note = 2'-Omethylguanosine
  modified_base 57: mod_base = OTHER; note = 2'-Omethylcytosine
  modified_base 59: mod_base = OTHER; note = 2'-fluorouridine phosphorothiorate
  modified_base 64: mod_base = OTHER; note = 2'-Omethyluridine phosphorothiorate
  modified_base 67: mod_base = OTHER; note = 2'-Omethyladenosine
  modified_base 71: mod_base = OTHER; note = Cytosine phosphorothiorate
  modified_base 73: mod_base = OTHER; note = 2'-fluoroadenosine
  modified_base 81: mod_base = OTHER; note = 2'-fluorouridine
  modified_base 84: mod_base = OTHER; note = 2'-fluorocytosine phosphorothiorate

SEQ ID NO: 5541 - RNA, 75 nt, synthetic construct; identical to SEQ ID NO: 3306
  source 1..75: mol_type = other RNA
  modified_base 1: mod_base = OTHER; note = 2'-Omethylguanosine
  modified_base 9: mod_base = OTHER; note = 2'-fluoroguanosine
  modified_base 10: mod_base = OTHER; note = 2'-Omethylguanosine
  modified_base 13: mod_base = OTHER; note = 2'-Omethylcytosine
  modified_base 17: mod_base = OTHER; note = Guanosine phosphorothiorate
  modified_base 18: mod_base = OTHER; note = 2'-Omethylguanosine
  modified_base 19: mod_base = OTHER; note = Uridine phosphorothiorate
  modified_base 24: mod_base = OTHER; note = 2'-Omethylcytosine
  modified_base 28: mod_base = OTHER; note = 2'-Omethyluridine
  modified_base 32: mod_base = OTHER; note = 2'-fluorouridine
  modified_base 34: mod_base = OTHER; note = Uridine phosphorothiorate
  modified_base 36: mod_base = OTHER; note = Guanosine phosphorothiorate
  modified_base 37: mod_base = OTHER; note = Adenosine phosphorothiorate
  modified_base 40: mod_base = OTHER; note = 2'-fluoroadenosine
  modified_base 42: mod_base = OTHER; note = 2'-Omethyladenosine
  modified_base 43: mod_base = OTHER; note = 2'-fluoroadenosine
  modified_base 45: mod_base = OTHER; note = Guanosine phosphorothiorate
  modified_base 49: mod_base = OTHER; note = 2'-Omethylcytosine
  modified_base 51: mod_base = OTHER; note = 2'-Omethyluridine
  modified_base 53: mod_base = OTHER; note = Uridine phosphorothiorate
  modified_base 54: mod_base = OTHER; note = Uridine phosphorothiorate
  modified_base 55: mod_base = OTHER; note = 2'-Omethylcytosine
  modified_base 56: mod_base = OTHER; note = Adenosine phosphorothiorate
  modified_base 61: mod_base = OTHER; note = 2'-Omethyladenosine
  modified_base 62: mod_base = OTHER; note = 2'-fluorocytosine
  modified_base 64: mod_base = OTHER; note = 2'-Omethyluridine
  modified_base 70: mod_base = OTHER; note = 2'-Omethyluridine
  modified_base 72: mod_base = OTHER; note = 2'-Omethyladenosine

SEQ ID NO: 5542 - RNA, 76 nt, synthetic construct; identical to SEQ ID NO: 3295
  source 1..76: mol_type = other RNA
  modified_base 1: mod_base = OTHER; note = 2'-fluorocytosine
  modified_base 2: mod_base = OTHER; note = 2'-Omethylcytosine phosphorothiorate
  modified_base 3: mod_base = OTHER; note = 2'-Omethyluridine phosphorothiorate
  modified_base 7: mod_base = OTHER; note = 2'-Omethyladenosine
  modified_base 10: mod_base = OTHER; note = 2'-Omethylguanosine
  modified_base 11: mod_base = OTHER; note = 2'-fluorocytosine phosphorothiorate
  modified_base 13: mod_base = OTHER; note = Cytosine phosphorothiorate
  modified_base 21: mod_base = OTHER; note = 2'-Omethyladenosine
  modified_base 27: mod_base = OTHER; note = Guanosine phosphorothiorate
  modified_base 29: mod_base = OTHER; note = 2'-fluoroguanosine phosphorothiorate
  modified_base 39: mod_base = OTHER; note = 2'-Omethyluridine phosphorothiorate
  modified_base 42: mod_base = OTHER; note = 2'-fluorouridine phosphorothiorate
  modified_base 49: mod_base = OTHER; note = 2'-Omethylguanosine
  modified_base 53: mod_base = OTHER; note = 2'-Omethylguanosine phosphorothiorate
  modified_base 67: mod_base = OTHER; note = 2'-fluorocytosine
  modified_base 75: mod_base = OTHER; note = 2'-Omethylcytosine phosphorothiorate
  modified_base 76: mod_base = OTHER; note = 2'-fluoroadenosine

SEQ ID NO: 5543 - RNA, 75 nt, synthetic construct; identical to SEQ ID NO: 3299
  source 1..75: mol_type = other RNA
  modified_base 8: mod_base = OTHER; note = 2'-fluoroadenosine
  modified_base 16: mod_base = OTHER; note = 2'-fluorocytosine
  modified_base 21: mod_base = OTHER; note = Guanosine phosphorothiorate
  modified_base 26: mod_base = OTHER; note = 2'-fluorouridine
  modified_base 27: mod_base = OTHER; note = Cytosine phosphorothiorate
  modified_base 37: mod_base = OTHER; note = Adenosine phosphorothiorate
  modified_base 40: mod_base = OTHER; note = 2'-fluorouridine
  modified_base 41: mod_base = OTHER; note = Guanosine phosphorothiorate
  modified_base 45: mod_base = OTHER; note = 2'-Omethylguanosine phosphorothiorate
  modified_base 50: mod_base = OTHER; note = 2'-fluoroguanosine
  modified_base 54: mod_base = OTHER; note = 2'-fluorouridine
  modified_base 59: mod_base = OTHER; note = 2'-Omethyluridine phosphorothiorate
  modified_base 63: mod_base = OTHER; note = 2'-fluorouridine phosphorothiorate
  modified_base 71: mod_base = OTHER; note = 2'-fluorocytosine
  modified_base 74: mod_base = OTHER; note = Cytosine phosphorothiorate

SEQ ID NO: 5544 - RNA, 85 nt, synthetic construct; identical to SEQ ID NO: 3310
  source 1..85: mol_type = other RNA
  modified_base 1: mod_base = OTHER; note = 2'-Omethylcytosine phosphorothiorate
  modified_base 15: mod_base = OTHER; note = 2'-Omethyluridine
  modified_base 22: mod_base = OTHER; note = 2'-fluoroguanosine
  modified_base 46: mod_base = OTHER; note = 2'-Omethyladenosine
  modified_base 73: mod_base = OTHER; note = 2'-fluoroadenosine
  modified_base 84: mod_base = OTHER; note = 2'-fluorocytosine

SEQ ID NO: 5545 - DNA, 74 bp, synthetic construct; identical to SEQ ID NO: 3384
  source 1..74: mol_type = other DNA
  modified_base 1: mod_base = OTHER; note = 2'-Omethylguanosine phosphorothiorate
  modified_base 2: mod_base = OTHER; note = 2'-Omethylguanosine phosphorothiorate
  modified_base 27: mod_base = OTHER; note = Uridine phosphorothiorate
  modified_base 51: mod_base = OTHER; note = Guanosine phosphorothiorate
  modified_base 59: mod_base = OTHER; note = 2'-fluoroguanosine
  modified_base 73: mod_base = OTHER; note = 2'-Omethylguanosine
  misc_feature 1..51: note = RNA
  misc_feature 52: note = DNA
  misc_feature 53..74: note = RNA

SEQ ID NO: 5546 - RNA, 76 nt, synthetic construct; identical to SEQ ID NO: 625
  source 1..76: mol_type = other RNA
  modified_base 1: mod_base = OTHER; note = Guanosine phosphorothiorate
  modified_base 3: mod_base = OTHER; note = Cytosine phosphorothiorate
  modified_base 4: mod_base = OTHER; note = 2'-fluorouridine
  modified_base 5: mod_base = OTHER; note = Cytosine phosphorothiorate
  modified_base 15: mod_base = OTHER; note = 2'-Omethyladenosine
  modified_base 16: mod_base = OTHER; note = 2'-fluorouridine phosphorothiorate
  modified_base 17: mod_base = OTHER; note = 2'-Omethylguanosine
  modified_base 18: mod_base = OTHER; note = 2'-fluoroguanosine
  modified_base 22: mod_base = OTHER; note = Guanosine phosphorothiorate
  modified_base 23: mod_base = OTHER; note = 2'-Omethylcytosine
  modified_base 25: mod_base = OTHER; note = Cytosine phosphorothiorate
  modified_base 27: mod_base = OTHER; note = 2'-Omethyluridine phosphorothiorate
  modified_base 29: mod_base = OTHER; note = 2'-Omethylguanosine
  modified_base 30: mod_base = OTHER; note = 2'-fluoroguanosine
  modified_base 31: mod_base = OTHER; note = 2'-fluoroadenosine
  modified_base 32: mod_base = OTHER; note = 2'-fluorocytosine
  modified_base 33: mod_base = OTHER; note = 2'-fluorouridine phosphorothiorate
  modified_base 34: mod_base = OTHER; note = 2'-fluorouridine
  modified_base 39: mod_base = OTHER; note = 2'-Omethyluridine
  modified_base 40: mod_base = OTHER; note = 2'-fluorouridine
  modified_base 41: mod_base = OTHER; note = 2'-fluorocytosine
  modified_base 48: mod_base = OTHER; note = 2'-Omethyluridine
  modified_base 51: mod_base = OTHER; note = 2'-Omethylguanosine
  modified_base 56: mod_base = OTHER; note = 2'-Omethylcytosine phosphorothiorate
  modified_base 57: mod_base = OTHER; note = 2'-Omethylguanosine
  modified_base 58: mod_base = OTHER; note = 2'-fluoroadenosine
  modified_base 59: mod_base = OTHER; note = 2'-Omethylguanosine
  modified_base 61: mod_base = OTHER; note = Cytosine phosphorothiorate
  modified_base 62: mod_base = OTHER; note = Cytosine phosphorothiorate
  modified_base 63: mod_base = OTHER; note = 2'-Omethylcytosine
  modified_base 64: mod_base = OTHER; note = 2'-fluoroguanosine
  modified_base 67: mod_base = OTHER; note = Guanosine phosphorothiorate
  modified_base 69: mod_base = OTHER; note = 2'-Omethyladenosine
  modified_base 70: mod_base = OTHER; note = 2'-Omethylguanosine
  modified_base 72: mod_base = OTHER; note = Cytosine phosphorothiorate
  modified_base 73: mod_base = OTHER; note = 2'-Omethylguanosine
  modified_base 74: mod_base = OTHER; note = Cytosine phosphorothiorate

SEQ ID NO: 5547 - RNA, 76 nt, synthetic construct; identical to SEQ ID NO: 625
  source 1..76: mol_type = other RNA
  modified_base 1: mod_base = OTHER; note = Guanosine phosphorothiorate
  modified_base 3: mod_base = OTHER; note = Cytosine phosphorothiorate
  modified_base 4: mod_base = OTHER; note = 2'-Omethyluridine phosphorothiorate
  modified_base 5: mod_base = OTHER; note = 2'-fluorocytosine
  modified_base 7: mod_base = OTHER; note = Guanosine phosphorothiorate
  modified_base 10: mod_base = OTHER; note = 2'-fluoroguanosine
  modified_base 14: mod_base = OTHER; note = 2'-fluoroadenosine
  modified_base 15: mod_base = OTHER; note = 2'-Omethyladenosine
  modified_base 17: mod_base = OTHER; note = 2'-Omethylguanosine
  modified_base 20: mod_base = OTHER; note = 2'-Omethyluridine
  modified_base 26: mod_base = OTHER; note = Adenosine phosphorothiorate
  modified_base 27: mod_base = OTHER; note = 2'-Omethyluridine phosphorothiorate
  modified_base 29: mod_base = OTHER; note = 2'-fluoroguanosine
  modified_base 32: mod_base = OTHER; note = 2'-fluorocytosine
  modified_base 33: mod_base = OTHER; note = Uridine phosphorothiorate
  modified_base 34: mod_base = OTHER; note = 2'-fluorouridine
  modified_base 38: mod_base = OTHER; note = 2'-Omethyladenosine phosphorothiorate
  modified_base 39: mod_base = OTHER; note = 2'-Omethyluridine
  modified_base 40: mod_base = OTHER; note = 2'-Omethyluridine
  modified_base 42: mod_base = OTHER; note = 2'-fluoroadenosine
  modified_base 44: mod_base = OTHER; note = 2'-fluoroadenosine
  modified_base 46: mod_base = OTHER; note = 2'-Omethylguanosine
  modified_base 49: mod_base = OTHER; note = 2'-fluorocytosine
  modified_base 53: mod_base = OTHER; note = 2'-Omethylguanosine
  modified_base 58: mod_base = OTHER; note = 2'-fluoroadenosine phosphorothiorate
  modified_base 59: mod_base = OTHER; note = 2'-Omethylguanosine
  modified_base 61: mod_base = OTHER; note = Cytosine phosphorothiorate
  modified_base 62: mod_base = OTHER; note = Cytosine phosphorothiorate
  modified_base 66: mod_base = OTHER; note = Cytosine phosphorothiorate
  modified_base 67: mod_base = OTHER; note = 2'-fluoroguanosine phosphorothiorate
  modified_base 69: mod_base = OTHER; note = 2'-fluoroadenosine
  modified_base 75: mod_base = OTHER; note = 2'-Omethylcytosine
  modified_base 76: mod_base = OTHER; note = 2'-Omethyladenosine

SEQ ID NO: 5548 - RNA, 86 nt, synthetic construct
  source 1..86: mol_type = other RNA
accaggatggccgagtggttaaggcgttggacttcagatccaatggacgtgtgtccgcgtgggttcgaaccccactcctggtacca

SEQ ID NO: 5549 - RNA, 86 nt, synthetic construct; identical to SEQ ID NO: 3290
  source 1..86: mol_type = other RNA
  modified_base 1: mod_base = OTHER; note = 2'-Omethyladenosine
  modified_base 35: mod_base = OTHER; note = Cytosine phosphorothiorate
  modified_base 37: mod_base = OTHER; note = Guanosine phosphorothiorate
  modified_base 83: mod_base = OTHER; note = 2'-Omethyladenosine

SEQ ID NO: 5550 - RNA, 75 nt, synthetic construct; identical to SEQ ID NO: 3336
  source 1..75: mol_type = other RNA
  modified_base 1: mod_base = OTHER; note = 2'-fluorocytosine phosphorothiorate
  modified_base 2: mod_base = OTHER; note = 2'-Omethylcytosine phosphorothiorate
  modified_base 3: mod_base = OTHER; note = Uridine phosphorothiorate
  modified_base 10: mod_base = OTHER; note = 2'-Omethylcytosine phosphorothiorate
  modified_base 17: mod_base = OTHER; note = 2'-fluoroguanosine
  modified_base 18: mod_base = OTHER; note = 2'-fluoroguanosine
  modified_base 22: mod_base = OTHER; note = 2'-Omethyladenosine
  modified_base 26: mod_base = OTHER; note = Uridine phosphorothiorate
  modified_base 27: mod_base = OTHER; note = 2'-Omethylcytosine phosphorothiorate
  modified_base 34: mod_base = OTHER; note = Uridine phosphorothiorate
  modified_base 39: mod_base = OTHER; note = 2'-fluorocytosine
  modified_base 40: mod_base = OTHER; note = 2'-fluorouridine
  modified_base 46: mod_base = OTHER; note = 2'-fluorouridine
  modified_base 47: mod_base = OTHER; note = 2'-fluorocytosine
  modified_base 56: mod_base = OTHER; note = 2'-fluoroadenosine
  modified_base 57: mod_base = OTHER; note = 2'-Omethyladenosine phosphorothiorate
  modified_base 62: mod_base = OTHER; note = 2'-fluorocytosine phosphorothiorate
  modified_base 63: mod_base = OTHER; note = Uridine phosphorothiorate
  modified_base 72: mod_base = OTHER; note = 2'-Omethylguanosine
  modified_base 73: mod_base = OTHER; note = Cytosine phosphorothiorate
  modified_base 74: mod_base = OTHER; note = Cytosine phosphorothiorate

SEQ ID NO: 5551 - RNA, 76 nt, synthetic construct; identical to SEQ ID NO: 625
  source 1..76: mol_type = other RNA
  modified_base 1: mod_base = OTHER; note = 2'-Omethylguanosine phosphorothiorate
  modified_base 2: mod_base = OTHER; note = 2'-Omethylguanosine
  modified_base 12: mod_base = OTHER; note = 2'-Omethylguanosine
  modified_base 13: mod_base = OTHER; note = 2'-Omethylcytosine
  modified_base 33: mod_base = OTHER; note = 2'-fluorouridine
  modified_base 35: mod_base = OTHER; note = Cytosine phosphorothiorate
  modified_base 37: mod_base = OTHER; note = Adenosine phosphorothiorate
  modified_base 52: mod_base = OTHER; note = 2'-Omethylguanosine
  modified_base 62: mod_base = OTHER; note = 2'-Omethylcytosine
  modified_base 68: mod_base = OTHER; note = 2'-Omethylguanosine
  modified_base 73: mod_base = OTHER; note = 2'-Omethylguanosine
  modified_base 75: mod_base = OTHER; note = 2'-fluorocytosine phosphorothiorate
  modified_base 76: mod_base = OTHER; note = 2'-fluoroadenosine

SEQ ID NO: 5552 - DNA, 76 bp, synthetic construct; identical to SEQ ID NO: 1924
  source 1..76: mol_type = other DNA
  modified_base 1: mod_base = OTHER; note = 2'-Omethylguanosine phosphorothiorate
  modified_base 2: mod_base = OTHER; note = 2'-Omethylguanosine phosphorothiorate
  modified_base 14: mod_base = OTHER; note = 2'-Omethyladenosine phosphorothiorate
  modified_base 17: mod_base = OTHER; note = Guanosine phosphorothiorate
  modified_base 18: mod_base = OTHER; note = 2'-fluoroguanosine
  modified_base 20: mod_base = OTHER; note = 2'-O-(2-Methoxyethyl) thymine phosphorothiorate
  modified_base 24: mod_base = OTHER; note = 2'-fluoroguanosine
  modified_base 33: mod_base = OTHER; note = Uridine phosphorothiorate
  modified_base 34: mod_base = OTHER; note = deoxyuridine phosphorothiorate
  modified_base 35: mod_base = OTHER; note = 2'-O-(2-Methoxyethyl) 5-methylcytosine phosphorothiorate
  modified_base 36: mod_base = OTHER; note = 2'-O-(2-Methoxyethyl) adenosine
  modified_base 37: mod_base = OTHER; note = Adenosine phosphorothiorate
  modified_base 43: mod_base = OTHER; note = Adenosine phosphorothiorate
  modified_base 44: mod_base = OTHER; note = 2'-O-(2-Methoxyethyl) adenosine phosphorothiorate
  modified_base 45: mod_base = OTHER; note = 2'-O-(2-Methoxyethyl) guanosine phosphorothiorate
  modified_base 47: mod_base = OTHER; note = Uridine phosphorothiorate
  modified_base 48: mod_base = OTHER; note = 2'-O-(2-Methoxyethyl) thymine phosphorothiorate
  modified_base 53: mod_base = OTHER; note = 2'-Omethylguanosine
  modified_base 55: mod_base = OTHER; note = Uridine phosphorothiorate
  modified_base 57: mod_base = OTHER; note = 2'-fluoroguanosine
  modified_base 58: mod_base = OTHER; note = Adenosine phosphorothiorate
  modified_base 60: mod_base = OTHER; note = Uridine phosphorothiorate
  modified_base 61: mod_base = OTHER; note = 2'-Omethylcytosine
  modified_base 62: mod_base = OTHER; note = Cytosine phosphorothiorate
  modified_base 63: mod_base = OTHER; note = 2'-O-(2-Methoxyethyl) 5-methylcytosine
  modified_base 68: mod_base = OTHER; note = Guanosine phosphorothiorate
  modified_base 70: mod_base = OTHER; note = 2'-Omethylguanosine phosphorothiorate
  modified_base 71: mod_base = OTHER; note = Uridine phosphorothiorate
  modified_base 72: mod_base = OTHER; note = 2'-Omethylcytosine
  modified_base 75: mod_base = OTHER; note = Cytosine phosphorothiorate
  modified_base 76: mod_base = OTHER; note = 2'-Omethyladenosine
  misc_feature 1..14: note = RNA
  misc_feature 15: note = DNA
  misc_feature 16..24: note = RNA
  misc_feature 25: note = DNA
  misc_feature 26..33: note = RNA
  misc_feature 34: note = DNA
  misc_feature 35..37: note = RNA
  misc_feature 38: note = DNA
  misc_feature 39..49: note = RNA
  misc_feature 50: note = DNA
  misc_feature 51..76: note = RNA

SEQ ID NO: 5553 - RNA, 76 nt, synthetic construct; identical to SEQ ID NO: 625
  source 1..76: mol_type = other RNA
  modified_base 1: mod_base = OTHER; note = 2'-Omethylguanosine
  modified_base 33: mod_base = OTHER; note = 2'-O-(2-Methoxyethyl) thymine
  modified_base 35: mod_base = OTHER; note = Cytosine phosphorothiorate
  modified_base 37: mod_base = OTHER; note = Adenosine phosphorothiorate
  modified_base 38: mod_base = OTHER; note = Adenosine phosphorothiorate
  modified_base 73: mod_base = OTHER; note = 2'-Omethylguanosine

SEQ ID NO: 5554 - RNA, 85 nt, synthetic construct; identical to SEQ ID NO: 3288
  source 1..85: mol_type = other RNA
  modified_base 1: mod_base = OTHER; note = 2'-Omethylcytosine
  modified_base 11: mod_base = OTHER; note = 2'-Omethylcytosine
  modified_base 20: mod_base = OTHER; note = 2'-Omethyladenosine
  modified_base 23: mod_base = OTHER; note = 2'-fluoroguanosine
  modified_base 27: mod_base = OTHER; note = 2'-fluorouridine
  modified_base 29: mod_base = OTHER; note = 2'-fluoroguanosine
  modified_base 33: mod_base = OTHER; note = 2'-fluorouridine
  modified_base 40: mod_base = OTHER; note = Cytosine phosphorothiorate
  modified_base 49: mod_base = OTHER; note = 2'-fluorouridine
  modified_base 50: mod_base = OTHER; note = 2'-fluoroadenosine phosphorothiorate
  modified_base 51: mod_base = OTHER; note = 2'-Omethyluridine
  modified_base 53: mod_base = OTHER; note = 2'-fluorouridine phosphorothiorate
  modified_base 55: mod_base = OTHER; note = 2'-Omethylcytosine
  modified_base 57: mod_base = OTHER; note = 2'-Omethylcytosine
  modified_base 65: mod_base = OTHER; note = Cytosine phosphorothiorate
  modified_base 73: mod_base = OTHER; note = 2'-fluoroadenosine
  modified_base 75: mod_base = OTHER; note = Uridine phosphorothiorate
  modified_base 77: mod_base = OTHER; note = 2'-fluorocytosine
  modified_base 84: mod_base = OTHER; note = 2'-Omethylcytosine

SEQ ID NO: 5555 - RNA, 86 nt, synthetic construct; identical to SEQ ID NO: 3290
  source 1..86: mol_type = other RNA
  modified_base 39: mod_base = OTHER; note = 2'-Omethyluridine

SEQ ID NO: 5556 - RNA, 76 nt, synthetic construct; identical to SEQ ID NO: 3325
  source 1..76: mol_type = other RNA
  modified_base 1: mod_base = OTHER; note = 2'-Omethyluridine
  modified_base 19: mod_base = OTHER; note = 2'-Omethyladenosine
  modified_base 20: mod_base = OTHER; note = 2'-Omethyluridine
  modified_base 21: mod_base = OTHER; note = 2'-fluoroadenosine
  modified_base 22: mod_base = OTHER; note = 2'-Omethylguanosine
  modified_base 40: mod_base = OTHER; note = 2'-fluorouridine
  modified_base 41: mod_base = OTHER; note = 2'-Omethylcytosine
  modified_base 42: mod_base = OTHER; note = 2'-Omethyladenosine
  modified_base 43: mod_base = OTHER; note = 2'-Omethyladenosine
  modified_base 73: mod_base = OTHER; note = 2'-Omethylguanosine

SEQ ID NO: 5557 - RNA, 76 nt, synthetic construct; identical to SEQ ID NO: 3289
  source 1..76: mol_type = other RNA
  modified_base 1: mod_base = OTHER; note = 2'-Omethylguanosine phosphorothiorate
  modified_base 2: mod_base = OTHER; note = 2'-Omethylcytosine phosphorothiorate
  modified_base 38: mod_base = OTHER; note = Adenosine phosphorothiorate
  modified_base 39: mod_base = OTHER; note = Uridine phosphorothiorate
  modified_base 40: mod_base = OTHER; note = 2'-fluorocytosine
  modified_base 52: mod_base = OTHER; note = 2'-fluoroguanosine
  modified_base 74: mod_base = OTHER; note = Cytosine phosphorothiorate
  modified_base 75: mod_base = OTHER; note = 2'-Omethylcytosine phosphorothiorate
  modified_base 76: mod_base = OTHER; note = 2'-Omethyladenosine

SEQ ID NO: 5558 - RNA, 85 nt, synthetic construct; identical to SEQ ID NO: 3288
  source 1..85: mol_type = other RNA
  modified_base 1: mod_base = OTHER; note = 2'-Omethylcytosine
  modified_base 6: mod_base = OTHER; note = Adenosine phosphorothiorate
  modified_base 11: mod_base = OTHER; note = Cytosine phosphorothiorate
  modified_base 45: mod_base = OTHER; note = Guanosine phosphorothiorate
  modified_base 47: mod_base = OTHER; note = Cytosine phosphorothiorate
  modified_base 84: mod_base = OTHER; note = 2'-Omethylcytosine phosphorothiorate

SEQ ID NO: 5559 - RNA, 76 nt, synthetic construct; identical to SEQ ID NO: 625
  source 1..76: mol_type = other RNA
  modified_base 1: mod_base = OTHER; note = 2'-Omethylguanosine phosphorothiorate
  modified_base 2: mod_base = OTHER; note = 2'-Omethylguanosine phosphorothiorate
  modified_base 3: mod_base = OTHER; note = 2'-Omethylcytosine phosphorothiorate
  modified_base 4: mod_base = OTHER; note = 2'-Omethyluridine phosphorothiorate
  modified_base 5: mod_base = OTHER; note = 2'-Omethylcytosine phosphorothiorate
  modified_base 6: mod_base = OTHER; note = 2'-Omethylcytosine phosphorothiorate
  modified_base 10: mod_base = OTHER; note = 2'-Omethylguanosine
  modified_base 11: mod_base = OTHER; note = 2'-Omethylcytosine
  modified_base 12: mod_base = OTHER; note = 2'-Omethylguanosine
  modified_base 13: mod_base = OTHER; note = 2'-Omethylcytosine
  modified_base 22: mod_base = OTHER; note = 2'-Omethylguanosine
  modified_base 23: mod_base = OTHER; note = 2'-Omethylcytosine
  modified_base 24: mod_base = OTHER; note = 2'-Omethylguanosine
  modified_base 25: mod_base = OTHER; note = 2'-Omethylcytosine
  modified_base 44: mod_base = OTHER; note = 2'-Omethyladenosine
  modified_base 45: mod_base = OTHER; note = 2'-Omethylguanosine
  modified_base 46: mod_base = OTHER; note = 2'-Omethylguanosine
  modified_base 54: mod_base = OTHER; note = Uridine phosphorothiorate
  modified_base 55: mod_base = OTHER; note = Uridine phosphorothiorate
  modified_base 56: mod_base = OTHER; note = Cytosine phosphorothiorate
  modified_base 57: mod_base = OTHER; note = Guanosine phosphorothiorate
  modified_base 61: mod_base = OTHER; note = 2'-Omethylcytosine
  modified_base 62: mod_base = OTHER; note = 2'-Omethylcytosine
  modified_base 63: mod_base = OTHER; note = 2'-Omethylcytosine
  modified_base 64: mod_base = OTHER; note = 2'-Omethylguanosine
  modified_base 65: mod_base = OTHER; note = 2'-Omethylguanosine
  modified_base 66: mod_base = OTHER; note = 2'-Omethylcytosine
  modified_base 67: mod_base = OTHER; note = 2'-Omethylguanosine
  modified_base 68: mod_base = OTHER; note = 2'-Omethylguanosine
  modified_base 69: mod_base = OTHER; note = 2'-Omethyladenosine

SEQ ID NO: 5560 - RNA, 75 nt, synthetic construct; identical to SEQ ID NO: 1045
  source 1..75: mol_type = other RNA
  modified_base 1: mod_base = OTHER; note = 2'-Omethylguanosine phosphorothiorate
  modified_base 2: mod_base = OTHER; note = 2'-fluoroguanosine phosphorothiorate
  modified_base 19: mod_base = OTHER; note = 2'-Omethyluridine phosphorothiorate
  modified_base 21: mod_base = OTHER; note = 2'-fluoroadenosine
  modified_base 31: mod_base = OTHER; note = 2'-Omethyladenosine
  modified_base 32: mod_base = OTHER; note = 2'-fluorocytosine
  modified_base 38: mod_base = OTHER; note = 2'-fluoroadenosine phosphorothiorate
  modified_base 41: mod_base = OTHER; note = Cytosine phosphorothiorate
  modified_base 44: mod_base = OTHER; note = 2'-fluorocytosine
  modified_base 49: mod_base = OTHER; note = Cytosine phosphorothiorate
  modified_base 56: mod_base = OTHER; note = 2'-Omethylguanosine phosphorothiorate
  modified_base 60: mod_base = OTHER; note = 2'-fluorocytosine phosphorothiorate
  modified_base 62: mod_base = OTHER; note = Cytosine phosphorothiorate
  modified_base 63: mod_base = OTHER; note = 2'-fluoroguanosine
  modified_base 64: mod_base = OTHER; note = 2'-fluoroguanosine
  modified_base 65: mod_base = OTHER; note = Uridine phosphorothiorate

SEQ ID NO: 5561 - RNA, 76 nt, synthetic construct; identical to SEQ ID NO: 3295
  source 1..76: mol_type = other RNA
  modified_base 1: mod_base = OTHER; note = 2'-Omethylcytosine phosphorothiorate
  modified_base 2: mod_base = OTHER; note = 2'-Omethylcytosine
  modified_base 10: mod_base = OTHER; note = 2'-Omethylguanosine
  modified_base 17: mod_base = OTHER; note = 2'-fluorouridine phosphorothiorate
  modified_base 25: mod_base = OTHER; note = 2'-fluorocytosine phosphorothiorate
  modified_base 30: mod_base = OTHER; note = 2'-fluoroguanosine phosphorothiorate
  modified_base 48: mod_base = OTHER; note = 2'-Omethylcytosine phosphorothiorate
  modified_base 76: mod_base = OTHER; note = 2'-fluoroadenosine

SEQ ID NO: 5562 - RNA, 86 nt, synthetic construct; identical to SEQ ID NO: 3290
  source 1..86: mol_type = other RNA
  modified_base 1: mod_base = OTHER; note = 2'-Omethyladenosine phosphorothiorate
  modified_base 2: mod_base = OTHER; note = 2'-Omethylcytosine
  modified_base 3: mod_base = OTHER; note = 2'-Omethylcytosine
  modified_base 4: mod_base = OTHER; note = 2'-Omethyladenosine
  modified_base 5: mod_base = OTHER; note = 2'-Omethylguanosine
  modified_base 6: mod_base = OTHER; note = 2'-Omethylguanosine
  modified_base 43: mod_base = OTHER; note = 2'-Omethyladenosine
  modified_base 44: mod_base = OTHER; note = 2'-Omethyluridine
  modified_base 57: mod_base = OTHER; note = 2'-fluoroguanosine
  modified_base 58: mod_base = OTHER; note = 2'-fluorocytosine
  modified_base 83: mod_base = OTHER; note = 2'-Omethyladenosine

SEQ ID NO: 5563 - RNA, 76 nt, synthetic construct; identical to SEQ ID NO: 625
  source 1..76: mol_type = other RNA
  modified_base 1: mod_base = OTHER; note = 2'-Omethylguanosine
  modified_base 13: mod_base = OTHER; note = 2'-Omethylcytosine
  modified_base 17: mod_base = OTHER; note = Guanosine phosphorothiorate
  modified_base 18: mod_base = OTHER; note = 2'-Omethylguanosine
  modified_base 19: mod_base = OTHER; note = Adenosine phosphorothiorate
  modified_base 20: mod_base = OTHER; note = 2'-Omethyluridine
  modified_base 25: mod_base = OTHER; note = 2'-Omethylcytosine
  modified_base 29: mod_base = OTHER; note = 2'-Omethylguanosine
  modified_base 33: mod_base = OTHER; note = 2'-fluorouridine
  modified_base 35: mod_base = OTHER; note = Cytosine phosphorothiorate
  modified_base 37: mod_base = OTHER; note = Adenosine phosphorothiorate
  modified_base 38: mod_base = OTHER; note = Adenosine phosphorothiorate
  modified_base 43: mod_base = OTHER; note = 2'-Omethyladenosine
  modified_base 44: mod_base = OTHER; note = 2'-fluoroadenosine
  modified_base 46: mod_base = OTHER; note = Guanosine phosphorothiorate
  modified_base 50: mod_base = OTHER; note = 2'-Omethylcytosine
  modified_base 52: mod_base = OTHER; note = 2'-Omethylguanosine
  modified_base 54: mod_base = OTHER; note = Uridine phosphorothiorate
  modified_base 55: mod_base = OTHER; note = Uridine phosphorothiorate
  modified_base 56: mod_base = OTHER; note = 2'-Omethylcytosine
  modified_base 57: mod_base = OTHER; note = Guanosine phosphorothiorate
  modified_base 62: mod_base = OTHER; note = 2'-Omethylcytosine
  modified_base 63: mod_base = OTHER; note = 2'-fluorocytosine
  modified_base 65: mod_base = OTHER; note = 2'-Omethylguanosine
  modified_base 71: mod_base = OTHER; note = 2'-Omethyluridine
  modified_base 73: mod_base = OTHER; note = 2'-Omethylguanosine

SEQ ID NO: 5564 - RNA, 85 nt, synthetic construct; identical to SEQ ID NO: 3297
  source 1..85: mol_type = other RNA
  modified_base 1: mod_base = OTHER; note = 2'-Omethylguanosine phosphorothiorate
  modified_base 2: mod_base = OTHER; note = 2'-fluorocytosine phosphorothiorate
  modified_base 19: mod_base = OTHER; note = 2'-fluorouridine
  modified_base 22: mod_base = OTHER; note = Adenosine phosphorothiorate
  modified_base 49: mod_base = OTHER; note = 2'-Omethyluridine
  modified_base 60: mod_base = OTHER; note = Adenosine phosphorothiorate

SEQ ID NO: 5565 - RNA, 76 nt, synthetic construct; identical to SEQ ID NO: 625
  source 1..76: mol_type = other RNA
  modified_base 1: mod_base = OTHER; note = 2'-fluoroguanosine
  modified_base 5: mod_base = OTHER; note = 2'-fluorocytosine
  modified_base 8: mod_base = OTHER; note = Uridine phosphorothiorate
  modified_base 9: mod_base = OTHER; note = Guanosine phosphorothiorate
  modified_base 10: mod_base = OTHER; note = 2'-Omethylguanosine
  modified_base 11: mod_base = OTHER; note = Cytosine phosphorothiorate
  modified_base 12: mod_base = OTHER; note = 2'-Omethylguanosine
  modified_base 14: mod_base = OTHER; note = 2'-Omethyladenosine
  modified_base 18: mod_base = OTHER; note = 2'-fluoroguanosine
  modified_base 20: mod_base = OTHER; note = Uridine phosphorothiorate
  modified_base 24: mod_base = OTHER; note = 2'-Omethylguanosine
  modified_base 25: mod_base = OTHER; note = 2'-fluorocytosine
  modified_base 27: mod_base = OTHER; note = 2'-Omethyluridine phosphorothiorate
  modified_base 29: mod_base = OTHER; note = 2'-Omethylguanosine
  modified_base 32: mod_base = OTHER; note = 2'-fluorocytosine
  modified_base 38: mod_base = OTHER; note = 2'-Omethyladenosine
  modified_base 42: mod_base = OTHER; note = Adenosine phosphorothiorate
  modified_base 44: mod_base = OTHER; note = 2'-Omethyladenosine
  modified_base 45: mod_base = OTHER; note = 2'-fluoroguanosine phosphorothiorate
  modified_base 46: mod_base = OTHER; note = 2'-Omethylguanosine
  modified_base 47: mod_base = OTHER; note = 2'-fluorouridine
  modified_base 48: mod_base = OTHER; note = 2'-fluorouridine
  modified_base 53: mod_base = OTHER; note = Guanosine phosphorothiorate
  modified_base 60: mod_base = OTHER; note = 2'-Omethyluridine
  modified_base 61: mod_base = OTHER; note = Cytosine phosphorothiorate
  modified_base 63: mod_base = OTHER; note = 2'-fluorocytosine
  modified_base 66: mod_base = OTHER; note = 2'-fluorocytosine
  modified_base 68: mod_base = OTHER; note = 2'-fluoroguanosine
  modified_base 71: mod_base = OTHER; note = 2'-fluorouridine phosphorothiorate
  modified_base 73: mod_base = OTHER; note = Guanosine phosphorothiorate
  modified_base 74: mod_base = OTHER; note = 2'-fluorocytosine phosphorothiorate
  modified_base 75: mod_base = OTHER; note = Cytosine phosphorothiorate

SEQ ID NO: 5566 - RNA, 76 nt, synthetic construct; identical to SEQ ID NO: 3318
  source 1..76: mol_type = other RNA
  modified_base 1: mod_base = OTHER; note = 2'-Omethylcytosine
  modified_base 2: mod_base = OTHER; note = 2'-Omethylcytosine
  modified_base 3: mod_base = OTHER; note = 2'-Omethyluridine
  modified_base 4: mod_base = OTHER; note = 2'-Omethyluridine
  modified_base 5: mod_base = OTHER; note = 2'-Omethylcytosine
  modified_base 6: mod_base = OTHER; note = 2'-Omethylguanosine
  modified_base 10: mod_base = OTHER; note = 2'-Omethylguanosine
  modified_base 11: mod_base = OTHER; note = 2'-Omethylcytosine
  modified_base 12: mod_base = OTHER; note = 2'-Omethyluridine
  modified_base 13: mod_base = OTHER; note = 2'-Omethylcytosine
  modified_base 14: mod_base = OTHER; note = 2'-Omethyladenosine
  modified_base 15: mod_base = OTHER; note = 2'-fluoroguanosine
  modified_base 16: mod_base = OTHER; note = 2'-Omethyluridine
  modified_base 18: mod_base = OTHER; note = 2'-Omethylguanosine
  modified_base 19: mod_base = OTHER; note = 2'-Omethylguanosine
  modified_base 20: mod_base = OTHER; note = 2'-fluorouridine
  modified_base 22: mod_base = OTHER; note = 2'-Omethylguanosine
  modified_base 23: mod_base = OTHER; note = 2'-Omethyladenosine
  modified_base 24: mod_base = OTHER; note = 2'-Omethylguanosine
  modified_base 25: mod_base = OTHER; note = 2'-Omethylcytosine
  modified_base 33: mod_base = OTHER; note = 2'-fluorouridine
  modified_base 35: mod_base = OTHER; note = Uridine phosphorothiorate
  modified_base 37: mod_base = OTHER; note = Guanosine phosphorothiorate
  modified_base 38: mod_base = OTHER; note = Adenosine phosphorothiorate
  modified_base 41: mod_base = OTHER; note = 2'-Omethylcytosine
  modified_base 42: mod_base = OTHER; note = 2'-Omethyluridine
  modified_base 43: mod_base = OTHER; note = 2'-Omethyluridine
  modified_base 44: mod_base = OTHER; note = 2'-Omethyladenosine
  modified_base 49: mod_base = OTHER; note = 2'-Omethylguanosine
  modified_base 50: mod_base = OTHER; note = 2'-Omethylcytosine
  modified_base 52: mod_base = OTHER; note = 2'-Omethylguanosine
  modified_base 54: mod_base = OTHER; note = 2'-Omethyluridine
  modified_base 55: mod_base = OTHER; note = Uridine phosphorothiorate
  modified_base 56: mod_base = OTHER; note = 2'-Omethylcytosine
  modified_base 57: mod_base = OTHER; note = 2'-fluoroguanosine
  modified_base 59: mod_base = OTHER; note = 2'-Omethyladenosine
  modified_base 61: mod_base = OTHER; note = 2'-Omethylcytosine
  modified_base 65: mod_base = OTHER; note = 2'-Omethylcytosine
  modified_base 73: mod_base = OTHER; note = 2'-Omethyladenosine

SEQ ID NO: 5567 - RNA, 76 nt, synthetic construct; identical to SEQ ID NO: 3318
  source 1..76: mol_type = other RNA
  modified_base 22: mod_base = OTHER; note = 2'-Omethylguanosine
  modified_base 23: mod_base = OTHER; note = 2'-Omethyladenosine
  modified_base 24: mod_base = OTHER; note = 2'-Omethylguanosine
  modified_base 25: mod_base = OTHER; note = 2'-Omethylcytosine
  modified_base 49: mod_base = OTHER; note = 2'-Omethylguanosine
  modified_base 50: mod_base = OTHER; note = 2'-Omethylcytosine
  modified_base 51: mod_base = OTHER; note = 2'-Omethyluridine
  modified_base 52: mod_base = OTHER; note = 2'-Omethylguanosine
  modified_base 53: mod_base = OTHER; note = 2'-Omethylguanosine
  modified_base 73: mod_base = OTHER; note = 2'-Omethyladenosine

SEQ ID NO: 5568 - RNA, 76 nt, synthetic construct; identical to SEQ ID NO: 625
  source 1..76: mol_type = other RNA
  modified_base 1: mod_base = OTHER; note = 2'-Omethylguanosine
  modified_base 10: mod_base = OTHER; note = 2'-Omethylguanosine
  modified_base 13: mod_base = OTHER; note = 2'-Omethylcytosine
  modified_base 17: mod_base = OTHER; note = Guanosine phosphorothiorate
  modified_base 18: mod_base = OTHER; note = 2'-Omethylguanosine
  modified_base 19: mod_base = OTHER; note = Adenosine phosphorothiorate
  modified_base 20: mod_base = OTHER; note = 2'-Omethyluridine
  modified_base 25: mod_base = OTHER; note = 2'-Omethylcytosine
  modified_base 29: mod_base = OTHER; note = 2'-Omethylguanosine
  modified_base 33: mod_base = OTHER; note = 2'-fluorouridine
  modified_base 35: mod_base = OTHER; note = Cytosine phosphorothiorate
  modified_base 37: mod_base = OTHER; note = Adenosine phosphorothiorate
  modified_base 38: mod_base = OTHER; note = Adenosine phosphorothiorate
  modified_base 41: mod_base = OTHER; note = 2'-Omethylcytosine
  modified_base 43: mod_base = OTHER; note = 2'-Omethyladenosine
  modified_base 44: mod_base = OTHER; note = 2'-fluoroadenosine
  modified_base 50: mod_base = OTHER; note = 2'-Omethylcytosine
  modified_base 52: mod_base = OTHER; note = 2'-Omethylguanosine
  modified_base 54: mod_base = OTHER; note = Uridine phosphorothiorate
  modified_base 55: mod_base = OTHER; note = Uridine phosphorothiorate
  modified_base 56: mod_base = OTHER; note = 2'-Omethylcytosine
  modified_base 57: mod_base = OTHER; note = Guanosine phosphorothiorate
  modified_base 62: mod_base = OTHER; note = 2'-Omethylcytosine
  modified_base 63: mod_base = OTHER; note = 2'-fluorocytosine
  modified_base 65: mod_base = OTHER; note = 2'-Omethylguanosine
  modified_base 71: mod_base = OTHER; note = 2'-Omethyluridine
  modified_base 73: mod_base = OTHER; note = 2'-Omethylguanosine

SEQ ID NO: 5569 - RNA, 76 nt, synthetic construct; identical to SEQ ID NO: 625
  source 1..76: mol_type = other RNA
  modified_base 1: mod_base = OTHER; note = 2'-Omethylguanosine
  modified_base 2: mod_base = OTHER; note = 2'-Omethylguanosine
  modified_base 13: mod_base = OTHER; note = 2'-Omethylcytosine
  modified_base 33: mod_base = OTHER; note = 2'-fluorouridine
  modified_base 35: mod_base = OTHER; note = Cytosine phosphorothiorate
  modified_base 37: mod_base = OTHER; note = Adenosine phosphorothiorate
  modified_base 52: mod_base = OTHER; note = 2'-Omethylguanosine
  modified_base 62: mod_base = OTHER; note = 2'-Omethylcytosine
  modified_base 63: mod_base = OTHER; note = 2'-fluorocytosine
  modified_base 73: mod_base = OTHER; note = 2'-Omethylguanosine
  modified_base 75: mod_base = OTHER; note = 2'-fluorocytosine phosphorothiorate

SEQ ID NO: 5570 - RNA, 76 nt, synthetic construct; identical to SEQ ID NO: 3318
  source 1..76: mol_type = other RNA
  modified_base 1: mod_base = OTHER; note = 2'-Omethylcytosine
  modified_base 10: mod_base = OTHER; note = 2'-Omethylguanosine
  modified_base 11: mod_base = OTHER; note = 2'-Omethylcytosine
  modified_base 12: mod_base = OTHER; note = 2'-Omethyluridine
  modified_base 13: mod_base = OTHER; note = 2'-Omethylcytosine
  modified_base 18: mod_base = OTHER; note = 2'-Omethylguanosine
  modified_base 19: mod_base = OTHER; note = 2'-Omethylguanosine
  modified_base 25: mod_base = OTHER; note = 2'-Omethylcytosine
  modified_base 33: mod_base = OTHER; note = Uridine phosphorothiorate
  modified_base 34: mod_base = OTHER; note = 2'-Omethylcytosine
  modified_base 35: mod_base = OTHER; note = Uridine phosphorothiorate
  modified_base 37: mod_base = OTHER; note = Guanosine phosphorothiorate
  modified_base 38: mod_base = OTHER; note = Adenosine phosphorothiorate
  modified_base 41: mod_base = OTHER; note = 2'-Omethylcytosine
  modified_base 42: mod_base = OTHER; note = 2'-Omethyluridine
  modified_base 43: mod_base = OTHER; note = 2'-Omethyluridine
  modified_base 44: mod_base = OTHER; note = 2'-Omethyladenosine
  modified_base 49: mod_base = OTHER; note = 2'-Omethylguanosine
  modified_base 50: mod_base = OTHER; note = 2'-Omethylcytosine
  modified_base 52: mod_base = OTHER; note = 2'-Omethylguanosine
  modified_base 54: mod_base = OTHER; note = Uridine phosphorothiorate
  modified_base 55: mod_base = OTHER; note = Uridine phosphorothiorate
  modified_base 61: mod_base = OTHER; note = 2'-Omethylcytosine
  modified_base 65: mod_base = OTHER; note = 2'-Omethylcytosine
  modified_base 73: mod_base = OTHER; note = 2'-Omethyladenosine

SEQ ID NO: 5571 - RNA, 76 nt, synthetic construct; identical to SEQ ID NO: 625
  source 1..76: mol_type = other RNA
  modified_base 1: mod_base = OTHER; note = 2'-Omethylguanosine phosphorothiorate
  modified_base 2: mod_base = OTHER; note = 2'-Omethylguanosine phosphorothiorate
  modified_base 3: mod_base = OTHER; note = 2'-Omethylcytosine phosphorothiorate
  modified_base 4: mod_base = OTHER; note = 2'-Omethyluridine phosphorothiorate
  modified_base 5: mod_base = OTHER; note = 2'-Omethylcytosine phosphorothiorate
  modified_base 6: mod_base = OTHER; note = 2'-Omethylcytosine phosphorothiorate
  modified_base 10: mod_base = OTHER; note = 2'-Omethylguanosine
  modified_base 11: mod_base = OTHER; note = 2'-Omethylcytosine
  modified_base 12: mod_base = OTHER; note = 2'-Omethylguanosine
  modified_base 13: mod_base = OTHER; note = 2'-Omethylcytosine
  modified_base 14: mod_base = OTHER; note = 2'-Omethyladenosine
  modified_base 15: mod_base = OTHER; note = 2'-Omethyladenosine
  modified_base 16: mod_base = OTHER; note = 2'-Omethyluridine
  modified_base 17: mod_base = OTHER; note = 2'-Omethylguanosine
  modified_base 18: mod_base = OTHER; note = 2'-Omethylguanosine
  modified_base 19: mod_base = OTHER; note = 2'-Omethyladenosine
  modified_base 20: mod_base = OTHER; note = 2'-Omethyluridine
  modified_base 22: mod_base = OTHER; note = 2'-Omethylguanosine
  modified_base 23: mod_base = OTHER; note = 2'-Omethylcytosine
  modified_base 24: mod_base = OTHER; note = 2'-Omethylguanosine
  modified_base 25: mod_base = OTHER; note = 2'-Omethylcytosine
  modified_base 44: mod_base = OTHER; note = 2'-Omethyladenosine
  modified_base 45: mod_base = OTHER; note = 2'-Omethylguanosine
  modified_base 46: mod_base = OTHER; note = 2'-Omethylguanosine
  modified_base 49: mod_base = OTHER; note = 2'-Omethylcytosine
  modified_base 50: mod_base = OTHER; note = 2'-Omethylcytosine
  modified_base 51: mod_base = OTHER; note = 2'-Omethylguanosine
  modified_base 52: mod_base = OTHER; note = 2'-Omethylguanosine
  modified_base 53: mod_base = OTHER; note = 2'-Omethylguanosine
  modified_base 54: mod_base = OTHER; note = Uridine phosphorothiorate
  modified_base 55: mod_base = OTHER; note = Uridine phosphorothiorate
  modified_base 56: mod_base = OTHER; note = Cytosine phosphorothiorate
  modified_base 57: mod_base = OTHER; note = Guanosine phosphorothiorate
  modified_base 61: mod_base = OTHER; note = 2'-Omethylcytosine
  modified_base 62: mod_base = OTHER; note = 2'-Omethylcytosine
  modified_base 63: mod_base = OTHER; note = 2'-Omethylcytosine
  modified_base 64: mod_base = OTHER; note = 2'-Omethylguanosine
  modified_base 65: mod_base = OTHER; note = 2'-Omethylguanosine
  modified_base 66: mod_base = OTHER; note = 2'-Omethylcytosine
  modified_base 67: mod_base = OTHER; note = 2'-Omethylguanosine
  modified_base 68: mod_base = OTHER; note = 2'-Omethylguanosine
  modified_base 69: mod_base = OTHER; note = 2'-Omethyladenosine

SEQ ID NO: 5572 - RNA, 76 nt, synthetic construct; identical to SEQ ID NO: 3295
  source 1..76: mol_type = other RNA
  modified_base 1: mod_base = OTHER; note = 2'-Omethylcytosine
  modified_base 2: mod_base = OTHER; note = 2'-fluorocytosine
  modified_base 3: mod_base = OTHER; note = Uridine phosphorothiorate
  modified_base 4: mod_base = OTHER; note = 2'-fluorouridine
  modified_base 7: mod_base = OTHER; note = 2'-fluoroadenosine
  modified_base 8: mod_base = OTHER; note = 2'-fluorouridine phosphorothiorate
  modified_base 11: mod_base = OTHER; note = Cytosine phosphorothiorate
  modified_base 12: mod_base = OTHER; note = 2'-Omethyluridine phosphorothiorate
  modified_base 18: mod_base = OTHER; note = 2'-fluoroguanosine phosphorothiorate
  modified_base 25: mod_base = OTHER; note = 2'-fluorocytosine
  modified_base 28: mod_base = OTHER; note = 2'-fluoroadenosine phosphorothiorate
  modified_base 30: mod_base = OTHER; note = 2'-fluoroguanosine
  modified_base 37: mod_base = OTHER; note = 2'-fluoroguanosine phosphorothiorate
  modified_base 40: mod_base = OTHER; note = 2'-fluorocytosine phosphorothiorate
  modified_base 42: mod_base = OTHER; note = 2'-fluorouridine phosphorothiorate
  modified_base 45: mod_base = OTHER; note = 2'-Omethylguanosine
  modified_base 48: mod_base = OTHER; note = 2'-fluorocytosine phosphorothiorate
  modified_base 53: mod_base = OTHER; note = Guanosine phosphorothiorate
  modified_base 54: mod_base = OTHER; note = Uridine phosphorothiorate
  modified_base 75: mod_base = OTHER; note = Cytosine phosphorothiorate

SEQ ID NO: 5573 - RNA, 76 nt, synthetic construct; identical to SEQ ID NO: 3316
  source 1..76: mol_type = other RNA
  modified_base 1: mod_base = OTHER; note = 2'-Omethyladenosine phosphorothiorate
  modified_base 2: mod_base = OTHER; note = 2'-Omethylcytosine
  modified_base 3: mod_base = OTHER; note = 2'-Omethylcytosine
  modified_base 4: mod_base = OTHER; note = 2'-Omethyladenosine
  modified_base 5: mod_base = OTHER; note = 2'-Omethyladenosine
  modified_base 6: mod_base = OTHER; note = 2'-Omethylcytosine
  modified_base 44: mod_base = OTHER; note = 2'-Omethyladenosine
  modified_base 45: mod_base = OTHER; note = 2'-Omethylguanosine
  modified_base 46: mod_base = OTHER; note = 2'-fluoroguanosine
  modified_base 47: mod_base = OTHER; note = 2'-fluorouridine
  modified_base 48: mod_base = OTHER; note = 2'-Omethyluridine
  modified_base 49: mod_base = OTHER; note = 2'-Omethylcytosine
  modified_base 73: mod_base = OTHER; note = 2'-Omethylguanosine

SEQ ID NO: 5574 - RNA, 86 nt, synthetic construct; identical to SEQ ID NO: 3290
  source 1..86: mol_type = other RNA
  modified_base 1: mod_base = OTHER; note = 2'-Omethyladenosine
  modified_base 14: mod_base = OTHER; note = 2'-Omethyladenosine
  modified_base 15: mod_base = OTHER; note = 2'-fluoroguanosine
  modified_base 16: mod_base = OTHER; note = 2'-Omethyluridine
  modified_base 17: mod_base = OTHER; note = 2'-Omethylguanosine
  modified_base 18: mod_base = OTHER; note = 2'-Omethylguanosine
  modified_base 19: mod_base = OTHER; note = 2'-fluorouridine
  modified_base 20: mod_base = OTHER; note = 2'-Omethyluridine
  modified_base 64: mod_base = OTHER; note = 2'-Omethyluridine
  modified_base 66: mod_base = OTHER; note = 2'-Omethylcytosine
  modified_base 69: mod_base = OTHER; note = 2'-Omethyladenosine
  modified_base 83: mod_base = OTHER; note = 2'-Omethyladenosine

SEQ ID NO: 5575 - RNA, 76 nt, synthetic construct; identical to SEQ ID NO: 3318
  source 1..76: mol_type = other RNA
  modified_base 1: mod_base = OTHER; note = 2'-Omethylcytosine
  modified_base 10: mod_base = OTHER; note = 2'-Omethylguanosine
  modified_base 11: mod_base = OTHER; note = 2'-Omethylcytosine
  modified_base 12: mod_base = OTHER; note = 2'-Omethyluridine
  modified_base 13: mod_base = OTHER; note = 2'-Omethylcytosine
  modified_base 14: mod_base = OTHER; note = 2'-Omethyladenosine
  modified_base 15: mod_base = OTHER; note = 2'-Omethylguanosine
  modified_base 16: mod_base = OTHER; note = 2'-Omethyluridine
  modified_base 18: mod_base = OTHER; note = 2'-Omethylguanosine
  modified_base 19: mod_base = OTHER; note = 2'-Omethylguanosine
  modified_base 20: mod_base = OTHER; note = Uridine phosphorothiorate
  modified_base 21: mod_base = OTHER; note = Adenosine phosphorothiorate
  modified_base 25: mod_base = OTHER; note = 2'-Omethylcytosine
  modified_base 33: mod_base = OTHER; note = 2'-fluorouridine
  modified_base 34: mod_base = OTHER; note = 2'-Omethylcytosine
  modified_base 35: mod_base = OTHER; note = Uridine phosphorothiorate
  modified_base 37: mod_base = OTHER; note = Guanosine phosphorothiorate
  modified_base 38: mod_base = OTHER; note = Adenosine phosphorothiorate
  modified_base 41: mod_base = OTHER; note = 2'-fluorocytosine
  modified_base 42: mod_base = OTHER; note = 2'-Omethyluridine
  modified_base 43: mod_base = OTHER; note = 2'-Omethyluridine
  modified_base 44: mod_base = OTHER; note = 2'-fluoroadenosine
  modified_base 49: mod_base = OTHER; note = 2'-Omethylguanosine
  modified_base 50: mod_base = OTHER; note = 2'-Omethylcytosine
  modified_base 52: mod_base = OTHER; note = 2'-Omethylguanosine
  modified_base 54: mod_base = OTHER; note = Uridine phosphorothiorate
  modified_base 55: mod_base = OTHER; note = Uridine phosphorothiorate
  modified_base 61: mod_base = OTHER; note = 2'-Omethylcytosine
  modified_base 65: mod_base = OTHER; note = 2'-Omethylcytosine
  modified_base 73: mod_base = OTHER; note = 2'-Omethyladenosine

SEQ ID NO: 5576 - RNA, 85 nt, synthetic construct; identical to SEQ ID NO: 3288
  source 1..85: mol_type = other RNA
  modified_base 1: mod_base = OTHER; note = 2'-Omethylcytosine phosphorothiorate
  modified_base 2: mod_base = OTHER; note = 2'-Omethylcytosine
  modified_base 14: mod_base = OTHER; note = 2'-Omethylguanosine
  modified_base 22: mod_base = OTHER; note = 2'-fluoroguanosine
  modified_base 25: mod_base = OTHER; note = Guanosine phosphorothiorate
  modified_base 26: mod_base = OTHER; note = 2'-fluorouridine
  modified_base 29: mod_base = OTHER; note = 2'-fluoroguanosine
  modified_base 33: mod_base = OTHER; note = 2'-fluorouridine
  modified_base 34: mod_base = OTHER; note = Cytosine phosphorothiorate
  modified_base 44: mod_base = OTHER; note = 2'-Omethylguanosine
  modified_base 46: mod_base = OTHER; note = 2'-fluoroadenosine
  modified_base 48: mod_base = OTHER; note = Adenosine phosphorothiorate
  modified_base 55: mod_base = OTHER; note = 2'-Omethylcytosine
  modified_base 58: mod_base = OTHER; note = 2'-fluoroguanosine
  modified_base 64: mod_base = OTHER; note = 2'-Omethyluridine
  modified_base 67: mod_base = OTHER; note = Adenosine phosphorothiorate
  modified_base 76: mod_base = OTHER; note = 2'-fluorocytosine
  modified_base 77: mod_base = OTHER; note = 2'-Omethylcytosine
  modified_base 84: mod_base = OTHER; note = Cytosine phosphorothiorate

SEQ ID NO: 5577 - RNA, 76 nt, synthetic construct; identical to SEQ ID NO: 625
  source 1..76: mol_type = other RNA
  modified_base 2: mod_base = OTHER; note = Guanosine phosphorothiorate
  modified_base 3: mod_base = OTHER; note = 2'-fluorocytosine
  modified_base 5: mod_base = OTHER; note = 2'-Omethylcytosine
  modified_base 11: mod_base = OTHER; note = 2'-fluorocytosine
  modified_base 12: mod_base = OTHER; note = 2'-Omethylguanosine
  modified_base 17: mod_base = OTHER; note = 2'-Omethylguanosine
  modified_base 18: mod_base = OTHER; note = 2'-fluoroguanosine
  modified_base 20: mod_base = OTHER; note = Uridine phosphorothiorate
  modified_base 23: mod_base = OTHER; note = Cytosine phosphorothiorate
  modified_base 24: mod_base = OTHER; note = 2'-fluoroguanosine
  modified_base 26: mod_base = OTHER; note = 2'-Omethyladenosine
  modified_base 27: mod_base = OTHER; note = 2'-fluorouridine
  modified_base 29: mod_base = OTHER; note = 2'-Omethylguanosine
  modified_base 30: mod_base = OTHER; note = 2'-fluoroguanosine phosphorothiorate
  modified_base 39: mod_base = OTHER; note = 2'-Omethyluridine
  modified_base 41: mod_base = OTHER; note = 2'-fluorocytosine
  modified_base 42: mod_base = OTHER; note = Adenosine phosphorothiorate
  modified_base 43: mod_base = OTHER; note = 2'-Omethyladenosine
  modified_base 47: mod_base = OTHER; note = 2'-Omethyluridine
  modified_base 48: mod_base = OTHER; note = 2'-Omethyluridine
  modified_base 49: mod_base = OTHER; note = Cytosine phosphorothiorate
  modified_base 50: mod_base = OTHER; note = 2'-Omethylcytosine
  modified_base 51: mod_base = OTHER; note = Guanosine phosphorothiorate
  modified_base 52: mod_base = OTHER; note = 2'-Omethylguanosine
  modified_base 57: mod_base = OTHER; note = 2'-Omethylguanosine
  modified_base 59: mod_base = OTHER; note = 2'-Omethylguanosine
  modified_base 61: mod_base = OTHER; note = 2'-fluorocytosine
  modified_base 63: mod_base = OTHER; note = 2'-fluorocytosine
  modified_base 64: mod_base = OTHER; note = 2'-Omethylguanosine
  modified_base 65: mod_base = OTHER; note = 2'-Omethylguanosine phosphorothiorate
  modified_base 66: mod_base = OTHER; note = 2'-fluorocytosine
  modified_base 70: mod_base = OTHER; note = 2'-Omethylguanosine
  modified_base 71: mod_base = OTHER; note = 2'-Omethyluridine phosphorothiorate
  modified_base 74: mod_base = OTHER; note = 2'-Omethylcytosine phosphorothiorate
  modified_base 75: mod_base = OTHER; note = 2'-fluorocytosine phosphorothiorate
  modified_base 76: mod_base = OTHER; note = 2'-fluoroadenosine

SEQ ID NO: 5578 - RNA, 74 nt, synthetic construct; identical to SEQ ID NO: 3293
  source 1..74: mol_type = other RNA
  modified_base 1: mod_base = OTHER; note = 2'-Omethyladenosine
  modified_base 2: mod_base = OTHER; note = Cytosine phosphorothiorate
  modified_base 3: mod_base = OTHER; note = Cytosine phosphorothiorate
  modified_base 4: mod_base = OTHER; note = 2'-fluorouridine
  modified_base 6: mod_base = OTHER; note = 2'-fluoroguanosine
  modified_base 8: mod_base = OTHER; note = Guanosine phosphorothiorate
  modified_base 9: mod_base = OTHER; note = 2'-fluoroguanosine
  modified_base 10: mod_base = OTHER; note = 2'-Omethylcytosine phosphorothiorate
  modified_base 11: mod_base = OTHER; note = 2'-Omethylguanosine phosphorothiorate
  modified_base 24: mod_base = OTHER; note = 2'-fluoroguanosine
  modified_base 41: mod_base = OTHER; note = 2'-fluoroadenosine
  modified_base 44: mod_base = OTHER; note = Guanosine phosphorothiorate
  modified_base 48: mod_base = OTHER; note = 2'-fluorocytosine
  modified_base 50: mod_base = OTHER; note = Uridine phosphorothiorate
  modified_base 60: mod_base = OTHER; note = Adenosine phosphorothiorate
  modified_base 62: mod_base = OTHER; note = Guanosine phosphorothiorate
  modified_base 73: mod_base = OTHER; note = Cytosine phosphorothiorate
  modified_base 74: mod_base = OTHER; note = 2'-fluoroadenosine

SEQ ID NO: 5579 - RNA, 76 nt, synthetic construct; identical to SEQ ID NO: 625
  source 1..76: mol_type = other RNA
  modified_base 1: mod_base = OTHER; note = 2'-Omethylguanosine phosphorothiorate
  modified_base 2: mod_base = OTHER; note = 2'-Omethylguanosine phosphorothiorate
  modified_base 3: mod_base = OTHER; note = 2'-Omethylcytosine
  modified_base 4: mod_base = OTHER; note = 2'-Omethyluridine
  modified_base 5: mod_base = OTHER; note = 2'-Omethylcytosine
  modified_base 6: mod_base = OTHER; note = 2'-Omethylcytosine
  modified_base 16: mod_base = OTHER; note = 2'-Omethyluridine
  modified_base 17: mod_base = OTHER; note = 2'-Omethylguanosine
  modified_base 18: mod_base = OTHER; note = 2'-Omethylguanosine
  modified_base 20: mod_base = OTHER; note = 2'-Omethyluridine
  modified_base 25: mod_base = OTHER; note = 2'-Omethylcytosine
  modified_base 33: mod_base = OTHER; note = 2'-fluorouridine
  modified_base 35: mod_base = OTHER; note = Cytosine phosphorothiorate
  modified_base 37: mod_base = OTHER; note = Adenosine phosphorothiorate
  modified_base 38: mod_base = OTHER; note = Adenosine phosphorothiorate
  modified_base 41: mod_base = OTHER; note = 2'-Omethylcytosine
  modified_base 42: mod_base = OTHER; note = 2'-Omethyladenosine
  modified_base 43: mod_base = OTHER; note = 2'-Omethyladenosine
  modified_base 44: mod_base = OTHER; note = 2'-Omethyladenosine
  modified_base 49: mod_base = OTHER; note = 2'-Omethylcytosine
  modified_base 50: mod_base = OTHER; note = 2'-Omethylcytosine
  modified_base 52: mod_base = OTHER; note = 2'-Omethylguanosine
  modified_base 54: mod_base = OTHER; note = Uridine phosphorothiorate
  modified_base 55: mod_base = OTHER; note = Uridine phosphorothiorate
  modified_base 61: mod_base = OTHER; note = 2'-Omethylcytosine
  modified_base 65: mod_base = OTHER; note = 2'-Omethylguanosine
  modified_base 75: mod_base = OTHER; note = Cytosine phosphorothiorate
  modified_base 76: mod_base = OTHER; note = 2'-Omethyladenosine

SEQ ID NO: 5580 - RNA, 85 nt, synthetic construct; identical to SEQ ID NO: 3297
  source 1..85: mol_type = other RNA
  modified_base 1: mod_base = OTHER; note = 2'-Omethylguanosine phosphorothiorate
  modified_base 2: mod_base = OTHER; note = Cytosine phosphorothiorate
  modified_base 4: mod_base = OTHER; note = 2'-Omethylguanosine
  modified_base 14: mod_base = OTHER; note = 2'-fluoroadenosine
  modified_base 18: mod_base = OTHER; note = 2'-Omethylguanosine
  modified_base 20: mod_base = OTHER; note = 2'-Omethyluridine
  modified_base 50: mod_base = OTHER; note = Cytosine phosphorothiorate
  modified_base 56: mod_base = OTHER; note = 2'-fluoroguanosine
  modified_base 59: mod_base = OTHER; note = 2'-fluorocytosine
  modified_base 82: mod_base = OTHER; note = Guanosine phosphorothiorate

SEQ ID NO: 5581 - RNA, 75 nt, synthetic construct; identical to SEQ ID NO: 3311
  source 1..75: mol_type = other RNA
  modified_base 1: mod_base = OTHER; note = 2'-Omethylguanosine phosphorothiorate
  modified_base 12: mod_base = OTHER; note = Guanosine phosphorothiorate
  modified_base 13: mod_base = OTHER; note = 2'-fluorouridine
  modified_base 20: mod_base = OTHER; note = 2'-fluoroadenosine
  modified_base 23: mod_base = OTHER; note = 2'-fluorocytosine
  modified_base 31: mod_base = OTHER; note = 2'-fluoroadenosine
  modified_base 41: mod_base = OTHER; note = 2'-fluorocytosine
  modified_base 42: mod_base = OTHER; note = 2'-fluoroadenosine
  modified_base 59: mod_base = OTHER; note = 2'-fluorouridine
  modified_base 67: mod_base = OTHER; note = Guanosine phosphorothiorate
  modified_base 73: mod_base = OTHER; note = Cytosine phosphorothiorate

SEQ ID NO: 5582 - RNA, 76 nt, synthetic construct; identical to SEQ ID NO: 3419
  source 1..76: mol_type = other RNA
  modified_base 1: mod_base = OTHER; note = 2'-Omethylguanosine
  modified_base 10: mod_base = OTHER; note = 2'-Omethylguanosine
  modified_base 13: mod_base = OTHER; note = 2'-Omethylcytosine
  modified_base 17: mod_base = OTHER; note = Guanosine phosphorothiorate
  modified_base 18: mod_base = OTHER; note = 2'-Omethylguanosine
  modified_base 19: mod_base = OTHER; note = Adenosine phosphorothiorate
  modified_base 20: mod_base = OTHER; note = 2'-Omethyluridine
  modified_base 25: mod_base = OTHER; note = 2'-Omethylcytosine
  modified_base 29: mod_base = OTHER; note = 2'-Omethylcytosine
  modified_base 33: mod_base = OTHER; note = 2'-fluorouridine
  modified_base 35: mod_base = OTHER; note = Cytosine phosphorothiorate
  modified_base 37: mod_base = OTHER; note = Adenosine phosphorothiorate
  modified_base 38: mod_base = OTHER; note = Adenosine phosphorothiorate
  modified_base 41: mod_base = OTHER; note = 2'-fluoroguanosine phosphorothiorate
  modified_base 43: mod_base = OTHER; note = 2'-Omethyluridine
  modified_base 44: mod_base = OTHER; note = 2'-fluoroadenosine
  modified_base 46: mod_base = OTHER; note = Guanosine phosphorothiorate
  modified_base 50: mod_base = OTHER; note = 2'-Omethylcytosine
  modified_base 52: mod_base = OTHER; note = 2'-Omethylguanosine
  modified_base 54: mod_base = OTHER; note = Uridine phosphorothiorate
  modified_base 55: mod_base = OTHER; note = Uridine phosphorothiorate
  modified_base 56: mod_base = OTHER; note = 2'-Omethylcytosine
  modified_base 57: mod_base = OTHER; note = Guanosine phosphorothiorate
  modified_base 62: mod_base = OTHER; note = 2'-Omethylcytosine
  modified_base 63: mod_base = OTHER; note = 2'-fluorocytosine
  modified_base 65: mod_base = OTHER; note = 2'-Omethylguanosine
  modified_base 71: mod_base = OTHER; note = 2'-Omethyluridine
  modified_base 73: mod_base = OTHER; note = 2'-Omethylguanosine

SEQ ID NO: 5583 - RNA, 85 nt, synthetic construct; identical to SEQ ID NO: 3288
  source 1..85: mol_type = other RNA
  modified_base 1: mod_base = OTHER; note = 2'-Omethylcytosine
  modified_base 14: mod_base = OTHER; note = Guanosine phosphorothiorate
  modified_base 26: mod_base = OTHER; note = 2'-fluorouridine
  modified_base 30: mod_base = OTHER; note = 2'-fluoroadenosine
  modified_base 36: mod_base = OTHER; note = Guanosine phosphorothiorate
  modified_base 44: mod_base = OTHER; note = 2'-Omethylguanosine
  modified_base 53: mod_base = OTHER; note = Uridine phosphorothiorate
  modified_base 54: mod_base = OTHER; note = 2'-fluorocytosine
  modified_base 64: mod_base = OTHER; note = Uridine phosphorothiorate
  modified_base 76: mod_base = OTHER; note = 2'-fluorocytosine
  modified_base 84: mod_base = OTHER; note = 2'-fluorocytosine phosphorothiorate

SEQ ID NO: 5584 - RNA, 74 nt, synthetic construct; identical to SEQ ID NO: 766
  source 1..74: mol_type = other RNA
  modified_base 1: mod_base = OTHER; note = 2'-Omethylguanosine phosphorothiorate
  modified_base 2: mod_base = OTHER; note = 2'-Omethylguanosine phosphorothiorate
  modified_base 3: mod_base = OTHER; note = 2'-Omethylcytosine
  modified_base 4: mod_base = OTHER; note = 2'-Omethyluridine
  modified_base 5: mod_base = OTHER; note = 2'-Omethylcytosine
  modified_base 6: mod_base = OTHER; note = 2'-Omethylcytosine
  modified_base 16: mod_base = OTHER; note = 2'-Omethyluridine
  modified_base 17: mod_base = OTHER; note = 2'-Omethylguanosine
  modified_base 18: mod_base = OTHER; note = 2'-Omethylguanosine
  modified_base 20: mod_base = OTHER; note = 2'-Omethyluridine
  modified_base 25: mod_base = OTHER; note = 2'-Omethylcytosine
  modified_base 33: mod_base = OTHER; note = 2'-fluorouridine
  modified_base 35: mod_base = OTHER; note = Cytosine phosphorothiorate
  modified_base 37: mod_base = OTHER; note = Adenosine phosphorothiorate
  modified_base 38: mod_base = OTHER; note = Adenosine phosphorothiorate
  modified_base 41: mod_base = OTHER; note = 2'-fluorocytosine
  modified_base 42: mod_base = OTHER; note = 2'-Omethyladenosine
  modified_base 43: mod_base = OTHER; note = 2'-Omethyladenosine
  modified_base 44: mod_base = OTHER; note = 2'-fluoroadenosine
  modified_base 49: mod_base = OTHER; note = 2'-Omethylcytosine
  modified_base 50: mod_base = OTHER; note = 2'-Omethylcytosine
  modified_base 52: mod_base = OTHER; note = 2'-Omethylguanosine
  modified_base 54: mod_base = OTHER; note = 2'-Omethyluridine
  modified_base 55: mod_base = OTHER; note = Uridine phosphorothiorate
  modified_base 56: mod_base = OTHER; note = 2'-Omethylcytosine
  modified_base 57: mod_base = OTHER; note = 2'-fluoroguanosine
  modified_base 59: mod_base = OTHER; note = 2'-Omethylguanosine
  modified_base 61: mod_base = OTHER; note = 2'-Omethylcytosine
  modified_base 62: mod_base = OTHER; note = 2'-Omethylcytosine
  modified_base 63: mod_base = OTHER; note = 2'-fluorocytosine
  modified_base 64: mod_base = OTHER; note = 2'-Omethylguanosine
  modified_base 65: mod_base = OTHER; note = 2'-Omethylguanosine
  modified_base 73: mod_base = OTHER; note = 2'-Omethylguanosine phosphorothiorate

SEQ ID NO: 5585 - RNA, 85 nt, synthetic construct; identical to SEQ ID NO: 3317
  source 1..85: mol_type = other RNA
  modified_base 1: mod_base = OTHER; note = 2'-Omethylguanosine phosphorothiorate
  modified_base 25: mod_base = OTHER; note = 2'-Omethylcytosine phosphorothiorate
  modified_base 37: mod_base = OTHER; note = Adenosine phosphorothiorate
  modified_base 46: mod_base = OTHER; note = 2'-Omethylguanosine phosphorothiorate
  modified_base 74: mod_base = OTHER; note = 2'-fluorocytosine
  modified_base 82: mod_base = OTHER; note = Guanosine phosphorothiorate

SEQ ID NO: 5586 - RNA, 76 nt, synthetic construct; identical to SEQ ID NO: 3295
  source 1..76: mol_type = other RNA
  modified_base 1: mod_base = OTHER; note = 2'-Omethylcytosine phosphorothiorate
  modified_base 2: mod_base = OTHER; note = 2'-Omethylcytosine
  modified_base 3: mod_base = OTHER; note = 2'-Omethyluridine phosphorothiorate
  modified_base 6: mod_base = OTHER; note = Guanosine phosphorothiorate
  modified_base 8: mod_base = OTHER; note = 2'-fluorouridine
  modified_base 13: mod_base = OTHER; note = 2'-Omethylcytosine
  modified_base 15: mod_base = OTHER; note = 2'-Omethylguanosine phosphorothiorate
  modified_base 23: mod_base = OTHER; note = Adenosine phosphorothiorate
  modified_base 30: mod_base = OTHER; note = 2'-fluoroguanosine
  modified_base 35: mod_base = OTHER; note = 2'-fluorouridine phosphorothiorate
  modified_base 40: mod_base = OTHER; note = Cytosine phosphorothiorate
  modified_base 43: mod_base = OTHER; note = 2'-Omethyluridine phosphorothiorate
  modified_base 45: mod_base = OTHER; note = 2'-fluoroguanosine phosphorothiorate
  modified_base 52: mod_base = OTHER; note = 2'-Omethylguanosine
  modified_base 74: mod_base = OTHER; note = 2'-Omethylcytosine phosphorothiorate
  modified_base 76: mod_base = OTHER; note = 2'-fluoroadenosine

SEQ ID NO: 5587 - RNA, 85 nt, synthetic construct; identical to SEQ ID NO: 3317
  source 1..85: mol_type = other RNA
  modified_base 1: mod_base = OTHER; note = 2'-Omethylguanosine phosphorothiorate
  modified_base 6: mod_base = OTHER; note = Guanosine phosphorothiorate
  modified_base 17: mod_base = OTHER; note = 2'-Omethylguanosine
  modified_base 48: mod_base = OTHER; note = 2'-Omethylguanosine phosphorothiorate
  modified_base 51: mod_base = OTHER; note = 2'-fluorouridine
  modified_base 61: mod_base = OTHER; note = 2'-fluoroguanosine phosphorothiorate
  modified_base 85: mod_base = OTHER; note = 2'-fluoroadenosine

SEQ ID NO: 5588 - RNA, 76 nt, synthetic construct; identical to SEQ ID NO: 3318
  source 1..76: mol_type = other RNA
  modified_base 1: mod_base = OTHER; note = 2'-Omethylcytosine
  modified_base 2: mod_base = OTHER; note = 2'-Omethylcytosine
  modified_base 3: mod_base = OTHER; note = 2'-Omethyluridine
  modified_base 4: mod_base = OTHER; note = 2'-Omethyluridine
  modified_base 5: mod_base = OTHER; note = 2'-Omethylcytosine
  modified_base 6: mod_base = OTHER; note = 2'-Omethylguanosine
  modified_base 49: mod_base = OTHER; note = 2'-Omethylguanosine
  modified_base 50: mod_base = OTHER; note = 2'-Omethylcytosine
  modified_base 51: mod_base = OTHER; note = 2'-Omethyluridine
  modified_base 52: mod_base = OTHER; note = 2'-Omethylguanosine
  modified_base 53: mod_base = OTHER; note = 2'-Omethylguanosine
  modified_base 73: mod_base = OTHER; note = 2'-Omethyladenosine

SEQ ID NO: 5589 - RNA, 76 nt, synthetic construct; identical to SEQ ID NO: 3615
  source 1..76: mol_type = other RNA
  modified_base 1: mod_base = OTHER; note = 2'-Omethylguanosine phosphorothiorate
  modified_base 2: mod_base = OTHER; note = 2'-Omethylguanosine phosphorothiorate
  modified_base 3: mod_base = OTHER; note = 2'-Omethylcytosine
  modified_base 4: mod_base = OTHER; note = 2'-Omethyluridine
  modified_base 5: mod_base = OTHER; note = 2'-Omethylcytosine
  modified_base 6: mod_base = OTHER; note = 2'-Omethylcytosine
  modified_base 16: mod_base = OTHER; note = 2'-Omethyluridine
  modified_base 17: mod_base = OTHER; note = 2'-Omethylguanosine
  modified_base 18: mod_base = OTHER; note = 2'-Omethylguanosine
  modified_base 20: mod_base = OTHER; note = 2'-Omethyluridine
  modified_base 25: mod_base = OTHER; note = 2'-Omethylcytosine
  modified_base 33: mod_base = OTHER; note = 2'-fluorouridine
  modified_base 35: mod_base = OTHER; note = Cytosine phosphorothiorate
  modified_base 37: mod_base = OTHER; note = Adenosine phosphorothiorate
  modified_base 38: mod_base = OTHER; note = Adenosine phosphorothiorate
  modified_base 41: mod_base = OTHER; note = 2'-Omethylcytosine
  modified_base 44: mod_base = OTHER; note = 2'-Omethylguanosine
  modified_base 45: mod_base = OTHER; note = 2'-Omethylguanosine
  modified_base 46: mod_base = OTHER; note = 2'-fluoroguanosine
  modified_base 47: mod_base = OTHER; note = 2'-fluorouridine
  modified_base 48: mod_base = OTHER; note = 2'-fluorouridine
  modified_base 49: mod_base = OTHER; note = 2'-Omethylcytosine
  modified_base 50: mod_base = OTHER; note = 2'-Omethylcytosine
  modified_base 51: mod_base = OTHER; note = 2'-Omethylguanosine
  modified_base 52: mod_base = OTHER; note = 2'-Omethylguanosine
  modified_base 53: mod_base = OTHER; note = 2'-Omethylguanosine
  modified_base 54: mod_base = OTHER; note = 2'-Omethyluridine
  modified_base 56: mod_base = OTHER; note = 2'-Omethylcytosine
  modified_base 59: mod_base = OTHER; note = 2'-Omethylguanosine
  modified_base 73: mod_base = OTHER; note = 2'-Omethylguanosine

SEQ ID NO: 5590 - RNA, 75 nt, synthetic construct; identical to SEQ ID NO: 3336
  source 1..75: mol_type = other RNA
  modified_base 1: mod_base = OTHER; note = 2'-Omethylcytosine
  modified_base 12: mod_base = OTHER; note = 2'-fluorocytosine phosphorothiorate
  modified_base 18: mod_base = OTHER; note = 2'-fluoroguanosine
  modified_base 19: mod_base = OTHER; note = 2'-Omethyluridine phosphorothiorate
  modified_base 23: mod_base = OTHER; note = 2'-fluoroguanosine
  modified_base 25: mod_base = OTHER; note = 2'-fluoroadenosine
  modified_base 26: mod_base = OTHER; note = 2'-Omethyluridine phosphorothiorate
  modified_base 29: mod_base = OTHER; note = 2'-fluoroguanosine
  modified_base 30: mod_base = OTHER; note = 2'-fluoroadenosine
  modified_base 35: mod_base = OTHER; note = 2'-fluoroadenosine
  modified_base 39: mod_base = OTHER; note = 2'-Omethylcytosine
  modified_base 45: mod_base = OTHER; note = 2'-fluoroguanosine
  modified_base 48: mod_base = OTHER; note = 2'-fluorocytosine
  modified_base 49: mod_base = OTHER; note = 2'-fluoroadenosine
  modified_base 50: mod_base = OTHER; note = 2'-fluoroguanosine
  modified_base 60: mod_base = OTHER; note = Cytosine phosphorothiorate
  modified_base 62: mod_base = OTHER; note = 2'-fluorocytosine phosphorothiorate
  modified_base 73: mod_base = OTHER; note = Cytosine phosphorothiorate
  modified_base 74: mod_base = OTHER; note = 2'-Omethylcytosine

SEQ ID NO: 5591 - RNA, 75 nt, synthetic construct; identical to SEQ ID NO: 1045
  source 1..75: mol_type = other RNA
  modified_base 2: mod_base = OTHER; note = 2'-Omethylguanosine phosphorothiorate
  modified_base 3: mod_base = OTHER; note = 2'-Omethyluridine
  modified_base 6: mod_base = OTHER; note = 2'-Omethylcytosine
  modified_base 15: mod_base = OTHER; note = 2'-fluoroadenosine phosphorothiorate
  modified_base 17: mod_base = OTHER; note = 2'-Omethylguanosine phosphorothiorate
  modified_base 18: mod_base = OTHER; note = 2'-Omethylguanosine phosphorothiorate
  modified_base 24: mod_base = OTHER; note = 2'-Omethyladenosine phosphorothiorate
  modified_base 32: mod_base = OTHER; note = 2'-Omethylcytosine
  modified_base 37: mod_base = OTHER; note = Adenosine phosphorothiorate
  modified_base 50: mod_base = OTHER; note = 2'-Omethylguanosine
  modified_base 56: mod_base = OTHER; note = 2'-Omethylguanosine
  modified_base 62: mod_base = OTHER; note = Cytosine phosphorothiorate
  modified_base 72: mod_base = OTHER; note = 2'-Omethyluridine
  modified_base 74: mod_base = OTHER; note = 2'-Omethylcytosine phosphorothiorate

SEQ ID NO: 5592 - RNA, 85 nt, synthetic construct; identical to SEQ ID NO: 3288
  source 1..85: mol_type = other RNA
  modified_base 1: mod_base = OTHER; note = 2'-Omethylcytosine
  modified_base 11: mod_base = OTHER; note = Cytosine phosphorothiorate
  modified_base 25: mod_base = OTHER; note = 2'-fluoroguanosine
  modified_base 30: mod_base = OTHER; note = 2'-fluoroadenosine
  modified_base 34: mod_base = OTHER; note = 2'-fluorocytosine
  modified_base 51: mod_base = OTHER; note = 2'-Omethyluridine
  modified_base 54: mod_base = OTHER; note = Cytosine phosphorothiorate
  modified_base 57: mod_base = OTHER; note = 2'-Omethylcytosine
  modified_base 60: mod_base = OTHER; note = Guanosine phosphorothiorate
  modified_base 68: mod_base = OTHER; note = Adenosine phosphorothiorate
  modified_base 84: mod_base = OTHER; note = Cytosine phosphorothiorate

SEQ ID NO: 5593 - RNA, 86 nt, synthetic construct
  source 1..86: mol_type = other RNA
gctggtttgcccgagtggttaagggggaagacttcagatcttctgtgcataagcacgcgtgggttcgaaccccacagccagcacca

SEQ ID NO: 5594 - RNA, 85 nt, synthetic construct; identical to SEQ ID NO: 3286
  source 1..85: mol_type = other RNA
  modified_base 1: mod_base = OTHER; note = 2'-Omethylcytosine
  modified_base 11: mod_base = OTHER; note = Cytosine phosphorothiorate
  modified_base 28: mod_base = OTHER; note = 2'-fluoroguanosine
  modified_base 32: mod_base = OTHER; note = 2'-fluorouridine
  modified_base 42: mod_base = OTHER; note = Adenosine phosphorothiorate
  modified_base 54: mod_base = OTHER; note = 2'-Omethylcytosine
  modified_base 57: mod_base = OTHER; note = 2'-Omethylcytosine
  modified_base 59: mod_base = OTHER; note = 2'-Omethyluridine
  modified_base 83: mod_base = OTHER; note = Cytosine phosphorothiorate
  modified_base 84: mod_base = OTHER; note = 2'-Omethylcytosine
  modified_base 85: mod_base = OTHER; note = 2'-fluoroadenosine

SEQ ID NO: 5595 - RNA, 75 nt, synthetic construct; identical to SEQ ID NO: 3306
  source 1..75: mol_type = other RNA
  modified_base 1: mod_base = OTHER; note = 2'-Omethylguanosine
  modified_base 10: mod_base = OTHER; note = 2'-Omethylguanosine
  modified_base 13: mod_base = OTHER; note = 2'-Omethylcytosine
  modified_base 17: mod_base = OTHER; note = Guanosine phosphorothiorate
  modified_base 18: mod_base = OTHER; note = 2'-Omethylguanosine
  modified_base 19: mod_base = OTHER; note = Uridine phosphorothiorate
  modified_base 24: mod_base = OTHER; note = 2'-Omethylcytosine
  modified_base 28: mod_base = OTHER; note = 2'-Omethyluridine
  modified_base 32: mod_base = OTHER; note = 2'-fluorouridine
  modified_base 34: mod_base = OTHER; note = Uridine phosphorothiorate
  modified_base 36: mod_base = OTHER; note = Guanosine phosphorothiorate
  modified_base 37: mod_base = OTHER; note = Adenosine phosphorothiorate
  modified_base 40: mod_base = OTHER; note = 2'-fluoroadenosine phosphorothiorate
  modified_base 42: mod_base = OTHER; note = 2'-Omethyladenosine
  modified_base 43: mod_base = OTHER; note = 2'-fluoroadenosine
  modified_base 45: mod_base = OTHER; note = Guanosine phosphorothiorate
  modified_base 49: mod_base = OTHER; note = 2'-Omethylcytosine
  modified_base 51: mod_base = OTHER; note = 2'-Omethyluridine
  modified_base 53: mod_base = OTHER; note = Uridine phosphorothiorate
  modified_base 54: mod_base = OTHER; note = Uridine phosphorothiorate
  modified_base 55: mod_base = OTHER; note = 2'-Omethylcytosine
  modified_base 56: mod_base = OTHER; note = Adenosine phosphorothiorate
  modified_base 61: mod_base = OTHER; note = 2'-Omethyladenosine
  modified_base 62: mod_base = OTHER; note = 2'-fluorocytosine
  modified_base 64: mod_base = OTHER; note = 2'-Omethyluridine
  modified_base 70: mod_base = OTHER; note = 2'-Omethyluridine
  modified_base 72: mod_base = OTHER; note = 2'-Omethyladenosine

SEQ ID NO: 5596 - RNA, 75 nt, synthetic construct; identical to SEQ ID NO: 3299
  source 1..75: mol_type = other RNA
  modified_base 2: mod_base = OTHER; note = 2'-Omethylcytosine
  modified_base 13: mod_base = OTHER; note = 2'-Omethyladenosine phosphorothiorate
  modified_base 20: mod_base = OTHER; note = 2'-fluoroadenosine
  modified_base 26: mod_base = OTHER; note = Uridine phosphorothiorate
  modified_base 27: mod_base = OTHER; note = Cytosine phosphorothiorate
  modified_base 33: mod_base = OTHER; note = 2'-Omethyluridine phosphorothiorate
  modified_base 45: mod_base = OTHER; note = 2'-fluoroguanosine
  modified_base 46: mod_base = OTHER; note = 2'-fluorouridine
  modified_base 50: mod_base = OTHER; note = Guanosine phosphorothiorate
  modified_base 53: mod_base = OTHER; note = 2'-fluorouridine
  modified_base 73: mod_base = OTHER; note = Cytosine phosphorothiorate
  modified_base 74: mod_base = OTHER; note = Cytosine phosphorothiorate

SEQ ID NO: 5597 - RNA, 85 nt, synthetic construct; identical to SEQ ID NO: 3297
  source 1..85: mol_type = other RNA
  modified_base 1: mod_base = OTHER; note = 2'-Omethylguanosine phosphorothiorate
  modified_base 2: mod_base = OTHER; note = 2'-Omethylcytosine phosphorothiorate
  modified_base 9: mod_base = OTHER; note = 2'-Omethylguanosine
  modified_base 20: mod_base = OTHER; note = Uridine phosphorothiorate
  modified_base 36: mod_base = OTHER; note = 2'-fluoroadenosine
  modified_base 45: mod_base = OTHER; note = 2'-Omethylguanosine
  modified_base 58: mod_base = OTHER; note = Guanosine phosphorothiorate
  modified_base 84: mod_base = OTHER; note = 2'-Omethylcytosine phosphorothiorate

SEQ ID NO: 5598 - RNA, 86 nt, synthetic construct; identical to SEQ ID NO: 3290
  source 1..86: mol_type = other RNA
  modified_base 12: mod_base = OTHER; note = 2'-Omethylcytosine

SEQ ID NO: 5599 - RNA, 86 nt, synthetic construct; identical to SEQ ID NO: 3290
  source 1..86: mol_type = other RNA
  modified_base 65: mod_base = OTHER; note = 2'-fluorouridine

SEQ ID NO: 5600 - RNA, 76 nt, synthetic construct; identical to SEQ ID NO: 3295
  source 1..76: mol_type = other RNA
  modified_base 1: mod_base = OTHER; note = 2'-Omethylcytosine
  modified_base 2: mod_base = OTHER; note = 2'-Omethylcytosine
  modified_base 3: mod_base = OTHER; note = 2'-Omethyluridine phosphorothiorate
  modified_base 9: mod_base = OTHER; note = Adenosine phosphorothiorate
  modified_base 13: mod_base = OTHER; note = Cytosine phosphorothiorate
  modified_base 14: mod_base = OTHER; note = 2'-fluoroadenosine phosphorothiorate
  modified_base 17: mod_base = OTHER; note = 2'-Omethyluridine
  modified_base 25: mod_base = OTHER; note = 2'-fluorocytosine
  modified_base 27: mod_base = OTHER; note = 2'-fluoroguanosine phosphorothiorate
  modified_base 28: mod_base = OTHER; note = 2'-fluoroadenosine phosphorothiorate
  modified_base 30: mod_base = OTHER; note = 2'-fluoroguanosine phosphorothiorate
  modified_base 37: mod_base = OTHER; note = Guanosine phosphorothiorate
  modified_base 38: mod_base = OTHER; note = 2'-fluoroadenosine phosphorothiorate
  modified_base 39: mod_base = OTHER; note = 2'-fluorouridine
  modified_base 46: mod_base = OTHER; note = 2'-fluoroguanosine phosphorothiorate
  modified_base 52: mod_base = OTHER; note = Guanosine phosphorothiorate
  modified_base 53: mod_base = OTHER; note = 2'-fluoroguanosine phosphorothiorate
  modified_base 61: mod_base = OTHER; note = Cytosine phosphorothiorate
  modified_base 67: mod_base = OTHER; note = 2'-fluorocytosine
  modified_base 74: mod_base = OTHER; note = 2'-fluorocytosine
  modified_base 75: mod_base = OTHER; note = Cytosine phosphorothiorate

SEQ ID NO: 5601 - RNA, 76 nt, synthetic construct; identical to SEQ ID NO: 625
  source 1..76: mol_type = other RNA
  modified_base 1: mod_base = OTHER; note = 2'-Omethylguanosine phosphorothiorate
  modified_base 2: mod_base = OTHER; note = 2'-Omethylguanosine
  modified_base 3: mod_base = OTHER; note = 2'-Omethylcytosine
  modified_base 4: mod_base = OTHER; note = 2'-Omethyluridine
  modified_base 5: mod_base = OTHER; note = 2'-Omethylcytosine
  modified_base 6: mod_base = OTHER; note = 2'-Omethylcytosine
  modified_base 14: mod_base = OTHER; note = 2'-Omethyladenosine
  modified_base 15: mod_base = OTHER; note = 2'-Omethyladenosine
  modified_base 16: mod_base = OTHER; note = 2'-Omethyluridine
  modified_base 17: mod_base = OTHER; note = 2'-Omethylguanosine
  modified_base 18: mod_base = OTHER; note = 2'-Omethylguanosine
  modified_base 20: mod_base = OTHER; note = 2'-Omethyluridine
  modified_base 25: mod_base = OTHER; note = 2'-Omethylcytosine
  modified_base 33: mod_base = OTHER; note = 2'-fluorouridine
  modified_base 35: mod_base = OTHER; note = Cytosine phosphorothiorate
  modified_base 37: mod_base = OTHER; note = Adenosine phosphorothiorate
  modified_base 38: mod_base = OTHER; note = Adenosine phosphorothiorate
  modified_base 41: mod_base = OTHER; note = 2'-fluorocytosine
  modified_base 42: mod_base = OTHER; note = 2'-Omethyladenosine
  modified_base 43: mod_base = OTHER; note = 2'-Omethyladenosine
  modified_base 44: mod_base = OTHER; note = 2'-fluoroadenosine
  modified_base 49: mod_base = OTHER; note = 2'-Omethylcytosine
  modified_base 50: mod_base = OTHER; note = 2'-Omethylcytosine
  modified_base 52: mod_base = OTHER; note = 2'-Omethylguanosine
  modified_base 54: mod_base = OTHER; note = 2'-Omethyluridine
  modified_base 55: mod_base = OTHER; note = Uridine phosphorothiorate
  modified_base 56: mod_base = OTHER; note = 2'-Omethylcytosine
  modified_base 57: mod_base = OTHER; note = 2'-fluoroguanosine
  modified_base 59: mod_base = OTHER; note = 2'-Omethylguanosine
  modified_base 61: mod_base = OTHER; note = 2'-Omethylcytosine
  modified_base 62: mod_base = OTHER; note = 2'-Omethylcytosine
  modified_base 63: mod_base = OTHER; note = 2'-fluorocytosine
  modified_base 64: mod_base = OTHER; note = 2'-Omethylguanosine
  modified_base 65: mod_base = OTHER; note = 2'-Omethylguanosine
  modified_base 73: mod_base = OTHER; note = 2'-Omethylguanosine

SEQ ID NO: 5602 - RNA, 75 nt, synthetic construct; identical to SEQ ID NO: 3306
  source 1..75: mol_type = other RNA
  modified_base 1: mod_base = OTHER; note = 2'-Omethylguanosine phosphorothiorate
  modified_base 2: mod_base = OTHER; note = 2'-Omethyladenosine phosphorothiorate
  modified_base 3: mod_base = OTHER; note = 2'-Omethylcytosine
  modified_base 4: mod_base = OTHER; note = 2'-Omethylcytosine
  modified_base 5: mod_base = OTHER; note = 2'-Omethyluridine
  modified_base 6: mod_base = OTHER; note = 2'-Omethylcytosine
  modified_base 16: mod_base = OTHER; note = 2'-Omethylcytosine
  modified_base 17: mod_base = OTHER; note = 2'-Omethylguanosine
  modified_base 18: mod_base = OTHER; note = 2'-Omethylguanosine
  modified_base 24: mod_base = OTHER; note = 2'-Omethylcytosine
  modified_base 32: mod_base = OTHER; note = 2'-fluorouridine
  modified_base 34: mod_base = OTHER; note = Uridine phosphorothiorate
  modified_base 36: mod_base = OTHER; note = Guanosine phosphorothiorate
  modified_base 37: mod_base = OTHER; note = Adenosine phosphorothiorate
  modified_base 40: mod_base = OTHER; note = 2'-Omethyladenosine
  modified_base 43: mod_base = OTHER; note = 2'-Omethyladenosine
  modified_base 44: mod_base = OTHER; note = 2'-Omethylguanosine
  modified_base 45: mod_base = OTHER; note = 2'-fluoroguanosine
  modified_base 46: mod_base = OTHER; note = 2'-fluorouridine
  modified_base 47: mod_base = OTHER; note = 2'-fluorouridine
  modified_base 55: mod_base = OTHER; note = 2'-Omethylcytosine
  modified_base 58: mod_base = OTHER; note = 2'-Omethyladenosine
  modified_base 72: mod_base = OTHER; note = 2'-Omethyladenosine

SEQ ID NO: 5603 - RNA, 76 nt, synthetic construct; identical to SEQ ID NO: 625
  source 1..76: mol_type = other RNA
  modified_base 1: mod_base = OTHER; note = 2'-fluoroguanosine
  modified_base 5: mod_base = OTHER; note = 2'-fluorocytosine
  modified_base 6: mod_base = OTHER; note = 2'-Omethylcytosine
  modified_base 10: mod_base = OTHER; note = Guanosine phosphorothiorate
  modified_base 11: mod_base = OTHER; note = 2'-Omethylcytosine
  modified_base 16: mod_base = OTHER; note = 2'-fluorouridine phosphorothiorate
  modified_base 17: mod_base = OTHER; note = 2'-Omethylguanosine
  modified_base 27: mod_base = OTHER; note = Uridine phosphorothiorate
  modified_base 28: mod_base = OTHER; note = 2'-fluorouridine
  modified_base 30: mod_base = OTHER; note = 2'-fluoroguanosine phosphorothiorate
  modified_base 31: mod_base = OTHER; note = 2'-Omethyladenosine
  modified_base 32: mod_base = OTHER; note = 2'-fluorocytosine
  modified_base 39: mod_base = OTHER; note = 2'-Omethyluridine
  modified_base 40: mod_base = OTHER; note = 2'-fluorouridine
  modified_base 41: mod_base = OTHER; note = 2'-fluorocytosine
  modified_base 43: mod_base = OTHER; note = Adenosine phosphorothiorate
  modified_base 45: mod_base = OTHER; note = 2'-fluoroguanosine
  modified_base 47: mod_base = OTHER; note = 2'-fluorouridine
  modified_base 48: mod_base = OTHER; note = 2'-Omethyluridine
  modified_base 50: mod_base = OTHER; note = 2'-Omethylcytosine
  modified_base 51: mod_base = OTHER; note = Guanosine phosphorothiorate
  modified_base 53: mod_base = OTHER; note = 2'-Omethylguanosine
  modified_base 55: mod_base = OTHER; note = Uridine phosphorothiorate
  modified_base 56: mod_base = OTHER; note = 2'-Omethylcytosine
  modified_base 58: mod_base = OTHER; note = Adenosine phosphorothiorate
  modified_base 59: mod_base = OTHER; note = 2'-fluoroguanosine
  modified_base 64: mod_base = OTHER; note = Guanosine phosphorothiorate
  modified_base 67: mod_base = OTHER; note = 2'-Omethylguanosine
  modified_base 68: mod_base = OTHER; note = 2'-Omethylguanosine
  modified_base 69: mod_base = OTHER; note = 2'-Omethyladenosine
  modified_base 71: mod_base = OTHER; note = 2'-Omethyluridine phosphorothiorate
  modified_base 75: mod_base = OTHER; note = Cytosine phosphorothiorate

SEQ ID NO: 5604 - RNA, 74 nt, synthetic construct; identical to SEQ ID NO: 3293
  source 1..74: mol_type = other RNA
  modified_base 3: mod_base = OTHER; note = 2'-Omethylcytosine phosphorothiorate
  modified_base 5: mod_base = OTHER; note = 2'-Omethylcytosine
  modified_base 11: mod_base = OTHER; note = 2'-fluoroguanosine
  modified_base 15: mod_base = OTHER; note = 2'-fluorocytosine
  modified_base 33: mod_base = OTHER; note = 2'-Omethyluridine phosphorothiorate
  modified_base 42: mod_base = OTHER; note = Adenosine phosphorothiorate
  modified_base 44: mod_base = OTHER; note = 2'-Omethylguanosine phosphorothiorate
  modified_base 50: mod_base = OTHER; note = 2'-fluorouridine
  modified_base 74: mod_base = OTHER; note = 2'-fluoroadenosine

SEQ ID NO: 5605 - RNA, 76 nt, synthetic construct; identical to SEQ ID NO: 3289
  source 1..76: mol_type = other RNA
  modified_base 1: mod_base = OTHER; note = 2'-Omethylguanosine
  modified_base 2: mod_base = OTHER; note = 2'-Omethylcytosine
  modified_base 3: mod_base = OTHER; note = 2'-Omethylcytosine
  modified_base 4: mod_base = OTHER; note = 2'-Omethyluridine
  modified_base 5: mod_base = OTHER; note = 2'-Omethylguanosine
  modified_base 6: mod_base = OTHER; note = 2'-Omethylguanosine
  modified_base 13: mod_base = OTHER; note = 2'-Omethylcytosine
  modified_base 14: mod_base = OTHER; note = 2'-Omethyladenosine
  modified_base 15: mod_base = OTHER; note = 2'-Omethylguanosine
  modified_base 16: mod_base = OTHER; note = 2'-Omethyluridine
  modified_base 18: mod_base = OTHER; note = 2'-Omethylguanosine
  modified_base 19: mod_base = OTHER; note = 2'-Omethylguanosine
  modified_base 20: mod_base = OTHER; note = Uridine phosphorothiorate
  modified_base 21: mod_base = OTHER; note = Adenosine phosphorothiorate
  modified_base 25: mod_base = OTHER; note = 2'-Omethylcytosine
  modified_base 33: mod_base = OTHER; note = Uridine phosphorothiorate
  modified_base 34: mod_base = OTHER; note = 2'-Omethyluridine
  modified_base 35: mod_base = OTHER; note = Uridine phosphorothiorate
  modified_base 37: mod_base = OTHER; note = Adenosine phosphorothiorate
  modified_base 38: mod_base = OTHER; note = Adenosine phosphorothiorate
  modified_base 49: mod_base = OTHER; note = 2'-Omethylcytosine
  modified_base 50: mod_base = OTHER; note = 2'-Omethyladenosine
  modified_base 51: mod_base = OTHER; note = 2'-Omethylguanosine
  modified_base 52: mod_base = OTHER; note = 2'-Omethylguanosine
  modified_base 53: mod_base = OTHER; note = 2'-Omethylguanosine
  modified_base 54: mod_base = OTHER; note = Uridine phosphorothiorate
  modified_base 55: mod_base = OTHER; note = Uridine phosphorothiorate
  modified_base 61: mod_base = OTHER; note = 2'-Omethylcytosine
  modified_base 65: mod_base = OTHER; note = 2'-Omethylguanosine
  modified_base 73: mod_base = OTHER; note = 2'-Omethylguanosine

SEQ ID NO: 5606 - RNA, 76 nt, synthetic construct; identical to SEQ ID NO: 3447
  source 1..76: mol_type = other RNA
  modified_base 1: mod_base = OTHER; note = 2'-Omethylguanosine phosphorothiorate
  modified_base 2: mod_base = OTHER; note = 2'-Omethylcytosine phosphorothiorate
  modified_base 3: mod_base = OTHER; note = 2'-Omethylcytosine
  modified_base 4: mod_base = OTHER; note = 2'-Omethylcytosine
  modified_base 5: mod_base = OTHER; note = 2'-Omethylguanosine
  modified_base 6: mod_base = OTHER; note = 2'-Omethyladenosine
  modified_base 10: mod_base = OTHER; note = 2'-Omethylguanosine
  modified_base 11: mod_base = OTHER; note = 2'-Omethylcytosine
  modified_base 12: mod_base = OTHER; note = 2'-Omethylguanosine
  modified_base 13: mod_base = OTHER; note = 2'-Omethylcytosine
  modified_base 14: mod_base = OTHER; note = 2'-Omethyladenosine
  modified_base 15: mod_base = OTHER; note = 2'-fluoroadenosine
  modified_base 16: mod_base = OTHER; note = 2'-Omethyluridine
  modified_base 17: mod_base = OTHER; note = 2'-Omethylguanosine
  modified_base 18: mod_base = OTHER; note = 2'-Omethylguanosine
  modified_base 19: mod_base = OTHER; note = 2'-fluoroadenosine
  modified_base 20: mod_base = OTHER; note = 2'-Omethyluridine
  modified_base 22: mod_base = OTHER; note = 2'-Omethylguanosine
  modified_base 23: mod_base = OTHER; note = 2'-Omethylcytosine
  modified_base 24: mod_base = OTHER; note = 2'-Omethylguanosine
  modified_base 25: mod_base = OTHER; note = 2'-Omethylcytosine
  modified_base 33: mod_base = OTHER; note = 2'-fluorouridine
  modified_base 35: mod_base = OTHER; note = Cytosine phosphorothiorate
  modified_base 37: mod_base = OTHER; note = Adenosine phosphorothiorate
  modified_base 38: mod_base = OTHER; note = Adenosine phosphorothiorate
  modified_base 44: mod_base = OTHER; note = 2'-Omethyladenosine
  modified_base 45: mod_base = OTHER; note = 2'-Omethylguanosine
  modified_base 46: mod_base = OTHER; note = 2'-fluoroguanosine
  modified_base 47: mod_base = OTHER; note = 2'-fluorouridine
  modified_base 48: mod_base = OTHER; note = 2'-fluorouridine
  modified_base 56: mod_base = OTHER; note = 2'-Omethylcytosine
  modified_base 59: mod_base = OTHER; note = 2'-Omethylguanosine
  modified_base 61: mod_base = OTHER; note = 2'-Omethylcytosine
  modified_base 62: mod_base = OTHER; note = 2'-Omethylcytosine
  modified_base 63: mod_base = OTHER; note = 2'-fluorocytosine
  modified_base 64: mod_base = OTHER; note = 2'-Omethylguanosine
  modified_base 65: mod_base = OTHER; note = 2'-Omethylguanosine
  modified_base 66: mod_base = OTHER; note = 2'-Omethylcytosine
  modified_base 67: mod_base = OTHER; note = 2'-Omethyluridine
  modified_base 68: mod_base = OTHER; note = 2'-Omethylcytosine
  modified_base 73: mod_base = OTHER; note = 2'-Omethylguanosine

SEQ ID NO: 5607 - RNA, 76 nt, synthetic construct; identical to SEQ ID NO: 625
  source 1..76: mol_type = other RNA
  modified_base 1: mod_base = OTHER; note = 2'-Omethylguanosine
  modified_base 2: mod_base = OTHER; note = 2'-Omethylguanosine
  modified_base 3: mod_base = OTHER; note = 2'-Omethylcytosine
  modified_base 4: mod_base = OTHER; note = 2'-Omethyluridine
  modified_base 5: mod_base = OTHER; note = 2'-Omethylcytosine
  modified_base 6: mod_base = OTHER; note = 2'-Omethylcytosine
  modified_base 7: mod_base = OTHER; note = 2'-Omethylguanosine phosphorothiorate
  modified_base 9: mod_base = OTHER; note = 2'-Omethylguanosine phosphorothiorate
  modified_base 10: mod_base = OTHER; note = 2'-Omethylguanosine
  modified_base 11: mod_base = OTHER; note = 2'-Omethylcytosine
  modified_base 12: mod_base = OTHER; note = 2'-Omethylguanosine
  modified_base 13: mod_base = OTHER; note = 2'-Omethylcytosine
  modified_base 14: mod_base = OTHER; note = 2'-Omethyladenosine
  modified_base 15: mod_base = OTHER; note = 2'-Omethyladenosine
  modified_base 17: mod_base = OTHER; note = 2'-Omethylguanosine
  modified_base 18: mod_base = OTHER; note = 2'-Omethylguanosine
  modified_base 19: mod_base = OTHER; note = 2'-Omethyladenosine
  modified_base 20: mod_base = OTHER; note = 2'-Omethyluridine
  modified_base 21: mod_base = OTHER; note = 2'-fluoroadenosine phosphorothiorate
  modified_base 22: mod_base = OTHER; note = 2'-Omethylguanosine phosphorothiorate
  modified_base 23: mod_base = OTHER; note = 2'-Omethylcytosine
  modified_base 24: mod_base = OTHER; note = 2'-Omethylguanosine phosphorothiorate
  modified_base 25: mod_base = OTHER; note = 2'-Omethylcytosine
  modified_base 26: mod_base = OTHER; note = Adenosine phosphorothiorate
  modified_base 27: mod_base = OTHER; note = 2'-Omethyluridine
  modified_base 28: mod_base = OTHER; note = 2'-Omethyluridine
  modified_base 29: mod_base = OTHER; note = 2'-Omethylguanosine
  modified_base 30: mod_base = OTHER; note = 2'-Omethylguanosine
  modified_base 31: mod_base = OTHER; note = 2'-Omethyladenosine
  modified_base 33: mod_base = OTHER; note = 2'-Omethyluridine
  modified_base 34: mod_base = OTHER; note = 2'-Omethyluridine phosphorothiorate
  modified_base 35: mod_base = OTHER; note = Cytosine phosphorothiorate
  modified_base 36: mod_base = OTHER; note = 2'-Omethyladenosine phosphorothiorate
  modified_base 37: mod_base = OTHER; note = Adenosine phosphorothiorate
  modified_base 40: mod_base = OTHER; note = 2'-Omethyluridine
  modified_base 41: mod_base = OTHER; note = 2'-Omethylcytosine
  modified_base 42: mod_base = OTHER; note = 2'-Omethyladenosine
  modified_base 44: mod_base = OTHER; note = 2'-Omethyladenosine
  modified_base 45: mod_base = OTHER; note = Guanosine phosphorothiorate
  modified_base 46: mod_base = OTHER; note = 2'-Omethylguanosine
  modified_base 47: mod_base = OTHER; note = 2'-Omethyluridine
  modified_base 48: mod_base = OTHER; note = 2'-Omethyluridine
  modified_base 49: mod_base = OTHER; note = 2'-Omethylcytosine
  modified_base 50: mod_base = OTHER; note = 2'-Omethylcytosine
  modified_base 51: mod_base = OTHER; note = 2'-Omethylguanosine
  modified_base 52: mod_base = OTHER; note = 2'-Omethylguanosine
  modified_base 53: mod_base = OTHER; note = 2'-fluoroguanosine
  modified_base 54: mod_base = OTHER; note = 2'-Omethyluridine
  modified_base 55: mod_base = OTHER; note = Uridine phosphorothiorate
  modified_base 56: mod_base = OTHER; note = 2'-Omethylcytosine phosphorothiorate
  modified_base 58: mod_base = OTHER; note = 2'-Omethyladenosine
  modified_base 59: mod_base = OTHER; note = 2'-Omethylguanosine
  modified_base 60: mod_base = OTHER; note = 2'-Omethyluridine
  modified_base 61: mod_base = OTHER; note = 2'-Omethylcytosine
  modified_base 62: mod_base = OTHER; note = 2'-Omethylcytosine
  modified_base 63: mod_base = OTHER; note = 2'-Omethylcytosine
  modified_base 64: mod_base = OTHER; note = 2'-Omethylguanosine
  modified_base 65: mod_base = OTHER; note = 2'-Omethylguanosine
  modified_base 66: mod_base = OTHER; note = 2'-Omethylcytosine
  modified_base 67: mod_base = OTHER; note = 2'-Omethylguanosine
  modified_base 68: mod_base = OTHER; note = 2'-Omethylguanosine
  modified_base 69: mod_base = OTHER; note = 2'-Omethyladenosine
  modified_base 70: mod_base = OTHER; note = 2'-Omethylguanosine
  modified_base 71: mod_base = OTHER; note = 2'-Omethyluridine
  modified_base 73: mod_base = OTHER; note = 2'-Omethylguanosine
  modified_base 74: mod_base = OTHER; note = 2'-fluorocytosine phosphorothiorate
  modified_base 75: mod_base = OTHER; note = 2'-fluorocytosine phosphorothiorate

SEQ ID NO: 5608 - RNA, 74 nt, synthetic construct; identical to SEQ ID NO: 3293
  source 1..74: mol_type = other RNA
  modified_base 1: mod_base = OTHER; note = 2'-fluoroadenosine
  modified_base 5: mod_base = OTHER; note = 2'-fluorocytosine
  modified_base 10: mod_base = OTHER; note = 2'-fluorocytosine
  modified_base 43: mod_base = OTHER; note = 2'-fluoroguanosine
  modified_base 60: mod_base = OTHER; note = Adenosine phosphorothiorate
  modified_base 73: mod_base = OTHER; note = Cytosine phosphorothiorate

SEQ ID NO: 5609 - RNA, 76 nt, synthetic construct; identical to SEQ ID NO: 3318
  source 1..76: mol_type = other RNA
  modified_base 1: mod_base = OTHER; note = 2'-Omethylcytosine
  modified_base 35: mod_base = OTHER; note = Uridine phosphorothiorate
  modified_base 37: mod_base = OTHER; note = Guanosine phosphorothiorate
  modified_base 73: mod_base = OTHER; note = 2'-Omethyladenosine

SEQ ID NO: 5610 - RNA, 76 nt, synthetic construct; identical to SEQ ID NO: 625
  source 1..76: mol_type = other RNA
  modified_base 14: mod_base = OTHER; note = 2'-Omethyladenosine
  modified_base 15: mod_base = OTHER; note = 2'-fluoroadenosine
  modified_base 16: mod_base = OTHER; note = 2'-Omethyluridine
  modified_base 17: mod_base = OTHER; note = 2'-Omethylguanosine
  modified_base 18: mod_base = OTHER; note = 2'-Omethylguanosine
  modified_base 19: mod_base = OTHER; note = 2'-fluoroadenosine
  modified_base 20: mod_base = OTHER; note = 2'-Omethyluridine

SEQ ID NO: 5611 - RNA, 76 nt, synthetic construct; identical to SEQ ID NO: 625
  source 1..76: mol_type = other RNA
  modified_base 1: mod_base = OTHER; note = 2'-Omethylguanosine
  modified_base 6: mod_base = OTHER; note = 2'-fluorocytosine
  modified_base 8: mod_base = OTHER; note = Uridine phosphorothiorate
  modified_base 10: mod_base = OTHER; note = 2'-Omethylguanosine phosphorothiorate
  modified_base 11: mod_base = OTHER; note = 2'-Omethylcytosine
  modified_base 15: mod_base = OTHER; note = 2'-Omethyladenosine phosphorothiorate
  modified_base 17: mod_base = OTHER; note = 2'-Omethylguanosine
  modified_base 18: mod_base = OTHER; note = 2'-Omethylguanosine
  modified_base 20: mod_base = OTHER; note = 2'-Omethyluridine
  modified_base 22: mod_base = OTHER; note = 2'-Omethylguanosine
  modified_base 23: mod_base = OTHER; note = Cytosine phosphorothiorate
  modified_base 25: mod_base = OTHER; note = Cytosine phosphorothiorate
  modified_base 28: mod_base = OTHER; note = 2'-Omethyluridine phosphorothiorate
  modified_base 29: mod_base = OTHER; note = 2'-Omethylguanosine
  modified_base 39: mod_base = OTHER; note = 2'-fluorouridine phosphorothiorate
  modified_base 40: mod_base = OTHER; note = 2'-Omethyluridine
  modified_base 42: mod_base = OTHER; note = 2'-fluoroadenosine
  modified_base 45: mod_base = OTHER; note = 2'-Omethylguanosine phosphorothiorate
  modified_base 48: mod_base = OTHER; note = 2'-fluorouridine phosphorothiorate
  modified_base 49: mod_base = OTHER; note = 2'-Omethylcytosine
  modified_base 50: mod_base = OTHER; note = Cytosine phosphorothiorate
  modified_base 54: mod_base = OTHER; note = 2'-fluorouridine phosphorothiorate
  modified_base 58: mod_base = OTHER; note = 2'-fluoroadenosine
  modified_base 60: mod_base = OTHER; note = 2'-fluorouridine
  modified_base 62: mod_base = OTHER; note = 2'-Omethylcytosine
  modified_base 63: mod_base = OTHER; note = Cytosine phosphorothiorate
  modified_base 69: mod_base = OTHER; note = Adenosine phosphorothiorate
  modified_base 70: mod_base = OTHER; note = 2'-fluoroguanosine
  modified_base 72: mod_base = OTHER; note = 2'-Omethylcytosine
  modified_base 76: mod_base = OTHER; note = 2'-fluoroadenosine

SEQ ID NO: 5612 - RNA, 76 nt, synthetic construct; identical to SEQ ID NO: 625
  source 1..76: mol_type = other RNA
  modified_base 16: mod_base = OTHER; note = 2'-Omethyluridine
  modified_base 17: mod_base = OTHER; note = 2'-Omethylguanosine
  modified_base 18: mod_base = OTHER; note = 2'-Omethylguanosine

SEQ ID NO: 5613 - RNA, 76 nt, synthetic construct; identical to SEQ ID NO: 3318
  source 1..76: mol_type = other RNA
  modified_base 1: mod_base = OTHER; note = 2'-Omethylcytosine
  modified_base 2: mod_base = OTHER; note = 2'-Omethylcytosine
  modified_base 3: mod_base = OTHER; note = 2'-Omethyluridine
  modified_base 4: mod_base = OTHER; note = 2'-Omethyluridine
  modified_base 5: mod_base = OTHER; note = 2'-Omethylcytosine
  modified_base 6: mod_base = OTHER; note = 2'-Omethylguanosine
  modified_base 13: mod_base = OTHER; note = 2'-Omethylcytosine
  modified_base 18: mod_base = OTHER; note = 2'-Omethylguanosine
  modified_base 19: mod_base = OTHER; note = 2'-Omethylguanosine
  modified_base 25: mod_base = OTHER; note = 2'-Omethylcytosine
  modified_base 33: mod_base = OTHER; note = 2'-fluorouridine
  modified_base 34: mod_base = OTHER; note = 2'-Omethylcytosine
  modified_base 35: mod_base = OTHER; note = Uridine phosphorothiorate
  modified_base 37: mod_base = OTHER; note = Guanosine phosphorothiorate
  modified_base 38: mod_base = OTHER; note = Adenosine phosphorothiorate
  modified_base 41: mod_base = OTHER; note = 2'-Omethylcytosine
  modified_base 42: mod_base = OTHER; note = 2'-Omethyluridine
  modified_base 43: mod_base = OTHER; note = 2'-Omethyluridine
  modified_base 44: mod_base = OTHER; note = 2'-Omethyladenosine
  modified_base 49: mod_base = OTHER; note = 2'-Omethylguanosine
  modified_base 50: mod_base = OTHER; note = 2'-Omethylcytosine
  modified_base 51: mod_base = OTHER; note = 2'-Omethyluridine
  modified_base 52: mod_base = OTHER; note = 2'-Omethylguanosine
  modified_base 53: mod_base = OTHER; note = 2'-Omethylguanosine
  modified_base 54: mod_base = OTHER; note = Uridine phosphorothiorate
  modified_base 55: mod_base = OTHER; note = Uridine phosphorothiorate
  modified_base 61: mod_base = OTHER; note = 2'-Omethylcytosine
  modified_base 65: mod_base = OTHER; note = 2'-Omethylcytosine
  modified_base 73: mod_base = OTHER; note = 2'-Omethyladenosine

SEQ ID NO: 5614 - RNA, 85 nt, synthetic construct; identical to SEQ ID NO: 3297
  source 1..85: mol_type = other RNA
  modified_base 1: mod_base = OTHER; note = 2'-Omethylguanosine phosphorothiorate
  modified_base 2: mod_base = OTHER; note = 2'-Omethylcytosine phosphorothiorate
  modified_base 3: mod_base = OTHER; note = 2'-Omethyluridine
  modified_base 4: mod_base = OTHER; note = 2'-Omethylguanosine
  modified_base 5: mod_base = OTHER; note = 2'-Omethyluridine
  modified_base 6: mod_base = OTHER; note = 2'-Omethylguanosine
  modified_base 44: mod_base = OTHER; note = 2'-Omethyluridine
  modified_base 58: mod_base = OTHER; note = 2'-Omethylguanosine
  modified_base 59: mod_base = OTHER; note = 2'-Omethylcytosine
  modified_base 60: mod_base = OTHER; note = 2'-Omethyladenosine
  modified_base 61: mod_base = OTHER; note = 2'-Omethylguanosine
  modified_base 62: mod_base = OTHER; note = 2'-Omethylguanosine
  modified_base 63: mod_base = OTHER; note = 2'-Omethyluridine
  modified_base 70: mod_base = OTHER; note = 2'-Omethylcytosine
  modified_base 71: mod_base = OTHER; note = 2'-Omethylcytosine
  modified_base 72: mod_base = OTHER; note = 2'-fluorouridine
  modified_base 73: mod_base = OTHER; note = 2'-Omethylguanosine
  modified_base 74: mod_base = OTHER; note = 2'-Omethylcytosine
  modified_base 75: mod_base = OTHER; note = 2'-Omethyluridine
  modified_base 76: mod_base = OTHER; note = 2'-Omethylcytosine
  modified_base 77: mod_base = OTHER; note = 2'-Omethyladenosine
  modified_base 82: mod_base = OTHER; note = 2'-Omethylguanosine

SEQ ID NO: 5615 - RNA, 76 nt, synthetic construct; identical to SEQ ID NO: 625
  source 1..76: mol_type = other RNA
  modified_base 1: mod_base = OTHER; note = 2'-Omethylguanosine
  modified_base 2: mod_base = OTHER; note = 2'-Omethylguanosine
  modified_base 3: mod_base = OTHER; note = 2'-Omethylcytosine
  modified_base 4: mod_base = OTHER; note = 2'-Omethyluridine
  modified_base 5: mod_base = OTHER; note = 2'-Omethylcytosine
  modified_base 6: mod_base = OTHER; note = 2'-Omethylcytosine
  modified_base 10: mod_base = OTHER; note = 2'-Omethylguanosine
  modified_base 11: mod_base = OTHER; note = 2'-Omethylcytosine
  modified_base 14: mod_base = OTHER; note = 2'-Omethyladenosine
  modified_base 15: mod_base = OTHER; note = 2'-Omethyladenosine
  modified_base 17: mod_base = OTHER; note = 2'-Omethylguanosine
  modified_base 18: mod_base = OTHER; note = 2'-Omethylguanosine
  modified_base 19: mod_base = OTHER; note = 2'-Omethyladenosine
  modified_base 23: mod_base = OTHER; note = 2'-Omethylcytosine
  modified_base 24: mod_base = OTHER; note = 2'-Omethylguanosine
  modified_base 26: mod_base = OTHER; note = Adenosine phosphorothiorate
  modified_base 29: mod_base = OTHER; note = 2'-fluoroguanosine phosphorothiorate
  modified_base 30: mod_base = OTHER; note = 2'-Omethylguanosine
  modified_base 33: mod_base = OTHER; note = 2'-fluorouridine
  modified_base 35: mod_base = OTHER; note = Cytosine phosphorothiorate
  modified_base 37: mod_base = OTHER; note = 2'-Omethyladenosine phosphorothiorate
  modified_base 38: mod_base = OTHER; note = 2'-Omethyladenosine phosphorothiorate
  modified_base 40: mod_base = OTHER; note = 2'-Omethyluridine
  modified_base 41: mod_base = OTHER; note = 2'-Omethylcytosine
  modified_base 49: mod_base = OTHER; note = 2'-Omethylcytosine phosphorothiorate
  modified_base 50: mod_base = OTHER; note = 2'-Omethylcytosine
  modified_base 51: mod_base = OTHER; note = 2'-Omethylguanosine
  modified_base 52: mod_base = OTHER; note = 2'-Omethylguanosine
  modified_base 53: mod_base = OTHER; note = 2'-Omethylguanosine phosphorothiorate
  modified_base 54: mod_base = OTHER; note = 2'-Omethyluridine
  modified_base 55: mod_base = OTHER; note = Uridine phosphorothiorate
  modified_base 56: mod_base = OTHER; note = 2'-Omethylcytosine phosphorothiorate
  modified_base 57: mod_base = OTHER; note = 2'-Omethylguanosine
  modified_base 60: mod_base = OTHER; note = 2'-Omethyluridine phosphorothiorate
  modified_base 61: mod_base = OTHER; note = 2'-Omethylcytosine phosphorothiorate
  modified_base 63: mod_base = OTHER; note = 2'-fluorocytosine
  modified_base 64: mod_base = OTHER; note = 2'-Omethylguanosine
  modified_base 65: mod_base = OTHER; note = 2'-Omethylguanosine
  modified_base 66: mod_base = OTHER; note = 2'-Omethylcytosine
  modified_base 67: mod_base = OTHER; note = 2'-fluoroguanosine
  modified_base 68: mod_base = OTHER; note = 2'-Omethylguanosine phosphorothiorate
  modified_base 69: mod_base = OTHER; note = 2'-fluoroadenosine
  modified_base 70: mod_base = OTHER; note = Guanosine phosphorothiorate
  modified_base 72: mod_base = OTHER; note = 2'-Omethylcytosine
  modified_base 73: mod_base = OTHER; note = 2'-Omethylguanosine
  modified_base 74: mod_base = OTHER; note = 2'-fluorocytosine phosphorothiorate
  modified_base 75: mod_base = OTHER; note = 2'-Omethylcytosine phosphorothiorate
  modified_base 76: mod_base = OTHER; note = 2'-fluoroadenosine

SEQ ID NO: 5616 - RNA, 76 nt, synthetic construct; identical to SEQ ID NO: 625
  source 1..76: mol_type = other RNA
  modified_base 10: mod_base = OTHER; note = 2'-fluoroguanosine phosphorothiorate
  modified_base 11: mod_base = OTHER; note = 2'-fluorocytosine
  modified_base 13: mod_base = OTHER; note = 2'-fluorocytosine
  modified_base 16: mod_base = OTHER; note = 2'-fluorouridine
  modified_base 20: mod_base = OTHER; note = 2'-fluorouridine
  modified_base 22: mod_base = OTHER; note = Guanosine phosphorothiorate
  modified_base 24: mod_base = OTHER; note = 2'-Omethylguanosine phosphorothiorate
  modified_base 26: mod_base = OTHER; note = 2'-Omethyladenosine
  modified_base 29: mod_base = OTHER; note = 2'-fluoroguanosine phosphorothiorate
  modified_base 31: mod_base = OTHER; note = 2'-fluoroadenosine
  modified_base 33: mod_base = OTHER; note = 2'-fluorouridine
  modified_base 36: mod_base = OTHER; note = Adenosine phosphorothiorate
  modified_base 38: mod_base = OTHER; note = 2'-Omethyladenosine
  modified_base 39: mod_base = OTHER; note = Uridine phosphorothiorate
  modified_base 40: mod_base = OTHER; note = 2'-fluorouridine
  modified_base 42: mod_base = OTHER; note = 2'-Omethyladenosine
  modified_base 43: mod_base = OTHER; note = 2'-fluoroadenosine
  modified_base 44: mod_base = OTHER; note = 2'-fluoroadenosine
  modified_base 46: mod_base = OTHER; note = 2'-fluoroguanosine
  modified_base 47: mod_base = OTHER; note = 2'-fluorouridine
  modified_base 50: mod_base = OTHER; note = 2'-Omethylcytosine
  modified_base 56: mod_base = OTHER; note = 2'-fluorocytosine
  modified_base 57: mod_base = OTHER; note = 2'-fluoroguanosine
  modified_base 59: mod_base = OTHER; note = 2'-fluoroguanosine
  modified_base 60: mod_base = OTHER; note = 2'-fluorouridine
  modified_base 61: mod_base = OTHER; note = 2'-fluorocytosine
  modified_base 63: mod_base = OTHER; note = 2'-fluorocytosine
  modified_base 64: mod_base = OTHER; note = Guanosine phosphorothiorate
  modified_base 65: mod_base = OTHER; note = 2'-Omethylguanosine
  modified_base 67: mod_base = OTHER; note = Guanosine phosphorothiorate
  modified_base 68: mod_base = OTHER; note = 2'-Omethylguanosine phosphorothiorate
  modified_base 69: mod_base = OTHER; note = 2'-Omethyladenosine phosphorothiorate
  modified_base 70: mod_base = OTHER; note = 2'-Omethylguanosine
  modified_base 72: mod_base = OTHER; note = 2'-Omethylcytosine phosphorothiorate
  modified_base 73: mod_base = OTHER; note = 2'-fluoroguanosine
  modified_base 76: mod_base = OTHER; note = 2'-fluoroadenosine

SEQ ID NO: 5617 - RNA, 76 nt, synthetic construct; identical to SEQ ID NO: 3295
  source 1..76: mol_type = other RNA
  modified_base 1: mod_base = OTHER; note = 2'-Omethylcytosine
  modified_base 2: mod_base = OTHER; note = 2'-fluorocytosine
  modified_base 3: mod_base = OTHER; note = 2'-fluorouridine
  modified_base 11: mod_base = OTHER; note = 2'-Omethylcytosine
  modified_base 26: mod_base = OTHER; note = 2'-fluoroguanosine
  modified_base 51: mod_base = OTHER; note = 2'-Omethyluridine
  modified_base 52: mod_base = OTHER; note = 2'-Omethylguanosine phosphorothiorate
  modified_base 61: mod_base = OTHER; note = 2'-Omethylcytosine phosphorothiorate
  modified_base 74: mod_base = OTHER; note = 2'-Omethylcytosine phosphorothiorate
  modified_base 75: mod_base = OTHER; note = 2'-fluorocytosine phosphorothiorate

SEQ ID NO: 5618 - RNA, 85 nt, synthetic construct; identical to SEQ ID NO: 3286
  source 1..85: mol_type = other RNA
  modified_base 1: mod_base = OTHER; note = 2'-Omethylcytosine phosphorothiorate
  modified_base 2: mod_base = OTHER; note = 2'-fluorocytosine
  modified_base 15: mod_base = OTHER; note = 2'-fluorouridine phosphorothiorate
  modified_base 24: mod_base = OTHER; note = 2'-Omethylcytosine
  modified_base 26: mod_base = OTHER; note = 2'-Omethyluridine
  modified_base 33: mod_base = OTHER; note = 2'-fluorouridine
  modified_base 43: mod_base = OTHER; note = Uridine phosphorothiorate
  modified_base 47: mod_base = OTHER; note = 2'-Omethylcytosine
  modified_base 55: mod_base = OTHER; note = 2'-fluorocytosine phosphorothiorate
  modified_base 61: mod_base = OTHER; note = Guanosine phosphorothiorate
  modified_base 72: mod_base = OTHER; note = 2'-fluorocytosine phosphorothiorate
  modified_base 76: mod_base = OTHER; note = Cytosine phosphorothiorate

SEQ ID NO: 5619 - RNA, 76 nt, synthetic construct; identical to SEQ ID NO: 625
  source 1..76: mol_type = other RNA
  modified_base 1: mod_base = OTHER; note = 2'-Omethylguanosine phosphorothiorate
  modified_base 2: mod_base = OTHER; note = 2'-Omethylguanosine
  modified_base 13: mod_base = OTHER; note = 2'-Omethylcytosine
  modified_base 33: mod_base = OTHER; note = 2'-fluorouridine
  modified_base 35: mod_base = OTHER; note = Cytosine phosphorothiorate
  modified_base 37: mod_base = OTHER; note = Adenosine phosphorothiorate
  modified_base 38: mod_base = OTHER; note = Adenosine phosphorothiorate
  modified_base 52: mod_base = OTHER; note = 2'-Omethylguanosine
  modified_base 57: mod_base = OTHER; note = 2'-Omethylguanosine
  modified_base 62: mod_base = OTHER; note = 2'-Omethylcytosine
  modified_base 63: mod_base = OTHER; note = 2'-fluorocytosine
  modified_base 73: mod_base = OTHER; note = 2'-Omethylguanosine
  modified_base 75: mod_base = OTHER; note = 2'-fluorocytosine phosphorothiorate
  modified_base 76: mod_base = OTHER; note = 2'-Omethyladenosine

SEQ ID NO: 5620 - RNA, 76 nt, synthetic construct; identical to SEQ ID NO: 625
  source 1..76: mol_type = other RNA
  modified_base 1: mod_base = OTHER; note = 2'-Omethylguanosine
  modified_base 17: mod_base = OTHER; note = 2'-Omethylguanosine
  modified_base 18: mod_base = OTHER; note = 2'-Omethylguanosine
  modified_base 27: mod_base = OTHER; note = Thymine
  modified_base 50: mod_base = OTHER; note = 2'-Omethylcytosine
  modified_base 52: mod_base = OTHER; note = 2'-Omethylguanosine
  modified_base 73: mod_base = OTHER; note = 2'-Omethylguanosine

SEQ ID NO: 5621 - RNA, 86 nt, synthetic construct; identical to SEQ ID NO: 3290
  source 1..86: mol_type = other RNA
  modified_base 1: mod_base = OTHER; note = 2'-Omethyladenosine
  modified_base 2: mod_base = OTHER; note = 2'-Omethylcytosine
  modified_base 3: mod_base = OTHER; note = 2'-Omethylcytosine
  modified_base 4: mod_base = OTHER; note = 2'-Omethyladenosine
  modified_base 5: mod_base = OTHER; note = 2'-Omethylguanosine
  modified_base 6: mod_base = OTHER; note = 2'-Omethylguanosine
  modified_base 10: mod_base = OTHER; note = 2'-Omethylguanosine
  modified_base 11: mod_base = OTHER; note = 2'-Omethylcytosine
  modified_base 12: mod_base = OTHER; note = 2'-Omethylcytosine
  modified_base 13: mod_base = OTHER; note = 2'-Omethylguanosine
  modified_base 59: mod_base = OTHER; note = 2'-Omethylguanosine
  modified_base 60: mod_base = OTHER; note = 2'-Omethyluridine
  modified_base 61: mod_base = OTHER; note = 2'-Omethylguanosine
  modified_base 62: mod_base = OTHER; note = 2'-Omethylguanosine
  modified_base 63: mod_base = OTHER; note = 2'-Omethylguanosine

SEQ ID NO: 5622 - RNA, 76 nt, synthetic construct
  source 1..76: mol_type = other RNA
ggctccgtggcgcaatggaaagcgcattggacttcaaattcaaagggtccgggttcgagtcccggcggagtcgcca

SEQ ID NO: 5623 - DNA, 76 bp, synthetic construct; identical to SEQ ID NO: 1924
  source 1..76: mol_type = other DNA
  modified_base 1: mod_base = OTHER; note = 2'-Omethylguanosine phosphorothiorate
  modified_base 2: mod_base = OTHER; note = 2'-Omethylguanosine phosphorothiorate
  modified_base 3: mod_base = OTHER; note = 2'-fluorocytosine phosphorothiorate
  modified_base 6: mod_base = OTHER; note = Cytosine phosphorothiorate
  modified_base 8: mod_base = OTHER; note = Uridine phosphorothiorate
  modified_base 9: mod_base = OTHER; note = 2'-O-(2-Methoxyethyl) guanosine phosphorothiorate
  modified_base 10: mod_base = OTHER; note = 2'-Omethylguanosine
  modified_base 12: mod_base = OTHER; note = Guanosine phosphorothiorate
  modified_base 13: mod_base = OTHER; note = 2'-O-(2-Methoxyethyl) 5-methylcytosine phosphorothiorate
  modified_base 14: mod_base = OTHER; note = 2'-Omethyladenosine phosphorothiorate
  modified_base 15: mod_base = OTHER; note = 2'-O-(2-Methoxyethyl) adenosine phosphorothiorate
  modified_base 16: mod_base = OTHER; note = 2'-O-(2-Methoxyethyl) thymine
  modified_base 20: mod_base = OTHER; note = Uridine phosphorothiorate
  modified_base 21: mod_base = OTHER; note = 2'-fluoroadenosine
  modified_base 26: mod_base = OTHER; note = 2'-O-(2-Methoxyethyl) adenosine
  modified_base 30: mod_base = OTHER; note = Guanosine phosphorothiorate
  modified_base 36: mod_base = OTHER; note = Adenosine phosphorothiorate
  modified_base 37: mod_base = OTHER; note = 2'-fluoroadenosine
  modified_base 42: mod_base = OTHER; note = Adenosine phosphorothiorate
  modified_base 43: mod_base = OTHER; note = 2'-Omethyladenosine phosphorothiorate
  modified_base 44: mod_base = OTHER; note = 2'-Omethyladenosine
  modified_base 46: mod_base = OTHER; note = Guanosine phosphorothiorate
  modified_base 49: mod_base = OTHER; note = 2'-fluorocytosine phosphorothiorate
  modified_base 50: mod_base = OTHER; note = 2'-O-(2-Methoxyethyl) 5-methylcytosine
  modified_base 55: mod_base = OTHER; note = 2'-fluorouridine
  modified_base 59: mod_base = OTHER; note = 2'-Omethylguanosine phosphorothiorate
  modified_base 60: mod_base = OTHER; note = 2'-Omethyluridine
  modified_base 62: mod_base = OTHER; note = 2'-Omethylcytosine
  modified_base 72: mod_base = OTHER; note = 2'-O-(2-Methoxyethyl) 5-methylcytosine phosphorothiorate
  modified_base 73: mod_base = OTHER; note = Guanosine phosphorothiorate
  modified_base 74: mod_base = OTHER; note = 2'-fluorocytosine phosphorothiorate
  modified_base 75: mod_base = OTHER; note = 2'-Omethylcytosine phosphorothiorate
  misc_feature 1..3: note = RNA
  misc_feature 4: note = DNA
  misc_feature 5..26: note = RNA
  misc_feature 27: note = DNA
  misc_feature 28..30: note = RNA
  misc_feature 31: note = DNA
  misc_feature 32..52: note = RNA
  misc_feature 53..54: note = DNA
  misc_feature 55..75: note = RNA
  misc_feature 76: note = DNA

SEQ ID NO: 5624 - RNA, 76 nt, synthetic construct; identical to SEQ ID NO: 3295
  source 1..76: mol_type = other RNA
  modified_base 1: mod_base = OTHER; note = 2'-Omethylcytosine
  modified_base 2: mod_base = OTHER; note = Cytosine phosphorothiorate
  modified_base 3: mod_base = OTHER; note = Uridine phosphorothiorate
  modified_base 4: mod_base = OTHER; note = Uridine phosphorothiorate
  modified_base 6: mod_base = OTHER; note = 2'-fluoroguanosine phosphorothiorate
  modified_base 8: mod_base = OTHER; note = 2'-fluorouridine
  modified_base 12: mod_base = OTHER; note = 2'-Omethyluridine phosphorothiorate
  modified_base 26: mod_base = OTHER; note = 2'-Omethylguanosine
  modified_base 27: mod_base = OTHER; note = 2'-fluoroguanosine
  modified_base 29: mod_base = OTHER; note = 2'-Omethylguanosine
  modified_base 34: mod_base = OTHER; note = 2'-fluorouridine phosphorothiorate
  modified_base 43: mod_base = OTHER; note = 2'-Omethyluridine phosphorothiorate
  modified_base 52: mod_base = OTHER; note = 2'-Omethylguanosine
  modified_base 53: mod_base = OTHER; note = 2'-fluoroguanosine phosphorothiorate
  modified_base 60: mod_base = OTHER; note = 2'-fluorouridine phosphorothiorate
  modified_base 74: mod_base = OTHER; note = 2'-fluorocytosine
  modified_base 75: mod_base = OTHER; note = 2'-Omethylcytosine phosphorothiorate
  modified_base 76: mod_base = OTHER; note = 2'-Omethyladenosine

SEQ ID NO: 5625 - RNA, 75 nt, synthetic construct; identical to SEQ ID NO: 3306
  source 1..75: mol_type = other RNA
  modified_base 1: mod_base = OTHER; note = 2'-Omethylguanosine phosphorothiorate
  modified_base 2: mod_base = OTHER; note = 2'-Omethyladenosine
  modified_base 3: mod_base = OTHER; note = 2'-Omethylcytosine
  modified_base 4: mod_base = OTHER; note = 2'-Omethylcytosine
  modified_base 5: mod_base = OTHER; note = 2'-Omethyluridine
  modified_base 6: mod_base = OTHER; note = 2'-Omethylcytosine
  modified_base 48: mod_base = OTHER; note = 2'-Omethylguanosine
  modified_base 49: mod_base = OTHER; note = 2'-Omethylcytosine
  modified_base 50: mod_base = OTHER; note = 2'-Omethylguanosine
  modified_base 51: mod_base = OTHER; note = 2'-Omethyluridine
  modified_base 52: mod_base = OTHER; note = 2'-Omethylguanosine
  modified_base 60: mod_base = OTHER; note = 2'-Omethylcytosine
  modified_base 61: mod_base = OTHER; note = 2'-Omethyladenosine
  modified_base 62: mod_base = OTHER; note = 2'-fluorocytosine
  modified_base 63: mod_base = OTHER; note = 2'-Omethylguanosine
  modified_base 64: mod_base = OTHER; note = 2'-Omethyluridine
  modified_base 65: mod_base = OTHER; note = 2'-Omethylcytosine
  modified_base 66: mod_base = OTHER; note = 2'-Omethylguanosine
  modified_base 67: mod_base = OTHER; note = 2'-Omethylguanosine
  modified_base 68: mod_base = OTHER; note = 2'-Omethylguanosine
  modified_base 70: mod_base = OTHER; note = 2'-Omethyluridine
  modified_base 71: mod_base = OTHER; note = 2'-Omethylcytosine

SEQ ID NO: 5626 - RNA, 76 nt, synthetic construct; identical to SEQ ID NO: 625
  source 1..76: mol_type = other RNA
  modified_base 1: mod_base = OTHER; note = 2'-Omethylguanosine phosphorothiorate
  modified_base 2: mod_base = OTHER; note = 2'-Omethylguanosine
  modified_base 17: mod_base = OTHER; note = 2'-Omethylguanosine
  modified_base 33: mod_base = OTHER; note = 2'-fluorouridine
  modified_base 35: mod_base = OTHER; note = Cytosine phosphorothiorate
  modified_base 37: mod_base = OTHER; note = Adenosine phosphorothiorate
  modified_base 38: mod_base = OTHER; note = Adenosine phosphorothiorate
  modified_base 52: mod_base = OTHER; note = 2'-Omethylguanosine
  modified_base 57: mod_base = OTHER; note = 2'-Omethylguanosine
  modified_base 65: mod_base = OTHER; note = 2'-Omethylguanosine
  modified_base 73: mod_base = OTHER; note = 2'-Omethylguanosine
  modified_base 75: mod_base = OTHER; note = 2'-fluorocytosine phosphorothiorate

SEQ ID NO: 5627 - RNA, 76 nt, synthetic construct; identical to SEQ ID NO: 625
  source 1..76: mol_type = other RNA
  modified_base 1: mod_base = OTHER; note = 2'-Omethylguanosine
  modified_base 2: mod_base = OTHER; note = 2'-Omethylguanosine
  modified_base 3: mod_base = OTHER; note = 2'-Omethylcytosine
  modified_base 4: mod_base = OTHER; note = 2'-Omethyluridine
  modified_base 5: mod_base = OTHER; note = 2'-Omethylcytosine
  modified_base 6: mod_base = OTHER; note = 2'-Omethylcytosine
  modified_base 11: mod_base = OTHER; note = 2'-Omethylcytosine
  modified_base 12: mod_base = OTHER; note = 2'-Omethylguanosine
  modified_base 13: mod_base = OTHER; note = 2'-Omethylcytosine
  modified_base 14: mod_base = OTHER; note = 2'-Omethyladenosine
  modified_base 15: mod_base = OTHER; note = 2'-Omethyladenosine
  modified_base 16: mod_base = OTHER; note = 2'-Omethyluridine
  modified_base 17: mod_base = OTHER; note = 2'-Omethylguanosine
  modified_base 18: mod_base = OTHER; note = 2'-fluoroguanosine phosphorothiorate
  modified_base 19: mod_base = OTHER; note = 2'-fluoroadenosine phosphorothiorate
  modified_base 20: mod_base = OTHER; note = Uridine phosphorothiorate
  modified_base 21: mod_base = OTHER; note = 2'-fluoroadenosine phosphorothiorate
  modified_base 23: mod_base = OTHER; note = 2'-Omethylcytosine
  modified_base 24: mod_base = OTHER; note = 2'-Omethylguanosine phosphorothiorate
  modified_base 25: mod_base = OTHER; note = 2'-Omethylcytosine
  modified_base 26: mod_base = OTHER; note = Adenosine phosphorothiorate
  modified_base 28: mod_base = OTHER; note = 2'-Omethyluridine phosphorothiorate
  modified_base 31: mod_base = OTHER; note = 2'-Omethyladenosine phosphorothiorate
  modified_base 33: mod_base = OTHER; note = 2'-fluorouridine
  modified_base 34: mod_base = OTHER; note = 2'-Omethyluridine phosphorothiorate
  modified_base 35: mod_base = OTHER; note = Cytosine phosphorothiorate
  modified_base 38: mod_base = OTHER; note = Adenosine phosphorothiorate
  modified_base 39: mod_base = OTHER; note = 2'-Omethyluridine phosphorothiorate
  modified_base 40: mod_base = OTHER; note = 2'-Omethyluridine
  modified_base 41: mod_base = OTHER; note = 2'-fluorocytosine
  modified_base 42: mod_base = OTHER; note = Adenosine phosphorothiorate
  modified_base 44: mod_base = OTHER; note = 2'-Omethyladenosine
  modified_base 45: mod_base = OTHER; note = Guanosine phosphorothiorate
  modified_base 48: mod_base = OTHER; note = 2'-fluorouridine
  modified_base 49: mod_base = OTHER; note = 2'-Omethylcytosine
  modified_base 50: mod_base = OTHER; note = 2'-Omethylcytosine
  modified_base 51: mod_base = OTHER; note = 2'-Omethylguanosine phosphorothiorate
  modified_base 52: mod_base = OTHER; note = 2'-Omethylguanosine
  modified_base 53: mod_base = OTHER; note = 2'-Omethylguanosine phosphorothiorate
  modified_base 55: mod_base = OTHER; note = Uridine phosphorothiorate
  modified_base 56: mod_base = OTHER; note = 2'-Omethylcytosine
  modified_base 57: mod_base = OTHER; note = 2'-Omethylguanosine
  modified_base 59: mod_base = OTHER; note = 2'-Omethylguanosine
  modified_base 61: mod_base = OTHER; note = 2'-Omethylcytosine phosphorothiorate
  modified_base 62: mod_base = OTHER; note = 2'-Omethylcytosine
  modified_base 63: mod_base = OTHER; note = 2'-fluorocytosine
  modified_base 64: mod_base = OTHER; note = 2'-Omethylguanosine
  modified_base 65: mod_base = OTHER; note = 2'-Omethylguanosine
  modified_base 66: mod_base = OTHER; note = 2'-Omethylcytosine phosphorothiorate
  modified_base 67: mod_base = OTHER; note = 2'-fluoroguanosine
  modified_base 68: mod_base = OTHER; note = 2'-Omethylguanosine
  modified_base 69: mod_base = OTHER; note = 2'-fluoroadenosine
  modified_base 71: mod_base = OTHER; note = 2'-Omethyluridine phosphorothiorate
  modified_base 72: mod_base = OTHER; note = 2'-Omethylcytosine
  modified_base 73: mod_base = OTHER; note = 2'-Omethylguanosine
  modified_base 74: mod_base = OTHER; note = 2'-fluorocytosine phosphorothiorate
  modified_base 75: mod_base = OTHER; note = 2'-Omethylcytosine phosphorothiorate

SEQ ID NO: 5628 - RNA, 85 nt, synthetic construct; identical to SEQ ID NO: 3288
  source 1..85: mol_type = other RNA
  modified_base 1: mod_base = OTHER; note = 2'-Omethylcytosine
  modified_base 11: mod_base = OTHER; note = Cytosine phosphorothiorate
  modified_base 26: mod_base = OTHER; note = 2'-Omethyluridine
  modified_base 28: mod_base = OTHER; note = 2'-fluoroguanosine
  modified_base 32: mod_base = OTHER; note = 2'-fluorouridine
  modified_base 36: mod_base = OTHER; note = Guanosine phosphorothiorate
  modified_base 44: mod_base = OTHER; note = 2'-Omethylguanosine
  modified_base 48: mod_base = OTHER; note = Adenosine phosphorothiorate
  modified_base 57: mod_base = OTHER; note = 2'-Omethylcytosine
  modified_base 59: mod_base = OTHER; note = 2'-Omethyluridine
  modified_base 67: mod_base = OTHER; note = Adenosine phosphorothiorate
  modified_base 84: mod_base = OTHER; note = Cytosine phosphorothiorate

SEQ ID NO: 5629 - RNA, 76 nt, synthetic construct; identical to SEQ ID NO: 3447
  source 1..76: mol_type = other RNA
  modified_base 1: mod_base = OTHER; note = 2'-Omethylguanosine
  modified_base 17: mod_base = OTHER; note = 2'-Omethylguanosine
  modified_base 18: mod_base = OTHER; note = 2'-Omethylguanosine
  modified_base 50: mod_base = OTHER; note = 2'-Omethylcytosine
  modified_base 52: mod_base = OTHER; note = 2'-Omethylguanosine
  modified_base 73: mod_base = OTHER; note = 2'-Omethylguanosine

SEQ ID NO: 5630 - RNA, 85 nt, synthetic construct; identical to SEQ ID NO: 3297
  source 1..85: mol_type = other RNA

SEQ ID NO: 5631 - RNA, 75 nt, synthetic construct; identical to SEQ ID NO: 1045
  source 1..75: mol_type = other RNA
  modified_base 2: mod_base = OTHER; note = 2'-Omethylguanosine phosphorothiorate
  modified_base 3: mod_base = OTHER; note = 2'-Omethyluridine phosphorothiorate
  modified_base 14: mod_base = OTHER; note = 2'-Omethyladenosine
  modified_base 18: mod_base = OTHER; note = 2'-Omethylguanosine phosphorothiorate
  modified_base 19: mod_base = OTHER; note = 2'-Omethyluridine
  modified_base 25: mod_base = OTHER; note = 2'-fluorocytosine phosphorothiorate
  modified_base 41: mod_base = OTHER; note = 2'-Omethylcytosine phosphorothiorate
  modified_base 45: mod_base = OTHER; note = 2'-Omethylguanosine
  modified_base 50: mod_base = OTHER; note = 2'-Omethylguanosine
  modified_base 53: mod_base = OTHER; note = 2'-Omethyluridine phosphorothiorate
  modified_base 54: mod_base = OTHER; note = 2'-Omethyluridine phosphorothiorate
  modified_base 55: mod_base = OTHER; note = 2'-Omethylcytosine phosphorothiorate
  modified_base 57: mod_base = OTHER; note = 2'-fluoroadenosine
  modified_base 60: mod_base = OTHER; note = 2'-Omethylcytosine
  modified_base 66: mod_base = OTHER; note = 2'-Omethylguanosine
  modified_base 72: mod_base = OTHER; note = 2'-Omethyluridine
  modified_base 74: mod_base = OTHER; note = 2'-Omethylcytosine phosphorothiorate

SEQ ID NO: 5632 - RNA, 76 nt, synthetic construct; identical to SEQ ID NO: 625
  source 1..76: mol_type = other RNA
  modified_base 1: mod_base = OTHER; note = 2'-Omethylguanosine phosphorothiorate
  modified_base 2: mod_base = OTHER; note = 2'-Omethylguanosine phosphorothiorate
  modified_base 3: mod_base = OTHER; note = 2'-Omethylcytosine
  modified_base 4: mod_base = OTHER; note = 2'-Omethyluridine
  modified_base 5: mod_base = OTHER; note = 2'-Omethylcytosine
  modified_base 6: mod_base = OTHER; note = 2'-Omethylcytosine
  modified_base 16: mod_base = OTHER; note = 2'-Omethyluridine
  modified_base 17: mod_base = OTHER; note = 2'-Omethylguanosine
  modified_base 18: mod_base = OTHER; note = 2'-Omethylguanosine
  modified_base 20: mod_base = OTHER; note = 2'-Omethyluridine
  modified_base 25: mod_base = OTHER; note = 2'-Omethylcytosine
  modified_base 33: mod_base = OTHER; note = 2'-fluorouridine
  modified_base 35: mod_base = OTHER; note = Cytosine phosphorothiorate
  modified_base 37: mod_base = OTHER; note = Adenosine phosphorothiorate
  modified_base 38: mod_base = OTHER; note = Adenosine phosphorothiorate
  modified_base 41: mod_base = OTHER; note = 2'-fluorocytosine
  modified_base 42: mod_base = OTHER; note = 2'-Omethyladenosine
  modified_base 43: mod_base = OTHER; note = 2'-Omethyladenosine
  modified_base 44: mod_base = OTHER; note = 2'-fluoroadenosine
  modified_base 49: mod_base = OTHER; note = 2'-Omethylcytosine
  modified_base 50: mod_base = OTHER; note = 2'-Omethylcytosine
  modified_base 52: mod_base = OTHER; note = 2'-Omethylguanosine
  modified_base 54: mod_base = OTHER; note = 2'-Omethyluridine
  modified_base 55: mod_base = OTHER; note = Uridine phosphorothiorate
  modified_base 56: mod_base = OTHER; note = 2'-Omethylcytosine
  modified_base 57: mod_base = OTHER; note = 2'-fluoroguanosine
  modified_base 59: mod_base = OTHER; note = 2'-Omethylguanosine
  modified_base 61: mod_base = OTHER; note = 2'-Omethylcytosine
  modified_base 62: mod_base = OTHER; note = 2'-Omethylcytosine
  modified_base 63: mod_base = OTHER; note = 2'-fluorocytosine
  modified_base 64: mod_base = OTHER; note = 2'-Omethylguanosine
  modified_base 65: mod_base = OTHER; note = 2'-Omethylguanosine
  modified_base 74: mod_base = OTHER; note = Cytosine phosphorothiorate
  modified_base 75: mod_base = OTHER; note = 2'-Omethylcytosine phosphorothiorate
  modified_base 76: mod_base = OTHER; note = 2'-Omethyladenosine

SEQ ID NO: 5633 - RNA, 76 nt, synthetic construct; identical to SEQ ID NO: 3289
  source 1..76: mol_type = other RNA
  modified_base 1: mod_base = OTHER; note = 2'-Omethylguanosine
  modified_base 44: mod_base = OTHER; note = 2'-Omethylguanosine
  modified_base 45: mod_base = OTHER; note = 2'-Omethylguanosine
  modified_base 73: mod_base = OTHER; note = 2'-Omethylguanosine

SEQ ID NO: 5634 - RNA, 86 nt, synthetic construct
  source 1..86: mol_type = other RNA
accaggatggccgagaggttaaggcgttggacttcagatccaatggacatatgtcctcgtgggttcgaaccccactcctggtacca

SEQ ID NO: 5635 - DNA, 76 bp, synthetic construct; identical to SEQ ID NO: 1924
  source 1..76: mol_type = other DNA
  modified_base 1: mod_base = OTHER; note = 2'-Omethylguanosine
  modified_base 9: mod_base = OTHER; note = Guanosine phosphorothiorate
  modified_base 10: mod_base = OTHER; note = 2'-O-(2-Methoxyethyl) guanosine
  modified_base 11: mod_base = OTHER; note = 2'-Omethylcytosine
  modified_base 13: mod_base = OTHER; note = 2'-fluorocytosine
  modified_base 16: mod_base = OTHER; note = Uridine phosphorothiorate
  modified_base 17: mod_base = OTHER; note = 2'-Omethylguanosine
  modified_base 18: mod_base = OTHER; note = 2'-Omethylguanosine phosphorothiorate
  modified_base 22: mod_base = OTHER; note = 2'-O-(2-Methoxyethyl) guanosine
  modified_base 23: mod_base = OTHER; note = Cytosine phosphorothiorate
  modified_base 26: mod_base = OTHER; note = 2'-Omethyladenosine phosphorothiorate
  modified_base 28: mod_base = OTHER; note = Uridine phosphorothiorate
  modified_base 35: mod_base = OTHER; note = Cytosine phosphorothiorate
  modified_base 38: mod_base = OTHER; note = 2'-fluoroadenosine phosphorothiorate
  modified_base 40: mod_base = OTHER; note = Uridine phosphorothiorate
  modified_base 41: mod_base = OTHER; note = 2'-fluorocytosine
  modified_base 44: mod_base = OTHER; note = Adenosine phosphorothiorate
  modified_base 45: mod_base = OTHER; note = 2'-O-(2-Methoxyethyl) guanosine phosphorothiorate
  modified_base 49: mod_base = OTHER; note = Cytosine phosphorothiorate
  modified_base 50: mod_base = OTHER; note = Cytosine phosphorothiorate
  modified_base 52: mod_base = OTHER; note = Guanosine phosphorothiorate
  modified_base 53: mod_base = OTHER; note = deoxyguanosine phosphorothiorate
  modified_base 58: mod_base = OTHER; note = Adenosine phosphorothiorate
  modified_base 59: mod_base = OTHER; note = Guanosine phosphorothiorate
  modified_base 60: mod_base = OTHER; note = Uridine phosphorothiorate
  modified_base 61: mod_base = OTHER; note = 2'-fluorocytosine phosphorothiorate
  modified_base 65: mod_base = OTHER; note = 2'-O-(2-Methoxyethyl) guanosine
  modified_base 67: mod_base = OTHER; note = 2'-fluoroguanosine phosphorothiorate
  modified_base 68: mod_base = OTHER; note = 2'-Omethylguanosine
  modified_base 70: mod_base = OTHER; note = 2'-fluoroguanosine
  modified_base 71: mod_base = OTHER; note = Uridine phosphorothiorate
  modified_base 72: mod_base = OTHER; note = 2'-O-(2-Methoxyethyl) 5-methylcytosine
  modified_base 73: mod_base = OTHER; note = 2'-O-(2-Methoxyethyl) guanosine
  modified_base 76: mod_base = OTHER; note = 2'-fluoroadenosine
  misc_feature 1..23: note = RNA
  misc_feature 24: note = DNA
  misc_feature 25..32: note = RNA
  misc_feature 33: note = DNA
  misc_feature 34..35: note = RNA
  misc_feature 36: note = DNA
  misc_feature 37..50: note = RNA
  misc_feature 51: note = DNA
  misc_feature 52: note = RNA
  misc_feature 53: note = DNA
  misc_feature 54..76: note = RNA

SEQ ID NO: 5636 - RNA, 73 nt, synthetic construct; identical to SEQ ID NO: 935
  source 1..73: mol_type = other RNA
  modified_base 1: mod_base = OTHER; note = 2'-Omethylguanosine phosphorothiorate
  modified_base 2: mod_base = OTHER; note = 2'-Omethylguanosine
  modified_base 3: mod_base = OTHER; note = 2'-Omethylcytosine
  modified_base 4: mod_base = OTHER; note = 2'-Omethyluridine
  modified_base 5: mod_base = OTHER; note = 2'-Omethylcytosine
  modified_base 6: mod_base = OTHER; note = 2'-Omethylcytosine
  modified_base 49: mod_base = OTHER; note = 2'-Omethylcytosine
  modified_base 50: mod_base = OTHER; note = 2'-Omethylcytosine
  modified_base 51: mod_base = OTHER; note = 2'-Omethylguanosine
  modified_base 52: mod_base = OTHER; note = 2'-Omethylguanosine
  modified_base 53: mod_base = OTHER; note = 2'-Omethylguanosine
  modified_base 61: mod_base = OTHER; note = 2'-Omethylcytosine
  modified_base 62: mod_base = OTHER; note = 2'-Omethylcytosine
  modified_base 63: mod_base = OTHER; note = 2'-fluorocytosine
  modified_base 64: mod_base = OTHER; note = 2'-Omethylguanosine
  modified_base 65: mod_base = OTHER; note = 2'-Omethylguanosine
  modified_base 66: mod_base = OTHER; note = 2'-Omethylcytosine
  modified_base 67: mod_base = OTHER; note = 2'-Omethylguanosine
  modified_base 68: mod_base = OTHER; note = 2'-Omethylguanosine
  modified_base 69: mod_base = OTHER; note = 2'-Omethyladenosine
  modified_base 70: mod_base = OTHER; note = 2'-fluoroguanosine

SEQ ID NO: 5637 - DNA, 76 bp, synthetic construct; identical to SEQ ID NO: 1924
  source 1..76: mol_type = other DNA
  modified_base 1: mod_base = OTHER; note = 2'-Omethylguanosine phosphorothiorate
  modified_base 2: mod_base = OTHER; note = 2'-Omethylguanosine
  modified_base 12: mod_base = OTHER; note = Guanosine phosphorothiorate
  modified_base 13: mod_base = OTHER; note = 2'-fluorocytosine
  modified_base 25: mod_base = OTHER; note = Cytosine phosphorothiorate
  modified_base 44: mod_base = OTHER; note = Adenosine phosphorothiorate
  modified_base 45: mod_base = OTHER; note = 2'-O-(2-Methoxyethyl) guanosine
  modified_base 51: mod_base = OTHER; note = Guanosine phosphorothiorate
  modified_base 73: mod_base = OTHER; note = Guanosine phosphorothiorate
  modified_base 75: mod_base = OTHER; note = 2'-Omethylcytosine
  misc_feature 1..51: note = RNA
  misc_feature 52: note = DNA
  misc_feature 53..76: note = RNA

SEQ ID NO: 5638 - RNA, 86 nt, synthetic construct; identical to SEQ ID NO: 3290
  source 1..86: mol_type = other RNA
  modified_base 1: mod_base = OTHER; note = 2'-fluoroadenosine

SEQ ID NO: 5639 - RNA, 76 nt, synthetic construct; identical to SEQ ID NO: 625
  source 1..76: mol_type = other RNA
  modified_base 1: mod_base = OTHER; note = 2'-Omethylguanosine
  modified_base 10: mod_base = OTHER; note = 2'-Omethylguanosine
  modified_base 13: mod_base = OTHER; note = 2'-Omethylcytosine
  modified_base 17: mod_base = OTHER; note = Guanosine phosphorothiorate
  modified_base 18: mod_base = OTHER; note = 2'-Omethylguanosine
  modified_base 19: mod_base = OTHER; note = Adenosine phosphorothiorate
  modified_base 20: mod_base = OTHER; note = 2'-Omethyluridine
  modified_base 25: mod_base = OTHER; note = 2'-Omethylcytosine
  modified_base 33: mod_base = OTHER; note = 2'-fluorouridine
  modified_base 35: mod_base = OTHER; note = Cytosine phosphorothiorate
  modified_base 37: mod_base = OTHER; note = Adenosine phosphorothiorate
  modified_base 38: mod_base = OTHER; note = Adenosine phosphorothiorate
  modified_base 43: mod_base = OTHER; note = 2'-Omethyladenosine
  modified_base 44: mod_base = OTHER; note = 2'-fluoroadenosine
  modified_base 46: mod_base = OTHER; note = Guanosine phosphorothiorate
  modified_base 50: mod_base = OTHER; note = 2'-Omethylcytosine
  modified_base 52: mod_base = OTHER; note = 2'-Omethylguanosine
  modified_base 54: mod_base = OTHER; note = Uridine phosphorothiorate
  modified_base 55: mod_base = OTHER; note = Uridine phosphorothiorate
  modified_base 56: mod_base = OTHER; note = 2'-Omethylcytosine
  modified_base 57: mod_base = OTHER; note = Guanosine phosphorothiorate
  modified_base 62: mod_base = OTHER; note = 2'-Omethylcytosine
  modified_base 63: mod_base = OTHER; note = 2'-fluorocytosine
  modified_base 65: mod_base = OTHER; note = 2'-Omethylguanosine
  modified_base 71: mod_base = OTHER; note = 2'-Omethyluridine
  modified_base 73: mod_base = OTHER; note = 2'-Omethylguanosine

SEQ ID NO: 5640 - RNA, 85 nt, synthetic construct; identical to SEQ ID NO: 3286
  source 1..85: mol_type = other RNA
  modified_base 1: mod_base = OTHER; note = 2'-Omethylcytosine
  modified_base 2: mod_base = OTHER; note = 2'-fluorocytosine
  modified_base 11: mod_base = OTHER; note = Cytosine phosphorothiorate
  modified_base 25: mod_base = OTHER; note = 2'-fluoroguanosine
  modified_base 27: mod_base = OTHER; note = 2'-fluorouridine
  modified_base 28: mod_base = OTHER; note = 2'-fluoroguanosine
  modified_base 29: mod_base = OTHER; note = 2'-fluoroguanosine
  modified_base 30: mod_base = OTHER; note = 2'-fluoroadenosine
  modified_base 32: mod_base = OTHER; note = 2'-fluorouridine
  modified_base 33: mod_base = OTHER; note = Uridine phosphorothiorate
  modified_base 34: mod_base = OTHER; note = 2'-fluorouridine
  modified_base 36: mod_base = OTHER; note = Guanosine phosphorothiorate
  modified_base 40: mod_base = OTHER; note = Cytosine phosphorothiorate
  modified_base 43: mod_base = OTHER; note = 2'-Omethyluridine
  modified_base 44: mod_base = OTHER; note = Guanosine phosphorothiorate
  modified_base 48: mod_base = OTHER; note = 2'-Omethyladenosine
  modified_base 51: mod_base = OTHER; note = 2'-Omethyluridine
  modified_base 54: mod_base = OTHER; note = 2'-Omethylcytosine
  modified_base 56: mod_base = OTHER; note = 2'-fluoroguanosine
  modified_base 57: mod_base = OTHER; note = 2'-Omethylcytosine
  modified_base 58: mod_base = OTHER; note = 2'-Omethylguanosine
  modified_base 61: mod_base = OTHER; note = 2'-fluoroguanosine
  modified_base 64: mod_base = OTHER; note = Uridine phosphorothiorate
  modified_base 70: mod_base = OTHER; note = 2'-fluorocytosine
  modified_base 71: mod_base = OTHER; note = 2'-fluorocytosine
  modified_base 75: mod_base = OTHER; note = 2'-fluorouridine
  modified_base 84: mod_base = OTHER; note = Cytosine phosphorothiorate

SEQ ID NO: 5641 - RNA, 76 nt, synthetic construct; identical to SEQ ID NO: 3342
  source 1..76: mol_type = other RNA
  modified_base 1: mod_base = OTHER; note = 2'-Omethylguanosine phosphorothiorate
  modified_base 2: mod_base = OTHER; note = 2'-Omethylguanosine phosphorothiorate
  modified_base 13: mod_base = OTHER; note = 2'-fluorocytosine
  modified_base 14: mod_base = OTHER; note = 2'-fluoroadenosine
  modified_base 54: mod_base = OTHER; note = 2'-fluorouridine
  modified_base 59: mod_base = OTHER; note = 2'-Omethylguanosine
  modified_base 75: mod_base = OTHER; note = Cytosine phosphorothiorate
  modified_base 76: mod_base = OTHER; note = 2'-Omethyladenosine

SEQ ID NO: 5642 - RNA, 76 nt, synthetic construct; identical to SEQ ID NO: 625
  source 1..76: mol_type = other RNA
  modified_base 1: mod_base = OTHER; note = 2'-Omethylguanosine
  modified_base 3: mod_base = OTHER; note = Cytosine phosphorothiorate
  modified_base 5: mod_base = OTHER; note = 2'-fluorocytosine
  modified_base 6: mod_base = OTHER; note = 2'-Omethylcytosine
  modified_base 9: mod_base = OTHER; note = Guanosine phosphorothiorate
  modified_base 10: mod_base = OTHER; note = 2'-fluoroguanosine
  modified_base 11: mod_base = OTHER; note = 2'-Omethylcytosine
  modified_base 12: mod_base = OTHER; note = 2'-Omethylguanosine
  modified_base 14: mod_base = OTHER; note = 2'-fluoroadenosine
  modified_base 15: mod_base = OTHER; note = 2'-Omethyladenosine
  modified_base 16: mod_base = OTHER; note = 2'-Omethyluridine
  modified_base 18: mod_base = OTHER; note = 2'-fluoroguanosine phosphorothiorate
  modified_base 20: mod_base = OTHER; note = 2'-fluorouridine
  modified_base 23: mod_base = OTHER; note = 2'-Omethylcytosine phosphorothiorate
  modified_base 24: mod_base = OTHER; note = 2'-Omethylguanosine
  modified_base 25: mod_base = OTHER; note = 2'-fluorocytosine phosphorothiorate
  modified_base 26: mod_base = OTHER; note = 2'-Omethyladenosine
  modified_base 27: mod_base = OTHER; note = 2'-Omethyluridine
  modified_base 30: mod_base = OTHER; note = Guanosine phosphorothiorate
  modified_base 31: mod_base = OTHER; note = 2'-fluoroadenosine
  modified_base 32: mod_base = OTHER; note = 2'-fluorocytosine
  modified_base 40: mod_base = OTHER; note = Uridine phosphorothiorate
  modified_base 41: mod_base = OTHER; note = 2'-Omethylcytosine
  modified_base 43: mod_base = OTHER; note = 2'-fluoroadenosine
  modified_base 49: mod_base = OTHER; note = Cytosine phosphorothiorate
  modified_base 50: mod_base = OTHER; note = 2'-Omethylcytosine
  modified_base 56: mod_base = OTHER; note = Cytosine phosphorothiorate
  modified_base 57: mod_base = OTHER; note = 2'-fluoroguanosine
  modified_base 58: mod_base = OTHER; note = 2'-fluoroadenosine
  modified_base 62: mod_base = OTHER; note = Cytosine phosphorothiorate
  modified_base 64: mod_base = OTHER; note = 2'-Omethylguanosine
  modified_base 67: mod_base = OTHER; note = 2'-Omethylguanosine
  modified_base 68: mod_base = OTHER; note = 2'-fluoroguanosine
  modified_base 69: mod_base = OTHER; note = 2'-Omethyladenosine
  modified_base 72: mod_base = OTHER; note = 2'-fluorocytosine phosphorothiorate
  modified_base 73: mod_base = OTHER; note = 2'-Omethylguanosine
  modified_base 76: mod_base = OTHER; note = 2'-Omethyladenosine

SEQ ID NO: 5643 - RNA, 74 nt, synthetic construct; identical to SEQ ID NO: 3293
  source 1..74: mol_type = other RNA
  modified_base 1: mod_base = OTHER; note = 2'-fluoroadenosine
  modified_base 2: mod_base = OTHER; note = Cytosine phosphorothiorate
  modified_base 4: mod_base = OTHER; note = 2'-fluorouridine
  modified_base 6: mod_base = OTHER; note = 2'-fluoroguanosine
  modified_base 7: mod_base = OTHER; note = 2'-Omethyluridine
  modified_base 9: mod_base = OTHER; note = 2'-fluoroguanosine
  modified_base 10: mod_base = OTHER; note = 2'-Omethylcytosine phosphorothiorate
  modified_base 24: mod_base = OTHER; note = 2'-fluoroguanosine
  modified_base 25: mod_base = OTHER; note = 2'-Omethyluridine phosphorothiorate
  modified_base 27: mod_base = OTHER; note = 2'-fluorouridine
  modified_base 44: mod_base = OTHER; note = 2'-fluoroguanosine
  modified_base 48: mod_base = OTHER; note = 2'-fluorocytosine
  modified_base 50: mod_base = OTHER; note = Uridine phosphorothiorate
  modified_base 51: mod_base = OTHER; note = 2'-fluoroguanosine
  modified_base 58: mod_base = OTHER; note = Uridine phosphorothiorate
  modified_base 62: mod_base = OTHER; note = Guanosine phosphorothiorate
  modified_base 73: mod_base = OTHER; note = 2'-Omethylcytosine phosphorothiorate

SEQ ID NO: 5644 - RNA, 85 nt, synthetic construct; identical to SEQ ID NO: 3317
  source 1..85: mol_type = other RNA
  modified_base 1: mod_base = OTHER; note = 2'-Omethylguanosine phosphorothiorate
  modified_base 2: mod_base = OTHER; note = 2'-Omethylcytosine phosphorothiorate
  modified_base 12: mod_base = OTHER; note = 2'-Omethylcytosine phosphorothiorate
  modified_base 26: mod_base = OTHER; note = 2'-Omethylguanosine phosphorothiorate
  modified_base 38: mod_base = OTHER; note = 2'-fluoroadenosine
  modified_base 45: mod_base = OTHER; note = 2'-Omethylguanosine
  modified_base 51: mod_base = OTHER; note = 2'-Omethyluridine phosphorothiorate
  modified_base 57: mod_base = OTHER; note = 2'-Omethylcytosine phosphorothiorate
  modified_base 61: mod_base = OTHER; note = Guanosine phosphorothiorate

SEQ ID NO: 5645 - RNA, 76 nt, synthetic construct; identical to SEQ ID NO: 625
  source 1..76: mol_type = other RNA
  modified_base 1: mod_base = OTHER; note = 2'-Omethylguanosine
  modified_base 8: mod_base = OTHER; note = Uridine phosphorothiorate
  modified_base 10: mod_base = OTHER; note = 2'-fluoroguanosine
  modified_base 11: mod_base = OTHER; note = 2'-fluorocytosine
  modified_base 12: mod_base = OTHER; note = Guanosine phosphorothiorate
  modified_base 14: mod_base = OTHER; note = 2'-Omethyladenosine
  modified_base 15: mod_base = OTHER; note = 2'-Omethyladenosine
  modified_base 16: mod_base = OTHER; note = 2'-Omethyluridine phosphorothiorate
  modified_base 18: mod_base = OTHER; note = 2'-Omethylguanosine phosphorothiorate
  modified_base 24: mod_base = OTHER; note = Guanosine phosphorothiorate
  modified_base 29: mod_base = OTHER; note = 2'-fluoroguanosine phosphorothiorate
  modified_base 30: mod_base = OTHER; note = 2'-Omethylguanosine
  modified_base 34: mod_base = OTHER; note = 2'-Omethyluridine
  modified_base 40: mod_base = OTHER; note = 2'-fluorouridine
  modified_base 43: mod_base = OTHER; note = 2'-fluoroadenosine
  modified_base 46: mod_base = OTHER; note = 2'-Omethylguanosine phosphorothiorate
  modified_base 47: mod_base = OTHER; note = Uridine phosphorothiorate
  modified_base 48: mod_base = OTHER; note = 2'-Omethyluridine phosphorothiorate
  modified_base 49: mod_base = OTHER; note = 2'-Omethylcytosine
  modified_base 56: mod_base = OTHER; note = 2'-Omethylcytosine
  modified_base 59: mod_base = OTHER; note = Guanosine phosphorothiorate
  modified_base 60: mod_base = OTHER; note = 2'-Omethyluridine
  modified_base 63: mod_base = OTHER; note = 2'-fluorocytosine
  modified_base 64: mod_base = OTHER; note = Guanosine phosphorothiorate
  modified_base 66: mod_base = OTHER; note = 2'-Omethylcytosine
  modified_base 69: mod_base = OTHER; note = 2'-fluoroadenosine
  modified_base 70: mod_base = OTHER; note = 2'-Omethylguanosine phosphorothiorate
  modified_base 71: mod_base = OTHER; note = 2'-fluorouridine phosphorothiorate
  modified_base 72: mod_base = OTHER; note = Cytosine phosphorothiorate
  modified_base 73: mod_base = OTHER; note = 2'-Omethylguanosine
  modified_base 75: mod_base = OTHER; note = 2'-fluorocytosine
  modified_base 76: mod_base = OTHER; note = 2'-Omethyladenosine

SEQ ID NO: 5646 - RNA, 76 nt, synthetic construct; identical to SEQ ID NO: 625
  source 1..76: mol_type = other RNA
  modified_base 4: mod_base = OTHER; note = Uridine phosphorothiorate
  modified_base 5: mod_base = OTHER; note = 2'-fluorocytosine
  modified_base 6: mod_base = OTHER; note = 2'-Omethylcytosine
  modified_base 11: mod_base = OTHER; note = Cytosine phosphorothiorate
  modified_base 12: mod_base = OTHER; note = 2'-Omethylguanosine
  modified_base 14: mod_base = OTHER; note = Adenosine phosphorothiorate
  modified_base 15: mod_base = OTHER; note = 2'-Omethyladenosine
  modified_base 16: mod_base = OTHER; note = 2'-fluorouridine
  modified_base 17: mod_base = OTHER; note = Guanosine phosphorothiorate
  modified_base 18: mod_base = OTHER; note = 2'-Omethylguanosine
  modified_base 20: mod_base = OTHER; note = 2'-fluorouridine
  modified_base 22: mod_base = OTHER; note = 2'-Omethylguanosine
  modified_base 24: mod_base = OTHER; note = 2'-fluoroguanosine
  modified_base 25: mod_base = OTHER; note = 2'-fluorocytosine
  modified_base 26: mod_base = OTHER; note = 2'-Omethyladenosine phosphorothiorate
  modified_base 27: mod_base = OTHER; note = 2'-Omethyluridine phosphorothiorate
  modified_base 28: mod_base = OTHER; note = 2'-Omethyluridine
  modified_base 29: mod_base = OTHER; note = 2'-Omethylguanosine
  modified_base 34: mod_base = OTHER; note = 2'-fluorouridine
  modified_base 39: mod_base = OTHER; note = Uridine phosphorothiorate
  modified_base 40: mod_base = OTHER; note = 2'-Omethyluridine
  modified_base 42: mod_base = OTHER; note = 2'-fluoroadenosine
  modified_base 44: mod_base = OTHER; note = 2'-fluoroadenosine
  modified_base 45: mod_base = OTHER; note = 2'-fluoroguanosine
  modified_base 49: mod_base = OTHER; note = 2'-fluorocytosine
  modified_base 51: mod_base = OTHER; note = 2'-Omethylguanosine
  modified_base 54: mod_base = OTHER; note = 2'-fluorouridine
  modified_base 56: mod_base = OTHER; note = Cytosine phosphorothiorate
  modified_base 63: mod_base = OTHER; note = 2'-Omethylcytosine
  modified_base 64: mod_base = OTHER; note = 2'-fluoroguanosine phosphorothiorate
  modified_base 68: mod_base = OTHER; note = 2'-Omethylguanosine
  modified_base 69: mod_base = OTHER; note = 2'-fluoroadenosine
  modified_base 70: mod_base = OTHER; note = 2'-Omethylguanosine phosphorothiorate
  modified_base 72: mod_base = OTHER; note = 2'-fluorocytosine
  modified_base 74: mod_base = OTHER; note = 2'-Omethylcytosine
  modified_base 75: mod_base = OTHER; note = 2'-fluorocytosine phosphorothiorate
  modified_base 76: mod_base = OTHER; note = 2'-Omethyladenosine

SEQ ID NO: 5647 - RNA, 76 nt, synthetic construct; identical to SEQ ID NO: 625
  source 1..76: mol_type = other RNA
  modified_base 1: mod_base = OTHER; note = 2'-Omethylguanosine phosphorothiorate
  modified_base 2: mod_base = OTHER; note = 2'-Omethylguanosine
  modified_base 3: mod_base = OTHER; note = 2'-Omethylcytosine
  modified_base 4: mod_base = OTHER; note = 2'-Omethyluridine
  modified_base 5: mod_base = OTHER; note = 2'-Omethylcytosine
  modified_base 6: mod_base = OTHER; note = 2'-Omethylcytosine
  modified_base 13: mod_base = OTHER; note = 2'-Omethylcytosine
  modified_base 16: mod_base = OTHER; note = 2'-Omethyluridine
  modified_base 17: mod_base = OTHER; note = 2'-Omethylguanosine
  modified_base 18: mod_base = OTHER; note = 2'-Omethylguanosine
  modified_base 20: mod_base = OTHER; note = 2'-Omethyluridine
  modified_base 22: mod_base = OTHER; note = 2'-Omethylguanosine
  modified_base 25: mod_base = OTHER; note = 2'-Omethylcytosine
  modified_base 29: mod_base = OTHER; note = 2'-Omethylguanosine
  modified_base 33: mod_base = OTHER; note = 2'-fluorouridine
  modified_base 35: mod_base = OTHER; note = Cytosine phosphorothiorate
  modified_base 37: mod_base = OTHER; note = Adenosine phosphorothiorate
  modified_base 38: mod_base = OTHER; note = Adenosine phosphorothiorate
  modified_base 41: mod_base = OTHER; note = 2'-fluorocytosine phosphorothiorate
  modified_base 43: mod_base = OTHER; note = 2'-Omethyladenosine
  modified_base 44: mod_base = OTHER; note = 2'-fluoroadenosine
  modified_base 46: mod_base = OTHER; note = Guanosine phosphorothiorate
  modified_base 49: mod_base = OTHER; note = 2'-Omethylcytosine
  modified_base 50: mod_base = OTHER; note = 2'-Omethylcytosine
  modified_base 51: mod_base = OTHER; note = 2'-Omethylguanosine
  modified_base 52: mod_base = OTHER; note = 2'-Omethylguanosine
  modified_base 53: mod_base = OTHER; note = 2'-Omethylguanosine
  modified_base 54: mod_base = OTHER; note = 2'-Omethyluridine phosphorothiorate
  modified_base 55: mod_base = OTHER; note = Uridine phosphorothiorate
  modified_base 56: mod_base = OTHER; note = 2'-Omethylcytosine
  modified_base 57: mod_base = OTHER; note = 2'-fluoroguanosine
  modified_base 59: mod_base = OTHER; note = 2'-Omethylguanosine
  modified_base 61: mod_base = OTHER; note = 2'-Omethylcytosine
  modified_base 62: mod_base = OTHER; note = 2'-Omethylcytosine
  modified_base 63: mod_base = OTHER; note = 2'-fluorocytosine
  modified_base 64: mod_base = OTHER; note = 2'-Omethylguanosine
  modified_base 65: mod_base = OTHER; note = 2'-Omethylguanosine
  modified_base 66: mod_base = OTHER; note = 2'-Omethylcytosine
  modified_base 67: mod_base = OTHER; note = 2'-Omethylguanosine
  modified_base 68: mod_base = OTHER; note = 2'-Omethylguanosine
  modified_base 69: mod_base = OTHER; note = 2'-Omethyladenosine
  modified_base 71: mod_base = OTHER; note = 2'-Omethyluridine
  modified_base 73: mod_base = OTHER; note = 2'-Omethylguanosine
  modified_base 74: mod_base = OTHER; note = Cytosine phosphorothiorate
  modified_base 75: mod_base = OTHER; note = 2'-fluorocytosine phosphorothiorate

SEQ ID NO: 5648 - RNA, 76 nt, synthetic construct; identical to SEQ ID NO: 3295
  source 1..76: mol_type = other RNA
  modified_base 1: mod_base = OTHER; note = 2'-Omethylcytosine
  modified_base 2: mod_base = OTHER; note = 2'-fluorocytosine
  modified_base 3: mod_base = OTHER; note = 2'-Omethyluridine
  modified_base 9: mod_base = OTHER; note = 2'-fluoroadenosine
  modified_base 12: mod_base = OTHER; note = 2'-Omethyluridine phosphorothiorate
  modified_base 15: mod_base = OTHER; note = 2'-fluoroguanosine phosphorothiorate
  modified_base 24: mod_base = OTHER; note = 2'-fluoroguanosine
  modified_base 26: mod_base = OTHER; note = 2'-Omethylguanosine phosphorothiorate
  modified_base 37: mod_base = OTHER; note = 2'-fluoroguanosine
  modified_base 47: mod_base = OTHER; note = 2'-Omethyluridine
  modified_base 52: mod_base = OTHER; note = 2'-Omethylguanosine phosphorothiorate
  modified_base 75: mod_base = OTHER; note = 2'-Omethylcytosine phosphorothiorate

SEQ ID NO: 5649 - RNA, 75 nt, synthetic construct; identical to SEQ ID NO: 3311
  source 1..75: mol_type = other RNA
  modified_base 1: mod_base = OTHER; note = 2'-Omethylguanosine
  modified_base 2: mod_base = OTHER; note = 2'-Omethylguanosine phosphorothiorate
  modified_base 19: mod_base = OTHER; note = Uridine phosphorothiorate
  modified_base 20: mod_base = OTHER; note = 2'-fluoroadenosine
  modified_base 25: mod_base = OTHER; note = Cytosine phosphorothiorate
  modified_base 36: mod_base = OTHER; note = 2'-fluoroadenosine
  modified_base 41: mod_base = OTHER; note = 2'-fluorocytosine
  modified_base 44: mod_base = OTHER; note = 2'-fluorocytosine
  modified_base 51: mod_base = OTHER; note = 2'-fluoroadenosine phosphorothiorate
  modified_base 66: mod_base = OTHER; note = Guanosine phosphorothiorate
  modified_base 67: mod_base = OTHER; note = 2'-fluoroguanosine
  modified_base 73: mod_base = OTHER; note = 2'-fluorocytosine phosphorothiorate

SEQ ID NO: 5650 - RNA, 76 nt, synthetic construct; identical to SEQ ID NO: 625
  source 1..76: mol_type = other RNA
  modified_base 1: mod_base = OTHER; note = 2'-Omethylguanosine phosphorothiorate
  modified_base 2: mod_base = OTHER; note = 2'-Omethylguanosine
  modified_base 25: mod_base = OTHER; note = 2'-O-(2-Methoxyethyl) 5-methylcytosine
  modified_base 52: mod_base = OTHER; note = 2'-fluoroguanosine
  modified_base 56: mod_base = OTHER; note = Cytosine phosphorothiorate
  modified_base 61: mod_base = OTHER; note = 2'-fluorocytosine
  modified_base 74: mod_base = OTHER; note = Cytosine phosphorothiorate
  modified_base 75: mod_base = OTHER; note = 2'-Omethylcytosine phosphorothiorate
  modified_base 76: mod_base = OTHER; note = 2'-Omethyladenosine

SEQ ID NO: 5651 - RNA, 76 nt, synthetic construct
  source 1..76: mol_type = other RNA
gcctcagtggcctaatggataaggcactggccttcaaagccagggattgggggttcgagtcccctctgaggtgcca

SEQ ID NO: 5652 - RNA, 74 nt, synthetic construct; identical to SEQ ID NO: 766
  source 1..74: mol_type = other RNA
  modified_base 1: mod_base = OTHER; note = 2'-Omethylguanosine
  modified_base 14: mod_base = OTHER; note = 2'-Omethyladenosine
  modified_base 15: mod_base = OTHER; note = 2'-fluoroadenosine
  modified_base 16: mod_base = OTHER; note = 2'-Omethyluridine
  modified_base 17: mod_base = OTHER; note = 2'-Omethylguanosine
  modified_base 18: mod_base = OTHER; note = 2'-Omethylguanosine
  modified_base 19: mod_base = OTHER; note = 2'-fluoroadenosine
  modified_base 20: mod_base = OTHER; note = 2'-Omethyluridine
  modified_base 73: mod_base = OTHER; note = 2'-Omethylguanosine phosphorothiorate

SEQ ID NO: 5653 - RNA, 76 nt, synthetic construct; identical to SEQ ID NO: 625
  source 1..76: mol_type = other RNA
  modified_base 1: mod_base = OTHER; note = 2'-Omethylguanosine
  modified_base 2: mod_base = OTHER; note = 2'-Omethylguanosine
  modified_base 3: mod_base = OTHER; note = 2'-Omethylcytosine
  modified_base 4: mod_base = OTHER; note = 2'-Omethyluridine
  modified_base 5: mod_base = OTHER; note = 2'-Omethylcytosine
  modified_base 6: mod_base = OTHER; note = 2'-Omethylcytosine
  modified_base 13: mod_base = OTHER; note = 2'-Omethylcytosine
  modified_base 14: mod_base = OTHER; note = 2'-Omethyladenosine
  modified_base 15: mod_base = OTHER; note = 2'-fluoroadenosine
  modified_base 16: mod_base = OTHER; note = 2'-Omethyluridine
  modified_base 17: mod_base = OTHER; note = 2'-Omethylguanosine
  modified_base 18: mod_base = OTHER; note = 2'-Omethylguanosine
  modified_base 19: mod_base = OTHER; note = 2'-fluoroadenosine
  modified_base 20: mod_base = OTHER; note = 2'-Omethyluridine
  modified_base 21: mod_base = OTHER; note = 2'-fluoroadenosine
  modified_base 33: mod_base = OTHER; note = 2'-fluorouridine
  modified_base 35: mod_base = OTHER; note = Cytosine phosphorothiorate
  modified_base 37: mod_base = OTHER; note = Adenosine phosphorothiorate
  modified_base 38: mod_base = OTHER; note = Adenosine phosphorothiorate
  modified_base 52: mod_base = OTHER; note = 2'-Omethylguanosine
  modified_base 53: mod_base = OTHER; note = 2'-Omethylguanosine
  modified_base 54: mod_base = OTHER; note = 2'-Omethyluridine phosphorothiorate
  modified_base 55: mod_base = OTHER; note = Uridine phosphorothiorate
  modified_base 56: mod_base = OTHER; note = 2'-Omethylcytosine
  modified_base 57: mod_base = OTHER; note = 2'-fluoroguanosine
  modified_base 59: mod_base = OTHER; note = 2'-Omethylguanosine
  modified_base 62: mod_base = OTHER; note = 2'-Omethylcytosine
  modified_base 63: mod_base = OTHER; note = 2'-fluorocytosine
  modified_base 65: mod_base = OTHER; note = 2'-Omethylguanosine
  modified_base 73: mod_base = OTHER; note = 2'-Omethylguanosine
  modified_base 75: mod_base = OTHER; note = 2'-fluorocytosine phosphorothiorate

SEQ ID NO: 5654 - RNA, 76 nt, synthetic construct; identical to SEQ ID NO: 3289
  source 1..76: mol_type = other RNA
  modified_base 1: mod_base = OTHER; note = 2'-Omethylguanosine
  modified_base 49: mod_base = OTHER; note = 2'-Omethylcytosine
  modified_base 50: mod_base = OTHER; note = 2'-Omethyladenosine
  modified_base 51: mod_base = OTHER; note = 2'-Omethylguanosine
  modified_base 52: mod_base = OTHER; note = 2'-Omethylguanosine
  modified_base 53: mod_base = OTHER; note = 2'-Omethylguanosine
  modified_base 61: mod_base = OTHER; note = 2'-Omethylcytosine
  modified_base 62: mod_base = OTHER; note = 2'-Omethylcytosine
  modified_base 63: mod_base = OTHER; note = 2'-fluorocytosine
  modified_base 64: mod_base = OTHER; note = 2'-Omethyluridine
  modified_base 65: mod_base = OTHER; note = 2'-Omethylguanosine
  modified_base 73: mod_base = OTHER; note = 2'-Omethylguanosine

SEQ ID NO: 5655 - RNA, 76 nt, synthetic construct; identical to SEQ ID NO: 625
  source 1..76: mol_type = other RNA
  modified_base 1: mod_base = OTHER; note = 2'-Omethylguanosine phosphorothiorate
  modified_base 2: mod_base = OTHER; note = 2'-Omethylguanosine phosphorothiorate
  modified_base 3: mod_base = OTHER; note = 2'-Omethylcytosine phosphorothiorate
  modified_base 4: mod_base = OTHER; note = 2'-Omethyluridine phosphorothiorate
  modified_base 5: mod_base = OTHER; note = 2'-Omethylcytosine phosphorothiorate
  modified_base 6: mod_base = OTHER; note = 2'-Omethylcytosine phosphorothiorate
  modified_base 10: mod_base = OTHER; note = 2'-Omethylguanosine
  modified_base 11: mod_base = OTHER; note = 2'-Omethylcytosine
  modified_base 12: mod_base = OTHER; note = 2'-Omethylguanosine
  modified_base 13: mod_base = OTHER; note = 2'-Omethylcytosine
  modified_base 14: mod_base = OTHER; note = 2'-Omethyladenosine
  modified_base 15: mod_base = OTHER; note = 2'-Omethyladenosine
  modified_base 16: mod_base = OTHER; note = 2'-Omethyluridine
  modified_base 17: mod_base = OTHER; note = 2'-Omethylguanosine
  modified_base 18: mod_base = OTHER; note = 2'-Omethylguanosine
  modified_base 19: mod_base = OTHER; note = 2'-Omethyladenosine
  modified_base 20: mod_base = OTHER; note = 2'-Omethyluridine
  modified_base 22: mod_base = OTHER; note = 2'-Omethylguanosine
  modified_base 23: mod_base = OTHER; note = 2'-Omethylcytosine
  modified_base 24: mod_base = OTHER; note = 2'-Omethylguanosine
  modified_base 25: mod_base = OTHER; note = 2'-Omethylcytosine
  modified_base 40: mod_base = OTHER; note = 2'-fluorouridine
  modified_base 41: mod_base = OTHER; note = 2'-fluorocytosine
  modified_base 42: mod_base = OTHER; note = 2'-fluoroadenosine
  modified_base 43: mod_base = OTHER; note = 2'-fluoroadenosine
  modified_base 44: mod_base = OTHER; note = 2'-Omethyladenosine
  modified_base 45: mod_base = OTHER; note = 2'-Omethylguanosine
  modified_base 46: mod_base = OTHER; note = 2'-Omethylguanosine
  modified_base 54: mod_base = OTHER; note = Uridine phosphorothiorate
  modified_base 55: mod_base = OTHER; note = Uridine phosphorothiorate
  modified_base 56: mod_base = OTHER; note = Cytosine phosphorothiorate
  modified_base 57: mod_base = OTHER; note = Guanosine phosphorothiorate
  modified_base 61: mod_base = OTHER; note = 2'-Omethylcytosine
  modified_base 62: mod_base = OTHER; note = 2'-Omethylcytosine
  modified_base 63: mod_base = OTHER; note = 2'-Omethylcytosine
  modified_base 64: mod_base = OTHER; note = 2'-Omethylguanosine
  modified_base 65: mod_base = OTHER; note = 2'-Omethylguanosine
  modified_base 66: mod_base = OTHER; note = 2'-Omethylcytosine
  modified_base 67: mod_base = OTHER; note = 2'-Omethylguanosine
  modified_base 68: mod_base = OTHER; note = 2'-Omethylguanosine
  modified_base 69: mod_base = OTHER; note = 2'-Omethyladenosine

SEQ ID NO: 5656 - RNA, 86 nt, synthetic construct; identical to SEQ ID NO: 3290
  source 1..86: mol_type = other RNA
  modified_base 1: mod_base = OTHER; note = 2'-Omethyladenosine
  modified_base 16: mod_base = OTHER; note = 2'-Omethyluridine
  modified_base 17: mod_base = OTHER; note = 2'-Omethylguanosine
  modified_base 18: mod_base = OTHER; note = 2'-Omethylguanosine
  modified_base 64: mod_base = OTHER; note = 2'-Omethyluridine
  modified_base 66: mod_base = OTHER; note = 2'-Omethylcytosine
  modified_base 67: mod_base = OTHER; note = 2'-Omethylguanosine
  modified_base 69: mod_base = OTHER; note = 2'-Omethyladenosine
  modified_base 83: mod_base = OTHER; note = 2'-Omethyladenosine

SEQ ID NO: 5657 - RNA, 75 nt, synthetic construct; identical to SEQ ID NO: 3311
  source 1..75: mol_type = other RNA
  modified_base 1: mod_base = OTHER; note = 2'-Omethylguanosine phosphorothiorate
  modified_base 2: mod_base = OTHER; note = Guanosine phosphorothiorate
  modified_base 5: mod_base = OTHER; note = 2'-Omethylcytosine phosphorothiorate
  modified_base 10: mod_base = OTHER; note = Guanosine phosphorothiorate
  modified_base 18: mod_base = OTHER; note = Guanosine phosphorothiorate
  modified_base 22: mod_base = OTHER; note = 2'-fluoroguanosine
  modified_base 25: mod_base = OTHER; note = 2'-fluorocytosine
  modified_base 38: mod_base = OTHER; note = 2'-fluoroadenosine phosphorothiorate
  modified_base 57: mod_base = OTHER; note = Adenosine phosphorothiorate
  modified_base 58: mod_base = OTHER; note = 2'-fluoroguanosine
  modified_base 61: mod_base = OTHER; note = Uridine phosphorothiorate
  modified_base 64: mod_base = OTHER; note = 2'-fluoroguanosine
  modified_base 67: mod_base = OTHER; note = Guanosine phosphorothiorate
  modified_base 68: mod_base = OTHER; note = 2'-fluoroadenosine
  modified_base 74: mod_base = OTHER; note = 2'-fluorocytosine phosphorothiorate

SEQ ID NO: 5658 - RNA, 76 nt, synthetic construct; identical to SEQ ID NO: 3342
  source 1..76: mol_type = other RNA
  modified_base 1: mod_base = OTHER; note = 2'-Omethylguanosine
  modified_base 2: mod_base = OTHER; note = 2'-Omethylguanosine
  modified_base 3: mod_base = OTHER; note = 2'-Omethylcytosine
  modified_base 4: mod_base = OTHER; note = 2'-Omethyluridine
  modified_base 5: mod_base = OTHER; note = 2'-Omethylcytosine
  modified_base 6: mod_base = OTHER; note = 2'-Omethylcytosine
  modified_base 16: mod_base = OTHER; note = 2'-Omethyluridine
  modified_base 17: mod_base = OTHER; note = 2'-Omethylguanosine
  modified_base 18: mod_base = OTHER; note = 2'-Omethylguanosine
  modified_base 20: mod_base = OTHER; note = 2'-Omethyluridine
  modified_base 25: mod_base = OTHER; note = 2'-Omethylcytosine
  modified_base 33: mod_base = OTHER; note = 2'-fluorouridine
  modified_base 35: mod_base = OTHER; note = Cytosine phosphorothiorate
  modified_base 37: mod_base = OTHER; note = Adenosine phosphorothiorate
  modified_base 38: mod_base = OTHER; note = Adenosine phosphorothiorate
  modified_base 41: mod_base = OTHER; note = 2'-fluorocytosine
  modified_base 42: mod_base = OTHER; note = 2'-Omethylguanosine
  modified_base 43: mod_base = OTHER; note = 2'-Omethyladenosine
  modified_base 44: mod_base = OTHER; note = 2'-fluoroadenosine
  modified_base 49: mod_base = OTHER; note = 2'-Omethylcytosine
  modified_base 50: mod_base = OTHER; note = 2'-Omethylcytosine
  modified_base 52: mod_base = OTHER; note = 2'-Omethylguanosine
  modified_base 54: mod_base = OTHER; note = 2'-Omethyluridine
  modified_base 55: mod_base = OTHER; note = Uridine phosphorothiorate
  modified_base 56: mod_base = OTHER; note = 2'-Omethylcytosine
  modified_base 57: mod_base = OTHER; note = 2'-fluoroguanosine
  modified_base 59: mod_base = OTHER; note = 2'-Omethylguanosine
  modified_base 61: mod_base = OTHER; note = 2'-Omethylcytosine
  modified_base 62: mod_base = OTHER; note = 2'-Omethylcytosine
  modified_base 63: mod_base = OTHER; note = 2'-fluorocytosine
  modified_base 64: mod_base = OTHER; note = 2'-Omethylguanosine
  modified_base 65: mod_base = OTHER; note = 2'-Omethylguanosine
  modified_base 73: mod_base = OTHER; note = 2'-Omethylguanosine

SEQ ID NO: 5659 - RNA, 76 nt, synthetic construct; identical to SEQ ID NO: 3419
  source 1..76: mol_type = other RNA
  modified_base 1: mod_base = OTHER; note = 2'-Omethylguanosine phosphorothiorate
  modified_base 2: mod_base = OTHER; note = 2'-Omethylguanosine phosphorothiorate
  modified_base 74: mod_base = OTHER; note = Cytosine phosphorothiorate
  modified_base 75: mod_base = OTHER; note = 2'-Omethylcytosine

SEQ ID NO: 5660 - RNA, 85 nt, synthetic construct; identical to SEQ ID NO: 3288
  source 1..85: mol_type = other RNA
  modified_base 1: mod_base = OTHER; note = Cytosine phosphorothiorate
  modified_base 9: mod_base = OTHER; note = Guanosine phosphorothiorate
  modified_base 38: mod_base = OTHER; note = Uridine phosphorothiorate
  modified_base 55: mod_base = OTHER; note = 2'-Omethylcytosine
  modified_base 57: mod_base = OTHER; note = Cytosine phosphorothiorate
  modified_base 73: mod_base = OTHER; note = Adenosine phosphorothiorate

SEQ ID NO: 5661 - RNA, 75 nt, synthetic construct; identical to SEQ ID NO: 3306
  source 1..75: mol_type = other RNA
  modified_base 73: mod_base = OTHER; note = 2'-Omethylcytosine
  modified_base 74: mod_base = OTHER; note = 2'-Omethylcytosine

SEQ ID NO: 5662 - RNA, 76 nt, synthetic construct; identical to SEQ ID NO: 3289
  source 1..76: mol_type = other RNA
  modified_base 1: mod_base = OTHER; note = 2'-Omethylguanosine
  modified_base 65: mod_base = OTHER; note = 2'-Omethylguanosine

SEQ ID NO: 5663 - RNA, 75 nt, synthetic construct; identical to SEQ ID NO: 1045
  source 1..75: mol_type = other RNA
  modified_base 1: mod_base = OTHER; note = 2'-Omethylguanosine phosphorothiorate
  modified_base 2: mod_base = OTHER; note = 2'-Omethylguanosine phosphorothiorate
  modified_base 14: mod_base = OTHER; note = Adenosine phosphorothiorate
  modified_base 20: mod_base = OTHER; note = Adenosine phosphorothiorate
  modified_base 21: mod_base = OTHER; note = 2'-fluoroadenosine
  modified_base 73: mod_base = OTHER; note = Cytosine phosphorothiorate
  modified_base 74: mod_base = OTHER; note = 2'-Omethylcytosine phosphorothiorate
  modified_base 75: mod_base = OTHER; note = 2'-Omethyladenosine

SEQ ID NO: 5664 - RNA, 76 nt, synthetic construct; identical to SEQ ID NO: 3318
  source 1..76: mol_type = other RNA
  modified_base 1: mod_base = OTHER; note = 2'-Omethylcytosine phosphorothiorate
  modified_base 2: mod_base = OTHER; note = 2'-Omethylcytosine phosphorothiorate
  modified_base 3: mod_base = OTHER; note = 2'-Omethyluridine
  modified_base 4: mod_base = OTHER; note = 2'-Omethyluridine
  modified_base 5: mod_base = OTHER; note = 2'-Omethylcytosine
  modified_base 6: mod_base = OTHER; note = 2'-Omethylguanosine
  modified_base 44: mod_base = OTHER; note = 2'-Omethyladenosine
  modified_base 45: mod_base = OTHER; note = 2'-Omethylguanosine
  modified_base 49: mod_base = OTHER; note = 2'-Omethylguanosine
  modified_base 50: mod_base = OTHER; note = 2'-Omethylcytosine
  modified_base 51: mod_base = OTHER; note = 2'-Omethyluridine
  modified_base 52: mod_base = OTHER; note = 2'-Omethylguanosine
  modified_base 53: mod_base = OTHER; note = 2'-Omethylguanosine
  modified_base 54: mod_base = OTHER; note = 2'-Omethyluridine
  modified_base 61: mod_base = OTHER; note = 2'-Omethylcytosine
  modified_base 62: mod_base = OTHER; note = 2'-Omethylcytosine
  modified_base 63: mod_base = OTHER; note = 2'-fluoroguanosine
  modified_base 64: mod_base = OTHER; note = 2'-Omethylguanosine
  modified_base 65: mod_base = OTHER; note = 2'-Omethylcytosine
  modified_base 66: mod_base = OTHER; note = 2'-Omethyluridine
  modified_base 67: mod_base = OTHER; note = 2'-Omethylcytosine
  modified_base 68: mod_base = OTHER; note = 2'-Omethylguanosine
  modified_base 73: mod_base = OTHER; note = 2'-Omethyladenosine

SEQ ID NO: 5665 - RNA, 76 nt, synthetic construct; identical to SEQ ID NO: 625
  source 1..76: mol_type = other RNA
  modified_base 3: mod_base = OTHER; note = 2'-fluorocytosine
  modified_base 4: mod_base = OTHER; note = Uridine phosphorothiorate
  modified_base 5: mod_base = OTHER; note = 2'-fluorocytosine
  modified_base 11: mod_base = OTHER; note = 2'-Omethylcytosine
  modified_base 14: mod_base = OTHER; note = 2'-fluoroadenosine
  modified_base 18: mod_base = OTHER; note = 2'-Omethylguanosine
  modified_base 22: mod_base = OTHER; note = Guanosine phosphorothiorate
  modified_base 23: mod_base = OTHER; note = 2'-fluorocytosine
  modified_base 24: mod_base = OTHER; note = 2'-Omethylguanosine
  modified_base 25: mod_base = OTHER; note = 2'-fluorocytosine
  modified_base 28: mod_base = OTHER; note = 2'-Omethyluridine
  modified_base 29: mod_base = OTHER; note = 2'-fluoroguanosine
  modified_base 30: mod_base = OTHER; note = Guanosine phosphorothiorate
  modified_base 31: mod_base = OTHER; note = 2'-fluoroadenosine
  modified_base 38: mod_base = OTHER; note = 2'-Omethyladenosine
  modified_base 39: mod_base = OTHER; note = 2'-Omethyluridine
  modified_base 44: mod_base = OTHER; note = 2'-fluoroadenosine
  modified_base 46: mod_base = OTHER; note = 2'-Omethylguanosine
  modified_base 48: mod_base = OTHER; note = 2'-fluorouridine
  modified_base 50: mod_base = OTHER; note = 2'-Omethylcytosine
  modified_base 54: mod_base = OTHER; note = Uridine phosphorothiorate
  modified_base 56: mod_base = OTHER; note = 2'-Omethylcytosine
  modified_base 57: mod_base = OTHER; note = 2'-Omethylguanosine phosphorothiorate
  modified_base 58: mod_base = OTHER; note = 2'-fluoroadenosine
  modified_base 59: mod_base = OTHER; note = 2'-Omethylguanosine
  modified_base 62: mod_base = OTHER; note = 2'-Omethylcytosine
  modified_base 64: mod_base = OTHER; note = 2'-Omethylguanosine
  modified_base 65: mod_base = OTHER; note = 2'-Omethylguanosine
  modified_base 68: mod_base = OTHER; note = 2'-Omethylguanosine
  modified_base 69: mod_base = OTHER; note = 2'-Omethyladenosine
  modified_base 71: mod_base = OTHER; note = 2'-fluorouridine
  modified_base 72: mod_base = OTHER; note = Cytosine phosphorothiorate
  modified_base 73: mod_base = OTHER; note = 2'-Omethylguanosine
  modified_base 74: mod_base = OTHER; note = 2'-Omethylcytosine
  modified_base 75: mod_base = OTHER; note = 2'-Omethylcytosine

SEQ ID NO: 5666 - RNA, 76 nt, synthetic construct; identical to SEQ ID NO: 3342
  source 1..76: mol_type = other RNA
  modified_base 1: mod_base = OTHER; note = 2'-Omethylguanosine
  modified_base 14: mod_base = OTHER; note = 2'-Omethyladenosine
  modified_base 15: mod_base = OTHER; note = 2'-fluoroadenosine
  modified_base 16: mod_base = OTHER; note = 2'-Omethyluridine
  modified_base 17: mod_base = OTHER; note = 2'-Omethylguanosine
  modified_base 18: mod_base = OTHER; note = 2'-Omethylguanosine
  modified_base 19: mod_base = OTHER; note = 2'-fluoroadenosine
  modified_base 20: mod_base = OTHER; note = 2'-Omethyluridine
  modified_base 54: mod_base = OTHER; note = 2'-Omethyluridine phosphorothiorate
  modified_base 55: mod_base = OTHER; note = Uridine phosphorothiorate
  modified_base 56: mod_base = OTHER; note = 2'-Omethylcytosine
  modified_base 57: mod_base = OTHER; note = 2'-Omethylguanosine
  modified_base 59: mod_base = OTHER; note = 2'-Omethylguanosine
  modified_base 73: mod_base = OTHER; note = 2'-Omethylguanosine

SEQ ID NO: 5667 - RNA, 76 nt, synthetic construct; identical to SEQ ID NO: 3490
  source 1..76: mol_type = other RNA
  modified_base 1: mod_base = OTHER; note = 2'-Omethylguanosine phosphorothiorate
  modified_base 2: mod_base = OTHER; note = 2'-Omethylguanosine phosphorothiorate
  modified_base 3: mod_base = OTHER; note = 2'-Omethylcytosine
  modified_base 4: mod_base = OTHER; note = 2'-Omethyluridine
  modified_base 5: mod_base = OTHER; note = 2'-Omethylcytosine
  modified_base 6: mod_base = OTHER; note = 2'-Omethylcytosine
  modified_base 10: mod_base = OTHER; note = 2'-Omethylguanosine
  modified_base 11: mod_base = OTHER; note = 2'-Omethylcytosine
  modified_base 12: mod_base = OTHER; note = 2'-Omethylguanosine
  modified_base 13: mod_base = OTHER; note = 2'-Omethylcytosine
  modified_base 22: mod_base = OTHER; note = 2'-Omethylguanosine
  modified_base 23: mod_base = OTHER; note = 2'-Omethylcytosine
  modified_base 24: mod_base = OTHER; note = 2'-Omethylguanosine
  modified_base 25: mod_base = OTHER; note = 2'-Omethylcytosine
  modified_base 49: mod_base = OTHER; note = 2'-Omethylguanosine
  modified_base 50: mod_base = OTHER; note = 2'-Omethylcytosine
  modified_base 51: mod_base = OTHER; note = 2'-Omethylguanosine
  modified_base 52: mod_base = OTHER; note = 2'-Omethylguanosine
  modified_base 53: mod_base = OTHER; note = 2'-Omethylguanosine
  modified_base 54: mod_base = OTHER; note = 2'-Omethyluridine
  modified_base 61: mod_base = OTHER; note = 2'-Omethylcytosine
  modified_base 62: mod_base = OTHER; note = 2'-Omethylcytosine
  modified_base 63: mod_base = OTHER; note = 2'-fluorocytosine
  modified_base 64: mod_base = OTHER; note = 2'-Omethylguanosine
  modified_base 65: mod_base = OTHER; note = 2'-Omethylcytosine
  modified_base 66: mod_base = OTHER; note = 2'-Omethylcytosine
  modified_base 67: mod_base = OTHER; note = 2'-Omethylguanosine
  modified_base 68: mod_base = OTHER; note = 2'-Omethylguanosine
  modified_base 73: mod_base = OTHER; note = 2'-Omethylguanosine

SEQ ID NO: 5668 - RNA, 85 nt, synthetic construct; identical to SEQ ID NO: 3317
  source 1..85: mol_type = other RNA
  modified_base 1: mod_base = OTHER; note = 2'-Omethylguanosine phosphorothiorate
  modified_base 2: mod_base = OTHER; note = 2'-Omethylcytosine phosphorothiorate
  modified_base 3: mod_base = OTHER; note = 2'-Omethyluridine phosphorothiorate
  modified_base 4: mod_base = OTHER; note = Guanosine phosphorothiorate
  modified_base 15: mod_base = OTHER; note = 2'-Omethylguanosine
  modified_base 17: mod_base = OTHER; note = 2'-Omethylguanosine
  modified_base 33: mod_base = OTHER; note = 2'-fluorouridine
  modified_base 44: mod_base = OTHER; note = 2'-Omethyluridine
  modified_base 45: mod_base = OTHER; note = 2'-fluoroguanosine
  modified_base 46: mod_base = OTHER; note = 2'-Omethylguanosine
  modified_base 55: mod_base = OTHER; note = 2'-Omethylcytosine phosphorothiorate
  modified_base 59: mod_base = OTHER; note = 2'-Omethylcytosine
  modified_base 61: mod_base = OTHER; note = 2'-Omethylguanosine
  modified_base 70: mod_base = OTHER; note = 2'-fluorocytosine
  modified_base 74: mod_base = OTHER; note = Cytosine phosphorothiorate
  modified_base 82: mod_base = OTHER; note = 2'-Omethylguanosine

SEQ ID NO: 5669 - RNA, 75 nt, synthetic construct; identical to SEQ ID NO: 3306
  source 1..75: mol_type = other RNA
  modified_base 1: mod_base = OTHER; note = 2'-Omethylguanosine
  modified_base 17: mod_base = OTHER; note = 2'-Omethylguanosine
  modified_base 18: mod_base = OTHER; note = 2'-Omethylguanosine
  modified_base 72: mod_base = OTHER; note = 2'-Omethyladenosine

SEQ ID NO: 5670 - RNA, 85 nt, synthetic construct; identical to SEQ ID NO: 3286
  source 1..85: mol_type = other RNA
  modified_base 1: mod_base = OTHER; note = 2'-Omethylcytosine
  modified_base 5: mod_base = OTHER; note = Guanosine phosphorothiorate
  modified_base 12: mod_base = OTHER; note = 2'-fluoroguanosine phosphorothiorate
  modified_base 16: mod_base = OTHER; note = 2'-Omethylguanosine
  modified_base 25: mod_base = OTHER; note = 2'-fluoroguanosine
  modified_base 26: mod_base = OTHER; note = Uridine phosphorothiorate
  modified_base 33: mod_base = OTHER; note = 2'-fluorouridine
  modified_base 34: mod_base = OTHER; note = Uridine phosphorothiorate
  modified_base 40: mod_base = OTHER; note = Cytosine phosphorothiorate
  modified_base 51: mod_base = OTHER; note = 2'-Omethyluridine
  modified_base 54: mod_base = OTHER; note = 2'-Omethylcytosine
  modified_base 58: mod_base = OTHER; note = Guanosine phosphorothiorate
  modified_base 69: mod_base = OTHER; note = 2'-fluorocytosine phosphorothiorate
  modified_base 76: mod_base = OTHER; note = Cytosine phosphorothiorate
  modified_base 84: mod_base = OTHER; note = 2'-Omethylcytosine

SEQ ID NO: 5671 - RNA, 75 nt, synthetic construct; identical to SEQ ID NO: 3299
  source 1..75: mol_type = other RNA
  modified_base 1: mod_base = OTHER; note = 2'-Omethylcytosine
  modified_base 4: mod_base = OTHER; note = 2'-Omethylguanosine phosphorothiorate
  modified_base 13: mod_base = OTHER; note = 2'-fluoroadenosine phosphorothiorate
  modified_base 16: mod_base = OTHER; note = 2'-fluorocytosine
  modified_base 18: mod_base = OTHER; note = 2'-fluoroguanosine
  modified_base 19: mod_base = OTHER; note = 2'-fluorouridine
  modified_base 23: mod_base = OTHER; note = Guanosine phosphorothiorate
  modified_base 25: mod_base = OTHER; note = 2'-fluoroadenosine
  modified_base 29: mod_base = OTHER; note = Guanosine phosphorothiorate
  modified_base 39: mod_base = OTHER; note = 2'-fluorocytosine
  modified_base 40: mod_base = OTHER; note = 2'-fluorouridine
  modified_base 41: mod_base = OTHER; note = 2'-Omethylguanosine phosphorothiorate
  modified_base 48: mod_base = OTHER; note = 2'-Omethylcytosine phosphorothiorate
  modified_base 54: mod_base = OTHER; note = Uridine phosphorothiorate
  modified_base 69: mod_base = OTHER; note = Guanosine phosphorothiorate
  modified_base 73: mod_base = OTHER; note = Cytosine phosphorothiorate
  modified_base 74: mod_base = OTHER; note = 2'-Omethylcytosine
  modified_base 75: mod_base = OTHER; note = 2'-fluoroadenosine

SEQ ID NO: 5672 - RNA, 75 nt, synthetic construct; identical to SEQ ID NO: 3311
  source 1..75: mol_type = other RNA
  modified_base 1: mod_base = OTHER; note = 2'-Omethylguanosine phosphorothiorate
  modified_base 2: mod_base = OTHER; note = 2'-Omethylguanosine phosphorothiorate
  modified_base 16: mod_base = OTHER; note = 2'-fluorouridine
  modified_base 18: mod_base = OTHER; note = 2'-fluoroguanosine
  modified_base 19: mod_base = OTHER; note = 2'-fluorouridine
  modified_base 22: mod_base = OTHER; note = Guanosine phosphorothiorate
  modified_base 23: mod_base = OTHER; note = 2'-fluorocytosine
  modified_base 31: mod_base = OTHER; note = 2'-Omethyladenosine
  modified_base 32: mod_base = OTHER; note = Cytosine phosphorothiorate
  modified_base 36: mod_base = OTHER; note = Adenosine phosphorothiorate
  modified_base 38: mod_base = OTHER; note = 2'-fluoroadenosine phosphorothiorate
  modified_base 43: mod_base = OTHER; note = 2'-Omethylguanosine
  modified_base 52: mod_base = OTHER; note = 2'-fluoroguanosine phosphorothiorate
  modified_base 59: mod_base = OTHER; note = Uridine phosphorothiorate
  modified_base 60: mod_base = OTHER; note = Cytosine phosphorothiorate
  modified_base 65: mod_base = OTHER; note = Uridine phosphorothiorate
  modified_base 69: mod_base = OTHER; note = Adenosine phosphorothiorate
  modified_base 72: mod_base = OTHER; note = Uridine phosphorothiorate
  modified_base 74: mod_base = OTHER; note = 2'-fluorocytosine phosphorothiorate

SEQ ID NO: 5673 - RNA, 75 nt, synthetic construct; identical to SEQ ID NO: 3336
  source 1..75: mol_type = other RNA
  modified_base 8: mod_base = OTHER; note = 2'-fluoroadenosine
  modified_base 13: mod_base = OTHER; note = 2'-Omethyladenosine phosphorothiorate
  modified_base 17: mod_base = OTHER; note = 2'-fluoroguanosine
  modified_base 19: mod_base = OTHER; note = 2'-fluorouridine
  modified_base 24: mod_base = OTHER; note = 2'-fluorocytosine
  modified_base 28: mod_base = OTHER; note = 2'-Omethyladenosine phosphorothiorate
  modified_base 29: mod_base = OTHER; note = 2'-Omethylguanosine phosphorothiorate
  modified_base 38: mod_base = OTHER; note = 2'-Omethyluridine phosphorothiorate
  modified_base 51: mod_base = OTHER; note = Guanosine phosphorothiorate
  modified_base 54: mod_base = OTHER; note = 2'-Omethyluridine phosphorothiorate
  modified_base 62: mod_base = OTHER; note = Cytosine phosphorothiorate
  modified_base 71: mod_base = OTHER; note = 2'-fluorocytosine phosphorothiorate
  modified_base 74: mod_base = OTHER; note = 2'-Omethylcytosine

SEQ ID NO: 5674 - RNA, 86 nt, synthetic construct; identical to SEQ ID NO: 3290
  source 1..86: mol_type = other RNA
  modified_base 73: mod_base = OTHER; note = 2'-Omethylcytosine

SEQ ID NO: 5675 - RNA, 76 nt, synthetic construct; identical to SEQ ID NO: 3318
  source 1..76: mol_type = other RNA
  modified_base 1: mod_base = OTHER; note = 2'-Omethylcytosine
  modified_base 40: mod_base = OTHER; note = 2'-fluorocytosine
  modified_base 41: mod_base = OTHER; note = 2'-Omethylcytosine phosphorothiorate
  modified_base 42: mod_base = OTHER; note = 2'-fluorouridine
  modified_base 43: mod_base = OTHER; note = 2'-Omethyluridine phosphorothiorate
  modified_base 73: mod_base = OTHER; note = 2'-Omethyladenosine

SEQ ID NO: 5676 - RNA, 76 nt, synthetic construct; identical to SEQ ID NO: 625
  source 1..76: mol_type = other RNA
  modified_base 1: mod_base = OTHER; note = 2'-Omethylguanosine
  modified_base 10: mod_base = OTHER; note = 2'-Omethylguanosine
  modified_base 13: mod_base = OTHER; note = 2'-Omethylcytosine
  modified_base 17: mod_base = OTHER; note = Guanosine phosphorothiorate
  modified_base 18: mod_base = OTHER; note = 2'-Omethylguanosine
  modified_base 20: mod_base = OTHER; note = 2'-Omethyluridine
  modified_base 25: mod_base = OTHER; note = 2'-Omethylcytosine
  modified_base 29: mod_base = OTHER; note = 2'-Omethylguanosine
  modified_base 33: mod_base = OTHER; note = 2'-fluorouridine
  modified_base 35: mod_base = OTHER; note = Cytosine phosphorothiorate
  modified_base 37: mod_base = OTHER; note = Adenosine phosphorothiorate
  modified_base 38: mod_base = OTHER; note = Adenosine phosphorothiorate
  modified_base 41: mod_base = OTHER; note = 2'-Omethylcytosine
  modified_base 43: mod_base = OTHER; note = 2'-Omethyladenosine
  modified_base 44: mod_base = OTHER; note = 2'-fluoroadenosine
  modified_base 46: mod_base = OTHER; note = Guanosine phosphorothiorate
  modified_base 50: mod_base = OTHER; note = 2'-Omethylcytosine
  modified_base 52: mod_base = OTHER; note = 2'-Omethylguanosine
  modified_base 54: mod_base = OTHER; note = Uridine phosphorothiorate
  modified_base 55: mod_base = OTHER; note = Uridine phosphorothiorate
  modified_base 56: mod_base = OTHER; note = 2'-Omethylcytosine
  modified_base 57: mod_base = OTHER; note = Guanosine phosphorothiorate
  modified_base 62: mod_base = OTHER; note = 2'-Omethylcytosine
  modified_base 63: mod_base = OTHER; note = 2'-fluorocytosine
  modified_base 65: mod_base = OTHER; note = 2'-Omethylguanosine
  modified_base 71: mod_base = OTHER; note = 2'-Omethyluridine
  modified_base 73: mod_base = OTHER; note = 2'-Omethylguanosine

SEQ ID NO: 5677 - RNA, 76 nt, synthetic construct; identical to SEQ ID NO: 625
  source 1..76: mol_type = other RNA
  modified_base 1: mod_base = OTHER; note = 2'-Omethylguanosine
  modified_base 10: mod_base = OTHER; note = 2'-Omethylguanosine
  modified_base 13: mod_base = OTHER; note = 2'-Omethylcytosine
  modified_base 17: mod_base = OTHER; note = Guanosine phosphorothiorate
  modified_base 18: mod_base = OTHER; note = 2'-Omethylguanosine
  modified_base 19: mod_base = OTHER; note = Adenosine phosphorothiorate
  modified_base 20: mod_base = OTHER; note = Uridine phosphorothiorate
  modified_base 25: mod_base = OTHER; note = 2'-Omethylcytosine
  modified_base 29: mod_base = OTHER; note = 2'-Omethylguanosine
  modified_base 33: mod_base = OTHER; note = 2'-fluorouridine
  modified_base 35: mod_base = OTHER; note = Cytosine phosphorothiorate
  modified_base 37: mod_base = OTHER; note = Adenosine phosphorothiorate
  modified_base 38: mod_base = OTHER; note = Adenosine phosphorothiorate
  modified_base 43: mod_base = OTHER; note = 2'-Omethyladenosine
  modified_base 44: mod_base = OTHER; note = 2'-fluoroadenosine
  modified_base 46: mod_base = OTHER; note = Guanosine phosphorothiorate
  modified_base 50: mod_base = OTHER; note = 2'-Omethylcytosine
  modified_base 52: mod_base = OTHER; note = 2'-Omethylguanosine
  modified_base 54: mod_base = OTHER; note = Uridine phosphorothiorate
  modified_base 55: mod_base = OTHER; note = Uridine phosphorothiorate
  modified_base 56: mod_base = OTHER; note = 2'-Omethylcytosine
  modified_base 57: mod_base = OTHER; note = Guanosine phosphorothiorate
  modified_base 62: mod_base = OTHER; note = 2'-Omethylcytosine
  modified_base 63: mod_base = OTHER; note = 2'-fluorocytosine
  modified_base 65: mod_base = OTHER; note = 2'-Omethylguanosine
  modified_base 71: mod_base = OTHER; note = 2'-Omethyluridine
  modified_base 73: mod_base = OTHER; note = 2'-Omethylguanosine

SEQ ID NO: 5678 - DNA, 73 bp, synthetic construct; identical to SEQ ID NO: 3380
  source 1..73: mol_type = other DNA
  modified_base 1: mod_base = OTHER; note = 2'-Omethylguanosine phosphorothiorate
  modified_base 2: mod_base = OTHER; note = 2'-Omethylguanosine phosphorothiorate
  modified_base 9: mod_base = OTHER; note = Guanosine phosphorothiorate
  modified_base 52: mod_base = OTHER; note = 2'-Omethylguanosine
  modified_base 59: mod_base = OTHER; note = 2'-O-(2-Methoxyethyl) guanosine
  misc_feature 1..9: note = RNA
  misc_feature 10: note = DNA
  misc_feature 11..73: note = RNA

SEQ ID NO: 5679 - RNA, 76 nt, synthetic construct; identical to SEQ ID NO: 3295
  source 1..76: mol_type = other RNA
  modified_base 1: mod_base = OTHER; note = 2'-Omethylcytosine phosphorothiorate
  modified_base 2: mod_base = OTHER; note = 2'-Omethylcytosine
  modified_base 3: mod_base = OTHER; note = 2'-Omethyluridine
  modified_base 4: mod_base = OTHER; note = 2'-Omethyluridine phosphorothiorate
  modified_base 7: mod_base = OTHER; note = Adenosine phosphorothiorate
  modified_base 8: mod_base = OTHER; note = 2'-fluorouridine phosphorothiorate
  modified_base 9: mod_base = OTHER; note = 2'-fluoroadenosine
  modified_base 10: mod_base = OTHER; note = 2'-fluoroguanosine
  modified_base 14: mod_base = OTHER; note = 2'-fluoroadenosine
  modified_base 17: mod_base = OTHER; note = 2'-Omethyluridine
  modified_base 20: mod_base = OTHER; note = 2'-Omethyluridine
  modified_base 24: mod_base = OTHER; note = 2'-Omethylguanosine
  modified_base 28: mod_base = OTHER; note = 2'-fluoroadenosine phosphorothiorate
  modified_base 37: mod_base = OTHER; note = 2'-Omethylguanosine phosphorothiorate
  modified_base 39: mod_base = OTHER; note = 2'-fluorouridine
  modified_base 49: mod_base = OTHER; note = 2'-fluoroguanosine phosphorothiorate
  modified_base 52: mod_base = OTHER; note = 2'-fluoroguanosine phosphorothiorate
  modified_base 53: mod_base = OTHER; note = Guanosine phosphorothiorate
  modified_base 54: mod_base = OTHER; note = Uridine phosphorothiorate
  modified_base 59: mod_base = OTHER; note = Adenosine phosphorothiorate
  modified_base 74: mod_base = OTHER; note = 2'-fluorocytosine
  modified_base 75: mod_base = OTHER; note = Cytosine phosphorothiorate
  modified_base 76: mod_base = OTHER; note = 2'-Omethyladenosine

SEQ ID NO: 5680 - RNA, 76 nt, synthetic construct; identical to SEQ ID NO: 625
  source 1..76: mol_type = other RNA
  modified_base 2: mod_base = OTHER; note = 2'-Omethylguanosine phosphorothiorate
  modified_base 3: mod_base = OTHER; note = 2'-Omethylcytosine
  modified_base 6: mod_base = OTHER; note = 2'-fluorocytosine
  modified_base 10: mod_base = OTHER; note = Guanosine phosphorothiorate
  modified_base 12: mod_base = OTHER; note = 2'-fluoroguanosine
  modified_base 17: mod_base = OTHER; note = Guanosine phosphorothiorate
  modified_base 18: mod_base = OTHER; note = 2'-Omethylguanosine phosphorothiorate
  modified_base 20: mod_base = OTHER; note = 2'-Omethyluridine phosphorothiorate
  modified_base 24: mod_base = OTHER; note = 2'-fluoroguanosine
  modified_base 25: mod_base = OTHER; note = 2'-fluorocytosine
  modified_base 26: mod_base = OTHER; note = 2'-Omethyladenosine
  modified_base 27: mod_base = OTHER; note = Uridine phosphorothiorate
  modified_base 40: mod_base = OTHER; note = 2'-fluorouridine
  modified_base 42: mod_base = OTHER; note = 2'-fluoroadenosine
  modified_base 43: mod_base = OTHER; note = 2'-Omethyladenosine
  modified_base 45: mod_base = OTHER; note = 2'-fluoroguanosine phosphorothiorate
  modified_base 47: mod_base = OTHER; note = 2'-fluorouridine
  modified_base 48: mod_base = OTHER; note = 2'-Omethyluridine
  modified_base 50: mod_base = OTHER; note = Cytosine phosphorothiorate
  modified_base 51: mod_base = OTHER; note = 2'-Omethylguanosine
  modified_base 52: mod_base = OTHER; note = 2'-Omethylguanosine phosphorothiorate
  modified_base 53: mod_base = OTHER; note = 2'-Omethylguanosine
  modified_base 54: mod_base = OTHER; note = 2'-fluorouridine
  modified_base 59: mod_base = OTHER; note = 2'-fluoroguanosine phosphorothiorate
  modified_base 60: mod_base = OTHER; note = 2'-Omethyluridine
  modified_base 61: mod_base = OTHER; note = Cytosine phosphorothiorate
  modified_base 62: mod_base = OTHER; note = 2'-Omethylcytosine
  modified_base 63: mod_base = OTHER; note = 2'-fluorocytosine
  modified_base 67: mod_base = OTHER; note = 2'-Omethylguanosine
  modified_base 70: mod_base = OTHER; note = 2'-Omethylguanosine
  modified_base 72: mod_base = OTHER; note = 2'-Omethylcytosine
  modified_base 74: mod_base = OTHER; note = 2'-fluorocytosine

SEQ ID NO: 5681 - RNA, 75 nt, synthetic construct; identical to SEQ ID NO: 3306
  source 1..75: mol_type = other RNA
  modified_base 1: mod_base = OTHER; note = 2'-Omethylguanosine
  modified_base 51: mod_base = OTHER; note = 2'-Omethyluridine
  modified_base 72: mod_base = OTHER; note = 2'-Omethyladenosine

SEQ ID NO: 5682 - RNA, 75 nt, synthetic construct; identical to SEQ ID NO: 1045
  source 1..75: mol_type = other RNA
  modified_base 2: mod_base = OTHER; note = 2'-Omethylguanosine phosphorothiorate
  modified_base 5: mod_base = OTHER; note = Cytosine phosphorothiorate
  modified_base 8: mod_base = OTHER; note = 2'-fluorouridine
  modified_base 15: mod_base = OTHER; note = 2'-fluoroadenosine
  modified_base 17: mod_base = OTHER; note = 2'-fluoroguanosine phosphorothiorate
  modified_base 18: mod_base = OTHER; note = 2'-Omethylguanosine phosphorothiorate
  modified_base 19: mod_base = OTHER; note = 2'-fluorouridine
  modified_base 29: mod_base = OTHER; note = 2'-Omethylguanosine
  modified_base 38: mod_base = OTHER; note = 2'-Omethyladenosine
  modified_base 41: mod_base = OTHER; note = 2'-Omethylcytosine
  modified_base 47: mod_base = OTHER; note = 2'-fluorouridine
  modified_base 48: mod_base = OTHER; note = 2'-Omethylcytosine phosphorothiorate
  modified_base 49: mod_base = OTHER; note = 2'-Omethylcytosine
  modified_base 52: mod_base = OTHER; note = 2'-Omethylguanosine phosphorothiorate
  modified_base 53: mod_base = OTHER; note = 2'-Omethyluridine
  modified_base 60: mod_base = OTHER; note = Cytosine phosphorothiorate
  modified_base 64: mod_base = OTHER; note = 2'-Omethylguanosine
  modified_base 66: mod_base = OTHER; note = 2'-fluoroguanosine phosphorothiorate
  modified_base 67: mod_base = OTHER; note = 2'-Omethylguanosine
  modified_base 72: mod_base = OTHER; note = 2'-Omethyluridine
  modified_base 74: mod_base = OTHER; note = 2'-Omethylcytosine phosphorothiorate

SEQ ID NO: 5683 - RNA, 85 nt, synthetic construct; identical to SEQ ID NO: 3297
  source 1..85: mol_type = other RNA
  modified_base 1: mod_base = OTHER; note = 2'-Omethylguanosine phosphorothiorate
  modified_base 2: mod_base = OTHER; note = 2'-Omethylcytosine
  modified_base 13: mod_base = OTHER; note = 2'-fluoroguanosine phosphorothiorate
  modified_base 16: mod_base = OTHER; note = Uridine phosphorothiorate
  modified_base 30: mod_base = OTHER; note = Guanosine phosphorothiorate
  modified_base 55: mod_base = OTHER; note = 2'-Omethylcytosine phosphorothiorate

SEQ ID NO: 5684 - RNA, 85 nt, synthetic construct
  source 1..85: mol_type = other RNA
gtcacggtggccgagtggttaaggcgttggacttcaaatccaatggggattccccgcacaggttcgaatcctgttcgtgacgcca

SEQ ID NO: 5685 - RNA, 85 nt, synthetic construct; identical to SEQ ID NO: 3288
  source 1..85: mol_type = other RNA
  modified_base 1: mod_base = OTHER; note = 2'-fluorocytosine
  modified_base 11: mod_base = OTHER; note = Cytosine phosphorothiorate
  modified_base 52: mod_base = OTHER; note = Guanosine phosphorothiorate
  modified_base 58: mod_base = OTHER; note = 2'-Omethylguanosine
  modified_base 71: mod_base = OTHER; note = 2'-fluorocytosine
  modified_base 79: mod_base = OTHER; note = Guanosine phosphorothiorate

SEQ ID NO: 5686 - RNA, 75 nt, synthetic construct; identical to SEQ ID NO: 3306
  source 1..75: mol_type = other RNA
  modified_base 1: mod_base = OTHER; note = 2'-Omethylguanosine
  modified_base 14: mod_base = OTHER; note = 2'-Omethyladenosine
  modified_base 15: mod_base = OTHER; note = 2'-Omethyladenosine
  modified_base 16: mod_base = OTHER; note = 2'-Omethylcytosine
  modified_base 17: mod_base = OTHER; note = 2'-Omethylguanosine
  modified_base 18: mod_base = OTHER; note = 2'-Omethylguanosine
  modified_base 19: mod_base = OTHER; note = Uridine phosphorothiorate
  modified_base 20: mod_base = OTHER; note = Adenosine phosphorothiorate
  modified_base 32: mod_base = OTHER; note = 2'-fluorouridine
  modified_base 33: mod_base = OTHER; note = 2'-Omethylcytosine
  modified_base 34: mod_base = OTHER; note = Uridine phosphorothiorate
  modified_base 36: mod_base = OTHER; note = Guanosine phosphorothiorate
  modified_base 37: mod_base = OTHER; note = Adenosine phosphorothiorate
  modified_base 49: mod_base = OTHER; note = 2'-Omethylcytosine
  modified_base 51: mod_base = OTHER; note = 2'-Omethyluridine
  modified_base 72: mod_base = OTHER; note = 2'-Omethyladenosine

SEQ ID NO: 5687 - RNA, 75 nt, synthetic construct; identical to SEQ ID NO: 3311
  source 1..75: mol_type = other RNA
  modified_base 1: mod_base = OTHER; note = 2'-Omethylguanosine
  modified_base 2: mod_base = OTHER; note = 2'-Omethylguanosine phosphorothiorate
  modified_base 11: mod_base = OTHER; note = 2'-fluorouridine phosphorothiorate
  modified_base 14: mod_base = OTHER; note = Adenosine phosphorothiorate
  modified_base 20: mod_base = OTHER; note = Adenosine phosphorothiorate
  modified_base 21: mod_base = OTHER; note = 2'-fluoroadenosine
  modified_base 24: mod_base = OTHER; note = 2'-fluoroadenosine
  modified_base 33: mod_base = OTHER; note = 2'-fluorouridine
  modified_base 41: mod_base = OTHER; note = 2'-Omethylcytosine
  modified_base 42: mod_base = OTHER; note = 2'-fluoroadenosine
  modified_base 52: mod_base = OTHER; note = 2'-fluoroguanosine
  modified_base 57: mod_base = OTHER; note = 2'-Omethyladenosine
  modified_base 60: mod_base = OTHER; note = Cytosine phosphorothiorate
  modified_base 64: mod_base = OTHER; note = 2'-fluoroguanosine
  modified_base 65: mod_base = OTHER; note = 2'-fluorouridine
  modified_base 66: mod_base = OTHER; note = 2'-fluoroguanosine phosphorothiorate
  modified_base 72: mod_base = OTHER; note = Uridine phosphorothiorate
  modified_base 74: mod_base = OTHER; note = 2'-fluorocytosine phosphorothiorate

SEQ ID NO: 5688 - RNA, 76 nt, synthetic construct; identical to SEQ ID NO: 3318
  source 1..76: mol_type = other RNA
  modified_base 1: mod_base = OTHER; note = 2'-Omethylcytosine
  modified_base 14: mod_base = OTHER; note = 2'-Omethyladenosine
  modified_base 15: mod_base = OTHER; note = 2'-fluoroguanosine
  modified_base 16: mod_base = OTHER; note = 2'-Omethyluridine
  modified_base 18: mod_base = OTHER; note = 2'-Omethylguanosine
  modified_base 19: mod_base = OTHER; note = 2'-Omethylguanosine
  modified_base 20: mod_base = OTHER; note = 2'-fluorouridine
  modified_base 54: mod_base = OTHER; note = 2'-Omethyluridine
  modified_base 56: mod_base = OTHER; note = 2'-Omethylcytosine
  modified_base 59: mod_base = OTHER; note = 2'-Omethyladenosine
  modified_base 73: mod_base = OTHER; note = 2'-Omethyladenosine

SEQ ID NO: 5689 - RNA, 76 nt, synthetic construct; identical to SEQ ID NO: 625
  source 1..76: mol_type = other RNA
  modified_base 1: mod_base = OTHER; note = 2'-Omethylguanosine phosphorothiorate
  modified_base 2: mod_base = OTHER; note = 2'-Omethylguanosine
  modified_base 17: mod_base = OTHER; note = Guanosine phosphorothiorate
  modified_base 25: mod_base = OTHER; note = 2'-Omethylcytosine
  modified_base 33: mod_base = OTHER; note = 2'-fluorouridine
  modified_base 35: mod_base = OTHER; note = Cytosine phosphorothiorate
  modified_base 37: mod_base = OTHER; note = Adenosine phosphorothiorate
  modified_base 38: mod_base = OTHER; note = Adenosine phosphorothiorate
  modified_base 52: mod_base = OTHER; note = 2'-fluoroguanosine
  modified_base 56: mod_base = OTHER; note = 2'-Omethylcytosine
  modified_base 62: mod_base = OTHER; note = 2'-Omethylcytosine
  modified_base 68: mod_base = OTHER; note = 2'-Omethylguanosine
  modified_base 73: mod_base = OTHER; note = 2'-Omethylguanosine
  modified_base 75: mod_base = OTHER; note = 2'-fluorocytosine phosphorothiorate

SEQ ID NO: 5690 - RNA, 86 nt, synthetic construct; identical to SEQ ID NO: 3290
  source 1..86: mol_type = other RNA
  modified_base 5: mod_base = OTHER; note = 2'-Omethylguanosine

SEQ ID NO: 5691 - RNA, 76 nt, synthetic construct; identical to SEQ ID NO: 625
  source 1..76: mol_type = other RNA
  modified_base 1: mod_base = OTHER; note = 2'-Omethylguanosine phosphorothiorate
  modified_base 2: mod_base = OTHER; note = 2'-Omethylguanosine phosphorothiorate
  modified_base 3: mod_base = OTHER; note = 2'-Omethylcytosine phosphorothiorate
  modified_base 4: mod_base = OTHER; note = 2'-Omethyluridine phosphorothiorate
  modified_base 5: mod_base = OTHER; note = 2'-Omethylcytosine phosphorothiorate
  modified_base 6: mod_base = OTHER; note = 2'-Omethylcytosine phosphorothiorate
  modified_base 22: mod_base = OTHER; note = 2'-Omethylguanosine
  modified_base 23: mod_base = OTHER; note = 2'-Omethylcytosine
  modified_base 24: mod_base = OTHER; note = 2'-Omethylguanosine
  modified_base 25: mod_base = OTHER; note = 2'-Omethylcytosine

SEQ ID NO: 5692 - RNA, 76 nt, synthetic construct; identical to SEQ ID NO: 625
  source 1..76: mol_type = other RNA
  modified_base 1: mod_base = OTHER; note = 2'-Omethylguanosine phosphorothiorate
  modified_base 2: mod_base = OTHER; note = 2'-Omethylguanosine
  modified_base 3: mod_base = OTHER; note = 2'-Omethylcytosine
  modified_base 4: mod_base = OTHER; note = 2'-Omethyluridine
  modified_base 5: mod_base = OTHER; note = 2'-Omethylcytosine
  modified_base 6: mod_base = OTHER; note = 2'-Omethylcytosine
  modified_base 10: mod_base = OTHER; note = 2'-Omethylguanosine
  modified_base 11: mod_base = OTHER; note = 2'-Omethylcytosine
  modified_base 12: mod_base = OTHER; note = 2'-Omethylguanosine
  modified_base 13: mod_base = OTHER; note = 2'-Omethylcytosine
  modified_base 14: mod_base = OTHER; note = 2'-Omethyladenosine
  modified_base 15: mod_base = OTHER; note = 2'-fluoroadenosine
  modified_base 16: mod_base = OTHER; note = 2'-Omethyluridine
  modified_base 17: mod_base = OTHER; note = 2'-Omethylguanosine
  modified_base 18: mod_base = OTHER; note = 2'-Omethylguanosine
  modified_base 19: mod_base = OTHER; note = 2'-fluoroadenosine
  modified_base 20: mod_base = OTHER; note = 2'-Omethyluridine
  modified_base 21: mod_base = OTHER; note = 2'-fluoroadenosine
  modified_base 22: mod_base = OTHER; note = 2'-Omethylguanosine
  modified_base 23: mod_base = OTHER; note = 2'-Omethylcytosine
  modified_base 24: mod_base = OTHER; note = 2'-Omethylguanosine
  modified_base 25: mod_base = OTHER; note = 2'-Omethylcytosine
  modified_base 38: mod_base = OTHER; note = Adenosine phosphorothiorate
  modified_base 39: mod_base = OTHER; note = Uridine phosphorothiorate
  modified_base 40: mod_base = OTHER; note = 2'-fluorouridine
  modified_base 43: mod_base = OTHER; note = 2'-Omethyladenosine
  modified_base 44: mod_base = OTHER; note = 2'-Omethyladenosine
  modified_base 45: mod_base = OTHER; note = 2'-Omethylguanosine
  modified_base 46: mod_base = OTHER; note = 2'-fluoroguanosine
  modified_base 48: mod_base = OTHER; note = 2'-fluorouridine
  modified_base 49: mod_base = OTHER; note = 2'-Omethylcytosine
  modified_base 50: mod_base = OTHER; note = 2'-Omethylcytosine
  modified_base 54: mod_base = OTHER; note = Uridine phosphorothiorate
  modified_base 55: mod_base = OTHER; note = Uridine phosphorothiorate
  modified_base 56: mod_base = OTHER; note = 2'-Omethylcytosine
  modified_base 57: mod_base = OTHER; note = Guanosine phosphorothiorate
  modified_base 61: mod_base = OTHER; note = 2'-Omethylcytosine
  modified_base 62: mod_base = OTHER; note = 2'-Omethylcytosine
  modified_base 63: mod_base = OTHER; note = 2'-fluorocytosine
  modified_base 64: mod_base = OTHER; note = 2'-Omethylguanosine
  modified_base 65: mod_base = OTHER; note = 2'-Omethylguanosine
  modified_base 66: mod_base = OTHER; note = 2'-Omethylcytosine
  modified_base 67: mod_base = OTHER; note = 2'-Omethylguanosine
  modified_base 68: mod_base = OTHER; note = 2'-Omethylguanosine
  modified_base 69: mod_base = OTHER; note = 2'-fluoroadenosine

SEQ ID NO: 5693 - RNA, 76 nt, synthetic construct; identical to SEQ ID NO: 3289
  source 1..76: mol_type = other RNA
  modified_base 1: mod_base = OTHER; note = 2'-Omethylguanosine
  modified_base 14: mod_base = OTHER; note = 2'-Omethyladenosine
  modified_base 16: mod_base = OTHER; note = 2'-Omethyluridine
  modified_base 73: mod_base = OTHER; note = 2'-Omethylguanosine

SEQ ID NO: 5694 - RNA, 86 nt, synthetic construct; identical to SEQ ID NO: 3290
  source 1..86: mol_type = other RNA
  modified_base 75: mod_base = OTHER; note = Cytosine phosphorothiorate

SEQ ID NO: 5695 - RNA, 75 nt, synthetic construct; identical to SEQ ID NO: 3311
  source 1..75: mol_type = other RNA
  modified_base 1: mod_base = OTHER; note = 2'-Omethylguanosine phosphorothiorate
  modified_base 2: mod_base = OTHER; note = 2'-fluoroguanosine
  modified_base 19: mod_base = OTHER; note = Uridine phosphorothiorate
  modified_base 20: mod_base = OTHER; note = 2'-fluoroadenosine
  modified_base 23: mod_base = OTHER; note = Cytosine phosphorothiorate
  modified_base 24: mod_base = OTHER; note = 2'-fluoroadenosine
  modified_base 28: mod_base = OTHER; note = 2'-fluorouridine
  modified_base 38: mod_base = OTHER; note = Adenosine phosphorothiorate
  modified_base 39: mod_base = OTHER; note = 2'-fluorouridine
  modified_base 51: mod_base = OTHER; note = Adenosine phosphorothiorate
  modified_base 60: mod_base = OTHER; note = 2'-fluorocytosine
  modified_base 65: mod_base = OTHER; note = Uridine phosphorothiorate
  modified_base 73: mod_base = OTHER; note = Cytosine phosphorothiorate
  modified_base 74: mod_base = OTHER; note = 2'-Omethylcytosine

SEQ ID NO: 5696 - RNA, 74 nt, synthetic construct; identical to SEQ ID NO: 3293
  source 1..74: mol_type = other RNA
  modified_base 1: mod_base = OTHER; note = 2'-fluoroadenosine
  modified_base 2: mod_base = OTHER; note = 2'-Omethylcytosine phosphorothiorate
  modified_base 4: mod_base = OTHER; note = 2'-fluorouridine
  modified_base 8: mod_base = OTHER; note = Guanosine phosphorothiorate
  modified_base 12: mod_base = OTHER; note = 2'-Omethylcytosine phosphorothiorate
  modified_base 21: mod_base = OTHER; note = 2'-fluorocytosine
  modified_base 25: mod_base = OTHER; note = 2'-fluorouridine phosphorothiorate
  modified_base 43: mod_base = OTHER; note = 2'-fluoroguanosine
  modified_base 44: mod_base = OTHER; note = Guanosine phosphorothiorate
  modified_base 50: mod_base = OTHER; note = Uridine phosphorothiorate
  modified_base 57: mod_base = OTHER; note = 2'-fluoroadenosine
  modified_base 62: mod_base = OTHER; note = 2'-fluoroguanosine phosphorothiorate
  modified_base 65: mod_base = OTHER; note = 2'-fluoroguanosine
  modified_base 73: mod_base = OTHER; note = 2'-Omethylcytosine

SEQ ID NO: 5697 - RNA, 76 nt, synthetic construct; identical to SEQ ID NO: 3342
  source 1..76: mol_type = other RNA
  modified_base 1: mod_base = OTHER; note = 2'-Omethylguanosine
  modified_base 14: mod_base = OTHER; note = 2'-Omethyladenosine
  modified_base 15: mod_base = OTHER; note = 2'-fluoroadenosine
  modified_base 16: mod_base = OTHER; note = 2'-Omethyluridine
  modified_base 17: mod_base = OTHER; note = 2'-Omethylguanosine
  modified_base 18: mod_base = OTHER; note = 2'-Omethylguanosine
  modified_base 19: mod_base = OTHER; note = 2'-fluoroadenosine
  modified_base 20: mod_base = OTHER; note = 2'-Omethyluridine
  modified_base 33: mod_base = OTHER; note = 2'-fluorouridine
  modified_base 35: mod_base = OTHER; note = Cytosine phosphorothiorate
  modified_base 37: mod_base = OTHER; note = Adenosine phosphorothiorate
  modified_base 38: mod_base = OTHER; note = Adenosine phosphorothiorate
  modified_base 41: mod_base = OTHER; note = 2'-Omethylcytosine
  modified_base 42: mod_base = OTHER; note = 2'-Omethylguanosine
  modified_base 43: mod_base = OTHER; note = 2'-Omethyladenosine
  modified_base 44: mod_base = OTHER; note = 2'-Omethyladenosine
  modified_base 50: mod_base = OTHER; note = 2'-Omethylcytosine
  modified_base 52: mod_base = OTHER; note = 2'-Omethylguanosine
  modified_base 73: mod_base = OTHER; note = 2'-Omethylguanosine

SEQ ID NO: 5698 - RNA, 86 nt, synthetic construct; identical to SEQ ID NO: 3290
  source 1..86: mol_type = other RNA
  modified_base 82: mod_base = OTHER; note = 2'-fluorouridine

SEQ ID NO: 5699 - RNA, 76 nt, synthetic construct; identical to SEQ ID NO: 625
  source 1..76: mol_type = other RNA
  modified_base 1: mod_base = OTHER; note = 2'-fluoroguanosine
  modified_base 5: mod_base = OTHER; note = Cytosine phosphorothiorate
  modified_base 6: mod_base = OTHER; note = 2'-fluorocytosine
  modified_base 11: mod_base = OTHER; note = 2'-Omethylcytosine
  modified_base 12: mod_base = OTHER; note = 2'-Omethylguanosine phosphorothiorate
  modified_base 13: mod_base = OTHER; note = Cytosine phosphorothiorate
  modified_base 14: mod_base = OTHER; note = 2'-fluoroadenosine phosphorothiorate
  modified_base 18: mod_base = OTHER; note = Guanosine phosphorothiorate
  modified_base 21: mod_base = OTHER; note = Adenosine phosphorothiorate
  modified_base 24: mod_base = OTHER; note = 2'-Omethylguanosine
  modified_base 27: mod_base = OTHER; note = 2'-fluorouridine
  modified_base 28: mod_base = OTHER; note = 2'-fluorouridine phosphorothiorate
  modified_base 29: mod_base = OTHER; note = 2'-Omethylguanosine
  modified_base 33: mod_base = OTHER; note = Uridine phosphorothiorate
  modified_base 34: mod_base = OTHER; note = 2'-fluorouridine phosphorothiorate
  modified_base 36: mod_base = OTHER; note = Adenosine phosphorothiorate
  modified_base 38: mod_base = OTHER; note = Adenosine phosphorothiorate
  modified_base 40: mod_base = OTHER; note = Uridine phosphorothiorate
  modified_base 42: mod_base = OTHER; note = 2'-Omethyladenosine
  modified_base 44: mod_base = OTHER; note = 2'-fluoroadenosine
  modified_base 47: mod_base = OTHER; note = 2'-Omethyluridine
  modified_base 49: mod_base = OTHER; note = Cytosine phosphorothiorate
  modified_base 50: mod_base = OTHER; note = 2'-fluorocytosine
  modified_base 51: mod_base = OTHER; note = 2'-Omethylguanosine phosphorothiorate
  modified_base 56: mod_base = OTHER; note = Cytosine phosphorothiorate
  modified_base 57: mod_base = OTHER; note = 2'-fluoroguanosine
  modified_base 58: mod_base = OTHER; note = 2'-fluoroadenosine
  modified_base 59: mod_base = OTHER; note = 2'-fluoroguanosine
  modified_base 63: mod_base = OTHER; note = Cytosine phosphorothiorate
  modified_base 64: mod_base = OTHER; note = 2'-fluoroguanosine
  modified_base 66: mod_base = OTHER; note = 2'-fluorocytosine
  modified_base 67: mod_base = OTHER; note = 2'-Omethylguanosine
  modified_base 71: mod_base = OTHER; note = 2'-fluorouridine
  modified_base 75: mod_base = OTHER; note = Cytosine phosphorothiorate
  modified_base 76: mod_base = OTHER; note = 2'-Omethyladenosine

SEQ ID NO: 5700 - RNA, 76 nt, synthetic construct; identical to SEQ ID NO: 625
  source 1..76: mol_type = other RNA
  modified_base 1: mod_base = OTHER; note = 2'-Omethylguanosine
  modified_base 2: mod_base = OTHER; note = 2'-Omethylguanosine
  modified_base 3: mod_base = OTHER; note = 2'-Omethylcytosine
  modified_base 4: mod_base = OTHER; note = 2'-Omethyluridine
  modified_base 5: mod_base = OTHER; note = 2'-Omethylcytosine
  modified_base 6: mod_base = OTHER; note = 2'-Omethylcytosine
  modified_base 7: mod_base = OTHER; note = 2'-fluoroguanosine phosphorothiorate
  modified_base 10: mod_base = OTHER; note = 2'-Omethylguanosine
  modified_base 11: mod_base = OTHER; note = 2'-Omethylcytosine
  modified_base 12: mod_base = OTHER; note = 2'-Omethylguanosine
  modified_base 13: mod_base = OTHER; note = 2'-Omethylcytosine
  modified_base 15: mod_base = OTHER; note = 2'-Omethyladenosine
  modified_base 16: mod_base = OTHER; note = 2'-Omethyluridine
  modified_base 17: mod_base = OTHER; note = 2'-Omethylguanosine
  modified_base 18: mod_base = OTHER; note = 2'-fluoroguanosine phosphorothiorate
  modified_base 19: mod_base = OTHER; note = 2'-fluoroadenosine phosphorothiorate
  modified_base 20: mod_base = OTHER; note = 2'-Omethyluridine
  modified_base 21: mod_base = OTHER; note = 2'-fluoroadenosine phosphorothiorate
  modified_base 22: mod_base = OTHER; note = 2'-Omethylguanosine
  modified_base 23: mod_base = OTHER; note = 2'-Omethylcytosine
  modified_base 24: mod_base = OTHER; note = 2'-Omethylguanosine
  modified_base 25: mod_base = OTHER; note = Cytosine phosphorothiorate
  modified_base 28: mod_base = OTHER; note = 2'-Omethyluridine phosphorothiorate
  modified_base 29: mod_base = OTHER; note = 2'-fluoroguanosine phosphorothiorate
  modified_base 30: mod_base = OTHER; note = 2'-Omethylguanosine phosphorothiorate
  modified_base 31: mod_base = OTHER; note = 2'-Omethyladenosine phosphorothiorate
  modified_base 32: mod_base = OTHER; note = 2'-Omethylcytosine phosphorothiorate
  modified_base 33: mod_base = OTHER; note = 2'-fluorouridine
  modified_base 34: mod_base = OTHER; note = 2'-Omethyluridine phosphorothiorate
  modified_base 35: mod_base = OTHER; note = Cytosine phosphorothiorate
  modified_base 36: mod_base = OTHER; note = 2'-Omethyladenosine phosphorothiorate
  modified_base 37: mod_base = OTHER; note = Adenosine phosphorothiorate
  modified_base 38: mod_base = OTHER; note = Adenosine phosphorothiorate
  modified_base 39: mod_base = OTHER; note = 2'-Omethyluridine phosphorothiorate
  modified_base 40: mod_base = OTHER; note = 2'-Omethyluridine
  modified_base 41: mod_base = OTHER; note = 2'-fluorocytosine
  modified_base 42: mod_base = OTHER; note = Adenosine phosphorothiorate
  modified_base 44: mod_base = OTHER; note = 2'-Omethyladenosine
  modified_base 47: mod_base = OTHER; note = 2'-Omethyluridine phosphorothiorate
  modified_base 49: mod_base = OTHER; note = 2'-Omethylcytosine
  modified_base 50: mod_base = OTHER; note = 2'-Omethylcytosine
  modified_base 51: mod_base = OTHER; note = 2'-Omethylguanosine phosphorothiorate
  modified_base 52: mod_base = OTHER; note = 2'-Omethylguanosine
  modified_base 53: mod_base = OTHER; note = 2'-Omethylguanosine
  modified_base 54: mod_base = OTHER; note = 2'-Omethyluridine
  modified_base 55: mod_base = OTHER; note = Uridine phosphorothiorate
  modified_base 56: mod_base = OTHER; note = Cytosine phosphorothiorate
  modified_base 57: mod_base = OTHER; note = 2'-Omethylguanosine
  modified_base 59: mod_base = OTHER; note = 2'-Omethylguanosine
  modified_base 60: mod_base = OTHER; note = 2'-Omethyluridine phosphorothiorate
  modified_base 61: mod_base = OTHER; note = 2'-Omethylcytosine
  modified_base 62: mod_base = OTHER; note = 2'-Omethylcytosine
  modified_base 63: mod_base = OTHER; note = 2'-Omethylcytosine phosphorothiorate
  modified_base 64: mod_base = OTHER; note = 2'-Omethylguanosine
  modified_base 65: mod_base = OTHER; note = 2'-Omethylguanosine phosphorothiorate
  modified_base 66: mod_base = OTHER; note = 2'-Omethylcytosine
  modified_base 67: mod_base = OTHER; note = 2'-Omethylguanosine phosphorothiorate
  modified_base 68: mod_base = OTHER; note = 2'-Omethylguanosine
  modified_base 69: mod_base = OTHER; note = 2'-fluoroadenosine
  modified_base 70: mod_base = OTHER; note = Guanosine phosphorothiorate
  modified_base 71: mod_base = OTHER; note = 2'-Omethyluridine phosphorothiorate
  modified_base 72: mod_base = OTHER; note = 2'-Omethylcytosine
  modified_base 73: mod_base = OTHER; note = 2'-fluoroguanosine phosphorothiorate
  modified_base 74: mod_base = OTHER; note = 2'-fluorocytosine
  modified_base 75: mod_base = OTHER; note = 2'-Omethylcytosine
  modified_base 76: mod_base = OTHER; note = 2'-fluoroadenosine

SEQ ID NO: 5701 - RNA, 76 nt, synthetic construct; identical to SEQ ID NO: 625
  source 1..76: mol_type = other RNA
  modified_base 1: mod_base = OTHER; note = 2'-Omethylguanosine phosphorothiorate
  modified_base 2: mod_base = OTHER; note = 2'-Omethylguanosine
  modified_base 3: mod_base = OTHER; note = 2'-Omethylcytosine
  modified_base 4: mod_base = OTHER; note = 2'-Omethyluridine
  modified_base 5: mod_base = OTHER; note = 2'-Omethylcytosine
  modified_base 6: mod_base = OTHER; note = 2'-Omethylcytosine
  modified_base 10: mod_base = OTHER; note = 2'-Omethylguanosine
  modified_base 11: mod_base = OTHER; note = 2'-Omethylcytosine
  modified_base 12: mod_base = OTHER; note = Guanosine phosphorothiorate
  modified_base 13: mod_base = OTHER; note = 2'-Omethylcytosine
  modified_base 14: mod_base = OTHER; note = 2'-Omethyladenosine
  modified_base 15: mod_base = OTHER; note = 2'-fluoroadenosine
  modified_base 16: mod_base = OTHER; note = 2'-Omethyluridine
  modified_base 17: mod_base = OTHER; note = Guanosine phosphorothiorate
  modified_base 18: mod_base = OTHER; note = 2'-Omethylguanosine
  modified_base 19: mod_base = OTHER; note = Adenosine phosphorothiorate
  modified_base 20: mod_base = OTHER; note = 2'-Omethyluridine
  modified_base 21: mod_base = OTHER; note = 2'-fluoroadenosine
  modified_base 22: mod_base = OTHER; note = 2'-Omethylguanosine
  modified_base 23: mod_base = OTHER; note = 2'-Omethylcytosine
  modified_base 24: mod_base = OTHER; note = 2'-Omethylguanosine
  modified_base 25: mod_base = OTHER; note = 2'-Omethylcytosine
  modified_base 29: mod_base = OTHER; note = 2'-Omethylguanosine
  modified_base 33: mod_base = OTHER; note = 2'-fluorouridine
  modified_base 35: mod_base = OTHER; note = Cytosine phosphorothiorate
  modified_base 37: mod_base = OTHER; note = Adenosine phosphorothiorate
  modified_base 38: mod_base = OTHER; note = Adenosine phosphorothiorate
  modified_base 40: mod_base = OTHER; note = 2'-fluorouridine
  modified_base 41: mod_base = OTHER; note = 2'-Omethylcytosine
  modified_base 42: mod_base = OTHER; note = 2'-Omethyladenosine
  modified_base 43: mod_base = OTHER; note = 2'-Omethyladenosine
  modified_base 44: mod_base = OTHER; note = 2'-fluoroadenosine
  modified_base 45: mod_base = OTHER; note = 2'-O-(2-Methoxyethyl) guanosine
  modified_base 46: mod_base = OTHER; note = Guanosine phosphorothiorate
  modified_base 49: mod_base = OTHER; note = 2'-Omethylcytosine
  modified_base 50: mod_base = OTHER; note = 2'-Omethylcytosine
  modified_base 51: mod_base = OTHER; note = 2'-Omethylguanosine
  modified_base 52: mod_base = OTHER; note = 2'-Omethylguanosine
  modified_base 53: mod_base = OTHER; note = 2'-Omethylguanosine
  modified_base 54: mod_base = OTHER; note = 2'-Omethyluridine phosphorothiorate
  modified_base 55: mod_base = OTHER; note = Uridine phosphorothiorate
  modified_base 56: mod_base = OTHER; note = 2'-Omethylcytosine
  modified_base 57: mod_base = OTHER; note = 2'-fluoroguanosine
  modified_base 59: mod_base = OTHER; note = 2'-Omethylguanosine
  modified_base 61: mod_base = OTHER; note = 2'-Omethylcytosine
  modified_base 62: mod_base = OTHER; note = 2'-Omethylcytosine
  modified_base 63: mod_base = OTHER; note = 2'-fluorocytosine
  modified_base 64: mod_base = OTHER; note = 2'-Omethylguanosine
  modified_base 65: mod_base = OTHER; note = 2'-Omethylguanosine
  modified_base 66: mod_base = OTHER; note = 2'-Omethylcytosine
  modified_base 67: mod_base = OTHER; note = 2'-Omethylguanosine
  modified_base 68: mod_base = OTHER; note = 2'-Omethylguanosine
  modified_base 69: mod_base = OTHER; note = 2'-fluoroadenosine
  modified_base 70: mod_base = OTHER; note = 2'-fluoroguanosine
  modified_base 71: mod_base = OTHER; note = 2'-Omethyluridine
  modified_base 73: mod_base = OTHER; note = 2'-Omethylguanosine
  modified_base 75: mod_base = OTHER; note = 2'-fluorocytosine phosphorothiorate

SEQ ID NO: 5702 - RNA, 76 nt, synthetic construct; identical to SEQ ID NO: 3318
  source 1..76: mol_type = other RNA
  modified_base 1: mod_base = OTHER; note = 2'-Omethylcytosine
  modified_base 10: mod_base = OTHER; note = 2'-Omethylguanosine
  modified_base 13: mod_base = OTHER; note = 2'-Omethylcytosine
  modified_base 18: mod_base = OTHER; note = Guanosine phosphorothiorate
  modified_base 19: mod_base = OTHER; note = 2'-Omethylguanosine
  modified_base 20: mod_base = OTHER; note = Uridine phosphorothiorate
  modified_base 25: mod_base = OTHER; note = 2'-Omethylcytosine
  modified_base 29: mod_base = OTHER; note = 2'-Omethylguanosine
  modified_base 33: mod_base = OTHER; note = 2'-fluorouridine
  modified_base 35: mod_base = OTHER; note = Uridine phosphorothiorate
  modified_base 37: mod_base = OTHER; note = Guanosine phosphorothiorate
  modified_base 38: mod_base = OTHER; note = Adenosine phosphorothiorate
  modified_base 41: mod_base = OTHER; note = 2'-fluorocytosine phosphorothiorate
  modified_base 43: mod_base = OTHER; note = 2'-Omethyluridine
  modified_base 44: mod_base = OTHER; note = 2'-fluoroadenosine
  modified_base 46: mod_base = OTHER; note = Guanosine phosphorothiorate
  modified_base 50: mod_base = OTHER; note = 2'-Omethylcytosine
  modified_base 52: mod_base = OTHER; note = 2'-Omethylguanosine
  modified_base 54: mod_base = OTHER; note = Uridine phosphorothiorate
  modified_base 55: mod_base = OTHER; note = Uridine phosphorothiorate
  modified_base 56: mod_base = OTHER; note = 2'-Omethylcytosine
  modified_base 57: mod_base = OTHER; note = Guanosine phosphorothiorate
  modified_base 62: mod_base = OTHER; note = 2'-Omethylcytosine
  modified_base 63: mod_base = OTHER; note = 2'-fluoroguanosine
  modified_base 65: mod_base = OTHER; note = 2'-Omethylcytosine
  modified_base 71: mod_base = OTHER; note = 2'-Omethylguanosine
  modified_base 73: mod_base = OTHER; note = 2'-Omethyladenosine

SEQ ID NO: 5703 - RNA, 76 nt, synthetic construct; identical to SEQ ID NO: 625
  source 1..76: mol_type = other RNA
  modified_base 1: mod_base = OTHER; note = 2'-Omethylguanosine phosphorothiorate
  modified_base 2: mod_base = OTHER; note = 2'-Omethylguanosine phosphorothiorate
  modified_base 3: mod_base = OTHER; note = 2'-Omethylcytosine
  modified_base 4: mod_base = OTHER; note = 2'-Omethyluridine
  modified_base 5: mod_base = OTHER; note = 2'-Omethylcytosine
  modified_base 6: mod_base = OTHER; note = 2'-Omethylcytosine
  modified_base 10: mod_base = OTHER; note = 2'-Omethylguanosine
  modified_base 11: mod_base = OTHER; note = 2'-Omethylcytosine
  modified_base 12: mod_base = OTHER; note = 2'-Omethylguanosine
  modified_base 13: mod_base = OTHER; note = 2'-Omethylcytosine
  modified_base 14: mod_base = OTHER; note = 2'-Omethyladenosine
  modified_base 15: mod_base = OTHER; note = 2'-fluoroadenosine
  modified_base 16: mod_base = OTHER; note = 2'-Omethyluridine
  modified_base 17: mod_base = OTHER; note = 2'-Omethylguanosine
  modified_base 18: mod_base = OTHER; note = 2'-Omethylguanosine
  modified_base 19: mod_base = OTHER; note = 2'-fluoroadenosine
  modified_base 20: mod_base = OTHER; note = 2'-Omethyluridine
  modified_base 22: mod_base = OTHER; note = 2'-Omethylguanosine
  modified_base 23: mod_base = OTHER; note = 2'-Omethylcytosine
  modified_base 24: mod_base = OTHER; note = 2'-Omethylguanosine
  modified_base 25: mod_base = OTHER; note = 2'-Omethylcytosine
  modified_base 38: mod_base = OTHER; note = Adenosine phosphorothiorate
  modified_base 39: mod_base = OTHER; note = Uridine phosphorothiorate
  modified_base 40: mod_base = OTHER; note = 2'-fluorouridine
  modified_base 43: mod_base = OTHER; note = 2'-Omethyladenosine
  modified_base 44: mod_base = OTHER; note = 2'-Omethyladenosine
  modified_base 45: mod_base = OTHER; note = 2'-Omethylguanosine
  modified_base 46: mod_base = OTHER; note = 2'-fluoroguanosine
  modified_base 48: mod_base = OTHER; note = 2'-fluorouridine
  modified_base 49: mod_base = OTHER; note = 2'-Omethylcytosine
  modified_base 50: mod_base = OTHER; note = 2'-Omethylcytosine
  modified_base 54: mod_base = OTHER; note = Uridine phosphorothiorate
  modified_base 55: mod_base = OTHER; note = Uridine phosphorothiorate
  modified_base 56: mod_base = OTHER; note = 2'-Omethylcytosine
  modified_base 57: mod_base = OTHER; note = Guanosine phosphorothiorate
  modified_base 61: mod_base = OTHER; note = 2'-Omethylcytosine
  modified_base 62: mod_base = OTHER; note = 2'-Omethylcytosine
  modified_base 63: mod_base = OTHER; note = 2'-fluorocytosine
  modified_base 64: mod_base = OTHER; note = 2'-Omethylguanosine
  modified_base 65: mod_base = OTHER; note = 2'-Omethylguanosine
  modified_base 66: mod_base = OTHER; note = 2'-Omethylcytosine
  modified_base 67: mod_base = OTHER; note = 2'-Omethylguanosine
  modified_base 68: mod_base = OTHER; note = 2'-Omethylguanosine
  modified_base 69: mod_base = OTHER; note = 2'-Omethyladenosine
  modified_base 70: mod_base = OTHER; note = 2'-fluoroguanosine

SEQ ID NO: 5704 - RNA, 75 nt, synthetic construct; identical to SEQ ID NO: 1045
  source 1..75: mol_type = other RNA
  modified_base 1: mod_base = OTHER; note = 2'-Omethylguanosine phosphorothiorate
  modified_base 2: mod_base = OTHER; note = 2'-Omethylguanosine phosphorothiorate
  modified_base 3: mod_base = OTHER; note = 2'-Omethyluridine
  modified_base 4: mod_base = OTHER; note = 2'-Omethyluridine
  modified_base 5: mod_base = OTHER; note = 2'-Omethylcytosine
  modified_base 6: mod_base = OTHER; note = 2'-Omethylcytosine
  modified_base 10: mod_base = OTHER; note = 2'-Omethylguanosine
  modified_base 11: mod_base = OTHER; note = 2'-Omethyluridine
  modified_base 12: mod_base = OTHER; note = 2'-Omethylguanosine
  modified_base 13: mod_base = OTHER; note = 2'-Omethyluridine
  modified_base 22: mod_base = OTHER; note = 2'-Omethylguanosine
  modified_base 23: mod_base = OTHER; note = 2'-Omethylcytosine
  modified_base 24: mod_base = OTHER; note = 2'-Omethyladenosine
  modified_base 25: mod_base = OTHER; note = 2'-Omethylcytosine
  modified_base 48: mod_base = OTHER; note = 2'-Omethylcytosine
  modified_base 49: mod_base = OTHER; note = 2'-Omethylcytosine
  modified_base 50: mod_base = OTHER; note = 2'-Omethylguanosine
  modified_base 51: mod_base = OTHER; note = 2'-Omethyladenosine
  modified_base 52: mod_base = OTHER; note = 2'-Omethylguanosine
  modified_base 53: mod_base = OTHER; note = 2'-Omethyluridine
  modified_base 60: mod_base = OTHER; note = 2'-Omethylcytosine
  modified_base 61: mod_base = OTHER; note = 2'-Omethyluridine
  modified_base 62: mod_base = OTHER; note = 2'-fluorocytosine
  modified_base 63: mod_base = OTHER; note = 2'-Omethylguanosine
  modified_base 64: mod_base = OTHER; note = 2'-Omethylguanosine
  modified_base 65: mod_base = OTHER; note = 2'-Omethyluridine
  modified_base 66: mod_base = OTHER; note = 2'-Omethylguanosine
  modified_base 67: mod_base = OTHER; note = 2'-Omethylguanosine
  modified_base 72: mod_base = OTHER; note = 2'-Omethyluridine

SEQ ID NO: 5705 - RNA, 86 nt, synthetic construct; identical to SEQ ID NO: 3290
  source 1..86: mol_type = other RNA
  modified_base 69: mod_base = OTHER; note = Adenosine phosphorothiorate

SEQ ID NO: 5706 - RNA, 85 nt, synthetic construct; identical to SEQ ID NO: 3286
  source 1..85: mol_type = other RNA
  modified_base 1: mod_base = OTHER; note = 2'-Omethylcytosine phosphorothiorate
  modified_base 8: mod_base = OTHER; note = Guanosine phosphorothiorate
  modified_base 11: mod_base = OTHER; note = Cytosine phosphorothiorate
  modified_base 30: mod_base = OTHER; note = 2'-fluoroadenosine
  modified_base 44: mod_base = OTHER; note = Guanosine phosphorothiorate
  modified_base 50: mod_base = OTHER; note = Adenosine phosphorothiorate
  modified_base 59: mod_base = OTHER; note = 2'-Omethyluridine
  modified_base 75: mod_base = OTHER; note = 2'-fluorouridine
  modified_base 84: mod_base = OTHER; note = 2'-fluorocytosine

SEQ ID NO: 5707 - RNA, 75 nt, synthetic construct; identical to SEQ ID NO: 3299
  source 1..75: mol_type = other RNA
  modified_base 6: mod_base = OTHER; note = 2'-fluoroguanosine phosphorothiorate
  modified_base 9: mod_base = OTHER; note = Guanosine phosphorothiorate
  modified_base 11: mod_base = OTHER; note = 2'-fluorouridine phosphorothiorate
  modified_base 16: mod_base = OTHER; note = 2'-fluorocytosine
  modified_base 21: mod_base = OTHER; note = 2'-fluoroguanosine
  modified_base 23: mod_base = OTHER; note = 2'-fluoroguanosine
  modified_base 25: mod_base = OTHER; note = 2'-fluoroadenosine
  modified_base 38: mod_base = OTHER; note = Uridine phosphorothiorate
  modified_base 40: mod_base = OTHER; note = 2'-fluorouridine
  modified_base 48: mod_base = OTHER; note = 2'-fluorocytosine
  modified_base 54: mod_base = OTHER; note = 2'-fluorouridine
  modified_base 57: mod_base = OTHER; note = 2'-fluoroadenosine
  modified_base 62: mod_base = OTHER; note = 2'-Omethylcytosine phosphorothiorate
  modified_base 64: mod_base = OTHER; note = 2'-fluoroguanosine
  modified_base 71: mod_base = OTHER; note = Cytosine phosphorothiorate
  modified_base 73: mod_base = OTHER; note = 2'-fluorocytosine phosphorothiorate
  modified_base 74: mod_base = OTHER; note = Cytosine phosphorothiorate

SEQ ID NO: 5708 - RNA, 85 nt, synthetic construct; identical to SEQ ID NO: 3317
  source 1..85: mol_type = other RNA
  modified_base 1: mod_base = OTHER; note = 2'-Omethylguanosine phosphorothiorate
  modified_base 2: mod_base = OTHER; note = 2'-fluorocytosine phosphorothiorate
  modified_base 3: mod_base = OTHER; note = 2'-Omethyluridine phosphorothiorate
  modified_base 4: mod_base = OTHER; note = 2'-Omethylguanosine phosphorothiorate
  modified_base 15: mod_base = OTHER; note = Guanosine phosphorothiorate
  modified_base 17: mod_base = OTHER; note = 2'-fluoroguanosine
  modified_base 20: mod_base = OTHER; note = 2'-fluorouridine
  modified_base 23: mod_base = OTHER; note = Guanosine phosphorothiorate
  modified_base 28: mod_base = OTHER; note = Uridine phosphorothiorate
  modified_base 29: mod_base = OTHER; note = Guanosine phosphorothiorate
  modified_base 45: mod_base = OTHER; note = 2'-Omethylguanosine phosphorothiorate
  modified_base 47: mod_base = OTHER; note = 2'-Omethylguanosine
  modified_base 52: mod_base = OTHER; note = 2'-Omethylcytosine
  modified_base 54: mod_base = OTHER; note = 2'-Omethylcytosine
  modified_base 57: mod_base = OTHER; note = 2'-Omethylcytosine phosphorothiorate
  modified_base 60: mod_base = OTHER; note = 2'-fluoroadenosine
  modified_base 62: mod_base = OTHER; note = Guanosine phosphorothiorate
  modified_base 72: mod_base = OTHER; note = 2'-fluorouridine
  modified_base 82: mod_base = OTHER; note = 2'-Omethylguanosine

SEQ ID NO: 5709 - RNA, 76 nt, synthetic construct; identical to SEQ ID NO: 625
  source 1..76: mol_type = other RNA
  modified_base 1: mod_base = OTHER; note = 2'-Omethylguanosine
  modified_base 10: mod_base = OTHER; note = 2'-Omethylguanosine
  modified_base 13: mod_base = OTHER; note = 2'-Omethylcytosine
  modified_base 17: mod_base = OTHER; note = Guanosine phosphorothiorate
  modified_base 18: mod_base = OTHER; note = 2'-Omethylguanosine
  modified_base 19: mod_base = OTHER; note = Adenosine phosphorothiorate
  modified_base 20: mod_base = OTHER; note = 2'-Omethyluridine
  modified_base 25: mod_base = OTHER; note = 2'-Omethylcytosine
  modified_base 29: mod_base = OTHER; note = 2'-Omethylguanosine
  modified_base 33: mod_base = OTHER; note = 2'-fluorouridine
  modified_base 35: mod_base = OTHER; note = Cytosine phosphorothiorate
  modified_base 37: mod_base = OTHER; note = Adenosine phosphorothiorate
  modified_base 38: mod_base = OTHER; note = Adenosine phosphorothiorate
  modified_base 41: mod_base = OTHER; note = 2'-fluorocytosine
  modified_base 43: mod_base = OTHER; note = 2'-Omethyladenosine
  modified_base 44: mod_base = OTHER; note = 2'-fluoroadenosine
  modified_base 46: mod_base = OTHER; note = Guanosine phosphorothiorate
  modified_base 50: mod_base = OTHER; note = 2'-Omethylcytosine
  modified_base 52: mod_base = OTHER; note = 2'-Omethylguanosine
  modified_base 54: mod_base = OTHER; note = Uridine phosphorothiorate
  modified_base 55: mod_base = OTHER; note = Uridine phosphorothiorate
  modified_base 56: mod_base = OTHER; note = 2'-Omethylcytosine
  modified_base 57: mod_base = OTHER; note = Guanosine phosphorothiorate
  modified_base 62: mod_base = OTHER; note = 2'-Omethylcytosine
  modified_base 63: mod_base = OTHER; note = 2'-fluorocytosine
  modified_base 65: mod_base = OTHER; note = 2'-Omethylguanosine phosphorothiorate
  modified_base 71: mod_base = OTHER; note = 2'-Omethyluridine
  modified_base 73: mod_base = OTHER; note = 2'-Omethylguanosine

SEQ ID NO: 5710 - DNA, 76 bp, synthetic construct; identical to SEQ ID NO: 1924
  source 1..76: mol_type = other DNA
  modified_base 1: mod_base = OTHER; note = 2'-Omethylguanosine
  modified_base 2: mod_base = OTHER; note = Guanosine phosphorothiorate
  modified_base 8: mod_base = OTHER; note = Uridine phosphorothiorate
  modified_base 9: mod_base = OTHER; note = 2'-O-(2-Methoxyethyl) guanosine
  modified_base 10: mod_base = OTHER; note = 2'-Omethylguanosine
  modified_base 12: mod_base = OTHER; note = Guanosine phosphorothiorate
  modified_base 15: mod_base = OTHER; note = Adenosine phosphorothiorate
  modified_base 16: mod_base = OTHER; note = 2'-fluorouridine phosphorothiorate
  modified_base 17: mod_base = OTHER; note = 2'-Omethylguanosine phosphorothiorate
  modified_base 18: mod_base = OTHER; note = 2'-O-(2-Methoxyethyl) guanosine
  modified_base 20: mod_base = OTHER; note = 2'-O-(2-Methoxyethyl) thymine phosphorothiorate
  modified_base 21: mod_base = OTHER; note = 2'-O-(2-Methoxyethyl) adenosine
  modified_base 24: mod_base = OTHER; note = Guanosine phosphorothiorate
  modified_base 25: mod_base = OTHER; note = 2'-O-(2-Methoxyethyl) 5-methylcytosine
  modified_base 27: mod_base = OTHER; note = 2'-fluorouridine
  modified_base 28: mod_base = OTHER; note = 2'-fluorouridine
  modified_base 29: mod_base = OTHER; note = 2'-fluoroguanosine
  modified_base 31: mod_base = OTHER; note = 2'-fluoroadenosine
  modified_base 33: mod_base = OTHER; note = 2'-fluorouridine
  modified_base 37: mod_base = OTHER; note = Adenosine phosphorothiorate
  modified_base 38: mod_base = OTHER; note = 2'-O-(2-Methoxyethyl) adenosine
  modified_base 39: mod_base = OTHER; note = 2'-Omethyluridine phosphorothiorate
  modified_base 40: mod_base = OTHER; note = 2'-fluorouridine
  modified_base 43: mod_base = OTHER; note = 2'-Omethyladenosine
  modified_base 44: mod_base = OTHER; note = 2'-O-(2-Methoxyethyl) adenosine
  modified_base 45: mod_base = OTHER; note = deoxyguanosine phosphorothiorate
  modified_base 46: mod_base = OTHER; note = 2'-O-(2-Methoxyethyl) guanosine
  modified_base 50: mod_base = OTHER; note = 2'-fluorocytosine
  modified_base 52: mod_base = OTHER; note = deoxyguanosine phosphorothiorate
  modified_base 55: mod_base = OTHER; note = Uridine phosphorothiorate
  modified_base 59: mod_base = OTHER; note = Guanosine phosphorothiorate
  modified_base 60: mod_base = OTHER; note = 2'-O-(2-Methoxyethyl) thymine
  modified_base 61: mod_base = OTHER; note = 2'-O-(2-Methoxyethyl) 5-methylcytosine
  modified_base 64: mod_base = OTHER; note = 2'-O-(2-Methoxyethyl) guanosine phosphorothiorate
  modified_base 68: mod_base = OTHER; note = Guanosine phosphorothiorate
  modified_base 69: mod_base = OTHER; note = 2'-fluoroadenosine
  modified_base 71: mod_base = OTHER; note = Uridine phosphorothiorate
  modified_base 72: mod_base = OTHER; note = 2'-fluorocytosine
  modified_base 74: mod_base = OTHER; note = Cytosine phosphorothiorate
  modified_base 75: mod_base = OTHER; note = 2'-Omethylcytosine phosphorothiorate
  modified_base 76: mod_base = OTHER; note = 2'-Omethyladenosine
  misc_feature 1..2: note = RNA
  misc_feature 3: note = DNA
  misc_feature 4..31: note = RNA
  misc_feature 32: note = DNA
  misc_feature 33..44: note = RNA
  misc_feature 45: note = DNA
  misc_feature 46..51: note = RNA
  misc_feature 52: note = DNA
  misc_feature 53..56: note = RNA
  misc_feature 57: note = DNA
  misc_feature 58..65: note = RNA
  misc_feature 66: note = DNA
  misc_feature 67..76: note = RNA

SEQ ID NO: 5711 - RNA, 75 nt, synthetic construct; identical to SEQ ID NO: 3306
  source 1..75: mol_type = other RNA
  modified_base 1: mod_base = OTHER; note = 2'-Omethylguanosine
  modified_base 2: mod_base = OTHER; note = 2'-Omethyladenosine
  modified_base 3: mod_base = OTHER; note = 2'-Omethylcytosine
  modified_base 4: mod_base = OTHER; note = 2'-Omethylcytosine
  modified_base 5: mod_base = OTHER; note = 2'-Omethyluridine

SEQ ID NO: 5712 - RNA, 76 nt, synthetic construct; identical to SEQ ID NO: 625
  source 1..76: mol_type = other RNA
  modified_base 1: mod_base = OTHER; note = 2'-Omethylguanosine
  modified_base 17: mod_base = OTHER; note = 2'-Omethylguanosine
  modified_base 18: mod_base = OTHER; note = 2'-Omethylguanosine
  modified_base 28: mod_base = OTHER; note = Thymine
  modified_base 50: mod_base = OTHER; note = 2'-Omethylcytosine
  modified_base 52: mod_base = OTHER; note = 2'-Omethylguanosine
  modified_base 73: mod_base = OTHER; note = 2'-Omethylguanosine

SEQ ID NO: 5713 - RNA, 76 nt, synthetic construct; identical to SEQ ID NO: 3289
  source 1..76: mol_type = other RNA
  modified_base 1: mod_base = OTHER; note = 2'-Omethylguanosine phosphorothiorate
  modified_base 2: mod_base = OTHER; note = 2'-Omethylcytosine phosphorothiorate
  modified_base 14: mod_base = OTHER; note = 2'-Omethyladenosine
  modified_base 18: mod_base = OTHER; note = 2'-Omethylguanosine
  modified_base 19: mod_base = OTHER; note = 2'-Omethylguanosine
  modified_base 22: mod_base = OTHER; note = 2'-Omethylguanosine
  modified_base 25: mod_base = OTHER; note = 2'-Omethylcytosine
  modified_base 27: mod_base = OTHER; note = 2'-Omethyluridine
  modified_base 33: mod_base = OTHER; note = 2'-fluorouridine
  modified_base 41: mod_base = OTHER; note = 2'-Omethyluridine phosphorothiorate
  modified_base 44: mod_base = OTHER; note = 2'-Omethylguanosine
  modified_base 45: mod_base = OTHER; note = 2'-Omethylguanosine
  modified_base 46: mod_base = OTHER; note = 2'-fluoroguanosine
  modified_base 47: mod_base = OTHER; note = 2'-fluorouridine
  modified_base 48: mod_base = OTHER; note = 2'-fluorocytosine
  modified_base 52: mod_base = OTHER; note = 2'-Omethylguanosine
  modified_base 55: mod_base = OTHER; note = Uridine phosphorothiorate
  modified_base 71: mod_base = OTHER; note = 2'-Omethylguanosine
  modified_base 73: mod_base = OTHER; note = 2'-Omethylguanosine

SEQ ID NO: 5714 - RNA, 75 nt, synthetic construct; identical to SEQ ID NO: 1045
  source 1..75: mol_type = other RNA
  modified_base 1: mod_base = OTHER; note = 2'-Omethylguanosine phosphorothiorate
  modified_base 2: mod_base = OTHER; note = 2'-Omethylguanosine phosphorothiorate
  modified_base 13: mod_base = OTHER; note = 2'-fluorouridine
  modified_base 14: mod_base = OTHER; note = 2'-Omethyladenosine
  modified_base 16: mod_base = OTHER; note = 2'-Omethyluridine phosphorothiorate
  modified_base 18: mod_base = OTHER; note = 2'-fluoroguanosine phosphorothiorate
  modified_base 39: mod_base = OTHER; note = Uridine phosphorothiorate
  modified_base 58: mod_base = OTHER; note = Guanosine phosphorothiorate
  modified_base 63: mod_base = OTHER; note = 2'-Omethylguanosine phosphorothiorate
  modified_base 66: mod_base = OTHER; note = 2'-Omethylguanosine
  modified_base 67: mod_base = OTHER; note = 2'-Omethylguanosine
  modified_base 69: mod_base = OTHER; note = 2'-Omethyladenosine
  modified_base 72: mod_base = OTHER; note = 2'-Omethyluridine
  modified_base 74: mod_base = OTHER; note = 2'-Omethylcytosine phosphorothiorate
  modified_base 75: mod_base = OTHER; note = 2'-Omethyladenosine

SEQ ID NO: 5715 - RNA, 75 nt, synthetic construct; identical to SEQ ID NO: 3336
  source 1..75: mol_type = other RNA
  modified_base 5: mod_base = OTHER; note = 2'-Omethylguanosine phosphorothiorate
  modified_base 15: mod_base = OTHER; note = 2'-fluorouridine
  modified_base 22: mod_base = OTHER; note = 2'-fluoroadenosine
  modified_base 29: mod_base = OTHER; note = 2'-fluoroguanosine
  modified_base 41: mod_base = OTHER; note = 2'-Omethylguanosine phosphorothiorate
  modified_base 63: mod_base = OTHER; note = 2'-Omethyluridine phosphorothiorate
  modified_base 73: mod_base = OTHER; note = Cytosine phosphorothiorate
  modified_base 74: mod_base = OTHER; note = Cytosine phosphorothiorate

SEQ ID NO: 5716 - RNA, 75 nt, synthetic construct; identical to SEQ ID NO: 1045
  source 1..75: mol_type = other RNA
  modified_base 1: mod_base = OTHER; note = 2'-Omethylguanosine phosphorothiorate
  modified_base 2: mod_base = OTHER; note = 2'-Omethylguanosine
  modified_base 11: mod_base = OTHER; note = 2'-fluorouridine phosphorothiorate
  modified_base 14: mod_base = OTHER; note = 2'-Omethyladenosine
  modified_base 15: mod_base = OTHER; note = Adenosine phosphorothiorate
  modified_base 21: mod_base = OTHER; note = 2'-fluoroadenosine
  modified_base 22: mod_base = OTHER; note = 2'-fluoroguanosine
  modified_base 23: mod_base = OTHER; note = Cytosine phosphorothiorate
  modified_base 33: mod_base = OTHER; note = 2'-Omethyluridine phosphorothiorate
  modified_base 38: mod_base = OTHER; note = 2'-fluoroadenosine
  modified_base 39: mod_base = OTHER; note = 2'-fluorouridine
  modified_base 41: mod_base = OTHER; note = 2'-fluorocytosine
  modified_base 42: mod_base = OTHER; note = 2'-fluoroadenosine
  modified_base 45: mod_base = OTHER; note = 2'-Omethylguanosine phosphorothiorate
  modified_base 58: mod_base = OTHER; note = 2'-fluoroguanosine
  modified_base 59: mod_base = OTHER; note = 2'-Omethyluridine
  modified_base 66: mod_base = OTHER; note = Guanosine phosphorothiorate
  modified_base 67: mod_base = OTHER; note = 2'-fluoroguanosine
  modified_base 74: mod_base = OTHER; note = Cytosine phosphorothiorate

SEQ ID NO: 5717 - RNA, 75 nt, synthetic construct; identical to SEQ ID NO: 3336
  source 1..75: mol_type = other RNA
  modified_base 21: mod_base = OTHER; note = 2'-fluoroguanosine
  modified_base 26: mod_base = OTHER; note = 2'-Omethyluridine
  modified_base 27: mod_base = OTHER; note = 2'-fluorocytosine
  modified_base 28: mod_base = OTHER; note = Adenosine phosphorothiorate
  modified_base 33: mod_base = OTHER; note = 2'-fluorocytosine
  modified_base 34: mod_base = OTHER; note = 2'-fluorouridine
  modified_base 35: mod_base = OTHER; note = 2'-fluoroadenosine
  modified_base 38: mod_base = OTHER; note = 2'-Omethyluridine phosphorothiorate
  modified_base 39: mod_base = OTHER; note = 2'-fluorocytosine phosphorothiorate
  modified_base 40: mod_base = OTHER; note = 2'-Omethyluridine phosphorothiorate
  modified_base 49: mod_base = OTHER; note = Adenosine phosphorothiorate
  modified_base 55: mod_base = OTHER; note = Cytosine phosphorothiorate
  modified_base 56: mod_base = OTHER; note = Adenosine phosphorothiorate
  modified_base 59: mod_base = OTHER; note = 2'-Omethyluridine phosphorothiorate
  modified_base 72: mod_base = OTHER; note = 2'-fluoroguanosine phosphorothiorate
  modified_base 74: mod_base = OTHER; note = 2'-Omethylcytosine

SEQ ID NO: 5718 - RNA, 86 nt, synthetic construct; identical to SEQ ID NO: 3290
  source 1..86: mol_type = other RNA
  modified_base 1: mod_base = OTHER; note = 2'-Omethyladenosine
  modified_base 2: mod_base = OTHER; note = 2'-Omethylcytosine
  modified_base 3: mod_base = OTHER; note = 2'-Omethylcytosine
  modified_base 4: mod_base = OTHER; note = 2'-Omethyladenosine
  modified_base 5: mod_base = OTHER; note = 2'-Omethylguanosine
  modified_base 6: mod_base = OTHER; note = 2'-Omethylguanosine
  modified_base 13: mod_base = OTHER; note = 2'-Omethylguanosine
  modified_base 14: mod_base = OTHER; note = 2'-Omethyladenosine
  modified_base 15: mod_base = OTHER; note = 2'-Omethylguanosine
  modified_base 16: mod_base = OTHER; note = 2'-Omethyluridine
  modified_base 17: mod_base = OTHER; note = 2'-Omethylguanosine
  modified_base 18: mod_base = OTHER; note = 2'-Omethylguanosine
  modified_base 19: mod_base = OTHER; note = Uridine phosphorothiorate
  modified_base 20: mod_base = OTHER; note = 2'-Omethyluridine
  modified_base 21: mod_base = OTHER; note = Adenosine phosphorothiorate
  modified_base 25: mod_base = OTHER; note = 2'-Omethylcytosine
  modified_base 33: mod_base = OTHER; note = 2'-fluorouridine
  modified_base 34: mod_base = OTHER; note = 2'-Omethyluridine
  modified_base 35: mod_base = OTHER; note = Cytosine phosphorothiorate
  modified_base 37: mod_base = OTHER; note = Guanosine phosphorothiorate
  modified_base 38: mod_base = OTHER; note = Adenosine phosphorothiorate
  modified_base 41: mod_base = OTHER; note = 2'-fluorocytosine
  modified_base 42: mod_base = OTHER; note = 2'-Omethyladenosine
  modified_base 43: mod_base = OTHER; note = 2'-Omethyladenosine
  modified_base 44: mod_base = OTHER; note = 2'-fluorouridine
  modified_base 59: mod_base = OTHER; note = 2'-Omethylguanosine
  modified_base 60: mod_base = OTHER; note = 2'-Omethyluridine
  modified_base 61: mod_base = OTHER; note = 2'-Omethylguanosine
  modified_base 62: mod_base = OTHER; note = 2'-Omethylguanosine
  modified_base 63: mod_base = OTHER; note = 2'-Omethylguanosine
  modified_base 64: mod_base = OTHER; note = Uridine phosphorothiorate
  modified_base 65: mod_base = OTHER; note = Uridine phosphorothiorate
  modified_base 71: mod_base = OTHER; note = 2'-Omethylcytosine
  modified_base 75: mod_base = OTHER; note = 2'-Omethylcytosine
  modified_base 83: mod_base = OTHER; note = 2'-Omethyladenosine

SEQ ID NO: 5719 - RNA, 75 nt, synthetic construct; identical to SEQ ID NO: 1045
  source 1..75: mol_type = other RNA
  modified_base 1: mod_base = OTHER; note = 2'-Omethylguanosine
  modified_base 19: mod_base = OTHER; note = 2'-Omethyluridine
  modified_base 20: mod_base = OTHER; note = 2'-Omethyladenosine phosphorothiorate
  modified_base 21: mod_base = OTHER; note = 2'-fluoroadenosine
  modified_base 22: mod_base = OTHER; note = 2'-Omethylguanosine
  modified_base 40: mod_base = OTHER; note = 2'-fluorocytosine
  modified_base 41: mod_base = OTHER; note = 2'-Omethylcytosine
  modified_base 42: mod_base = OTHER; note = 2'-Omethyladenosine
  modified_base 43: mod_base = OTHER; note = 2'-Omethylguanosine
  modified_base 72: mod_base = OTHER; note = 2'-Omethyluridine

SEQ ID NO: 5720 - RNA, 73 nt, synthetic construct; identical to SEQ ID NO: 935
  source 1..73: mol_type = other RNA
  modified_base 1: mod_base = OTHER; note = 2'-Omethylguanosine phosphorothiorate
  modified_base 2: mod_base = OTHER; note = 2'-Omethylguanosine
  modified_base 3: mod_base = OTHER; note = 2'-Omethylcytosine
  modified_base 4: mod_base = OTHER; note = 2'-Omethyluridine
  modified_base 5: mod_base = OTHER; note = 2'-Omethylcytosine
  modified_base 6: mod_base = OTHER; note = 2'-Omethylcytosine
  modified_base 44: mod_base = OTHER; note = 2'-Omethyladenosine
  modified_base 45: mod_base = OTHER; note = 2'-Omethylguanosine
  modified_base 46: mod_base = OTHER; note = 2'-fluoroguanosine
  modified_base 48: mod_base = OTHER; note = 2'-fluorouridine
  modified_base 72: mod_base = OTHER; note = 2'-Omethylcytosine

SEQ ID NO: 5721 - RNA, 85 nt, synthetic construct; identical to SEQ ID NO: 3297
  source 1..85: mol_type = other RNA
  modified_base 1: mod_base = OTHER; note = 2'-Omethylguanosine phosphorothiorate
  modified_base 2: mod_base = OTHER; note = 2'-Omethylcytosine phosphorothiorate
  modified_base 83: mod_base = OTHER; note = Cytosine phosphorothiorate
  modified_base 84: mod_base = OTHER; note = 2'-Omethylcytosine

SEQ ID NO: 5722 - RNA, 76 nt, synthetic construct; identical to SEQ ID NO: 625
  source 1..76: mol_type = other RNA
  modified_base 2: mod_base = OTHER; note = 2'-fluoroguanosine
  modified_base 4: mod_base = OTHER; note = 2'-Omethyluridine
  modified_base 7: mod_base = OTHER; note = Guanosine phosphorothiorate
  modified_base 10: mod_base = OTHER; note = 2'-fluoroguanosine phosphorothiorate
  modified_base 11: mod_base = OTHER; note = 2'-fluorocytosine
  modified_base 12: mod_base = OTHER; note = 2'-fluoroguanosine phosphorothiorate
  modified_base 13: mod_base = OTHER; note = Cytosine phosphorothiorate
  modified_base 14: mod_base = OTHER; note = 2'-Omethyladenosine
  modified_base 15: mod_base = OTHER; note = 2'-fluoroadenosine
  modified_base 16: mod_base = OTHER; note = Uridine phosphorothiorate
  modified_base 18: mod_base = OTHER; note = Guanosine phosphorothiorate
  modified_base 19: mod_base = OTHER; note = Adenosine phosphorothiorate
  modified_base 20: mod_base = OTHER; note = 2'-Omethyluridine
  modified_base 22: mod_base = OTHER; note = 2'-fluoroguanosine
  modified_base 25: mod_base = OTHER; note = Cytosine phosphorothiorate
  modified_base 26: mod_base = OTHER; note = 2'-Omethyladenosine
  modified_base 29: mod_base = OTHER; note = 2'-Omethylguanosine
  modified_base 34: mod_base = OTHER; note = 2'-Omethyluridine
  modified_base 38: mod_base = OTHER; note = 2'-Omethyladenosine
  modified_base 41: mod_base = OTHER; note = 2'-Omethylcytosine
  modified_base 44: mod_base = OTHER; note = 2'-fluoroadenosine
  modified_base 45: mod_base = OTHER; note = 2'-Omethylguanosine
  modified_base 46: mod_base = OTHER; note = 2'-fluoroguanosine phosphorothiorate
  modified_base 48: mod_base = OTHER; note = 2'-fluorouridine
  modified_base 49: mod_base = OTHER; note = 2'-fluorocytosine
  modified_base 50: mod_base = OTHER; note = 2'-fluorocytosine
  modified_base 53: mod_base = OTHER; note = 2'-fluoroguanosine
  modified_base 57: mod_base = OTHER; note = 2'-fluoroguanosine
  modified_base 63: mod_base = OTHER; note = Cytosine phosphorothiorate
  modified_base 64: mod_base = OTHER; note = Guanosine phosphorothiorate
  modified_base 65: mod_base = OTHER; note = 2'-fluoroguanosine
  modified_base 69: mod_base = OTHER; note = 2'-fluoroadenosine
  modified_base 72: mod_base = OTHER; note = 2'-Omethylcytosine
  modified_base 75: mod_base = OTHER; note = 2'-Omethylcytosine

SEQ ID NO: 5723 - RNA, 86 nt, synthetic construct; identical to SEQ ID NO: 3290
  source 1..86: mol_type = other RNA
  modified_base 26: mod_base = OTHER; note = 2'-Omethylguanosine

SEQ ID NO: 5724 - RNA, 76 nt, synthetic construct; identical to SEQ ID NO: 3318
  source 1..76: mol_type = other RNA
  modified_base 1: mod_base = OTHER; note = 2'-Omethylcytosine phosphorothiorate
  modified_base 2: mod_base = OTHER; note = 2'-Omethylcytosine
  modified_base 3: mod_base = OTHER; note = 2'-Omethyluridine
  modified_base 4: mod_base = OTHER; note = 2'-Omethyluridine
  modified_base 5: mod_base = OTHER; note = 2'-Omethylcytosine
  modified_base 6: mod_base = OTHER; note = 2'-Omethylguanosine
  modified_base 43: mod_base = OTHER; note = 2'-Omethyluridine
  modified_base 44: mod_base = OTHER; note = 2'-Omethyladenosine
  modified_base 45: mod_base = OTHER; note = 2'-Omethylguanosine
  modified_base 46: mod_base = OTHER; note = 2'-fluoroguanosine
  modified_base 48: mod_base = OTHER; note = 2'-fluorocytosine
  modified_base 73: mod_base = OTHER; note = 2'-Omethyladenosine

SEQ ID NO: 5725 - RNA, 76 nt, synthetic construct; identical to SEQ ID NO: 625
  source 1..76: mol_type = other RNA
  modified_base 1: mod_base = OTHER; note = 2'-Omethylguanosine
  modified_base 2: mod_base = OTHER; note = 2'-Omethylguanosine
  modified_base 3: mod_base = OTHER; note = 2'-Omethylcytosine
  modified_base 10: mod_base = OTHER; note = 2'-Omethylguanosine
  modified_base 11: mod_base = OTHER; note = 2'-Omethylcytosine
  modified_base 12: mod_base = OTHER; note = 2'-Omethylguanosine
  modified_base 13: mod_base = OTHER; note = 2'-Omethylcytosine
  modified_base 14: mod_base = OTHER; note = 2'-Omethyladenosine
  modified_base 15: mod_base = OTHER; note = 2'-fluoroadenosine
  modified_base 16: mod_base = OTHER; note = 2'-Omethyluridine
  modified_base 17: mod_base = OTHER; note = 2'-Omethylguanosine
  modified_base 18: mod_base = OTHER; note = 2'-Omethylguanosine
  modified_base 19: mod_base = OTHER; note = 2'-fluoroadenosine
  modified_base 20: mod_base = OTHER; note = 2'-Omethyluridine
  modified_base 22: mod_base = OTHER; note = 2'-Omethylguanosine
  modified_base 23: mod_base = OTHER; note = 2'-Omethylcytosine
  modified_base 24: mod_base = OTHER; note = 2'-Omethylguanosine
  modified_base 25: mod_base = OTHER; note = 2'-Omethylcytosine
  modified_base 38: mod_base = OTHER; note = Adenosine phosphorothiorate
  modified_base 39: mod_base = OTHER; note = Uridine phosphorothiorate
  modified_base 40: mod_base = OTHER; note = 2'-fluorouridine
  modified_base 43: mod_base = OTHER; note = 2'-Omethyladenosine
  modified_base 44: mod_base = OTHER; note = 2'-Omethyladenosine
  modified_base 45: mod_base = OTHER; note = 2'-Omethylguanosine
  modified_base 46: mod_base = OTHER; note = 2'-fluoroguanosine
  modified_base 48: mod_base = OTHER; note = 2'-fluorouridine
  modified_base 49: mod_base = OTHER; note = 2'-Omethylcytosine
  modified_base 50: mod_base = OTHER; note = 2'-Omethylcytosine
  modified_base 54: mod_base = OTHER; note = Uridine phosphorothiorate
  modified_base 55: mod_base = OTHER; note = Uridine phosphorothiorate
  modified_base 56: mod_base = OTHER; note = 2'-Omethylcytosine
  modified_base 57: mod_base = OTHER; note = Guanosine phosphorothiorate
  modified_base 61: mod_base = OTHER; note = 2'-Omethylcytosine
  modified_base 62: mod_base = OTHER; note = 2'-Omethylcytosine
  modified_base 63: mod_base = OTHER; note = 2'-fluorocytosine
  modified_base 64: mod_base = OTHER; note = 2'-Omethylguanosine
  modified_base 65: mod_base = OTHER; note = 2'-Omethylguanosine
  modified_base 66: mod_base = OTHER; note = 2'-Omethylcytosine
  modified_base 67: mod_base = OTHER; note = 2'-Omethylguanosine
  modified_base 68: mod_base = OTHER; note = 2'-Omethylguanosine
  modified_base 69: mod_base = OTHER; note = 2'-fluoroadenosine

SEQ ID NO: 5726 - RNA, 76 nt, synthetic construct; identical to SEQ ID NO: 625
  source 1..76: mol_type = other RNA
  modified_base 2: mod_base = OTHER; note = 2'-Omethylguanosine
  modified_base 3: mod_base = OTHER; note = 2'-Omethylcytosine
  modified_base 4: mod_base = OTHER; note = 2'-Omethyluridine
  modified_base 6: mod_base = OTHER; note = Cytosine phosphorothiorate
  modified_base 8: mod_base = OTHER; note = Uridine phosphorothiorate
  modified_base 9: mod_base = OTHER; note = Guanosine phosphorothiorate
  modified_base 10: mod_base = OTHER; note = 2'-Omethylguanosine
  modified_base 12: mod_base = OTHER; note = 2'-Omethylguanosine
  modified_base 13: mod_base = OTHER; note = 2'-fluorocytosine
  modified_base 14: mod_base = OTHER; note = 2'-Omethyladenosine
  modified_base 18: mod_base = OTHER; note = Guanosine phosphorothiorate
  modified_base 20: mod_base = OTHER; note = 2'-Omethyluridine
  modified_base 25: mod_base = OTHER; note = Cytosine phosphorothiorate
  modified_base 26: mod_base = OTHER; note = 2'-Omethyladenosine
  modified_base 27: mod_base = OTHER; note = 2'-fluorouridine
  modified_base 29: mod_base = OTHER; note = 2'-Omethylguanosine
  modified_base 30: mod_base = OTHER; note = Guanosine phosphorothiorate
  modified_base 31: mod_base = OTHER; note = 2'-Omethyladenosine
  modified_base 32: mod_base = OTHER; note = 2'-fluorocytosine
  modified_base 34: mod_base = OTHER; note = 2'-fluorouridine
  modified_base 38: mod_base = OTHER; note = 2'-Omethyladenosine
  modified_base 41: mod_base = OTHER; note = 2'-Omethylcytosine
  modified_base 42: mod_base = OTHER; note = 2'-fluoroadenosine
  modified_base 44: mod_base = OTHER; note = Adenosine phosphorothiorate
  modified_base 45: mod_base = OTHER; note = 2'-fluoroguanosine
  modified_base 46: mod_base = OTHER; note = 2'-fluoroguanosine
  modified_base 47: mod_base = OTHER; note = Uridine phosphorothiorate
  modified_base 52: mod_base = OTHER; note = Guanosine phosphorothiorate
  modified_base 53: mod_base = OTHER; note = 2'-Omethylguanosine
  modified_base 57: mod_base = OTHER; note = 2'-fluoroguanosine
  modified_base 59: mod_base = OTHER; note = 2'-fluoroguanosine phosphorothiorate
  modified_base 60: mod_base = OTHER; note = Uridine phosphorothiorate
  modified_base 63: mod_base = OTHER; note = 2'-fluorocytosine
  modified_base 66: mod_base = OTHER; note = 2'-fluorocytosine
  modified_base 67: mod_base = OTHER; note = Guanosine phosphorothiorate
  modified_base 68: mod_base = OTHER; note = 2'-Omethylguanosine
  modified_base 69: mod_base = OTHER; note = 2'-Omethyladenosine
  modified_base 74: mod_base = OTHER; note = 2'-fluorocytosine

SEQ ID NO: 5727 - RNA, 85 nt, synthetic construct; identical to SEQ ID NO: 3301
  source 1..85: mol_type = other RNA
  modified_base 1: mod_base = OTHER; note = 2'-Omethylguanosine phosphorothiorate
  modified_base 2: mod_base = OTHER; note = Cytosine phosphorothiorate
  modified_base 3: mod_base = OTHER; note = Uridine phosphorothiorate
  modified_base 4: mod_base = OTHER; note = 2'-Omethylguanosine phosphorothiorate
  modified_base 11: mod_base = OTHER; note = Cytosine phosphorothiorate
  modified_base 14: mod_base = OTHER; note = 2'-Omethyladenosine
  modified_base 23: mod_base = OTHER; note = Guanosine phosphorothiorate
  modified_base 25: mod_base = OTHER; note = 2'-Omethylcytosine phosphorothiorate
  modified_base 29: mod_base = OTHER; note = 2'-fluoroguanosine
  modified_base 34: mod_base = OTHER; note = 2'-fluorouridine
  modified_base 36: mod_base = OTHER; note = 2'-Omethyladenosine
  modified_base 37: mod_base = OTHER; note = Adenosine phosphorothiorate
  modified_base 38: mod_base = OTHER; note = 2'-fluoroadenosine
  modified_base 45: mod_base = OTHER; note = 2'-Omethylguanosine phosphorothiorate
  modified_base 52: mod_base = OTHER; note = 2'-Omethylcytosine phosphorothiorate
  modified_base 53: mod_base = OTHER; note = 2'-fluorocytosine
  modified_base 55: mod_base = OTHER; note = 2'-Omethylcytosine phosphorothiorate
  modified_base 59: mod_base = OTHER; note = 2'-Omethylcytosine
  modified_base 61: mod_base = OTHER; note = 2'-Omethylguanosine
  modified_base 73: mod_base = OTHER; note = 2'-fluoroguanosine
  modified_base 82: mod_base = OTHER; note = Guanosine phosphorothiorate

SEQ ID NO: 5728 - RNA, 75 nt, synthetic construct; identical to SEQ ID NO: 1045
  source 1..75: mol_type = other RNA
  modified_base 1: mod_base = OTHER; note = 2'-Omethylguanosine
  modified_base 13: mod_base = OTHER; note = 2'-Omethyluridine
  modified_base 14: mod_base = OTHER; note = 2'-Omethyladenosine
  modified_base 15: mod_base = OTHER; note = 2'-Omethyladenosine
  modified_base 16: mod_base = OTHER; note = 2'-Omethyluridine
  modified_base 17: mod_base = OTHER; note = 2'-Omethylguanosine
  modified_base 18: mod_base = OTHER; note = 2'-Omethylguanosine
  modified_base 19: mod_base = OTHER; note = Uridine phosphorothiorate
  modified_base 20: mod_base = OTHER; note = 2'-Omethyladenosine
  modified_base 21: mod_base = OTHER; note = Adenosine phosphorothiorate
  modified_base 25: mod_base = OTHER; note = 2'-Omethylcytosine
  modified_base 33: mod_base = OTHER; note = Uridine phosphorothiorate
  modified_base 34: mod_base = OTHER; note = 2'-Omethyluridine
  modified_base 35: mod_base = OTHER; note = Uridine phosphorothiorate
  modified_base 37: mod_base = OTHER; note = Adenosine phosphorothiorate
  modified_base 38: mod_base = OTHER; note = Adenosine phosphorothiorate
  modified_base 41: mod_base = OTHER; note = 2'-fluorocytosine
  modified_base 42: mod_base = OTHER; note = 2'-Omethyladenosine
  modified_base 43: mod_base = OTHER; note = 2'-Omethylguanosine
  modified_base 44: mod_base = OTHER; note = 2'-fluorocytosine
  modified_base 48: mod_base = OTHER; note = 2'-Omethylcytosine
  modified_base 49: mod_base = OTHER; note = 2'-Omethylcytosine
  modified_base 51: mod_base = OTHER; note = 2'-Omethyladenosine
  modified_base 53: mod_base = OTHER; note = Uridine phosphorothiorate
  modified_base 54: mod_base = OTHER; note = Uridine phosphorothiorate
  modified_base 60: mod_base = OTHER; note = 2'-Omethylcytosine
  modified_base 64: mod_base = OTHER; note = 2'-Omethylguanosine
  modified_base 72: mod_base = OTHER; note = 2'-Omethyluridine

SEQ ID NO: 5729 - RNA, 76 nt, synthetic construct; identical to SEQ ID NO: 625
  source 1..76: mol_type = other RNA
  modified_base 3: mod_base = OTHER; note = 2'-fluorocytosine
  modified_base 7: mod_base = OTHER; note = Guanosine phosphorothiorate
  modified_base 10: mod_base = OTHER; note = 2'-Omethylguanosine
  modified_base 11: mod_base = OTHER; note = 2'-Omethylcytosine
  modified_base 13: mod_base = OTHER; note = 2'-fluorocytosine
  modified_base 15: mod_base = OTHER; note = Adenosine phosphorothiorate
  modified_base 16: mod_base = OTHER; note = 2'-fluorouridine
  modified_base 17: mod_base = OTHER; note = 2'-Omethylguanosine
  modified_base 18: mod_base = OTHER; note = 2'-Omethylguanosine
  modified_base 21: mod_base = OTHER; note = Adenosine phosphorothiorate
  modified_base 23: mod_base = OTHER; note = 2'-fluorocytosine phosphorothiorate
  modified_base 24: mod_base = OTHER; note = 2'-fluoroguanosine
  modified_base 25: mod_base = OTHER; note = Cytosine phosphorothiorate
  modified_base 26: mod_base = OTHER; note = 2'-Omethyladenosine
  modified_base 27: mod_base = OTHER; note = Uridine phosphorothiorate
  modified_base 28: mod_base = OTHER; note = 2'-fluorouridine
  modified_base 30: mod_base = OTHER; note = 2'-Omethylguanosine
  modified_base 31: mod_base = OTHER; note = 2'-Omethyladenosine
  modified_base 40: mod_base = OTHER; note = 2'-Omethyluridine
  modified_base 41: mod_base = OTHER; note = 2'-fluorocytosine phosphorothiorate
  modified_base 42: mod_base = OTHER; note = 2'-Omethyladenosine
  modified_base 43: mod_base = OTHER; note = 2'-Omethyladenosine
  modified_base 44: mod_base = OTHER; note = 2'-fluoroadenosine
  modified_base 46: mod_base = OTHER; note = 2'-Omethylguanosine
  modified_base 47: mod_base = OTHER; note = 2'-fluorouridine
  modified_base 48: mod_base = OTHER; note = 2'-fluorouridine phosphorothiorate
  modified_base 49: mod_base = OTHER; note = 2'-Omethylcytosine
  modified_base 52: mod_base = OTHER; note = 2'-Omethylguanosine
  modified_base 53: mod_base = OTHER; note = 2'-fluoroguanosine
  modified_base 54: mod_base = OTHER; note = 2'-Omethyluridine
  modified_base 56: mod_base = OTHER; note = 2'-fluorocytosine
  modified_base 59: mod_base = OTHER; note = Guanosine phosphorothiorate
  modified_base 63: mod_base = OTHER; note = 2'-fluorocytosine
  modified_base 67: mod_base = OTHER; note = 2'-fluoroguanosine
  modified_base 69: mod_base = OTHER; note = 2'-fluoroadenosine
  modified_base 70: mod_base = OTHER; note = 2'-fluoroguanosine
  modified_base 73: mod_base = OTHER; note = Guanosine phosphorothiorate
  modified_base 74: mod_base = OTHER; note = 2'-fluorocytosine phosphorothiorate
  modified_base 76: mod_base = OTHER; note = 2'-Omethyladenosine

SEQ ID NO: 5730 - RNA, 85 nt, synthetic construct; identical to SEQ ID NO: 3297
  source 1..85: mol_type = other RNA
  modified_base 1: mod_base = OTHER; note = 2'-Omethylguanosine phosphorothiorate
  modified_base 2: mod_base = OTHER; note = 2'-Omethylcytosine phosphorothiorate
  modified_base 84: mod_base = OTHER; note = 2'-Omethylcytosine phosphorothiorate
  modified_base 85: mod_base = OTHER; note = 2'-Omethyladenosine

SEQ ID NO: 5731 - RNA, 86 nt, synthetic construct; identical to SEQ ID NO: 3290
  source 1..86: mol_type = other RNA
  modified_base 13: mod_base = OTHER; note = Guanosine phosphorothiorate

SEQ ID NO: 5732 - RNA, 76 nt, synthetic construct; identical to SEQ ID NO: 625
  source 1..76: mol_type = other RNA
  modified_base 1: mod_base = OTHER; note = 2'-O-(2-Methoxyethyl) guanosine
  modified_base 2: mod_base = OTHER; note = 2'-O-(2-Methoxyethyl) guanosine
  modified_base 3: mod_base = OTHER; note = 2'-O-(2-Methoxyethyl) cytosine
  modified_base 4: mod_base = OTHER; note = 2'-O-(2-Methoxyethyl) thymine
  modified_base 5: mod_base = OTHER; note = 2'-O-(2-Methoxyethyl) cytosine
  modified_base 6: mod_base = OTHER; note = 2'-O-(2-Methoxyethyl) cytosine
  modified_base 7: mod_base = OTHER; note = 2'-O-(2-Methoxyethyl) guanosine

SEQ ID NO: 5733 - RNA, 85 nt, synthetic construct; identical to SEQ ID NO: 3297
  source 1..85: mol_type = other RNA
  modified_base 1: mod_base = OTHER; note = 2'-Omethylguanosine
  modified_base 2: mod_base = OTHER; note = 2'-Omethylcytosine
  modified_base 3: mod_base = OTHER; note = 2'-Omethyluridine
  modified_base 4: mod_base = OTHER; note = 2'-Omethylguanosine
  modified_base 5: mod_base = OTHER; note = 2'-Omethyluridine
  modified_base 6: mod_base = OTHER; note = 2'-Omethylguanosine
  modified_base 10: mod_base = OTHER; note = 2'-Omethylguanosine
  modified_base 11: mod_base = OTHER; note = 2'-Omethylcytosine
  modified_base 12: mod_base = OTHER; note = 2'-Omethylcytosine
  modified_base 13: mod_base = OTHER; note = 2'-Omethylguanosine
  modified_base 14: mod_base = OTHER; note = 2'-Omethyladenosine
  modified_base 15: mod_base = OTHER; note = 2'-fluoroguanosine
  modified_base 16: mod_base = OTHER; note = 2'-Omethyluridine
  modified_base 17: mod_base = OTHER; note = 2'-Omethylguanosine
  modified_base 18: mod_base = OTHER; note = 2'-Omethylguanosine
  modified_base 19: mod_base = OTHER; note = 2'-fluorouridine
  modified_base 20: mod_base = OTHER; note = 2'-Omethyluridine
  modified_base 25: mod_base = OTHER; note = 2'-Omethylcytosine
  modified_base 33: mod_base = OTHER; note = 2'-fluorouridine
  modified_base 35: mod_base = OTHER; note = Cytosine phosphorothiorate
  modified_base 37: mod_base = OTHER; note = Adenosine phosphorothiorate
  modified_base 38: mod_base = OTHER; note = Adenosine phosphorothiorate
  modified_base 41: mod_base = OTHER; note = 2'-Omethylcytosine
  modified_base 42: mod_base = OTHER; note = 2'-Omethyladenosine
  modified_base 43: mod_base = OTHER; note = 2'-Omethyladenosine
  modified_base 44: mod_base = OTHER; note = 2'-Omethyluridine
  modified_base 58: mod_base = OTHER; note = 2'-Omethylguanosine
  modified_base 59: mod_base = OTHER; note = 2'-Omethylcytosine
  modified_base 61: mod_base = OTHER; note = 2'-Omethylguanosine
  modified_base 63: mod_base = OTHER; note = 2'-Omethyluridine
  modified_base 64: mod_base = OTHER; note = Uridine phosphorothiorate
  modified_base 65: mod_base = OTHER; note = 2'-Omethylcytosine
  modified_base 66: mod_base = OTHER; note = 2'-fluoroguanosine
  modified_base 68: mod_base = OTHER; note = 2'-Omethyladenosine
  modified_base 70: mod_base = OTHER; note = 2'-Omethylcytosine
  modified_base 74: mod_base = OTHER; note = 2'-Omethylcytosine
  modified_base 82: mod_base = OTHER; note = 2'-Omethylguanosine

SEQ ID NO: 5734 - RNA, 75 nt, synthetic construct; identical to SEQ ID NO: 3306
  source 1..75: mol_type = other RNA
  modified_base 1: mod_base = OTHER; note = 2'-Omethylguanosine phosphorothiorate
  modified_base 74: mod_base = OTHER; note = 2'-Omethylcytosine phosphorothiorate

SEQ ID NO: 5735 - RNA, 75 nt, synthetic construct; identical to SEQ ID NO: 3306
  source 1..75: mol_type = other RNA
  modified_base 1: mod_base = OTHER; note = 2'-Omethylguanosine
  modified_base 13: mod_base = OTHER; note = 2'-Omethylcytosine
  modified_base 17: mod_base = OTHER; note = 2'-Omethylguanosine
  modified_base 18: mod_base = OTHER; note = 2'-Omethylguanosine
  modified_base 24: mod_base = OTHER; note = 2'-Omethylcytosine
  modified_base 32: mod_base = OTHER; note = Uridine phosphorothiorate
  modified_base 33: mod_base = OTHER; note = 2'-Omethylcytosine
  modified_base 34: mod_base = OTHER; note = Uridine phosphorothiorate
  modified_base 36: mod_base = OTHER; note = Guanosine phosphorothiorate
  modified_base 37: mod_base = OTHER; note = Adenosine phosphorothiorate
  modified_base 40: mod_base = OTHER; note = 2'-Omethyladenosine
  modified_base 41: mod_base = OTHER; note = 2'-Omethylguanosine
  modified_base 42: mod_base = OTHER; note = 2'-Omethyladenosine
  modified_base 43: mod_base = OTHER; note = 2'-Omethyladenosine
  modified_base 48: mod_base = OTHER; note = 2'-Omethylguanosine
  modified_base 49: mod_base = OTHER; note = 2'-Omethylcytosine
  modified_base 51: mod_base = OTHER; note = 2'-Omethyluridine
  modified_base 53: mod_base = OTHER; note = Uridine phosphorothiorate
  modified_base 54: mod_base = OTHER; note = Uridine phosphorothiorate
  modified_base 55: mod_base = OTHER; note = 2'-Omethylcytosine
  modified_base 56: mod_base = OTHER; note = Adenosine phosphorothiorate
  modified_base 57: mod_base = OTHER; note = Adenosine phosphorothiorate
  modified_base 58: mod_base = OTHER; note = 2'-Omethyladenosine
  modified_base 60: mod_base = OTHER; note = 2'-Omethylcytosine
  modified_base 64: mod_base = OTHER; note = 2'-Omethyluridine
  modified_base 72: mod_base = OTHER; note = 2'-Omethyladenosine

SEQ ID NO: 5736 - RNA, 76 nt, synthetic construct; identical to SEQ ID NO: 3295
  source 1..76: mol_type = other RNA
  modified_base 1: mod_base = OTHER; note = 2'-Omethylcytosine phosphorothiorate
  modified_base 2: mod_base = OTHER; note = 2'-fluorocytosine phosphorothiorate
  modified_base 5: mod_base = OTHER; note = 2'-fluorocytosine phosphorothiorate
  modified_base 6: mod_base = OTHER; note = 2'-Omethylguanosine phosphorothiorate
  modified_base 10: mod_base = OTHER; note = 2'-fluoroguanosine
  modified_base 13: mod_base = OTHER; note = 2'-fluorocytosine phosphorothiorate
  modified_base 14: mod_base = OTHER; note = 2'-fluoroadenosine phosphorothiorate
  modified_base 21: mod_base = OTHER; note = 2'-Omethyladenosine
  modified_base 25: mod_base = OTHER; note = 2'-fluorocytosine phosphorothiorate
  modified_base 27: mod_base = OTHER; note = 2'-fluoroguanosine
  modified_base 29: mod_base = OTHER; note = 2'-fluoroguanosine
  modified_base 31: mod_base = OTHER; note = Adenosine phosphorothiorate
  modified_base 39: mod_base = OTHER; note = 2'-fluorouridine
  modified_base 47: mod_base = OTHER; note = 2'-Omethyluridine
  modified_base 53: mod_base = OTHER; note = Guanosine phosphorothiorate
  modified_base 59: mod_base = OTHER; note = Adenosine phosphorothiorate
  modified_base 74: mod_base = OTHER; note = 2'-fluorocytosine
  modified_base 75: mod_base = OTHER; note = 2'-fluorocytosine

SEQ ID NO: 5737 - RNA, 76 nt, synthetic construct; identical to SEQ ID NO: 625
  source 1..76: mol_type = other RNA
  modified_base 2: mod_base = OTHER; note = Guanosine phosphorothiorate
  modified_base 5: mod_base = OTHER; note = Cytosine phosphorothiorate
  modified_base 6: mod_base = OTHER; note = 2'-Omethylcytosine
  modified_base 8: mod_base = OTHER; note = Uridine phosphorothiorate
  modified_base 11: mod_base = OTHER; note = 2'-Omethylcytosine
  modified_base 12: mod_base = OTHER; note = 2'-Omethylguanosine
  modified_base 15: mod_base = OTHER; note = 2'-fluoroadenosine
  modified_base 20: mod_base = OTHER; note = 2'-fluorouridine phosphorothiorate
  modified_base 22: mod_base = OTHER; note = Guanosine phosphorothiorate
  modified_base 23: mod_base = OTHER; note = 2'-Omethylcytosine
  modified_base 25: mod_base = OTHER; note = 2'-Omethylcytosine phosphorothiorate
  modified_base 26: mod_base = OTHER; note = 2'-fluoroadenosine
  modified_base 29: mod_base = OTHER; note = 2'-Omethylguanosine
  modified_base 31: mod_base = OTHER; note = 2'-Omethyladenosine
  modified_base 32: mod_base = OTHER; note = 2'-fluorocytosine
  modified_base 34: mod_base = OTHER; note = 2'-fluorouridine
  modified_base 39: mod_base = OTHER; note = 2'-Omethyluridine
  modified_base 40: mod_base = OTHER; note = 2'-Omethyluridine
  modified_base 45: mod_base = OTHER; note = 2'-Omethylguanosine
  modified_base 50: mod_base = OTHER; note = 2'-fluorocytosine
  modified_base 52: mod_base = OTHER; note = 2'-Omethylguanosine
  modified_base 57: mod_base = OTHER; note = 2'-Omethylguanosine phosphorothiorate
  modified_base 58: mod_base = OTHER; note = 2'-fluoroadenosine
  modified_base 60: mod_base = OTHER; note = 2'-Omethyluridine
  modified_base 61: mod_base = OTHER; note = 2'-Omethylcytosine
  modified_base 62: mod_base = OTHER; note = 2'-fluorocytosine
  modified_base 63: mod_base = OTHER; note = 2'-Omethylcytosine
  modified_base 64: mod_base = OTHER; note = Guanosine phosphorothiorate
  modified_base 65: mod_base = OTHER; note = Guanosine phosphorothiorate
  modified_base 66: mod_base = OTHER; note = 2'-fluorocytosine
  modified_base 68: mod_base = OTHER; note = 2'-Omethylguanosine
  modified_base 69: mod_base = OTHER; note = Adenosine phosphorothiorate
  modified_base 70: mod_base = OTHER; note = 2'-Omethylguanosine
  modified_base 72: mod_base = OTHER; note = 2'-Omethylcytosine
  modified_base 73: mod_base = OTHER; note = 2'-fluoroguanosine

SEQ ID NO: 5738 - RNA, 76 nt, synthetic construct; identical to SEQ ID NO: 3289
  source 1..76: mol_type = other RNA
  modified_base 1: mod_base = OTHER; note = 2'-Omethylguanosine
  modified_base 2: mod_base = OTHER; note = 2'-Omethylcytosine
  modified_base 3: mod_base = OTHER; note = 2'-Omethylcytosine
  modified_base 4: mod_base = OTHER; note = 2'-Omethyluridine
  modified_base 5: mod_base = OTHER; note = 2'-Omethylguanosine
  modified_base 6: mod_base = OTHER; note = 2'-Omethylguanosine
  modified_base 10: mod_base = OTHER; note = 2'-Omethylguanosine
  modified_base 11: mod_base = OTHER; note = 2'-Omethylcytosine
  modified_base 12: mod_base = OTHER; note = 2'-Omethyluridine
  modified_base 13: mod_base = OTHER; note = 2'-Omethylcytosine
  modified_base 22: mod_base = OTHER; note = 2'-Omethylguanosine
  modified_base 23: mod_base = OTHER; note = 2'-Omethyladenosine
  modified_base 24: mod_base = OTHER; note = 2'-Omethylguanosine
  modified_base 25: mod_base = OTHER; note = 2'-Omethylcytosine
  modified_base 49: mod_base = OTHER; note = 2'-Omethylcytosine
  modified_base 50: mod_base = OTHER; note = 2'-Omethyladenosine
  modified_base 51: mod_base = OTHER; note = 2'-Omethylguanosine
  modified_base 52: mod_base = OTHER; note = 2'-Omethylguanosine
  modified_base 53: mod_base = OTHER; note = 2'-Omethylguanosine
  modified_base 73: mod_base = OTHER; note = 2'-Omethylguanosine

SEQ ID NO: 5739 - RNA, 76 nt, synthetic construct; identical to SEQ ID NO: 3289
  source 1..76: mol_type = other RNA
  modified_base 1: mod_base = OTHER; note = 2'-Omethylguanosine
  modified_base 10: mod_base = OTHER; note = 2'-Omethylguanosine
  modified_base 11: mod_base = OTHER; note = 2'-Omethylcytosine
  modified_base 12: mod_base = OTHER; note = 2'-Omethyluridine
  modified_base 13: mod_base = OTHER; note = 2'-Omethylcytosine
  modified_base 14: mod_base = OTHER; note = 2'-Omethyladenosine
  modified_base 15: mod_base = OTHER; note = 2'-Omethylguanosine
  modified_base 16: mod_base = OTHER; note = 2'-Omethyluridine
  modified_base 18: mod_base = OTHER; note = 2'-Omethylguanosine
  modified_base 19: mod_base = OTHER; note = 2'-Omethylguanosine
  modified_base 20: mod_base = OTHER; note = Uridine phosphorothiorate
  modified_base 21: mod_base = OTHER; note = Adenosine phosphorothiorate
  modified_base 25: mod_base = OTHER; note = 2'-Omethylcytosine
  modified_base 33: mod_base = OTHER; note = Uridine phosphorothiorate
  modified_base 34: mod_base = OTHER; note = 2'-Omethyluridine
  modified_base 35: mod_base = OTHER; note = Uridine phosphorothiorate
  modified_base 37: mod_base = OTHER; note = Adenosine phosphorothiorate
  modified_base 38: mod_base = OTHER; note = Adenosine phosphorothiorate
  modified_base 49: mod_base = OTHER; note = 2'-Omethylcytosine
  modified_base 50: mod_base = OTHER; note = 2'-Omethyladenosine
  modified_base 52: mod_base = OTHER; note = 2'-Omethylguanosine
  modified_base 54: mod_base = OTHER; note = Uridine phosphorothiorate
  modified_base 55: mod_base = OTHER; note = Uridine phosphorothiorate
  modified_base 61: mod_base = OTHER; note = 2'-Omethylcytosine
  modified_base 65: mod_base = OTHER; note = 2'-Omethylguanosine
  modified_base 73: mod_base = OTHER; note = 2'-Omethylguanosine

SEQ ID NO: 5740 - RNA, 75 nt, synthetic construct; identical to SEQ ID NO: 1045
  source 1..75: mol_type = other RNA
  modified_base 1: mod_base = OTHER; note = 2'-Omethylguanosine phosphorothiorate
  modified_base 2: mod_base = OTHER; note = 2'-Omethylguanosine phosphorothiorate
  modified_base 3: mod_base = OTHER; note = 2'-Omethyluridine phosphorothiorate
  modified_base 4: mod_base = OTHER; note = 2'-Omethyluridine
  modified_base 7: mod_base = OTHER; note = Adenosine phosphorothiorate
  modified_base 20: mod_base = OTHER; note = 2'-Omethyladenosine
  modified_base 31: mod_base = OTHER; note = 2'-Omethyladenosine phosphorothiorate
  modified_base 32: mod_base = OTHER; note = 2'-Omethylcytosine
  modified_base 52: mod_base = OTHER; note = 2'-Omethylguanosine phosphorothiorate
  modified_base 56: mod_base = OTHER; note = 2'-Omethylguanosine
  modified_base 58: mod_base = OTHER; note = 2'-Omethylguanosine
  modified_base 59: mod_base = OTHER; note = 2'-fluorouridine phosphorothiorate
  modified_base 65: mod_base = OTHER; note = Uridine phosphorothiorate
  modified_base 66: mod_base = OTHER; note = 2'-Omethylguanosine
  modified_base 72: mod_base = OTHER; note = 2'-Omethyluridine
  modified_base 74: mod_base = OTHER; note = 2'-Omethylcytosine phosphorothiorate
  modified_base 75: mod_base = OTHER; note = 2'-Omethyladenosine

SEQ ID NO: 5741 - DNA, 76 bp, synthetic construct; identical to SEQ ID NO: 1924
  source 1..76: mol_type = other DNA
  modified_base 1: mod_base = OTHER; note = 2'-Omethylguanosine phosphorothiorate
  modified_base 2: mod_base = OTHER; note = 2'-Omethylguanosine phosphorothiorate
  modified_base 3: mod_base = OTHER; note = deoxycytosine phosphorothiorate
  modified_base 8: mod_base = OTHER; note = Uridine phosphorothiorate
  modified_base 14: mod_base = OTHER; note = Adenosine phosphorothiorate
  modified_base 16: mod_base = OTHER; note = Uridine phosphorothiorate
  modified_base 17: mod_base = OTHER; note = Guanosine phosphorothiorate
  modified_base 24: mod_base = OTHER; note = Guanosine phosphorothiorate
  modified_base 25: mod_base = OTHER; note = 2'-fluorocytosine
  modified_base 26: mod_base = OTHER; note = 2'-Omethyladenosine
  modified_base 28: mod_base = OTHER; note = 2'-fluorouridine
  modified_base 31: mod_base = OTHER; note = Adenosine phosphorothiorate
  modified_base 35: mod_base = OTHER; note = Cytosine phosphorothiorate
  modified_base 36: mod_base = OTHER; note = Adenosine phosphorothiorate
  modified_base 37: mod_base = OTHER; note = deoxyadenosine phosphorothiorate
  modified_base 38: mod_base = OTHER; note = Adenosine phosphorothiorate
  modified_base 39: mod_base = OTHER; note = 2'-O-(2-Methoxyethyl) thymine
  modified_base 44: mod_base = OTHER; note = 2'-O-(2-Methoxyethyl) adenosine
  modified_base 45: mod_base = OTHER; note = Guanosine phosphorothiorate
  modified_base 48: mod_base = OTHER; note = Uridine phosphorothiorate
  modified_base 49: mod_base = OTHER; note = deoxycytosine phosphorothiorate
  modified_base 50: mod_base = OTHER; note = 2'-fluorocytosine
  modified_base 55: mod_base = OTHER; note = Uridine phosphorothiorate
  modified_base 58: mod_base = OTHER; note = Adenosine phosphorothiorate
  modified_base 60: mod_base = OTHER; note = 2'-O-(2-Methoxyethyl) thymine
  modified_base 64: mod_base = OTHER; note = Guanosine phosphorothiorate
  modified_base 65: mod_base = OTHER; note = 2'-Omethylguanosine
  modified_base 66: mod_base = OTHER; note = 2'-O-(2-Methoxyethyl) 5-methylcytosine
  modified_base 70: mod_base = OTHER; note = Guanosine phosphorothiorate
  modified_base 71: mod_base = OTHER; note = 2'-Omethyluridine
  modified_base 73: mod_base = OTHER; note = Guanosine phosphorothiorate
  modified_base 74: mod_base = OTHER; note = 2'-O-(2-Methoxyethyl) 5-methylcytosine
  modified_base 75: mod_base = OTHER; note = Cytosine phosphorothiorate
  modified_base 76: mod_base = OTHER; note = 2'-fluoroadenosine
  misc_feature 1..2: note = RNA
  misc_feature 3..4: note = DNA
  misc_feature 5..36: note = RNA
  misc_feature 37: note = DNA
  misc_feature 38..45: note = RNA
  misc_feature 46: note = DNA
  misc_feature 47..48: note = RNA
  misc_feature 49: note = DNA
  misc_feature 50..62: note = RNA
  misc_feature 63: note = DNA
  misc_feature 64..76: note = RNA

SEQ ID NO: 5742 - RNA, 76 nt, synthetic construct
  source 1..76: mol_type = other RNA
ggctcgctgacgcaatggatagcgtattggacttcaaattcaaaggttccgggttcgagtcccgggcgagtcgcca

SEQ ID NO: 5743 - RNA, 76 nt, synthetic construct; identical to SEQ ID NO: 625
  source 1..76: mol_type = other RNA
  modified_base 3: mod_base = OTHER; note = 2'-fluorocytosine
  modified_base 4: mod_base = OTHER; note = 2'-Omethyluridine
  modified_base 12: mod_base = OTHER; note = 2'-Omethylguanosine
  modified_base 13: mod_base = OTHER; note = 2'-fluorocytosine phosphorothiorate
  modified_base 14: mod_base = OTHER; note = 2'-Omethyladenosine
  modified_base 15: mod_base = OTHER; note = 2'-fluoroadenosine
  modified_base 16: mod_base = OTHER; note = Uridine phosphorothiorate
  modified_base 18: mod_base = OTHER; note = 2'-fluoroguanosine
  modified_base 19: mod_base = OTHER; note = Adenosine phosphorothiorate
  modified_base 20: mod_base = OTHER; note = 2'-fluorouridine
  modified_base 21: mod_base = OTHER; note = Adenosine phosphorothiorate
  modified_base 24: mod_base = OTHER; note = 2'-Omethylguanosine
  modified_base 25: mod_base = OTHER; note = 2'-fluorocytosine
  modified_base 29: mod_base = OTHER; note = 2'-fluoroguanosine
  modified_base 30: mod_base = OTHER; note = 2'-Omethylguanosine
  modified_base 33: mod_base = OTHER; note = 2'-fluorouridine phosphorothiorate
  modified_base 40: mod_base = OTHER; note = 2'-Omethyluridine
  modified_base 44: mod_base = OTHER; note = 2'-Omethyladenosine
  modified_base 45: mod_base = OTHER; note = 2'-fluoroguanosine
  modified_base 50: mod_base = OTHER; note = 2'-Omethylcytosine
  modified_base 53: mod_base = OTHER; note = 2'-fluoroguanosine
  modified_base 54: mod_base = OTHER; note = 2'-Omethyluridine
  modified_base 56: mod_base = OTHER; note = 2'-Omethylcytosine
  modified_base 58: mod_base = OTHER; note = Adenosine phosphorothiorate
  modified_base 60: mod_base = OTHER; note = 2'-fluorouridine
  modified_base 61: mod_base = OTHER; note = 2'-fluorocytosine phosphorothiorate
  modified_base 64: mod_base = OTHER; note = Guanosine phosphorothiorate
  modified_base 65: mod_base = OTHER; note = 2'-fluoroguanosine
  modified_base 69: mod_base = OTHER; note = 2'-fluoroadenosine
  modified_base 70: mod_base = OTHER; note = Guanosine phosphorothiorate
  modified_base 73: mod_base = OTHER; note = Guanosine phosphorothiorate
  modified_base 75: mod_base = OTHER; note = Cytosine phosphorothiorate
  modified_base 76: mod_base = OTHER; note = 2'-Omethyladenosine

SEQ ID NO: 5744 - RNA, 76 nt, synthetic construct; identical to SEQ ID NO: 625
  source 1..76: mol_type = other RNA
  modified_base 1: mod_base = OTHER; note = 2'-Omethylguanosine phosphorothiorate
  modified_base 2: mod_base = OTHER; note = 2'-Omethylguanosine
  modified_base 3: mod_base = OTHER; note = 2'-Omethylcytosine
  modified_base 4: mod_base = OTHER; note = 2'-Omethyluridine
  modified_base 5: mod_base = OTHER; note = 2'-Omethylcytosine
  modified_base 6: mod_base = OTHER; note = 2'-Omethylcytosine
  modified_base 10: mod_base = OTHER; note = 2'-Omethylguanosine
  modified_base 11: mod_base = OTHER; note = 2'-Omethylcytosine
  modified_base 12: mod_base = OTHER; note = 2'-Omethylguanosine
  modified_base 13: mod_base = OTHER; note = 2'-Omethylcytosine
  modified_base 14: mod_base = OTHER; note = 2'-Omethyladenosine
  modified_base 15: mod_base = OTHER; note = 2'-fluoroadenosine
  modified_base 16: mod_base = OTHER; note = 2'-Omethyluridine
  modified_base 17: mod_base = OTHER; note = 2'-Omethylguanosine
  modified_base 18: mod_base = OTHER; note = 2'-Omethylguanosine
  modified_base 19: mod_base = OTHER; note = 2'-fluoroadenosine
  modified_base 20: mod_base = OTHER; note = 2'-Omethyluridine
  modified_base 21: mod_base = OTHER; note = 2'-fluoroadenosine
  modified_base 22: mod_base = OTHER; note = 2'-Omethylguanosine
  modified_base 23: mod_base = OTHER; note = 2'-Omethylcytosine
  modified_base 24: mod_base = OTHER; note = 2'-Omethylguanosine
  modified_base 25: mod_base = OTHER; note = 2'-Omethylcytosine
  modified_base 38: mod_base = OTHER; note = Adenosine phosphorothiorate
  modified_base 39: mod_base = OTHER; note = Uridine phosphorothiorate
  modified_base 40: mod_base = OTHER; note = 2'-fluorouridine
  modified_base 43: mod_base = OTHER; note = 2'-Omethyladenosine
  modified_base 44: mod_base = OTHER; note = 2'-Omethyladenosine
  modified_base 45: mod_base = OTHER; note = 2'-Omethylguanosine
  modified_base 46: mod_base = OTHER; note = 2'-fluoroguanosine
  modified_base 48: mod_base = OTHER; note = 2'-fluorouridine
  modified_base 49: mod_base = OTHER; note = 2'-Omethylcytosine
  modified_base 50: mod_base = OTHER; note = 2'-Omethylcytosine
  modified_base 54: mod_base = OTHER; note = 2'-Omethyluridine phosphorothiorate
  modified_base 55: mod_base = OTHER; note = Uridine phosphorothiorate
  modified_base 56: mod_base = OTHER; note = 2'-Omethylcytosine
  modified_base 57: mod_base = OTHER; note = 2'-fluoroguanosine
  modified_base 61: mod_base = OTHER; note = 2'-Omethylcytosine
  modified_base 62: mod_base = OTHER; note = 2'-Omethylcytosine
  modified_base 63: mod_base = OTHER; note = 2'-fluorocytosine
  modified_base 64: mod_base = OTHER; note = 2'-Omethylguanosine
  modified_base 65: mod_base = OTHER; note = 2'-Omethylguanosine
  modified_base 66: mod_base = OTHER; note = 2'-Omethylcytosine
  modified_base 67: mod_base = OTHER; note = 2'-Omethylguanosine
  modified_base 68: mod_base = OTHER; note = 2'-Omethylguanosine
  modified_base 69: mod_base = OTHER; note = 2'-fluoroadenosine

SEQ ID NO: 5745 - RNA, 76 nt, synthetic construct; identical to SEQ ID NO: 625
  source 1..76: mol_type = other RNA
  modified_base 1: mod_base = OTHER; note = 2'-Omethylguanosine phosphorothiorate
  modified_base 2: mod_base = OTHER; note = 2'-Omethylguanosine phosphorothiorate
  modified_base 3: mod_base = OTHER; note = 2'-Omethylcytosine
  modified_base 4: mod_base = OTHER; note = 2'-Omethyluridine
  modified_base 5: mod_base = OTHER; note = 2'-Omethylcytosine
  modified_base 6: mod_base = OTHER; note = 2'-Omethylcytosine
  modified_base 10: mod_base = OTHER; note = 2'-Omethylguanosine
  modified_base 11: mod_base = OTHER; note = 2'-Omethylcytosine
  modified_base 12: mod_base = OTHER; note = 2'-Omethylguanosine
  modified_base 13: mod_base = OTHER; note = 2'-Omethylcytosine
  modified_base 14: mod_base = OTHER; note = 2'-Omethyladenosine
  modified_base 15: mod_base = OTHER; note = 2'-fluoroadenosine
  modified_base 16: mod_base = OTHER; note = 2'-Omethyluridine
  modified_base 17: mod_base = OTHER; note = 2'-Omethylguanosine
  modified_base 18: mod_base = OTHER; note = 2'-Omethylguanosine
  modified_base 19: mod_base = OTHER; note = 2'-fluoroadenosine
  modified_base 20: mod_base = OTHER; note = 2'-Omethyluridine
  modified_base 22: mod_base = OTHER; note = 2'-Omethylguanosine
  modified_base 23: mod_base = OTHER; note = 2'-Omethylcytosine
  modified_base 24: mod_base = OTHER; note = 2'-Omethylguanosine
  modified_base 25: mod_base = OTHER; note = 2'-Omethylcytosine
  modified_base 38: mod_base = OTHER; note = Adenosine phosphorothiorate
  modified_base 39: mod_base = OTHER; note = Uridine phosphorothiorate
  modified_base 40: mod_base = OTHER; note = 2'-fluorouridine
  modified_base 43: mod_base = OTHER; note = 2'-Omethyladenosine
  modified_base 44: mod_base = OTHER; note = 2'-Omethyladenosine
  modified_base 45: mod_base = OTHER; note = 2'-Omethylguanosine
  modified_base 46: mod_base = OTHER; note = 2'-fluoroguanosine
  modified_base 48: mod_base = OTHER; note = 2'-fluorouridine
  modified_base 49: mod_base = OTHER; note = 2'-Omethylcytosine
  modified_base 50: mod_base = OTHER; note = 2'-Omethylcytosine
  modified_base 51: mod_base = OTHER; note = 2'-Omethylguanosine
  modified_base 52: mod_base = OTHER; note = 2'-Omethylguanosine
  modified_base 53: mod_base = OTHER; note = 2'-Omethylguanosine
  modified_base 54: mod_base = OTHER; note = 2'-Omethyluridine
  modified_base 61: mod_base = OTHER; note = 2'-Omethylcytosine
  modified_base 62: mod_base = OTHER; note = 2'-Omethylcytosine
  modified_base 63: mod_base = OTHER; note = 2'-fluorocytosine
  modified_base 64: mod_base = OTHER; note = 2'-Omethylguanosine
  modified_base 65: mod_base = OTHER; note = 2'-Omethylguanosine
  modified_base 66: mod_base = OTHER; note = 2'-Omethylcytosine
  modified_base 67: mod_base = OTHER; note = 2'-Omethylguanosine
  modified_base 68: mod_base = OTHER; note = 2'-Omethylguanosine

SEQ ID NO: 5746 - RNA, 76 nt, synthetic construct; identical to SEQ ID NO: 3295
  source 1..76: mol_type = other RNA
  modified_base 1: mod_base = OTHER; note = 2'-Omethylcytosine phosphorothiorate
  modified_base 2: mod_base = OTHER; note = 2'-Omethylcytosine
  modified_base 3: mod_base = OTHER; note = 2'-fluorouridine
  modified_base 4: mod_base = OTHER; note = 2'-Omethyluridine phosphorothiorate
  modified_base 5: mod_base = OTHER; note = 2'-Omethylcytosine phosphorothiorate
  modified_base 9: mod_base = OTHER; note = 2'-Omethyladenosine
  modified_base 17: mod_base = OTHER; note = 2'-Omethyluridine
  modified_base 27: mod_base = OTHER; note = 2'-fluoroguanosine phosphorothiorate
  modified_base 28: mod_base = OTHER; note = Adenosine phosphorothiorate
  modified_base 36: mod_base = OTHER; note = 2'-Omethyladenosine phosphorothiorate
  modified_base 38: mod_base = OTHER; note = 2'-Omethyladenosine
  modified_base 45: mod_base = OTHER; note = 2'-fluoroguanosine phosphorothiorate
  modified_base 52: mod_base = OTHER; note = 2'-Omethylguanosine
  modified_base 53: mod_base = OTHER; note = 2'-Omethylguanosine
  modified_base 68: mod_base = OTHER; note = 2'-fluoroguanosine
  modified_base 74: mod_base = OTHER; note = 2'-Omethylcytosine phosphorothiorate
  modified_base 75: mod_base = OTHER; note = Cytosine phosphorothiorate
  modified_base 76: mod_base = OTHER; note = 2'-Omethyladenosine

SEQ ID NO: 5747 - RNA, 75 nt, synthetic construct; identical to SEQ ID NO: 1045
  source 1..75: mol_type = other RNA
  modified_base 1: mod_base = OTHER; note = 2'-Omethylguanosine phosphorothiorate
  modified_base 2: mod_base = OTHER; note = 2'-Omethylguanosine phosphorothiorate
  modified_base 5: mod_base = OTHER; note = 2'-Omethylcytosine
  modified_base 12: mod_base = OTHER; note = Guanosine phosphorothiorate
  modified_base 15: mod_base = OTHER; note = 2'-Omethyladenosine
  modified_base 28: mod_base = OTHER; note = 2'-Omethyluridine
  modified_base 49: mod_base = OTHER; note = 2'-fluorocytosine phosphorothiorate
  modified_base 50: mod_base = OTHER; note = 2'-Omethylguanosine phosphorothiorate
  modified_base 58: mod_base = OTHER; note = 2'-Omethylguanosine
  modified_base 59: mod_base = OTHER; note = 2'-fluorouridine phosphorothiorate
  modified_base 66: mod_base = OTHER; note = 2'-Omethylguanosine phosphorothiorate
  modified_base 67: mod_base = OTHER; note = 2'-Omethylguanosine
  modified_base 72: mod_base = OTHER; note = 2'-Omethyluridine
  modified_base 74: mod_base = OTHER; note = 2'-Omethylcytosine phosphorothiorate

SEQ ID NO: 5748 - RNA, 76 nt, synthetic construct; identical to SEQ ID NO: 625
  source 1..76: mol_type = other RNA
  modified_base 27: mod_base = OTHER; note = Thymine
  modified_base 28: mod_base = OTHER; note = Thymine
  modified_base 39: mod_base = OTHER; note = Thymine
  modified_base 40: mod_base = OTHER; note = Thymine

SEQ ID NO: 5749 - RNA, 76 nt, synthetic construct; identical to SEQ ID NO: 625
  source 1..76: mol_type = other RNA
  modified_base 1: mod_base = OTHER; note = 2'-fluoroguanosine
  modified_base 2: mod_base = OTHER; note = Guanosine phosphorothiorate
  modified_base 5: mod_base = OTHER; note = 2'-Omethylcytosine phosphorothiorate
  modified_base 6: mod_base = OTHER; note = 2'-fluorocytosine
  modified_base 11: mod_base = OTHER; note = Cytosine phosphorothiorate
  modified_base 14: mod_base = OTHER; note = 2'-fluoroadenosine
  modified_base 21: mod_base = OTHER; note = Adenosine phosphorothiorate
  modified_base 22: mod_base = OTHER; note = 2'-fluoroguanosine
  modified_base 25: mod_base = OTHER; note = 2'-fluorocytosine
  modified_base 28: mod_base = OTHER; note = 2'-Omethyluridine
  modified_base 29: mod_base = OTHER; note = 2'-fluoroguanosine
  modified_base 31: mod_base = OTHER; note = 2'-Omethyladenosine
  modified_base 33: mod_base = OTHER; note = 2'-fluorouridine
  modified_base 39: mod_base = OTHER; note = 2'-fluorouridine
  modified_base 40: mod_base = OTHER; note = 2'-Omethyluridine
  modified_base 42: mod_base = OTHER; note = 2'-Omethyladenosine
  modified_base 43: mod_base = OTHER; note = Adenosine phosphorothiorate
  modified_base 44: mod_base = OTHER; note = 2'-fluoroadenosine phosphorothiorate
  modified_base 45: mod_base = OTHER; note = 2'-fluoroguanosine
  modified_base 48: mod_base = OTHER; note = 2'-Omethyluridine phosphorothiorate
  modified_base 49: mod_base = OTHER; note = Cytosine phosphorothiorate
  modified_base 55: mod_base = OTHER; note = Uridine phosphorothiorate
  modified_base 56: mod_base = OTHER; note = 2'-fluorocytosine phosphorothiorate
  modified_base 59: mod_base = OTHER; note = 2'-Omethylguanosine
  modified_base 60: mod_base = OTHER; note = 2'-fluorouridine
  modified_base 68: mod_base = OTHER; note = 2'-fluoroguanosine
  modified_base 69: mod_base = OTHER; note = 2'-Omethyladenosine
  modified_base 72: mod_base = OTHER; note = 2'-fluorocytosine
  modified_base 73: mod_base = OTHER; note = Guanosine phosphorothiorate
  modified_base 76: mod_base = OTHER; note = 2'-fluoroadenosine

SEQ ID NO: 5750 - RNA, 76 nt, synthetic construct; identical to SEQ ID NO: 3325
  source 1..76: mol_type = other RNA
  modified_base 1: mod_base = OTHER; note = 2'-Omethyluridine
  modified_base 14: mod_base = OTHER; note = 2'-Omethyladenosine
  modified_base 15: mod_base = OTHER; note = 2'-fluoroadenosine
  modified_base 16: mod_base = OTHER; note = 2'-Omethyluridine
  modified_base 17: mod_base = OTHER; note = 2'-Omethylguanosine
  modified_base 18: mod_base = OTHER; note = 2'-Omethylguanosine
  modified_base 19: mod_base = OTHER; note = 2'-fluoroadenosine
  modified_base 20: mod_base = OTHER; note = 2'-Omethyluridine
  modified_base 54: mod_base = OTHER; note = 2'-Omethyluridine phosphorothiorate
  modified_base 55: mod_base = OTHER; note = Uridine phosphorothiorate
  modified_base 56: mod_base = OTHER; note = 2'-Omethylcytosine
  modified_base 57: mod_base = OTHER; note = 2'-Omethylguanosine
  modified_base 59: mod_base = OTHER; note = 2'-Omethylguanosine
  modified_base 73: mod_base = OTHER; note = 2'-Omethylguanosine

SEQ ID NO: 5751 - RNA, 86 nt, synthetic construct; identical to SEQ ID NO: 3290
  source 1..86: mol_type = other RNA
  modified_base 1: mod_base = OTHER; note = 2'-Omethyladenosine
  modified_base 14: mod_base = OTHER; note = 2'-Omethyladenosine phosphorothiorate
  modified_base 15: mod_base = OTHER; note = 2'-Omethylguanosine phosphorothiorate
  modified_base 16: mod_base = OTHER; note = 2'-Omethyluridine phosphorothiorate
  modified_base 17: mod_base = OTHER; note = 2'-Omethylguanosine phosphorothiorate
  modified_base 18: mod_base = OTHER; note = 2'-Omethylguanosine phosphorothiorate
  modified_base 19: mod_base = OTHER; note = Uridine phosphorothiorate
  modified_base 20: mod_base = OTHER; note = 2'-Omethyluridine phosphorothiorate
  modified_base 21: mod_base = OTHER; note = Adenosine phosphorothiorate
  modified_base 60: mod_base = OTHER; note = 2'-Omethyluridine
  modified_base 62: mod_base = OTHER; note = 2'-Omethylguanosine
  modified_base 83: mod_base = OTHER; note = 2'-Omethyladenosine

SEQ ID NO: 5752 - RNA, 76 nt, synthetic construct; identical to SEQ ID NO: 625
  source 1..76: mol_type = other RNA
  modified_base 1: mod_base = OTHER; note = 2'-Omethylguanosine
  modified_base 2: mod_base = OTHER; note = 2'-Omethylguanosine phosphorothiorate
  modified_base 10: mod_base = OTHER; note = 2'-Omethylguanosine
  modified_base 13: mod_base = OTHER; note = 2'-Omethylcytosine
  modified_base 17: mod_base = OTHER; note = Guanosine phosphorothiorate
  modified_base 18: mod_base = OTHER; note = 2'-Omethylguanosine
  modified_base 19: mod_base = OTHER; note = Adenosine phosphorothiorate
  modified_base 20: mod_base = OTHER; note = 2'-Omethyluridine
  modified_base 25: mod_base = OTHER; note = 2'-Omethylcytosine
  modified_base 29: mod_base = OTHER; note = 2'-Omethylguanosine
  modified_base 33: mod_base = OTHER; note = 2'-fluorouridine
  modified_base 35: mod_base = OTHER; note = Cytosine phosphorothiorate
  modified_base 37: mod_base = OTHER; note = Adenosine phosphorothiorate
  modified_base 38: mod_base = OTHER; note = Adenosine phosphorothiorate
  modified_base 41: mod_base = OTHER; note = 2'-Omethylcytosine
  modified_base 43: mod_base = OTHER; note = 2'-Omethyladenosine
  modified_base 44: mod_base = OTHER; note = 2'-fluoroadenosine
  modified_base 46: mod_base = OTHER; note = Guanosine phosphorothiorate
  modified_base 50: mod_base = OTHER; note = 2'-Omethylcytosine
  modified_base 52: mod_base = OTHER; note = 2'-Omethylguanosine
  modified_base 54: mod_base = OTHER; note = Uridine phosphorothiorate
  modified_base 55: mod_base = OTHER; note = Uridine phosphorothiorate
  modified_base 56: mod_base = OTHER; note = 2'-Omethylcytosine
  modified_base 57: mod_base = OTHER; note = Guanosine phosphorothiorate
  modified_base 62: mod_base = OTHER; note = 2'-Omethylcytosine
  modified_base 63: mod_base = OTHER; note = 2'-fluorocytosine
  modified_base 65: mod_base = OTHER; note = 2'-Omethylguanosine
  modified_base 71: mod_base = OTHER; note = 2'-Omethyluridine
  modified_base 73: mod_base = OTHER; note = 2'-Omethylguanosine

SEQ ID NO: 5753 - RNA, 85 nt, synthetic construct; identical to SEQ ID NO: 3286
  source 1..85: mol_type = other RNA
  modified_base 1: mod_base = OTHER; note = 2'-fluorocytosine phosphorothiorate
  modified_base 32: mod_base = OTHER; note = 2'-fluorouridine
  modified_base 50: mod_base = OTHER; note = 2'-Omethyladenosine
  modified_base 56: mod_base = OTHER; note = 2'-Omethylguanosine
  modified_base 62: mod_base = OTHER; note = 2'-fluoroguanosine
  modified_base 69: mod_base = OTHER; note = Cytosine phosphorothiorate
  modified_base 84: mod_base = OTHER; note = Cytosine phosphorothiorate

SEQ ID NO: 5754 - RNA, 76 nt, synthetic construct; identical to SEQ ID NO: 625
  source 1..76: mol_type = other RNA
  modified_base 3: mod_base = OTHER; note = 2'-fluorocytosine
  modified_base 4: mod_base = OTHER; note = Uridine phosphorothiorate
  modified_base 5: mod_base = OTHER; note = 2'-Omethylcytosine
  modified_base 6: mod_base = OTHER; note = Cytosine phosphorothiorate
  modified_base 10: mod_base = OTHER; note = Guanosine phosphorothiorate
  modified_base 11: mod_base = OTHER; note = 2'-fluorocytosine
  modified_base 13: mod_base = OTHER; note = 2'-Omethylcytosine phosphorothiorate
  modified_base 14: mod_base = OTHER; note = 2'-Omethyladenosine
  modified_base 15: mod_base = OTHER; note = 2'-Omethyladenosine
  modified_base 16: mod_base = OTHER; note = 2'-fluorouridine
  modified_base 24: mod_base = OTHER; note = 2'-fluoroguanosine
  modified_base 27: mod_base = OTHER; note = Uridine phosphorothiorate
  modified_base 30: mod_base = OTHER; note = Guanosine phosphorothiorate
  modified_base 31: mod_base = OTHER; note = 2'-Omethyladenosine
  modified_base 34: mod_base = OTHER; note = 2'-Omethyluridine
  modified_base 38: mod_base = OTHER; note = 2'-Omethyladenosine
  modified_base 40: mod_base = OTHER; note = Uridine phosphorothiorate
  modified_base 41: mod_base = OTHER; note = 2'-Omethylcytosine
  modified_base 43: mod_base = OTHER; note = 2'-Omethyladenosine
  modified_base 45: mod_base = OTHER; note = 2'-fluoroguanosine phosphorothiorate
  modified_base 50: mod_base = OTHER; note = 2'-Omethylcytosine
  modified_base 52: mod_base = OTHER; note = 2'-Omethylguanosine
  modified_base 53: mod_base = OTHER; note = 2'-fluoroguanosine phosphorothiorate
  modified_base 54: mod_base = OTHER; note = 2'-fluorouridine
  modified_base 60: mod_base = OTHER; note = Uridine phosphorothiorate
  modified_base 61: mod_base = OTHER; note = 2'-Omethylcytosine
  modified_base 62: mod_base = OTHER; note = 2'-fluorocytosine phosphorothiorate
  modified_base 66: mod_base = OTHER; note = Cytosine phosphorothiorate
  modified_base 69: mod_base = OTHER; note = 2'-Omethyladenosine phosphorothiorate
  modified_base 70: mod_base = OTHER; note = 2'-Omethylguanosine
  modified_base 74: mod_base = OTHER; note = 2'-fluorocytosine
  modified_base 75: mod_base = OTHER; note = 2'-fluorocytosine

SEQ ID NO: 5755 - RNA, 76 nt, synthetic construct; identical to SEQ ID NO: 625
  source 1..76: mol_type = other RNA
  modified_base 1: mod_base = OTHER; note = 2'-Omethylguanosine
  modified_base 2: mod_base = OTHER; note = 2'-Omethylguanosine
  modified_base 3: mod_base = OTHER; note = 2'-Omethylcytosine
  modified_base 4: mod_base = OTHER; note = 2'-Omethyluridine
  modified_base 5: mod_base = OTHER; note = 2'-Omethylcytosine
  modified_base 6: mod_base = OTHER; note = 2'-Omethylcytosine
  modified_base 7: mod_base = OTHER; note = 2'-fluoroguanosine phosphorothiorate
  modified_base 10: mod_base = OTHER; note = 2'-Omethylguanosine
  modified_base 11: mod_base = OTHER; note = 2'-Omethylcytosine
  modified_base 12: mod_base = OTHER; note = 2'-Omethylguanosine
  modified_base 13: mod_base = OTHER; note = 2'-Omethylcytosine
  modified_base 14: mod_base = OTHER; note = 2'-Omethyladenosine
  modified_base 15: mod_base = OTHER; note = 2'-fluoroadenosine
  modified_base 16: mod_base = OTHER; note = 2'-Omethyluridine
  modified_base 17: mod_base = OTHER; note = 2'-Omethylguanosine
  modified_base 18: mod_base = OTHER; note = 2'-Omethylguanosine
  modified_base 19: mod_base = OTHER; note = 2'-Omethyladenosine
  modified_base 20: mod_base = OTHER; note = 2'-Omethyluridine
  modified_base 21: mod_base = OTHER; note = 2'-Omethyladenosine phosphorothiorate
  modified_base 22: mod_base = OTHER; note = 2'-Omethylguanosine
  modified_base 23: mod_base = OTHER; note = 2'-Omethylcytosine
  modified_base 24: mod_base = OTHER; note = 2'-Omethylguanosine
  modified_base 25: mod_base = OTHER; note = 2'-fluorocytosine
  modified_base 26: mod_base = OTHER; note = Adenosine phosphorothiorate
  modified_base 27: mod_base = OTHER; note = 2'-Omethyluridine
  modified_base 28: mod_base = OTHER; note = 2'-Omethyluridine
  modified_base 29: mod_base = OTHER; note = 2'-Omethylguanosine
  modified_base 30: mod_base = OTHER; note = 2'-Omethylguanosine
  modified_base 31: mod_base = OTHER; note = 2'-Omethyladenosine
  modified_base 33: mod_base = OTHER; note = 2'-Omethyluridine
  modified_base 34: mod_base = OTHER; note = 2'-Omethyluridine
  modified_base 35: mod_base = OTHER; note = Cytosine phosphorothiorate
  modified_base 36: mod_base = OTHER; note = 2'-Omethyladenosine phosphorothiorate
  modified_base 37: mod_base = OTHER; note = Adenosine phosphorothiorate
  modified_base 38: mod_base = OTHER; note = Adenosine phosphorothiorate
  modified_base 40: mod_base = OTHER; note = 2'-Omethyluridine
  modified_base 41: mod_base = OTHER; note = 2'-Omethylcytosine
  modified_base 42: mod_base = OTHER; note = 2'-Omethyladenosine
  modified_base 43: mod_base = OTHER; note = 2'-Omethyladenosine
  modified_base 44: mod_base = OTHER; note = 2'-fluoroadenosine
  modified_base 45: mod_base = OTHER; note = Guanosine phosphorothiorate
  modified_base 46: mod_base = OTHER; note = 2'-Omethylguanosine
  modified_base 47: mod_base = OTHER; note = 2'-Omethyluridine
  modified_base 49: mod_base = OTHER; note = 2'-Omethylcytosine
  modified_base 50: mod_base = OTHER; note = 2'-Omethylcytosine
  modified_base 51: mod_base = OTHER; note = 2'-Omethylguanosine
  modified_base 52: mod_base = OTHER; note = 2'-Omethylguanosine
  modified_base 53: mod_base = OTHER; note = 2'-Omethylguanosine
  modified_base 54: mod_base = OTHER; note = 2'-Omethyluridine
  modified_base 55: mod_base = OTHER; note = Uridine phosphorothiorate
  modified_base 56: mod_base = OTHER; note = 2'-Omethylcytosine phosphorothiorate
  modified_base 57: mod_base = OTHER; note = 2'-Omethylguanosine
  modified_base 59: mod_base = OTHER; note = 2'-Omethylguanosine
  modified_base 60: mod_base = OTHER; note = 2'-Omethyluridine
  modified_base 61: mod_base = OTHER; note = 2'-Omethylcytosine
  modified_base 62: mod_base = OTHER; note = 2'-Omethylcytosine
  modified_base 63: mod_base = OTHER; note = 2'-fluorocytosine
  modified_base 64: mod_base = OTHER; note = 2'-Omethylguanosine
  modified_base 65: mod_base = OTHER; note = 2'-Omethylguanosine
  modified_base 66: mod_base = OTHER; note = 2'-Omethylcytosine
  modified_base 67: mod_base = OTHER; note = 2'-Omethylguanosine
  modified_base 68: mod_base = OTHER; note = 2'-Omethylguanosine
  modified_base 69: mod_base = OTHER; note = 2'-Omethyladenosine
  modified_base 70: mod_base = OTHER; note = 2'-Omethylguanosine
  modified_base 72: mod_base = OTHER; note = 2'-Omethylcytosine
  modified_base 73: mod_base = OTHER; note = 2'-Omethylguanosine
  modified_base 74: mod_base = OTHER; note = 2'-fluorocytosine phosphorothiorate
  modified_base 75: mod_base = OTHER; note = 2'-fluorocytosine phosphorothiorate

SEQ ID NO: 5756 - RNA, 86 nt, synthetic construct; identical to SEQ ID NO: 3290
  source 1..86: mol_type = other RNA
  modified_base 1: mod_base = OTHER; note = 2'-Omethyladenosine phosphorothiorate
  modified_base 2: mod_base = OTHER; note = 2'-Omethylcytosine phosphorothiorate
  modified_base 3: mod_base = OTHER; note = 2'-Omethylcytosine
  modified_base 4: mod_base = OTHER; note = 2'-Omethyladenosine
  modified_base 5: mod_base = OTHER; note = 2'-Omethylguanosine
  modified_base 6: mod_base = OTHER; note = 2'-Omethylguanosine
  modified_base 10: mod_base = OTHER; note = 2'-Omethylguanosine
  modified_base 11: mod_base = OTHER; note = 2'-Omethylcytosine
  modified_base 12: mod_base = OTHER; note = 2'-Omethylcytosine
  modified_base 13: mod_base = OTHER; note = 2'-Omethylguanosine
  modified_base 16: mod_base = OTHER; note = 2'-Omethyluridine
  modified_base 17: mod_base = OTHER; note = 2'-Omethylguanosine
  modified_base 18: mod_base = OTHER; note = 2'-Omethylguanosine
  modified_base 33: mod_base = OTHER; note = 2'-fluorouridine
  modified_base 35: mod_base = OTHER; note = Cytosine phosphorothiorate
  modified_base 37: mod_base = OTHER; note = Guanosine phosphorothiorate
  modified_base 38: mod_base = OTHER; note = Adenosine phosphorothiorate
  modified_base 44: mod_base = OTHER; note = 2'-Omethyluridine
  modified_base 57: mod_base = OTHER; note = 2'-fluoroguanosine
  modified_base 58: mod_base = OTHER; note = 2'-fluorocytosine
  modified_base 66: mod_base = OTHER; note = 2'-Omethylcytosine
  modified_base 69: mod_base = OTHER; note = 2'-Omethyladenosine
  modified_base 71: mod_base = OTHER; note = 2'-Omethylcytosine
  modified_base 72: mod_base = OTHER; note = 2'-Omethylcytosine
  modified_base 73: mod_base = OTHER; note = 2'-fluorocytosine
  modified_base 74: mod_base = OTHER; note = 2'-Omethyladenosine
  modified_base 75: mod_base = OTHER; note = 2'-Omethylcytosine
  modified_base 76: mod_base = OTHER; note = 2'-Omethyluridine
  modified_base 77: mod_base = OTHER; note = 2'-Omethylcytosine
  modified_base 78: mod_base = OTHER; note = 2'-Omethylcytosine
  modified_base 83: mod_base = OTHER; note = 2'-Omethyladenosine

SEQ ID NO: 5757 - RNA, 85 nt, synthetic construct; identical to SEQ ID NO: 3286
  source 1..85: mol_type = other RNA
  modified_base 1: mod_base = OTHER; note = 2'-Omethylcytosine
  modified_base 11: mod_base = OTHER; note = Cytosine phosphorothiorate
  modified_base 26: mod_base = OTHER; note = 2'-fluorouridine
  modified_base 30: mod_base = OTHER; note = 2'-fluoroadenosine
  modified_base 34: mod_base = OTHER; note = 2'-fluorouridine
  modified_base 43: mod_base = OTHER; note = 2'-Omethyluridine
  modified_base 54: mod_base = OTHER; note = 2'-fluorocytosine
  modified_base 61: mod_base = OTHER; note = 2'-Omethylguanosine
  modified_base 71: mod_base = OTHER; note = 2'-fluorocytosine
  modified_base 73: mod_base = OTHER; note = Adenosine phosphorothiorate
  modified_base 84: mod_base = OTHER; note = Cytosine phosphorothiorate

SEQ ID NO: 5758 - RNA, 75 nt, synthetic construct; identical to SEQ ID NO: 1045
  source 1..75: mol_type = other RNA
  modified_base 1: mod_base = OTHER; note = 2'-Omethylguanosine
  modified_base 2: mod_base = OTHER; note = 2'-Omethylguanosine
  modified_base 3: mod_base = OTHER; note = 2'-Omethyluridine
  modified_base 4: mod_base = OTHER; note = 2'-Omethyluridine
  modified_base 5: mod_base = OTHER; note = 2'-Omethylcytosine
  modified_base 6: mod_base = OTHER; note = 2'-Omethylcytosine
  modified_base 16: mod_base = OTHER; note = 2'-Omethyluridine
  modified_base 17: mod_base = OTHER; note = 2'-Omethylguanosine
  modified_base 18: mod_base = OTHER; note = 2'-Omethylguanosine
  modified_base 20: mod_base = OTHER; note = 2'-Omethyladenosine
  modified_base 22: mod_base = OTHER; note = 2'-Omethylguanosine
  modified_base 23: mod_base = OTHER; note = 2'-Omethylcytosine
  modified_base 24: mod_base = OTHER; note = 2'-Omethyladenosine
  modified_base 25: mod_base = OTHER; note = 2'-Omethylcytosine
  modified_base 33: mod_base = OTHER; note = 2'-fluorouridine
  modified_base 35: mod_base = OTHER; note = Uridine phosphorothiorate
  modified_base 37: mod_base = OTHER; note = Adenosine phosphorothiorate
  modified_base 38: mod_base = OTHER; note = Adenosine phosphorothiorate
  modified_base 41: mod_base = OTHER; note = 2'-Omethylcytosine
  modified_base 42: mod_base = OTHER; note = 2'-Omethyladenosine
  modified_base 43: mod_base = OTHER; note = 2'-Omethylguanosine
  modified_base 44: mod_base = OTHER; note = 2'-Omethylcytosine
  modified_base 45: mod_base = OTHER; note = 2'-Omethylguanosine
  modified_base 46: mod_base = OTHER; note = 2'-fluoroadenosine
  modified_base 47: mod_base = OTHER; note = 2'-fluorouridine
  modified_base 48: mod_base = OTHER; note = 2'-Omethylcytosine
  modified_base 49: mod_base = OTHER; note = 2'-Omethylcytosine
  modified_base 51: mod_base = OTHER; note = 2'-Omethyladenosine
  modified_base 53: mod_base = OTHER; note = 2'-Omethyluridine
  modified_base 54: mod_base = OTHER; note = Uridine phosphorothiorate
  modified_base 55: mod_base = OTHER; note = 2'-Omethylcytosine
  modified_base 56: mod_base = OTHER; note = 2'-fluoroguanosine
  modified_base 58: mod_base = OTHER; note = 2'-Omethylguanosine
  modified_base 60: mod_base = OTHER; note = 2'-Omethylcytosine
  modified_base 64: mod_base = OTHER; note = 2'-Omethylguanosine
  modified_base 72: mod_base = OTHER; note = 2'-Omethyluridine

SEQ ID NO: 5759 - RNA, 74 nt, synthetic construct; identical to SEQ ID NO: 3293
  source 1..74: mol_type = other RNA
  modified_base 4: mod_base = OTHER; note = 2'-fluorouridine
  modified_base 8: mod_base = OTHER; note = Guanosine phosphorothiorate
  modified_base 12: mod_base = OTHER; note = 2'-fluorocytosine
  modified_base 26: mod_base = OTHER; note = 2'-fluorocytosine
  modified_base 39: mod_base = OTHER; note = Adenosine phosphorothiorate
  modified_base 46: mod_base = OTHER; note = 2'-fluorouridine
  modified_base 48: mod_base = OTHER; note = Cytosine phosphorothiorate
  modified_base 73: mod_base = OTHER; note = 2'-Omethylcytosine phosphorothiorate

SEQ ID NO: 5760 - RNA, 75 nt, synthetic construct; identical to SEQ ID NO: 3336
  source 1..75: mol_type = other RNA
  modified_base 11: mod_base = OTHER; note = Uridine phosphorothiorate
  modified_base 16: mod_base = OTHER; note = 2'-fluorocytosine
  modified_base 23: mod_base = OTHER; note = 2'-fluoroguanosine
  modified_base 26: mod_base = OTHER; note = 2'-fluorouridine
  modified_base 34: mod_base = OTHER; note = 2'-fluorouridine
  modified_base 46: mod_base = OTHER; note = 2'-fluorouridine
  modified_base 47: mod_base = OTHER; note = 2'-fluorocytosine
  modified_base 53: mod_base = OTHER; note = 2'-fluorouridine
  modified_base 63: mod_base = OTHER; note = 2'-fluorouridine
  modified_base 73: mod_base = OTHER; note = Cytosine phosphorothiorate
  modified_base 74: mod_base = OTHER; note = 2'-Omethylcytosine

SEQ ID NO: 5761 - RNA, 86 nt, synthetic construct; identical to SEQ ID NO: 3290
  source 1..86: mol_type = other RNA
  modified_base 1: mod_base = OTHER; note = 2'-Omethyladenosine phosphorothiorate
  modified_base 2: mod_base = OTHER; note = 2'-Omethylcytosine phosphorothiorate
  modified_base 3: mod_base = OTHER; note = 2'-Omethylcytosine
  modified_base 4: mod_base = OTHER; note = 2'-Omethyladenosine
  modified_base 5: mod_base = OTHER; note = 2'-Omethylguanosine
  modified_base 6: mod_base = OTHER; note = 2'-Omethylguanosine
  modified_base 16: mod_base = OTHER; note = 2'-Omethyluridine
  modified_base 17: mod_base = OTHER; note = 2'-Omethylguanosine
  modified_base 18: mod_base = OTHER; note = 2'-Omethylguanosine
  modified_base 20: mod_base = OTHER; note = 2'-Omethyluridine
  modified_base 25: mod_base = OTHER; note = 2'-Omethylcytosine
  modified_base 33: mod_base = OTHER; note = 2'-fluorouridine
  modified_base 35: mod_base = OTHER; note = Cytosine phosphorothiorate
  modified_base 37: mod_base = OTHER; note = Guanosine phosphorothiorate
  modified_base 38: mod_base = OTHER; note = Adenosine phosphorothiorate
  modified_base 41: mod_base = OTHER; note = 2'-Omethylcytosine
  modified_base 44: mod_base = OTHER; note = 2'-Omethyluridine
  modified_base 57: mod_base = OTHER; note = 2'-fluoroguanosine
  modified_base 58: mod_base = OTHER; note = 2'-fluorocytosine
  modified_base 59: mod_base = OTHER; note = 2'-Omethylguanosine
  modified_base 60: mod_base = OTHER; note = 2'-Omethyluridine
  modified_base 61: mod_base = OTHER; note = 2'-Omethylguanosine
  modified_base 62: mod_base = OTHER; note = 2'-Omethylguanosine
  modified_base 63: mod_base = OTHER; note = 2'-Omethylguanosine
  modified_base 64: mod_base = OTHER; note = 2'-Omethyluridine
  modified_base 66: mod_base = OTHER; note = 2'-Omethylcytosine
  modified_base 69: mod_base = OTHER; note = 2'-Omethyladenosine
  modified_base 83: mod_base = OTHER; note = 2'-Omethyladenosine

SEQ ID NO: 5762 - RNA, 75 nt, synthetic construct; identical to SEQ ID NO: 3336
  source 1..75: mol_type = other RNA
  modified_base 1: mod_base = OTHER; note = Cytosine phosphorothiorate
  modified_base 3: mod_base = OTHER; note = 2'-fluorouridine
  modified_base 9: mod_base = OTHER; note = 2'-Omethylguanosine phosphorothiorate
  modified_base 15: mod_base = OTHER; note = 2'-Omethyluridine phosphorothiorate
  modified_base 20: mod_base = OTHER; note = 2'-fluoroadenosine
  modified_base 24: mod_base = OTHER; note = 2'-fluorocytosine phosphorothiorate
  modified_base 25: mod_base = OTHER; note = 2'-fluoroadenosine
  modified_base 29: mod_base = OTHER; note = 2'-Omethylguanosine phosphorothiorate
  modified_base 34: mod_base = OTHER; note = 2'-Omethyluridine phosphorothiorate
  modified_base 38: mod_base = OTHER; note = 2'-fluorouridine
  modified_base 41: mod_base = OTHER; note = 2'-fluoroguanosine phosphorothiorate
  modified_base 46: mod_base = OTHER; note = 2'-fluorouridine
  modified_base 47: mod_base = OTHER; note = Cytosine phosphorothiorate
  modified_base 48: mod_base = OTHER; note = 2'-fluorocytosine
  modified_base 56: mod_base = OTHER; note = 2'-fluoroadenosine
  modified_base 57: mod_base = OTHER; note = 2'-fluoroadenosine phosphorothiorate
  modified_base 74: mod_base = OTHER; note = 2'-Omethylcytosine

SEQ ID NO: 5763 - RNA, 85 nt, synthetic construct; identical to SEQ ID NO: 3297
  source 1..85: mol_type = other RNA
  modified_base 1: mod_base = OTHER; note = 2'-Omethylguanosine
  modified_base 17: mod_base = OTHER; note = 2'-Omethylguanosine
  modified_base 18: mod_base = OTHER; note = 2'-Omethylguanosine
  modified_base 33: mod_base = OTHER; note = Uridine phosphorothiorate
  modified_base 34: mod_base = OTHER; note = 2'-Omethyluridine
  modified_base 35: mod_base = OTHER; note = Cytosine phosphorothiorate
  modified_base 37: mod_base = OTHER; note = Adenosine phosphorothiorate
  modified_base 38: mod_base = OTHER; note = Adenosine phosphorothiorate
  modified_base 41: mod_base = OTHER; note = 2'-fluorocytosine
  modified_base 42: mod_base = OTHER; note = 2'-Omethyladenosine
  modified_base 43: mod_base = OTHER; note = 2'-Omethyladenosine
  modified_base 44: mod_base = OTHER; note = 2'-fluorouridine
  modified_base 59: mod_base = OTHER; note = 2'-Omethylcytosine
  modified_base 61: mod_base = OTHER; note = 2'-Omethylguanosine
  modified_base 82: mod_base = OTHER; note = 2'-Omethylguanosine

SEQ ID NO: 5764 - RNA, 74 nt, synthetic construct; identical to SEQ ID NO: 3293
  source 1..74: mol_type = other RNA
  modified_base 1: mod_base = OTHER; note = 2'-fluoroadenosine phosphorothiorate
  modified_base 2: mod_base = OTHER; note = 2'-fluorocytosine
  modified_base 4: mod_base = OTHER; note = Uridine phosphorothiorate
  modified_base 6: mod_base = OTHER; note = Guanosine phosphorothiorate
  modified_base 8: mod_base = OTHER; note = Guanosine phosphorothiorate
  modified_base 9: mod_base = OTHER; note = 2'-fluoroguanosine
  modified_base 12: mod_base = OTHER; note = 2'-Omethylcytosine phosphorothiorate
  modified_base 15: mod_base = OTHER; note = 2'-Omethylcytosine
  modified_base 24: mod_base = OTHER; note = Guanosine phosphorothiorate
  modified_base 27: mod_base = OTHER; note = 2'-fluorouridine
  modified_base 33: mod_base = OTHER; note = Uridine phosphorothiorate
  modified_base 37: mod_base = OTHER; note = 2'-fluorouridine
  modified_base 43: mod_base = OTHER; note = 2'-fluoroguanosine
  modified_base 44: mod_base = OTHER; note = Guanosine phosphorothiorate
  modified_base 47: mod_base = OTHER; note = Guanosine phosphorothiorate
  modified_base 52: mod_base = OTHER; note = 2'-fluorouridine
  modified_base 62: mod_base = OTHER; note = Guanosine phosphorothiorate
  modified_base 73: mod_base = OTHER; note = 2'-Omethylcytosine phosphorothiorate

SEQ ID NO: 5765 - RNA, 75 nt, synthetic construct; identical to SEQ ID NO: 1045
  source 1..75: mol_type = other RNA
  modified_base 1: mod_base = OTHER; note = 2'-Omethylguanosine phosphorothiorate
  modified_base 2: mod_base = OTHER; note = Guanosine phosphorothiorate
  modified_base 10: mod_base = OTHER; note = 2'-fluoroguanosine phosphorothiorate
  modified_base 12: mod_base = OTHER; note = Guanosine phosphorothiorate
  modified_base 13: mod_base = OTHER; note = 2'-fluorouridine
  modified_base 17: mod_base = OTHER; note = 2'-fluoroguanosine phosphorothiorate
  modified_base 36: mod_base = OTHER; note = 2'-Omethyladenosine
  modified_base 39: mod_base = OTHER; note = Uridine phosphorothiorate
  modified_base 48: mod_base = OTHER; note = 2'-fluorocytosine
  modified_base 54: mod_base = OTHER; note = 2'-Omethyluridine
  modified_base 56: mod_base = OTHER; note = 2'-fluoroguanosine
  modified_base 57: mod_base = OTHER; note = 2'-Omethyladenosine
  modified_base 64: mod_base = OTHER; note = 2'-fluoroguanosine
  modified_base 69: mod_base = OTHER; note = 2'-fluoroadenosine phosphorothiorate
  modified_base 73: mod_base = OTHER; note = Cytosine phosphorothiorate
  modified_base 75: mod_base = OTHER; note = 2'-Omethyladenosine

SEQ ID NO: 5766 - RNA, 76 nt, synthetic construct; identical to SEQ ID NO: 625
  source 1..76: mol_type = other RNA
  modified_base 1: mod_base = OTHER; note = 2'-Omethylguanosine
  modified_base 2: mod_base = OTHER; note = 2'-Omethylguanosine
  modified_base 3: mod_base = OTHER; note = 2'-Omethylcytosine
  modified_base 4: mod_base = OTHER; note = 2'-Omethyluridine
  modified_base 5: mod_base = OTHER; note = 2'-Omethylcytosine
  modified_base 6: mod_base = OTHER; note = 2'-Omethylcytosine
  modified_base 13: mod_base = OTHER; note = 2'-Omethylcytosine
  modified_base 14: mod_base = OTHER; note = 2'-Omethyladenosine
  modified_base 15: mod_base = OTHER; note = 2'-fluoroadenosine
  modified_base 16: mod_base = OTHER; note = 2'-Omethyluridine
  modified_base 17: mod_base = OTHER; note = 2'-Omethylguanosine
  modified_base 18: mod_base = OTHER; note = 2'-Omethylguanosine
  modified_base 19: mod_base = OTHER; note = 2'-fluoroadenosine
  modified_base 20: mod_base = OTHER; note = 2'-Omethyluridine
  modified_base 21: mod_base = OTHER; note = 2'-fluoroadenosine
  modified_base 25: mod_base = OTHER; note = 2'-Omethylcytosine
  modified_base 33: mod_base = OTHER; note = 2'-fluorouridine
  modified_base 35: mod_base = OTHER; note = Cytosine phosphorothiorate
  modified_base 37: mod_base = OTHER; note = Adenosine phosphorothiorate
  modified_base 38: mod_base = OTHER; note = Adenosine phosphorothiorate
  modified_base 49: mod_base = OTHER; note = 2'-Omethylcytosine
  modified_base 50: mod_base = OTHER; note = 2'-Omethylcytosine
  modified_base 51: mod_base = OTHER; note = 2'-Omethylguanosine
  modified_base 52: mod_base = OTHER; note = 2'-Omethylguanosine
  modified_base 53: mod_base = OTHER; note = 2'-Omethylguanosine
  modified_base 54: mod_base = OTHER; note = 2'-Omethyluridine phosphorothiorate
  modified_base 55: mod_base = OTHER; note = Uridine phosphorothiorate
  modified_base 56: mod_base = OTHER; note = 2'-Omethylcytosine
  modified_base 57: mod_base = OTHER; note = 2'-fluoroguanosine
  modified_base 59: mod_base = OTHER; note = 2'-Omethylguanosine
  modified_base 61: mod_base = OTHER; note = 2'-Omethylcytosine
  modified_base 62: mod_base = OTHER; note = 2'-Omethylcytosine
  modified_base 63: mod_base = OTHER; note = 2'-fluorocytosine
  modified_base 64: mod_base = OTHER; note = 2'-Omethylguanosine
  modified_base 65: mod_base = OTHER; note = 2'-Omethylguanosine
  modified_base 66: mod_base = OTHER; note = 2'-Omethylcytosine
  modified_base 67: mod_base = OTHER; note = 2'-Omethylguanosine
  modified_base 68: mod_base = OTHER; note = 2'-Omethylguanosine
  modified_base 69: mod_base = OTHER; note = 2'-fluoroadenosine
  modified_base 71: mod_base = OTHER; note = 2'-Omethyluridine
  modified_base 73: mod_base = OTHER; note = 2'-Omethylguanosine
  modified_base 75: mod_base = OTHER; note = 2'-fluorocytosine phosphorothiorate

SEQ ID NO: 5767 - RNA, 76 nt, synthetic construct; identical to SEQ ID NO: 625
  source 1..76: mol_type = other RNA
  modified_base 1: mod_base = OTHER; note = 2'-Omethylguanosine phosphorothiorate
  modified_base 2: mod_base = OTHER; note = 2'-Omethylguanosine
  modified_base 3: mod_base = OTHER; note = 2'-Omethylcytosine
  modified_base 4: mod_base = OTHER; note = 2'-Omethyluridine
  modified_base 5: mod_base = OTHER; note = 2'-Omethylcytosine
  modified_base 6: mod_base = OTHER; note = 2'-Omethylcytosine
  modified_base 9: mod_base = OTHER; note = Guanosine phosphorothiorate
  modified_base 10: mod_base = OTHER; note = 2'-Omethylguanosine
  modified_base 11: mod_base = OTHER; note = 2'-Omethylcytosine
  modified_base 12: mod_base = OTHER; note = 2'-Omethylguanosine
  modified_base 13: mod_base = OTHER; note = 2'-Omethylcytosine
  modified_base 14: mod_base = OTHER; note = 2'-Omethyladenosine
  modified_base 15: mod_base = OTHER; note = 2'-fluoroadenosine
  modified_base 16: mod_base = OTHER; note = 2'-Omethyluridine
  modified_base 17: mod_base = OTHER; note = 2'-Omethylguanosine
  modified_base 18: mod_base = OTHER; note = 2'-Omethylguanosine
  modified_base 19: mod_base = OTHER; note = Adenosine phosphorothiorate
  modified_base 20: mod_base = OTHER; note = 2'-Omethyluridine
  modified_base 21: mod_base = OTHER; note = 2'-fluoroadenosine
  modified_base 22: mod_base = OTHER; note = 2'-Omethylguanosine
  modified_base 23: mod_base = OTHER; note = 2'-Omethylcytosine
  modified_base 24: mod_base = OTHER; note = 2'-Omethylguanosine
  modified_base 25: mod_base = OTHER; note = 2'-Omethylcytosine
  modified_base 29: mod_base = OTHER; note = 2'-Omethylguanosine
  modified_base 33: mod_base = OTHER; note = 2'-fluorouridine
  modified_base 35: mod_base = OTHER; note = Cytosine phosphorothiorate
  modified_base 37: mod_base = OTHER; note = Adenosine phosphorothiorate
  modified_base 38: mod_base = OTHER; note = Adenosine phosphorothiorate
  modified_base 40: mod_base = OTHER; note = 2'-fluorouridine
  modified_base 41: mod_base = OTHER; note = 2'-fluorocytosine phosphorothiorate
  modified_base 42: mod_base = OTHER; note = 2'-Omethyladenosine
  modified_base 43: mod_base = OTHER; note = 2'-Omethyladenosine
  modified_base 44: mod_base = OTHER; note = 2'-fluoroadenosine
  modified_base 46: mod_base = OTHER; note = Guanosine phosphorothiorate
  modified_base 49: mod_base = OTHER; note = 2'-Omethylcytosine
  modified_base 50: mod_base = OTHER; note = 2'-Omethylcytosine
  modified_base 51: mod_base = OTHER; note = 2'-Omethylguanosine
  modified_base 52: mod_base = OTHER; note = 2'-Omethylguanosine
  modified_base 53: mod_base = OTHER; note = 2'-Omethylguanosine
  modified_base 54: mod_base = OTHER; note = Uridine phosphorothiorate
  modified_base 55: mod_base = OTHER; note = Uridine phosphorothiorate
  modified_base 56: mod_base = OTHER; note = 2'-Omethylcytosine
  modified_base 57: mod_base = OTHER; note = 2'-Omethylguanosine
  modified_base 59: mod_base = OTHER; note = 2'-Omethylguanosine
  modified_base 61: mod_base = OTHER; note = 2'-Omethylcytosine
  modified_base 62: mod_base = OTHER; note = 2'-Omethylcytosine
  modified_base 63: mod_base = OTHER; note = 2'-fluorocytosine
  modified_base 64: mod_base = OTHER; note = 2'-Omethylguanosine
  modified_base 65: mod_base = OTHER; note = 2'-Omethylguanosine
  modified_base 66: mod_base = OTHER; note = 2'-Omethylcytosine
  modified_base 67: mod_base = OTHER; note = 2'-Omethylguanosine
  modified_base 68: mod_base = OTHER; note = 2'-Omethylguanosine
  modified_base 69: mod_base = OTHER; note = 2'-Omethyladenosine
  modified_base 70: mod_base = OTHER; note = 2'-fluoroguanosine
  modified_base 71: mod_base = OTHER; note = 2'-Omethyluridine
  modified_base 73: mod_base = OTHER; note = 2'-Omethylguanosine
  modified_base 74: mod_base = OTHER; note = Cytosine phosphorothiorate
  modified_base 75: mod_base = OTHER; note = 2'-fluorocytosine phosphorothiorate

SEQ ID NO: 5768 - RNA, 75 nt, synthetic construct; identical to SEQ ID NO: 1045
  source 1..75: mol_type = other RNA
  modified_base 1: mod_base = OTHER; note = 2'-Omethylguanosine
  modified_base 14: mod_base = OTHER; note = 2'-Omethyladenosine phosphorothiorate
  modified_base 15: mod_base = OTHER; note = 2'-Omethyladenosine phosphorothiorate
  modified_base 16: mod_base = OTHER; note = 2'-Omethyluridine phosphorothiorate
  modified_base 17: mod_base = OTHER; note = 2'-Omethylguanosine phosphorothiorate
  modified_base 18: mod_base = OTHER; note = 2'-Omethylguanosine phosphorothiorate
  modified_base 19: mod_base = OTHER; note = 2'-fluorouridine phosphorothiorate
  modified_base 20: mod_base = OTHER; note = 2'-Omethyladenosine phosphorothiorate
  modified_base 21: mod_base = OTHER; note = 2'-fluoroadenosine phosphorothiorate
  modified_base 49: mod_base = OTHER; note = 2'-Omethylcytosine
  modified_base 51: mod_base = OTHER; note = 2'-Omethyladenosine
  modified_base 72: mod_base = OTHER; note = 2'-Omethyluridine

SEQ ID NO: 5769 - RNA, 76 nt, synthetic construct; identical to SEQ ID NO: 625
  source 1..76: mol_type = other RNA
  modified_base 2: mod_base = OTHER; note = 2'-Omethylguanosine
  modified_base 3: mod_base = OTHER; note = 2'-Omethylcytosine
  modified_base 12: mod_base = OTHER; note = 2'-fluoroguanosine phosphorothiorate
  modified_base 13: mod_base = OTHER; note = 2'-fluorocytosine
  modified_base 14: mod_base = OTHER; note = 2'-Omethyladenosine
  modified_base 15: mod_base = OTHER; note = 2'-fluoroadenosine
  modified_base 18: mod_base = OTHER; note = 2'-fluoroguanosine
  modified_base 20: mod_base = OTHER; note = 2'-Omethyluridine
  modified_base 21: mod_base = OTHER; note = Adenosine phosphorothiorate
  modified_base 22: mod_base = OTHER; note = 2'-Omethylguanosine
  modified_base 23: mod_base = OTHER; note = Cytosine phosphorothiorate
  modified_base 24: mod_base = OTHER; note = 2'-fluoroguanosine
  modified_base 25: mod_base = OTHER; note = 2'-Omethylcytosine phosphorothiorate
  modified_base 26: mod_base = OTHER; note = 2'-Omethyladenosine phosphorothiorate
  modified_base 27: mod_base = OTHER; note = 2'-fluorouridine
  modified_base 28: mod_base = OTHER; note = Uridine phosphorothiorate
  modified_base 29: mod_base = OTHER; note = 2'-Omethylguanosine phosphorothiorate
  modified_base 30: mod_base = OTHER; note = 2'-Omethylguanosine
  modified_base 37: mod_base = OTHER; note = Adenosine phosphorothiorate
  modified_base 38: mod_base = OTHER; note = 2'-fluoroadenosine
  modified_base 40: mod_base = OTHER; note = 2'-fluorouridine
  modified_base 41: mod_base = OTHER; note = 2'-fluorocytosine
  modified_base 42: mod_base = OTHER; note = 2'-Omethyladenosine
  modified_base 44: mod_base = OTHER; note = Adenosine phosphorothiorate
  modified_base 45: mod_base = OTHER; note = 2'-fluoroguanosine
  modified_base 48: mod_base = OTHER; note = 2'-Omethyluridine phosphorothiorate
  modified_base 49: mod_base = OTHER; note = 2'-fluorocytosine
  modified_base 50: mod_base = OTHER; note = 2'-fluorocytosine
  modified_base 54: mod_base = OTHER; note = Uridine phosphorothiorate
  modified_base 56: mod_base = OTHER; note = 2'-fluorocytosine
  modified_base 57: mod_base = OTHER; note = 2'-fluoroguanosine
  modified_base 59: mod_base = OTHER; note = 2'-Omethylguanosine
  modified_base 60: mod_base = OTHER; note = 2'-Omethyluridine
  modified_base 61: mod_base = OTHER; note = 2'-Omethylcytosine
  modified_base 62: mod_base = OTHER; note = 2'-Omethylcytosine
  modified_base 63: mod_base = OTHER; note = 2'-fluorocytosine
  modified_base 65: mod_base = OTHER; note = Guanosine phosphorothiorate
  modified_base 66: mod_base = OTHER; note = 2'-Omethylcytosine
  modified_base 74: mod_base = OTHER; note = 2'-Omethylcytosine
  modified_base 75: mod_base = OTHER; note = 2'-Omethylcytosine
  modified_base 76: mod_base = OTHER; note = 2'-Omethyladenosine

SEQ ID NO: 5770 - RNA, 85 nt, synthetic construct; identical to SEQ ID NO: 3297
  source 1..85: mol_type = other RNA
  modified_base 1: mod_base = OTHER; note = 2'-Omethylguanosine
  modified_base 2: mod_base = OTHER; note = 2'-Omethylcytosine
  modified_base 3: mod_base = OTHER; note = 2'-Omethyluridine
  modified_base 4: mod_base = OTHER; note = 2'-Omethylguanosine
  modified_base 5: mod_base = OTHER; note = 2'-Omethyluridine
  modified_base 6: mod_base = OTHER; note = 2'-Omethylguanosine
  modified_base 74: mod_base = OTHER; note = 2'-Omethylcytosine
  modified_base 75: mod_base = OTHER; note = 2'-Omethyluridine
  modified_base 76: mod_base = OTHER; note = 2'-Omethylcytosine
  modified_base 77: mod_base = OTHER; note = 2'-Omethyladenosine
  modified_base 82: mod_base = OTHER; note = 2'-Omethylguanosine

SEQ ID NO: 5771 - RNA, 75 nt, synthetic construct; identical to SEQ ID NO: 3311
  source 1..75: mol_type = other RNA
  modified_base 1: mod_base = OTHER; note = 2'-Omethylguanosine phosphorothiorate
  modified_base 2: mod_base = OTHER; note = 2'-Omethylguanosine phosphorothiorate
  modified_base 18: mod_base = OTHER; note = 2'-fluoroguanosine
  modified_base 24: mod_base = OTHER; note = 2'-fluoroadenosine
  modified_base 36: mod_base = OTHER; note = 2'-fluoroadenosine
  modified_base 43: mod_base = OTHER; note = 2'-fluoroguanosine
  modified_base 59: mod_base = OTHER; note = 2'-fluorouridine
  modified_base 64: mod_base = OTHER; note = Guanosine phosphorothiorate
  modified_base 65: mod_base = OTHER; note = 2'-fluorouridine
  modified_base 67: mod_base = OTHER; note = Guanosine phosphorothiorate
  modified_base 68: mod_base = OTHER; note = 2'-fluoroadenosine
  modified_base 73: mod_base = OTHER; note = Cytosine phosphorothiorate
  modified_base 74: mod_base = OTHER; note = 2'-fluorocytosine phosphorothiorate

SEQ ID NO: 5772 - RNA, 85 nt, synthetic construct; identical to SEQ ID NO: 3297
  source 1..85: mol_type = other RNA
  modified_base 1: mod_base = OTHER; note = 2'-Omethylguanosine
  modified_base 14: mod_base = OTHER; note = 2'-Omethyladenosine
  modified_base 15: mod_base = OTHER; note = 2'-Omethylguanosine
  modified_base 16: mod_base = OTHER; note = 2'-Omethyluridine
  modified_base 17: mod_base = OTHER; note = 2'-Omethylguanosine
  modified_base 18: mod_base = OTHER; note = 2'-Omethylguanosine
  modified_base 19: mod_base = OTHER; note = Uridine phosphorothiorate
  modified_base 20: mod_base = OTHER; note = 2'-Omethyluridine
  modified_base 21: mod_base = OTHER; note = Adenosine phosphorothiorate
  modified_base 33: mod_base = OTHER; note = 2'-fluorouridine
  modified_base 34: mod_base = OTHER; note = 2'-Omethyluridine
  modified_base 35: mod_base = OTHER; note = Cytosine phosphorothiorate
  modified_base 37: mod_base = OTHER; note = Adenosine phosphorothiorate
  modified_base 38: mod_base = OTHER; note = Adenosine phosphorothiorate
  modified_base 59: mod_base = OTHER; note = 2'-Omethylcytosine
  modified_base 61: mod_base = OTHER; note = 2'-Omethylguanosine
  modified_base 82: mod_base = OTHER; note = 2'-Omethylguanosine

SEQ ID NO: 5773 - RNA, 76 nt, synthetic construct; identical to SEQ ID NO: 625
  source 1..76: mol_type = other RNA
  modified_base 48: mod_base = OTHER; note = 2'-fluorouridine
  modified_base 49: mod_base = OTHER; note = 2'-Omethylcytosine
  modified_base 50: mod_base = OTHER; note = 2'-Omethylcytosine

SEQ ID NO: 5774 - RNA, 76 nt, synthetic construct; identical to SEQ ID NO: 3329
  source 1..76: mol_type = other RNA
  modified_base 1: mod_base = OTHER; note = 2'-Omethylguanosine phosphorothiorate
  modified_base 2: mod_base = OTHER; note = 2'-Omethylguanosine phosphorothiorate
  modified_base 3: mod_base = OTHER; note = 2'-Omethylcytosine
  modified_base 4: mod_base = OTHER; note = 2'-Omethylcytosine
  modified_base 5: mod_base = OTHER; note = 2'-Omethylcytosine
  modified_base 6: mod_base = OTHER; note = 2'-Omethylcytosine
  modified_base 16: mod_base = OTHER; note = 2'-Omethyluridine
  modified_base 17: mod_base = OTHER; note = 2'-Omethylguanosine
  modified_base 18: mod_base = OTHER; note = 2'-Omethylguanosine
  modified_base 20: mod_base = OTHER; note = 2'-Omethyluridine
  modified_base 25: mod_base = OTHER; note = 2'-Omethylcytosine
  modified_base 33: mod_base = OTHER; note = 2'-fluorouridine
  modified_base 35: mod_base = OTHER; note = Cytosine phosphorothiorate
  modified_base 37: mod_base = OTHER; note = Adenosine phosphorothiorate
  modified_base 38: mod_base = OTHER; note = Adenosine phosphorothiorate
  modified_base 41: mod_base = OTHER; note = 2'-Omethylcytosine
  modified_base 44: mod_base = OTHER; note = 2'-Omethyladenosine
  modified_base 45: mod_base = OTHER; note = 2'-Omethylguanosine
  modified_base 46: mod_base = OTHER; note = 2'-fluoroguanosine
  modified_base 47: mod_base = OTHER; note = 2'-fluorouridine
  modified_base 48: mod_base = OTHER; note = 2'-fluorouridine
  modified_base 49: mod_base = OTHER; note = 2'-Omethylcytosine
  modified_base 50: mod_base = OTHER; note = 2'-Omethylcytosine
  modified_base 51: mod_base = OTHER; note = 2'-Omethylguanosine
  modified_base 52: mod_base = OTHER; note = 2'-Omethylguanosine
  modified_base 53: mod_base = OTHER; note = 2'-Omethylguanosine
  modified_base 54: mod_base = OTHER; note = 2'-Omethyluridine
  modified_base 56: mod_base = OTHER; note = 2'-Omethylcytosine
  modified_base 59: mod_base = OTHER; note = 2'-Omethylguanosine
  modified_base 73: mod_base = OTHER; note = 2'-Omethylguanosine

SEQ ID NO: 5775 - RNA, 85 nt, synthetic construct; identical to SEQ ID NO: 3286
  source 1..85: mol_type = other RNA
  modified_base 1: mod_base = OTHER; note = 2'-Omethylcytosine
  modified_base 4: mod_base = OTHER; note = 2'-fluoroguanosine
  modified_base 14: mod_base = OTHER; note = Guanosine phosphorothiorate
  modified_base 15: mod_base = OTHER; note = 2'-fluorouridine phosphorothiorate
  modified_base 25: mod_base = OTHER; note = 2'-fluoroguanosine
  modified_base 26: mod_base = OTHER; note = 2'-Omethyluridine phosphorothiorate
  modified_base 30: mod_base = OTHER; note = 2'-fluoroadenosine
  modified_base 34: mod_base = OTHER; note = 2'-fluorouridine
  modified_base 39: mod_base = OTHER; note = Cytosine phosphorothiorate
  modified_base 45: mod_base = OTHER; note = Guanosine phosphorothiorate
  modified_base 48: mod_base = OTHER; note = 2'-Omethyladenosine
  modified_base 53: mod_base = OTHER; note = 2'-Omethyluridine
  modified_base 55: mod_base = OTHER; note = Cytosine phosphorothiorate
  modified_base 56: mod_base = OTHER; note = 2'-Omethylguanosine
  modified_base 57: mod_base = OTHER; note = 2'-Omethylcytosine
  modified_base 61: mod_base = OTHER; note = Guanosine phosphorothiorate
  modified_base 75: mod_base = OTHER; note = 2'-fluorouridine
  modified_base 80: mod_base = OTHER; note = 2'-fluoroguanosine phosphorothiorate
  modified_base 84: mod_base = OTHER; note = 2'-Omethylcytosine

SEQ ID NO: 5776 - RNA, 74 nt, synthetic construct; identical to SEQ ID NO: 3293
  source 1..74: mol_type = other RNA
  modified_base 1: mod_base = OTHER; note = Adenosine phosphorothiorate
  modified_base 2: mod_base = OTHER; note = Cytosine phosphorothiorate
  modified_base 3: mod_base = OTHER; note = Cytosine phosphorothiorate
  modified_base 4: mod_base = OTHER; note = Uridine phosphorothiorate
  modified_base 6: mod_base = OTHER; note = Guanosine phosphorothiorate
  modified_base 7: mod_base = OTHER; note = Uridine phosphorothiorate
  modified_base 9: mod_base = OTHER; note = 2'-Omethylguanosine phosphorothiorate
  modified_base 14: mod_base = OTHER; note = 2'-fluoroadenosine
  modified_base 24: mod_base = OTHER; note = 2'-fluoroguanosine
  modified_base 27: mod_base = OTHER; note = 2'-Omethyluridine
  modified_base 34: mod_base = OTHER; note = 2'-fluoroadenosine
  modified_base 38: mod_base = OTHER; note = Cytosine phosphorothiorate
  modified_base 42: mod_base = OTHER; note = Adenosine phosphorothiorate
  modified_base 43: mod_base = OTHER; note = 2'-fluoroguanosine
  modified_base 46: mod_base = OTHER; note = Uridine phosphorothiorate
  modified_base 48: mod_base = OTHER; note = 2'-fluorocytosine
  modified_base 51: mod_base = OTHER; note = Guanosine phosphorothiorate
  modified_base 73: mod_base = OTHER; note = Cytosine phosphorothiorate
  modified_base 74: mod_base = OTHER; note = 2'-Omethyladenosine

SEQ ID NO: 5777 - RNA, 75 nt, synthetic construct; identical to SEQ ID NO: 1045
  source 1..75: mol_type = other RNA
  modified_base 1: mod_base = OTHER; note = 2'-Omethylguanosine
  modified_base 4: mod_base = OTHER; note = 2'-Omethyluridine
  modified_base 6: mod_base = OTHER; note = 2'-Omethylcytosine
  modified_base 10: mod_base = OTHER; note = 2'-Omethylguanosine
  modified_base 11: mod_base = OTHER; note = 2'-Omethyluridine
  modified_base 12: mod_base = OTHER; note = 2'-Omethylguanosine
  modified_base 13: mod_base = OTHER; note = 2'-Omethyluridine
  modified_base 17: mod_base = OTHER; note = 2'-Omethylguanosine
  modified_base 18: mod_base = OTHER; note = 2'-Omethylguanosine
  modified_base 20: mod_base = OTHER; note = 2'-Omethyladenosine
  modified_base 22: mod_base = OTHER; note = 2'-Omethylguanosine
  modified_base 25: mod_base = OTHER; note = 2'-Omethylcytosine
  modified_base 29: mod_base = OTHER; note = 2'-Omethylguanosine
  modified_base 30: mod_base = OTHER; note = 2'-Omethylguanosine
  modified_base 41: mod_base = OTHER; note = 2'-Omethylcytosine
  modified_base 42: mod_base = OTHER; note = 2'-Omethyladenosine
  modified_base 43: mod_base = OTHER; note = 2'-Omethylguanosine
  modified_base 45: mod_base = OTHER; note = 2'-Omethylguanosine
  modified_base 48: mod_base = OTHER; note = 2'-Omethylcytosine
  modified_base 49: mod_base = OTHER; note = 2'-Omethylcytosine
  modified_base 51: mod_base = OTHER; note = 2'-Omethyladenosine
  modified_base 55: mod_base = OTHER; note = 2'-Omethylcytosine
  modified_base 58: mod_base = OTHER; note = 2'-Omethylguanosine
  modified_base 60: mod_base = OTHER; note = 2'-Omethylcytosine
  modified_base 61: mod_base = OTHER; note = 2'-Omethyluridine
  modified_base 64: mod_base = OTHER; note = 2'-Omethylguanosine
  modified_base 65: mod_base = OTHER; note = 2'-Omethyluridine
  modified_base 66: mod_base = OTHER; note = 2'-Omethylguanosine
  modified_base 67: mod_base = OTHER; note = 2'-Omethylguanosine
  modified_base 68: mod_base = OTHER; note = 2'-Omethyladenosine
  modified_base 70: mod_base = OTHER; note = 2'-Omethylcytosine
  modified_base 71: mod_base = OTHER; note = 2'-Omethylcytosine
  modified_base 72: mod_base = OTHER; note = 2'-Omethyluridine
  modified_base 75: mod_base = OTHER; note = 2'-Omethyladenosine

SEQ ID NO: 5778 - RNA, 74 nt, synthetic construct; identical to SEQ ID NO: 3293
  source 1..74: mol_type = other RNA
  modified_base 1: mod_base = OTHER; note = Adenosine phosphorothiorate
  modified_base 2: mod_base = OTHER; note = Cytosine phosphorothiorate
  modified_base 3: mod_base = OTHER; note = Cytosine phosphorothiorate
  modified_base 4: mod_base = OTHER; note = 2'-fluorouridine phosphorothiorate
  modified_base 6: mod_base = OTHER; note = Guanosine phosphorothiorate
  modified_base 8: mod_base = OTHER; note = Guanosine phosphorothiorate
  modified_base 9: mod_base = OTHER; note = 2'-fluoroguanosine
  modified_base 11: mod_base = OTHER; note = 2'-fluoroguanosine
  modified_base 24: mod_base = OTHER; note = 2'-fluoroguanosine
  modified_base 27: mod_base = OTHER; note = 2'-Omethyluridine
  modified_base 35: mod_base = OTHER; note = 2'-fluoroguanosine
  modified_base 42: mod_base = OTHER; note = Adenosine phosphorothiorate
  modified_base 47: mod_base = OTHER; note = Guanosine phosphorothiorate
  modified_base 48: mod_base = OTHER; note = 2'-fluorocytosine
  modified_base 51: mod_base = OTHER; note = 2'-fluoroguanosine
  modified_base 62: mod_base = OTHER; note = Guanosine phosphorothiorate
  modified_base 70: mod_base = OTHER; note = Cytosine phosphorothiorate
  modified_base 73: mod_base = OTHER; note = 2'-Omethylcytosine phosphorothiorate
  modified_base 74: mod_base = OTHER; note = 2'-Omethyladenosine

SEQ ID NO: 5779 - RNA, 73 nt, synthetic construct; identical to SEQ ID NO: 935
  source 1..73: mol_type = other RNA
  modified_base 1: mod_base = OTHER; note = 2'-Omethylguanosine phosphorothiorate
  modified_base 2: mod_base = OTHER; note = 2'-Omethylguanosine phosphorothiorate
  modified_base 13: mod_base = OTHER; note = 2'-fluorocytosine
  modified_base 14: mod_base = OTHER; note = 2'-fluoroadenosine
  modified_base 54: mod_base = OTHER; note = 2'-fluorouridine
  modified_base 59: mod_base = OTHER; note = 2'-Omethylguanosine
  modified_base 71: mod_base = OTHER; note = Uridine phosphorothiorate
  modified_base 72: mod_base = OTHER; note = 2'-Omethylcytosine

SEQ ID NO: 5780 - RNA, 76 nt, synthetic construct; identical to SEQ ID NO: 3295
  source 1..76: mol_type = other RNA
  modified_base 1: mod_base = OTHER; note = 2'-Omethylcytosine phosphorothiorate
  modified_base 3: mod_base = OTHER; note = 2'-fluorouridine
  modified_base 21: mod_base = OTHER; note = 2'-fluoroadenosine phosphorothiorate
  modified_base 43: mod_base = OTHER; note = 2'-fluorouridine phosphorothiorate
  modified_base 48: mod_base = OTHER; note = Cytosine phosphorothiorate
  modified_base 52: mod_base = OTHER; note = 2'-Omethylguanosine
  modified_base 60: mod_base = OTHER; note = 2'-fluorouridine
  modified_base 75: mod_base = OTHER; note = 2'-fluorocytosine

SEQ ID NO: 5781 - RNA, 75 nt, synthetic construct; identical to SEQ ID NO: 3311
  source 1..75: mol_type = other RNA
  modified_base 1: mod_base = OTHER; note = Guanosine phosphorothiorate
  modified_base 2: mod_base = OTHER; note = 2'-Omethylguanosine phosphorothiorate
  modified_base 20: mod_base = OTHER; note = Adenosine phosphorothiorate
  modified_base 21: mod_base = OTHER; note = 2'-fluoroadenosine
  modified_base 28: mod_base = OTHER; note = 2'-fluorouridine
  modified_base 39: mod_base = OTHER; note = 2'-fluorouridine
  modified_base 40: mod_base = OTHER; note = 2'-Omethylcytosine
  modified_base 50: mod_base = OTHER; note = Guanosine phosphorothiorate
  modified_base 51: mod_base = OTHER; note = Adenosine phosphorothiorate
  modified_base 56: mod_base = OTHER; note = 2'-fluoroguanosine
  modified_base 58: mod_base = OTHER; note = 2'-fluoroguanosine
  modified_base 62: mod_base = OTHER; note = 2'-fluorocytosine
  modified_base 63: mod_base = OTHER; note = Guanosine phosphorothiorate
  modified_base 64: mod_base = OTHER; note = Guanosine phosphorothiorate
  modified_base 65: mod_base = OTHER; note = Uridine phosphorothiorate
  modified_base 67: mod_base = OTHER; note = Guanosine phosphorothiorate
  modified_base 73: mod_base = OTHER; note = Cytosine phosphorothiorate
  modified_base 74: mod_base = OTHER; note = 2'-Omethylcytosine

SEQ ID NO: 5782 - RNA, 75 nt, synthetic construct; identical to SEQ ID NO: 1045
  source 1..75: mol_type = other RNA
  modified_base 1: mod_base = OTHER; note = 2'-Omethylguanosine
  modified_base 10: mod_base = OTHER; note = 2'-Omethylguanosine
  modified_base 11: mod_base = OTHER; note = 2'-Omethyluridine
  modified_base 12: mod_base = OTHER; note = 2'-Omethylguanosine
  modified_base 13: mod_base = OTHER; note = 2'-Omethyluridine
  modified_base 14: mod_base = OTHER; note = 2'-Omethyladenosine
  modified_base 15: mod_base = OTHER; note = 2'-Omethyladenosine
  modified_base 16: mod_base = OTHER; note = 2'-Omethyluridine
  modified_base 17: mod_base = OTHER; note = 2'-Omethylguanosine
  modified_base 18: mod_base = OTHER; note = 2'-Omethylguanosine
  modified_base 19: mod_base = OTHER; note = Uridine phosphorothiorate
  modified_base 20: mod_base = OTHER; note = 2'-Omethyladenosine
  modified_base 21: mod_base = OTHER; note = Adenosine phosphorothiorate
  modified_base 22: mod_base = OTHER; note = 2'-Omethylguanosine
  modified_base 23: mod_base = OTHER; note = 2'-Omethylcytosine
  modified_base 24: mod_base = OTHER; note = 2'-Omethyladenosine
  modified_base 25: mod_base = OTHER; note = 2'-Omethylcytosine
  modified_base 33: mod_base = OTHER; note = Uridine phosphorothiorate
  modified_base 34: mod_base = OTHER; note = 2'-Omethyluridine
  modified_base 35: mod_base = OTHER; note = Uridine phosphorothiorate
  modified_base 37: mod_base = OTHER; note = Adenosine phosphorothiorate
  modified_base 38: mod_base = OTHER; note = Adenosine phosphorothiorate
  modified_base 41: mod_base = OTHER; note = 2'-fluorocytosine
  modified_base 42: mod_base = OTHER; note = 2'-Omethyladenosine
  modified_base 43: mod_base = OTHER; note = 2'-Omethylguanosine
  modified_base 44: mod_base = OTHER; note = 2'-fluorocytosine
  modified_base 48: mod_base = OTHER; note = 2'-Omethylcytosine
  modified_base 49: mod_base = OTHER; note = 2'-Omethylcytosine
  modified_base 51: mod_base = OTHER; note = 2'-Omethyladenosine
  modified_base 53: mod_base = OTHER; note = Uridine phosphorothiorate
  modified_base 54: mod_base = OTHER; note = Uridine phosphorothiorate
  modified_base 60: mod_base = OTHER; note = 2'-Omethylcytosine
  modified_base 64: mod_base = OTHER; note = 2'-Omethylguanosine
  modified_base 72: mod_base = OTHER; note = 2'-Omethyluridine

SEQ ID NO: 5783 - RNA, 76 nt, synthetic construct; identical to SEQ ID NO: 625
  source 1..76: mol_type = other RNA
  modified_base 1: mod_base = OTHER; note = 2'-Omethylguanosine phosphorothiorate
  modified_base 2: mod_base = OTHER; note = 2'-Omethylguanosine
  modified_base 3: mod_base = OTHER; note = 2'-Omethylcytosine
  modified_base 4: mod_base = OTHER; note = 2'-Omethyluridine
  modified_base 5: mod_base = OTHER; note = 2'-Omethylcytosine
  modified_base 6: mod_base = OTHER; note = 2'-Omethylcytosine
  modified_base 10: mod_base = OTHER; note = 2'-Omethylguanosine
  modified_base 11: mod_base = OTHER; note = 2'-Omethylcytosine
  modified_base 12: mod_base = OTHER; note = 2'-Omethylguanosine
  modified_base 13: mod_base = OTHER; note = 2'-Omethylcytosine
  modified_base 16: mod_base = OTHER; note = 2'-Omethyluridine
  modified_base 17: mod_base = OTHER; note = 2'-Omethylguanosine
  modified_base 18: mod_base = OTHER; note = 2'-Omethylguanosine
  modified_base 49: mod_base = OTHER; note = 2'-Omethylcytosine
  modified_base 50: mod_base = OTHER; note = 2'-Omethylcytosine
  modified_base 51: mod_base = OTHER; note = 2'-Omethylguanosine
  modified_base 52: mod_base = OTHER; note = 2'-Omethylguanosine
  modified_base 53: mod_base = OTHER; note = 2'-Omethylguanosine
  modified_base 54: mod_base = OTHER; note = 2'-Omethyluridine phosphorothiorate
  modified_base 56: mod_base = OTHER; note = 2'-Omethylcytosine
  modified_base 57: mod_base = OTHER; note = 2'-fluoroguanosine
  modified_base 59: mod_base = OTHER; note = 2'-Omethylguanosine
  modified_base 73: mod_base = OTHER; note = 2'-Omethylguanosine

SEQ ID NO: 5784 - RNA, 85 nt, synthetic construct; identical to SEQ ID NO: 3310
  source 1..85: mol_type = other RNA
  modified_base 1: mod_base = OTHER; note = 2'-fluorocytosine phosphorothiorate
  modified_base 32: mod_base = OTHER; note = 2'-fluorouridine
  modified_base 50: mod_base = OTHER; note = 2'-Omethyladenosine
  modified_base 56: mod_base = OTHER; note = 2'-Omethylguanosine
  modified_base 62: mod_base = OTHER; note = 2'-fluoroguanosine
  modified_base 69: mod_base = OTHER; note = Cytosine phosphorothiorate
  modified_base 84: mod_base = OTHER; note = Cytosine phosphorothiorate

SEQ ID NO: 5785 - RNA, 76 nt, synthetic construct; identical to SEQ ID NO: 625
  source 1..76: mol_type = other RNA
  modified_base 1: mod_base = OTHER; note = 2'-Omethylguanosine
  modified_base 10: mod_base = OTHER; note = 2'-Omethylguanosine
  modified_base 13: mod_base = OTHER; note = 2'-Omethylcytosine
  modified_base 17: mod_base = OTHER; note = Guanosine phosphorothiorate
  modified_base 18: mod_base = OTHER; note = 2'-Omethylguanosine
  modified_base 19: mod_base = OTHER; note = Adenosine phosphorothiorate
  modified_base 20: mod_base = OTHER; note = 2'-Omethyluridine
  modified_base 25: mod_base = OTHER; note = 2'-Omethylcytosine
  modified_base 29: mod_base = OTHER; note = 2'-Omethylguanosine
  modified_base 33: mod_base = OTHER; note = 2'-fluorouridine
  modified_base 35: mod_base = OTHER; note = Cytosine phosphorothiorate
  modified_base 37: mod_base = OTHER; note = Adenosine phosphorothiorate
  modified_base 38: mod_base = OTHER; note = Adenosine phosphorothiorate
  modified_base 41: mod_base = OTHER; note = 2'-fluorocytosine
  modified_base 43: mod_base = OTHER; note = 2'-Omethyladenosine
  modified_base 44: mod_base = OTHER; note = 2'-fluoroadenosine
  modified_base 46: mod_base = OTHER; note = Guanosine phosphorothiorate
  modified_base 50: mod_base = OTHER; note = 2'-Omethylcytosine
  modified_base 52: mod_base = OTHER; note = 2'-Omethylguanosine
  modified_base 54: mod_base = OTHER; note = Uridine phosphorothiorate
  modified_base 55: mod_base = OTHER; note = Uridine phosphorothiorate
  modified_base 56: mod_base = OTHER; note = 2'-Omethylcytosine
  modified_base 57: mod_base = OTHER; note = 2'-Omethylguanosine phosphorothiorate
  modified_base 62: mod_base = OTHER; note = 2'-Omethylcytosine
  modified_base 63: mod_base = OTHER; note = 2'-fluorocytosine
  modified_base 65: mod_base = OTHER; note = 2'-Omethylguanosine
  modified_base 71: mod_base = OTHER; note = 2'-Omethyluridine
  modified_base 73: mod_base = OTHER; note = 2'-Omethylguanosine

SEQ ID NO: 5786 - RNA, 86 nt, synthetic construct
  source 1..86: mol_type = other RNA
accgggatggccgagtggttaaggcgttggacttcagatccaatgggctggtgcccgcgtgggttcgaaccccactctcggtacca

SEQ ID NO: 5787 - RNA, 85 nt, synthetic construct; identical to SEQ ID NO: 3317
  source 1..85: mol_type = other RNA
  modified_base 1: mod_base = OTHER; note = 2'-Omethylguanosine phosphorothiorate
  modified_base 3: mod_base = OTHER; note = Uridine phosphorothiorate
  modified_base 4: mod_base = OTHER; note = 2'-Omethylguanosine phosphorothiorate
  modified_base 11: mod_base = OTHER; note = 2'-Omethylcytosine
  modified_base 18: mod_base = OTHER; note = 2'-Omethylguanosine phosphorothiorate
  modified_base 21: mod_base = OTHER; note = 2'-Omethyladenosine phosphorothiorate
  modified_base 27: mod_base = OTHER; note = Uridine phosphorothiorate
  modified_base 37: mod_base = OTHER; note = 2'-Omethyladenosine phosphorothiorate
  modified_base 44: mod_base = OTHER; note = 2'-Omethyluridine
  modified_base 46: mod_base = OTHER; note = 2'-Omethylguanosine phosphorothiorate
  modified_base 47: mod_base = OTHER; note = 2'-Omethylguanosine
  modified_base 50: mod_base = OTHER; note = Cytosine phosphorothiorate
  modified_base 54: mod_base = OTHER; note = 2'-Omethylcytosine
  modified_base 55: mod_base = OTHER; note = 2'-Omethylcytosine phosphorothiorate
  modified_base 59: mod_base = OTHER; note = 2'-Omethylcytosine
  modified_base 63: mod_base = OTHER; note = 2'-Omethyluridine
  modified_base 82: mod_base = OTHER; note = Guanosine phosphorothiorate
  modified_base 83: mod_base = OTHER; note = Cytosine phosphorothiorate
  modified_base 84: mod_base = OTHER; note = 2'-fluorocytosine

SEQ ID NO: 5788 - RNA, 76 nt, synthetic construct; identical to SEQ ID NO: 625
  source 1..76: mol_type = other RNA
  modified_base 1: mod_base = OTHER; note = 2'-Omethylguanosine phosphorothiorate
  modified_base 2: mod_base = OTHER; note = 2'-Omethylguanosine phosphorothiorate
  modified_base 3: mod_base = OTHER; note = 2'-Omethylcytosine phosphorothiorate
  modified_base 4: mod_base = OTHER; note = 2'-Omethyluridine phosphorothiorate
  modified_base 5: mod_base = OTHER; note = 2'-Omethylcytosine phosphorothiorate
  modified_base 6: mod_base = OTHER; note = 2'-Omethylcytosine phosphorothiorate
  modified_base 10: mod_base = OTHER; note = 2'-Omethylguanosine
  modified_base 11: mod_base = OTHER; note = 2'-Omethylcytosine
  modified_base 12: mod_base = OTHER; note = 2'-Omethylguanosine
  modified_base 13: mod_base = OTHER; note = 2'-Omethylcytosine
  modified_base 14: mod_base = OTHER; note = 2'-Omethyladenosine
  modified_base 15: mod_base = OTHER; note = 2'-Omethyladenosine
  modified_base 16: mod_base = OTHER; note = 2'-Omethyluridine
  modified_base 17: mod_base = OTHER; note = 2'-Omethylguanosine
  modified_base 18: mod_base = OTHER; note = 2'-Omethylguanosine
  modified_base 19: mod_base = OTHER; note = 2'-Omethyladenosine
  modified_base 20: mod_base = OTHER; note = 2'-Omethyluridine
  modified_base 22: mod_base = OTHER; note = 2'-Omethylguanosine
  modified_base 23: mod_base = OTHER; note = 2'-Omethylcytosine
  modified_base 24: mod_base = OTHER; note = 2'-Omethylguanosine
  modified_base 25: mod_base = OTHER; note = 2'-Omethylcytosine
  modified_base 49: mod_base = OTHER; note = 2'-Omethylcytosine
  modified_base 50: mod_base = OTHER; note = 2'-Omethylcytosine
  modified_base 51: mod_base = OTHER; note = 2'-Omethylguanosine
  modified_base 52: mod_base = OTHER; note = 2'-Omethylguanosine
  modified_base 53: mod_base = OTHER; note = 2'-Omethylguanosine

SEQ ID NO: 5789 - RNA, 76 nt, synthetic construct; identical to SEQ ID NO: 625
  source 1..76: mol_type = other RNA
  modified_base 1: mod_base = OTHER; note = 2'-Omethylguanosine
  modified_base 2: mod_base = OTHER; note = Guanosine phosphorothiorate
  modified_base 3: mod_base = OTHER; note = 2'-Omethylcytosine
  modified_base 4: mod_base = OTHER; note = Uridine phosphorothiorate
  modified_base 13: mod_base = OTHER; note = Cytosine phosphorothiorate
  modified_base 14: mod_base = OTHER; note = 2'-fluoroadenosine
  modified_base 16: mod_base = OTHER; note = 2'-fluorouridine phosphorothiorate
  modified_base 18: mod_base = OTHER; note = 2'-Omethylguanosine phosphorothiorate
  modified_base 20: mod_base = OTHER; note = Uridine phosphorothiorate
  modified_base 22: mod_base = OTHER; note = 2'-Omethylguanosine
  modified_base 24: mod_base = OTHER; note = 2'-fluoroguanosine
  modified_base 26: mod_base = OTHER; note = 2'-fluoroadenosine
  modified_base 27: mod_base = OTHER; note = 2'-fluorouridine
  modified_base 28: mod_base = OTHER; note = 2'-fluorouridine
  modified_base 29: mod_base = OTHER; note = 2'-fluoroguanosine
  modified_base 30: mod_base = OTHER; note = 2'-fluoroguanosine
  modified_base 34: mod_base = OTHER; note = 2'-fluorouridine
  modified_base 39: mod_base = OTHER; note = 2'-fluorouridine
  modified_base 40: mod_base = OTHER; note = 2'-fluorouridine
  modified_base 41: mod_base = OTHER; note = Cytosine phosphorothiorate
  modified_base 42: mod_base = OTHER; note = 2'-fluoroadenosine
  modified_base 48: mod_base = OTHER; note = Uridine phosphorothiorate
  modified_base 49: mod_base = OTHER; note = 2'-fluorocytosine
  modified_base 50: mod_base = OTHER; note = Cytosine phosphorothiorate
  modified_base 51: mod_base = OTHER; note = 2'-Omethylguanosine
  modified_base 53: mod_base = OTHER; note = 2'-Omethylguanosine phosphorothiorate
  modified_base 54: mod_base = OTHER; note = 2'-fluorouridine
  modified_base 57: mod_base = OTHER; note = 2'-fluoroguanosine
  modified_base 59: mod_base = OTHER; note = Guanosine phosphorothiorate
  modified_base 60: mod_base = OTHER; note = 2'-Omethyluridine phosphorothiorate
  modified_base 61: mod_base = OTHER; note = 2'-Omethylcytosine
  modified_base 62: mod_base = OTHER; note = 2'-fluorocytosine
  modified_base 64: mod_base = OTHER; note = 2'-Omethylguanosine
  modified_base 70: mod_base = OTHER; note = 2'-fluoroguanosine
  modified_base 72: mod_base = OTHER; note = 2'-Omethylcytosine
  modified_base 73: mod_base = OTHER; note = 2'-fluoroguanosine
  modified_base 74: mod_base = OTHER; note = 2'-fluorocytosine
  modified_base 76: mod_base = OTHER; note = 2'-fluoroadenosine

SEQ ID NO: 5790 - RNA, 76 nt, synthetic construct; identical to SEQ ID NO: 3615
  source 1..76: mol_type = other RNA
  modified_base 1: mod_base = OTHER; note = 2'-Omethylguanosine
  modified_base 2: mod_base = OTHER; note = 2'-Omethylguanosine
  modified_base 3: mod_base = OTHER; note = 2'-Omethylcytosine
  modified_base 4: mod_base = OTHER; note = 2'-Omethyluridine
  modified_base 5: mod_base = OTHER; note = 2'-Omethylcytosine
  modified_base 6: mod_base = OTHER; note = 2'-Omethylcytosine
  modified_base 10: mod_base = OTHER; note = 2'-Omethylguanosine
  modified_base 11: mod_base = OTHER; note = 2'-Omethylcytosine
  modified_base 12: mod_base = OTHER; note = 2'-Omethylguanosine
  modified_base 13: mod_base = OTHER; note = 2'-Omethylcytosine
  modified_base 16: mod_base = OTHER; note = 2'-Omethyluridine
  modified_base 17: mod_base = OTHER; note = 2'-Omethylguanosine
  modified_base 18: mod_base = OTHER; note = 2'-Omethylguanosine
  modified_base 20: mod_base = OTHER; note = 2'-Omethyluridine
  modified_base 25: mod_base = OTHER; note = 2'-Omethylcytosine
  modified_base 33: mod_base = OTHER; note = 2'-fluorouridine
  modified_base 35: mod_base = OTHER; note = Cytosine phosphorothiorate
  modified_base 37: mod_base = OTHER; note = Adenosine phosphorothiorate
  modified_base 38: mod_base = OTHER; note = Adenosine phosphorothiorate
  modified_base 41: mod_base = OTHER; note = 2'-fluorocytosine
  modified_base 42: mod_base = OTHER; note = 2'-Omethyladenosine
  modified_base 43: mod_base = OTHER; note = 2'-Omethyladenosine
  modified_base 44: mod_base = OTHER; note = 2'-fluoroguanosine
  modified_base 49: mod_base = OTHER; note = 2'-Omethylcytosine
  modified_base 50: mod_base = OTHER; note = 2'-Omethylcytosine
  modified_base 52: mod_base = OTHER; note = 2'-Omethylguanosine
  modified_base 54: mod_base = OTHER; note = 2'-Omethyluridine
  modified_base 55: mod_base = OTHER; note = Uridine phosphorothiorate
  modified_base 56: mod_base = OTHER; note = 2'-Omethylcytosine
  modified_base 57: mod_base = OTHER; note = 2'-fluoroguanosine
  modified_base 59: mod_base = OTHER; note = 2'-Omethylguanosine
  modified_base 61: mod_base = OTHER; note = 2'-Omethylcytosine
  modified_base 65: mod_base = OTHER; note = 2'-Omethylguanosine
  modified_base 73: mod_base = OTHER; note = 2'-Omethylguanosine

SEQ ID NO: 5791 - RNA, 75 nt, synthetic construct; identical to SEQ ID NO: 1045
  source 1..75: mol_type = other RNA
  modified_base 1: mod_base = OTHER; note = 2'-Omethylguanosine phosphorothiorate
  modified_base 2: mod_base = OTHER; note = 2'-Omethylguanosine phosphorothiorate
  modified_base 11: mod_base = OTHER; note = 2'-fluorouridine
  modified_base 12: mod_base = OTHER; note = Guanosine phosphorothiorate
  modified_base 13: mod_base = OTHER; note = Uridine phosphorothiorate
  modified_base 19: mod_base = OTHER; note = 2'-fluorouridine
  modified_base 23: mod_base = OTHER; note = 2'-fluorocytosine
  modified_base 26: mod_base = OTHER; note = 2'-fluorouridine
  modified_base 37: mod_base = OTHER; note = 2'-fluoroadenosine
  modified_base 42: mod_base = OTHER; note = 2'-fluoroadenosine
  modified_base 44: mod_base = OTHER; note = 2'-fluorocytosine
  modified_base 55: mod_base = OTHER; note = 2'-fluorocytosine phosphorothiorate
  modified_base 58: mod_base = OTHER; note = Guanosine phosphorothiorate
  modified_base 65: mod_base = OTHER; note = Uridine phosphorothiorate
  modified_base 66: mod_base = OTHER; note = 2'-fluoroguanosine
  modified_base 73: mod_base = OTHER; note = Cytosine phosphorothiorate
  modified_base 74: mod_base = OTHER; note = 2'-Omethylcytosine

SEQ ID NO: 5792 - RNA, 85 nt, synthetic construct; identical to SEQ ID NO: 3297
  source 1..85: mol_type = other RNA
  modified_base 1: mod_base = OTHER; note = 2'-Omethylguanosine phosphorothiorate

SEQ ID NO: 5793 - RNA, 86 nt, synthetic construct; identical to SEQ ID NO: 3290
  source 1..86: mol_type = other RNA
  modified_base 1: mod_base = OTHER; note = 2'-Omethyladenosine
  modified_base 19: mod_base = OTHER; note = 2'-fluorouridine
  modified_base 20: mod_base = OTHER; note = 2'-Omethyluridine
  modified_base 21: mod_base = OTHER; note = 2'-Omethyladenosine
  modified_base 22: mod_base = OTHER; note = 2'-Omethyladenosine
  modified_base 40: mod_base = OTHER; note = 2'-fluorocytosine
  modified_base 41: mod_base = OTHER; note = 2'-Omethylcytosine
  modified_base 42: mod_base = OTHER; note = 2'-Omethyladenosine
  modified_base 43: mod_base = OTHER; note = 2'-Omethyladenosine
  modified_base 83: mod_base = OTHER; note = 2'-Omethyladenosine

SEQ ID NO: 5794 - RNA, 76 nt, synthetic construct; identical to SEQ ID NO: 625
  source 1..76: mol_type = other RNA
  modified_base 1: mod_base = OTHER; note = 2'-Omethylguanosine phosphorothiorate
  modified_base 2: mod_base = OTHER; note = 2'-Omethylguanosine
  modified_base 3: mod_base = OTHER; note = 2'-Omethylcytosine
  modified_base 4: mod_base = OTHER; note = 2'-Omethyluridine
  modified_base 5: mod_base = OTHER; note = 2'-Omethylcytosine
  modified_base 6: mod_base = OTHER; note = 2'-Omethylcytosine
  modified_base 10: mod_base = OTHER; note = 2'-Omethylguanosine
  modified_base 11: mod_base = OTHER; note = 2'-Omethylcytosine
  modified_base 12: mod_base = OTHER; note = 2'-Omethylguanosine
  modified_base 13: mod_base = OTHER; note = 2'-Omethylcytosine
  modified_base 22: mod_base = OTHER; note = 2'-Omethylguanosine
  modified_base 23: mod_base = OTHER; note = 2'-Omethylcytosine
  modified_base 24: mod_base = OTHER; note = 2'-Omethylguanosine
  modified_base 25: mod_base = OTHER; note = 2'-Omethylcytosine
  modified_base 49: mod_base = OTHER; note = 2'-Omethylcytosine
  modified_base 50: mod_base = OTHER; note = 2'-Omethylcytosine
  modified_base 51: mod_base = OTHER; note = 2'-Omethylguanosine
  modified_base 52: mod_base = OTHER; note = 2'-Omethylguanosine
  modified_base 53: mod_base = OTHER; note = 2'-Omethylguanosine
  modified_base 61: mod_base = OTHER; note = 2'-Omethylcytosine
  modified_base 62: mod_base = OTHER; note = 2'-Omethylcytosine
  modified_base 63: mod_base = OTHER; note = 2'-fluorocytosine
  modified_base 64: mod_base = OTHER; note = 2'-Omethylguanosine
  modified_base 65: mod_base = OTHER; note = 2'-Omethylguanosine
  modified_base 66: mod_base = OTHER; note = 2'-Omethylcytosine
  modified_base 67: mod_base = OTHER; note = 2'-Omethylguanosine
  modified_base 68: mod_base = OTHER; note = 2'-Omethylguanosine
  modified_base 69: mod_base = OTHER; note = 2'-fluoroadenosine
  modified_base 71: mod_base = OTHER; note = 2'-Omethyluridine

SEQ ID NO: 5795 - RNA, 76 nt, synthetic construct; identical to SEQ ID NO: 625
  source 1..76: mol_type = other RNA
  modified_base 1: mod_base = OTHER; note = 2'-Omethylguanosine
  modified_base 17: mod_base = OTHER; note = 2'-Omethylguanosine
  modified_base 18: mod_base = OTHER; note = 2'-Omethylguanosine
  modified_base 40: mod_base = OTHER; note = Thymine
  modified_base 50: mod_base = OTHER; note = 2'-Omethylcytosine
  modified_base 52: mod_base = OTHER; note = 2'-Omethylguanosine
  modified_base 73: mod_base = OTHER; note = 2'-Omethylguanosine

SEQ ID NO: 5796 - RNA, 76 nt, synthetic construct; identical to SEQ ID NO: 3795
  source 1..76: mol_type = other RNA
  modified_base 1: mod_base = OTHER; note = 2'-Omethylguanosine phosphorothiorate
  modified_base 2: mod_base = OTHER; note = 2'-Omethylcytosine phosphorothiorate
  modified_base 3: mod_base = OTHER; note = 2'-Omethylcytosine
  modified_base 4: mod_base = OTHER; note = 2'-Omethyluridine
  modified_base 5: mod_base = OTHER; note = 2'-Omethylcytosine
  modified_base 6: mod_base = OTHER; note = 2'-Omethylcytosine
  modified_base 16: mod_base = OTHER; note = 2'-Omethyluridine
  modified_base 17: mod_base = OTHER; note = 2'-Omethylguanosine
  modified_base 18: mod_base = OTHER; note = 2'-Omethylguanosine
  modified_base 20: mod_base = OTHER; note = 2'-Omethyluridine
  modified_base 25: mod_base = OTHER; note = 2'-Omethylcytosine
  modified_base 33: mod_base = OTHER; note = 2'-fluorouridine
  modified_base 35: mod_base = OTHER; note = Cytosine phosphorothiorate
  modified_base 37: mod_base = OTHER; note = Adenosine phosphorothiorate
  modified_base 38: mod_base = OTHER; note = Adenosine phosphorothiorate
  modified_base 41: mod_base = OTHER; note = 2'-Omethylcytosine
  modified_base 44: mod_base = OTHER; note = 2'-Omethylguanosine
  modified_base 45: mod_base = OTHER; note = 2'-Omethylguanosine
  modified_base 46: mod_base = OTHER; note = 2'-fluoroadenosine
  modified_base 47: mod_base = OTHER; note = 2'-fluorouridine
  modified_base 48: mod_base = OTHER; note = 2'-fluorouridine
  modified_base 49: mod_base = OTHER; note = 2'-Omethylguanosine
  modified_base 50: mod_base = OTHER; note = 2'-Omethylcytosine
  modified_base 51: mod_base = OTHER; note = 2'-Omethylguanosine
  modified_base 52: mod_base = OTHER; note = 2'-Omethylguanosine
  modified_base 53: mod_base = OTHER; note = 2'-Omethylguanosine
  modified_base 54: mod_base = OTHER; note = 2'-Omethyluridine
  modified_base 56: mod_base = OTHER; note = 2'-Omethylcytosine
  modified_base 59: mod_base = OTHER; note = 2'-Omethylguanosine
  modified_base 73: mod_base = OTHER; note = 2'-Omethylguanosine

SEQ ID NO: 5797 - RNA, 76 nt, synthetic construct; identical to SEQ ID NO: 3295
  source 1..76: mol_type = other RNA
  modified_base 1: mod_base = OTHER; note = 2'-Omethylcytosine phosphorothiorate
  modified_base 2: mod_base = OTHER; note = 2'-fluorocytosine
  modified_base 3: mod_base = OTHER; note = 2'-fluorouridine phosphorothiorate
  modified_base 4: mod_base = OTHER; note = 2'-Omethyluridine
  modified_base 5: mod_base = OTHER; note = 2'-fluorocytosine
  modified_base 8: mod_base = OTHER; note = 2'-fluorouridine
  modified_base 14: mod_base = OTHER; note = 2'-fluoroadenosine phosphorothiorate
  modified_base 20: mod_base = OTHER; note = 2'-Omethyluridine
  modified_base 26: mod_base = OTHER; note = 2'-Omethylguanosine phosphorothiorate
  modified_base 37: mod_base = OTHER; note = 2'-fluoroguanosine phosphorothiorate
  modified_base 52: mod_base = OTHER; note = 2'-fluoroguanosine phosphorothiorate
  modified_base 75: mod_base = OTHER; note = Cytosine phosphorothiorate

SEQ ID NO: 5798 - RNA, 75 nt, synthetic construct; identical to SEQ ID NO: 3299
  source 1..75: mol_type = other RNA
  modified_base 1: mod_base = OTHER; note = 2'-Omethylcytosine
  modified_base 3: mod_base = OTHER; note = 2'-fluorouridine phosphorothiorate
  modified_base 6: mod_base = OTHER; note = Guanosine phosphorothiorate
  modified_base 12: mod_base = OTHER; note = 2'-Omethylcytosine phosphorothiorate
  modified_base 15: mod_base = OTHER; note = Uridine phosphorothiorate
  modified_base 18: mod_base = OTHER; note = 2'-fluoroguanosine
  modified_base 20: mod_base = OTHER; note = 2'-fluoroadenosine
  modified_base 25: mod_base = OTHER; note = 2'-fluoroadenosine
  modified_base 36: mod_base = OTHER; note = 2'-fluoroadenosine
  modified_base 38: mod_base = OTHER; note = 2'-fluorouridine
  modified_base 39: mod_base = OTHER; note = 2'-fluorocytosine
  modified_base 42: mod_base = OTHER; note = 2'-fluoroadenosine phosphorothiorate
  modified_base 48: mod_base = OTHER; note = 2'-fluorocytosine
  modified_base 49: mod_base = OTHER; note = 2'-fluoroadenosine
  modified_base 53: mod_base = OTHER; note = 2'-Omethyluridine phosphorothiorate
  modified_base 55: mod_base = OTHER; note = 2'-fluorocytosine phosphorothiorate
  modified_base 63: mod_base = OTHER; note = 2'-fluorouridine
  modified_base 71: mod_base = OTHER; note = Cytosine phosphorothiorate
  modified_base 74: mod_base = OTHER; note = 2'-Omethylcytosine

SEQ ID NO: 5799 - RNA, 76 nt, synthetic construct; identical to SEQ ID NO: 3447
  source 1..76: mol_type = other RNA
  modified_base 1: mod_base = OTHER; note = 2'-Omethylguanosine phosphorothiorate
  modified_base 2: mod_base = OTHER; note = 2'-Omethylcytosine phosphorothiorate
  modified_base 74: mod_base = OTHER; note = Cytosine phosphorothiorate
  modified_base 75: mod_base = OTHER; note = 2'-Omethylcytosine

SEQ ID NO: 5800 - RNA, 76 nt, synthetic construct; identical to SEQ ID NO: 625
  source 1..76: mol_type = other RNA
  modified_base 1: mod_base = OTHER; note = 2'-Omethylguanosine
  modified_base 17: mod_base = OTHER; note = 2'-Omethylguanosine
  modified_base 18: mod_base = OTHER; note = 2'-Omethylguanosine
  modified_base 50: mod_base = OTHER; note = 2'-Omethylcytosine
  modified_base 52: mod_base = OTHER; note = 2'-Omethylguanosine
  modified_base 54: mod_base = OTHER; note = Thymine
  modified_base 73: mod_base = OTHER; note = 2'-Omethylguanosine

SEQ ID NO: 5801 - RNA, 76 nt, synthetic construct; identical to SEQ ID NO: 625
  source 1..76: mol_type = other RNA
  modified_base 1: mod_base = OTHER; note = Guanosine phosphorothiorate
  modified_base 2: mod_base = OTHER; note = 2'-fluoroguanosine
  modified_base 3: mod_base = OTHER; note = 2'-fluorocytosine
  modified_base 4: mod_base = OTHER; note = 2'-fluorouridine
  modified_base 6: mod_base = OTHER; note = Cytosine phosphorothiorate
  modified_base 13: mod_base = OTHER; note = 2'-Omethylcytosine
  modified_base 15: mod_base = OTHER; note = 2'-Omethyladenosine
  modified_base 16: mod_base = OTHER; note = 2'-fluorouridine phosphorothiorate
  modified_base 18: mod_base = OTHER; note = 2'-Omethylguanosine
  modified_base 20: mod_base = OTHER; note = Uridine phosphorothiorate
  modified_base 23: mod_base = OTHER; note = 2'-fluorocytosine
  modified_base 30: mod_base = OTHER; note = 2'-Omethylguanosine
  modified_base 36: mod_base = OTHER; note = Adenosine phosphorothiorate
  modified_base 42: mod_base = OTHER; note = 2'-Omethyladenosine
  modified_base 43: mod_base = OTHER; note = 2'-Omethyladenosine phosphorothiorate
  modified_base 48: mod_base = OTHER; note = 2'-fluorouridine phosphorothiorate
  modified_base 49: mod_base = OTHER; note = 2'-Omethylcytosine
  modified_base 50: mod_base = OTHER; note = 2'-Omethylcytosine
  modified_base 53: mod_base = OTHER; note = 2'-Omethylguanosine
  modified_base 54: mod_base = OTHER; note = Uridine phosphorothiorate
  modified_base 59: mod_base = OTHER; note = 2'-Omethylguanosine
  modified_base 60: mod_base = OTHER; note = 2'-Omethyluridine phosphorothiorate
  modified_base 61: mod_base = OTHER; note = 2'-Omethylcytosine
  modified_base 62: mod_base = OTHER; note = 2'-fluorocytosine
  modified_base 64: mod_base = OTHER; note = 2'-Omethylguanosine
  modified_base 67: mod_base = OTHER; note = 2'-Omethylguanosine phosphorothiorate
  modified_base 68: mod_base = OTHER; note = 2'-Omethylguanosine
  modified_base 70: mod_base = OTHER; note = Guanosine phosphorothiorate
  modified_base 71: mod_base = OTHER; note = 2'-Omethyluridine
  modified_base 73: mod_base = OTHER; note = 2'-Omethylguanosine
  modified_base 75: mod_base = OTHER; note = 2'-fluorocytosine phosphorothiorate
  modified_base 76: mod_base = OTHER; note = 2'-Omethyladenosine

SEQ ID NO: 5802 - RNA, 76 nt, synthetic construct; identical to SEQ ID NO: 3295
  source 1..76: mol_type = other RNA
  modified_base 1: mod_base = OTHER; note = 2'-Omethylcytosine
  modified_base 2: mod_base = OTHER; note = 2'-fluorocytosine phosphorothiorate
  modified_base 3: mod_base = OTHER; note = 2'-fluorouridine
  modified_base 17: mod_base = OTHER; note = 2'-Omethyluridine
  modified_base 30: mod_base = OTHER; note = 2'-fluoroguanosine
  modified_base 46: mod_base = OTHER; note = 2'-Omethylguanosine
  modified_base 47: mod_base = OTHER; note = Uridine phosphorothiorate
  modified_base 53: mod_base = OTHER; note = 2'-fluoroguanosine phosphorothiorate
  modified_base 75: mod_base = OTHER; note = Cytosine phosphorothiorate

SEQ ID NO: 5803 - RNA, 85 nt, synthetic construct; identical to SEQ ID NO: 3286
  source 1..85: mol_type = other RNA
  modified_base 1: mod_base = OTHER; note = 2'-Omethylcytosine
  modified_base 30: mod_base = OTHER; note = 2'-fluoroadenosine
  modified_base 34: mod_base = OTHER; note = 2'-fluorouridine
  modified_base 36: mod_base = OTHER; note = Guanosine phosphorothiorate
  modified_base 42: mod_base = OTHER; note = Adenosine phosphorothiorate
  modified_base 84: mod_base = OTHER; note = Cytosine phosphorothiorate
  modified_base 85: mod_base = OTHER; note = 2'-fluoroadenosine

SEQ ID NO: 5804 - RNA, 76 nt, synthetic construct; identical to SEQ ID NO: 3795
  source 1..76: mol_type = other RNA
  modified_base 1: mod_base = OTHER; note = 2'-Omethylguanosine
  modified_base 13: mod_base = OTHER; note = 2'-Omethyluridine
  modified_base 17: mod_base = OTHER; note = 2'-Omethylguanosine
  modified_base 18: mod_base = OTHER; note = 2'-Omethylguanosine
  modified_base 25: mod_base = OTHER; note = 2'-Omethylcytosine
  modified_base 33: mod_base = OTHER; note = Uridine phosphorothiorate
  modified_base 34: mod_base = OTHER; note = 2'-Omethyluridine
  modified_base 35: mod_base = OTHER; note = Cytosine phosphorothiorate
  modified_base 37: mod_base = OTHER; note = Adenosine phosphorothiorate
  modified_base 38: mod_base = OTHER; note = Adenosine phosphorothiorate
  modified_base 41: mod_base = OTHER; note = 2'-fluorocytosine
  modified_base 42: mod_base = OTHER; note = 2'-Omethylguanosine
  modified_base 43: mod_base = OTHER; note = 2'-Omethylguanosine
  modified_base 44: mod_base = OTHER; note = 2'-fluoroguanosine
  modified_base 49: mod_base = OTHER; note = 2'-Omethylguanosine
  modified_base 50: mod_base = OTHER; note = 2'-Omethylcytosine
  modified_base 52: mod_base = OTHER; note = 2'-Omethylguanosine
  modified_base 54: mod_base = OTHER; note = Uridine phosphorothiorate
  modified_base 55: mod_base = OTHER; note = Uridine phosphorothiorate
  modified_base 56: mod_base = OTHER; note = 2'-Omethylcytosine
  modified_base 57: mod_base = OTHER; note = Guanosine phosphorothiorate
  modified_base 58: mod_base = OTHER; note = Adenosine phosphorothiorate
  modified_base 59: mod_base = OTHER; note = 2'-Omethylguanosine
  modified_base 61: mod_base = OTHER; note = 2'-Omethylcytosine
  modified_base 65: mod_base = OTHER; note = 2'-Omethyluridine
  modified_base 73: mod_base = OTHER; note = 2'-Omethylguanosine

SEQ ID NO: 5805 - RNA, 76 nt, synthetic construct; identical to SEQ ID NO: 625
  source 1..76: mol_type = other RNA
  modified_base 1: mod_base = OTHER; note = 2'-fluoroguanosine phosphorothiorate
  modified_base 2: mod_base = OTHER; note = 2'-fluoroguanosine
  modified_base 3: mod_base = OTHER; note = 2'-fluorocytosine
  modified_base 4: mod_base = OTHER; note = 2'-fluorouridine
  modified_base 5: mod_base = OTHER; note = 2'-fluorocytosine
  modified_base 9: mod_base = OTHER; note = Guanosine phosphorothiorate
  modified_base 12: mod_base = OTHER; note = 2'-fluoroguanosine
  modified_base 14: mod_base = OTHER; note = 2'-Omethyladenosine
  modified_base 16: mod_base = OTHER; note = 2'-Omethyluridine
  modified_base 18: mod_base = OTHER; note = 2'-fluoroguanosine
  modified_base 21: mod_base = OTHER; note = Adenosine phosphorothiorate
  modified_base 22: mod_base = OTHER; note = 2'-Omethylguanosine
  modified_base 23: mod_base = OTHER; note = 2'-fluorocytosine
  modified_base 24: mod_base = OTHER; note = 2'-Omethylguanosine
  modified_base 27: mod_base = OTHER; note = Uridine phosphorothiorate
  modified_base 28: mod_base = OTHER; note = 2'-fluorouridine
  modified_base 33: mod_base = OTHER; note = 2'-fluorouridine
  modified_base 34: mod_base = OTHER; note = 2'-fluorouridine phosphorothiorate
  modified_base 40: mod_base = OTHER; note = 2'-Omethyluridine
  modified_base 42: mod_base = OTHER; note = Adenosine phosphorothiorate
  modified_base 50: mod_base = OTHER; note = 2'-fluorocytosine
  modified_base 51: mod_base = OTHER; note = 2'-Omethylguanosine
  modified_base 52: mod_base = OTHER; note = 2'-Omethylguanosine
  modified_base 53: mod_base = OTHER; note = 2'-fluoroguanosine
  modified_base 56: mod_base = OTHER; note = Cytosine phosphorothiorate
  modified_base 57: mod_base = OTHER; note = 2'-fluoroguanosine
  modified_base 59: mod_base = OTHER; note = Guanosine phosphorothiorate
  modified_base 61: mod_base = OTHER; note = 2'-fluorocytosine
  modified_base 63: mod_base = OTHER; note = Cytosine phosphorothiorate
  modified_base 65: mod_base = OTHER; note = 2'-fluoroguanosine
  modified_base 66: mod_base = OTHER; note = 2'-Omethylcytosine phosphorothiorate
  modified_base 67: mod_base = OTHER; note = 2'-fluoroguanosine
  modified_base 71: mod_base = OTHER; note = 2'-fluorouridine
  modified_base 73: mod_base = OTHER; note = 2'-fluoroguanosine
  modified_base 74: mod_base = OTHER; note = 2'-Omethylcytosine phosphorothiorate
  modified_base 75: mod_base = OTHER; note = 2'-fluorocytosine

SEQ ID NO: 5806 - RNA, 85 nt, synthetic construct; identical to SEQ ID NO: 3286
  source 1..85: mol_type = other RNA
  modified_base 1: mod_base = OTHER; note = 2'-Omethylcytosine
  modified_base 30: mod_base = OTHER; note = 2'-fluoroadenosine
  modified_base 44: mod_base = OTHER; note = 2'-Omethylguanosine
  modified_base 50: mod_base = OTHER; note = Adenosine phosphorothiorate
  modified_base 57: mod_base = OTHER; note = 2'-Omethylcytosine
  modified_base 59: mod_base = OTHER; note = 2'-Omethyluridine
  modified_base 85: mod_base = OTHER; note = 2'-Omethyladenosine

SEQ ID NO: 5807 - RNA, 76 nt, synthetic construct; identical to SEQ ID NO: 625
  source 1..76: mol_type = other RNA
  modified_base 1: mod_base = OTHER; note = 2'-Omethylguanosine phosphorothiorate
  modified_base 2: mod_base = OTHER; note = 2'-Omethylguanosine
  modified_base 3: mod_base = OTHER; note = 2'-Omethylcytosine
  modified_base 10: mod_base = OTHER; note = 2'-Omethylguanosine
  modified_base 11: mod_base = OTHER; note = 2'-Omethylcytosine
  modified_base 12: mod_base = OTHER; note = 2'-Omethylguanosine
  modified_base 13: mod_base = OTHER; note = 2'-Omethylcytosine
  modified_base 14: mod_base = OTHER; note = 2'-Omethyladenosine
  modified_base 15: mod_base = OTHER; note = 2'-fluoroadenosine
  modified_base 16: mod_base = OTHER; note = 2'-Omethyluridine
  modified_base 17: mod_base = OTHER; note = 2'-Omethylguanosine
  modified_base 18: mod_base = OTHER; note = 2'-Omethylguanosine
  modified_base 19: mod_base = OTHER; note = 2'-fluoroadenosine
  modified_base 20: mod_base = OTHER; note = 2'-Omethyluridine
  modified_base 22: mod_base = OTHER; note = 2'-Omethylguanosine
  modified_base 23: mod_base = OTHER; note = 2'-Omethylcytosine
  modified_base 24: mod_base = OTHER; note = 2'-Omethylguanosine
  modified_base 25: mod_base = OTHER; note = 2'-Omethylcytosine
  modified_base 38: mod_base = OTHER; note = Adenosine phosphorothiorate
  modified_base 39: mod_base = OTHER; note = Uridine phosphorothiorate
  modified_base 40: mod_base = OTHER; note = 2'-fluorouridine
  modified_base 43: mod_base = OTHER; note = 2'-Omethyladenosine
  modified_base 44: mod_base = OTHER; note = 2'-Omethyladenosine
  modified_base 45: mod_base = OTHER; note = 2'-Omethylguanosine
  modified_base 46: mod_base = OTHER; note = 2'-fluoroguanosine
  modified_base 48: mod_base = OTHER; note = 2'-fluorouridine
  modified_base 49: mod_base = OTHER; note = 2'-Omethylcytosine
  modified_base 50: mod_base = OTHER; note = 2'-Omethylcytosine
  modified_base 54: mod_base = OTHER; note = 2'-Omethyluridine phosphorothiorate
  modified_base 55: mod_base = OTHER; note = Uridine phosphorothiorate
  modified_base 56: mod_base = OTHER; note = 2'-Omethylcytosine
  modified_base 57: mod_base = OTHER; note = 2'-fluoroguanosine
  modified_base 61: mod_base = OTHER; note = 2'-Omethylcytosine
  modified_base 62: mod_base = OTHER; note = 2'-Omethylcytosine
  modified_base 63: mod_base = OTHER; note = 2'-fluorocytosine
  modified_base 64: mod_base = OTHER; note = 2'-Omethylguanosine
  modified_base 65: mod_base = OTHER; note = 2'-Omethylguanosine
  modified_base 66: mod_base = OTHER; note = 2'-Omethylcytosine
  modified_base 67: mod_base = OTHER; note = 2'-Omethylguanosine
  modified_base 68: mod_base = OTHER; note = 2'-Omethylguanosine

SEQ ID NO: 5808 - RNA, 85 nt, synthetic construct; identical to SEQ ID NO: 3288
  source 1..85: mol_type = other RNA
  modified_base 1: mod_base = OTHER; note = 2'-Omethylcytosine
  modified_base 11: mod_base = OTHER; note = Cytosine phosphorothiorate
  modified_base 15: mod_base = OTHER; note = Uridine phosphorothiorate
  modified_base 25: mod_base = OTHER; note = 2'-fluoroguanosine
  modified_base 26: mod_base = OTHER; note = 2'-Omethyluridine phosphorothiorate
  modified_base 27: mod_base = OTHER; note = 2'-fluorouridine
  modified_base 30: mod_base = OTHER; note = 2'-fluoroadenosine
  modified_base 34: mod_base = OTHER; note = 2'-fluorocytosine
  modified_base 39: mod_base = OTHER; note = Cytosine phosphorothiorate
  modified_base 42: mod_base = OTHER; note = Adenosine phosphorothiorate
  modified_base 46: mod_base = OTHER; note = Adenosine phosphorothiorate
  modified_base 51: mod_base = OTHER; note = 2'-Omethyluridine
  modified_base 55: mod_base = OTHER; note = 2'-Omethylcytosine
  modified_base 57: mod_base = OTHER; note = 2'-Omethylcytosine
  modified_base 59: mod_base = OTHER; note = 2'-fluorouridine
  modified_base 61: mod_base = OTHER; note = 2'-fluoroguanosine phosphorothiorate
  modified_base 69: mod_base = OTHER; note = Cytosine phosphorothiorate
  modified_base 75: mod_base = OTHER; note = 2'-fluorouridine
  modified_base 81: mod_base = OTHER; note = 2'-Omethyluridine
  modified_base 84: mod_base = OTHER; note = 2'-fluorocytosine phosphorothiorate

SEQ ID NO: 5809 - RNA, 75 nt, synthetic construct; identical to SEQ ID NO: 3299
  source 1..75: mol_type = other RNA
  modified_base 9: mod_base = OTHER; note = 2'-Omethylguanosine phosphorothiorate
  modified_base 14: mod_base = OTHER; note = 2'-fluoroguanosine phosphorothiorate
  modified_base 22: mod_base = OTHER; note = 2'-fluoroadenosine
  modified_base 27: mod_base = OTHER; note = Cytosine phosphorothiorate
  modified_base 36: mod_base = OTHER; note = Adenosine phosphorothiorate
  modified_base 47: mod_base = OTHER; note = 2'-fluorocytosine phosphorothiorate
  modified_base 49: mod_base = OTHER; note = 2'-fluoroadenosine
  modified_base 73: mod_base = OTHER; note = Cytosine phosphorothiorate
  modified_base 74: mod_base = OTHER; note = Cytosine phosphorothiorate

SEQ ID NO: 5810 - RNA, 74 nt, synthetic construct; identical to SEQ ID NO: 766
  source 1..74: mol_type = other RNA
  modified_base 1: mod_base = OTHER; note = 2'-Omethylguanosine phosphorothiorate
  modified_base 2: mod_base = OTHER; note = 2'-Omethylguanosine
  modified_base 3: mod_base = OTHER; note = 2'-Omethylcytosine
  modified_base 4: mod_base = OTHER; note = 2'-Omethyluridine
  modified_base 5: mod_base = OTHER; note = 2'-Omethylcytosine
  modified_base 6: mod_base = OTHER; note = 2'-Omethylcytosine
  modified_base 49: mod_base = OTHER; note = 2'-Omethylcytosine
  modified_base 50: mod_base = OTHER; note = 2'-Omethylcytosine
  modified_base 51: mod_base = OTHER; note = 2'-Omethylguanosine
  modified_base 52: mod_base = OTHER; note = 2'-Omethylguanosine
  modified_base 53: mod_base = OTHER; note = 2'-Omethylguanosine
  modified_base 61: mod_base = OTHER; note = 2'-Omethylcytosine
  modified_base 62: mod_base = OTHER; note = 2'-Omethylcytosine
  modified_base 63: mod_base = OTHER; note = 2'-fluorocytosine
  modified_base 64: mod_base = OTHER; note = 2'-Omethylguanosine
  modified_base 65: mod_base = OTHER; note = 2'-Omethylguanosine
  modified_base 66: mod_base = OTHER; note = 2'-Omethylcytosine
  modified_base 67: mod_base = OTHER; note = 2'-Omethylguanosine
  modified_base 68: mod_base = OTHER; note = 2'-Omethylguanosine
  modified_base 69: mod_base = OTHER; note = 2'-Omethyladenosine
  modified_base 73: mod_base = OTHER; note = 2'-Omethylguanosine

SEQ ID NO: 5811 - RNA, 75 nt, synthetic construct; identical to SEQ ID NO: 3306
  source 1..75: mol_type = other RNA
  modified_base 13: mod_base = OTHER; note = 2'-Omethylcytosine
  modified_base 72: mod_base = OTHER; note = 2'-Omethyladenosine

SEQ ID NO: 5812 - RNA, 76 nt, synthetic construct; identical to SEQ ID NO: 625
  source 1..76: mol_type = other RNA
  modified_base 66: mod_base = OTHER; note = 2'-fluorocytosine
  modified_base 67: mod_base = OTHER; note = 2'-fluoroguanosine
  modified_base 68: mod_base = OTHER; note = 2'-fluoroguanosine
  modified_base 69: mod_base = OTHER; note = 2'-fluoroadenosine
  modified_base 70: mod_base = OTHER; note = 2'-fluoroguanosine
  modified_base 71: mod_base = OTHER; note = 2'-fluorouridine
  modified_base 72: mod_base = OTHER; note = 2'-fluorocytosine

SEQ ID NO: 5813 - RNA, 75 nt, synthetic construct; identical to SEQ ID NO: 1045
  source 1..75: mol_type = other RNA
  modified_base 2: mod_base = OTHER; note = 2'-Omethylguanosine phosphorothiorate
  modified_base 14: mod_base = OTHER; note = 2'-Omethyladenosine
  modified_base 36: mod_base = OTHER; note = 2'-fluoroadenosine
  modified_base 48: mod_base = OTHER; note = 2'-fluorocytosine
  modified_base 59: mod_base = OTHER; note = Uridine phosphorothiorate
  modified_base 60: mod_base = OTHER; note = 2'-fluorocytosine
  modified_base 66: mod_base = OTHER; note = 2'-fluoroguanosine
  modified_base 71: mod_base = OTHER; note = 2'-fluorocytosine

SEQ ID NO: 5814 - RNA, 76 nt, synthetic construct; identical to SEQ ID NO: 625
  source 1..76: mol_type = other RNA
  modified_base 2: mod_base = OTHER; note = 2'-Omethylguanosine
  modified_base 4: mod_base = OTHER; note = Uridine phosphorothiorate
  modified_base 5: mod_base = OTHER; note = 2'-fluorocytosine
  modified_base 6: mod_base = OTHER; note = 2'-fluorocytosine
  modified_base 10: mod_base = OTHER; note = 2'-Omethylguanosine
  modified_base 12: mod_base = OTHER; note = 2'-fluoroguanosine
  modified_base 14: mod_base = OTHER; note = 2'-fluoroadenosine
  modified_base 15: mod_base = OTHER; note = Adenosine phosphorothiorate
  modified_base 16: mod_base = OTHER; note = 2'-Omethyluridine
  modified_base 17: mod_base = OTHER; note = 2'-Omethylguanosine
  modified_base 20: mod_base = OTHER; note = Uridine phosphorothiorate
  modified_base 25: mod_base = OTHER; note = Cytosine phosphorothiorate
  modified_base 28: mod_base = OTHER; note = 2'-fluorouridine
  modified_base 31: mod_base = OTHER; note = 2'-Omethyladenosine
  modified_base 33: mod_base = OTHER; note = 2'-fluorouridine phosphorothiorate
  modified_base 39: mod_base = OTHER; note = Uridine phosphorothiorate
  modified_base 41: mod_base = OTHER; note = Cytosine phosphorothiorate
  modified_base 42: mod_base = OTHER; note = 2'-Omethyladenosine
  modified_base 43: mod_base = OTHER; note = 2'-fluoroadenosine
  modified_base 46: mod_base = OTHER; note = 2'-Omethylguanosine phosphorothiorate
  modified_base 49: mod_base = OTHER; note = 2'-fluorocytosine
  modified_base 51: mod_base = OTHER; note = 2'-Omethylguanosine
  modified_base 56: mod_base = OTHER; note = 2'-Omethylcytosine
  modified_base 57: mod_base = OTHER; note = 2'-Omethylguanosine
  modified_base 58: mod_base = OTHER; note = 2'-fluoroadenosine
  modified_base 59: mod_base = OTHER; note = Guanosine phosphorothiorate
  modified_base 60: mod_base = OTHER; note = 2'-fluorouridine
  modified_base 68: mod_base = OTHER; note = 2'-Omethylguanosine
  modified_base 69: mod_base = OTHER; note = 2'-Omethyladenosine
  modified_base 70: mod_base = OTHER; note = Guanosine phosphorothiorate
  modified_base 71: mod_base = OTHER; note = 2'-Omethyluridine phosphorothiorate
  modified_base 72: mod_base = OTHER; note = Cytosine phosphorothiorate
  modified_base 73: mod_base = OTHER; note = 2'-Omethylguanosine
  modified_base 74: mod_base = OTHER; note = 2'-fluorocytosine

SEQ ID NO: 5815 - RNA, 75 nt, synthetic construct; identical to SEQ ID NO: 1045
  source 1..75: mol_type = other RNA
  modified_base 1: mod_base = OTHER; note = 2'-Omethylguanosine phosphorothiorate
  modified_base 2: mod_base = OTHER; note = 2'-Omethylguanosine phosphorothiorate
  modified_base 16: mod_base = OTHER; note = Uridine phosphorothiorate
  modified_base 17: mod_base = OTHER; note = 2'-fluoroguanosine phosphorothiorate
  modified_base 20: mod_base = OTHER; note = 2'-Omethyladenosine
  modified_base 23: mod_base = OTHER; note = 2'-Omethylcytosine
  modified_base 29: mod_base = OTHER; note = 2'-Omethylguanosine
  modified_base 30: mod_base = OTHER; note = 2'-Omethylguanosine phosphorothiorate
  modified_base 41: mod_base = OTHER; note = 2'-Omethylcytosine
  modified_base 55: mod_base = OTHER; note = 2'-Omethylcytosine phosphorothiorate
  modified_base 56: mod_base = OTHER; note = 2'-Omethylguanosine
  modified_base 68: mod_base = OTHER; note = 2'-Omethyladenosine
  modified_base 72: mod_base = OTHER; note = 2'-Omethyluridine
  modified_base 73: mod_base = OTHER; note = Cytosine phosphorothiorate
  modified_base 74: mod_base = OTHER; note = 2'-Omethylcytosine phosphorothiorate
  modified_base 75: mod_base = OTHER; note = 2'-Omethyladenosine

SEQ ID NO: 5816 - DNA, 73 bp, synthetic construct; identical to SEQ ID NO: 3380
  source 1..73: mol_type = other DNA
  modified_base 1: mod_base = OTHER; note = 2'-Omethylguanosine phosphorothiorate
  modified_base 2: mod_base = OTHER; note = 2'-Omethylguanosine phosphorothiorate
  modified_base 52: mod_base = OTHER; note = 2'-Omethylguanosine
  modified_base 63: mod_base = OTHER; note = Cytosine phosphorothiorate
  modified_base 72: mod_base = OTHER; note = 2'-Omethylcytosine phosphorothiorate
  misc_feature 1..63: note = RNA
  misc_feature 64: note = DNA
  misc_feature 65..73: note = RNA

SEQ ID NO: 5817 - RNA, 76 nt, synthetic construct; identical to SEQ ID NO: 625
  source 1..76: mol_type = other RNA
  modified_base 1: mod_base = OTHER; note = 2'-Omethylguanosine phosphorothiorate
  modified_base 2: mod_base = OTHER; note = 2'-Omethylguanosine phosphorothiorate
  modified_base 3: mod_base = OTHER; note = 2'-Omethylcytosine
  modified_base 4: mod_base = OTHER; note = 2'-Omethyluridine
  modified_base 5: mod_base = OTHER; note = 2'-Omethylcytosine
  modified_base 6: mod_base = OTHER; note = 2'-Omethylcytosine
  modified_base 10: mod_base = OTHER; note = 2'-Omethylguanosine
  modified_base 11: mod_base = OTHER; note = 2'-Omethylcytosine
  modified_base 12: mod_base = OTHER; note = 2'-Omethylguanosine
  modified_base 13: mod_base = OTHER; note = 2'-Omethylcytosine
  modified_base 16: mod_base = OTHER; note = 2'-Omethyluridine
  modified_base 17: mod_base = OTHER; note = 2'-Omethylguanosine
  modified_base 18: mod_base = OTHER; note = 2'-Omethylguanosine
  modified_base 20: mod_base = OTHER; note = 2'-Omethyluridine
  modified_base 22: mod_base = OTHER; note = 2'-Omethylguanosine
  modified_base 23: mod_base = OTHER; note = 2'-Omethylcytosine
  modified_base 24: mod_base = OTHER; note = 2'-Omethylguanosine
  modified_base 25: mod_base = OTHER; note = 2'-Omethylcytosine
  modified_base 33: mod_base = OTHER; note = 2'-fluorouridine
  modified_base 35: mod_base = OTHER; note = Cytosine phosphorothiorate
  modified_base 37: mod_base = OTHER; note = Adenosine phosphorothiorate
  modified_base 38: mod_base = OTHER; note = Adenosine phosphorothiorate
  modified_base 41: mod_base = OTHER; note = 2'-fluorocytosine
  modified_base 42: mod_base = OTHER; note = 2'-Omethyladenosine
  modified_base 43: mod_base = OTHER; note = 2'-Omethyladenosine
  modified_base 44: mod_base = OTHER; note = 2'-fluoroadenosine
  modified_base 49: mod_base = OTHER; note = 2'-Omethylcytosine
  modified_base 50: mod_base = OTHER; note = 2'-Omethylcytosine
  modified_base 52: mod_base = OTHER; note = 2'-Omethylguanosine
  modified_base 54: mod_base = OTHER; note = 2'-Omethyluridine
  modified_base 55: mod_base = OTHER; note = Uridine phosphorothiorate
  modified_base 56: mod_base = OTHER; note = 2'-Omethylcytosine
  modified_base 57: mod_base = OTHER; note = 2'-fluoroguanosine
  modified_base 59: mod_base = OTHER; note = 2'-Omethylguanosine
  modified_base 61: mod_base = OTHER; note = 2'-Omethylcytosine
  modified_base 65: mod_base = OTHER; note = 2'-Omethylguanosine
  modified_base 74: mod_base = OTHER; note = Cytosine phosphorothiorate
  modified_base 75: mod_base = OTHER; note = 2'-Omethylcytosine

SEQ ID NO: 5818 - RNA, 86 nt, synthetic construct; identical to SEQ ID NO: 3290
  source 1..86: mol_type = other RNA
  modified_base 33: mod_base = OTHER; note = 2'-Omethyluridine

SEQ ID NO: 5819 - RNA, 76 nt, synthetic construct; identical to SEQ ID NO: 625
  source 1..76: mol_type = other RNA
  modified_base 1: mod_base = OTHER; note = 2'-Omethylguanosine phosphorothiorate
  modified_base 2: mod_base = OTHER; note = 2'-Omethylguanosine
  modified_base 3: mod_base = OTHER; note = 2'-Omethylcytosine
  modified_base 4: mod_base = OTHER; note = 2'-Omethyluridine
  modified_base 5: mod_base = OTHER; note = 2'-Omethylcytosine
  modified_base 6: mod_base = OTHER; note = 2'-Omethylcytosine
  modified_base 10: mod_base = OTHER; note = 2'-Omethylguanosine
  modified_base 11: mod_base = OTHER; note = 2'-Omethylcytosine
  modified_base 12: mod_base = OTHER; note = 2'-Omethylguanosine
  modified_base 13: mod_base = OTHER; note = 2'-Omethylcytosine
  modified_base 16: mod_base = OTHER; note = 2'-Omethyluridine
  modified_base 17: mod_base = OTHER; note = 2'-Omethylguanosine
  modified_base 18: mod_base = OTHER; note = 2'-Omethylguanosine
  modified_base 22: mod_base = OTHER; note = 2'-Omethylguanosine
  modified_base 23: mod_base = OTHER; note = 2'-Omethylcytosine
  modified_base 24: mod_base = OTHER; note = 2'-Omethylguanosine
  modified_base 25: mod_base = OTHER; note = 2'-Omethylcytosine
  modified_base 44: mod_base = OTHER; note = 2'-Omethyladenosine
  modified_base 45: mod_base = OTHER; note = 2'-Omethylguanosine
  modified_base 46: mod_base = OTHER; note = 2'-Omethylguanosine
  modified_base 49: mod_base = OTHER; note = 2'-Omethylcytosine
  modified_base 50: mod_base = OTHER; note = 2'-Omethylcytosine
  modified_base 51: mod_base = OTHER; note = 2'-Omethylguanosine
  modified_base 52: mod_base = OTHER; note = 2'-Omethylguanosine
  modified_base 53: mod_base = OTHER; note = 2'-Omethylguanosine
  modified_base 54: mod_base = OTHER; note = 2'-Omethyluridine phosphorothiorate
  modified_base 55: mod_base = OTHER; note = Uridine phosphorothiorate
  modified_base 56: mod_base = OTHER; note = 2'-Omethylcytosine
  modified_base 57: mod_base = OTHER; note = 2'-fluoroguanosine
  modified_base 59: mod_base = OTHER; note = 2'-Omethylguanosine
  modified_base 61: mod_base = OTHER; note = 2'-Omethylcytosine
  modified_base 62: mod_base = OTHER; note = 2'-Omethylcytosine
  modified_base 63: mod_base = OTHER; note = 2'-Omethylcytosine
  modified_base 64: mod_base = OTHER; note = 2'-Omethylguanosine
  modified_base 65: mod_base = OTHER; note = 2'-Omethylguanosine
  modified_base 66: mod_base = OTHER; note = 2'-Omethylcytosine
  modified_base 67: mod_base = OTHER; note = 2'-Omethylguanosine
  modified_base 68: mod_base = OTHER; note = 2'-Omethylguanosine
  modified_base 69: mod_base = OTHER; note = 2'-Omethyladenosine
  modified_base 73: mod_base = OTHER; note = 2'-Omethylguanosine

SEQ ID NO: 5820 - RNA, 85 nt, synthetic construct; identical to SEQ ID NO: 3286
  source 1..85: mol_type = other RNA
  modified_base 1: mod_base = OTHER; note = 2'-fluorocytosine
  modified_base 25: mod_base = OTHER; note = 2'-fluoroguanosine
  modified_base 33: mod_base = OTHER; note = 2'-fluorouridine
  modified_base 44: mod_base = OTHER; note = Guanosine phosphorothiorate
  modified_base 55: mod_base = OTHER; note = 2'-Omethylcytosine
  modified_base 58: mod_base = OTHER; note = Guanosine phosphorothiorate
  modified_base 70: mod_base = OTHER; note = 2'-fluorocytosine
  modified_base 84: mod_base = OTHER; note = Cytosine phosphorothiorate

SEQ ID NO: 5821 - RNA, 76 nt, synthetic construct; identical to SEQ ID NO: 3795
  source 1..76: mol_type = other RNA
  modified_base 1: mod_base = OTHER; note = 2'-Omethylguanosine
  modified_base 2: mod_base = OTHER; note = 2'-Omethylcytosine
  modified_base 3: mod_base = OTHER; note = 2'-Omethylcytosine
  modified_base 4: mod_base = OTHER; note = 2'-Omethyluridine
  modified_base 5: mod_base = OTHER; note = 2'-Omethylcytosine
  modified_base 6: mod_base = OTHER; note = 2'-Omethylcytosine
  modified_base 14: mod_base = OTHER; note = 2'-Omethyladenosine
  modified_base 15: mod_base = OTHER; note = 2'-Omethyladenosine
  modified_base 16: mod_base = OTHER; note = 2'-Omethyluridine
  modified_base 17: mod_base = OTHER; note = 2'-Omethylguanosine
  modified_base 18: mod_base = OTHER; note = 2'-Omethylguanosine
  modified_base 20: mod_base = OTHER; note = 2'-Omethyluridine
  modified_base 25: mod_base = OTHER; note = 2'-Omethylcytosine
  modified_base 41: mod_base = OTHER; note = 2'-Omethylcytosine
  modified_base 42: mod_base = OTHER; note = 2'-Omethylguanosine
  modified_base 43: mod_base = OTHER; note = 2'-Omethylguanosine
  modified_base 44: mod_base = OTHER; note = 2'-Omethylguanosine
  modified_base 49: mod_base = OTHER; note = 2'-Omethylguanosine
  modified_base 50: mod_base = OTHER; note = 2'-Omethylcytosine
  modified_base 52: mod_base = OTHER; note = 2'-Omethylguanosine
  modified_base 54: mod_base = OTHER; note = 2'-Omethyluridine
  modified_base 55: mod_base = OTHER; note = Uridine phosphorothiorate
  modified_base 56: mod_base = OTHER; note = 2'-Omethylcytosine
  modified_base 57: mod_base = OTHER; note = 2'-fluoroguanosine
  modified_base 59: mod_base = OTHER; note = 2'-Omethylguanosine
  modified_base 61: mod_base = OTHER; note = 2'-Omethylcytosine
  modified_base 62: mod_base = OTHER; note = 2'-Omethylcytosine
  modified_base 63: mod_base = OTHER; note = 2'-fluorocytosine
  modified_base 64: mod_base = OTHER; note = 2'-Omethylguanosine
  modified_base 65: mod_base = OTHER; note = 2'-Omethyluridine
  modified_base 73: mod_base = OTHER; note = 2'-Omethylguanosine

SEQ ID NO: 5822 - RNA, 74 nt, synthetic construct; identical to SEQ ID NO: 3293
  source 1..74: mol_type = other RNA
  modified_base 1: mod_base = OTHER; note = 2'-fluoroadenosine
  modified_base 2: mod_base = OTHER; note = Cytosine phosphorothiorate
  modified_base 4: mod_base = OTHER; note = Uridine phosphorothiorate
  modified_base 6: mod_base = OTHER; note = Guanosine phosphorothiorate
  modified_base 8: mod_base = OTHER; note = Guanosine phosphorothiorate
  modified_base 9: mod_base = OTHER; note = 2'-fluoroguanosine
  modified_base 11: mod_base = OTHER; note = 2'-Omethylguanosine
  modified_base 12: mod_base = OTHER; note = 2'-fluorocytosine phosphorothiorate
  modified_base 24: mod_base = OTHER; note = 2'-fluoroguanosine
  modified_base 26: mod_base = OTHER; note = 2'-fluorocytosine
  modified_base 33: mod_base = OTHER; note = 2'-fluorouridine
  modified_base 35: mod_base = OTHER; note = 2'-Omethylguanosine
  modified_base 42: mod_base = OTHER; note = Adenosine phosphorothiorate
  modified_base 46: mod_base = OTHER; note = Uridine phosphorothiorate
  modified_base 48: mod_base = OTHER; note = Cytosine phosphorothiorate
  modified_base 51: mod_base = OTHER; note = Guanosine phosphorothiorate
  modified_base 57: mod_base = OTHER; note = 2'-fluoroadenosine
  modified_base 73: mod_base = OTHER; note = 2'-Omethylcytosine phosphorothiorate
  modified_base 74: mod_base = OTHER; note = 2'-Omethyladenosine

SEQ ID NO: 5823 - RNA, 76 nt, synthetic construct; identical to SEQ ID NO: 625
  source 1..76: mol_type = other RNA
  modified_base 1: mod_base = OTHER; note = 2'-Omethylguanosine phosphorothiorate
  modified_base 2: mod_base = OTHER; note = 2'-Omethylguanosine
  modified_base 3: mod_base = OTHER; note = 2'-Omethylcytosine
  modified_base 4: mod_base = OTHER; note = 2'-Omethyluridine
  modified_base 5: mod_base = OTHER; note = 2'-Omethylcytosine
  modified_base 6: mod_base = OTHER; note = 2'-Omethylcytosine
  modified_base 10: mod_base = OTHER; note = 2'-Omethylguanosine
  modified_base 11: mod_base = OTHER; note = 2'-Omethylcytosine
  modified_base 12: mod_base = OTHER; note = 2'-Omethylguanosine
  modified_base 13: mod_base = OTHER; note = 2'-Omethylcytosine
  modified_base 22: mod_base = OTHER; note = 2'-Omethylguanosine
  modified_base 23: mod_base = OTHER; note = 2'-Omethylcytosine
  modified_base 24: mod_base = OTHER; note = 2'-Omethylguanosine
  modified_base 25: mod_base = OTHER; note = 2'-Omethylcytosine
  modified_base 49: mod_base = OTHER; note = 2'-Omethylcytosine
  modified_base 50: mod_base = OTHER; note = 2'-Omethylcytosine
  modified_base 51: mod_base = OTHER; note = 2'-Omethylguanosine
  modified_base 52: mod_base = OTHER; note = 2'-Omethylguanosine
  modified_base 53: mod_base = OTHER; note = 2'-Omethylguanosine
  modified_base 61: mod_base = OTHER; note = 2'-Omethylcytosine
  modified_base 62: mod_base = OTHER; note = 2'-Omethylcytosine
  modified_base 63: mod_base = OTHER; note = 2'-fluorocytosine
  modified_base 64: mod_base = OTHER; note = 2'-Omethylguanosine
  modified_base 65: mod_base = OTHER; note = 2'-Omethylguanosine
  modified_base 66: mod_base = OTHER; note = 2'-Omethylcytosine
  modified_base 67: mod_base = OTHER; note = 2'-Omethylguanosine
  modified_base 68: mod_base = OTHER; note = 2'-Omethylguanosine
  modified_base 69: mod_base = OTHER; note = 2'-Omethyladenosine
  modified_base 71: mod_base = OTHER; note = 2'-Omethyluridine
  modified_base 72: mod_base = OTHER; note = 2'-Omethylcytosine

SEQ ID NO: 5824 - RNA, 76 nt, synthetic construct; identical to SEQ ID NO: 3332
  source 1..76: mol_type = other RNA
  modified_base 1: mod_base = OTHER; note = 2'-Omethylguanosine
  modified_base 17: mod_base = OTHER; note = 2'-Omethylguanosine
  modified_base 18: mod_base = OTHER; note = 2'-Omethylguanosine
  modified_base 50: mod_base = OTHER; note = 2'-Omethylcytosine
  modified_base 52: mod_base = OTHER; note = 2'-Omethylguanosine
  modified_base 73: mod_base = OTHER; note = 2'-Omethylguanosine

SEQ ID NO: 5825 - RNA, 76 nt, synthetic construct; identical to SEQ ID NO: 3318
  source 1..76: mol_type = other RNA
  modified_base 1: mod_base = OTHER; note = 2'-Omethylcytosine
  modified_base 9: mod_base = OTHER; note = Adenosine phosphorothiorate
  modified_base 10: mod_base = OTHER; note = 2'-Omethylguanosine
  modified_base 13: mod_base = OTHER; note = 2'-Omethylcytosine
  modified_base 18: mod_base = OTHER; note = Guanosine phosphorothiorate
  modified_base 19: mod_base = OTHER; note = 2'-Omethylguanosine
  modified_base 20: mod_base = OTHER; note = Uridine phosphorothiorate
  modified_base 25: mod_base = OTHER; note = 2'-Omethylcytosine
  modified_base 29: mod_base = OTHER; note = 2'-Omethylguanosine
  modified_base 33: mod_base = OTHER; note = 2'-fluorouridine
  modified_base 35: mod_base = OTHER; note = Uridine phosphorothiorate
  modified_base 37: mod_base = OTHER; note = Guanosine phosphorothiorate
  modified_base 38: mod_base = OTHER; note = Adenosine phosphorothiorate
  modified_base 41: mod_base = OTHER; note = 2'-fluorocytosine
  modified_base 43: mod_base = OTHER; note = 2'-Omethyluridine
  modified_base 44: mod_base = OTHER; note = 2'-fluoroadenosine
  modified_base 46: mod_base = OTHER; note = Guanosine phosphorothiorate
  modified_base 50: mod_base = OTHER; note = 2'-Omethylcytosine
  modified_base 52: mod_base = OTHER; note = 2'-Omethylguanosine
  modified_base 54: mod_base = OTHER; note = Uridine phosphorothiorate
  modified_base 55: mod_base = OTHER; note = Uridine phosphorothiorate
  modified_base 56: mod_base = OTHER; note = 2'-Omethylcytosine
  modified_base 57: mod_base = OTHER; note = Guanosine phosphorothiorate
  modified_base 62: mod_base = OTHER; note = 2'-Omethylcytosine
  modified_base 63: mod_base = OTHER; note = 2'-fluoroguanosine
  modified_base 65: mod_base = OTHER; note = 2'-Omethylcytosine
  modified_base 71: mod_base = OTHER; note = 2'-Omethylguanosine
  modified_base 73: mod_base = OTHER; note = 2'-Omethyladenosine

SEQ ID NO: 5826 - RNA, 85 nt, synthetic construct; identical to SEQ ID NO: 3286
  source 1..85: mol_type = other RNA
  modified_base 1: mod_base = OTHER; note = 2'-fluorocytosine
  modified_base 11: mod_base = OTHER; note = Cytosine phosphorothiorate
  modified_base 25: mod_base = OTHER; note = 2'-fluoroguanosine
  modified_base 29: mod_base = OTHER; note = 2'-fluoroguanosine
  modified_base 49: mod_base = OTHER; note = 2'-Omethyluridine
  modified_base 54: mod_base = OTHER; note = 2'-Omethylcytosine
  modified_base 57: mod_base = OTHER; note = 2'-Omethylcytosine
  modified_base 59: mod_base = OTHER; note = 2'-Omethyluridine
  modified_base 84: mod_base = OTHER; note = 2'-Omethylcytosine

SEQ ID NO: 5827 - RNA, 86 nt, synthetic construct; identical to SEQ ID NO: 3290
  source 1..86: mol_type = other RNA
  modified_base 57: mod_base = OTHER; note = 2'-Omethylguanosine

SEQ ID NO: 5828 - RNA, 74 nt, synthetic construct; identical to SEQ ID NO: 3293
  source 1..74: mol_type = other RNA
  modified_base 1: mod_base = OTHER; note = 2'-fluoroadenosine
  modified_base 4: mod_base = OTHER; note = 2'-Omethyluridine
  modified_base 8: mod_base = OTHER; note = 2'-fluoroguanosine
  modified_base 24: mod_base = OTHER; note = 2'-Omethylguanosine
  modified_base 39: mod_base = OTHER; note = Adenosine phosphorothiorate
  modified_base 48: mod_base = OTHER; note = Cytosine phosphorothiorate
  modified_base 51: mod_base = OTHER; note = 2'-fluoroguanosine
  modified_base 73: mod_base = OTHER; note = Cytosine phosphorothiorate

SEQ ID NO: 5829 - RNA, 76 nt, synthetic construct; identical to SEQ ID NO: 3325
  source 1..76: mol_type = other RNA
  modified_base 1: mod_base = OTHER; note = 2'-Omethyluridine
  modified_base 2: mod_base = OTHER; note = 2'-Omethyladenosine
  modified_base 3: mod_base = OTHER; note = 2'-Omethylcytosine
  modified_base 4: mod_base = OTHER; note = 2'-Omethyladenosine
  modified_base 5: mod_base = OTHER; note = 2'-Omethylcytosine
  modified_base 6: mod_base = OTHER; note = 2'-Omethylcytosine
  modified_base 14: mod_base = OTHER; note = 2'-Omethyladenosine
  modified_base 15: mod_base = OTHER; note = 2'-Omethyladenosine
  modified_base 16: mod_base = OTHER; note = 2'-Omethyluridine
  modified_base 17: mod_base = OTHER; note = 2'-Omethylguanosine
  modified_base 18: mod_base = OTHER; note = 2'-Omethylguanosine
  modified_base 20: mod_base = OTHER; note = 2'-Omethyluridine
  modified_base 25: mod_base = OTHER; note = 2'-Omethylcytosine
  modified_base 41: mod_base = OTHER; note = 2'-Omethylcytosine
  modified_base 42: mod_base = OTHER; note = 2'-Omethyladenosine
  modified_base 43: mod_base = OTHER; note = 2'-Omethyladenosine
  modified_base 44: mod_base = OTHER; note = 2'-Omethyladenosine
  modified_base 49: mod_base = OTHER; note = 2'-Omethylcytosine
  modified_base 50: mod_base = OTHER; note = 2'-Omethylcytosine
  modified_base 52: mod_base = OTHER; note = 2'-Omethylguanosine
  modified_base 54: mod_base = OTHER; note = 2'-Omethyluridine
  modified_base 55: mod_base = OTHER; note = Uridine phosphorothiorate
  modified_base 56: mod_base = OTHER; note = 2'-Omethylcytosine
  modified_base 57: mod_base = OTHER; note = 2'-fluoroguanosine
  modified_base 59: mod_base = OTHER; note = 2'-Omethylguanosine
  modified_base 61: mod_base = OTHER; note = 2'-Omethylcytosine
  modified_base 62: mod_base = OTHER; note = 2'-Omethylcytosine
  modified_base 63: mod_base = OTHER; note = 2'-fluorocytosine
  modified_base 64: mod_base = OTHER; note = 2'-Omethylguanosine
  modified_base 65: mod_base = OTHER; note = 2'-Omethylguanosine
  modified_base 73: mod_base = OTHER; note = 2'-Omethylguanosine

SEQ ID NO: 5830 - RNA, 76 nt, synthetic construct; identical to SEQ ID NO: 3332
  source 1..76: mol_type = other RNA
  modified_base 1: mod_base = OTHER; note = 2'-Omethylguanosine phosphorothiorate
  modified_base 2: mod_base = OTHER; note = 2'-Omethylguanosine phosphorothiorate
  modified_base 13: mod_base = OTHER; note = 2'-fluorocytosine
  modified_base 14: mod_base = OTHER; note = 2'-fluoroadenosine
  modified_base 54: mod_base = OTHER; note = 2'-fluorouridine
  modified_base 59: mod_base = OTHER; note = 2'-Omethylguanosine
  modified_base 75: mod_base = OTHER; note = Cytosine phosphorothiorate
  modified_base 76: mod_base = OTHER; note = 2'-Omethyladenosine

SEQ ID NO: 5831 - RNA, 76 nt, synthetic construct; identical to SEQ ID NO: 625
  source 1..76: mol_type = other RNA
  modified_base 1: mod_base = OTHER; note = 2'-Omethylguanosine phosphorothiorate
  modified_base 2: mod_base = OTHER; note = 2'-Omethylguanosine
  modified_base 3: mod_base = OTHER; note = 2'-Omethylcytosine
  modified_base 4: mod_base = OTHER; note = 2'-Omethyluridine
  modified_base 5: mod_base = OTHER; note = 2'-Omethylcytosine
  modified_base 6: mod_base = OTHER; note = 2'-Omethylcytosine
  modified_base 13: mod_base = OTHER; note = 2'-Omethylcytosine
  modified_base 17: mod_base = OTHER; note = 2'-Omethylguanosine
  modified_base 33: mod_base = OTHER; note = 2'-fluorouridine
  modified_base 35: mod_base = OTHER; note = Cytosine phosphorothiorate
  modified_base 37: mod_base = OTHER; note = Adenosine phosphorothiorate
  modified_base 38: mod_base = OTHER; note = Adenosine phosphorothiorate
  modified_base 49: mod_base = OTHER; note = 2'-Omethylcytosine
  modified_base 50: mod_base = OTHER; note = 2'-Omethylcytosine
  modified_base 51: mod_base = OTHER; note = 2'-Omethylguanosine
  modified_base 52: mod_base = OTHER; note = 2'-Omethylguanosine
  modified_base 53: mod_base = OTHER; note = 2'-Omethylguanosine
  modified_base 56: mod_base = OTHER; note = 2'-Omethylcytosine
  modified_base 57: mod_base = OTHER; note = 2'-Omethylguanosine
  modified_base 61: mod_base = OTHER; note = 2'-Omethylcytosine
  modified_base 62: mod_base = OTHER; note = 2'-Omethylcytosine
  modified_base 63: mod_base = OTHER; note = 2'-fluorocytosine
  modified_base 64: mod_base = OTHER; note = 2'-Omethylguanosine
  modified_base 65: mod_base = OTHER; note = 2'-Omethylguanosine
  modified_base 66: mod_base = OTHER; note = 2'-Omethylcytosine
  modified_base 67: mod_base = OTHER; note = 2'-Omethylguanosine
  modified_base 68: mod_base = OTHER; note = 2'-Omethylguanosine
  modified_base 69: mod_base = OTHER; note = 2'-fluoroadenosine
  modified_base 71: mod_base = OTHER; note = 2'-Omethyluridine
  modified_base 73: mod_base = OTHER; note = 2'-Omethylguanosine
  modified_base 75: mod_base = OTHER; note = 2'-fluorocytosine phosphorothiorate

SEQ ID NO: 5832 - RNA, 76 nt, synthetic construct; identical to SEQ ID NO: 625
  source 1..76: mol_type = other RNA
  modified_base 1: mod_base = OTHER; note = 2'-Omethylguanosine
  modified_base 2: mod_base = OTHER; note = 2'-Omethylguanosine
  modified_base 3: mod_base = OTHER; note = 2'-Omethylcytosine
  modified_base 4: mod_base = OTHER; note = 2'-Omethyluridine
  modified_base 5: mod_base = OTHER; note = 2'-Omethylcytosine phosphorothiorate
  modified_base 6: mod_base = OTHER; note = 2'-Omethylcytosine
  modified_base 13: mod_base = OTHER; note = 2'-Omethylcytosine
  modified_base 14: mod_base = OTHER; note = 2'-Omethyladenosine
  modified_base 18: mod_base = OTHER; note = 2'-fluoroguanosine phosphorothiorate
  modified_base 19: mod_base = OTHER; note = 2'-fluoroadenosine phosphorothiorate
  modified_base 20: mod_base = OTHER; note = Uridine phosphorothiorate
  modified_base 21: mod_base = OTHER; note = 2'-fluoroadenosine phosphorothiorate
  modified_base 22: mod_base = OTHER; note = 2'-Omethylguanosine
  modified_base 24: mod_base = OTHER; note = 2'-Omethylguanosine phosphorothiorate
  modified_base 25: mod_base = OTHER; note = 2'-Omethylcytosine
  modified_base 26: mod_base = OTHER; note = Adenosine phosphorothiorate
  modified_base 30: mod_base = OTHER; note = 2'-fluoroguanosine phosphorothiorate
  modified_base 31: mod_base = OTHER; note = 2'-Omethyladenosine phosphorothiorate
  modified_base 33: mod_base = OTHER; note = 2'-Omethyluridine phosphorothiorate
  modified_base 35: mod_base = OTHER; note = 2'-Omethylcytosine phosphorothiorate
  modified_base 37: mod_base = OTHER; note = Adenosine phosphorothiorate
  modified_base 38: mod_base = OTHER; note = 2'-Omethyladenosine phosphorothiorate
  modified_base 39: mod_base = OTHER; note = 2'-Omethyluridine phosphorothiorate
  modified_base 41: mod_base = OTHER; note = 2'-Omethylcytosine
  modified_base 42: mod_base = OTHER; note = Adenosine phosphorothiorate
  modified_base 43: mod_base = OTHER; note = Adenosine phosphorothiorate
  modified_base 44: mod_base = OTHER; note = 2'-Omethyladenosine
  modified_base 49: mod_base = OTHER; note = 2'-Omethylcytosine
  modified_base 50: mod_base = OTHER; note = 2'-Omethylcytosine
  modified_base 53: mod_base = OTHER; note = 2'-Omethylguanosine
  modified_base 54: mod_base = OTHER; note = Uridine phosphorothiorate
  modified_base 55: mod_base = OTHER; note = Uridine phosphorothiorate
  modified_base 59: mod_base = OTHER; note = 2'-Omethylguanosine
  modified_base 61: mod_base = OTHER; note = 2'-Omethylcytosine
  modified_base 62: mod_base = OTHER; note = 2'-Omethylcytosine
  modified_base 63: mod_base = OTHER; note = 2'-Omethylcytosine
  modified_base 64: mod_base = OTHER; note = 2'-Omethylguanosine phosphorothiorate
  modified_base 65: mod_base = OTHER; note = 2'-Omethylguanosine phosphorothiorate
  modified_base 66: mod_base = OTHER; note = 2'-fluorocytosine phosphorothiorate
  modified_base 67: mod_base = OTHER; note = 2'-fluoroguanosine
  modified_base 68: mod_base = OTHER; note = 2'-Omethylguanosine phosphorothiorate
  modified_base 69: mod_base = OTHER; note = 2'-fluoroadenosine
  modified_base 73: mod_base = OTHER; note = 2'-Omethylguanosine
  modified_base 74: mod_base = OTHER; note = 2'-fluorocytosine
  modified_base 75: mod_base = OTHER; note = 2'-fluorocytosine phosphorothiorate
  modified_base 76: mod_base = OTHER; note = 2'-Omethyladenosine

SEQ ID NO: 5833 - RNA, 75 nt, synthetic construct; identical to SEQ ID NO: 3306
  source 1..75: mol_type = other RNA
  modified_base 1: mod_base = OTHER; note = 2'-Omethylguanosine
  modified_base 2: mod_base = OTHER; note = 2'-Omethyladenosine
  modified_base 3: mod_base = OTHER; note = 2'-Omethylcytosine
  modified_base 4: mod_base = OTHER; note = 2'-Omethylcytosine
  modified_base 5: mod_base = OTHER; note = 2'-Omethyluridine
  modified_base 6: mod_base = OTHER; note = 2'-Omethylcytosine
  modified_base 10: mod_base = OTHER; note = 2'-Omethylguanosine
  modified_base 11: mod_base = OTHER; note = 2'-Omethylcytosine
  modified_base 12: mod_base = OTHER; note = 2'-Omethylguanosine
  modified_base 13: mod_base = OTHER; note = 2'-Omethylcytosine
  modified_base 16: mod_base = OTHER; note = 2'-Omethylcytosine
  modified_base 17: mod_base = OTHER; note = 2'-Omethylguanosine
  modified_base 18: mod_base = OTHER; note = 2'-Omethylguanosine
  modified_base 24: mod_base = OTHER; note = 2'-Omethylcytosine
  modified_base 32: mod_base = OTHER; note = 2'-fluorouridine
  modified_base 34: mod_base = OTHER; note = Uridine phosphorothiorate
  modified_base 36: mod_base = OTHER; note = Guanosine phosphorothiorate
  modified_base 37: mod_base = OTHER; note = Adenosine phosphorothiorate
  modified_base 40: mod_base = OTHER; note = 2'-fluoroadenosine
  modified_base 41: mod_base = OTHER; note = 2'-Omethylguanosine
  modified_base 42: mod_base = OTHER; note = 2'-Omethyladenosine
  modified_base 43: mod_base = OTHER; note = 2'-fluoroadenosine
  modified_base 48: mod_base = OTHER; note = 2'-Omethylguanosine
  modified_base 49: mod_base = OTHER; note = 2'-Omethylcytosine
  modified_base 51: mod_base = OTHER; note = 2'-Omethyluridine
  modified_base 53: mod_base = OTHER; note = 2'-Omethyluridine
  modified_base 54: mod_base = OTHER; note = Uridine phosphorothiorate
  modified_base 55: mod_base = OTHER; note = 2'-Omethylcytosine
  modified_base 56: mod_base = OTHER; note = 2'-fluoroadenosine
  modified_base 58: mod_base = OTHER; note = 2'-Omethyladenosine
  modified_base 60: mod_base = OTHER; note = 2'-Omethylcytosine
  modified_base 64: mod_base = OTHER; note = 2'-Omethyluridine
  modified_base 72: mod_base = OTHER; note = 2'-Omethyladenosine

SEQ ID NO: 5834 - RNA, 76 nt, synthetic construct; identical to SEQ ID NO: 625
  source 1..76: mol_type = other RNA
  modified_base 1: mod_base = OTHER; note = 2'-fluoroguanosine
  modified_base 2: mod_base = OTHER; note = 2'-fluoroguanosine
  modified_base 8: mod_base = OTHER; note = Uridine phosphorothiorate
  modified_base 13: mod_base = OTHER; note = 2'-fluorocytosine
  modified_base 14: mod_base = OTHER; note = 2'-Omethyladenosine
  modified_base 16: mod_base = OTHER; note = 2'-Omethyluridine
  modified_base 23: mod_base = OTHER; note = Cytosine phosphorothiorate
  modified_base 24: mod_base = OTHER; note = 2'-Omethylguanosine
  modified_base 25: mod_base = OTHER; note = 2'-Omethylcytosine
  modified_base 27: mod_base = OTHER; note = Uridine phosphorothiorate
  modified_base 32: mod_base = OTHER; note = 2'-fluorocytosine
  modified_base 33: mod_base = OTHER; note = Uridine phosphorothiorate
  modified_base 34: mod_base = OTHER; note = 2'-Omethyluridine
  modified_base 38: mod_base = OTHER; note = 2'-fluoroadenosine
  modified_base 40: mod_base = OTHER; note = 2'-fluorouridine phosphorothiorate
  modified_base 43: mod_base = OTHER; note = Adenosine phosphorothiorate
  modified_base 44: mod_base = OTHER; note = 2'-Omethyladenosine
  modified_base 46: mod_base = OTHER; note = 2'-fluoroguanosine phosphorothiorate
  modified_base 47: mod_base = OTHER; note = 2'-Omethyluridine
  modified_base 49: mod_base = OTHER; note = 2'-Omethylcytosine phosphorothiorate
  modified_base 50: mod_base = OTHER; note = 2'-fluorocytosine
  modified_base 53: mod_base = OTHER; note = Guanosine phosphorothiorate
  modified_base 54: mod_base = OTHER; note = Uridine phosphorothiorate
  modified_base 56: mod_base = OTHER; note = 2'-Omethylcytosine
  modified_base 58: mod_base = OTHER; note = Adenosine phosphorothiorate
  modified_base 59: mod_base = OTHER; note = 2'-fluoroguanosine
  modified_base 62: mod_base = OTHER; note = Cytosine phosphorothiorate
  modified_base 63: mod_base = OTHER; note = 2'-Omethylcytosine
  modified_base 65: mod_base = OTHER; note = 2'-Omethylguanosine
  modified_base 69: mod_base = OTHER; note = 2'-Omethyladenosine
  modified_base 70: mod_base = OTHER; note = Guanosine phosphorothiorate
  modified_base 72: mod_base = OTHER; note = Cytosine phosphorothiorate
  modified_base 75: mod_base = OTHER; note = 2'-fluorocytosine phosphorothiorate
  modified_base 76: mod_base = OTHER; note = 2'-Omethyladenosine

SEQ ID NO: 5835 - RNA, 76 nt, synthetic construct; identical to SEQ ID NO: 625
  source 1..76: mol_type = other RNA
  modified_base 4: mod_base = OTHER; note = Uridine phosphorothiorate
  modified_base 10: mod_base = OTHER; note = 2'-fluoroguanosine phosphorothiorate
  modified_base 11: mod_base = OTHER; note = Cytosine phosphorothiorate
  modified_base 12: mod_base = OTHER; note = 2'-Omethylguanosine
  modified_base 15: mod_base = OTHER; note = 2'-fluoroadenosine
  modified_base 18: mod_base = OTHER; note = 2'-fluoroguanosine
  modified_base 20: mod_base = OTHER; note = 2'-fluorouridine
  modified_base 22: mod_base = OTHER; note = 2'-fluoroguanosine
  modified_base 23: mod_base = OTHER; note = 2'-Omethylcytosine
  modified_base 24: mod_base = OTHER; note = 2'-Omethylguanosine
  modified_base 25: mod_base = OTHER; note = Cytosine phosphorothiorate
  modified_base 26: mod_base = OTHER; note = 2'-Omethyladenosine
  modified_base 29: mod_base = OTHER; note = 2'-fluoroguanosine
  modified_base 33: mod_base = OTHER; note = Uridine phosphorothiorate
  modified_base 36: mod_base = OTHER; note = Adenosine phosphorothiorate
  modified_base 42: mod_base = OTHER; note = 2'-fluoroadenosine
  modified_base 45: mod_base = OTHER; note = 2'-Omethylguanosine phosphorothiorate
  modified_base 46: mod_base = OTHER; note = 2'-Omethylguanosine
  modified_base 47: mod_base = OTHER; note = 2'-fluorouridine
  modified_base 48: mod_base = OTHER; note = 2'-fluorouridine
  modified_base 52: mod_base = OTHER; note = 2'-fluoroguanosine phosphorothiorate
  modified_base 54: mod_base = OTHER; note = Uridine phosphorothiorate
  modified_base 56: mod_base = OTHER; note = 2'-Omethylcytosine phosphorothiorate
  modified_base 60: mod_base = OTHER; note = 2'-fluorouridine
  modified_base 62: mod_base = OTHER; note = Cytosine phosphorothiorate
  modified_base 63: mod_base = OTHER; note = 2'-fluorocytosine
  modified_base 64: mod_base = OTHER; note = 2'-Omethylguanosine
  modified_base 67: mod_base = OTHER; note = 2'-Omethylguanosine
  modified_base 68: mod_base = OTHER; note = 2'-fluoroguanosine
  modified_base 70: mod_base = OTHER; note = 2'-fluoroguanosine
  modified_base 72: mod_base = OTHER; note = 2'-Omethylcytosine phosphorothiorate
  modified_base 73: mod_base = OTHER; note = 2'-Omethylguanosine

SEQ ID NO: 5836 - RNA, 76 nt, synthetic construct; identical to SEQ ID NO: 625
  source 1..76: mol_type = other RNA
  modified_base 1: mod_base = OTHER; note = Guanosine phosphorothiorate
  modified_base 2: mod_base = OTHER; note = 2'-fluoroguanosine
  modified_base 5: mod_base = OTHER; note = 2'-Omethylcytosine
  modified_base 6: mod_base = OTHER; note = 2'-Omethylcytosine phosphorothiorate
  modified_base 7: mod_base = OTHER; note = Guanosine phosphorothiorate
  modified_base 11: mod_base = OTHER; note = 2'-Omethylcytosine
  modified_base 13: mod_base = OTHER; note = Cytosine phosphorothiorate
  modified_base 14: mod_base = OTHER; note = 2'-Omethyladenosine
  modified_base 16: mod_base = OTHER; note = 2'-fluorouridine
  modified_base 18: mod_base = OTHER; note = 2'-Omethylguanosine
  modified_base 22: mod_base = OTHER; note = 2'-fluoroguanosine
  modified_base 23: mod_base = OTHER; note = 2'-Omethylcytosine phosphorothiorate
  modified_base 24: mod_base = OTHER; note = 2'-fluoroguanosine
  modified_base 27: mod_base = OTHER; note = 2'-Omethyluridine phosphorothiorate
  modified_base 29: mod_base = OTHER; note = 2'-fluoroguanosine
  modified_base 32: mod_base = OTHER; note = 2'-fluorocytosine
  modified_base 34: mod_base = OTHER; note = 2'-fluorouridine
  modified_base 37: mod_base = OTHER; note = Adenosine phosphorothiorate
  modified_base 38: mod_base = OTHER; note = 2'-Omethyladenosine
  modified_base 42: mod_base = OTHER; note = 2'-Omethyladenosine
  modified_base 44: mod_base = OTHER; note = 2'-Omethyladenosine
  modified_base 45: mod_base = OTHER; note = Guanosine phosphorothiorate
  modified_base 46: mod_base = OTHER; note = 2'-fluoroguanosine
  modified_base 48: mod_base = OTHER; note = 2'-Omethyluridine
  modified_base 49: mod_base = OTHER; note = 2'-fluorocytosine
  modified_base 52: mod_base = OTHER; note = 2'-fluoroguanosine
  modified_base 53: mod_base = OTHER; note = 2'-Omethylguanosine
  modified_base 58: mod_base = OTHER; note = 2'-fluoroadenosine
  modified_base 59: mod_base = OTHER; note = Guanosine phosphorothiorate
  modified_base 62: mod_base = OTHER; note = 2'-Omethylcytosine
  modified_base 63: mod_base = OTHER; note = Cytosine phosphorothiorate
  modified_base 64: mod_base = OTHER; note = 2'-Omethylguanosine
  modified_base 65: mod_base = OTHER; note = Guanosine phosphorothiorate
  modified_base 66: mod_base = OTHER; note = 2'-fluorocytosine
  modified_base 68: mod_base = OTHER; note = 2'-Omethylguanosine
  modified_base 69: mod_base = OTHER; note = 2'-Omethyladenosine
  modified_base 70: mod_base = OTHER; note = 2'-Omethylguanosine
  modified_base 71: mod_base = OTHER; note = 2'-Omethyluridine
  modified_base 72: mod_base = OTHER; note = Cytosine phosphorothiorate
  modified_base 73: mod_base = OTHER; note = 2'-Omethylguanosine
  modified_base 76: mod_base = OTHER; note = 2'-Omethyladenosine

SEQ ID NO: 5837 - RNA, 76 nt, synthetic construct; identical to SEQ ID NO: 3490
  source 1..76: mol_type = other RNA
  modified_base 1: mod_base = OTHER; note = 2'-Omethylguanosine phosphorothiorate
  modified_base 2: mod_base = OTHER; note = 2'-Omethylguanosine phosphorothiorate
  modified_base 3: mod_base = OTHER; note = 2'-Omethylcytosine
  modified_base 4: mod_base = OTHER; note = 2'-Omethyluridine
  modified_base 5: mod_base = OTHER; note = 2'-Omethylcytosine
  modified_base 6: mod_base = OTHER; note = 2'-Omethylcytosine
  modified_base 10: mod_base = OTHER; note = 2'-Omethylguanosine
  modified_base 11: mod_base = OTHER; note = 2'-Omethylcytosine
  modified_base 12: mod_base = OTHER; note = 2'-Omethylguanosine
  modified_base 13: mod_base = OTHER; note = 2'-Omethylcytosine
  modified_base 17: mod_base = OTHER; note = 2'-Omethylguanosine
  modified_base 18: mod_base = OTHER; note = 2'-Omethylguanosine
  modified_base 22: mod_base = OTHER; note = 2'-Omethylguanosine
  modified_base 23: mod_base = OTHER; note = 2'-Omethylcytosine
  modified_base 24: mod_base = OTHER; note = 2'-Omethylguanosine
  modified_base 25: mod_base = OTHER; note = 2'-Omethylcytosine
  modified_base 33: mod_base = OTHER; note = 2'-fluorouridine
  modified_base 35: mod_base = OTHER; note = Cytosine phosphorothiorate
  modified_base 37: mod_base = OTHER; note = Adenosine phosphorothiorate
  modified_base 38: mod_base = OTHER; note = Adenosine phosphorothiorate
  modified_base 41: mod_base = OTHER; note = 2'-fluorocytosine
  modified_base 42: mod_base = OTHER; note = 2'-Omethyladenosine
  modified_base 43: mod_base = OTHER; note = 2'-Omethyladenosine
  modified_base 44: mod_base = OTHER; note = 2'-fluoroadenosine
  modified_base 49: mod_base = OTHER; note = 2'-Omethylguanosine
  modified_base 50: mod_base = OTHER; note = 2'-Omethylcytosine
  modified_base 51: mod_base = OTHER; note = 2'-Omethylguanosine
  modified_base 52: mod_base = OTHER; note = 2'-Omethylguanosine
  modified_base 53: mod_base = OTHER; note = 2'-Omethylguanosine
  modified_base 54: mod_base = OTHER; note = Uridine phosphorothiorate
  modified_base 55: mod_base = OTHER; note = Uridine phosphorothiorate
  modified_base 61: mod_base = OTHER; note = 2'-Omethylcytosine
  modified_base 62: mod_base = OTHER; note = 2'-Omethylcytosine
  modified_base 63: mod_base = OTHER; note = 2'-fluorocytosine
  modified_base 64: mod_base = OTHER; note = 2'-Omethylguanosine
  modified_base 65: mod_base = OTHER; note = 2'-Omethylcytosine
  modified_base 66: mod_base = OTHER; note = 2'-Omethylcytosine
  modified_base 67: mod_base = OTHER; note = 2'-Omethylguanosine
  modified_base 68: mod_base = OTHER; note = 2'-Omethylguanosine
  modified_base 73: mod_base = OTHER; note = 2'-Omethylguanosine

SEQ ID NO: 5838 - RNA, 86 nt, synthetic construct; identical to SEQ ID NO: 3290
  source 1..86: mol_type = other RNA
  modified_base 4: mod_base = OTHER; note = Adenosine phosphorothiorate

SEQ ID NO: 5839 - RNA, 76 nt, synthetic construct; identical to SEQ ID NO: 3295
  source 1..76: mol_type = other RNA
  modified_base 1: mod_base = OTHER; note = 2'-Omethylcytosine
  modified_base 2: mod_base = OTHER; note = 2'-Omethylcytosine phosphorothiorate
  modified_base 3: mod_base = OTHER; note = 2'-Omethyluridine phosphorothiorate
  modified_base 4: mod_base = OTHER; note = 2'-fluorouridine
  modified_base 5: mod_base = OTHER; note = 2'-fluorocytosine phosphorothiorate
  modified_base 8: mod_base = OTHER; note = 2'-Omethyluridine phosphorothiorate
  modified_base 9: mod_base = OTHER; note = 2'-fluoroadenosine phosphorothiorate
  modified_base 10: mod_base = OTHER; note = 2'-fluoroguanosine phosphorothiorate
  modified_base 12: mod_base = OTHER; note = 2'-fluorouridine phosphorothiorate
  modified_base 14: mod_base = OTHER; note = 2'-fluoroadenosine phosphorothiorate
  modified_base 16: mod_base = OTHER; note = 2'-fluorouridine phosphorothiorate
  modified_base 17: mod_base = OTHER; note = 2'-Omethyluridine
  modified_base 25: mod_base = OTHER; note = 2'-fluorocytosine phosphorothiorate
  modified_base 37: mod_base = OTHER; note = 2'-Omethylguanosine
  modified_base 40: mod_base = OTHER; note = 2'-fluorocytosine
  modified_base 42: mod_base = OTHER; note = 2'-fluorouridine
  modified_base 43: mod_base = OTHER; note = 2'-fluorouridine phosphorothiorate
  modified_base 48: mod_base = OTHER; note = 2'-Omethylcytosine phosphorothiorate
  modified_base 52: mod_base = OTHER; note = 2'-Omethylguanosine
  modified_base 53: mod_base = OTHER; note = 2'-Omethylguanosine
  modified_base 59: mod_base = OTHER; note = Adenosine phosphorothiorate
  modified_base 74: mod_base = OTHER; note = 2'-fluorocytosine
  modified_base 75: mod_base = OTHER; note = Cytosine phosphorothiorate

SEQ ID NO: 5840 - DNA, 76 bp, synthetic construct; identical to SEQ ID NO: 1924
  source 1..76: mol_type = other DNA
  modified_base 1: mod_base = OTHER; note = 2'-Omethylguanosine phosphorothiorate
  modified_base 2: mod_base = OTHER; note = 2'-Omethylguanosine
  modified_base 3: mod_base = OTHER; note = 2'-fluorocytosine phosphorothiorate
  modified_base 10: mod_base = OTHER; note = Guanosine phosphorothiorate
  modified_base 14: mod_base = OTHER; note = 2'-O-(2-Methoxyethyl) adenosine phosphorothiorate
  modified_base 16: mod_base = OTHER; note = 2'-O-(2-Methoxyethyl) thymine
  modified_base 17: mod_base = OTHER; note = 2'-O-(2-Methoxyethyl) guanosine phosphorothiorate
  modified_base 18: mod_base = OTHER; note = 2'-fluoroguanosine phosphorothiorate
  modified_base 19: mod_base = OTHER; note = 2'-O-(2-Methoxyethyl) adenosine
  modified_base 26: mod_base = OTHER; note = Adenosine phosphorothiorate
  modified_base 27: mod_base = OTHER; note = 2'-Omethyluridine
  modified_base 28: mod_base = OTHER; note = 2'-fluorouridine
  modified_base 29: mod_base = OTHER; note = deoxyguanosine phosphorothiorate
  modified_base 31: mod_base = OTHER; note = Adenosine phosphorothiorate
  modified_base 32: mod_base = OTHER; note = 2'-O-(2-Methoxyethyl) 5-methylcytosine
  modified_base 36: mod_base = OTHER; note = Adenosine phosphorothiorate
  modified_base 37: mod_base = OTHER; note = 2'-fluoroadenosine
  modified_base 38: mod_base = OTHER; note = Adenosine phosphorothiorate
  modified_base 39: mod_base = OTHER; note = 2'-Omethyluridine
  modified_base 41: mod_base = OTHER; note = 2'-fluorocytosine
  modified_base 44: mod_base = OTHER; note = 2'-Omethyladenosine
  modified_base 45: mod_base = OTHER; note = Guanosine phosphorothiorate
  modified_base 46: mod_base = OTHER; note = 2'-fluoroguanosine phosphorothiorate
  modified_base 47: mod_base = OTHER; note = 2'-Omethyluridine phosphorothiorate
  modified_base 50: mod_base = OTHER; note = Cytosine phosphorothiorate
  modified_base 51: mod_base = OTHER; note = Guanosine phosphorothiorate
  modified_base 52: mod_base = OTHER; note = 2'-O-(2-Methoxyethyl) guanosine
  modified_base 54: mod_base = OTHER; note = 2'-fluorouridine
  modified_base 55: mod_base = OTHER; note = Uridine phosphorothiorate
  modified_base 60: mod_base = OTHER; note = Uridine phosphorothiorate
  modified_base 61: mod_base = OTHER; note = 2'-O-(2-Methoxyethyl) 5-methylcytosine
  modified_base 65: mod_base = OTHER; note = 2'-O-(2-Methoxyethyl) guanosine
  modified_base 66: mod_base = OTHER; note = 2'-O-(2-Methoxyethyl) 5-methylcytosine
  modified_base 72: mod_base = OTHER; note = Cytosine phosphorothiorate
  modified_base 73: mod_base = OTHER; note = 2'-fluoroguanosine
  modified_base 74: mod_base = OTHER; note = Cytosine phosphorothiorate
  modified_base 75: mod_base = OTHER; note = deoxycytosine phosphorothiorate
  modified_base 76: mod_base = OTHER; note = 2'-Omethyladenosine
  misc_feature 1..3: note = RNA
  misc_feature 4: note = DNA
  misc_feature 5..10: note = RNA
  misc_feature 11: note = DNA
  misc_feature 12..14: note = RNA
  misc_feature 15: note = DNA
  misc_feature 16..28: note = RNA
  misc_feature 29: note = DNA
  misc_feature 30..47: note = RNA
  misc_feature 48: note = DNA
  misc_feature 49..58: note = RNA
  misc_feature 59: note = DNA
  misc_feature 60..67: note = RNA
  misc_feature 68: note = DNA
  misc_feature 69..74: note = RNA
  misc_feature 75: note = DNA
  misc_feature 76: note = RNA

SEQ ID NO: 5841 - RNA, 76 nt, synthetic construct; identical to SEQ ID NO: 3490
  source 1..76: mol_type = other RNA
  modified_base 1: mod_base = OTHER; note = 2'-Omethylguanosine phosphorothiorate
  modified_base 2: mod_base = OTHER; note = 2'-Omethylguanosine phosphorothiorate
  modified_base 74: mod_base = OTHER; note = Cytosine phosphorothiorate
  modified_base 75: mod_base = OTHER; note = 2'-Omethylcytosine

SEQ ID NO: 5842 - RNA, 73 nt, synthetic construct; identical to SEQ ID NO: 935
  source 1..73: mol_type = other RNA
  modified_base 1: mod_base = OTHER; note = 2'-Omethylguanosine phosphorothiorate
  modified_base 2: mod_base = OTHER; note = 2'-Omethylguanosine phosphorothiorate
  modified_base 72: mod_base = OTHER; note = Cytosine phosphorothiorate

SEQ ID NO: 5843 - RNA, 76 nt, synthetic construct; identical to SEQ ID NO: 625
  source 1..76: mol_type = other RNA
  modified_base 4: mod_base = OTHER; note = 2'-Omethyluridine
  modified_base 6: mod_base = OTHER; note = 2'-Omethylcytosine
  modified_base 9: mod_base = OTHER; note = Guanosine phosphorothiorate
  modified_base 11: mod_base = OTHER; note = Cytosine phosphorothiorate
  modified_base 13: mod_base = OTHER; note = 2'-fluorocytosine
  modified_base 16: mod_base = OTHER; note = 2'-fluorouridine
  modified_base 17: mod_base = OTHER; note = 2'-Omethylguanosine
  modified_base 23: mod_base = OTHER; note = 2'-fluorocytosine
  modified_base 25: mod_base = OTHER; note = 2'-fluorocytosine
  modified_base 26: mod_base = OTHER; note = 2'-fluoroadenosine
  modified_base 29: mod_base = OTHER; note = 2'-fluoroguanosine phosphorothiorate
  modified_base 30: mod_base = OTHER; note = 2'-Omethylguanosine
  modified_base 36: mod_base = OTHER; note = Adenosine phosphorothiorate
  modified_base 38: mod_base = OTHER; note = Adenosine phosphorothiorate
  modified_base 39: mod_base = OTHER; note = 2'-Omethyluridine phosphorothiorate
  modified_base 40: mod_base = OTHER; note = 2'-Omethyluridine
  modified_base 41: mod_base = OTHER; note = 2'-fluorocytosine phosphorothiorate
  modified_base 43: mod_base = OTHER; note = Adenosine phosphorothiorate
  modified_base 45: mod_base = OTHER; note = Guanosine phosphorothiorate
  modified_base 46: mod_base = OTHER; note = 2'-Omethylguanosine
  modified_base 47: mod_base = OTHER; note = 2'-fluorouridine
  modified_base 49: mod_base = OTHER; note = Cytosine phosphorothiorate
  modified_base 50: mod_base = OTHER; note = 2'-fluorocytosine
  modified_base 52: mod_base = OTHER; note = 2'-Omethylguanosine
  modified_base 55: mod_base = OTHER; note = Uridine phosphorothiorate
  modified_base 57: mod_base = OTHER; note = 2'-Omethylguanosine
  modified_base 59: mod_base = OTHER; note = 2'-Omethylguanosine
  modified_base 62: mod_base = OTHER; note = Cytosine phosphorothiorate
  modified_base 63: mod_base = OTHER; note = 2'-Omethylcytosine
  modified_base 64: mod_base = OTHER; note = 2'-fluoroguanosine
  modified_base 68: mod_base = OTHER; note = 2'-Omethylguanosine
  modified_base 73: mod_base = OTHER; note = 2'-fluoroguanosine
  modified_base 74: mod_base = OTHER; note = Cytosine phosphorothiorate
  modified_base 75: mod_base = OTHER; note = 2'-Omethylcytosine
  modified_base 76: mod_base = OTHER; note = 2'-Omethyladenosine

SEQ ID NO: 5844 - RNA, 85 nt, synthetic construct; identical to SEQ ID NO: 3286
  source 1..85: mol_type = other RNA
  modified_base 1: mod_base = OTHER; note = 2'-Omethylcytosine
  modified_base 36: mod_base = OTHER; note = 2'-Omethylguanosine
  modified_base 56: mod_base = OTHER; note = 2'-Omethylguanosine
  modified_base 58: mod_base = OTHER; note = 2'-Omethylguanosine
  modified_base 64: mod_base = OTHER; note = Uridine phosphorothiorate

SEQ ID NO: 5845 - DNA, 76 bp, synthetic construct; identical to SEQ ID NO: 1924
  source 1..76: mol_type = other DNA
  modified_base 1: mod_base = OTHER; note = 2'-Omethylguanosine phosphorothiorate
  modified_base 3: mod_base = OTHER; note = 2'-O-(2-Methoxyethyl) 5-methylcytosine
  modified_base 9: mod_base = OTHER; note = Guanosine phosphorothiorate
  modified_base 10: mod_base = OTHER; note = Guanosine phosphorothiorate
  modified_base 11: mod_base = OTHER; note = 2'-O-(2-Methoxyethyl) 5-methylcytosine
  modified_base 14: mod_base = OTHER; note = 2'-O-(2-Methoxyethyl) adenosine
  modified_base 17: mod_base = OTHER; note = Guanosine phosphorothiorate
  modified_base 23: mod_base = OTHER; note = 2'-O-(2-Methoxyethyl) 5-methylcytosine
  modified_base 24: mod_base = OTHER; note = Guanosine phosphorothiorate
  modified_base 25: mod_base = OTHER; note = 2'-fluorocytosine
  modified_base 27: mod_base = OTHER; note = 2'-fluorouridine
  modified_base 28: mod_base = OTHER; note = 2'-fluorouridine
  modified_base 29: mod_base = OTHER; note = 2'-fluoroguanosine phosphorothiorate
  modified_base 30: mod_base = OTHER; note = 2'-O-(2-Methoxyethyl) guanosine
  modified_base 31: mod_base = OTHER; note = Adenosine phosphorothiorate
  modified_base 32: mod_base = OTHER; note = 2'-Omethylcytosine phosphorothiorate
  modified_base 33: mod_base = OTHER; note = 2'-fluorouridine
  modified_base 36: mod_base = OTHER; note = Adenosine phosphorothiorate
  modified_base 40: mod_base = OTHER; note = 2'-O-(2-Methoxyethyl) thymine
  modified_base 41: mod_base = OTHER; note = Cytosine phosphorothiorate
  modified_base 42: mod_base = OTHER; note = 2'-fluoroadenosine
  modified_base 46: mod_base = OTHER; note = Guanosine phosphorothiorate
  modified_base 49: mod_base = OTHER; note = 2'-Omethylcytosine phosphorothiorate
  modified_base 50: mod_base = OTHER; note = 2'-fluorocytosine
  modified_base 54: mod_base = OTHER; note = 2'-fluorouridine phosphorothiorate
  modified_base 55: mod_base = OTHER; note = 2'-Omethyluridine
  modified_base 56: mod_base = OTHER; note = 2'-fluorocytosine phosphorothiorate
  modified_base 57: mod_base = OTHER; note = 2'-O-(2-Methoxyethyl) guanosine
  modified_base 58: mod_base = OTHER; note = Adenosine phosphorothiorate
  modified_base 61: mod_base = OTHER; note = Cytosine phosphorothiorate
  modified_base 62: mod_base = OTHER; note = 2'-Omethylcytosine
  modified_base 66: mod_base = OTHER; note = Cytosine phosphorothiorate
  modified_base 71: mod_base = OTHER; note = deoxyuridine phosphorothiorate
  modified_base 72: mod_base = OTHER; note = 2'-fluorocytosine
  modified_base 74: mod_base = OTHER; note = Cytosine phosphorothiorate
  modified_base 75: mod_base = OTHER; note = 2'-Omethylcytosine phosphorothiorate
  misc_feature 1..17: note = RNA
  misc_feature 18: note = DNA
  misc_feature 19..58: note = RNA
  misc_feature 59..60: note = DNA
  misc_feature 61..69: note = RNA
  misc_feature 70..71: note = DNA
  misc_feature 72..76: note = RNA

SEQ ID NO: 5846 - RNA, 75 nt, synthetic construct; identical to SEQ ID NO: 1045
  source 1..75: mol_type = other RNA
  modified_base 2: mod_base = OTHER; note = 2'-Omethylguanosine phosphorothiorate
  modified_base 12: mod_base = OTHER; note = Guanosine phosphorothiorate
  modified_base 23: mod_base = OTHER; note = 2'-fluorocytosine
  modified_base 30: mod_base = OTHER; note = 2'-Omethylguanosine
  modified_base 31: mod_base = OTHER; note = 2'-Omethyladenosine
  modified_base 40: mod_base = OTHER; note = 2'-Omethylcytosine
  modified_base 46: mod_base = OTHER; note = 2'-fluoroadenosine
  modified_base 52: mod_base = OTHER; note = 2'-fluoroguanosine phosphorothiorate
  modified_base 57: mod_base = OTHER; note = 2'-fluoroadenosine phosphorothiorate
  modified_base 61: mod_base = OTHER; note = 2'-fluorouridine
  modified_base 65: mod_base = OTHER; note = Uridine phosphorothiorate
  modified_base 66: mod_base = OTHER; note = Guanosine phosphorothiorate
  modified_base 73: mod_base = OTHER; note = Cytosine phosphorothiorate
  modified_base 74: mod_base = OTHER; note = Cytosine phosphorothiorate

SEQ ID NO: 5847 - RNA, 76 nt, synthetic construct; identical to SEQ ID NO: 625
  source 1..76: mol_type = other RNA
  modified_base 1: mod_base = OTHER; note = 2'-Omethylguanosine phosphorothiorate
  modified_base 2: mod_base = OTHER; note = 2'-Omethylguanosine
  modified_base 33: mod_base = OTHER; note = 2'-fluorouridine
  modified_base 35: mod_base = OTHER; note = Cytosine phosphorothiorate
  modified_base 37: mod_base = OTHER; note = Adenosine phosphorothiorate
  modified_base 38: mod_base = OTHER; note = Adenosine phosphorothiorate
  modified_base 52: mod_base = OTHER; note = 2'-fluoroguanosine
  modified_base 56: mod_base = OTHER; note = 2'-Omethylcytosine
  modified_base 62: mod_base = OTHER; note = 2'-Omethylcytosine
  modified_base 63: mod_base = OTHER; note = 2'-fluorocytosine
  modified_base 68: mod_base = OTHER; note = 2'-Omethylguanosine
  modified_base 73: mod_base = OTHER; note = 2'-Omethylguanosine
  modified_base 75: mod_base = OTHER; note = 2'-fluorocytosine phosphorothiorate

SEQ ID NO: 5848 - RNA, 75 nt, synthetic construct; identical to SEQ ID NO: 1045
  source 1..75: mol_type = other RNA
  modified_base 1: mod_base = OTHER; note = 2'-fluoroguanosine
  modified_base 3: mod_base = OTHER; note = Uridine phosphorothiorate
  modified_base 12: mod_base = OTHER; note = 2'-fluoroguanosine
  modified_base 14: mod_base = OTHER; note = 2'-fluoroadenosine
  modified_base 21: mod_base = OTHER; note = Adenosine phosphorothiorate
  modified_base 22: mod_base = OTHER; note = 2'-fluoroguanosine
  modified_base 29: mod_base = OTHER; note = 2'-fluoroguanosine
  modified_base 45: mod_base = OTHER; note = 2'-fluoroguanosine
  modified_base 55: mod_base = OTHER; note = 2'-Omethylcytosine
  modified_base 59: mod_base = OTHER; note = Uridine phosphorothiorate
  modified_base 64: mod_base = OTHER; note = Guanosine phosphorothiorate
  modified_base 66: mod_base = OTHER; note = Guanosine phosphorothiorate
  modified_base 68: mod_base = OTHER; note = Adenosine phosphorothiorate
  modified_base 72: mod_base = OTHER; note = Uridine phosphorothiorate
  modified_base 73: mod_base = OTHER; note = Cytosine phosphorothiorate
  modified_base 74: mod_base = OTHER; note = 2'-fluorocytosine phosphorothiorate

SEQ ID NO: 5849 - RNA, 83 nt, synthetic construct
  source 1..83: mol_type = other RNA
  modified_base 1: mod_base = OTHER; note = 2'-Omethylguanosine
  modified_base 17: mod_base = OTHER; note = 2'-Omethylguanosine
  modified_base 18: mod_base = OTHER; note = 2'-Omethylguanosine
  modified_base 59: mod_base = OTHER; note = 2'-Omethylcytosine
  modified_base 61: mod_base = OTHER; note = 2'-Omethylguanosine
  modified_base 82: mod_base = OTHER; note = 2'-Omethylguanosine
gctgtgatggccgagtggttaaggcgttggacttcaaatccaatggggtctccccgcgcaggttcgaatcctgctcacagcgc

SEQ ID NO: 5850 - RNA, 85 nt, synthetic construct; identical to SEQ ID NO: 3317
  source 1..85: mol_type = other RNA
  modified_base 1: mod_base = OTHER; note = 2'-Omethylguanosine phosphorothiorate
  modified_base 2: mod_base = OTHER; note = 2'-Omethylcytosine
  modified_base 3: mod_base = OTHER; note = 2'-Omethyluridine
  modified_base 5: mod_base = OTHER; note = 2'-Omethyluridine phosphorothiorate
  modified_base 14: mod_base = OTHER; note = 2'-Omethyladenosine phosphorothiorate
  modified_base 20: mod_base = OTHER; note = Uridine phosphorothiorate
  modified_base 27: mod_base = OTHER; note = 2'-fluorouridine phosphorothiorate
  modified_base 33: mod_base = OTHER; note = 2'-fluorouridine
  modified_base 37: mod_base = OTHER; note = 2'-Omethyladenosine
  modified_base 41: mod_base = OTHER; note = 2'-Omethylcytosine phosphorothiorate
  modified_base 44: mod_base = OTHER; note = 2'-Omethyluridine
  modified_base 46: mod_base = OTHER; note = 2'-Omethylguanosine
  modified_base 49: mod_base = OTHER; note = 2'-Omethyluridine phosphorothiorate
  modified_base 52: mod_base = OTHER; note = 2'-Omethylcytosine phosphorothiorate
  modified_base 57: mod_base = OTHER; note = 2'-Omethylcytosine
  modified_base 59: mod_base = OTHER; note = 2'-Omethylcytosine
  modified_base 71: mod_base = OTHER; note = 2'-fluorocytosine
  modified_base 73: mod_base = OTHER; note = 2'-fluoroguanosine
  modified_base 74: mod_base = OTHER; note = 2'-fluorocytosine
  modified_base 82: mod_base = OTHER; note = Guanosine phosphorothiorate

SEQ ID NO: 5851 - RNA, 76 nt, synthetic construct; identical to SEQ ID NO: 625
  source 1..76: mol_type = other RNA
  modified_base 27: mod_base = OTHER; note = Thymine
  modified_base 28: mod_base = OTHER; note = Thymine
  modified_base 39: mod_base = OTHER; note = Thymine
  modified_base 40: mod_base = OTHER; note = Thymine
  modified_base 47: mod_base = OTHER; note = Thymine
  modified_base 48: mod_base = OTHER; note = Thymine

SEQ ID NO: 5852 - RNA, 76 nt, synthetic construct; identical to SEQ ID NO: 625
  source 1..76: mol_type = other RNA
  modified_base 1: mod_base = OTHER; note = 2'-Omethylguanosine phosphorothiorate
  modified_base 2: mod_base = OTHER; note = 2'-Omethylguanosine
  modified_base 3: mod_base = OTHER; note = 2'-Omethylcytosine
  modified_base 4: mod_base = OTHER; note = 2'-Omethyluridine
  modified_base 5: mod_base = OTHER; note = 2'-Omethylcytosine
  modified_base 6: mod_base = OTHER; note = 2'-Omethylcytosine
  modified_base 10: mod_base = OTHER; note = 2'-Omethylguanosine
  modified_base 11: mod_base = OTHER; note = 2'-Omethylcytosine
  modified_base 12: mod_base = OTHER; note = 2'-Omethylguanosine
  modified_base 13: mod_base = OTHER; note = 2'-Omethylcytosine
  modified_base 14: mod_base = OTHER; note = 2'-Omethyladenosine
  modified_base 15: mod_base = OTHER; note = 2'-Omethyladenosine
  modified_base 16: mod_base = OTHER; note = 2'-Omethyluridine
  modified_base 17: mod_base = OTHER; note = 2'-Omethylguanosine
  modified_base 18: mod_base = OTHER; note = 2'-Omethylguanosine
  modified_base 19: mod_base = OTHER; note = 2'-Omethyladenosine
  modified_base 20: mod_base = OTHER; note = 2'-Omethyluridine
  modified_base 22: mod_base = OTHER; note = 2'-Omethylguanosine
  modified_base 23: mod_base = OTHER; note = 2'-Omethylcytosine
  modified_base 24: mod_base = OTHER; note = 2'-Omethylguanosine
  modified_base 25: mod_base = OTHER; note = 2'-Omethylcytosine
  modified_base 40: mod_base = OTHER; note = 2'-fluorouridine
  modified_base 41: mod_base = OTHER; note = 2'-fluorocytosine
  modified_base 42: mod_base = OTHER; note = 2'-fluoroadenosine
  modified_base 43: mod_base = OTHER; note = 2'-fluoroadenosine
  modified_base 49: mod_base = OTHER; note = 2'-Omethylcytosine
  modified_base 50: mod_base = OTHER; note = 2'-Omethylcytosine
  modified_base 51: mod_base = OTHER; note = 2'-Omethylguanosine
  modified_base 52: mod_base = OTHER; note = 2'-Omethylguanosine
  modified_base 53: mod_base = OTHER; note = 2'-Omethylguanosine
  modified_base 61: mod_base = OTHER; note = 2'-Omethylcytosine
  modified_base 62: mod_base = OTHER; note = 2'-Omethylcytosine
  modified_base 63: mod_base = OTHER; note = 2'-fluorocytosine
  modified_base 64: mod_base = OTHER; note = 2'-Omethylguanosine
  modified_base 65: mod_base = OTHER; note = 2'-Omethylguanosine
  modified_base 66: mod_base = OTHER; note = 2'-Omethylcytosine
  modified_base 67: mod_base = OTHER; note = 2'-Omethylguanosine
  modified_base 68: mod_base = OTHER; note = 2'-Omethylguanosine
  modified_base 69: mod_base = OTHER; note = 2'-fluoroadenosine
  modified_base 71: mod_base = OTHER; note = 2'-Omethyluridine

SEQ ID NO: 5853 - RNA, 76 nt, synthetic construct; identical to SEQ ID NO: 625
  source 1..76: mol_type = other RNA
  modified_base 1: mod_base = OTHER; note = 2'-Omethylguanosine
  modified_base 10: mod_base = OTHER; note = 2'-Omethylguanosine
  modified_base 13: mod_base = OTHER; note = 2'-Omethylcytosine
  modified_base 17: mod_base = OTHER; note = Guanosine phosphorothiorate
  modified_base 18: mod_base = OTHER; note = 2'-Omethylguanosine
  modified_base 19: mod_base = OTHER; note = Adenosine phosphorothiorate
  modified_base 20: mod_base = OTHER; note = 2'-Omethyluridine
  modified_base 25: mod_base = OTHER; note = 2'-Omethylcytosine
  modified_base 29: mod_base = OTHER; note = 2'-Omethylguanosine
  modified_base 33: mod_base = OTHER; note = 2'-fluorouridine
  modified_base 35: mod_base = OTHER; note = Cytosine phosphorothiorate
  modified_base 37: mod_base = OTHER; note = Adenosine phosphorothiorate
  modified_base 38: mod_base = OTHER; note = Adenosine phosphorothiorate
  modified_base 41: mod_base = OTHER; note = 2'-fluorocytosine
  modified_base 43: mod_base = OTHER; note = 2'-Omethyladenosine
  modified_base 44: mod_base = OTHER; note = 2'-fluoroadenosine
  modified_base 46: mod_base = OTHER; note = 2'-Omethylguanosine phosphorothiorate
  modified_base 50: mod_base = OTHER; note = 2'-Omethylcytosine
  modified_base 52: mod_base = OTHER; note = 2'-Omethylguanosine
  modified_base 54: mod_base = OTHER; note = Uridine phosphorothiorate
  modified_base 55: mod_base = OTHER; note = Uridine phosphorothiorate
  modified_base 56: mod_base = OTHER; note = 2'-Omethylcytosine
  modified_base 57: mod_base = OTHER; note = Guanosine phosphorothiorate
  modified_base 62: mod_base = OTHER; note = 2'-Omethylcytosine
  modified_base 63: mod_base = OTHER; note = 2'-fluorocytosine
  modified_base 65: mod_base = OTHER; note = 2'-Omethylguanosine
  modified_base 71: mod_base = OTHER; note = 2'-Omethyluridine
  modified_base 73: mod_base = OTHER; note = 2'-Omethylguanosine

SEQ ID NO: 5854 - RNA, 75 nt, synthetic construct; identical to SEQ ID NO: 3336
  source 1..75: mol_type = other RNA
  modified_base 2: mod_base = OTHER; note = 2'-Omethylcytosine phosphorothiorate
  modified_base 20: mod_base = OTHER; note = 2'-fluoroadenosine
  modified_base 21: mod_base = OTHER; note = 2'-fluoroguanosine
  modified_base 28: mod_base = OTHER; note = 2'-Omethyladenosine phosphorothiorate
  modified_base 37: mod_base = OTHER; note = 2'-fluoroadenosine
  modified_base 53: mod_base = OTHER; note = 2'-Omethyluridine phosphorothiorate
  modified_base 62: mod_base = OTHER; note = 2'-fluorocytosine
  modified_base 74: mod_base = OTHER; note = Cytosine phosphorothiorate

SEQ ID NO: 5855 - RNA, 76 nt, synthetic construct; identical to SEQ ID NO: 625
  source 1..76: mol_type = other RNA
  modified_base 1: mod_base = OTHER; note = 2'-Omethylguanosine phosphorothiorate
  modified_base 2: mod_base = OTHER; note = 2'-Omethylguanosine
  modified_base 3: mod_base = OTHER; note = 2'-Omethylcytosine
  modified_base 4: mod_base = OTHER; note = 2'-Omethyluridine
  modified_base 5: mod_base = OTHER; note = 2'-Omethylcytosine
  modified_base 6: mod_base = OTHER; note = 2'-Omethylcytosine
  modified_base 12: mod_base = OTHER; note = 2'-Omethylguanosine
  modified_base 13: mod_base = OTHER; note = 2'-Omethylcytosine
  modified_base 14: mod_base = OTHER; note = 2'-Omethyladenosine
  modified_base 15: mod_base = OTHER; note = 2'-fluoroadenosine
  modified_base 16: mod_base = OTHER; note = 2'-fluorouridine
  modified_base 17: mod_base = OTHER; note = 2'-Omethylguanosine
  modified_base 18: mod_base = OTHER; note = 2'-Omethylguanosine
  modified_base 19: mod_base = OTHER; note = 2'-fluoroadenosine
  modified_base 20: mod_base = OTHER; note = 2'-Omethyluridine
  modified_base 33: mod_base = OTHER; note = 2'-fluorouridine
  modified_base 35: mod_base = OTHER; note = Cytosine phosphorothiorate
  modified_base 37: mod_base = OTHER; note = Adenosine phosphorothiorate
  modified_base 48: mod_base = OTHER; note = 2'-fluorouridine
  modified_base 49: mod_base = OTHER; note = 2'-Omethylcytosine
  modified_base 50: mod_base = OTHER; note = 2'-Omethylcytosine
  modified_base 51: mod_base = OTHER; note = 2'-Omethylguanosine
  modified_base 52: mod_base = OTHER; note = 2'-Omethylguanosine
  modified_base 53: mod_base = OTHER; note = 2'-Omethylguanosine
  modified_base 54: mod_base = OTHER; note = 2'-Omethyluridine
  modified_base 55: mod_base = OTHER; note = Uridine phosphorothiorate
  modified_base 56: mod_base = OTHER; note = 2'-Omethylcytosine
  modified_base 57: mod_base = OTHER; note = 2'-fluoroguanosine
  modified_base 59: mod_base = OTHER; note = 2'-Omethylguanosine
  modified_base 61: mod_base = OTHER; note = 2'-Omethylcytosine
  modified_base 62: mod_base = OTHER; note = 2'-Omethylcytosine
  modified_base 63: mod_base = OTHER; note = 2'-fluorocytosine
  modified_base 64: mod_base = OTHER; note = 2'-Omethylguanosine
  modified_base 65: mod_base = OTHER; note = 2'-Omethylguanosine
  modified_base 66: mod_base = OTHER; note = 2'-Omethylcytosine
  modified_base 67: mod_base = OTHER; note = 2'-Omethylguanosine
  modified_base 68: mod_base = OTHER; note = 2'-Omethylguanosine
  modified_base 73: mod_base = OTHER; note = 2'-Omethylguanosine
  modified_base 74: mod_base = OTHER; note = 2'-fluorocytosine phosphorothiorate
  modified_base 75: mod_base = OTHER; note = 2'-Omethylcytosine

SEQ ID NO: 5856 - RNA, 74 nt, synthetic construct; identical to SEQ ID NO: 3293
  source 1..74: mol_type = other RNA
  modified_base 1: mod_base = OTHER; note = 2'-Omethyladenosine
  modified_base 2: mod_base = OTHER; note = 2'-Omethylcytosine phosphorothiorate
  modified_base 7: mod_base = OTHER; note = 2'-fluorouridine
  modified_base 15: mod_base = OTHER; note = Cytosine phosphorothiorate
  modified_base 25: mod_base = OTHER; note = 2'-fluorouridine
  modified_base 39: mod_base = OTHER; note = Adenosine phosphorothiorate
  modified_base 46: mod_base = OTHER; note = 2'-fluorouridine
  modified_base 73: mod_base = OTHER; note = Cytosine phosphorothiorate
  modified_base 74: mod_base = OTHER; note = 2'-Omethyladenosine

SEQ ID NO: 5857 - RNA, 85 nt, synthetic construct; identical to SEQ ID NO: 3301
  source 1..85: mol_type = other RNA
  modified_base 1: mod_base = OTHER; note = 2'-Omethylguanosine phosphorothiorate
  modified_base 4: mod_base = OTHER; note = Guanosine phosphorothiorate
  modified_base 6: mod_base = OTHER; note = 2'-fluoroguanosine
  modified_base 10: mod_base = OTHER; note = 2'-Omethylguanosine phosphorothiorate
  modified_base 16: mod_base = OTHER; note = 2'-Omethyluridine phosphorothiorate
  modified_base 25: mod_base = OTHER; note = 2'-fluorocytosine
  modified_base 28: mod_base = OTHER; note = 2'-fluorouridine
  modified_base 29: mod_base = OTHER; note = 2'-fluoroguanosine
  modified_base 36: mod_base = OTHER; note = 2'-fluoroadenosine
  modified_base 46: mod_base = OTHER; note = Guanosine phosphorothiorate
  modified_base 48: mod_base = OTHER; note = 2'-Omethylguanosine phosphorothiorate
  modified_base 61: mod_base = OTHER; note = Guanosine phosphorothiorate
  modified_base 63: mod_base = OTHER; note = Uridine phosphorothiorate
  modified_base 81: mod_base = OTHER; note = Cytosine phosphorothiorate

SEQ ID NO: 5858 - RNA, 75 nt, synthetic construct; identical to SEQ ID NO: 1045
  source 1..75: mol_type = other RNA
  modified_base 1: mod_base = OTHER; note = 2'-Omethylguanosine phosphorothiorate
  modified_base 2: mod_base = OTHER; note = 2'-Omethylguanosine phosphorothiorate
  modified_base 3: mod_base = OTHER; note = 2'-Omethyluridine
  modified_base 5: mod_base = OTHER; note = 2'-Omethylcytosine phosphorothiorate
  modified_base 13: mod_base = OTHER; note = 2'-Omethyluridine
  modified_base 18: mod_base = OTHER; note = 2'-Omethylguanosine phosphorothiorate
  modified_base 53: mod_base = OTHER; note = 2'-fluorouridine
  modified_base 59: mod_base = OTHER; note = 2'-Omethyluridine phosphorothiorate
  modified_base 67: mod_base = OTHER; note = 2'-Omethylguanosine
  modified_base 69: mod_base = OTHER; note = 2'-fluoroadenosine
  modified_base 71: mod_base = OTHER; note = 2'-Omethylcytosine phosphorothiorate
  modified_base 72: mod_base = OTHER; note = 2'-Omethyluridine
  modified_base 73: mod_base = OTHER; note = Cytosine phosphorothiorate
  modified_base 74: mod_base = OTHER; note = 2'-Omethylcytosine phosphorothiorate

SEQ ID NO: 5859 - RNA, 76 nt, synthetic construct; identical to SEQ ID NO: 3318
  source 1..76: mol_type = other RNA
  modified_base 1: mod_base = OTHER; note = 2'-Omethylcytosine
  modified_base 61: mod_base = OTHER; note = 2'-Omethylcytosine
  modified_base 62: mod_base = OTHER; note = 2'-Omethylcytosine
  modified_base 63: mod_base = OTHER; note = 2'-fluoroguanosine
  modified_base 64: mod_base = OTHER; note = 2'-Omethylguanosine
  modified_base 65: mod_base = OTHER; note = 2'-Omethylcytosine
  modified_base 66: mod_base = OTHER; note = 2'-Omethyluridine
  modified_base 67: mod_base = OTHER; note = 2'-Omethylcytosine
  modified_base 68: mod_base = OTHER; note = 2'-Omethylguanosine
  modified_base 69: mod_base = OTHER; note = 2'-Omethyladenosine
  modified_base 70: mod_base = OTHER; note = 2'-fluoroadenosine
  modified_base 71: mod_base = OTHER; note = 2'-Omethylguanosine
  modified_base 72: mod_base = OTHER; note = 2'-Omethylguanosine
  modified_base 73: mod_base = OTHER; note = 2'-Omethyladenosine

SEQ ID NO: 5860 - RNA, 75 nt, synthetic construct; identical to SEQ ID NO: 1045
  source 1..75: mol_type = other RNA
  modified_base 1: mod_base = OTHER; note = 2'-fluoroguanosine phosphorothiorate
  modified_base 2: mod_base = OTHER; note = 2'-Omethylguanosine phosphorothiorate
  modified_base 12: mod_base = OTHER; note = 2'-fluoroguanosine
  modified_base 19: mod_base = OTHER; note = 2'-fluorouridine
  modified_base 22: mod_base = OTHER; note = 2'-fluoroguanosine phosphorothiorate
  modified_base 23: mod_base = OTHER; note = 2'-fluorocytosine
  modified_base 39: mod_base = OTHER; note = 2'-Omethyluridine
  modified_base 43: mod_base = OTHER; note = 2'-fluoroguanosine
  modified_base 59: mod_base = OTHER; note = Uridine phosphorothiorate
  modified_base 60: mod_base = OTHER; note = 2'-fluorocytosine
  modified_base 61: mod_base = OTHER; note = 2'-fluorouridine
  modified_base 65: mod_base = OTHER; note = Uridine phosphorothiorate
  modified_base 66: mod_base = OTHER; note = 2'-fluoroguanosine
  modified_base 73: mod_base = OTHER; note = 2'-fluorocytosine phosphorothiorate

SEQ ID NO: 5861 - RNA, 86 nt, synthetic construct; identical to SEQ ID NO: 3290
  source 1..86: mol_type = other RNA
  modified_base 75: mod_base = OTHER; note = 2'-Omethylcytosine

SEQ ID NO: 5862 - RNA, 86 nt, synthetic construct; identical to SEQ ID NO: 3290
  source 1..86: mol_type = other RNA
  modified_base 1: mod_base = OTHER; note = 2'-Omethyladenosine
  modified_base 19: mod_base = OTHER; note = 2'-Omethyluridine
  modified_base 20: mod_base = OTHER; note = 2'-Omethyluridine phosphorothiorate
  modified_base 21: mod_base = OTHER; note = 2'-fluoroadenosine
  modified_base 22: mod_base = OTHER; note = 2'-Omethyladenosine
  modified_base 40: mod_base = OTHER; note = 2'-fluorocytosine
  modified_base 41: mod_base = OTHER; note = 2'-Omethylcytosine
  modified_base 42: mod_base = OTHER; note = 2'-Omethyladenosine
  modified_base 43: mod_base = OTHER; note = 2'-Omethyladenosine
  modified_base 83: mod_base = OTHER; note = 2'-Omethyladenosine

SEQ ID NO: 5863 - RNA, 74 nt, synthetic construct; identical to SEQ ID NO: 766
  source 1..74: mol_type = other RNA
  modified_base 1: mod_base = OTHER; note = 2'-Omethylguanosine phosphorothiorate
  modified_base 2: mod_base = OTHER; note = 2'-Omethylguanosine
  modified_base 3: mod_base = OTHER; note = 2'-Omethylcytosine
  modified_base 4: mod_base = OTHER; note = 2'-Omethyluridine
  modified_base 5: mod_base = OTHER; note = 2'-Omethylcytosine
  modified_base 6: mod_base = OTHER; note = 2'-Omethylcytosine
  modified_base 14: mod_base = OTHER; note = 2'-Omethyladenosine
  modified_base 15: mod_base = OTHER; note = 2'-fluoroadenosine
  modified_base 16: mod_base = OTHER; note = 2'-Omethyluridine
  modified_base 17: mod_base = OTHER; note = 2'-Omethylguanosine
  modified_base 18: mod_base = OTHER; note = 2'-Omethylguanosine
  modified_base 19: mod_base = OTHER; note = 2'-fluoroadenosine
  modified_base 20: mod_base = OTHER; note = 2'-Omethyluridine
  modified_base 54: mod_base = OTHER; note = 2'-Omethyluridine
  modified_base 56: mod_base = OTHER; note = 2'-Omethylcytosine
  modified_base 57: mod_base = OTHER; note = 2'-fluoroguanosine
  modified_base 59: mod_base = OTHER; note = 2'-Omethylguanosine
  modified_base 73: mod_base = OTHER; note = 2'-Omethylguanosine phosphorothiorate

SEQ ID NO: 5864 - RNA, 76 nt, synthetic construct; identical to SEQ ID NO: 625
  source 1..76: mol_type = other RNA
  modified_base 6: mod_base = OTHER; note = 2'-Omethylcytosine
  modified_base 7: mod_base = OTHER; note = Guanosine phosphorothiorate
  modified_base 10: mod_base = OTHER; note = Guanosine phosphorothiorate
  modified_base 12: mod_base = OTHER; note = 2'-fluoroguanosine phosphorothiorate
  modified_base 13: mod_base = OTHER; note = 2'-Omethylcytosine
  modified_base 14: mod_base = OTHER; note = 2'-fluoroadenosine phosphorothiorate
  modified_base 15: mod_base = OTHER; note = 2'-fluoroadenosine
  modified_base 18: mod_base = OTHER; note = 2'-fluoroguanosine
  modified_base 21: mod_base = OTHER; note = Adenosine phosphorothiorate
  modified_base 22: mod_base = OTHER; note = 2'-Omethylguanosine
  modified_base 23: mod_base = OTHER; note = 2'-fluorocytosine phosphorothiorate
  modified_base 25: mod_base = OTHER; note = 2'-Omethylcytosine
  modified_base 30: mod_base = OTHER; note = 2'-Omethylguanosine phosphorothiorate
  modified_base 31: mod_base = OTHER; note = 2'-fluoroadenosine
  modified_base 33: mod_base = OTHER; note = 2'-fluorouridine
  modified_base 34: mod_base = OTHER; note = 2'-Omethyluridine phosphorothiorate
  modified_base 37: mod_base = OTHER; note = Adenosine phosphorothiorate
  modified_base 41: mod_base = OTHER; note = 2'-Omethylcytosine phosphorothiorate
  modified_base 42: mod_base = OTHER; note = 2'-Omethyladenosine
  modified_base 51: mod_base = OTHER; note = 2'-Omethylguanosine
  modified_base 52: mod_base = OTHER; note = Guanosine phosphorothiorate
  modified_base 54: mod_base = OTHER; note = 2'-fluorouridine
  modified_base 55: mod_base = OTHER; note = Uridine phosphorothiorate
  modified_base 57: mod_base = OTHER; note = 2'-fluoroguanosine
  modified_base 59: mod_base = OTHER; note = Guanosine phosphorothiorate
  modified_base 60: mod_base = OTHER; note = 2'-Omethyluridine phosphorothiorate
  modified_base 65: mod_base = OTHER; note = 2'-fluoroguanosine
  modified_base 66: mod_base = OTHER; note = 2'-Omethylcytosine
  modified_base 67: mod_base = OTHER; note = 2'-fluoroguanosine
  modified_base 68: mod_base = OTHER; note = 2'-Omethylguanosine phosphorothiorate
  modified_base 69: mod_base = OTHER; note = Adenosine phosphorothiorate
  modified_base 70: mod_base = OTHER; note = 2'-fluoroguanosine
  modified_base 71: mod_base = OTHER; note = 2'-fluorouridine
  modified_base 73: mod_base = OTHER; note = 2'-Omethylguanosine
  modified_base 76: mod_base = OTHER; note = 2'-Omethyladenosine

SEQ ID NO: 5865 - RNA, 76 nt, synthetic construct; identical to SEQ ID NO: 625
  source 1..76: mol_type = other RNA
  modified_base 2: mod_base = OTHER; note = 2'-Omethylguanosine
  modified_base 10: mod_base = OTHER; note = 2'-Omethylguanosine
  modified_base 11: mod_base = OTHER; note = 2'-Omethylcytosine
  modified_base 15: mod_base = OTHER; note = 2'-fluoroadenosine phosphorothiorate
  modified_base 17: mod_base = OTHER; note = 2'-Omethylguanosine
  modified_base 18: mod_base = OTHER; note = 2'-fluoroguanosine phosphorothiorate
  modified_base 19: mod_base = OTHER; note = Adenosine phosphorothiorate
  modified_base 20: mod_base = OTHER; note = 2'-Omethyluridine
  modified_base 22: mod_base = OTHER; note = 2'-fluoroguanosine
  modified_base 23: mod_base = OTHER; note = 2'-Omethylcytosine
  modified_base 27: mod_base = OTHER; note = 2'-fluorouridine
  modified_base 28: mod_base = OTHER; note = Uridine phosphorothiorate
  modified_base 29: mod_base = OTHER; note = 2'-fluoroguanosine
  modified_base 30: mod_base = OTHER; note = 2'-fluoroguanosine
  modified_base 38: mod_base = OTHER; note = 2'-fluoroadenosine
  modified_base 39: mod_base = OTHER; note = 2'-Omethyluridine phosphorothiorate
  modified_base 40: mod_base = OTHER; note = 2'-Omethyluridine phosphorothiorate
  modified_base 41: mod_base = OTHER; note = 2'-fluorocytosine
  modified_base 48: mod_base = OTHER; note = 2'-fluorouridine
  modified_base 49: mod_base = OTHER; note = Cytosine phosphorothiorate
  modified_base 50: mod_base = OTHER; note = 2'-fluorocytosine
  modified_base 52: mod_base = OTHER; note = 2'-Omethylguanosine
  modified_base 56: mod_base = OTHER; note = 2'-Omethylcytosine
  modified_base 59: mod_base = OTHER; note = 2'-Omethylguanosine
  modified_base 60: mod_base = OTHER; note = 2'-Omethyluridine
  modified_base 62: mod_base = OTHER; note = 2'-Omethylcytosine
  modified_base 63: mod_base = OTHER; note = 2'-Omethylcytosine
  modified_base 65: mod_base = OTHER; note = Guanosine phosphorothiorate
  modified_base 66: mod_base = OTHER; note = 2'-Omethylcytosine
  modified_base 68: mod_base = OTHER; note = 2'-fluoroguanosine
  modified_base 74: mod_base = OTHER; note = 2'-fluorocytosine phosphorothiorate
  modified_base 75: mod_base = OTHER; note = 2'-fluorocytosine
  modified_base 76: mod_base = OTHER; note = 2'-fluoroadenosine

SEQ ID NO: 5866 - RNA, 76 nt, synthetic construct; identical to SEQ ID NO: 625
  source 1..76: mol_type = other RNA
  modified_base 1: mod_base = OTHER; note = 2'-Omethylguanosine
  modified_base 10: mod_base = OTHER; note = 2'-Omethylguanosine
  modified_base 13: mod_base = OTHER; note = 2'-Omethylcytosine
  modified_base 17: mod_base = OTHER; note = Guanosine phosphorothiorate
  modified_base 18: mod_base = OTHER; note = 2'-Omethylguanosine
  modified_base 19: mod_base = OTHER; note = Adenosine phosphorothiorate
  modified_base 20: mod_base = OTHER; note = 2'-Omethyluridine
  modified_base 25: mod_base = OTHER; note = 2'-Omethylcytosine
  modified_base 29: mod_base = OTHER; note = 2'-Omethylguanosine
  modified_base 33: mod_base = OTHER; note = 2'-fluorouridine
  modified_base 35: mod_base = OTHER; note = Cytosine phosphorothiorate
  modified_base 37: mod_base = OTHER; note = Adenosine phosphorothiorate
  modified_base 38: mod_base = OTHER; note = Adenosine phosphorothiorate
  modified_base 41: mod_base = OTHER; note = 2'-fluorocytosine
  modified_base 43: mod_base = OTHER; note = 2'-Omethyladenosine
  modified_base 44: mod_base = OTHER; note = 2'-fluoroadenosine
  modified_base 46: mod_base = OTHER; note = Guanosine phosphorothiorate
  modified_base 50: mod_base = OTHER; note = 2'-Omethylcytosine
  modified_base 52: mod_base = OTHER; note = 2'-Omethylguanosine
  modified_base 54: mod_base = OTHER; note = Uridine phosphorothiorate
  modified_base 55: mod_base = OTHER; note = Uridine phosphorothiorate
  modified_base 56: mod_base = OTHER; note = 2'-Omethylcytosine
  modified_base 57: mod_base = OTHER; note = Guanosine phosphorothiorate
  modified_base 62: mod_base = OTHER; note = 2'-Omethylcytosine
  modified_base 65: mod_base = OTHER; note = 2'-Omethylguanosine
  modified_base 71: mod_base = OTHER; note = 2'-Omethyluridine
  modified_base 73: mod_base = OTHER; note = 2'-Omethylguanosine

SEQ ID NO: 5867 - RNA, 75 nt, synthetic construct; identical to SEQ ID NO: 3336
  source 1..75: mol_type = other RNA
  modified_base 4: mod_base = OTHER; note = 2'-Omethylguanosine
  modified_base 10: mod_base = OTHER; note = 2'-fluorocytosine
  modified_base 11: mod_base = OTHER; note = 2'-fluorouridine phosphorothiorate
  modified_base 18: mod_base = OTHER; note = 2'-fluoroguanosine
  modified_base 23: mod_base = OTHER; note = 2'-fluoroguanosine
  modified_base 26: mod_base = OTHER; note = 2'-Omethyluridine phosphorothiorate
  modified_base 28: mod_base = OTHER; note = 2'-fluoroadenosine
  modified_base 35: mod_base = OTHER; note = 2'-Omethyladenosine phosphorothiorate
  modified_base 38: mod_base = OTHER; note = Uridine phosphorothiorate
  modified_base 39: mod_base = OTHER; note = 2'-Omethylcytosine phosphorothiorate
  modified_base 40: mod_base = OTHER; note = 2'-fluorouridine
  modified_base 41: mod_base = OTHER; note = 2'-Omethylguanosine phosphorothiorate
  modified_base 47: mod_base = OTHER; note = 2'-fluorocytosine phosphorothiorate
  modified_base 53: mod_base = OTHER; note = 2'-Omethyluridine phosphorothiorate
  modified_base 62: mod_base = OTHER; note = 2'-fluorocytosine phosphorothiorate
  modified_base 72: mod_base = OTHER; note = Guanosine phosphorothiorate
  modified_base 73: mod_base = OTHER; note = Cytosine phosphorothiorate
  modified_base 75: mod_base = OTHER; note = 2'-fluoroadenosine

SEQ ID NO: 5868 - RNA, 76 nt, synthetic construct; identical to SEQ ID NO: 3295
  source 1..76: mol_type = other RNA
  modified_base 1: mod_base = OTHER; note = 2'-Omethylcytosine
  modified_base 2: mod_base = OTHER; note = 2'-fluorocytosine phosphorothiorate
  modified_base 3: mod_base = OTHER; note = 2'-Omethyluridine phosphorothiorate
  modified_base 5: mod_base = OTHER; note = 2'-fluorocytosine phosphorothiorate
  modified_base 9: mod_base = OTHER; note = 2'-fluoroadenosine
  modified_base 14: mod_base = OTHER; note = Adenosine phosphorothiorate
  modified_base 15: mod_base = OTHER; note = 2'-Omethylguanosine
  modified_base 18: mod_base = OTHER; note = 2'-fluoroguanosine phosphorothiorate
  modified_base 30: mod_base = OTHER; note = 2'-Omethylguanosine phosphorothiorate
  modified_base 37: mod_base = OTHER; note = 2'-fluoroguanosine phosphorothiorate
  modified_base 38: mod_base = OTHER; note = 2'-fluoroadenosine
  modified_base 39: mod_base = OTHER; note = Uridine phosphorothiorate
  modified_base 48: mod_base = OTHER; note = 2'-Omethylcytosine
  modified_base 52: mod_base = OTHER; note = 2'-Omethylguanosine phosphorothiorate
  modified_base 66: mod_base = OTHER; note = 2'-fluorouridine
  modified_base 74: mod_base = OTHER; note = 2'-Omethylcytosine phosphorothiorate
  modified_base 75: mod_base = OTHER; note = Cytosine phosphorothiorate

SEQ ID NO: 5869 - RNA, 86 nt, synthetic construct; identical to SEQ ID NO: 3290
  source 1..86: mol_type = other RNA
  modified_base 54: mod_base = OTHER; note = 2'-fluorouridine

SEQ ID NO: 5870 - RNA, 75 nt, synthetic construct; identical to SEQ ID NO: 3311
  source 1..75: mol_type = other RNA
  modified_base 1: mod_base = OTHER; note = 2'-Omethylguanosine phosphorothiorate
  modified_base 2: mod_base = OTHER; note = 2'-Omethylguanosine
  modified_base 11: mod_base = OTHER; note = 2'-fluorouridine phosphorothiorate
  modified_base 14: mod_base = OTHER; note = 2'-Omethyladenosine
  modified_base 15: mod_base = OTHER; note = Adenosine phosphorothiorate
  modified_base 21: mod_base = OTHER; note = 2'-fluoroadenosine
  modified_base 22: mod_base = OTHER; note = 2'-fluoroguanosine
  modified_base 23: mod_base = OTHER; note = Cytosine phosphorothiorate
  modified_base 33: mod_base = OTHER; note = 2'-Omethyluridine phosphorothiorate
  modified_base 38: mod_base = OTHER; note = 2'-fluoroadenosine
  modified_base 39: mod_base = OTHER; note = 2'-fluorouridine
  modified_base 41: mod_base = OTHER; note = 2'-fluorocytosine
  modified_base 42: mod_base = OTHER; note = 2'-fluoroadenosine
  modified_base 45: mod_base = OTHER; note = 2'-Omethylguanosine phosphorothiorate
  modified_base 58: mod_base = OTHER; note = 2'-fluoroguanosine
  modified_base 59: mod_base = OTHER; note = 2'-Omethyluridine
  modified_base 66: mod_base = OTHER; note = Guanosine phosphorothiorate
  modified_base 67: mod_base = OTHER; note = 2'-fluoroguanosine
  modified_base 74: mod_base = OTHER; note = Cytosine phosphorothiorate

SEQ ID NO: 5871 - RNA, 76 nt, synthetic construct
  source 1..76: mol_type = other RNA
ggccccgtggcgcaatggatagcgcattggacttcaaattcaaaggttccgggttcgaatcccggcggggtcgcca

SEQ ID NO: 5872 - RNA, 74 nt, synthetic construct; identical to SEQ ID NO: 3293
  source 1..74: mol_type = other RNA
  modified_base 2: mod_base = OTHER; note = Cytosine phosphorothiorate
  modified_base 3: mod_base = OTHER; note = Cytosine phosphorothiorate
  modified_base 4: mod_base = OTHER; note = 2'-fluorouridine
  modified_base 6: mod_base = OTHER; note = 2'-fluoroguanosine
  modified_base 8: mod_base = OTHER; note = Guanosine phosphorothiorate
  modified_base 10: mod_base = OTHER; note = Cytosine phosphorothiorate
  modified_base 12: mod_base = OTHER; note = 2'-fluorocytosine
  modified_base 22: mod_base = OTHER; note = Guanosine phosphorothiorate
  modified_base 27: mod_base = OTHER; note = 2'-fluorouridine
  modified_base 35: mod_base = OTHER; note = 2'-fluoroguanosine
  modified_base 43: mod_base = OTHER; note = 2'-fluoroguanosine
  modified_base 44: mod_base = OTHER; note = Guanosine phosphorothiorate
  modified_base 48: mod_base = OTHER; note = Cytosine phosphorothiorate
  modified_base 50: mod_base = OTHER; note = Uridine phosphorothiorate
  modified_base 51: mod_base = OTHER; note = 2'-fluoroguanosine
  modified_base 62: mod_base = OTHER; note = Guanosine phosphorothiorate
  modified_base 73: mod_base = OTHER; note = 2'-fluorocytosine phosphorothiorate

SEQ ID NO: 5873 - DNA, 76 bp, synthetic construct; identical to SEQ ID NO: 1924
  source 1..76: mol_type = other DNA
  modified_base 1: mod_base = OTHER; note = 2'-Omethylguanosine phosphorothiorate
  modified_base 2: mod_base = OTHER; note = 2'-Omethylguanosine phosphorothiorate
  modified_base 3: mod_base = OTHER; note = 2'-O-(2-Methoxyethyl) 5-methylcytosine
  modified_base 9: mod_base = OTHER; note = Guanosine phosphorothiorate
  modified_base 10: mod_base = OTHER; note = 2'-O-(2-Methoxyethyl) guanosine
  modified_base 14: mod_base = OTHER; note = 2'-O-(2-Methoxyethyl) adenosine
  modified_base 15: mod_base = OTHER; note = 2'-Omethyladenosine phosphorothiorate
  modified_base 16: mod_base = OTHER; note = 2'-fluorouridine
  modified_base 17: mod_base = OTHER; note = 2'-O-(2-Methoxyethyl) guanosine
  modified_base 19: mod_base = OTHER; note = Adenosine phosphorothiorate
  modified_base 23: mod_base = OTHER; note = Cytosine phosphorothiorate
  modified_base 26: mod_base = OTHER; note = 2'-O-(2-Methoxyethyl) adenosine
  modified_base 32: mod_base = OTHER; note = Cytosine phosphorothiorate
  modified_base 33: mod_base = OTHER; note = 2'-O-(2-Methoxyethyl) thymine phosphorothiorate
  modified_base 34: mod_base = OTHER; note = 2'-Omethyluridine
  modified_base 36: mod_base = OTHER; note = 2'-O-(2-Methoxyethyl) adenosine
  modified_base 38: mod_base = OTHER; note = 2'-O-(2-Methoxyethyl) adenosine
  modified_base 39: mod_base = OTHER; note = 2'-fluorouridine
  modified_base 42: mod_base = OTHER; note = 2'-O-(2-Methoxyethyl) adenosine phosphorothiorate
  modified_base 43: mod_base = OTHER; note = 2'-Omethyladenosine
  modified_base 44: mod_base = OTHER; note = 2'-fluoroadenosine
  modified_base 47: mod_base = OTHER; note = Uridine phosphorothiorate
  modified_base 48: mod_base = OTHER; note = 2'-O-(2-Methoxyethyl) thymine
  modified_base 49: mod_base = OTHER; note = 2'-Omethylcytosine
  modified_base 50: mod_base = OTHER; note = Cytosine phosphorothiorate
  modified_base 51: mod_base = OTHER; note = 2'-Omethylguanosine phosphorothiorate
  modified_base 52: mod_base = OTHER; note = 2'-fluoroguanosine phosphorothiorate
  modified_base 54: mod_base = OTHER; note = Uridine phosphorothiorate
  modified_base 55: mod_base = OTHER; note = Uridine phosphorothiorate
  modified_base 56: mod_base = OTHER; note = Cytosine phosphorothiorate
  modified_base 59: mod_base = OTHER; note = 2'-Omethylguanosine phosphorothiorate
  modified_base 60: mod_base = OTHER; note = 2'-Omethyluridine
  modified_base 67: mod_base = OTHER; note = 2'-O-(2-Methoxyethyl) guanosine phosphorothiorate
  modified_base 68: mod_base = OTHER; note = 2'-fluoroguanosine
  modified_base 72: mod_base = OTHER; note = 2'-O-(2-Methoxyethyl) 5-methylcytosine
  misc_feature 1..3: note = RNA
  misc_feature 4: note = DNA
  misc_feature 5..19: note = RNA
  misc_feature 20: note = DNA
  misc_feature 21: note = RNA
  misc_feature 22: note = DNA
  misc_feature 23..69: note = RNA
  misc_feature 70: note = DNA
  misc_feature 71..76: note = RNA

SEQ ID NO: 5874 - RNA, 86 nt, synthetic construct; identical to SEQ ID NO: 3290
  source 1..86: mol_type = other RNA
  modified_base 73: mod_base = OTHER; note = Cytosine phosphorothiorate

SEQ ID NO: 5875 - RNA, 76 nt, synthetic construct; identical to SEQ ID NO: 625
  source 1..76: mol_type = other RNA
  modified_base 1: mod_base = OTHER; note = 2'-Omethylguanosine
  modified_base 2: mod_base = OTHER; note = 2'-fluoroguanosine phosphorothiorate
  modified_base 10: mod_base = OTHER; note = 2'-Omethylguanosine
  modified_base 13: mod_base = OTHER; note = 2'-Omethylcytosine
  modified_base 17: mod_base = OTHER; note = Guanosine phosphorothiorate
  modified_base 18: mod_base = OTHER; note = 2'-Omethylguanosine
  modified_base 19: mod_base = OTHER; note = Adenosine phosphorothiorate
  modified_base 20: mod_base = OTHER; note = 2'-Omethyluridine
  modified_base 25: mod_base = OTHER; note = 2'-Omethylcytosine
  modified_base 29: mod_base = OTHER; note = 2'-Omethylguanosine
  modified_base 33: mod_base = OTHER; note = 2'-fluorouridine
  modified_base 35: mod_base = OTHER; note = Cytosine phosphorothiorate
  modified_base 37: mod_base = OTHER; note = Adenosine phosphorothiorate
  modified_base 38: mod_base = OTHER; note = Adenosine phosphorothiorate
  modified_base 41: mod_base = OTHER; note = 2'-fluorocytosine phosphorothiorate
  modified_base 43: mod_base = OTHER; note = 2'-Omethyladenosine
  modified_base 44: mod_base = OTHER; note = 2'-fluoroadenosine
  modified_base 50: mod_base = OTHER; note = 2'-Omethylcytosine
  modified_base 52: mod_base = OTHER; note = 2'-Omethylguanosine
  modified_base 54: mod_base = OTHER; note = Uridine phosphorothiorate
  modified_base 55: mod_base = OTHER; note = Uridine phosphorothiorate
  modified_base 56: mod_base = OTHER; note = 2'-Omethylcytosine
  modified_base 57: mod_base = OTHER; note = Guanosine phosphorothiorate
  modified_base 62: mod_base = OTHER; note = 2'-Omethylcytosine
  modified_base 63: mod_base = OTHER; note = 2'-fluorocytosine
  modified_base 65: mod_base = OTHER; note = 2'-Omethylguanosine
  modified_base 71: mod_base = OTHER; note = 2'-Omethyluridine
  modified_base 73: mod_base = OTHER; note = 2'-Omethylguanosine

SEQ ID NO: 5876 - RNA, 75 nt, synthetic construct; identical to SEQ ID NO: 3306
  source 1..75: mol_type = other RNA
  modified_base 1: mod_base = OTHER; note = 2'-Omethylguanosine
  modified_base 2: mod_base = OTHER; note = 2'-Omethyladenosine
  modified_base 3: mod_base = OTHER; note = 2'-Omethylcytosine
  modified_base 4: mod_base = OTHER; note = 2'-Omethylcytosine
  modified_base 5: mod_base = OTHER; note = 2'-Omethyluridine
  modified_base 6: mod_base = OTHER; note = 2'-Omethylcytosine
  modified_base 10: mod_base = OTHER; note = 2'-Omethylguanosine
  modified_base 11: mod_base = OTHER; note = 2'-Omethylcytosine
  modified_base 12: mod_base = OTHER; note = 2'-Omethylguanosine
  modified_base 13: mod_base = OTHER; note = 2'-Omethylcytosine
  modified_base 14: mod_base = OTHER; note = 2'-Omethyladenosine
  modified_base 15: mod_base = OTHER; note = 2'-fluoroadenosine
  modified_base 16: mod_base = OTHER; note = 2'-Omethylcytosine
  modified_base 17: mod_base = OTHER; note = 2'-Omethylguanosine
  modified_base 18: mod_base = OTHER; note = 2'-Omethylguanosine
  modified_base 19: mod_base = OTHER; note = 2'-fluorouridine
  modified_base 21: mod_base = OTHER; note = 2'-Omethylguanosine
  modified_base 22: mod_base = OTHER; note = 2'-Omethylcytosine
  modified_base 23: mod_base = OTHER; note = 2'-Omethylguanosine
  modified_base 24: mod_base = OTHER; note = 2'-Omethylcytosine
  modified_base 32: mod_base = OTHER; note = 2'-fluorouridine
  modified_base 34: mod_base = OTHER; note = Uridine phosphorothiorate
  modified_base 36: mod_base = OTHER; note = Guanosine phosphorothiorate
  modified_base 37: mod_base = OTHER; note = Adenosine phosphorothiorate
  modified_base 40: mod_base = OTHER; note = 2'-Omethyladenosine
  modified_base 41: mod_base = OTHER; note = 2'-Omethylguanosine
  modified_base 42: mod_base = OTHER; note = 2'-Omethyladenosine
  modified_base 43: mod_base = OTHER; note = 2'-Omethyladenosine
  modified_base 48: mod_base = OTHER; note = 2'-Omethylguanosine
  modified_base 49: mod_base = OTHER; note = 2'-Omethylcytosine
  modified_base 51: mod_base = OTHER; note = 2'-Omethyluridine
  modified_base 53: mod_base = OTHER; note = 2'-Omethyluridine
  modified_base 54: mod_base = OTHER; note = Uridine phosphorothiorate
  modified_base 55: mod_base = OTHER; note = 2'-Omethylcytosine
  modified_base 56: mod_base = OTHER; note = 2'-fluoroadenosine
  modified_base 58: mod_base = OTHER; note = 2'-Omethyladenosine
  modified_base 60: mod_base = OTHER; note = 2'-Omethylcytosine
  modified_base 64: mod_base = OTHER; note = 2'-Omethyluridine
  modified_base 72: mod_base = OTHER; note = 2'-Omethyladenosine

SEQ ID NO: 5877 - RNA, 85 nt, synthetic construct; identical to SEQ ID NO: 3317
  source 1..85: mol_type = other RNA
  modified_base 1: mod_base = OTHER; note = 2'-Omethylguanosine phosphorothiorate
  modified_base 2: mod_base = OTHER; note = Cytosine phosphorothiorate
  modified_base 18: mod_base = OTHER; note = Guanosine phosphorothiorate
  modified_base 24: mod_base = OTHER; note = 2'-fluoroguanosine
  modified_base 37: mod_base = OTHER; note = Adenosine phosphorothiorate
  modified_base 53: mod_base = OTHER; note = 2'-Omethylcytosine
  modified_base 82: mod_base = OTHER; note = 2'-Omethylguanosine phosphorothiorate

SEQ ID NO: 5878 - RNA, 85 nt, synthetic construct; identical to SEQ ID NO: 3297
  source 1..85: mol_type = other RNA
  modified_base 1: mod_base = OTHER; note = 2'-Omethylguanosine phosphorothiorate
  modified_base 2: mod_base = OTHER; note = 2'-Omethylcytosine
  modified_base 3: mod_base = OTHER; note = 2'-Omethyluridine
  modified_base 4: mod_base = OTHER; note = 2'-Omethylguanosine
  modified_base 5: mod_base = OTHER; note = 2'-Omethyluridine
  modified_base 6: mod_base = OTHER; note = 2'-Omethylguanosine
  modified_base 63: mod_base = OTHER; note = 2'-Omethyluridine phosphorothiorate
  modified_base 64: mod_base = OTHER; note = Uridine phosphorothiorate
  modified_base 65: mod_base = OTHER; note = 2'-Omethylcytosine
  modified_base 66: mod_base = OTHER; note = 2'-fluoroguanosine
  modified_base 67: mod_base = OTHER; note = Adenosine phosphorothiorate
  modified_base 68: mod_base = OTHER; note = 2'-Omethyladenosine
  modified_base 69: mod_base = OTHER; note = 2'-fluorouridine
  modified_base 82: mod_base = OTHER; note = 2'-Omethylguanosine

SEQ ID NO: 5879 - RNA, 86 nt, synthetic construct; identical to SEQ ID NO: 3290
  source 1..86: mol_type = other RNA
  modified_base 1: mod_base = OTHER; note = 2'-Omethyladenosine
  modified_base 62: mod_base = OTHER; note = 2'-Omethylguanosine

SEQ ID NO: 5880 - RNA, 75 nt, synthetic construct; identical to SEQ ID NO: 3336
  source 1..75: mol_type = other RNA
  modified_base 3: mod_base = OTHER; note = 2'-Omethyluridine phosphorothiorate
  modified_base 13: mod_base = OTHER; note = 2'-fluoroadenosine
  modified_base 16: mod_base = OTHER; note = Cytosine phosphorothiorate
  modified_base 22: mod_base = OTHER; note = 2'-Omethyladenosine
  modified_base 26: mod_base = OTHER; note = Uridine phosphorothiorate
  modified_base 27: mod_base = OTHER; note = 2'-fluorocytosine
  modified_base 28: mod_base = OTHER; note = 2'-fluoroadenosine
  modified_base 35: mod_base = OTHER; note = 2'-fluoroadenosine phosphorothiorate
  modified_base 40: mod_base = OTHER; note = 2'-fluorouridine
  modified_base 41: mod_base = OTHER; note = 2'-fluoroguanosine
  modified_base 46: mod_base = OTHER; note = 2'-fluorouridine
  modified_base 47: mod_base = OTHER; note = 2'-fluorocytosine
  modified_base 53: mod_base = OTHER; note = 2'-fluorouridine phosphorothiorate
  modified_base 57: mod_base = OTHER; note = 2'-fluoroadenosine phosphorothiorate
  modified_base 59: mod_base = OTHER; note = 2'-fluorouridine phosphorothiorate
  modified_base 64: mod_base = OTHER; note = 2'-fluoroguanosine phosphorothiorate
  modified_base 72: mod_base = OTHER; note = 2'-Omethylguanosine
  modified_base 74: mod_base = OTHER; note = Cytosine phosphorothiorate
  modified_base 75: mod_base = OTHER; note = 2'-fluoroadenosine

SEQ ID NO: 5881 - RNA, 76 nt, synthetic construct
  source 1..76: mol_type = other RNA
ggctcagtggcgcaatggatagcgctttggacttcaaattcaaaggttccgggttcgagtcccggctgagtcgcca

SEQ ID NO: 5882 - RNA, 85 nt, synthetic construct; identical to SEQ ID NO: 3297
  source 1..85: mol_type = other RNA
  modified_base 1: mod_base = OTHER; note = 2'-Omethylguanosine phosphorothiorate
  modified_base 3: mod_base = OTHER; note = Uridine phosphorothiorate
  modified_base 18: mod_base = OTHER; note = 2'-Omethylguanosine
  modified_base 20: mod_base = OTHER; note = 2'-Omethyluridine
  modified_base 47: mod_base = OTHER; note = 2'-Omethylguanosine
  modified_base 59: mod_base = OTHER; note = Cytosine phosphorothiorate
  modified_base 61: mod_base = OTHER; note = 2'-Omethylguanosine
  modified_base 82: mod_base = OTHER; note = 2'-Omethylguanosine

SEQ ID NO: 5883 - RNA, 76 nt, synthetic construct; identical to SEQ ID NO: 3289
  source 1..76: mol_type = other RNA
  modified_base 62: mod_base = OTHER; note = 2'-Omethylcytosine
  modified_base 63: mod_base = OTHER; note = 2'-Omethylcytosine

SEQ ID NO: 5884 - RNA, 76 nt, synthetic construct; identical to SEQ ID NO: 625
  source 1..76: mol_type = other RNA
  modified_base 1: mod_base = OTHER; note = 2'-Omethylguanosine phosphorothiorate
  modified_base 2: mod_base = OTHER; note = 2'-Omethylguanosine phosphorothiorate
  modified_base 3: mod_base = OTHER; note = 2'-Omethylcytosine
  modified_base 4: mod_base = OTHER; note = 2'-Omethyluridine
  modified_base 5: mod_base = OTHER; note = 2'-Omethylcytosine
  modified_base 6: mod_base = OTHER; note = 2'-Omethylcytosine
  modified_base 16: mod_base = OTHER; note = 2'-Omethyluridine
  modified_base 17: mod_base = OTHER; note = 2'-Omethylguanosine
  modified_base 18: mod_base = OTHER; note = 2'-Omethylguanosine
  modified_base 20: mod_base = OTHER; note = 2'-Omethyluridine
  modified_base 25: mod_base = OTHER; note = 2'-Omethylcytosine
  modified_base 33: mod_base = OTHER; note = 2'-fluorouridine
  modified_base 35: mod_base = OTHER; note = Cytosine phosphorothiorate
  modified_base 37: mod_base = OTHER; note = Adenosine phosphorothiorate
  modified_base 38: mod_base = OTHER; note = Adenosine phosphorothiorate
  modified_base 41: mod_base = OTHER; note = 2'-Omethylcytosine
  modified_base 42: mod_base = OTHER; note = 2'-Omethyladenosine
  modified_base 43: mod_base = OTHER; note = 2'-Omethyladenosine
  modified_base 44: mod_base = OTHER; note = 2'-Omethyladenosine
  modified_base 49: mod_base = OTHER; note = 2'-Omethylcytosine
  modified_base 50: mod_base = OTHER; note = 2'-Omethylcytosine
  modified_base 52: mod_base = OTHER; note = 2'-Omethylguanosine
  modified_base 54: mod_base = OTHER; note = Uridine phosphorothiorate
  modified_base 55: mod_base = OTHER; note = Uridine phosphorothiorate
  modified_base 61: mod_base = OTHER; note = 2'-Omethylcytosine
  modified_base 65: mod_base = OTHER; note = 2'-Omethylguanosine
  modified_base 74: mod_base = OTHER; note = Cytosine phosphorothiorate
  modified_base 75: mod_base = OTHER; note = 2'-Omethylcytosine phosphorothiorate
  modified_base 76: mod_base = OTHER; note = 2'-Omethyladenosine

SEQ ID NO: 5885 - RNA, 76 nt, synthetic construct; identical to SEQ ID NO: 3329
  source 1..76: mol_type = other RNA
  modified_base 1: mod_base = OTHER; note = 2'-Omethylguanosine
  modified_base 14: mod_base = OTHER; note = 2'-Omethyladenosine
  modified_base 15: mod_base = OTHER; note = 2'-fluoroadenosine
  modified_base 16: mod_base = OTHER; note = 2'-Omethyluridine
  modified_base 17: mod_base = OTHER; note = 2'-Omethylguanosine
  modified_base 18: mod_base = OTHER; note = 2'-Omethylguanosine
  modified_base 19: mod_base = OTHER; note = 2'-fluoroadenosine
  modified_base 20: mod_base = OTHER; note = 2'-Omethyluridine
  modified_base 33: mod_base = OTHER; note = 2'-fluorouridine
  modified_base 35: mod_base = OTHER; note = Cytosine phosphorothiorate
  modified_base 37: mod_base = OTHER; note = Adenosine phosphorothiorate
  modified_base 38: mod_base = OTHER; note = Adenosine phosphorothiorate
  modified_base 41: mod_base = OTHER; note = 2'-Omethylcytosine
  modified_base 42: mod_base = OTHER; note = 2'-Omethyladenosine
  modified_base 43: mod_base = OTHER; note = 2'-Omethyladenosine
  modified_base 44: mod_base = OTHER; note = 2'-Omethyladenosine
  modified_base 50: mod_base = OTHER; note = 2'-Omethylcytosine
  modified_base 52: mod_base = OTHER; note = 2'-Omethylguanosine
  modified_base 73: mod_base = OTHER; note = 2'-Omethylguanosine

SEQ ID NO: 5886 - RNA, 76 nt, synthetic construct; identical to SEQ ID NO: 625
  source 1..76: mol_type = other RNA
  modified_base 1: mod_base = OTHER; note = 2'-Omethylguanosine
  modified_base 10: mod_base = OTHER; note = 2'-Omethylguanosine
  modified_base 13: mod_base = OTHER; note = 2'-Omethylcytosine
  modified_base 17: mod_base = OTHER; note = Guanosine phosphorothiorate
  modified_base 18: mod_base = OTHER; note = 2'-Omethylguanosine
  modified_base 19: mod_base = OTHER; note = Adenosine phosphorothiorate
  modified_base 20: mod_base = OTHER; note = 2'-Omethyluridine
  modified_base 25: mod_base = OTHER; note = 2'-Omethylcytosine
  modified_base 29: mod_base = OTHER; note = 2'-Omethylguanosine
  modified_base 33: mod_base = OTHER; note = 2'-fluorouridine
  modified_base 35: mod_base = OTHER; note = Cytosine phosphorothiorate
  modified_base 37: mod_base = OTHER; note = Adenosine phosphorothiorate
  modified_base 38: mod_base = OTHER; note = Adenosine phosphorothiorate
  modified_base 43: mod_base = OTHER; note = 2'-Omethyladenosine
  modified_base 44: mod_base = OTHER; note = 2'-fluoroadenosine
  modified_base 46: mod_base = OTHER; note = Guanosine phosphorothiorate
  modified_base 50: mod_base = OTHER; note = 2'-Omethylcytosine
  modified_base 52: mod_base = OTHER; note = 2'-Omethylguanosine
  modified_base 54: mod_base = OTHER; note = Uridine phosphorothiorate
  modified_base 55: mod_base = OTHER; note = Uridine phosphorothiorate
  modified_base 56: mod_base = OTHER; note = 2'-Omethylcytosine
  modified_base 57: mod_base = OTHER; note = Guanosine phosphorothiorate
  modified_base 62: mod_base = OTHER; note = 2'-Omethylcytosine
  modified_base 63: mod_base = OTHER; note = 2'-fluorocytosine
  modified_base 65: mod_base = OTHER; note = Guanosine phosphorothiorate
  modified_base 71: mod_base = OTHER; note = 2'-Omethyluridine
  modified_base 73: mod_base = OTHER; note = 2'-Omethylguanosine

SEQ ID NO: 5887 - RNA, 75 nt, synthetic construct; identical to SEQ ID NO: 3336
  source 1..75: mol_type = other RNA
  modified_base 2: mod_base = OTHER; note = Cytosine phosphorothiorate
  modified_base 3: mod_base = OTHER; note = 2'-Omethyluridine phosphorothiorate
  modified_base 6: mod_base = OTHER; note = Guanosine phosphorothiorate
  modified_base 20: mod_base = OTHER; note = 2'-fluoroadenosine
  modified_base 21: mod_base = OTHER; note = 2'-Omethylguanosine
  modified_base 22: mod_base = OTHER; note = 2'-fluoroadenosine
  modified_base 23: mod_base = OTHER; note = 2'-Omethylguanosine phosphorothiorate
  modified_base 26: mod_base = OTHER; note = 2'-fluorouridine
  modified_base 27: mod_base = OTHER; note = 2'-fluorocytosine
  modified_base 33: mod_base = OTHER; note = 2'-fluorocytosine
  modified_base 36: mod_base = OTHER; note = 2'-fluoroadenosine
  modified_base 37: mod_base = OTHER; note = 2'-fluoroadenosine
  modified_base 48: mod_base = OTHER; note = 2'-fluorocytosine
  modified_base 49: mod_base = OTHER; note = Adenosine phosphorothiorate
  modified_base 53: mod_base = OTHER; note = Uridine phosphorothiorate
  modified_base 61: mod_base = OTHER; note = 2'-Omethylcytosine
  modified_base 62: mod_base = OTHER; note = Cytosine phosphorothiorate
  modified_base 64: mod_base = OTHER; note = 2'-fluoroguanosine
  modified_base 74: mod_base = OTHER; note = Cytosine phosphorothiorate
  modified_base 75: mod_base = OTHER; note = 2'-fluoroadenosine

SEQ ID NO: 5888 - RNA, 75 nt, synthetic construct; identical to SEQ ID NO: 3306
  source 1..75: mol_type = other RNA
  modified_base 1: mod_base = OTHER; note = 2'-Omethylguanosine
  modified_base 2: mod_base = OTHER; note = 2'-Omethyladenosine
  modified_base 3: mod_base = OTHER; note = 2'-Omethylcytosine
  modified_base 4: mod_base = OTHER; note = 2'-Omethylcytosine
  modified_base 5: mod_base = OTHER; note = 2'-Omethyluridine
  modified_base 6: mod_base = OTHER; note = 2'-Omethylcytosine
  modified_base 10: mod_base = OTHER; note = 2'-Omethylguanosine
  modified_base 11: mod_base = OTHER; note = 2'-Omethylcytosine
  modified_base 12: mod_base = OTHER; note = 2'-Omethylguanosine
  modified_base 13: mod_base = OTHER; note = 2'-Omethylcytosine

SEQ ID NO: 5889 - RNA, 75 nt, synthetic construct; identical to SEQ ID NO: 3306
  source 1..75: mol_type = other RNA
  modified_base 10: mod_base = OTHER; note = 2'-Omethylguanosine
  modified_base 11: mod_base = OTHER; note = 2'-Omethylcytosine
  modified_base 12: mod_base = OTHER; note = 2'-Omethylguanosine
  modified_base 13: mod_base = OTHER; note = 2'-Omethylcytosine
  modified_base 21: mod_base = OTHER; note = 2'-Omethylguanosine
  modified_base 22: mod_base = OTHER; note = 2'-Omethylcytosine
  modified_base 23: mod_base = OTHER; note = 2'-Omethylguanosine
  modified_base 24: mod_base = OTHER; note = 2'-Omethylcytosine
  modified_base 48: mod_base = OTHER; note = 2'-Omethylguanosine
  modified_base 49: mod_base = OTHER; note = 2'-Omethylcytosine
  modified_base 50: mod_base = OTHER; note = 2'-Omethylguanosine
  modified_base 51: mod_base = OTHER; note = 2'-Omethyluridine
  modified_base 52: mod_base = OTHER; note = 2'-Omethylguanosine
  modified_base 72: mod_base = OTHER; note = 2'-Omethyladenosine

SEQ ID NO: 5890 - RNA, 73 nt, synthetic construct; identical to SEQ ID NO: 935
  source 1..73: mol_type = other RNA
  modified_base 1: mod_base = OTHER; note = 2'-Omethylguanosine
  modified_base 40: mod_base = OTHER; note = 2'-Omethyluridine phosphorothiorate
  modified_base 41: mod_base = OTHER; note = 2'-Omethylcytosine
  modified_base 42: mod_base = OTHER; note = 2'-fluoroadenosine phosphorothiorate
  modified_base 43: mod_base = OTHER; note = 2'-Omethyladenosine phosphorothiorate
  modified_base 73: mod_base = OTHER; note = 2'-Omethylguanosine

SEQ ID NO: 5891 - RNA, 86 nt, synthetic construct; identical to SEQ ID NO: 3290
  source 1..86: mol_type = other RNA
  modified_base 43: mod_base = OTHER; note = Adenosine phosphorothiorate

SEQ ID NO: 5892 - RNA, 86 nt, synthetic construct; identical to SEQ ID NO: 3290
  source 1..86: mol_type = other RNA
  modified_base 1: mod_base = OTHER; note = 2'-Omethyladenosine phosphorothiorate
  modified_base 2: mod_base = OTHER; note = 2'-Omethylcytosine phosphorothiorate
  modified_base 3: mod_base = OTHER; note = 2'-Omethylcytosine
  modified_base 4: mod_base = OTHER; note = 2'-Omethyladenosine
  modified_base 5: mod_base = OTHER; note = 2'-Omethylguanosine
  modified_base 6: mod_base = OTHER; note = 2'-Omethylguanosine
  modified_base 16: mod_base = OTHER; note = 2'-Omethyluridine
  modified_base 17: mod_base = OTHER; note = 2'-Omethylguanosine
  modified_base 18: mod_base = OTHER; note = 2'-Omethylguanosine
  modified_base 20: mod_base = OTHER; note = 2'-Omethyluridine
  modified_base 25: mod_base = OTHER; note = 2'-Omethylcytosine
  modified_base 33: mod_base = OTHER; note = 2'-fluorouridine
  modified_base 35: mod_base = OTHER; note = Cytosine phosphorothiorate
  modified_base 37: mod_base = OTHER; note = Guanosine phosphorothiorate
  modified_base 38: mod_base = OTHER; note = Adenosine phosphorothiorate
  modified_base 41: mod_base = OTHER; note = 2'-Omethylcytosine
  modified_base 44: mod_base = OTHER; note = 2'-Omethyluridine
  modified_base 57: mod_base = OTHER; note = 2'-fluoroguanosine
  modified_base 58: mod_base = OTHER; note = 2'-fluorocytosine
  modified_base 66: mod_base = OTHER; note = 2'-Omethylcytosine
  modified_base 69: mod_base = OTHER; note = 2'-Omethyladenosine
  modified_base 83: mod_base = OTHER; note = 2'-Omethyladenosine

SEQ ID NO: 5893 - RNA, 76 nt, synthetic construct; identical to SEQ ID NO: 625
  source 1..76: mol_type = other RNA
  modified_base 1: mod_base = OTHER; note = 2'-Omethylguanosine
  modified_base 10: mod_base = OTHER; note = 2'-Omethylguanosine
  modified_base 13: mod_base = OTHER; note = 2'-Omethylcytosine
  modified_base 17: mod_base = OTHER; note = Guanosine phosphorothiorate
  modified_base 18: mod_base = OTHER; note = 2'-Omethylguanosine
  modified_base 19: mod_base = OTHER; note = Adenosine phosphorothiorate
  modified_base 20: mod_base = OTHER; note = 2'-Omethyluridine
  modified_base 25: mod_base = OTHER; note = 2'-Omethylcytosine
  modified_base 29: mod_base = OTHER; note = 2'-Omethylguanosine
  modified_base 33: mod_base = OTHER; note = 2'-fluorouridine
  modified_base 35: mod_base = OTHER; note = Cytosine phosphorothiorate
  modified_base 37: mod_base = OTHER; note = Adenosine phosphorothiorate
  modified_base 38: mod_base = OTHER; note = Adenosine phosphorothiorate
  modified_base 41: mod_base = OTHER; note = 2'-fluorocytosine
  modified_base 44: mod_base = OTHER; note = 2'-fluoroadenosine
  modified_base 46: mod_base = OTHER; note = Guanosine phosphorothiorate
  modified_base 50: mod_base = OTHER; note = 2'-Omethylcytosine
  modified_base 52: mod_base = OTHER; note = 2'-Omethylguanosine
  modified_base 54: mod_base = OTHER; note = Uridine phosphorothiorate
  modified_base 55: mod_base = OTHER; note = Uridine phosphorothiorate
  modified_base 56: mod_base = OTHER; note = 2'-Omethylcytosine
  modified_base 57: mod_base = OTHER; note = Guanosine phosphorothiorate
  modified_base 62: mod_base = OTHER; note = 2'-Omethylcytosine
  modified_base 63: mod_base = OTHER; note = 2'-fluorocytosine
  modified_base 65: mod_base = OTHER; note = 2'-Omethylguanosine
  modified_base 71: mod_base = OTHER; note = 2'-Omethyluridine
  modified_base 73: mod_base = OTHER; note = 2'-Omethylguanosine

SEQ ID NO: 5894 - RNA, 76 nt, synthetic construct; identical to SEQ ID NO: 3289
  source 1..76: mol_type = other RNA
  modified_base 1: mod_base = OTHER; note = 2'-Omethylguanosine
  modified_base 4: mod_base = OTHER; note = 2'-Omethyluridine
  modified_base 10: mod_base = OTHER; note = 2'-Omethylguanosine
  modified_base 11: mod_base = OTHER; note = 2'-Omethylcytosine
  modified_base 12: mod_base = OTHER; note = 2'-Omethyluridine
  modified_base 13: mod_base = OTHER; note = 2'-Omethylcytosine
  modified_base 18: mod_base = OTHER; note = 2'-Omethylguanosine
  modified_base 19: mod_base = OTHER; note = 2'-Omethylguanosine
  modified_base 25: mod_base = OTHER; note = 2'-Omethylcytosine
  modified_base 29: mod_base = OTHER; note = 2'-Omethyladenosine
  modified_base 30: mod_base = OTHER; note = 2'-Omethylguanosine
  modified_base 45: mod_base = OTHER; note = 2'-Omethylguanosine
  modified_base 49: mod_base = OTHER; note = 2'-Omethylcytosine
  modified_base 50: mod_base = OTHER; note = 2'-Omethyladenosine
  modified_base 52: mod_base = OTHER; note = 2'-Omethylguanosine
  modified_base 56: mod_base = OTHER; note = 2'-Omethylcytosine
  modified_base 59: mod_base = OTHER; note = 2'-Omethylguanosine
  modified_base 61: mod_base = OTHER; note = 2'-Omethylcytosine
  modified_base 65: mod_base = OTHER; note = 2'-Omethylguanosine
  modified_base 66: mod_base = OTHER; note = 2'-Omethyluridine
  modified_base 68: mod_base = OTHER; note = 2'-Omethylcytosine
  modified_base 69: mod_base = OTHER; note = 2'-Omethyladenosine
  modified_base 71: mod_base = OTHER; note = 2'-Omethylguanosine
  modified_base 72: mod_base = OTHER; note = 2'-Omethylcytosine
  modified_base 73: mod_base = OTHER; note = 2'-Omethylguanosine

SEQ ID NO: 5895 - RNA, 76 nt, synthetic construct; identical to SEQ ID NO: 625
  source 1..76: mol_type = other RNA
  modified_base 1: mod_base = OTHER; note = 2'-Omethylguanosine phosphorothiorate
  modified_base 2: mod_base = OTHER; note = 2'-Omethylguanosine
  modified_base 3: mod_base = OTHER; note = 2'-Omethylcytosine
  modified_base 4: mod_base = OTHER; note = 2'-Omethyluridine
  modified_base 5: mod_base = OTHER; note = 2'-Omethylcytosine
  modified_base 6: mod_base = OTHER; note = 2'-Omethylcytosine
  modified_base 10: mod_base = OTHER; note = 2'-Omethylguanosine
  modified_base 13: mod_base = OTHER; note = 2'-Omethylcytosine
  modified_base 17: mod_base = OTHER; note = Guanosine phosphorothiorate
  modified_base 18: mod_base = OTHER; note = 2'-Omethylguanosine
  modified_base 19: mod_base = OTHER; note = Adenosine phosphorothiorate
  modified_base 20: mod_base = OTHER; note = 2'-Omethyluridine
  modified_base 25: mod_base = OTHER; note = 2'-Omethylcytosine
  modified_base 29: mod_base = OTHER; note = 2'-Omethylguanosine
  modified_base 33: mod_base = OTHER; note = 2'-fluorouridine
  modified_base 35: mod_base = OTHER; note = Cytosine phosphorothiorate
  modified_base 37: mod_base = OTHER; note = Adenosine phosphorothiorate
  modified_base 38: mod_base = OTHER; note = Adenosine phosphorothiorate
  modified_base 41: mod_base = OTHER; note = 2'-Omethylcytosine
  modified_base 43: mod_base = OTHER; note = 2'-Omethyladenosine
  modified_base 44: mod_base = OTHER; note = 2'-fluoroadenosine
  modified_base 45: mod_base = OTHER; note = 2'-Omethylguanosine
  modified_base 46: mod_base = OTHER; note = Guanosine phosphorothiorate
  modified_base 48: mod_base = OTHER; note = 2'-fluorouridine
  modified_base 49: mod_base = OTHER; note = 2'-Omethylcytosine
  modified_base 50: mod_base = OTHER; note = 2'-Omethylcytosine
  modified_base 51: mod_base = OTHER; note = 2'-Omethylguanosine
  modified_base 52: mod_base = OTHER; note = 2'-Omethylguanosine
  modified_base 53: mod_base = OTHER; note = 2'-Omethylguanosine
  modified_base 54: mod_base = OTHER; note = Uridine phosphorothiorate
  modified_base 55: mod_base = OTHER; note = Uridine phosphorothiorate
  modified_base 56: mod_base = OTHER; note = 2'-Omethylcytosine
  modified_base 57: mod_base = OTHER; note = Guanosine phosphorothiorate
  modified_base 61: mod_base = OTHER; note = 2'-Omethylcytosine
  modified_base 62: mod_base = OTHER; note = 2'-Omethylcytosine
  modified_base 63: mod_base = OTHER; note = 2'-fluorocytosine
  modified_base 64: mod_base = OTHER; note = 2'-Omethylguanosine
  modified_base 65: mod_base = OTHER; note = 2'-Omethylguanosine
  modified_base 66: mod_base = OTHER; note = 2'-Omethylcytosine
  modified_base 67: mod_base = OTHER; note = 2'-Omethylguanosine
  modified_base 68: mod_base = OTHER; note = 2'-Omethylguanosine
  modified_base 69: mod_base = OTHER; note = 2'-Omethyladenosine
  modified_base 71: mod_base = OTHER; note = 2'-Omethyluridine
  modified_base 73: mod_base = OTHER; note = 2'-Omethylguanosine
  modified_base 75: mod_base = OTHER; note = 2'-fluorocytosine phosphorothiorate

SEQ ID NO: 5896 - RNA, 76 nt, synthetic construct
  source 1..76: mol_type = other RNA
gcctccgtggcctaatggataaggcatcggccttcaaagccggggattgcgggttcgagtcccgctggaggtgcca

SEQ ID NO: 5897 - RNA, 74 nt, synthetic construct; identical to SEQ ID NO: 3293
  source 1..74: mol_type = other RNA
  modified_base 1: mod_base = OTHER; note = 2'-fluoroadenosine phosphorothiorate
  modified_base 2: mod_base = OTHER; note = 2'-fluorocytosine phosphorothiorate
  modified_base 9: mod_base = OTHER; note = 2'-fluoroguanosine
  modified_base 12: mod_base = OTHER; note = 2'-Omethylcytosine
  modified_base 25: mod_base = OTHER; note = Uridine phosphorothiorate
  modified_base 35: mod_base = OTHER; note = 2'-Omethylguanosine phosphorothiorate
  modified_base 48: mod_base = OTHER; note = 2'-fluorocytosine
  modified_base 51: mod_base = OTHER; note = 2'-fluoroguanosine
  modified_base 73: mod_base = OTHER; note = 2'-Omethylcytosine phosphorothiorate

SEQ ID NO: 5898 - RNA, 76 nt, synthetic construct; identical to SEQ ID NO: 625
  source 1..76: mol_type = other RNA
  modified_base 1: mod_base = OTHER; note = 2'-Omethylguanosine phosphorothiorate
  modified_base 2: mod_base = OTHER; note = 2'-Omethylguanosine
  modified_base 3: mod_base = OTHER; note = 2'-Omethylcytosine
  modified_base 4: mod_base = OTHER; note = 2'-Omethyluridine
  modified_base 5: mod_base = OTHER; note = 2'-Omethylcytosine
  modified_base 6: mod_base = OTHER; note = 2'-Omethylcytosine
  modified_base 14: mod_base = OTHER; note = 2'-Omethyladenosine
  modified_base 15: mod_base = OTHER; note = 2'-fluoroadenosine
  modified_base 16: mod_base = OTHER; note = 2'-Omethyluridine
  modified_base 17: mod_base = OTHER; note = 2'-Omethylguanosine
  modified_base 18: mod_base = OTHER; note = 2'-Omethylguanosine
  modified_base 19: mod_base = OTHER; note = 2'-fluoroadenosine
  modified_base 20: mod_base = OTHER; note = 2'-Omethyluridine
  modified_base 40: mod_base = OTHER; note = 2'-fluorouridine
  modified_base 41: mod_base = OTHER; note = 2'-fluorocytosine
  modified_base 42: mod_base = OTHER; note = 2'-fluoroadenosine
  modified_base 43: mod_base = OTHER; note = 2'-fluoroadenosine
  modified_base 54: mod_base = OTHER; note = 2'-Omethyluridine
  modified_base 56: mod_base = OTHER; note = 2'-Omethylcytosine
  modified_base 57: mod_base = OTHER; note = 2'-fluoroguanosine
  modified_base 59: mod_base = OTHER; note = 2'-Omethylguanosine
  modified_base 61: mod_base = OTHER; note = 2'-Omethylcytosine
  modified_base 62: mod_base = OTHER; note = 2'-Omethylcytosine
  modified_base 63: mod_base = OTHER; note = 2'-Omethylcytosine
  modified_base 64: mod_base = OTHER; note = 2'-Omethylguanosine
  modified_base 65: mod_base = OTHER; note = 2'-Omethylguanosine
  modified_base 66: mod_base = OTHER; note = 2'-Omethylcytosine
  modified_base 67: mod_base = OTHER; note = 2'-Omethylguanosine
  modified_base 68: mod_base = OTHER; note = 2'-Omethylguanosine
  modified_base 69: mod_base = OTHER; note = 2'-Omethyladenosine
  modified_base 73: mod_base = OTHER; note = 2'-Omethylguanosine

SEQ ID NO: 5899 - RNA, 74 nt, synthetic construct; identical to SEQ ID NO: 3293
  source 1..74: mol_type = other RNA
  modified_base 1: mod_base = OTHER; note = 2'-fluoroadenosine phosphorothiorate
  modified_base 2: mod_base = OTHER; note = 2'-fluorocytosine
  modified_base 3: mod_base = OTHER; note = Cytosine phosphorothiorate
  modified_base 4: mod_base = OTHER; note = 2'-fluorouridine
  modified_base 6: mod_base = OTHER; note = 2'-fluoroguanosine
  modified_base 8: mod_base = OTHER; note = Guanosine phosphorothiorate
  modified_base 9: mod_base = OTHER; note = 2'-fluoroguanosine
  modified_base 11: mod_base = OTHER; note = 2'-fluoroguanosine
  modified_base 24: mod_base = OTHER; note = Guanosine phosphorothiorate
  modified_base 29: mod_base = OTHER; note = 2'-fluoroadenosine
  modified_base 42: mod_base = OTHER; note = Adenosine phosphorothiorate
  modified_base 43: mod_base = OTHER; note = 2'-fluoroguanosine
  modified_base 48: mod_base = OTHER; note = 2'-fluorocytosine
  modified_base 50: mod_base = OTHER; note = Uridine phosphorothiorate
  modified_base 51: mod_base = OTHER; note = 2'-Omethylguanosine phosphorothiorate
  modified_base 62: mod_base = OTHER; note = Guanosine phosphorothiorate
  modified_base 73: mod_base = OTHER; note = Cytosine phosphorothiorate
  modified_base 74: mod_base = OTHER; note = 2'-Omethyladenosine

SEQ ID NO: 5900 - RNA, 76 nt, synthetic construct; identical to SEQ ID NO: 625
  source 1..76: mol_type = other RNA
  modified_base 1: mod_base = OTHER; note = 2'-Omethylguanosine
  modified_base 2: mod_base = OTHER; note = 2'-Omethylguanosine
  modified_base 3: mod_base = OTHER; note = 2'-Omethylcytosine
  modified_base 4: mod_base = OTHER; note = 2'-Omethyluridine
  modified_base 5: mod_base = OTHER; note = 2'-Omethylcytosine
  modified_base 6: mod_base = OTHER; note = 2'-Omethylcytosine
  modified_base 10: mod_base = OTHER; note = 2'-Omethylguanosine
  modified_base 11: mod_base = OTHER; note = 2'-Omethylcytosine
  modified_base 12: mod_base = OTHER; note = 2'-Omethylguanosine
  modified_base 13: mod_base = OTHER; note = 2'-Omethylcytosine
  modified_base 14: mod_base = OTHER; note = 2'-Omethyladenosine
  modified_base 15: mod_base = OTHER; note = 2'-fluoroadenosine
  modified_base 16: mod_base = OTHER; note = 2'-Omethyluridine
  modified_base 17: mod_base = OTHER; note = 2'-Omethylguanosine
  modified_base 18: mod_base = OTHER; note = 2'-Omethylguanosine
  modified_base 19: mod_base = OTHER; note = 2'-fluoroadenosine
  modified_base 20: mod_base = OTHER; note = 2'-Omethyluridine
  modified_base 22: mod_base = OTHER; note = 2'-Omethylguanosine
  modified_base 23: mod_base = OTHER; note = 2'-Omethylcytosine
  modified_base 24: mod_base = OTHER; note = 2'-Omethylguanosine
  modified_base 25: mod_base = OTHER; note = 2'-Omethylcytosine
  modified_base 38: mod_base = OTHER; note = Adenosine phosphorothiorate
  modified_base 39: mod_base = OTHER; note = Uridine phosphorothiorate
  modified_base 40: mod_base = OTHER; note = 2'-fluorouridine
  modified_base 43: mod_base = OTHER; note = 2'-Omethyladenosine
  modified_base 44: mod_base = OTHER; note = 2'-Omethyladenosine
  modified_base 45: mod_base = OTHER; note = 2'-Omethylguanosine
  modified_base 46: mod_base = OTHER; note = 2'-fluoroguanosine
  modified_base 48: mod_base = OTHER; note = 2'-fluorouridine
  modified_base 49: mod_base = OTHER; note = 2'-Omethylcytosine
  modified_base 50: mod_base = OTHER; note = 2'-Omethylcytosine
  modified_base 54: mod_base = OTHER; note = Uridine phosphorothiorate
  modified_base 55: mod_base = OTHER; note = Uridine phosphorothiorate
  modified_base 56: mod_base = OTHER; note = 2'-Omethylcytosine
  modified_base 57: mod_base = OTHER; note = Guanosine phosphorothiorate
  modified_base 61: mod_base = OTHER; note = 2'-Omethylcytosine
  modified_base 62: mod_base = OTHER; note = 2'-Omethylcytosine
  modified_base 63: mod_base = OTHER; note = 2'-fluorocytosine
  modified_base 64: mod_base = OTHER; note = 2'-Omethylguanosine
  modified_base 65: mod_base = OTHER; note = 2'-Omethylguanosine
  modified_base 66: mod_base = OTHER; note = 2'-Omethylcytosine
  modified_base 67: mod_base = OTHER; note = 2'-Omethylguanosine
  modified_base 68: mod_base = OTHER; note = 2'-Omethylguanosine
  modified_base 69: mod_base = OTHER; note = 2'-fluoroadenosine

SEQ ID NO: 5901 - RNA, 85 nt, synthetic construct; identical to SEQ ID NO: 3286
  source 1..85: mol_type = other RNA
  modified_base 1: mod_base = OTHER; note = 2'-Omethylcytosine
  modified_base 11: mod_base = OTHER; note = Cytosine phosphorothiorate
  modified_base 21: mod_base = OTHER; note = 2'-fluoroadenosine
  modified_base 25: mod_base = OTHER; note = 2'-fluoroguanosine
  modified_base 32: mod_base = OTHER; note = 2'-fluorouridine
  modified_base 36: mod_base = OTHER; note = 2'-fluoroguanosine phosphorothiorate
  modified_base 39: mod_base = OTHER; note = Cytosine phosphorothiorate
  modified_base 50: mod_base = OTHER; note = 2'-Omethyladenosine
  modified_base 55: mod_base = OTHER; note = 2'-Omethylcytosine
  modified_base 73: mod_base = OTHER; note = 2'-Omethyladenosine phosphorothiorate
  modified_base 82: mod_base = OTHER; note = 2'-Omethyladenosine
  modified_base 84: mod_base = OTHER; note = Cytosine phosphorothiorate

SEQ ID NO: 5902 - RNA, 85 nt, synthetic construct; identical to SEQ ID NO: 3317
  source 1..85: mol_type = other RNA
  modified_base 1: mod_base = OTHER; note = 2'-Omethylguanosine phosphorothiorate
  modified_base 2: mod_base = OTHER; note = 2'-Omethylcytosine
  modified_base 19: mod_base = OTHER; note = 2'-Omethyluridine phosphorothiorate
  modified_base 46: mod_base = OTHER; note = 2'-Omethylguanosine
  modified_base 55: mod_base = OTHER; note = 2'-fluorocytosine
  modified_base 58: mod_base = OTHER; note = Guanosine phosphorothiorate
  modified_base 62: mod_base = OTHER; note = 2'-Omethylguanosine
  modified_base 71: mod_base = OTHER; note = 2'-fluorocytosine
  modified_base 82: mod_base = OTHER; note = 2'-fluoroguanosine phosphorothiorate

SEQ ID NO: 5903 - RNA, 76 nt, synthetic construct; identical to SEQ ID NO: 3289
  source 1..76: mol_type = other RNA
  modified_base 1: mod_base = OTHER; note = 2'-Omethylguanosine phosphorothiorate
  modified_base 2: mod_base = OTHER; note = 2'-Omethylcytosine
  modified_base 3: mod_base = OTHER; note = 2'-Omethylcytosine
  modified_base 4: mod_base = OTHER; note = 2'-Omethyluridine
  modified_base 5: mod_base = OTHER; note = 2'-Omethylguanosine
  modified_base 6: mod_base = OTHER; note = 2'-Omethylguanosine
  modified_base 16: mod_base = OTHER; note = 2'-Omethyluridine
  modified_base 18: mod_base = OTHER; note = 2'-Omethylguanosine
  modified_base 19: mod_base = OTHER; note = 2'-Omethylguanosine
  modified_base 33: mod_base = OTHER; note = 2'-fluorouridine
  modified_base 35: mod_base = OTHER; note = Uridine phosphorothiorate
  modified_base 37: mod_base = OTHER; note = Adenosine phosphorothiorate
  modified_base 38: mod_base = OTHER; note = Adenosine phosphorothiorate
  modified_base 44: mod_base = OTHER; note = 2'-Omethylguanosine
  modified_base 45: mod_base = OTHER; note = 2'-Omethylguanosine
  modified_base 46: mod_base = OTHER; note = 2'-fluoroguanosine
  modified_base 47: mod_base = OTHER; note = 2'-fluorouridine
  modified_base 48: mod_base = OTHER; note = 2'-fluorocytosine
  modified_base 49: mod_base = OTHER; note = 2'-Omethylcytosine
  modified_base 50: mod_base = OTHER; note = 2'-Omethyladenosine
  modified_base 51: mod_base = OTHER; note = 2'-Omethylguanosine
  modified_base 52: mod_base = OTHER; note = 2'-Omethylguanosine
  modified_base 53: mod_base = OTHER; note = 2'-Omethylguanosine
  modified_base 54: mod_base = OTHER; note = 2'-Omethyluridine
  modified_base 56: mod_base = OTHER; note = 2'-Omethylcytosine
  modified_base 59: mod_base = OTHER; note = 2'-Omethylguanosine
  modified_base 61: mod_base = OTHER; note = 2'-Omethylcytosine
  modified_base 62: mod_base = OTHER; note = 2'-Omethylcytosine
  modified_base 63: mod_base = OTHER; note = 2'-fluorocytosine
  modified_base 64: mod_base = OTHER; note = 2'-Omethyluridine
  modified_base 65: mod_base = OTHER; note = 2'-Omethylguanosine
  modified_base 66: mod_base = OTHER; note = 2'-Omethyluridine
  modified_base 67: mod_base = OTHER; note = 2'-Omethylcytosine
  modified_base 68: mod_base = OTHER; note = 2'-Omethylcytosine
  modified_base 73: mod_base = OTHER; note = 2'-Omethylguanosine

SEQ ID NO: 5904 - RNA, 76 nt, synthetic construct; identical to SEQ ID NO: 625
  source 1..76: mol_type = other RNA
  modified_base 1: mod_base = OTHER; note = 2'-Omethylguanosine phosphorothiorate
  modified_base 2: mod_base = OTHER; note = 2'-Omethylguanosine phosphorothiorate
  modified_base 3: mod_base = OTHER; note = 2'-Omethylcytosine
  modified_base 4: mod_base = OTHER; note = 2'-Omethyluridine
  modified_base 5: mod_base = OTHER; note = 2'-Omethylcytosine
  modified_base 6: mod_base = OTHER; note = 2'-Omethylcytosine
  modified_base 10: mod_base = OTHER; note = 2'-Omethylguanosine
  modified_base 11: mod_base = OTHER; note = 2'-Omethylcytosine
  modified_base 12: mod_base = OTHER; note = 2'-Omethylguanosine
  modified_base 13: mod_base = OTHER; note = 2'-Omethylcytosine
  modified_base 16: mod_base = OTHER; note = 2'-Omethyluridine
  modified_base 17: mod_base = OTHER; note = 2'-Omethylguanosine
  modified_base 18: mod_base = OTHER; note = 2'-Omethylguanosine
  modified_base 20: mod_base = OTHER; note = 2'-Omethyluridine
  modified_base 25: mod_base = OTHER; note = 2'-Omethylcytosine
  modified_base 33: mod_base = OTHER; note = 2'-fluorouridine
  modified_base 35: mod_base = OTHER; note = Cytosine phosphorothiorate
  modified_base 37: mod_base = OTHER; note = Adenosine phosphorothiorate
  modified_base 38: mod_base = OTHER; note = Adenosine phosphorothiorate
  modified_base 41: mod_base = OTHER; note = 2'-fluorocytosine
  modified_base 42: mod_base = OTHER; note = 2'-Omethyladenosine
  modified_base 43: mod_base = OTHER; note = 2'-Omethyladenosine
  modified_base 44: mod_base = OTHER; note = 2'-fluoroadenosine
  modified_base 49: mod_base = OTHER; note = 2'-Omethylcytosine
  modified_base 50: mod_base = OTHER; note = 2'-Omethylcytosine
  modified_base 52: mod_base = OTHER; note = 2'-Omethylguanosine
  modified_base 54: mod_base = OTHER; note = 2'-Omethyluridine
  modified_base 55: mod_base = OTHER; note = Uridine phosphorothiorate
  modified_base 56: mod_base = OTHER; note = 2'-Omethylcytosine
  modified_base 57: mod_base = OTHER; note = 2'-fluoroguanosine
  modified_base 59: mod_base = OTHER; note = 2'-Omethylguanosine
  modified_base 61: mod_base = OTHER; note = 2'-Omethylcytosine
  modified_base 65: mod_base = OTHER; note = 2'-Omethylguanosine
  modified_base 74: mod_base = OTHER; note = Cytosine phosphorothiorate
  modified_base 75: mod_base = OTHER; note = 2'-Omethylcytosine phosphorothiorate

SEQ ID NO: 5905 - RNA, 76 nt, synthetic construct; identical to SEQ ID NO: 625
  source 1..76: mol_type = other RNA
  modified_base 1: mod_base = OTHER; note = 2'-Omethylguanosine phosphorothiorate
  modified_base 2: mod_base = OTHER; note = 2'-Omethylguanosine phosphorothiorate
  modified_base 3: mod_base = OTHER; note = 2'-Omethylcytosine phosphorothiorate
  modified_base 4: mod_base = OTHER; note = 2'-Omethyluridine phosphorothiorate
  modified_base 5: mod_base = OTHER; note = 2'-Omethylcytosine phosphorothiorate
  modified_base 6: mod_base = OTHER; note = 2'-Omethylcytosine phosphorothiorate
  modified_base 10: mod_base = OTHER; note = 2'-Omethylguanosine
  modified_base 11: mod_base = OTHER; note = 2'-Omethylcytosine
  modified_base 12: mod_base = OTHER; note = 2'-Omethylguanosine
  modified_base 13: mod_base = OTHER; note = 2'-Omethylcytosine
  modified_base 14: mod_base = OTHER; note = 2'-Omethyladenosine
  modified_base 15: mod_base = OTHER; note = 2'-Omethyladenosine
  modified_base 16: mod_base = OTHER; note = 2'-Omethyluridine
  modified_base 17: mod_base = OTHER; note = 2'-Omethylguanosine
  modified_base 18: mod_base = OTHER; note = 2'-Omethylguanosine
  modified_base 19: mod_base = OTHER; note = 2'-Omethyladenosine
  modified_base 20: mod_base = OTHER; note = 2'-Omethyluridine
  modified_base 49: mod_base = OTHER; note = 2'-Omethylcytosine
  modified_base 50: mod_base = OTHER; note = 2'-Omethylcytosine
  modified_base 51: mod_base = OTHER; note = 2'-Omethylguanosine
  modified_base 52: mod_base = OTHER; note = 2'-Omethylguanosine
  modified_base 53: mod_base = OTHER; note = 2'-Omethylguanosine
  modified_base 61: mod_base = OTHER; note = 2'-Omethylcytosine
  modified_base 62: mod_base = OTHER; note = 2'-Omethylcytosine
  modified_base 63: mod_base = OTHER; note = 2'-Omethylcytosine
  modified_base 64: mod_base = OTHER; note = 2'-Omethylguanosine
  modified_base 65: mod_base = OTHER; note = 2'-Omethylguanosine
  modified_base 66: mod_base = OTHER; note = 2'-Omethylcytosine
  modified_base 67: mod_base = OTHER; note = 2'-Omethylguanosine
  modified_base 68: mod_base = OTHER; note = 2'-Omethylguanosine
  modified_base 69: mod_base = OTHER; note = 2'-Omethyladenosine

SEQ ID NO: 5906 - DNA, 76 bp, synthetic construct; identical to SEQ ID NO: 1924
  source 1..76: mol_type = other DNA
  modified_base 1: mod_base = OTHER; note = 2'-Omethylguanosine phosphorothiorate
  modified_base 8: mod_base = OTHER; note = Uridine phosphorothiorate
  modified_base 9: mod_base = OTHER; note = 2'-Omethylguanosine
  modified_base 11: mod_base = OTHER; note = Cytosine phosphorothiorate
  modified_base 12: mod_base = OTHER; note = 2'-fluoroguanosine phosphorothiorate
  modified_base 13: mod_base = OTHER; note = Cytosine phosphorothiorate
  modified_base 14: mod_base = OTHER; note = 2'-Omethyladenosine
  modified_base 17: mod_base = OTHER; note = Guanosine phosphorothiorate
  modified_base 18: mod_base = OTHER; note = 2'-O-(2-Methoxyethyl) guanosine phosphorothiorate
  modified_base 20: mod_base = OTHER; note = Uridine phosphorothiorate
  modified_base 22: mod_base = OTHER; note = Guanosine phosphorothiorate
  modified_base 24: mod_base = OTHER; note = 2'-fluoroguanosine
  modified_base 25: mod_base = OTHER; note = Cytosine phosphorothiorate
  modified_base 27: mod_base = OTHER; note = Uridine phosphorothiorate
  modified_base 28: mod_base = OTHER; note = Uridine phosphorothiorate
  modified_base 31: mod_base = OTHER; note = 2'-fluoroadenosine
  modified_base 33: mod_base = OTHER; note = 2'-fluorouridine
  modified_base 34: mod_base = OTHER; note = Uridine phosphorothiorate
  modified_base 35: mod_base = OTHER; note = 2'-O-(2-Methoxyethyl) 5-methylcytosine
  modified_base 39: mod_base = OTHER; note = Uridine phosphorothiorate
  modified_base 40: mod_base = OTHER; note = 2'-Omethyluridine
  modified_base 44: mod_base = OTHER; note = 2'-fluoroadenosine
  modified_base 46: mod_base = OTHER; note = 2'-Omethylguanosine phosphorothiorate
  modified_base 47: mod_base = OTHER; note = deoxyuridine phosphorothiorate
  modified_base 48: mod_base = OTHER; note = 2'-Omethyluridine
  modified_base 53: mod_base = OTHER; note = Guanosine phosphorothiorate
  modified_base 54: mod_base = OTHER; note = 2'-Omethyluridine
  modified_base 58: mod_base = OTHER; note = Adenosine phosphorothiorate
  modified_base 59: mod_base = OTHER; note = 2'-O-(2-Methoxyethyl) guanosine
  modified_base 61: mod_base = OTHER; note = 2'-Omethylcytosine
  modified_base 65: mod_base = OTHER; note = 2'-Omethylguanosine
  modified_base 67: mod_base = OTHER; note = 2'-O-(2-Methoxyethyl) guanosine
  modified_base 68: mod_base = OTHER; note = 2'-Omethylguanosine
  modified_base 71: mod_base = OTHER; note = Uridine phosphorothiorate
  modified_base 72: mod_base = OTHER; note = 2'-fluorocytosine
  modified_base 74: mod_base = OTHER; note = Cytosine phosphorothiorate
  modified_base 75: mod_base = OTHER; note = 2'-Omethylcytosine
  misc_feature 1..20: note = RNA
  misc_feature 21: note = DNA
  misc_feature 22: note = RNA
  misc_feature 23: note = DNA
  misc_feature 24..28: note = RNA
  misc_feature 29: note = DNA
  misc_feature 30..46: note = RNA
  misc_feature 47: note = DNA
  misc_feature 48..55: note = RNA
  misc_feature 56..57: note = DNA
  misc_feature 58..72: note = RNA
  misc_feature 73: note = DNA
  misc_feature 74..76: note = RNA

SEQ ID NO: 5907 - RNA, 73 nt, synthetic construct; identical to SEQ ID NO: 935
  source 1..73: mol_type = other RNA
  modified_base 1: mod_base = OTHER; note = 2'-Omethylguanosine phosphorothiorate
  modified_base 2: mod_base = OTHER; note = 2'-Omethylguanosine phosphorothiorate
  modified_base 22: mod_base = OTHER; note = Guanosine phosphorothiorate
  modified_base 23: mod_base = OTHER; note = 2'-Omethylcytosine
  modified_base 66: mod_base = OTHER; note = Cytosine phosphorothiorate
  modified_base 67: mod_base = OTHER; note = 2'-Omethylguanosine
  modified_base 72: mod_base = OTHER; note = 2'-Omethylcytosine

SEQ ID NO: 5908 - RNA, 76 nt, synthetic construct; identical to SEQ ID NO: 3316
  source 1..76: mol_type = other RNA
  modified_base 1: mod_base = OTHER; note = 2'-Omethyladenosine
  modified_base 2: mod_base = OTHER; note = 2'-Omethylcytosine
  modified_base 3: mod_base = OTHER; note = 2'-Omethylcytosine
  modified_base 4: mod_base = OTHER; note = 2'-Omethyladenosine
  modified_base 5: mod_base = OTHER; note = 2'-Omethyladenosine
  modified_base 6: mod_base = OTHER; note = 2'-Omethylcytosine
  modified_base 13: mod_base = OTHER; note = 2'-Omethylcytosine
  modified_base 14: mod_base = OTHER; note = 2'-Omethyladenosine
  modified_base 15: mod_base = OTHER; note = 2'-Omethyladenosine
  modified_base 16: mod_base = OTHER; note = 2'-Omethyluridine
  modified_base 17: mod_base = OTHER; note = 2'-Omethylguanosine
  modified_base 18: mod_base = OTHER; note = 2'-Omethylguanosine
  modified_base 19: mod_base = OTHER; note = Adenosine phosphorothiorate
  modified_base 20: mod_base = OTHER; note = 2'-Omethyluridine
  modified_base 21: mod_base = OTHER; note = Adenosine phosphorothiorate
  modified_base 25: mod_base = OTHER; note = 2'-Omethylcytosine
  modified_base 33: mod_base = OTHER; note = Uridine phosphorothiorate
  modified_base 34: mod_base = OTHER; note = 2'-Omethyluridine
  modified_base 35: mod_base = OTHER; note = Cytosine phosphorothiorate
  modified_base 37: mod_base = OTHER; note = Adenosine phosphorothiorate
  modified_base 38: mod_base = OTHER; note = Adenosine phosphorothiorate
  modified_base 49: mod_base = OTHER; note = 2'-Omethylcytosine
  modified_base 50: mod_base = OTHER; note = 2'-Omethylcytosine
  modified_base 51: mod_base = OTHER; note = 2'-Omethylguanosine
  modified_base 52: mod_base = OTHER; note = 2'-Omethylguanosine
  modified_base 53: mod_base = OTHER; note = 2'-Omethylguanosine
  modified_base 54: mod_base = OTHER; note = Uridine phosphorothiorate
  modified_base 55: mod_base = OTHER; note = Uridine phosphorothiorate
  modified_base 61: mod_base = OTHER; note = 2'-Omethylcytosine
  modified_base 65: mod_base = OTHER; note = 2'-Omethylguanosine
  modified_base 73: mod_base = OTHER; note = 2'-Omethylguanosine

SEQ ID NO: 5909 - RNA, 75 nt, synthetic construct; identical to SEQ ID NO: 1045
  source 1..75: mol_type = other RNA
  modified_base 1: mod_base = OTHER; note = 2'-Omethylguanosine phosphorothiorate
  modified_base 2: mod_base = OTHER; note = 2'-Omethylguanosine phosphorothiorate
  modified_base 12: mod_base = OTHER; note = Guanosine phosphorothiorate
  modified_base 14: mod_base = OTHER; note = 2'-Omethyladenosine
  modified_base 18: mod_base = OTHER; note = Guanosine phosphorothiorate
  modified_base 20: mod_base = OTHER; note = Adenosine phosphorothiorate
  modified_base 21: mod_base = OTHER; note = 2'-fluoroadenosine
  modified_base 31: mod_base = OTHER; note = 2'-fluoroadenosine
  modified_base 46: mod_base = OTHER; note = 2'-fluoroadenosine
  modified_base 55: mod_base = OTHER; note = 2'-Omethylcytosine
  modified_base 64: mod_base = OTHER; note = Guanosine phosphorothiorate
  modified_base 67: mod_base = OTHER; note = 2'-fluoroguanosine
  modified_base 73: mod_base = OTHER; note = Cytosine phosphorothiorate
  modified_base 74: mod_base = OTHER; note = 2'-Omethylcytosine

SEQ ID NO: 5910 - RNA, 75 nt, synthetic construct; identical to SEQ ID NO: 1045
  source 1..75: mol_type = other RNA
  modified_base 2: mod_base = OTHER; note = 2'-Omethylguanosine
  modified_base 4: mod_base = OTHER; note = 2'-fluorouridine
  modified_base 18: mod_base = OTHER; note = 2'-Omethylguanosine phosphorothiorate
  modified_base 20: mod_base = OTHER; note = Adenosine phosphorothiorate
  modified_base 21: mod_base = OTHER; note = 2'-fluoroadenosine
  modified_base 22: mod_base = OTHER; note = 2'-fluoroguanosine
  modified_base 30: mod_base = OTHER; note = 2'-fluoroguanosine
  modified_base 37: mod_base = OTHER; note = Adenosine phosphorothiorate
  modified_base 40: mod_base = OTHER; note = 2'-fluorocytosine
  modified_base 52: mod_base = OTHER; note = 2'-fluoroguanosine phosphorothiorate
  modified_base 53: mod_base = OTHER; note = Uridine phosphorothiorate
  modified_base 55: mod_base = OTHER; note = 2'-fluorocytosine phosphorothiorate
  modified_base 59: mod_base = OTHER; note = 2'-fluorouridine
  modified_base 66: mod_base = OTHER; note = Guanosine phosphorothiorate
  modified_base 67: mod_base = OTHER; note = Guanosine phosphorothiorate
  modified_base 68: mod_base = OTHER; note = Adenosine phosphorothiorate
  modified_base 72: mod_base = OTHER; note = Uridine phosphorothiorate
  modified_base 73: mod_base = OTHER; note = Cytosine phosphorothiorate

SEQ ID NO: 5911 - RNA, 76 nt, synthetic construct; identical to SEQ ID NO: 625
  source 1..76: mol_type = other RNA
  modified_base 2: mod_base = OTHER; note = 2'-fluoroguanosine
  modified_base 6: mod_base = OTHER; note = 2'-fluorocytosine phosphorothiorate
  modified_base 16: mod_base = OTHER; note = 2'-fluorouridine
  modified_base 18: mod_base = OTHER; note = 2'-Omethylguanosine
  modified_base 24: mod_base = OTHER; note = Guanosine phosphorothiorate
  modified_base 25: mod_base = OTHER; note = 2'-fluorocytosine
  modified_base 27: mod_base = OTHER; note = 2'-Omethyluridine
  modified_base 30: mod_base = OTHER; note = 2'-Omethylguanosine
  modified_base 31: mod_base = OTHER; note = 2'-fluoroadenosine
  modified_base 32: mod_base = OTHER; note = 2'-fluorocytosine
  modified_base 33: mod_base = OTHER; note = 2'-fluorouridine
  modified_base 34: mod_base = OTHER; note = 2'-fluorouridine phosphorothiorate
  modified_base 39: mod_base = OTHER; note = Uridine phosphorothiorate
  modified_base 40: mod_base = OTHER; note = 2'-fluorouridine
  modified_base 41: mod_base = OTHER; note = 2'-fluorocytosine
  modified_base 43: mod_base = OTHER; note = 2'-fluoroadenosine
  modified_base 45: mod_base = OTHER; note = Guanosine phosphorothiorate
  modified_base 47: mod_base = OTHER; note = 2'-Omethyluridine
  modified_base 48: mod_base = OTHER; note = 2'-fluorouridine phosphorothiorate
  modified_base 49: mod_base = OTHER; note = 2'-Omethylcytosine
  modified_base 52: mod_base = OTHER; note = 2'-Omethylguanosine phosphorothiorate
  modified_base 54: mod_base = OTHER; note = 2'-Omethyluridine
  modified_base 56: mod_base = OTHER; note = 2'-Omethylcytosine
  modified_base 61: mod_base = OTHER; note = Cytosine phosphorothiorate
  modified_base 63: mod_base = OTHER; note = 2'-Omethylcytosine
  modified_base 67: mod_base = OTHER; note = 2'-Omethylguanosine
  modified_base 69: mod_base = OTHER; note = Adenosine phosphorothiorate
  modified_base 70: mod_base = OTHER; note = 2'-fluoroguanosine
  modified_base 72: mod_base = OTHER; note = 2'-Omethylcytosine phosphorothiorate
  modified_base 73: mod_base = OTHER; note = 2'-fluoroguanosine
  modified_base 75: mod_base = OTHER; note = 2'-fluorocytosine phosphorothiorate

SEQ ID NO: 5912 - RNA, 85 nt, synthetic construct; identical to SEQ ID NO: 3297
  source 1..85: mol_type = other RNA
  modified_base 1: mod_base = OTHER; note = 2'-Omethylguanosine phosphorothiorate
  modified_base 2: mod_base = OTHER; note = Cytosine phosphorothiorate
  modified_base 17: mod_base = OTHER; note = 2'-Omethylguanosine
  modified_base 53: mod_base = OTHER; note = 2'-Omethylcytosine phosphorothiorate
  modified_base 58: mod_base = OTHER; note = Guanosine phosphorothiorate
  modified_base 60: mod_base = OTHER; note = Adenosine phosphorothiorate
  modified_base 84: mod_base = OTHER; note = 2'-Omethylcytosine phosphorothiorate

SEQ ID NO: 5913 - RNA, 76 nt, synthetic construct; identical to SEQ ID NO: 3490
  source 1..76: mol_type = other RNA
  modified_base 1: mod_base = OTHER; note = 2'-Omethylguanosine
  modified_base 14: mod_base = OTHER; note = 2'-Omethyladenosine
  modified_base 15: mod_base = OTHER; note = 2'-Omethyladenosine
  modified_base 16: mod_base = OTHER; note = 2'-Omethyluridine
  modified_base 17: mod_base = OTHER; note = 2'-Omethylguanosine
  modified_base 18: mod_base = OTHER; note = 2'-Omethylguanosine
  modified_base 19: mod_base = OTHER; note = Adenosine phosphorothiorate
  modified_base 20: mod_base = OTHER; note = 2'-Omethyluridine
  modified_base 21: mod_base = OTHER; note = Adenosine phosphorothiorate
  modified_base 33: mod_base = OTHER; note = 2'-fluorouridine
  modified_base 34: mod_base = OTHER; note = 2'-Omethyluridine
  modified_base 35: mod_base = OTHER; note = Cytosine phosphorothiorate
  modified_base 37: mod_base = OTHER; note = Adenosine phosphorothiorate
  modified_base 38: mod_base = OTHER; note = Adenosine phosphorothiorate
  modified_base 41: mod_base = OTHER; note = 2'-Omethylcytosine
  modified_base 42: mod_base = OTHER; note = 2'-Omethyladenosine
  modified_base 43: mod_base = OTHER; note = 2'-Omethyladenosine
  modified_base 44: mod_base = OTHER; note = 2'-Omethyladenosine
  modified_base 50: mod_base = OTHER; note = 2'-Omethylcytosine
  modified_base 52: mod_base = OTHER; note = 2'-Omethylguanosine
  modified_base 73: mod_base = OTHER; note = 2'-Omethylguanosine

SEQ ID NO: 5914 - RNA, 73 nt, synthetic construct; identical to SEQ ID NO: 4767
  source 1..73: mol_type = other RNA
  modified_base 1: mod_base = OTHER; note = 2'-Omethylguanosine
  modified_base 2: mod_base = OTHER; note = 2'-Omethylcytosine
  modified_base 3: mod_base = OTHER; note = 2'-Omethylcytosine
  modified_base 4: mod_base = OTHER; note = 2'-Omethyluridine
  modified_base 5: mod_base = OTHER; note = 2'-Omethylguanosine
  modified_base 6: mod_base = OTHER; note = 2'-Omethylguanosine

SEQ ID NO: 5915 - RNA, 76 nt, synthetic construct; identical to SEQ ID NO: 625
  source 1..76: mol_type = other RNA
  modified_base 2: mod_base = OTHER; note = 2'-Omethylguanosine
  modified_base 7: mod_base = OTHER; note = Guanosine phosphorothiorate
  modified_base 9: mod_base = OTHER; note = Guanosine phosphorothiorate
  modified_base 10: mod_base = OTHER; note = 2'-fluoroguanosine
  modified_base 12: mod_base = OTHER; note = 2'-fluoroguanosine phosphorothiorate
  modified_base 13: mod_base = OTHER; note = Cytosine phosphorothiorate
  modified_base 17: mod_base = OTHER; note = 2'-Omethylguanosine
  modified_base 20: mod_base = OTHER; note = 2'-Omethyluridine
  modified_base 24: mod_base = OTHER; note = Guanosine phosphorothiorate
  modified_base 25: mod_base = OTHER; note = 2'-fluorocytosine phosphorothiorate
  modified_base 28: mod_base = OTHER; note = Uridine phosphorothiorate
  modified_base 29: mod_base = OTHER; note = 2'-Omethylguanosine
  modified_base 30: mod_base = OTHER; note = Guanosine phosphorothiorate
  modified_base 32: mod_base = OTHER; note = 2'-fluorocytosine
  modified_base 33: mod_base = OTHER; note = Uridine phosphorothiorate
  modified_base 34: mod_base = OTHER; note = 2'-Omethyluridine
  modified_base 39: mod_base = OTHER; note = 2'-fluorouridine
  modified_base 40: mod_base = OTHER; note = Uridine phosphorothiorate
  modified_base 41: mod_base = OTHER; note = 2'-Omethylcytosine
  modified_base 43: mod_base = OTHER; note = 2'-fluoroadenosine
  modified_base 44: mod_base = OTHER; note = 2'-Omethyladenosine
  modified_base 45: mod_base = OTHER; note = Guanosine phosphorothiorate
  modified_base 46: mod_base = OTHER; note = Guanosine phosphorothiorate
  modified_base 47: mod_base = OTHER; note = 2'-fluorouridine phosphorothiorate
  modified_base 48: mod_base = OTHER; note = 2'-fluorouridine phosphorothiorate
  modified_base 49: mod_base = OTHER; note = 2'-Omethylcytosine
  modified_base 52: mod_base = OTHER; note = 2'-Omethylguanosine
  modified_base 53: mod_base = OTHER; note = 2'-fluoroguanosine phosphorothiorate
  modified_base 54: mod_base = OTHER; note = 2'-Omethyluridine
  modified_base 62: mod_base = OTHER; note = Cytosine phosphorothiorate
  modified_base 63: mod_base = OTHER; note = 2'-fluorocytosine
  modified_base 64: mod_base = OTHER; note = 2'-Omethylguanosine
  modified_base 66: mod_base = OTHER; note = Cytosine phosphorothiorate
  modified_base 68: mod_base = OTHER; note = Guanosine phosphorothiorate
  modified_base 73: mod_base = OTHER; note = 2'-Omethylguanosine
  modified_base 74: mod_base = OTHER; note = Cytosine phosphorothiorate
  modified_base 75: mod_base = OTHER; note = 2'-Omethylcytosine
  modified_base 76: mod_base = OTHER; note = 2'-fluoroadenosine

SEQ ID NO: 5916 - RNA, 85 nt, synthetic construct; identical to SEQ ID NO: 3317
  source 1..85: mol_type = other RNA
  modified_base 1: mod_base = OTHER; note = 2'-Omethylguanosine phosphorothiorate
  modified_base 3: mod_base = OTHER; note = 2'-fluorouridine
  modified_base 4: mod_base = OTHER; note = Guanosine phosphorothiorate
  modified_base 25: mod_base = OTHER; note = 2'-Omethylcytosine phosphorothiorate
  modified_base 54: mod_base = OTHER; note = 2'-Omethylcytosine
  modified_base 82: mod_base = OTHER; note = 2'-fluoroguanosine phosphorothiorate
  modified_base 83: mod_base = OTHER; note = Cytosine phosphorothiorate

SEQ ID NO: 5917 - RNA, 76 nt, synthetic construct; identical to SEQ ID NO: 3615
  source 1..76: mol_type = other RNA
  modified_base 1: mod_base = OTHER; note = 2'-Omethylguanosine
  modified_base 61: mod_base = OTHER; note = 2'-Omethylcytosine
  modified_base 62: mod_base = OTHER; note = 2'-Omethylcytosine
  modified_base 64: mod_base = OTHER; note = 2'-Omethylguanosine
  modified_base 65: mod_base = OTHER; note = 2'-Omethylguanosine
  modified_base 66: mod_base = OTHER; note = 2'-Omethylcytosine
  modified_base 67: mod_base = OTHER; note = 2'-Omethylguanosine
  modified_base 68: mod_base = OTHER; note = 2'-Omethylguanosine
  modified_base 69: mod_base = OTHER; note = 2'-Omethyladenosine
  modified_base 70: mod_base = OTHER; note = 2'-fluoroguanosine
  modified_base 71: mod_base = OTHER; note = 2'-Omethyluridine
  modified_base 72: mod_base = OTHER; note = 2'-Omethylcytosine
  modified_base 73: mod_base = OTHER; note = 2'-Omethylguanosine

SEQ ID NO: 5918 - RNA, 76 nt, synthetic construct; identical to SEQ ID NO: 625
  source 1..76: mol_type = other RNA
  modified_base 1: mod_base = OTHER; note = 2'-Omethylguanosine phosphorothiorate
  modified_base 2: mod_base = OTHER; note = 2'-Omethylguanosine
  modified_base 17: mod_base = OTHER; note = 2'-Omethylguanosine
  modified_base 33: mod_base = OTHER; note = 2'-fluorouridine
  modified_base 35: mod_base = OTHER; note = Cytosine phosphorothiorate
  modified_base 37: mod_base = OTHER; note = Adenosine phosphorothiorate
  modified_base 38: mod_base = OTHER; note = Adenosine phosphorothiorate
  modified_base 52: mod_base = OTHER; note = 2'-fluoroguanosine
  modified_base 62: mod_base = OTHER; note = 2'-Omethylcytosine
  modified_base 73: mod_base = OTHER; note = 2'-Omethylguanosine
  modified_base 75: mod_base = OTHER; note = 2'-fluorocytosine phosphorothiorate

SEQ ID NO: 5919 - RNA, 76 nt, synthetic construct; identical to SEQ ID NO: 625
  source 1..76: mol_type = other RNA
  modified_base 1: mod_base = OTHER; note = 2'-Omethylguanosine phosphorothiorate
  modified_base 2: mod_base = OTHER; note = 2'-Omethylguanosine phosphorothiorate
  modified_base 15: mod_base = OTHER; note = Adenosine phosphorothiorate
  modified_base 16: mod_base = OTHER; note = 2'-Omethyluridine
  modified_base 55: mod_base = OTHER; note = Uridine phosphorothiorate
  modified_base 56: mod_base = OTHER; note = 2'-O-(2-Methoxyethyl) 5-methylcytosine
  modified_base 63: mod_base = OTHER; note = Cytosine phosphorothiorate
  modified_base 64: mod_base = OTHER; note = 2'-Omethylguanosine
  modified_base 74: mod_base = OTHER; note = Cytosine phosphorothiorate
  modified_base 75: mod_base = OTHER; note = 2'-Omethylcytosine phosphorothiorate
  modified_base 76: mod_base = OTHER; note = 2'-Omethyladenosine

SEQ ID NO: 5920 - RNA, 76 nt, synthetic construct; identical to SEQ ID NO: 625
  source 1..76: mol_type = other RNA
  modified_base 1: mod_base = OTHER; note = 2'-Omethylguanosine phosphorothiorate
  modified_base 2: mod_base = OTHER; note = 2'-Omethylguanosine
  modified_base 3: mod_base = OTHER; note = 2'-Omethylcytosine
  modified_base 4: mod_base = OTHER; note = 2'-Omethyluridine
  modified_base 5: mod_base = OTHER; note = 2'-Omethylcytosine
  modified_base 6: mod_base = OTHER; note = 2'-Omethylcytosine
  modified_base 22: mod_base = OTHER; note = 2'-Omethylguanosine
  modified_base 23: mod_base = OTHER; note = 2'-Omethylcytosine
  modified_base 24: mod_base = OTHER; note = 2'-Omethylguanosine
  modified_base 25: mod_base = OTHER; note = 2'-Omethylcytosine
  modified_base 49: mod_base = OTHER; note = 2'-Omethylcytosine
  modified_base 50: mod_base = OTHER; note = 2'-Omethylcytosine
  modified_base 51: mod_base = OTHER; note = 2'-Omethylguanosine
  modified_base 52: mod_base = OTHER; note = 2'-Omethylguanosine
  modified_base 53: mod_base = OTHER; note = 2'-Omethylguanosine
  modified_base 61: mod_base = OTHER; note = 2'-Omethylcytosine
  modified_base 62: mod_base = OTHER; note = 2'-Omethylcytosine
  modified_base 63: mod_base = OTHER; note = 2'-fluorocytosine
  modified_base 64: mod_base = OTHER; note = 2'-Omethylguanosine
  modified_base 65: mod_base = OTHER; note = 2'-Omethylguanosine
  modified_base 66: mod_base = OTHER; note = 2'-Omethylcytosine
  modified_base 67: mod_base = OTHER; note = 2'-Omethylguanosine
  modified_base 68: mod_base = OTHER; note = 2'-Omethylguanosine
  modified_base 69: mod_base = OTHER; note = 2'-Omethyladenosine

SEQ ID NO: 5921 - RNA, 76 nt, synthetic construct; identical to SEQ ID NO: 625
  source 1..76: mol_type = other RNA
  modified_base 1: mod_base = OTHER; note = Guanosine phosphorothiorate
  modified_base 3: mod_base = OTHER; note = 2'-fluorocytosine
  modified_base 6: mod_base = OTHER; note = 2'-Omethylcytosine
  modified_base 8: mod_base = OTHER; note = Uridine phosphorothiorate
  modified_base 10: mod_base = OTHER; note = Guanosine phosphorothiorate
  modified_base 11: mod_base = OTHER; note = 2'-fluorocytosine
  modified_base 12: mod_base = OTHER; note = 2'-fluoroguanosine
  modified_base 13: mod_base = OTHER; note = 2'-Omethylcytosine
  modified_base 16: mod_base = OTHER; note = 2'-fluorouridine
  modified_base 17: mod_base = OTHER; note = 2'-Omethylguanosine phosphorothiorate
  modified_base 18: mod_base = OTHER; note = 2'-fluoroguanosine
  modified_base 25: mod_base = OTHER; note = 2'-fluorocytosine
  modified_base 26: mod_base = OTHER; note = Adenosine phosphorothiorate
  modified_base 27: mod_base = OTHER; note = 2'-fluorouridine
  modified_base 28: mod_base = OTHER; note = 2'-fluorouridine
  modified_base 31: mod_base = OTHER; note = 2'-Omethyladenosine
  modified_base 32: mod_base = OTHER; note = 2'-fluorocytosine
  modified_base 34: mod_base = OTHER; note = 2'-fluorouridine
  modified_base 42: mod_base = OTHER; note = 2'-fluoroadenosine
  modified_base 43: mod_base = OTHER; note = Adenosine phosphorothiorate
  modified_base 44: mod_base = OTHER; note = 2'-fluoroadenosine
  modified_base 48: mod_base = OTHER; note = 2'-Omethyluridine phosphorothiorate
  modified_base 49: mod_base = OTHER; note = 2'-Omethylcytosine
  modified_base 51: mod_base = OTHER; note = 2'-Omethylguanosine phosphorothiorate
  modified_base 52: mod_base = OTHER; note = 2'-Omethylguanosine
  modified_base 54: mod_base = OTHER; note = 2'-fluorouridine
  modified_base 56: mod_base = OTHER; note = 2'-Omethylcytosine
  modified_base 57: mod_base = OTHER; note = 2'-Omethylguanosine
  modified_base 58: mod_base = OTHER; note = Adenosine phosphorothiorate
  modified_base 59: mod_base = OTHER; note = 2'-fluoroguanosine
  modified_base 61: mod_base = OTHER; note = 2'-fluorocytosine
  modified_base 62: mod_base = OTHER; note = Cytosine phosphorothiorate
  modified_base 63: mod_base = OTHER; note = 2'-fluorocytosine
  modified_base 65: mod_base = OTHER; note = 2'-Omethylguanosine
  modified_base 68: mod_base = OTHER; note = 2'-Omethylguanosine
  modified_base 73: mod_base = OTHER; note = Guanosine phosphorothiorate
  modified_base 74: mod_base = OTHER; note = 2'-fluorocytosine
  modified_base 75: mod_base = OTHER; note = 2'-fluorocytosine

SEQ ID NO: 5922 - RNA, 76 nt, synthetic construct; identical to SEQ ID NO: 625
  source 1..76: mol_type = other RNA
  modified_base 8: mod_base = OTHER; note = Thymine
  modified_base 54: mod_base = OTHER; note = Thymine
  modified_base 55: mod_base = OTHER; note = Thymine
  modified_base 60: mod_base = OTHER; note = Thymine

SEQ ID NO: 5923 - RNA, 73 nt, synthetic construct; identical to SEQ ID NO: 935
  source 1..73: mol_type = other RNA
  modified_base 1: mod_base = OTHER; note = 2'-Omethylguanosine
  modified_base 40: mod_base = OTHER; note = 2'-fluorouridine
  modified_base 41: mod_base = OTHER; note = 2'-fluorocytosine
  modified_base 42: mod_base = OTHER; note = 2'-Omethyladenosine
  modified_base 43: mod_base = OTHER; note = 2'-Omethyladenosine
  modified_base 73: mod_base = OTHER; note = 2'-Omethylguanosine

SEQ ID NO: 5924 - RNA, 75 nt, synthetic construct; identical to SEQ ID NO: 1045
  source 1..75: mol_type = other RNA
  modified_base 1: mod_base = OTHER; note = 2'-Omethylguanosine
  modified_base 10: mod_base = OTHER; note = 2'-Omethylguanosine
  modified_base 11: mod_base = OTHER; note = 2'-Omethyluridine
  modified_base 12: mod_base = OTHER; note = 2'-Omethylguanosine
  modified_base 13: mod_base = OTHER; note = 2'-Omethyluridine
  modified_base 17: mod_base = OTHER; note = 2'-Omethylguanosine
  modified_base 18: mod_base = OTHER; note = 2'-Omethylguanosine
  modified_base 25: mod_base = OTHER; note = 2'-Omethylcytosine
  modified_base 33: mod_base = OTHER; note = 2'-fluorouridine
  modified_base 34: mod_base = OTHER; note = 2'-Omethyluridine
  modified_base 35: mod_base = OTHER; note = Uridine phosphorothiorate
  modified_base 37: mod_base = OTHER; note = Adenosine phosphorothiorate
  modified_base 38: mod_base = OTHER; note = Adenosine phosphorothiorate
  modified_base 41: mod_base = OTHER; note = 2'-Omethylcytosine
  modified_base 42: mod_base = OTHER; note = 2'-Omethyladenosine
  modified_base 43: mod_base = OTHER; note = 2'-Omethylguanosine
  modified_base 44: mod_base = OTHER; note = 2'-Omethylcytosine
  modified_base 48: mod_base = OTHER; note = 2'-Omethylcytosine
  modified_base 49: mod_base = OTHER; note = 2'-Omethylcytosine
  modified_base 51: mod_base = OTHER; note = 2'-Omethyladenosine
  modified_base 53: mod_base = OTHER; note = Uridine phosphorothiorate
  modified_base 54: mod_base = OTHER; note = Uridine phosphorothiorate
  modified_base 60: mod_base = OTHER; note = 2'-Omethylcytosine
  modified_base 64: mod_base = OTHER; note = 2'-Omethylguanosine
  modified_base 72: mod_base = OTHER; note = 2'-Omethyluridine

SEQ ID NO: 5925 - RNA, 76 nt, synthetic construct; identical to SEQ ID NO: 3289
  source 1..76: mol_type = other RNA
  modified_base 1: mod_base = OTHER; note = 2'-Omethylguanosine phosphorothiorate
  modified_base 2: mod_base = OTHER; note = 2'-Omethylcytosine phosphorothiorate
  modified_base 3: mod_base = OTHER; note = 2'-Omethylcytosine
  modified_base 4: mod_base = OTHER; note = 2'-Omethyluridine
  modified_base 5: mod_base = OTHER; note = 2'-Omethylguanosine
  modified_base 6: mod_base = OTHER; note = 2'-Omethylguanosine
  modified_base 10: mod_base = OTHER; note = 2'-Omethylguanosine
  modified_base 11: mod_base = OTHER; note = 2'-Omethylcytosine
  modified_base 12: mod_base = OTHER; note = 2'-Omethyluridine
  modified_base 13: mod_base = OTHER; note = 2'-Omethylcytosine
  modified_base 18: mod_base = OTHER; note = Guanosine phosphorothiorate
  modified_base 19: mod_base = OTHER; note = 2'-Omethylguanosine
  modified_base 20: mod_base = OTHER; note = Uridine phosphorothiorate
  modified_base 22: mod_base = OTHER; note = 2'-Omethylguanosine
  modified_base 23: mod_base = OTHER; note = 2'-Omethyladenosine
  modified_base 24: mod_base = OTHER; note = 2'-Omethylguanosine
  modified_base 25: mod_base = OTHER; note = 2'-Omethylcytosine
  modified_base 29: mod_base = OTHER; note = 2'-Omethyladenosine
  modified_base 33: mod_base = OTHER; note = 2'-fluorouridine
  modified_base 35: mod_base = OTHER; note = Uridine phosphorothiorate
  modified_base 37: mod_base = OTHER; note = Adenosine phosphorothiorate
  modified_base 38: mod_base = OTHER; note = Adenosine phosphorothiorate
  modified_base 41: mod_base = OTHER; note = 2'-fluorouridine phosphorothiorate
  modified_base 43: mod_base = OTHER; note = 2'-Omethyladenosine
  modified_base 44: mod_base = OTHER; note = 2'-fluoroguanosine
  modified_base 46: mod_base = OTHER; note = Guanosine phosphorothiorate
  modified_base 49: mod_base = OTHER; note = 2'-Omethylcytosine
  modified_base 50: mod_base = OTHER; note = 2'-Omethyladenosine
  modified_base 51: mod_base = OTHER; note = 2'-Omethylguanosine
  modified_base 52: mod_base = OTHER; note = 2'-Omethylguanosine
  modified_base 53: mod_base = OTHER; note = 2'-Omethylguanosine
  modified_base 54: mod_base = OTHER; note = Uridine phosphorothiorate
  modified_base 55: mod_base = OTHER; note = Uridine phosphorothiorate
  modified_base 56: mod_base = OTHER; note = 2'-Omethylcytosine
  modified_base 57: mod_base = OTHER; note = Adenosine phosphorothiorate
  modified_base 61: mod_base = OTHER; note = 2'-Omethylcytosine
  modified_base 62: mod_base = OTHER; note = 2'-Omethylcytosine
  modified_base 63: mod_base = OTHER; note = 2'-fluorocytosine
  modified_base 64: mod_base = OTHER; note = 2'-Omethyluridine
  modified_base 65: mod_base = OTHER; note = 2'-Omethylguanosine
  modified_base 66: mod_base = OTHER; note = 2'-Omethyluridine
  modified_base 67: mod_base = OTHER; note = 2'-Omethylcytosine
  modified_base 68: mod_base = OTHER; note = 2'-Omethylcytosine
  modified_base 71: mod_base = OTHER; note = 2'-Omethylguanosine
  modified_base 73: mod_base = OTHER; note = 2'-Omethylguanosine

SEQ ID NO: 5926 - RNA, 76 nt, synthetic construct; identical to SEQ ID NO: 625
  source 1..76: mol_type = other RNA
  modified_base 1: mod_base = OTHER; note = 2'-Omethylguanosine phosphorothiorate
  modified_base 2: mod_base = OTHER; note = 2'-Omethylguanosine
  modified_base 3: mod_base = OTHER; note = 2'-Omethylcytosine
  modified_base 4: mod_base = OTHER; note = 2'-Omethyluridine
  modified_base 5: mod_base = OTHER; note = 2'-Omethylcytosine
  modified_base 6: mod_base = OTHER; note = 2'-Omethylcytosine
  modified_base 14: mod_base = OTHER; note = 2'-Omethyladenosine
  modified_base 15: mod_base = OTHER; note = 2'-fluoroadenosine
  modified_base 16: mod_base = OTHER; note = 2'-Omethyluridine
  modified_base 17: mod_base = OTHER; note = 2'-Omethylguanosine
  modified_base 18: mod_base = OTHER; note = 2'-Omethylguanosine
  modified_base 19: mod_base = OTHER; note = 2'-fluoroadenosine
  modified_base 20: mod_base = OTHER; note = 2'-Omethyluridine
  modified_base 22: mod_base = OTHER; note = 2'-Omethylguanosine
  modified_base 23: mod_base = OTHER; note = 2'-Omethylcytosine
  modified_base 24: mod_base = OTHER; note = 2'-Omethylguanosine
  modified_base 25: mod_base = OTHER; note = 2'-Omethylcytosine
  modified_base 40: mod_base = OTHER; note = 2'-fluorouridine
  modified_base 41: mod_base = OTHER; note = 2'-fluorocytosine
  modified_base 42: mod_base = OTHER; note = 2'-fluoroadenosine
  modified_base 43: mod_base = OTHER; note = 2'-fluoroadenosine
  modified_base 49: mod_base = OTHER; note = 2'-Omethylcytosine
  modified_base 50: mod_base = OTHER; note = 2'-Omethylcytosine
  modified_base 51: mod_base = OTHER; note = 2'-Omethylguanosine
  modified_base 52: mod_base = OTHER; note = 2'-Omethylguanosine
  modified_base 53: mod_base = OTHER; note = 2'-Omethylguanosine
  modified_base 54: mod_base = OTHER; note = 2'-Omethyluridine
  modified_base 56: mod_base = OTHER; note = 2'-Omethylcytosine
  modified_base 57: mod_base = OTHER; note = 2'-fluoroguanosine
  modified_base 59: mod_base = OTHER; note = 2'-Omethylguanosine
  modified_base 61: mod_base = OTHER; note = 2'-Omethylcytosine
  modified_base 62: mod_base = OTHER; note = 2'-Omethylcytosine
  modified_base 63: mod_base = OTHER; note = 2'-Omethylcytosine
  modified_base 64: mod_base = OTHER; note = 2'-Omethylguanosine
  modified_base 65: mod_base = OTHER; note = 2'-Omethylguanosine
  modified_base 66: mod_base = OTHER; note = 2'-Omethylcytosine
  modified_base 67: mod_base = OTHER; note = 2'-Omethylguanosine
  modified_base 68: mod_base = OTHER; note = 2'-Omethylguanosine
  modified_base 69: mod_base = OTHER; note = 2'-Omethyladenosine
  modified_base 73: mod_base = OTHER; note = 2'-Omethylguanosine

SEQ ID NO: 5927 - RNA, 76 nt, synthetic construct; identical to SEQ ID NO: 625
  source 1..76: mol_type = other RNA
  modified_base 1: mod_base = OTHER; note = 2'-Omethylguanosine
  modified_base 2: mod_base = OTHER; note = 2'-Omethylguanosine
  modified_base 3: mod_base = OTHER; note = 2'-Omethylcytosine
  modified_base 4: mod_base = OTHER; note = 2'-Omethyluridine
  modified_base 5: mod_base = OTHER; note = 2'-Omethylcytosine
  modified_base 6: mod_base = OTHER; note = 2'-Omethylcytosine
  modified_base 7: mod_base = OTHER; note = Guanosine phosphorothiorate
  modified_base 10: mod_base = OTHER; note = 2'-Omethylguanosine
  modified_base 11: mod_base = OTHER; note = 2'-Omethylcytosine
  modified_base 12: mod_base = OTHER; note = 2'-Omethylguanosine
  modified_base 13: mod_base = OTHER; note = 2'-Omethylcytosine
  modified_base 14: mod_base = OTHER; note = 2'-Omethyladenosine
  modified_base 15: mod_base = OTHER; note = 2'-Omethyladenosine
  modified_base 16: mod_base = OTHER; note = 2'-Omethyluridine
  modified_base 17: mod_base = OTHER; note = 2'-Omethylguanosine
  modified_base 18: mod_base = OTHER; note = 2'-Omethylguanosine
  modified_base 20: mod_base = OTHER; note = 2'-Omethyluridine
  modified_base 21: mod_base = OTHER; note = 2'-fluoroadenosine phosphorothiorate
  modified_base 22: mod_base = OTHER; note = 2'-Omethylguanosine
  modified_base 23: mod_base = OTHER; note = 2'-Omethylcytosine
  modified_base 24: mod_base = OTHER; note = 2'-Omethylguanosine
  modified_base 25: mod_base = OTHER; note = 2'-Omethylcytosine
  modified_base 26: mod_base = OTHER; note = Adenosine phosphorothiorate
  modified_base 28: mod_base = OTHER; note = 2'-Omethyluridine
  modified_base 29: mod_base = OTHER; note = 2'-fluoroguanosine phosphorothiorate
  modified_base 30: mod_base = OTHER; note = 2'-Omethylguanosine
  modified_base 33: mod_base = OTHER; note = 2'-fluorouridine
  modified_base 35: mod_base = OTHER; note = 2'-Omethylcytosine phosphorothiorate
  modified_base 39: mod_base = OTHER; note = 2'-Omethyluridine phosphorothiorate
  modified_base 40: mod_base = OTHER; note = 2'-Omethyluridine
  modified_base 41: mod_base = OTHER; note = 2'-fluorocytosine
  modified_base 42: mod_base = OTHER; note = Adenosine phosphorothiorate
  modified_base 44: mod_base = OTHER; note = Adenosine phosphorothiorate
  modified_base 45: mod_base = OTHER; note = 2'-fluoroguanosine
  modified_base 48: mod_base = OTHER; note = 2'-fluorouridine
  modified_base 49: mod_base = OTHER; note = 2'-Omethylcytosine phosphorothiorate
  modified_base 51: mod_base = OTHER; note = 2'-Omethylguanosine
  modified_base 52: mod_base = OTHER; note = 2'-Omethylguanosine
  modified_base 55: mod_base = OTHER; note = Uridine phosphorothiorate
  modified_base 56: mod_base = OTHER; note = 2'-Omethylcytosine
  modified_base 59: mod_base = OTHER; note = 2'-Omethylguanosine
  modified_base 61: mod_base = OTHER; note = Cytosine phosphorothiorate
  modified_base 62: mod_base = OTHER; note = 2'-Omethylcytosine
  modified_base 63: mod_base = OTHER; note = 2'-fluorocytosine
  modified_base 64: mod_base = OTHER; note = 2'-Omethylguanosine
  modified_base 65: mod_base = OTHER; note = 2'-Omethylguanosine phosphorothiorate
  modified_base 66: mod_base = OTHER; note = 2'-fluorocytosine phosphorothiorate
  modified_base 67: mod_base = OTHER; note = 2'-fluoroguanosine
  modified_base 68: mod_base = OTHER; note = 2'-Omethylguanosine phosphorothiorate
  modified_base 69: mod_base = OTHER; note = 2'-fluoroadenosine
  modified_base 70: mod_base = OTHER; note = 2'-fluoroguanosine
  modified_base 71: mod_base = OTHER; note = 2'-Omethyluridine phosphorothiorate
  modified_base 73: mod_base = OTHER; note = 2'-fluoroguanosine phosphorothiorate
  modified_base 74: mod_base = OTHER; note = 2'-fluorocytosine phosphorothiorate
  modified_base 75: mod_base = OTHER; note = 2'-fluorocytosine phosphorothiorate
  modified_base 76: mod_base = OTHER; note = 2'-fluoroadenosine

SEQ ID NO: 5928 - RNA, 76 nt, synthetic construct; identical to SEQ ID NO: 625
  source 1..76: mol_type = other RNA
  modified_base 1: mod_base = OTHER; note = Guanosine phosphorothiorate
  modified_base 2: mod_base = OTHER; note = 2'-fluoroguanosine
  modified_base 3: mod_base = OTHER; note = Cytosine phosphorothiorate
  modified_base 8: mod_base = OTHER; note = Uridine phosphorothiorate
  modified_base 10: mod_base = OTHER; note = 2'-fluoroguanosine
  modified_base 13: mod_base = OTHER; note = Cytosine phosphorothiorate
  modified_base 14: mod_base = OTHER; note = 2'-Omethyladenosine
  modified_base 16: mod_base = OTHER; note = Uridine phosphorothiorate
  modified_base 17: mod_base = OTHER; note = 2'-Omethylguanosine
  modified_base 18: mod_base = OTHER; note = 2'-fluoroguanosine
  modified_base 20: mod_base = OTHER; note = Uridine phosphorothiorate
  modified_base 22: mod_base = OTHER; note = 2'-Omethylguanosine
  modified_base 24: mod_base = OTHER; note = 2'-Omethylguanosine phosphorothiorate
  modified_base 25: mod_base = OTHER; note = 2'-Omethylcytosine
  modified_base 28: mod_base = OTHER; note = 2'-Omethyluridine phosphorothiorate
  modified_base 30: mod_base = OTHER; note = 2'-fluoroguanosine
  modified_base 31: mod_base = OTHER; note = 2'-Omethyladenosine
  modified_base 33: mod_base = OTHER; note = 2'-fluorouridine phosphorothiorate
  modified_base 34: mod_base = OTHER; note = 2'-fluorouridine
  modified_base 37: mod_base = OTHER; note = Adenosine phosphorothiorate
  modified_base 38: mod_base = OTHER; note = 2'-fluoroadenosine
  modified_base 42: mod_base = OTHER; note = 2'-fluoroadenosine
  modified_base 44: mod_base = OTHER; note = Adenosine phosphorothiorate
  modified_base 45: mod_base = OTHER; note = 2'-Omethylguanosine
  modified_base 48: mod_base = OTHER; note = 2'-fluorouridine
  modified_base 49: mod_base = OTHER; note = 2'-Omethylcytosine
  modified_base 58: mod_base = OTHER; note = 2'-fluoroadenosine
  modified_base 60: mod_base = OTHER; note = 2'-fluorouridine phosphorothiorate
  modified_base 65: mod_base = OTHER; note = 2'-fluoroguanosine
  modified_base 66: mod_base = OTHER; note = Cytosine phosphorothiorate
  modified_base 67: mod_base = OTHER; note = 2'-Omethylguanosine
  modified_base 68: mod_base = OTHER; note = Guanosine phosphorothiorate
  modified_base 69: mod_base = OTHER; note = 2'-Omethyladenosine
  modified_base 76: mod_base = OTHER; note = 2'-fluoroadenosine

SEQ ID NO: 5929 - RNA, 85 nt, synthetic construct; identical to SEQ ID NO: 3297
  source 1..85: mol_type = other RNA
  modified_base 1: mod_base = OTHER; note = 2'-Omethylguanosine phosphorothiorate
  modified_base 2: mod_base = OTHER; note = 2'-Omethylcytosine phosphorothiorate
  modified_base 8: mod_base = OTHER; note = Uridine phosphorothiorate
  modified_base 14: mod_base = OTHER; note = 2'-Omethyladenosine
  modified_base 17: mod_base = OTHER; note = 2'-Omethylguanosine
  modified_base 18: mod_base = OTHER; note = 2'-Omethylguanosine
  modified_base 20: mod_base = OTHER; note = 2'-Omethyluridine phosphorothiorate
  modified_base 22: mod_base = OTHER; note = 2'-Omethyladenosine
  modified_base 25: mod_base = OTHER; note = 2'-Omethylcytosine
  modified_base 27: mod_base = OTHER; note = 2'-Omethyluridine
  modified_base 33: mod_base = OTHER; note = 2'-fluorouridine
  modified_base 41: mod_base = OTHER; note = 2'-Omethylcytosine phosphorothiorate
  modified_base 44: mod_base = OTHER; note = 2'-Omethyluridine phosphorothiorate
  modified_base 56: mod_base = OTHER; note = 2'-fluoroguanosine
  modified_base 57: mod_base = OTHER; note = 2'-fluorocytosine
  modified_base 64: mod_base = OTHER; note = Uridine phosphorothiorate
  modified_base 80: mod_base = OTHER; note = 2'-Omethylguanosine
  modified_base 82: mod_base = OTHER; note = 2'-Omethylguanosine

SEQ ID NO: 5930 - RNA, 76 nt, synthetic construct; identical to SEQ ID NO: 625
  source 1..76: mol_type = other RNA
  modified_base 1: mod_base = OTHER; note = 2'-Omethylguanosine
  modified_base 2: mod_base = OTHER; note = 2'-Omethylguanosine
  modified_base 3: mod_base = OTHER; note = 2'-Omethylcytosine
  modified_base 4: mod_base = OTHER; note = 2'-Omethyluridine
  modified_base 5: mod_base = OTHER; note = 2'-Omethylcytosine
  modified_base 6: mod_base = OTHER; note = 2'-Omethylcytosine
  modified_base 10: mod_base = OTHER; note = 2'-Omethylguanosine
  modified_base 11: mod_base = OTHER; note = 2'-Omethylcytosine
  modified_base 12: mod_base = OTHER; note = Guanosine phosphorothiorate
  modified_base 13: mod_base = OTHER; note = 2'-fluorocytosine
  modified_base 14: mod_base = OTHER; note = 2'-Omethyladenosine
  modified_base 15: mod_base = OTHER; note = 2'-fluoroadenosine
  modified_base 16: mod_base = OTHER; note = 2'-Omethyluridine
  modified_base 17: mod_base = OTHER; note = 2'-Omethylguanosine
  modified_base 18: mod_base = OTHER; note = 2'-Omethylguanosine
  modified_base 19: mod_base = OTHER; note = Adenosine phosphorothiorate
  modified_base 20: mod_base = OTHER; note = 2'-Omethyluridine
  modified_base 21: mod_base = OTHER; note = 2'-fluoroadenosine
  modified_base 22: mod_base = OTHER; note = 2'-Omethylguanosine
  modified_base 23: mod_base = OTHER; note = 2'-Omethylcytosine
  modified_base 24: mod_base = OTHER; note = 2'-Omethylguanosine
  modified_base 25: mod_base = OTHER; note = Cytosine phosphorothiorate
  modified_base 29: mod_base = OTHER; note = 2'-Omethylguanosine
  modified_base 33: mod_base = OTHER; note = 2'-fluorouridine
  modified_base 35: mod_base = OTHER; note = Cytosine phosphorothiorate
  modified_base 37: mod_base = OTHER; note = Adenosine phosphorothiorate
  modified_base 38: mod_base = OTHER; note = Adenosine phosphorothiorate
  modified_base 40: mod_base = OTHER; note = 2'-fluorouridine
  modified_base 41: mod_base = OTHER; note = 2'-Omethylcytosine
  modified_base 42: mod_base = OTHER; note = 2'-Omethyladenosine
  modified_base 43: mod_base = OTHER; note = 2'-Omethyladenosine
  modified_base 44: mod_base = OTHER; note = Adenosine phosphorothiorate
  modified_base 45: mod_base = OTHER; note = 2'-O-(2-Methoxyethyl) guanosine
  modified_base 46: mod_base = OTHER; note = Guanosine phosphorothiorate
  modified_base 49: mod_base = OTHER; note = 2'-Omethylcytosine
  modified_base 50: mod_base = OTHER; note = 2'-Omethylcytosine
  modified_base 51: mod_base = OTHER; note = Guanosine phosphorothiorate
  modified_base 52: mod_base = OTHER; note = 2'-Omethylguanosine
  modified_base 53: mod_base = OTHER; note = 2'-Omethylguanosine
  modified_base 54: mod_base = OTHER; note = Uridine phosphorothiorate
  modified_base 55: mod_base = OTHER; note = Uridine phosphorothiorate
  modified_base 56: mod_base = OTHER; note = 2'-Omethylcytosine
  modified_base 57: mod_base = OTHER; note = 2'-Omethylguanosine
  modified_base 59: mod_base = OTHER; note = 2'-Omethylguanosine
  modified_base 61: mod_base = OTHER; note = 2'-Omethylcytosine
  modified_base 62: mod_base = OTHER; note = 2'-Omethylcytosine
  modified_base 63: mod_base = OTHER; note = 2'-fluorocytosine
  modified_base 64: mod_base = OTHER; note = 2'-Omethylguanosine
  modified_base 65: mod_base = OTHER; note = 2'-Omethylguanosine
  modified_base 66: mod_base = OTHER; note = 2'-Omethylcytosine
  modified_base 67: mod_base = OTHER; note = 2'-Omethylguanosine
  modified_base 68: mod_base = OTHER; note = 2'-Omethylguanosine
  modified_base 69: mod_base = OTHER; note = 2'-fluoroadenosine
  modified_base 70: mod_base = OTHER; note = 2'-fluoroguanosine
  modified_base 71: mod_base = OTHER; note = 2'-Omethyluridine
  modified_base 73: mod_base = OTHER; note = 2'-Omethylguanosine
  modified_base 75: mod_base = OTHER; note = 2'-fluorocytosine phosphorothiorate

SEQ ID NO: 5931 - DNA, 76 bp, synthetic construct; identical to SEQ ID NO: 1924
  source 1..76: mol_type = other DNA
  modified_base 1: mod_base = OTHER; note = 2'-Omethylguanosine phosphorothiorate
  modified_base 2: mod_base = OTHER; note = 2'-Omethylguanosine
  modified_base 4: mod_base = OTHER; note = 2'-O-(2-Methoxyethyl) thymine
  modified_base 11: mod_base = OTHER; note = Cytosine phosphorothiorate
  modified_base 13: mod_base = OTHER; note = Cytosine phosphorothiorate
  modified_base 14: mod_base = OTHER; note = 2'-fluoroadenosine
  modified_base 15: mod_base = OTHER; note = 2'-Omethyladenosine
  modified_base 16: mod_base = OTHER; note = Uridine phosphorothiorate
  modified_base 18: mod_base = OTHER; note = 2'-fluoroguanosine
  modified_base 19: mod_base = OTHER; note = 2'-O-(2-Methoxyethyl) adenosine phosphorothiorate
  modified_base 20: mod_base = OTHER; note = 2'-fluorouridine
  modified_base 21: mod_base = OTHER; note = Adenosine phosphorothiorate
  modified_base 23: mod_base = OTHER; note = Cytosine phosphorothiorate
  modified_base 24: mod_base = OTHER; note = 2'-O-(2-Methoxyethyl) guanosine
  modified_base 32: mod_base = OTHER; note = Cytosine phosphorothiorate
  modified_base 33: mod_base = OTHER; note = 2'-O-(2-Methoxyethyl) thymine
  modified_base 38: mod_base = OTHER; note = Adenosine phosphorothiorate
  modified_base 39: mod_base = OTHER; note = Uridine phosphorothiorate
  modified_base 44: mod_base = OTHER; note = Adenosine phosphorothiorate
  modified_base 45: mod_base = OTHER; note = Guanosine phosphorothiorate
  modified_base 46: mod_base = OTHER; note = 2'-fluoroguanosine
  modified_base 49: mod_base = OTHER; note = Cytosine phosphorothiorate
  modified_base 50: mod_base = OTHER; note = deoxycytosine phosphorothiorate
  modified_base 51: mod_base = OTHER; note = 2'-Omethylguanosine
  modified_base 52: mod_base = OTHER; note = 2'-fluoroguanosine
  modified_base 53: mod_base = OTHER; note = 2'-fluoroguanosine
  modified_base 56: mod_base = OTHER; note = 2'-fluorocytosine
  modified_base 57: mod_base = OTHER; note = 2'-fluoroguanosine
  modified_base 61: mod_base = OTHER; note = Cytosine phosphorothiorate
  modified_base 69: mod_base = OTHER; note = Adenosine phosphorothiorate
  modified_base 70: mod_base = OTHER; note = 2'-O-(2-Methoxyethyl) guanosine
  modified_base 71: mod_base = OTHER; note = Uridine phosphorothiorate
  modified_base 72: mod_base = OTHER; note = 2'-O-(2-Methoxyethyl) 5-methylcytosine phosphorothiorate
  modified_base 73: mod_base = OTHER; note = deoxyguanosine phosphorothiorate
  modified_base 74: mod_base = OTHER; note = Cytosine phosphorothiorate
  misc_feature 1..9: note = RNA
  misc_feature 10: note = DNA
  misc_feature 11..16: note = RNA
  misc_feature 17: note = DNA
  misc_feature 18..21: note = RNA
  misc_feature 22: note = DNA
  misc_feature 23..28: note = RNA
  misc_feature 29: note = DNA
  misc_feature 30..39: note = RNA
  misc_feature 40: note = DNA
  misc_feature 41: note = RNA
  misc_feature 42: note = DNA
  misc_feature 43..47: note = RNA
  misc_feature 48: note = DNA
  misc_feature 49: note = RNA
  misc_feature 50: note = DNA
  misc_feature 51..64: note = RNA
  misc_feature 65: note = DNA
  misc_feature 66..72: note = RNA
  misc_feature 73: note = DNA
  misc_feature 74..76: note = RNA

SEQ ID NO: 5932 - RNA, 76 nt, synthetic construct
  source 1..76: mol_type = other RNA
ggctctgtggcgcaatggatagcgcattggacttcaaattcaaaggttgtgggttcgagtcccgccagagtcgcca

SEQ ID NO: 5933 - RNA, 73 nt, synthetic construct; identical to SEQ ID NO: 935
  source 1..73: mol_type = other RNA
  modified_base 1: mod_base = OTHER; note = 2'-Omethylguanosine
  modified_base 14: mod_base = OTHER; note = 2'-Omethyladenosine
  modified_base 16: mod_base = OTHER; note = 2'-Omethyluridine
  modified_base 17: mod_base = OTHER; note = 2'-Omethylguanosine
  modified_base 18: mod_base = OTHER; note = 2'-Omethylguanosine
  modified_base 19: mod_base = OTHER; note = 2'-fluoroadenosine
  modified_base 20: mod_base = OTHER; note = 2'-Omethyluridine
  modified_base 73: mod_base = OTHER; note = 2'-Omethylguanosine

SEQ ID NO: 5934 - RNA, 75 nt, synthetic construct; identical to SEQ ID NO: 3306
  source 1..75: mol_type = other RNA
  modified_base 1: mod_base = OTHER; note = 2'-Omethylguanosine
  modified_base 19: mod_base = OTHER; note = 2'-Omethyluridine
  modified_base 20: mod_base = OTHER; note = 2'-fluoroadenosine
  modified_base 21: mod_base = OTHER; note = 2'-Omethylguanosine
  modified_base 39: mod_base = OTHER; note = 2'-fluorocytosine
  modified_base 40: mod_base = OTHER; note = 2'-Omethyladenosine
  modified_base 41: mod_base = OTHER; note = 2'-Omethylguanosine
  modified_base 42: mod_base = OTHER; note = 2'-Omethyladenosine
  modified_base 72: mod_base = OTHER; note = 2'-Omethyladenosine

SEQ ID NO: 5935 - RNA, 73 nt, synthetic construct; identical to SEQ ID NO: 935
  source 1..73: mol_type = other RNA
  modified_base 1: mod_base = OTHER; note = 2'-Omethylguanosine phosphorothiorate
  modified_base 2: mod_base = OTHER; note = 2'-Omethylguanosine
  modified_base 3: mod_base = OTHER; note = 2'-Omethylcytosine
  modified_base 4: mod_base = OTHER; note = 2'-Omethyluridine
  modified_base 5: mod_base = OTHER; note = 2'-Omethylcytosine
  modified_base 6: mod_base = OTHER; note = 2'-Omethylcytosine
  modified_base 43: mod_base = OTHER; note = 2'-Omethyladenosine
  modified_base 44: mod_base = OTHER; note = 2'-Omethyladenosine
  modified_base 45: mod_base = OTHER; note = 2'-Omethylguanosine
  modified_base 46: mod_base = OTHER; note = 2'-fluoroguanosine
  modified_base 48: mod_base = OTHER; note = 2'-fluorouridine
  modified_base 49: mod_base = OTHER; note = 2'-Omethylcytosine
  modified_base 50: mod_base = OTHER; note = 2'-Omethylcytosine
  modified_base 72: mod_base = OTHER; note = Cytosine phosphorothiorate

SEQ ID NO: 5936 - RNA, 75 nt, synthetic construct; identical to SEQ ID NO: 3299
  source 1..75: mol_type = other RNA
  modified_base 4: mod_base = OTHER; note = 2'-Omethylguanosine phosphorothiorate
  modified_base 10: mod_base = OTHER; note = Cytosine phosphorothiorate
  modified_base 12: mod_base = OTHER; note = 2'-Omethylcytosine
  modified_base 16: mod_base = OTHER; note = Cytosine phosphorothiorate
  modified_base 18: mod_base = OTHER; note = 2'-fluoroguanosine
  modified_base 21: mod_base = OTHER; note = 2'-fluoroguanosine phosphorothiorate
  modified_base 25: mod_base = OTHER; note = 2'-fluoroadenosine
  modified_base 27: mod_base = OTHER; note = 2'-Omethylcytosine
  modified_base 29: mod_base = OTHER; note = 2'-Omethylguanosine phosphorothiorate
  modified_base 38: mod_base = OTHER; note = 2'-fluorouridine
  modified_base 39: mod_base = OTHER; note = 2'-Omethylcytosine phosphorothiorate
  modified_base 40: mod_base = OTHER; note = 2'-fluorouridine
  modified_base 41: mod_base = OTHER; note = 2'-fluoroguanosine
  modified_base 47: mod_base = OTHER; note = 2'-Omethylcytosine phosphorothiorate
  modified_base 52: mod_base = OTHER; note = 2'-fluoroguanosine phosphorothiorate
  modified_base 61: mod_base = OTHER; note = 2'-fluorocytosine phosphorothiorate
  modified_base 62: mod_base = OTHER; note = 2'-fluorocytosine
  modified_base 73: mod_base = OTHER; note = Cytosine phosphorothiorate
  modified_base 74: mod_base = OTHER; note = 2'-Omethylcytosine

SEQ ID NO: 5937 - RNA, 75 nt, synthetic construct; identical to SEQ ID NO: 3336
  source 1..75: mol_type = other RNA
  modified_base 9: mod_base = OTHER; note = 2'-fluoroguanosine phosphorothiorate
  modified_base 21: mod_base = OTHER; note = 2'-fluoroguanosine phosphorothiorate
  modified_base 37: mod_base = OTHER; note = 2'-Omethyladenosine
  modified_base 45: mod_base = OTHER; note = 2'-fluoroguanosine
  modified_base 46: mod_base = OTHER; note = 2'-fluorouridine
  modified_base 49: mod_base = OTHER; note = Adenosine phosphorothiorate
  modified_base 56: mod_base = OTHER; note = 2'-fluoroadenosine phosphorothiorate
  modified_base 72: mod_base = OTHER; note = Guanosine phosphorothiorate
  modified_base 74: mod_base = OTHER; note = 2'-Omethylcytosine

SEQ ID NO: 5938 - RNA, 85 nt, synthetic construct; identical to SEQ ID NO: 3301
  source 1..85: mol_type = other RNA
  modified_base 1: mod_base = OTHER; note = 2'-Omethylguanosine phosphorothiorate
  modified_base 2: mod_base = OTHER; note = 2'-Omethylcytosine
  modified_base 3: mod_base = OTHER; note = 2'-Omethyluridine phosphorothiorate
  modified_base 4: mod_base = OTHER; note = 2'-Omethylguanosine phosphorothiorate
  modified_base 15: mod_base = OTHER; note = 2'-Omethylguanosine phosphorothiorate
  modified_base 18: mod_base = OTHER; note = 2'-Omethylguanosine phosphorothiorate
  modified_base 21: mod_base = OTHER; note = Adenosine phosphorothiorate
  modified_base 26: mod_base = OTHER; note = 2'-Omethylguanosine
  modified_base 31: mod_base = OTHER; note = Adenosine phosphorothiorate
  modified_base 37: mod_base = OTHER; note = Adenosine phosphorothiorate
  modified_base 46: mod_base = OTHER; note = 2'-fluoroguanosine phosphorothiorate
  modified_base 54: mod_base = OTHER; note = 2'-Omethylcytosine
  modified_base 57: mod_base = OTHER; note = 2'-Omethylcytosine
  modified_base 58: mod_base = OTHER; note = 2'-fluoroguanosine
  modified_base 66: mod_base = OTHER; note = 2'-fluoroguanosine
  modified_base 70: mod_base = OTHER; note = 2'-fluorocytosine phosphorothiorate
  modified_base 72: mod_base = OTHER; note = Uridine phosphorothiorate
  modified_base 78: mod_base = OTHER; note = 2'-fluorocytosine
  modified_base 80: mod_base = OTHER; note = 2'-Omethylguanosine

SEQ ID NO: 5939 - RNA, 76 nt, synthetic construct; identical to SEQ ID NO: 3419
  source 1..76: mol_type = other RNA
  modified_base 1: mod_base = OTHER; note = 2'-Omethylguanosine phosphorothiorate
  modified_base 2: mod_base = OTHER; note = 2'-Omethylguanosine phosphorothiorate
  modified_base 52: mod_base = OTHER; note = Guanosine phosphorothiorate
  modified_base 74: mod_base = OTHER; note = Cytosine phosphorothiorate
  modified_base 75: mod_base = OTHER; note = 2'-Omethylcytosine

SEQ ID NO: 5940 - RNA, 86 nt, synthetic construct; identical to SEQ ID NO: 3290
  source 1..86: mol_type = other RNA
  modified_base 80: mod_base = OTHER; note = 2'-Omethylguanosine

SEQ ID NO: 5941 - RNA, 76 nt, synthetic construct; identical to SEQ ID NO: 625
  source 1..76: mol_type = other RNA
  modified_base 1: mod_base = OTHER; note = 2'-Omethylguanosine phosphorothiorate
  modified_base 2: mod_base = OTHER; note = 2'-Omethylguanosine phosphorothiorate
  modified_base 3: mod_base = OTHER; note = 2'-Omethylcytosine phosphorothiorate
  modified_base 4: mod_base = OTHER; note = 2'-Omethyluridine phosphorothiorate
  modified_base 5: mod_base = OTHER; note = 2'-Omethylcytosine phosphorothiorate
  modified_base 6: mod_base = OTHER; note = 2'-Omethylcytosine phosphorothiorate
  modified_base 10: mod_base = OTHER; note = 2'-Omethylguanosine
  modified_base 11: mod_base = OTHER; note = 2'-Omethylcytosine
  modified_base 12: mod_base = OTHER; note = 2'-Omethylguanosine
  modified_base 13: mod_base = OTHER; note = 2'-Omethylcytosine
  modified_base 22: mod_base = OTHER; note = 2'-Omethylguanosine
  modified_base 23: mod_base = OTHER; note = 2'-Omethylcytosine
  modified_base 24: mod_base = OTHER; note = 2'-Omethylguanosine
  modified_base 25: mod_base = OTHER; note = 2'-Omethylcytosine
  modified_base 40: mod_base = OTHER; note = 2'-fluorouridine
  modified_base 41: mod_base = OTHER; note = 2'-fluorocytosine
  modified_base 42: mod_base = OTHER; note = 2'-fluoroadenosine
  modified_base 43: mod_base = OTHER; note = 2'-fluoroadenosine
  modified_base 54: mod_base = OTHER; note = Uridine phosphorothiorate
  modified_base 55: mod_base = OTHER; note = Uridine phosphorothiorate
  modified_base 56: mod_base = OTHER; note = Cytosine phosphorothiorate
  modified_base 57: mod_base = OTHER; note = Guanosine phosphorothiorate

SEQ ID NO: 5942 - RNA, 75 nt, synthetic construct; identical to SEQ ID NO: 1045
  source 1..75: mol_type = other RNA
  modified_base 2: mod_base = OTHER; note = 2'-Omethylguanosine phosphorothiorate
  modified_base 3: mod_base = OTHER; note = 2'-Omethyluridine phosphorothiorate
  modified_base 14: mod_base = OTHER; note = Adenosine phosphorothiorate
  modified_base 16: mod_base = OTHER; note = 2'-Omethyluridine phosphorothiorate
  modified_base 18: mod_base = OTHER; note = 2'-Omethylguanosine
  modified_base 20: mod_base = OTHER; note = 2'-Omethyladenosine
  modified_base 39: mod_base = OTHER; note = 2'-fluorouridine phosphorothiorate
  modified_base 42: mod_base = OTHER; note = 2'-Omethyladenosine
  modified_base 49: mod_base = OTHER; note = 2'-fluorocytosine phosphorothiorate
  modified_base 52: mod_base = OTHER; note = 2'-Omethylguanosine
  modified_base 53: mod_base = OTHER; note = 2'-Omethyluridine
  modified_base 55: mod_base = OTHER; note = Cytosine phosphorothiorate
  modified_base 60: mod_base = OTHER; note = 2'-Omethylcytosine
  modified_base 65: mod_base = OTHER; note = 2'-fluorouridine phosphorothiorate
  modified_base 72: mod_base = OTHER; note = 2'-Omethyluridine
  modified_base 74: mod_base = OTHER; note = 2'-Omethylcytosine phosphorothiorate
  modified_base 75: mod_base = OTHER; note = 2'-Omethyladenosine

SEQ ID NO: 5943 - RNA, 75 nt, synthetic construct; identical to SEQ ID NO: 1045
  source 1..75: mol_type = other RNA
  modified_base 1: mod_base = OTHER; note = 2'-Omethylguanosine
  modified_base 19: mod_base = OTHER; note = 2'-fluorouridine
  modified_base 20: mod_base = OTHER; note = 2'-Omethyladenosine
  modified_base 21: mod_base = OTHER; note = 2'-Omethyladenosine
  modified_base 22: mod_base = OTHER; note = 2'-Omethylguanosine
  modified_base 72: mod_base = OTHER; note = 2'-Omethyluridine

SEQ ID NO: 5944 - RNA, 75 nt, synthetic construct; identical to SEQ ID NO: 3311
  source 1..75: mol_type = other RNA
  modified_base 1: mod_base = OTHER; note = 2'-Omethylguanosine phosphorothiorate
  modified_base 2: mod_base = OTHER; note = 2'-Omethylguanosine
  modified_base 13: mod_base = OTHER; note = Uridine phosphorothiorate
  modified_base 14: mod_base = OTHER; note = 2'-fluoroadenosine
  modified_base 22: mod_base = OTHER; note = 2'-fluoroguanosine
  modified_base 23: mod_base = OTHER; note = 2'-fluorocytosine
  modified_base 27: mod_base = OTHER; note = 2'-fluorocytosine phosphorothiorate
  modified_base 40: mod_base = OTHER; note = 2'-Omethylcytosine phosphorothiorate
  modified_base 41: mod_base = OTHER; note = 2'-fluorocytosine
  modified_base 44: mod_base = OTHER; note = 2'-fluorocytosine
  modified_base 55: mod_base = OTHER; note = Cytosine phosphorothiorate
  modified_base 73: mod_base = OTHER; note = Cytosine phosphorothiorate
  modified_base 74: mod_base = OTHER; note = Cytosine phosphorothiorate

SEQ ID NO: 5945 - RNA, 76 nt, synthetic construct; identical to SEQ ID NO: 3295
  source 1..76: mol_type = other RNA
  modified_base 1: mod_base = OTHER; note = 2'-Omethylcytosine phosphorothiorate
  modified_base 2: mod_base = OTHER; note = 2'-Omethylcytosine
  modified_base 4: mod_base = OTHER; note = 2'-fluorouridine
  modified_base 9: mod_base = OTHER; note = 2'-Omethyladenosine
  modified_base 16: mod_base = OTHER; note = 2'-fluorouridine phosphorothiorate
  modified_base 18: mod_base = OTHER; note = 2'-Omethylguanosine
  modified_base 31: mod_base = OTHER; note = 2'-fluoroadenosine phosphorothiorate
  modified_base 38: mod_base = OTHER; note = 2'-Omethyladenosine
  modified_base 41: mod_base = OTHER; note = 2'-fluorocytosine phosphorothiorate
  modified_base 42: mod_base = OTHER; note = 2'-fluorouridine phosphorothiorate
  modified_base 46: mod_base = OTHER; note = 2'-Omethylguanosine
  modified_base 49: mod_base = OTHER; note = 2'-Omethylguanosine
  modified_base 53: mod_base = OTHER; note = 2'-fluoroguanosine phosphorothiorate
  modified_base 59: mod_base = OTHER; note = Adenosine phosphorothiorate
  modified_base 74: mod_base = OTHER; note = 2'-fluorocytosine
  modified_base 75: mod_base = OTHER; note = 2'-Omethylcytosine phosphorothiorate
  modified_base 76: mod_base = OTHER; note = 2'-Omethyladenosine

SEQ ID NO: 5946 - RNA, 75 nt, synthetic construct; identical to SEQ ID NO: 3336
  source 1..75: mol_type = other RNA
  modified_base 2: mod_base = OTHER; note = Cytosine phosphorothiorate
  modified_base 6: mod_base = OTHER; note = 2'-fluoroguanosine phosphorothiorate
  modified_base 17: mod_base = OTHER; note = 2'-fluoroguanosine phosphorothiorate
  modified_base 20: mod_base = OTHER; note = 2'-fluoroadenosine
  modified_base 26: mod_base = OTHER; note = 2'-fluorouridine
  modified_base 28: mod_base = OTHER; note = 2'-fluoroadenosine phosphorothiorate
  modified_base 35: mod_base = OTHER; note = 2'-fluoroadenosine
  modified_base 37: mod_base = OTHER; note = 2'-Omethyladenosine
  modified_base 39: mod_base = OTHER; note = 2'-Omethylcytosine
  modified_base 40: mod_base = OTHER; note = 2'-Omethyluridine phosphorothiorate
  modified_base 45: mod_base = OTHER; note = Guanosine phosphorothiorate
  modified_base 50: mod_base = OTHER; note = Guanosine phosphorothiorate
  modified_base 53: mod_base = OTHER; note = 2'-fluorouridine
  modified_base 58: mod_base = OTHER; note = 2'-fluoroguanosine
  modified_base 62: mod_base = OTHER; note = 2'-Omethylcytosine
  modified_base 72: mod_base = OTHER; note = Guanosine phosphorothiorate
  modified_base 74: mod_base = OTHER; note = Cytosine phosphorothiorate

SEQ ID NO: 5947 - RNA, 76 nt, synthetic construct; identical to SEQ ID NO: 3318
  source 1..76: mol_type = other RNA
  modified_base 1: mod_base = OTHER; note = 2'-Omethylcytosine phosphorothiorate
  modified_base 2: mod_base = OTHER; note = 2'-Omethylcytosine phosphorothiorate
  modified_base 74: mod_base = OTHER; note = Cytosine phosphorothiorate
  modified_base 75: mod_base = OTHER; note = 2'-Omethylcytosine

SEQ ID NO: 5948 - RNA, 76 nt, synthetic construct
  source 1..76: mol_type = other RNA
gccccggtggcctaatggataaggcattggccttcaaagccagggattgtgggttcgagtcccactcggggtacca

SEQ ID NO: 5949 - RNA, 76 nt, synthetic construct; identical to SEQ ID NO: 625
  source 1..76: mol_type = other RNA
  modified_base 1: mod_base = OTHER; note = 2'-Omethylguanosine
  modified_base 16: mod_base = OTHER; note = Thymine
  modified_base 17: mod_base = OTHER; note = 2'-Omethylguanosine
  modified_base 18: mod_base = OTHER; note = 2'-Omethylguanosine
  modified_base 33: mod_base = OTHER; note = 2'-fluorouridine
  modified_base 50: mod_base = OTHER; note = 2'-Omethylcytosine
  modified_base 52: mod_base = OTHER; note = 2'-Omethylguanosine
  modified_base 55: mod_base = OTHER; note = Uridine phosphorothiorate
  modified_base 73: mod_base = OTHER; note = 2'-Omethylguanosine

SEQ ID NO: 5950 - RNA, 76 nt, synthetic construct; identical to SEQ ID NO: 625
  source 1..76: mol_type = other RNA
  modified_base 1: mod_base = OTHER; note = 2'-Omethylguanosine phosphorothiorate
  modified_base 2: mod_base = OTHER; note = 2'-Omethylguanosine
  modified_base 17: mod_base = OTHER; note = 2'-Omethylguanosine
  modified_base 33: mod_base = OTHER; note = 2'-fluorouridine
  modified_base 35: mod_base = OTHER; note = Cytosine phosphorothiorate
  modified_base 37: mod_base = OTHER; note = Adenosine phosphorothiorate
  modified_base 38: mod_base = OTHER; note = Adenosine phosphorothiorate
  modified_base 52: mod_base = OTHER; note = 2'-Omethylguanosine
  modified_base 54: mod_base = OTHER; note = 2'-Omethyluridine
  modified_base 62: mod_base = OTHER; note = 2'-Omethylcytosine
  modified_base 63: mod_base = OTHER; note = 2'-fluorocytosine
  modified_base 65: mod_base = OTHER; note = 2'-Omethylguanosine
  modified_base 73: mod_base = OTHER; note = 2'-Omethylguanosine
  modified_base 75: mod_base = OTHER; note = 2'-fluorocytosine phosphorothiorate

SEQ ID NO: 5951 - RNA, 86 nt, synthetic construct; identical to SEQ ID NO: 3290
  source 1..86: mol_type = other RNA
  modified_base 68: mod_base = OTHER; note = 2'-Omethyladenosine

SEQ ID NO: 5952 - RNA, 75 nt, synthetic construct; identical to SEQ ID NO: 3306
  source 1..75: mol_type = other RNA
  modified_base 1: mod_base = OTHER; note = 2'-Omethylguanosine phosphorothiorate
  modified_base 2: mod_base = OTHER; note = 2'-Omethyladenosine phosphorothiorate
  modified_base 3: mod_base = OTHER; note = 2'-Omethylcytosine
  modified_base 4: mod_base = OTHER; note = 2'-Omethylcytosine
  modified_base 5: mod_base = OTHER; note = 2'-Omethyluridine
  modified_base 6: mod_base = OTHER; note = 2'-Omethylcytosine
  modified_base 14: mod_base = OTHER; note = 2'-Omethyladenosine
  modified_base 17: mod_base = OTHER; note = 2'-Omethylguanosine
  modified_base 18: mod_base = OTHER; note = 2'-Omethylguanosine
  modified_base 21: mod_base = OTHER; note = 2'-Omethylguanosine
  modified_base 24: mod_base = OTHER; note = 2'-Omethylcytosine
  modified_base 26: mod_base = OTHER; note = 2'-Omethyluridine
  modified_base 32: mod_base = OTHER; note = 2'-fluorouridine
  modified_base 40: mod_base = OTHER; note = 2'-Omethyladenosine
  modified_base 43: mod_base = OTHER; note = 2'-Omethyladenosine
  modified_base 44: mod_base = OTHER; note = 2'-Omethylguanosine
  modified_base 45: mod_base = OTHER; note = 2'-fluoroguanosine
  modified_base 46: mod_base = OTHER; note = 2'-fluorouridine
  modified_base 47: mod_base = OTHER; note = 2'-fluorouridine
  modified_base 51: mod_base = OTHER; note = 2'-Omethyluridine
  modified_base 54: mod_base = OTHER; note = Uridine phosphorothiorate
  modified_base 70: mod_base = OTHER; note = 2'-Omethyluridine
  modified_base 72: mod_base = OTHER; note = 2'-Omethyladenosine

SEQ ID NO: 5953 - RNA, 85 nt, synthetic construct; identical to SEQ ID NO: 3317
  source 1..85: mol_type = other RNA
  modified_base 1: mod_base = OTHER; note = 2'-Omethylguanosine phosphorothiorate
  modified_base 2: mod_base = OTHER; note = Cytosine phosphorothiorate
  modified_base 15: mod_base = OTHER; note = 2'-Omethylguanosine
  modified_base 33: mod_base = OTHER; note = 2'-fluorouridine
  modified_base 34: mod_base = OTHER; note = 2'-fluorocytosine
  modified_base 49: mod_base = OTHER; note = Uridine phosphorothiorate
  modified_base 57: mod_base = OTHER; note = 2'-Omethylcytosine phosphorothiorate
  modified_base 62: mod_base = OTHER; note = 2'-Omethylguanosine
  modified_base 84: mod_base = OTHER; note = 2'-fluorocytosine phosphorothiorate

SEQ ID NO: 5954 - RNA, 76 nt, synthetic construct; identical to SEQ ID NO: 625
  source 1..76: mol_type = other RNA
  modified_base 1: mod_base = OTHER; note = 2'-fluoroguanosine phosphorothiorate
  modified_base 3: mod_base = OTHER; note = 2'-Omethylcytosine
  modified_base 5: mod_base = OTHER; note = 2'-Omethylcytosine
  modified_base 13: mod_base = OTHER; note = 2'-fluorocytosine phosphorothiorate
  modified_base 15: mod_base = OTHER; note = 2'-fluoroadenosine
  modified_base 17: mod_base = OTHER; note = Guanosine phosphorothiorate
  modified_base 18: mod_base = OTHER; note = 2'-fluoroguanosine
  modified_base 20: mod_base = OTHER; note = Uridine phosphorothiorate
  modified_base 24: mod_base = OTHER; note = 2'-fluoroguanosine
  modified_base 27: mod_base = OTHER; note = 2'-Omethyluridine
  modified_base 28: mod_base = OTHER; note = 2'-fluorouridine
  modified_base 31: mod_base = OTHER; note = 2'-Omethyladenosine
  modified_base 33: mod_base = OTHER; note = 2'-fluorouridine
  modified_base 34: mod_base = OTHER; note = 2'-Omethyluridine
  modified_base 39: mod_base = OTHER; note = Uridine phosphorothiorate
  modified_base 40: mod_base = OTHER; note = 2'-Omethyluridine
  modified_base 41: mod_base = OTHER; note = Cytosine phosphorothiorate
  modified_base 42: mod_base = OTHER; note = 2'-fluoroadenosine phosphorothiorate
  modified_base 43: mod_base = OTHER; note = 2'-fluoroadenosine
  modified_base 47: mod_base = OTHER; note = 2'-Omethyluridine
  modified_base 48: mod_base = OTHER; note = 2'-fluorouridine
  modified_base 50: mod_base = OTHER; note = 2'-fluorocytosine
  modified_base 56: mod_base = OTHER; note = 2'-fluorocytosine
  modified_base 57: mod_base = OTHER; note = 2'-Omethylguanosine phosphorothiorate
  modified_base 58: mod_base = OTHER; note = 2'-fluoroadenosine
  modified_base 62: mod_base = OTHER; note = 2'-fluorocytosine phosphorothiorate
  modified_base 64: mod_base = OTHER; note = 2'-fluoroguanosine phosphorothiorate
  modified_base 67: mod_base = OTHER; note = Guanosine phosphorothiorate
  modified_base 69: mod_base = OTHER; note = 2'-fluoroadenosine
  modified_base 75: mod_base = OTHER; note = Cytosine phosphorothiorate
  modified_base 76: mod_base = OTHER; note = 2'-fluoroadenosine

SEQ ID NO: 5955 - RNA, 85 nt, synthetic construct; identical to SEQ ID NO: 3317
  source 1..85: mol_type = other RNA
  modified_base 1: mod_base = OTHER; note = 2'-Omethylguanosine phosphorothiorate
  modified_base 2: mod_base = OTHER; note = Cytosine phosphorothiorate
  modified_base 3: mod_base = OTHER; note = 2'-Omethyluridine phosphorothiorate
  modified_base 4: mod_base = OTHER; note = 2'-Omethylguanosine phosphorothiorate
  modified_base 10: mod_base = OTHER; note = 2'-fluoroguanosine
  modified_base 18: mod_base = OTHER; note = 2'-Omethylguanosine
  modified_base 20: mod_base = OTHER; note = Uridine phosphorothiorate
  modified_base 26: mod_base = OTHER; note = 2'-fluoroguanosine phosphorothiorate
  modified_base 27: mod_base = OTHER; note = 2'-fluorouridine
  modified_base 29: mod_base = OTHER; note = 2'-fluoroguanosine phosphorothiorate
  modified_base 33: mod_base = OTHER; note = 2'-fluorouridine
  modified_base 42: mod_base = OTHER; note = 2'-fluoroadenosine
  modified_base 52: mod_base = OTHER; note = 2'-fluorocytosine
  modified_base 53: mod_base = OTHER; note = 2'-fluorocytosine
  modified_base 57: mod_base = OTHER; note = 2'-Omethylcytosine
  modified_base 60: mod_base = OTHER; note = Adenosine phosphorothiorate
  modified_base 73: mod_base = OTHER; note = 2'-Omethylguanosine
  modified_base 82: mod_base = OTHER; note = 2'-fluoroguanosine phosphorothiorate

SEQ ID NO: 5956 - RNA, 76 nt, synthetic construct; identical to SEQ ID NO: 625
  source 1..76: mol_type = other RNA
  modified_base 8: mod_base = OTHER; note = Thymine
  modified_base 16: mod_base = OTHER; note = Thymine
  modified_base 20: mod_base = OTHER; note = Thymine

SEQ ID NO: 5957 - RNA, 76 nt, synthetic construct
  source 1..76: mol_type = other RNA
ggctccgtggcgcaatggatagcgcattggacttcaaattcaaaggttccggtttcagataccggcggagtcgcca

SEQ ID NO: 5958 - RNA, 86 nt, synthetic construct; identical to SEQ ID NO: 3290
  source 1..86: mol_type = other RNA
  modified_base 6: mod_base = OTHER; note = 2'-Omethylguanosine

SEQ ID NO: 5959 - RNA, 85 nt, synthetic construct; identical to SEQ ID NO: 3297
  source 1..85: mol_type = other RNA
  modified_base 1: mod_base = OTHER; note = 2'-Omethylguanosine phosphorothiorate
  modified_base 2: mod_base = OTHER; note = Cytosine phosphorothiorate
  modified_base 24: mod_base = OTHER; note = Guanosine phosphorothiorate
  modified_base 27: mod_base = OTHER; note = 2'-Omethyluridine phosphorothiorate
  modified_base 34: mod_base = OTHER; note = 2'-fluorouridine
  modified_base 44: mod_base = OTHER; note = Uridine phosphorothiorate
  modified_base 56: mod_base = OTHER; note = Guanosine phosphorothiorate
  modified_base 82: mod_base = OTHER; note = 2'-Omethylguanosine phosphorothiorate

SEQ ID NO: 5960 - RNA, 85 nt, synthetic construct; identical to SEQ ID NO: 3288
  source 1..85: mol_type = other RNA
  modified_base 1: mod_base = OTHER; note = 2'-Omethylcytosine phosphorothiorate
  modified_base 3: mod_base = OTHER; note = 2'-Omethyladenosine
  modified_base 13: mod_base = OTHER; note = Adenosine phosphorothiorate
  modified_base 27: mod_base = OTHER; note = 2'-fluorouridine
  modified_base 45: mod_base = OTHER; note = 2'-Omethylguanosine
  modified_base 58: mod_base = OTHER; note = 2'-Omethylguanosine
  modified_base 64: mod_base = OTHER; note = 2'-fluorouridine
  modified_base 84: mod_base = OTHER; note = 2'-Omethylcytosine

SEQ ID NO: 5961 - RNA, 76 nt, synthetic construct; identical to SEQ ID NO: 3447
  source 1..76: mol_type = other RNA
  modified_base 1: mod_base = OTHER; note = 2'-Omethylguanosine
  modified_base 2: mod_base = OTHER; note = 2'-Omethylcytosine
  modified_base 3: mod_base = OTHER; note = 2'-Omethylcytosine
  modified_base 4: mod_base = OTHER; note = 2'-Omethylcytosine
  modified_base 5: mod_base = OTHER; note = 2'-Omethylguanosine
  modified_base 6: mod_base = OTHER; note = 2'-Omethyladenosine
  modified_base 16: mod_base = OTHER; note = 2'-Omethyluridine
  modified_base 17: mod_base = OTHER; note = 2'-Omethylguanosine
  modified_base 18: mod_base = OTHER; note = 2'-Omethylguanosine
  modified_base 20: mod_base = OTHER; note = 2'-Omethyluridine
  modified_base 25: mod_base = OTHER; note = 2'-Omethylcytosine
  modified_base 33: mod_base = OTHER; note = 2'-fluorouridine
  modified_base 35: mod_base = OTHER; note = Cytosine phosphorothiorate
  modified_base 37: mod_base = OTHER; note = Adenosine phosphorothiorate
  modified_base 38: mod_base = OTHER; note = Adenosine phosphorothiorate
  modified_base 41: mod_base = OTHER; note = 2'-Omethylcytosine
  modified_base 42: mod_base = OTHER; note = 2'-Omethyladenosine
  modified_base 43: mod_base = OTHER; note = 2'-Omethyladenosine
  modified_base 44: mod_base = OTHER; note = 2'-Omethyladenosine
  modified_base 49: mod_base = OTHER; note = 2'-Omethylcytosine
  modified_base 50: mod_base = OTHER; note = 2'-Omethylcytosine
  modified_base 52: mod_base = OTHER; note = 2'-Omethylguanosine
  modified_base 54: mod_base = OTHER; note = Uridine phosphorothiorate
  modified_base 55: mod_base = OTHER; note = Uridine phosphorothiorate
  modified_base 61: mod_base = OTHER; note = 2'-Omethylcytosine
  modified_base 65: mod_base = OTHER; note = 2'-Omethylguanosine
  modified_base 73: mod_base = OTHER; note = 2'-Omethylguanosine

SEQ ID NO: 5962 - RNA, 75 nt, synthetic construct; identical to SEQ ID NO: 3306
  source 1..75: mol_type = other RNA
  modified_base 1: mod_base = OTHER; note = 2'-Omethylguanosine
  modified_base 13: mod_base = OTHER; note = 2'-Omethylcytosine
  modified_base 14: mod_base = OTHER; note = 2'-Omethyladenosine
  modified_base 15: mod_base = OTHER; note = 2'-Omethyladenosine
  modified_base 16: mod_base = OTHER; note = 2'-Omethylcytosine
  modified_base 17: mod_base = OTHER; note = 2'-Omethylguanosine
  modified_base 18: mod_base = OTHER; note = 2'-Omethylguanosine
  modified_base 19: mod_base = OTHER; note = Uridine phosphorothiorate
  modified_base 20: mod_base = OTHER; note = Adenosine phosphorothiorate
  modified_base 24: mod_base = OTHER; note = 2'-Omethylcytosine
  modified_base 32: mod_base = OTHER; note = 2'-fluorouridine
  modified_base 33: mod_base = OTHER; note = 2'-Omethylcytosine
  modified_base 34: mod_base = OTHER; note = Uridine phosphorothiorate
  modified_base 36: mod_base = OTHER; note = Guanosine phosphorothiorate
  modified_base 37: mod_base = OTHER; note = Adenosine phosphorothiorate
  modified_base 48: mod_base = OTHER; note = 2'-Omethylguanosine
  modified_base 49: mod_base = OTHER; note = 2'-Omethylcytosine
  modified_base 51: mod_base = OTHER; note = 2'-Omethyluridine
  modified_base 53: mod_base = OTHER; note = Uridine phosphorothiorate
  modified_base 54: mod_base = OTHER; note = Uridine phosphorothiorate
  modified_base 55: mod_base = OTHER; note = 2'-Omethylcytosine
  modified_base 56: mod_base = OTHER; note = Adenosine phosphorothiorate
  modified_base 57: mod_base = OTHER; note = Adenosine phosphorothiorate
  modified_base 58: mod_base = OTHER; note = 2'-Omethyladenosine
  modified_base 60: mod_base = OTHER; note = 2'-Omethylcytosine
  modified_base 64: mod_base = OTHER; note = 2'-Omethyluridine
  modified_base 72: mod_base = OTHER; note = 2'-Omethyladenosine

SEQ ID NO: 5963 - RNA, 76 nt, synthetic construct; identical to SEQ ID NO: 625
  source 1..76: mol_type = other RNA
  modified_base 1: mod_base = OTHER; note = 2'-Omethylguanosine
  modified_base 3: mod_base = OTHER; note = Cytosine phosphorothiorate
  modified_base 4: mod_base = OTHER; note = Uridine phosphorothiorate
  modified_base 5: mod_base = OTHER; note = 2'-Omethylcytosine phosphorothiorate
  modified_base 6: mod_base = OTHER; note = 2'-Omethylcytosine
  modified_base 11: mod_base = OTHER; note = Cytosine phosphorothiorate
  modified_base 12: mod_base = OTHER; note = 2'-fluoroguanosine phosphorothiorate
  modified_base 13: mod_base = OTHER; note = 2'-fluorocytosine phosphorothiorate
  modified_base 14: mod_base = OTHER; note = 2'-fluoroadenosine
  modified_base 15: mod_base = OTHER; note = 2'-Omethyladenosine
  modified_base 16: mod_base = OTHER; note = 2'-fluorouridine
  modified_base 18: mod_base = OTHER; note = 2'-Omethylguanosine
  modified_base 22: mod_base = OTHER; note = 2'-Omethylguanosine
  modified_base 27: mod_base = OTHER; note = 2'-Omethyluridine
  modified_base 29: mod_base = OTHER; note = 2'-fluoroguanosine phosphorothiorate
  modified_base 30: mod_base = OTHER; note = Guanosine phosphorothiorate
  modified_base 31: mod_base = OTHER; note = 2'-fluoroadenosine
  modified_base 32: mod_base = OTHER; note = 2'-fluorocytosine
  modified_base 36: mod_base = OTHER; note = Adenosine phosphorothiorate
  modified_base 39: mod_base = OTHER; note = Uridine phosphorothiorate
  modified_base 40: mod_base = OTHER; note = 2'-Omethyluridine
  modified_base 43: mod_base = OTHER; note = 2'-fluoroadenosine
  modified_base 45: mod_base = OTHER; note = 2'-Omethylguanosine
  modified_base 46: mod_base = OTHER; note = 2'-fluoroguanosine
  modified_base 49: mod_base = OTHER; note = 2'-fluorocytosine
  modified_base 50: mod_base = OTHER; note = Cytosine phosphorothiorate
  modified_base 54: mod_base = OTHER; note = 2'-fluorouridine
  modified_base 57: mod_base = OTHER; note = 2'-Omethylguanosine
  modified_base 58: mod_base = OTHER; note = Adenosine phosphorothiorate
  modified_base 59: mod_base = OTHER; note = 2'-Omethylguanosine
  modified_base 67: mod_base = OTHER; note = 2'-fluoroguanosine
  modified_base 69: mod_base = OTHER; note = 2'-Omethyladenosine
  modified_base 71: mod_base = OTHER; note = Uridine phosphorothiorate
  modified_base 72: mod_base = OTHER; note = 2'-fluorocytosine
  modified_base 73: mod_base = OTHER; note = Guanosine phosphorothiorate
  modified_base 74: mod_base = OTHER; note = 2'-Omethylcytosine phosphorothiorate
  modified_base 76: mod_base = OTHER; note = 2'-Omethyladenosine

SEQ ID NO: 5964 - RNA, 76 nt, synthetic construct
  source 1..76: mol_type = other RNA
ggctccgtggcgcaatggacagcgcattggacttcagattcaaaggttccgggttcgagtcccggcggagtcgcca

SEQ ID NO: 5965 - RNA, 76 nt, synthetic construct; identical to SEQ ID NO: 3295
  source 1..76: mol_type = other RNA
  modified_base 1: mod_base = OTHER; note = 2'-fluorocytosine phosphorothiorate
  modified_base 2: mod_base = OTHER; note = 2'-Omethylcytosine phosphorothiorate
  modified_base 3: mod_base = OTHER; note = 2'-fluorouridine phosphorothiorate
  modified_base 4: mod_base = OTHER; note = 2'-Omethyluridine
  modified_base 8: mod_base = OTHER; note = 2'-fluorouridine
  modified_base 10: mod_base = OTHER; note = 2'-fluoroguanosine
  modified_base 11: mod_base = OTHER; note = 2'-Omethylcytosine
  modified_base 15: mod_base = OTHER; note = Guanosine phosphorothiorate
  modified_base 25: mod_base = OTHER; note = 2'-fluorocytosine
  modified_base 26: mod_base = OTHER; note = Guanosine phosphorothiorate
  modified_base 28: mod_base = OTHER; note = 2'-Omethyladenosine
  modified_base 37: mod_base = OTHER; note = Guanosine phosphorothiorate
  modified_base 40: mod_base = OTHER; note = 2'-fluorocytosine
  modified_base 47: mod_base = OTHER; note = 2'-fluorouridine phosphorothiorate
  modified_base 49: mod_base = OTHER; note = 2'-Omethylguanosine
  modified_base 52: mod_base = OTHER; note = 2'-fluoroguanosine phosphorothiorate
  modified_base 53: mod_base = OTHER; note = 2'-fluoroguanosine phosphorothiorate
  modified_base 54: mod_base = OTHER; note = 2'-fluorouridine phosphorothiorate
  modified_base 75: mod_base = OTHER; note = 2'-fluorocytosine

SEQ ID NO: 5966 - RNA, 76 nt, synthetic construct; identical to SEQ ID NO: 625
  source 1..76: mol_type = other RNA
  modified_base 1: mod_base = OTHER; note = 2'-Omethylguanosine phosphorothiorate
  modified_base 2: mod_base = OTHER; note = 2'-Omethylguanosine phosphorothiorate
  modified_base 3: mod_base = OTHER; note = 2'-Omethylcytosine
  modified_base 4: mod_base = OTHER; note = 2'-Omethyluridine
  modified_base 5: mod_base = OTHER; note = 2'-Omethylcytosine
  modified_base 6: mod_base = OTHER; note = 2'-Omethylcytosine
  modified_base 14: mod_base = OTHER; note = 2'-Omethyladenosine
  modified_base 15: mod_base = OTHER; note = 2'-Omethyladenosine
  modified_base 16: mod_base = OTHER; note = 2'-Omethyluridine
  modified_base 17: mod_base = OTHER; note = 2'-Omethylguanosine
  modified_base 18: mod_base = OTHER; note = 2'-Omethylguanosine
  modified_base 20: mod_base = OTHER; note = 2'-Omethyluridine
  modified_base 25: mod_base = OTHER; note = 2'-Omethylcytosine
  modified_base 33: mod_base = OTHER; note = 2'-fluorouridine
  modified_base 35: mod_base = OTHER; note = Cytosine phosphorothiorate
  modified_base 37: mod_base = OTHER; note = Adenosine phosphorothiorate
  modified_base 38: mod_base = OTHER; note = Adenosine phosphorothiorate
  modified_base 49: mod_base = OTHER; note = 2'-Omethylcytosine
  modified_base 50: mod_base = OTHER; note = 2'-Omethylcytosine
  modified_base 52: mod_base = OTHER; note = 2'-Omethylguanosine
  modified_base 54: mod_base = OTHER; note = 2'-Omethyluridine
  modified_base 55: mod_base = OTHER; note = Uridine phosphorothiorate
  modified_base 56: mod_base = OTHER; note = 2'-Omethylcytosine
  modified_base 57: mod_base = OTHER; note = 2'-fluoroguanosine
  modified_base 59: mod_base = OTHER; note = 2'-Omethylguanosine
  modified_base 61: mod_base = OTHER; note = 2'-Omethylcytosine
  modified_base 62: mod_base = OTHER; note = 2'-Omethylcytosine
  modified_base 63: mod_base = OTHER; note = 2'-fluorocytosine
  modified_base 64: mod_base = OTHER; note = 2'-Omethylguanosine
  modified_base 65: mod_base = OTHER; note = 2'-Omethylguanosine
  modified_base 75: mod_base = OTHER; note = Cytosine phosphorothiorate
  modified_base 76: mod_base = OTHER; note = 2'-Omethyladenosine

SEQ ID NO: 5967 - RNA, 85 nt, synthetic construct; identical to SEQ ID NO: 3297
  source 1..85: mol_type = other RNA
  modified_base 1: mod_base = OTHER; note = 2'-Omethylguanosine phosphorothiorate
  modified_base 2: mod_base = OTHER; note = 2'-Omethylcytosine phosphorothiorate
  modified_base 8: mod_base = OTHER; note = Uridine phosphorothiorate
  modified_base 14: mod_base = OTHER; note = Adenosine phosphorothiorate
  modified_base 18: mod_base = OTHER; note = Guanosine phosphorothiorate
  modified_base 20: mod_base = OTHER; note = 2'-Omethyluridine phosphorothiorate
  modified_base 22: mod_base = OTHER; note = Adenosine phosphorothiorate
  modified_base 25: mod_base = OTHER; note = Cytosine phosphorothiorate
  modified_base 27: mod_base = OTHER; note = Uridine phosphorothiorate
  modified_base 41: mod_base = OTHER; note = 2'-Omethylcytosine phosphorothiorate
  modified_base 56: mod_base = OTHER; note = Guanosine phosphorothiorate
  modified_base 57: mod_base = OTHER; note = 2'-fluorocytosine
  modified_base 58: mod_base = OTHER; note = Guanosine phosphorothiorate
  modified_base 80: mod_base = OTHER; note = Guanosine phosphorothiorate
  modified_base 82: mod_base = OTHER; note = 2'-Omethylguanosine phosphorothiorate

SEQ ID NO: 5968 - RNA, 76 nt, synthetic construct; identical to SEQ ID NO: 625
  source 1..76: mol_type = other RNA
  modified_base 1: mod_base = OTHER; note = 2'-Omethylguanosine
  modified_base 2: mod_base = OTHER; note = 2'-Omethylguanosine
  modified_base 3: mod_base = OTHER; note = 2'-Omethylcytosine
  modified_base 4: mod_base = OTHER; note = 2'-Omethyluridine
  modified_base 5: mod_base = OTHER; note = 2'-Omethylcytosine
  modified_base 6: mod_base = OTHER; note = 2'-Omethylcytosine
  modified_base 10: mod_base = OTHER; note = 2'-Omethylguanosine
  modified_base 12: mod_base = OTHER; note = 2'-Omethylguanosine phosphorothiorate
  modified_base 13: mod_base = OTHER; note = 2'-Omethylcytosine
  modified_base 14: mod_base = OTHER; note = 2'-Omethyladenosine
  modified_base 15: mod_base = OTHER; note = 2'-Omethyladenosine
  modified_base 18: mod_base = OTHER; note = 2'-fluoroguanosine phosphorothiorate
  modified_base 20: mod_base = OTHER; note = Uridine phosphorothiorate
  modified_base 21: mod_base = OTHER; note = 2'-fluoroadenosine phosphorothiorate
  modified_base 22: mod_base = OTHER; note = 2'-fluoroguanosine phosphorothiorate
  modified_base 23: mod_base = OTHER; note = 2'-Omethylcytosine
  modified_base 24: mod_base = OTHER; note = 2'-Omethylguanosine
  modified_base 25: mod_base = OTHER; note = 2'-Omethylcytosine
  modified_base 26: mod_base = OTHER; note = Adenosine phosphorothiorate
  modified_base 29: mod_base = OTHER; note = 2'-fluoroguanosine
  modified_base 30: mod_base = OTHER; note = 2'-fluoroguanosine phosphorothiorate
  modified_base 31: mod_base = OTHER; note = 2'-Omethyladenosine phosphorothiorate
  modified_base 33: mod_base = OTHER; note = 2'-fluorouridine
  modified_base 37: mod_base = OTHER; note = Adenosine phosphorothiorate
  modified_base 38: mod_base = OTHER; note = Adenosine phosphorothiorate
  modified_base 40: mod_base = OTHER; note = 2'-fluorouridine
  modified_base 41: mod_base = OTHER; note = 2'-fluorocytosine
  modified_base 42: mod_base = OTHER; note = Adenosine phosphorothiorate
  modified_base 43: mod_base = OTHER; note = Adenosine phosphorothiorate
  modified_base 44: mod_base = OTHER; note = 2'-Omethyladenosine
  modified_base 45: mod_base = OTHER; note = 2'-Omethylguanosine phosphorothiorate
  modified_base 49: mod_base = OTHER; note = 2'-Omethylcytosine phosphorothiorate
  modified_base 50: mod_base = OTHER; note = 2'-Omethylcytosine
  modified_base 52: mod_base = OTHER; note = 2'-Omethylguanosine
  modified_base 55: mod_base = OTHER; note = Uridine phosphorothiorate
  modified_base 56: mod_base = OTHER; note = Cytosine phosphorothiorate
  modified_base 57: mod_base = OTHER; note = Guanosine phosphorothiorate
  modified_base 59: mod_base = OTHER; note = 2'-Omethylguanosine phosphorothiorate
  modified_base 60: mod_base = OTHER; note = 2'-Omethyluridine phosphorothiorate
  modified_base 61: mod_base = OTHER; note = Cytosine phosphorothiorate
  modified_base 62: mod_base = OTHER; note = 2'-Omethylcytosine
  modified_base 63: mod_base = OTHER; note = 2'-fluorocytosine
  modified_base 64: mod_base = OTHER; note = Guanosine phosphorothiorate
  modified_base 66: mod_base = OTHER; note = 2'-Omethylcytosine
  modified_base 67: mod_base = OTHER; note = 2'-fluoroguanosine
  modified_base 68: mod_base = OTHER; note = 2'-Omethylguanosine
  modified_base 69: mod_base = OTHER; note = 2'-fluoroadenosine
  modified_base 71: mod_base = OTHER; note = 2'-Omethyluridine phosphorothiorate
  modified_base 73: mod_base = OTHER; note = 2'-Omethylguanosine
  modified_base 74: mod_base = OTHER; note = 2'-fluorocytosine
  modified_base 75: mod_base = OTHER; note = 2'-fluorocytosine
  modified_base 76: mod_base = OTHER; note = 2'-Omethyladenosine

SEQ ID NO: 5969 - RNA, 75 nt, synthetic construct; identical to SEQ ID NO: 1045
  source 1..75: mol_type = other RNA
  modified_base 1: mod_base = OTHER; note = 2'-Omethylguanosine
  modified_base 13: mod_base = OTHER; note = 2'-Omethyluridine
  modified_base 14: mod_base = OTHER; note = 2'-Omethyladenosine
  modified_base 15: mod_base = OTHER; note = 2'-Omethyladenosine
  modified_base 16: mod_base = OTHER; note = 2'-Omethyluridine
  modified_base 17: mod_base = OTHER; note = 2'-Omethylguanosine
  modified_base 18: mod_base = OTHER; note = 2'-Omethylguanosine
  modified_base 19: mod_base = OTHER; note = Uridine phosphorothiorate
  modified_base 20: mod_base = OTHER; note = 2'-Omethyladenosine
  modified_base 21: mod_base = OTHER; note = Adenosine phosphorothiorate
  modified_base 22: mod_base = OTHER; note = 2'-Omethylguanosine
  modified_base 23: mod_base = OTHER; note = 2'-Omethylcytosine
  modified_base 24: mod_base = OTHER; note = 2'-Omethyladenosine
  modified_base 25: mod_base = OTHER; note = 2'-Omethylcytosine
  modified_base 33: mod_base = OTHER; note = 2'-fluorouridine
  modified_base 34: mod_base = OTHER; note = 2'-Omethyluridine
  modified_base 35: mod_base = OTHER; note = Uridine phosphorothiorate
  modified_base 37: mod_base = OTHER; note = Adenosine phosphorothiorate
  modified_base 38: mod_base = OTHER; note = Adenosine phosphorothiorate
  modified_base 48: mod_base = OTHER; note = 2'-Omethylcytosine
  modified_base 49: mod_base = OTHER; note = 2'-Omethylcytosine
  modified_base 51: mod_base = OTHER; note = 2'-Omethyladenosine
  modified_base 53: mod_base = OTHER; note = Uridine phosphorothiorate
  modified_base 54: mod_base = OTHER; note = Uridine phosphorothiorate
  modified_base 60: mod_base = OTHER; note = 2'-Omethylcytosine
  modified_base 64: mod_base = OTHER; note = 2'-Omethylguanosine
  modified_base 72: mod_base = OTHER; note = 2'-Omethyluridine

SEQ ID NO: 5970 - RNA, 76 nt, synthetic construct; identical to SEQ ID NO: 3325
  source 1..76: mol_type = other RNA
  modified_base 1: mod_base = OTHER; note = 2'-Omethyluridine phosphorothiorate
  modified_base 2: mod_base = OTHER; note = 2'-Omethyladenosine
  modified_base 3: mod_base = OTHER; note = 2'-Omethylcytosine
  modified_base 4: mod_base = OTHER; note = 2'-Omethyladenosine
  modified_base 5: mod_base = OTHER; note = 2'-Omethylcytosine
  modified_base 6: mod_base = OTHER; note = 2'-Omethylcytosine
  modified_base 49: mod_base = OTHER; note = 2'-Omethylcytosine
  modified_base 50: mod_base = OTHER; note = 2'-Omethylcytosine
  modified_base 51: mod_base = OTHER; note = 2'-Omethylguanosine
  modified_base 52: mod_base = OTHER; note = 2'-Omethylguanosine
  modified_base 53: mod_base = OTHER; note = 2'-Omethylguanosine
  modified_base 61: mod_base = OTHER; note = 2'-Omethylcytosine
  modified_base 62: mod_base = OTHER; note = 2'-Omethylcytosine
  modified_base 63: mod_base = OTHER; note = 2'-fluorocytosine
  modified_base 64: mod_base = OTHER; note = 2'-Omethylguanosine
  modified_base 65: mod_base = OTHER; note = 2'-Omethylguanosine
  modified_base 66: mod_base = OTHER; note = 2'-Omethylcytosine
  modified_base 67: mod_base = OTHER; note = 2'-Omethylguanosine
  modified_base 68: mod_base = OTHER; note = 2'-Omethylguanosine
  modified_base 69: mod_base = OTHER; note = 2'-Omethyluridine
  modified_base 71: mod_base = OTHER; note = 2'-Omethyluridine
  modified_base 72: mod_base = OTHER; note = 2'-Omethyladenosine

SEQ ID NO: 5971 - RNA, 86 nt, synthetic construct; identical to SEQ ID NO: 3290
  source 1..86: mol_type = other RNA
  modified_base 31: mod_base = OTHER; note = 2'-fluoroadenosine

SEQ ID NO: 5972 - RNA, 76 nt, synthetic construct; identical to SEQ ID NO: 625
  source 1..76: mol_type = other RNA
  modified_base 1: mod_base = OTHER; note = 2'-Omethylguanosine
  modified_base 2: mod_base = OTHER; note = 2'-Omethylguanosine
  modified_base 18: mod_base = OTHER; note = 2'-Omethylguanosine
  modified_base 33: mod_base = OTHER; note = 2'-fluorouridine
  modified_base 35: mod_base = OTHER; note = Cytosine phosphorothiorate
  modified_base 37: mod_base = OTHER; note = Adenosine phosphorothiorate
  modified_base 38: mod_base = OTHER; note = Adenosine phosphorothiorate
  modified_base 52: mod_base = OTHER; note = 2'-Omethylguanosine
  modified_base 57: mod_base = OTHER; note = 2'-Omethylguanosine
  modified_base 73: mod_base = OTHER; note = 2'-Omethylguanosine
  modified_base 75: mod_base = OTHER; note = 2'-fluorocytosine phosphorothiorate

SEQ ID NO: 5973 - RNA, 85 nt, synthetic construct; identical to SEQ ID NO: 3310
  source 1..85: mol_type = other RNA
  modified_base 1: mod_base = OTHER; note = 2'-Omethylcytosine
  modified_base 17: mod_base = OTHER; note = 2'-Omethylguanosine
  modified_base 26: mod_base = OTHER; note = 2'-Omethyluridine
  modified_base 28: mod_base = OTHER; note = 2'-fluoroguanosine
  modified_base 32: mod_base = OTHER; note = 2'-fluorouridine
  modified_base 36: mod_base = OTHER; note = Guanosine phosphorothiorate
  modified_base 43: mod_base = OTHER; note = 2'-Omethyluridine
  modified_base 46: mod_base = OTHER; note = Adenosine phosphorothiorate
  modified_base 54: mod_base = OTHER; note = 2'-fluorocytosine
  modified_base 58: mod_base = OTHER; note = 2'-Omethylguanosine
  modified_base 61: mod_base = OTHER; note = Guanosine phosphorothiorate
  modified_base 73: mod_base = OTHER; note = Adenosine phosphorothiorate
  modified_base 84: mod_base = OTHER; note = 2'-Omethylcytosine

SEQ ID NO: 5974 - RNA, 76 nt, synthetic construct; identical to SEQ ID NO: 625
  source 1..76: mol_type = other RNA
  modified_base 1: mod_base = OTHER; note = 2'-Omethylguanosine phosphorothiorate
  modified_base 2: mod_base = OTHER; note = 2'-Omethylguanosine
  modified_base 3: mod_base = OTHER; note = 2'-Omethylcytosine
  modified_base 4: mod_base = OTHER; note = 2'-Omethyluridine
  modified_base 5: mod_base = OTHER; note = 2'-Omethylcytosine
  modified_base 6: mod_base = OTHER; note = 2'-Omethylcytosine
  modified_base 10: mod_base = OTHER; note = 2'-Omethylguanosine
  modified_base 11: mod_base = OTHER; note = 2'-Omethylcytosine
  modified_base 12: mod_base = OTHER; note = 2'-Omethylguanosine
  modified_base 13: mod_base = OTHER; note = 2'-Omethylcytosine
  modified_base 14: mod_base = OTHER; note = 2'-Omethyladenosine
  modified_base 15: mod_base = OTHER; note = 2'-fluoroadenosine
  modified_base 16: mod_base = OTHER; note = 2'-Omethyluridine
  modified_base 17: mod_base = OTHER; note = 2'-Omethylguanosine
  modified_base 18: mod_base = OTHER; note = 2'-Omethylguanosine
  modified_base 19: mod_base = OTHER; note = 2'-fluoroadenosine
  modified_base 20: mod_base = OTHER; note = 2'-Omethyluridine
  modified_base 22: mod_base = OTHER; note = 2'-Omethylguanosine
  modified_base 23: mod_base = OTHER; note = 2'-Omethylcytosine
  modified_base 24: mod_base = OTHER; note = 2'-Omethylguanosine
  modified_base 25: mod_base = OTHER; note = 2'-Omethylcytosine
  modified_base 49: mod_base = OTHER; note = 2'-Omethylcytosine
  modified_base 50: mod_base = OTHER; note = 2'-Omethylcytosine
  modified_base 51: mod_base = OTHER; note = 2'-Omethylguanosine
  modified_base 52: mod_base = OTHER; note = 2'-Omethylguanosine
  modified_base 53: mod_base = OTHER; note = 2'-Omethylguanosine
  modified_base 54: mod_base = OTHER; note = 2'-Omethyluridine
  modified_base 56: mod_base = OTHER; note = 2'-Omethylcytosine
  modified_base 57: mod_base = OTHER; note = 2'-fluoroguanosine
  modified_base 59: mod_base = OTHER; note = 2'-Omethylguanosine
  modified_base 61: mod_base = OTHER; note = 2'-Omethylcytosine
  modified_base 62: mod_base = OTHER; note = 2'-Omethylcytosine
  modified_base 63: mod_base = OTHER; note = 2'-Omethylcytosine
  modified_base 64: mod_base = OTHER; note = 2'-Omethylguanosine
  modified_base 65: mod_base = OTHER; note = 2'-Omethylguanosine
  modified_base 66: mod_base = OTHER; note = 2'-Omethylcytosine
  modified_base 67: mod_base = OTHER; note = 2'-Omethylguanosine
  modified_base 68: mod_base = OTHER; note = 2'-Omethylguanosine
  modified_base 69: mod_base = OTHER; note = 2'-Omethyladenosine
  modified_base 73: mod_base = OTHER; note = 2'-Omethylguanosine

SEQ ID NO: 5975 - RNA, 86 nt, synthetic construct; identical to SEQ ID NO: 3290
  source 1..86: mol_type = other RNA
  modified_base 34: mod_base = OTHER; note = 2'-Omethyluridine

SEQ ID NO: 5976 - RNA, 76 nt, synthetic construct; identical to SEQ ID NO: 3419
  source 1..76: mol_type = other RNA
  modified_base 1: mod_base = OTHER; note = 2'-Omethylguanosine
  modified_base 14: mod_base = OTHER; note = 2'-Omethyladenosine
  modified_base 15: mod_base = OTHER; note = 2'-fluoroadenosine
  modified_base 16: mod_base = OTHER; note = 2'-Omethyluridine
  modified_base 17: mod_base = OTHER; note = 2'-Omethylguanosine
  modified_base 18: mod_base = OTHER; note = 2'-Omethylguanosine
  modified_base 19: mod_base = OTHER; note = 2'-fluoroadenosine
  modified_base 20: mod_base = OTHER; note = 2'-Omethyluridine
  modified_base 54: mod_base = OTHER; note = 2'-Omethyluridine phosphorothiorate
  modified_base 55: mod_base = OTHER; note = Uridine phosphorothiorate
  modified_base 56: mod_base = OTHER; note = 2'-Omethylcytosine
  modified_base 57: mod_base = OTHER; note = 2'-Omethylguanosine
  modified_base 59: mod_base = OTHER; note = 2'-Omethylguanosine
  modified_base 73: mod_base = OTHER; note = 2'-Omethylguanosine

SEQ ID NO: 5977 - RNA, 76 nt, synthetic construct; identical to SEQ ID NO: 625
  source 1..76: mol_type = other RNA
  modified_base 1: mod_base = OTHER; note = 2'-Omethylguanosine phosphorothiorate
  modified_base 2: mod_base = OTHER; note = 2'-fluoroguanosine
  modified_base 6: mod_base = OTHER; note = 2'-fluorocytosine phosphorothiorate
  modified_base 14: mod_base = OTHER; note = 2'-fluoroadenosine phosphorothiorate
  modified_base 15: mod_base = OTHER; note = 2'-fluoroadenosine
  modified_base 17: mod_base = OTHER; note = Guanosine phosphorothiorate
  modified_base 18: mod_base = OTHER; note = Guanosine phosphorothiorate
  modified_base 20: mod_base = OTHER; note = 2'-Omethyluridine
  modified_base 23: mod_base = OTHER; note = 2'-fluorocytosine
  modified_base 24: mod_base = OTHER; note = Guanosine phosphorothiorate
  modified_base 25: mod_base = OTHER; note = 2'-Omethylcytosine
  modified_base 29: mod_base = OTHER; note = 2'-Omethylguanosine phosphorothiorate
  modified_base 30: mod_base = OTHER; note = 2'-Omethylguanosine
  modified_base 31: mod_base = OTHER; note = 2'-fluoroadenosine
  modified_base 33: mod_base = OTHER; note = Uridine phosphorothiorate
  modified_base 34: mod_base = OTHER; note = 2'-Omethyluridine
  modified_base 40: mod_base = OTHER; note = 2'-fluorouridine
  modified_base 41: mod_base = OTHER; note = 2'-Omethylcytosine
  modified_base 44: mod_base = OTHER; note = 2'-Omethyladenosine
  modified_base 45: mod_base = OTHER; note = 2'-fluoroguanosine
  modified_base 47: mod_base = OTHER; note = Uridine phosphorothiorate
  modified_base 48: mod_base = OTHER; note = 2'-fluorouridine
  modified_base 49: mod_base = OTHER; note = 2'-Omethylcytosine
  modified_base 50: mod_base = OTHER; note = 2'-fluorocytosine
  modified_base 53: mod_base = OTHER; note = 2'-Omethylguanosine phosphorothiorate
  modified_base 54: mod_base = OTHER; note = 2'-fluorouridine
  modified_base 57: mod_base = OTHER; note = Guanosine phosphorothiorate
  modified_base 58: mod_base = OTHER; note = 2'-fluoroadenosine
  modified_base 62: mod_base = OTHER; note = 2'-fluorocytosine phosphorothiorate
  modified_base 63: mod_base = OTHER; note = 2'-Omethylcytosine phosphorothiorate
  modified_base 68: mod_base = OTHER; note = 2'-fluoroguanosine
  modified_base 72: mod_base = OTHER; note = 2'-Omethylcytosine
  modified_base 73: mod_base = OTHER; note = 2'-fluoroguanosine
  modified_base 75: mod_base = OTHER; note = 2'-Omethylcytosine

SEQ ID NO: 5978 - RNA, 75 nt, synthetic construct; identical to SEQ ID NO: 3306
  source 1..75: mol_type = other RNA
  modified_base 1: mod_base = OTHER; note = 2'-Omethylguanosine
  modified_base 10: mod_base = OTHER; note = 2'-Omethylguanosine
  modified_base 11: mod_base = OTHER; note = 2'-Omethylcytosine
  modified_base 12: mod_base = OTHER; note = 2'-Omethylguanosine
  modified_base 13: mod_base = OTHER; note = 2'-Omethylcytosine
  modified_base 14: mod_base = OTHER; note = 2'-Omethyladenosine
  modified_base 15: mod_base = OTHER; note = 2'-Omethyladenosine
  modified_base 16: mod_base = OTHER; note = 2'-Omethylcytosine
  modified_base 17: mod_base = OTHER; note = 2'-Omethylguanosine
  modified_base 18: mod_base = OTHER; note = 2'-Omethylguanosine
  modified_base 19: mod_base = OTHER; note = Uridine phosphorothiorate
  modified_base 20: mod_base = OTHER; note = Adenosine phosphorothiorate
  modified_base 24: mod_base = OTHER; note = 2'-Omethylcytosine
  modified_base 32: mod_base = OTHER; note = Uridine phosphorothiorate
  modified_base 33: mod_base = OTHER; note = 2'-Omethylcytosine
  modified_base 34: mod_base = OTHER; note = Uridine phosphorothiorate
  modified_base 36: mod_base = OTHER; note = Guanosine phosphorothiorate
  modified_base 37: mod_base = OTHER; note = Adenosine phosphorothiorate
  modified_base 48: mod_base = OTHER; note = 2'-Omethylguanosine
  modified_base 49: mod_base = OTHER; note = 2'-Omethylcytosine
  modified_base 51: mod_base = OTHER; note = 2'-Omethyluridine
  modified_base 53: mod_base = OTHER; note = Uridine phosphorothiorate
  modified_base 54: mod_base = OTHER; note = Uridine phosphorothiorate
  modified_base 60: mod_base = OTHER; note = 2'-Omethylcytosine
  modified_base 64: mod_base = OTHER; note = 2'-Omethyluridine
  modified_base 72: mod_base = OTHER; note = 2'-Omethyladenosine

SEQ ID NO: 5979 - RNA, 76 nt, synthetic construct; identical to SEQ ID NO: 625
  source 1..76: mol_type = other RNA
  modified_base 5: mod_base = OTHER; note = Cytosine phosphorothiorate
  modified_base 6: mod_base = OTHER; note = Cytosine phosphorothiorate
  modified_base 7: mod_base = OTHER; note = Guanosine phosphorothiorate
  modified_base 9: mod_base = OTHER; note = Guanosine phosphorothiorate
  modified_base 10: mod_base = OTHER; note = 2'-Omethylguanosine
  modified_base 12: mod_base = OTHER; note = Guanosine phosphorothiorate
  modified_base 13: mod_base = OTHER; note = 2'-Omethylcytosine
  modified_base 14: mod_base = OTHER; note = 2'-Omethyladenosine
  modified_base 16: mod_base = OTHER; note = 2'-Omethyluridine
  modified_base 18: mod_base = OTHER; note = Guanosine phosphorothiorate
  modified_base 30: mod_base = OTHER; note = Guanosine phosphorothiorate
  modified_base 33: mod_base = OTHER; note = 2'-fluorouridine
  modified_base 37: mod_base = OTHER; note = Adenosine phosphorothiorate
  modified_base 38: mod_base = OTHER; note = 2'-Omethyladenosine
  modified_base 40: mod_base = OTHER; note = Uridine phosphorothiorate
  modified_base 44: mod_base = OTHER; note = Adenosine phosphorothiorate
  modified_base 45: mod_base = OTHER; note = 2'-fluoroguanosine
  modified_base 46: mod_base = OTHER; note = Guanosine phosphorothiorate
  modified_base 47: mod_base = OTHER; note = 2'-Omethyluridine
  modified_base 51: mod_base = OTHER; note = Guanosine phosphorothiorate
  modified_base 53: mod_base = OTHER; note = 2'-Omethylguanosine
  modified_base 54: mod_base = OTHER; note = 2'-fluorouridine
  modified_base 55: mod_base = OTHER; note = Uridine phosphorothiorate
  modified_base 56: mod_base = OTHER; note = 2'-fluorocytosine
  modified_base 59: mod_base = OTHER; note = 2'-Omethylguanosine
  modified_base 60: mod_base = OTHER; note = Uridine phosphorothiorate
  modified_base 61: mod_base = OTHER; note = 2'-fluorocytosine phosphorothiorate
  modified_base 62: mod_base = OTHER; note = 2'-Omethylcytosine phosphorothiorate
  modified_base 63: mod_base = OTHER; note = Cytosine phosphorothiorate
  modified_base 64: mod_base = OTHER; note = 2'-fluoroguanosine
  modified_base 66: mod_base = OTHER; note = 2'-fluorocytosine
  modified_base 68: mod_base = OTHER; note = 2'-Omethylguanosine
  modified_base 69: mod_base = OTHER; note = 2'-fluoroadenosine phosphorothiorate
  modified_base 70: mod_base = OTHER; note = 2'-Omethylguanosine phosphorothiorate
  modified_base 71: mod_base = OTHER; note = 2'-fluorouridine
  modified_base 75: mod_base = OTHER; note = 2'-Omethylcytosine phosphorothiorate

SEQ ID NO: 5980 - RNA, 76 nt, synthetic construct; identical to SEQ ID NO: 625
  source 1..76: mol_type = other RNA
  modified_base 4: mod_base = OTHER; note = Thymine
  modified_base 8: mod_base = OTHER; note = Thymine
  modified_base 71: mod_base = OTHER; note = Thymine

SEQ ID NO: 5981 - RNA, 76 nt, synthetic construct; identical to SEQ ID NO: 625
  source 1..76: mol_type = other RNA
  modified_base 1: mod_base = OTHER; note = 2'-Omethylguanosine
  modified_base 2: mod_base = OTHER; note = 2'-Omethylguanosine phosphorothiorate
  modified_base 10: mod_base = OTHER; note = 2'-Omethylguanosine
  modified_base 13: mod_base = OTHER; note = 2'-Omethylcytosine
  modified_base 17: mod_base = OTHER; note = Guanosine phosphorothiorate
  modified_base 18: mod_base = OTHER; note = 2'-Omethylguanosine
  modified_base 19: mod_base = OTHER; note = Adenosine phosphorothiorate
  modified_base 20: mod_base = OTHER; note = 2'-Omethyluridine
  modified_base 25: mod_base = OTHER; note = 2'-Omethylcytosine
  modified_base 29: mod_base = OTHER; note = 2'-Omethylguanosine
  modified_base 33: mod_base = OTHER; note = 2'-fluorouridine
  modified_base 35: mod_base = OTHER; note = Cytosine phosphorothiorate
  modified_base 37: mod_base = OTHER; note = Adenosine phosphorothiorate
  modified_base 38: mod_base = OTHER; note = Adenosine phosphorothiorate
  modified_base 41: mod_base = OTHER; note = 2'-fluorocytosine phosphorothiorate
  modified_base 43: mod_base = OTHER; note = 2'-Omethyladenosine
  modified_base 44: mod_base = OTHER; note = 2'-fluoroadenosine
  modified_base 50: mod_base = OTHER; note = 2'-Omethylcytosine
  modified_base 52: mod_base = OTHER; note = 2'-Omethylguanosine
  modified_base 54: mod_base = OTHER; note = Uridine phosphorothiorate
  modified_base 55: mod_base = OTHER; note = Uridine phosphorothiorate
  modified_base 56: mod_base = OTHER; note = 2'-Omethylcytosine
  modified_base 57: mod_base = OTHER; note = Guanosine phosphorothiorate
  modified_base 62: mod_base = OTHER; note = 2'-Omethylcytosine
  modified_base 63: mod_base = OTHER; note = 2'-fluorocytosine
  modified_base 65: mod_base = OTHER; note = 2'-Omethylguanosine
  modified_base 71: mod_base = OTHER; note = 2'-Omethyluridine
  modified_base 73: mod_base = OTHER; note = 2'-Omethylguanosine

SEQ ID NO: 5982 - RNA, 76 nt, synthetic construct; identical to SEQ ID NO: 625
  source 1..76: mol_type = other RNA
  modified_base 1: mod_base = OTHER; note = 2'-Omethylguanosine phosphorothiorate
  modified_base 2: mod_base = OTHER; note = 2'-Omethylguanosine
  modified_base 26: mod_base = OTHER; note = Adenosine phosphorothiorate
  modified_base 27: mod_base = OTHER; note = 2'-O-(2-Methoxyethyl) thymine
  modified_base 33: mod_base = OTHER; note = 2'-O-(2-Methoxyethyl) thymine
  modified_base 51: mod_base = OTHER; note = Guanosine phosphorothiorate
  modified_base 52: mod_base = OTHER; note = 2'-fluoroguanosine
  modified_base 59: mod_base = OTHER; note = 2'-O-(2-Methoxyethyl) guanosine
  modified_base 74: mod_base = OTHER; note = Cytosine phosphorothiorate
  modified_base 75: mod_base = OTHER; note = 2'-Omethylcytosine

SEQ ID NO: 5983 - RNA, 76 nt, synthetic construct; identical to SEQ ID NO: 625
  source 1..76: mol_type = other RNA
  modified_base 1: mod_base = OTHER; note = 2'-Omethylguanosine phosphorothiorate
  modified_base 2: mod_base = OTHER; note = 2'-Omethylguanosine phosphorothiorate
  modified_base 3: mod_base = OTHER; note = 2'-Omethylcytosine
  modified_base 4: mod_base = OTHER; note = 2'-Omethyluridine
  modified_base 5: mod_base = OTHER; note = 2'-Omethylcytosine
  modified_base 6: mod_base = OTHER; note = 2'-Omethylcytosine
  modified_base 10: mod_base = OTHER; note = 2'-Omethylguanosine
  modified_base 11: mod_base = OTHER; note = 2'-Omethylcytosine
  modified_base 12: mod_base = OTHER; note = 2'-Omethylguanosine
  modified_base 13: mod_base = OTHER; note = 2'-Omethylcytosine
  modified_base 14: mod_base = OTHER; note = 2'-Omethyladenosine
  modified_base 15: mod_base = OTHER; note = 2'-fluoroadenosine
  modified_base 16: mod_base = OTHER; note = 2'-Omethyluridine
  modified_base 17: mod_base = OTHER; note = 2'-Omethylguanosine
  modified_base 18: mod_base = OTHER; note = 2'-Omethylguanosine
  modified_base 19: mod_base = OTHER; note = 2'-fluoroadenosine
  modified_base 20: mod_base = OTHER; note = 2'-Omethyluridine
  modified_base 22: mod_base = OTHER; note = 2'-Omethylguanosine
  modified_base 23: mod_base = OTHER; note = 2'-Omethylcytosine
  modified_base 24: mod_base = OTHER; note = 2'-Omethylguanosine
  modified_base 25: mod_base = OTHER; note = 2'-Omethylcytosine
  modified_base 33: mod_base = OTHER; note = 2'-fluorouridine
  modified_base 35: mod_base = OTHER; note = Cytosine phosphorothiorate
  modified_base 37: mod_base = OTHER; note = Adenosine phosphorothiorate
  modified_base 38: mod_base = OTHER; note = Adenosine phosphorothiorate
  modified_base 49: mod_base = OTHER; note = 2'-Omethylcytosine
  modified_base 50: mod_base = OTHER; note = 2'-Omethylcytosine
  modified_base 51: mod_base = OTHER; note = 2'-Omethylguanosine
  modified_base 52: mod_base = OTHER; note = 2'-Omethylguanosine
  modified_base 53: mod_base = OTHER; note = 2'-Omethylguanosine
  modified_base 54: mod_base = OTHER; note = 2'-Omethyluridine
  modified_base 55: mod_base = OTHER; note = Uridine phosphorothiorate
  modified_base 56: mod_base = OTHER; note = 2'-Omethylcytosine
  modified_base 59: mod_base = OTHER; note = 2'-Omethylguanosine
  modified_base 61: mod_base = OTHER; note = 2'-Omethylcytosine
  modified_base 62: mod_base = OTHER; note = 2'-Omethylcytosine
  modified_base 63: mod_base = OTHER; note = 2'-fluorocytosine
  modified_base 64: mod_base = OTHER; note = 2'-Omethylguanosine
  modified_base 65: mod_base = OTHER; note = 2'-Omethylguanosine
  modified_base 66: mod_base = OTHER; note = 2'-Omethylcytosine
  modified_base 67: mod_base = OTHER; note = 2'-Omethylguanosine
  modified_base 68: mod_base = OTHER; note = 2'-Omethylguanosine
  modified_base 73: mod_base = OTHER; note = 2'-Omethylguanosine

SEQ ID NO: 5984 - RNA, 73 nt, synthetic construct; identical to SEQ ID NO: 935
  source 1..73: mol_type = other RNA
  modified_base 1: mod_base = OTHER; note = 2'-Omethylguanosine phosphorothiorate
  modified_base 2: mod_base = OTHER; note = 2'-Omethylguanosine phosphorothiorate
  modified_base 18: mod_base = OTHER; note = 2'-fluoroguanosine
  modified_base 72: mod_base = OTHER; note = 2'-Omethylcytosine

SEQ ID NO: 5985 - RNA, 76 nt, synthetic construct; identical to SEQ ID NO: 625
  source 1..76: mol_type = other RNA
  modified_base 1: mod_base = OTHER; note = 2'-Omethylguanosine phosphorothiorate
  modified_base 2: mod_base = OTHER; note = 2'-Omethylguanosine
  modified_base 33: mod_base = OTHER; note = 2'-fluorouridine
  modified_base 35: mod_base = OTHER; note = Cytosine phosphorothiorate
  modified_base 37: mod_base = OTHER; note = Adenosine phosphorothiorate
  modified_base 38: mod_base = OTHER; note = Adenosine phosphorothiorate
  modified_base 52: mod_base = OTHER; note = 2'-Omethylguanosine
  modified_base 62: mod_base = OTHER; note = 2'-Omethylcytosine
  modified_base 63: mod_base = OTHER; note = 2'-fluorocytosine
  modified_base 65: mod_base = OTHER; note = 2'-Omethylguanosine
  modified_base 73: mod_base = OTHER; note = 2'-Omethylguanosine
  modified_base 75: mod_base = OTHER; note = 2'-fluorocytosine phosphorothiorate

SEQ ID NO: 5986 - RNA, 75 nt, synthetic construct; identical to SEQ ID NO: 3311
  source 1..75: mol_type = other RNA
  modified_base 1: mod_base = OTHER; note = 2'-fluoroguanosine
  modified_base 2: mod_base = OTHER; note = 2'-Omethylguanosine phosphorothiorate
  modified_base 27: mod_base = OTHER; note = 2'-Omethylcytosine
  modified_base 41: mod_base = OTHER; note = 2'-fluorocytosine
  modified_base 44: mod_base = OTHER; note = 2'-fluorocytosine
  modified_base 57: mod_base = OTHER; note = 2'-fluoroadenosine
  modified_base 61: mod_base = OTHER; note = Uridine phosphorothiorate
  modified_base 67: mod_base = OTHER; note = Guanosine phosphorothiorate
  modified_base 73: mod_base = OTHER; note = Cytosine phosphorothiorate
  modified_base 74: mod_base = OTHER; note = 2'-Omethylcytosine

SEQ ID NO: 5987 - RNA, 74 nt, synthetic construct; identical to SEQ ID NO: 3293
  source 1..74: mol_type = other RNA
  modified_base 1: mod_base = OTHER; note = Adenosine phosphorothiorate
  modified_base 2: mod_base = OTHER; note = 2'-Omethylcytosine
  modified_base 3: mod_base = OTHER; note = 2'-Omethylcytosine phosphorothiorate
  modified_base 4: mod_base = OTHER; note = Uridine phosphorothiorate
  modified_base 8: mod_base = OTHER; note = Guanosine phosphorothiorate
  modified_base 12: mod_base = OTHER; note = 2'-fluorocytosine
  modified_base 18: mod_base = OTHER; note = 2'-Omethyluridine
  modified_base 24: mod_base = OTHER; note = Guanosine phosphorothiorate
  modified_base 41: mod_base = OTHER; note = 2'-Omethyladenosine phosphorothiorate
  modified_base 72: mod_base = OTHER; note = 2'-fluorocytosine
  modified_base 73: mod_base = OTHER; note = 2'-Omethylcytosine

SEQ ID NO: 5988 - RNA, 75 nt, synthetic construct; identical to SEQ ID NO: 3306
  source 1..75: mol_type = other RNA
  modified_base 1: mod_base = OTHER; note = 2'-Omethylguanosine
  modified_base 42: mod_base = OTHER; note = 2'-Omethyladenosine

SEQ ID NO: 5989 - RNA, 75 nt, synthetic construct; identical to SEQ ID NO: 3306
  source 1..75: mol_type = other RNA
  modified_base 1: mod_base = OTHER; note = 2'-Omethylguanosine
  modified_base 16: mod_base = OTHER; note = 2'-Omethylcytosine
  modified_base 17: mod_base = OTHER; note = 2'-Omethylguanosine
  modified_base 18: mod_base = OTHER; note = 2'-Omethylguanosine
  modified_base 53: mod_base = OTHER; note = 2'-Omethyluridine
  modified_base 54: mod_base = OTHER; note = Uridine phosphorothiorate
  modified_base 55: mod_base = OTHER; note = 2'-Omethylcytosine
  modified_base 58: mod_base = OTHER; note = 2'-Omethyladenosine
  modified_base 72: mod_base = OTHER; note = 2'-Omethyladenosine

SEQ ID NO: 5990 - RNA, 75 nt, synthetic construct; identical to SEQ ID NO: 3306
  source 1..75: mol_type = other RNA
  modified_base 1: mod_base = OTHER; note = 2'-Omethylguanosine
  modified_base 13: mod_base = OTHER; note = 2'-Omethylcytosine
  modified_base 14: mod_base = OTHER; note = 2'-Omethyladenosine
  modified_base 15: mod_base = OTHER; note = 2'-Omethyladenosine
  modified_base 16: mod_base = OTHER; note = 2'-Omethylcytosine
  modified_base 17: mod_base = OTHER; note = 2'-Omethylguanosine
  modified_base 18: mod_base = OTHER; note = 2'-Omethylguanosine
  modified_base 19: mod_base = OTHER; note = Uridine phosphorothiorate
  modified_base 20: mod_base = OTHER; note = Adenosine phosphorothiorate
  modified_base 24: mod_base = OTHER; note = 2'-Omethylcytosine
  modified_base 32: mod_base = OTHER; note = 2'-fluorouridine
  modified_base 33: mod_base = OTHER; note = 2'-Omethylcytosine
  modified_base 34: mod_base = OTHER; note = Uridine phosphorothiorate
  modified_base 36: mod_base = OTHER; note = Guanosine phosphorothiorate
  modified_base 37: mod_base = OTHER; note = Adenosine phosphorothiorate
  modified_base 48: mod_base = OTHER; note = 2'-Omethylguanosine
  modified_base 49: mod_base = OTHER; note = 2'-Omethylcytosine
  modified_base 50: mod_base = OTHER; note = 2'-Omethylguanosine
  modified_base 51: mod_base = OTHER; note = 2'-Omethyluridine
  modified_base 52: mod_base = OTHER; note = 2'-Omethylguanosine
  modified_base 53: mod_base = OTHER; note = Uridine phosphorothiorate
  modified_base 54: mod_base = OTHER; note = Uridine phosphorothiorate
  modified_base 60: mod_base = OTHER; note = 2'-Omethylcytosine
  modified_base 64: mod_base = OTHER; note = 2'-Omethyluridine
  modified_base 72: mod_base = OTHER; note = 2'-Omethyladenosine

SEQ ID NO: 5991 - RNA, 76 nt, synthetic construct; identical to SEQ ID NO: 3289
  source 1..76: mol_type = other RNA
  modified_base 1: mod_base = OTHER; note = 2'-Omethylguanosine phosphorothiorate
  modified_base 2: mod_base = OTHER; note = 2'-Omethylcytosine phosphorothiorate
  modified_base 3: mod_base = OTHER; note = 2'-Omethylcytosine
  modified_base 4: mod_base = OTHER; note = 2'-Omethyluridine
  modified_base 5: mod_base = OTHER; note = 2'-Omethylguanosine
  modified_base 6: mod_base = OTHER; note = 2'-Omethylguanosine
  modified_base 16: mod_base = OTHER; note = 2'-Omethyluridine
  modified_base 18: mod_base = OTHER; note = 2'-Omethylguanosine
  modified_base 19: mod_base = OTHER; note = 2'-Omethylguanosine
  modified_base 33: mod_base = OTHER; note = 2'-fluorouridine
  modified_base 35: mod_base = OTHER; note = Uridine phosphorothiorate
  modified_base 37: mod_base = OTHER; note = Adenosine phosphorothiorate
  modified_base 38: mod_base = OTHER; note = Adenosine phosphorothiorate
  modified_base 44: mod_base = OTHER; note = 2'-Omethylguanosine
  modified_base 45: mod_base = OTHER; note = 2'-Omethylguanosine
  modified_base 46: mod_base = OTHER; note = 2'-fluoroguanosine
  modified_base 47: mod_base = OTHER; note = 2'-fluorouridine
  modified_base 48: mod_base = OTHER; note = 2'-fluorocytosine
  modified_base 54: mod_base = OTHER; note = 2'-Omethyluridine
  modified_base 56: mod_base = OTHER; note = 2'-Omethylcytosine
  modified_base 59: mod_base = OTHER; note = 2'-Omethylguanosine
  modified_base 61: mod_base = OTHER; note = 2'-Omethylcytosine
  modified_base 62: mod_base = OTHER; note = 2'-Omethylcytosine
  modified_base 63: mod_base = OTHER; note = 2'-fluorocytosine
  modified_base 64: mod_base = OTHER; note = 2'-Omethyluridine
  modified_base 65: mod_base = OTHER; note = 2'-Omethylguanosine
  modified_base 66: mod_base = OTHER; note = 2'-Omethyluridine
  modified_base 67: mod_base = OTHER; note = 2'-Omethylcytosine
  modified_base 68: mod_base = OTHER; note = 2'-Omethylcytosine
  modified_base 73: mod_base = OTHER; note = 2'-Omethylguanosine

SEQ ID NO: 5992 - RNA, 75 nt, synthetic construct; identical to SEQ ID NO: 3299
  source 1..75: mol_type = other RNA
  modified_base 1: mod_base = OTHER; note = 2'-Omethylcytosine
  modified_base 12: mod_base = OTHER; note = 2'-fluorocytosine phosphorothiorate
  modified_base 18: mod_base = OTHER; note = 2'-fluoroguanosine
  modified_base 19: mod_base = OTHER; note = 2'-Omethyluridine phosphorothiorate
  modified_base 23: mod_base = OTHER; note = 2'-fluoroguanosine
  modified_base 25: mod_base = OTHER; note = 2'-fluoroadenosine
  modified_base 26: mod_base = OTHER; note = 2'-Omethyluridine phosphorothiorate
  modified_base 29: mod_base = OTHER; note = 2'-fluoroguanosine
  modified_base 30: mod_base = OTHER; note = 2'-fluoroadenosine
  modified_base 35: mod_base = OTHER; note = 2'-fluoroadenosine
  modified_base 39: mod_base = OTHER; note = 2'-Omethylcytosine
  modified_base 45: mod_base = OTHER; note = 2'-fluoroguanosine
  modified_base 48: mod_base = OTHER; note = 2'-fluorocytosine
  modified_base 49: mod_base = OTHER; note = 2'-fluoroadenosine
  modified_base 50: mod_base = OTHER; note = 2'-fluoroguanosine
  modified_base 60: mod_base = OTHER; note = Cytosine phosphorothiorate
  modified_base 62: mod_base = OTHER; note = 2'-fluorocytosine phosphorothiorate
  modified_base 73: mod_base = OTHER; note = Cytosine phosphorothiorate
  modified_base 74: mod_base = OTHER; note = 2'-Omethylcytosine

SEQ ID NO: 5993 - RNA, 85 nt, synthetic construct; identical to SEQ ID NO: 3288
  source 1..85: mol_type = other RNA
  modified_base 1: mod_base = OTHER; note = 2'-Omethylcytosine
  modified_base 19: mod_base = OTHER; note = 2'-Omethyluridine
  modified_base 25: mod_base = OTHER; note = Guanosine phosphorothiorate
  modified_base 26: mod_base = OTHER; note = 2'-fluorouridine
  modified_base 30: mod_base = OTHER; note = 2'-Omethyladenosine phosphorothiorate
  modified_base 33: mod_base = OTHER; note = 2'-fluorouridine
  modified_base 34: mod_base = OTHER; note = Cytosine phosphorothiorate
  modified_base 38: mod_base = OTHER; note = Uridine phosphorothiorate
  modified_base 44: mod_base = OTHER; note = 2'-Omethylguanosine
  modified_base 49: mod_base = OTHER; note = 2'-Omethyluridine
  modified_base 51: mod_base = OTHER; note = Uridine phosphorothiorate
  modified_base 56: mod_base = OTHER; note = 2'-fluoroguanosine phosphorothiorate
  modified_base 57: mod_base = OTHER; note = 2'-Omethylcytosine
  modified_base 59: mod_base = OTHER; note = Uridine phosphorothiorate
  modified_base 67: mod_base = OTHER; note = 2'-fluoroadenosine phosphorothiorate
  modified_base 84: mod_base = OTHER; note = Cytosine phosphorothiorate

SEQ ID NO: 5994 - RNA, 75 nt, synthetic construct; identical to SEQ ID NO: 3336
  source 1..75: mol_type = other RNA
  modified_base 11: mod_base = OTHER; note = Uridine phosphorothiorate
  modified_base 21: mod_base = OTHER; note = 2'-fluoroguanosine phosphorothiorate
  modified_base 46: mod_base = OTHER; note = 2'-fluorouridine
  modified_base 50: mod_base = OTHER; note = 2'-fluoroguanosine
  modified_base 51: mod_base = OTHER; note = 2'-fluoroguanosine
  modified_base 62: mod_base = OTHER; note = 2'-Omethylcytosine
  modified_base 73: mod_base = OTHER; note = Cytosine phosphorothiorate
  modified_base 74: mod_base = OTHER; note = 2'-fluorocytosine phosphorothiorate

SEQ ID NO: 5995 - RNA, 76 nt, synthetic construct; identical to SEQ ID NO: 625
  source 1..76: mol_type = other RNA
  modified_base 33: mod_base = OTHER; note = 2'-O-(2-Methoxyethyl) thymine
  modified_base 43: mod_base = OTHER; note = 2'-Omethyladenosine
  modified_base 65: mod_base = OTHER; note = 2'-Omethylguanosine

SEQ ID NO: 5996 - RNA, 86 nt, synthetic construct; identical to SEQ ID NO: 3290
  source 1..86: mol_type = other RNA
  modified_base 1: mod_base = OTHER; note = 2'-Omethyladenosine
  modified_base 2: mod_base = OTHER; note = 2'-Omethylcytosine
  modified_base 3: mod_base = OTHER; note = 2'-Omethylcytosine
  modified_base 4: mod_base = OTHER; note = 2'-Omethyladenosine
  modified_base 5: mod_base = OTHER; note = 2'-Omethylguanosine
  modified_base 6: mod_base = OTHER; note = 2'-Omethylguanosine
  modified_base 76: mod_base = OTHER; note = 2'-Omethyluridine
  modified_base 77: mod_base = OTHER; note = 2'-Omethylcytosine
  modified_base 78: mod_base = OTHER; note = 2'-Omethylcytosine
  modified_base 83: mod_base = OTHER; note = 2'-Omethyladenosine

SEQ ID NO: 5997 - RNA, 76 nt, synthetic construct
  source 1..76: mol_type = other RNA
gactccgtggcgcaatggatagcgcattggtcttcaaaatcaaaggttccgggttcgagtcccggcggagtcgcca

SEQ ID NO: 5998 - RNA, 75 nt, synthetic construct; identical to SEQ ID NO: 3311
  source 1..75: mol_type = other RNA
  modified_base 1: mod_base = OTHER; note = 2'-Omethylguanosine phosphorothiorate
  modified_base 2: mod_base = OTHER; note = 2'-Omethylguanosine
  modified_base 7: mod_base = OTHER; note = 2'-Omethyladenosine
  modified_base 9: mod_base = OTHER; note = 2'-fluoroguanosine
  modified_base 20: mod_base = OTHER; note = 2'-fluoroadenosine
  modified_base 23: mod_base = OTHER; note = 2'-fluorocytosine
  modified_base 27: mod_base = OTHER; note = Cytosine phosphorothiorate
  modified_base 35: mod_base = OTHER; note = 2'-fluorouridine
  modified_base 50: mod_base = OTHER; note = 2'-fluoroguanosine phosphorothiorate
  modified_base 54: mod_base = OTHER; note = 2'-Omethyluridine
  modified_base 59: mod_base = OTHER; note = 2'-fluorouridine
  modified_base 60: mod_base = OTHER; note = Cytosine phosphorothiorate
  modified_base 64: mod_base = OTHER; note = Guanosine phosphorothiorate
  modified_base 66: mod_base = OTHER; note = Guanosine phosphorothiorate
  modified_base 72: mod_base = OTHER; note = Uridine phosphorothiorate
  modified_base 73: mod_base = OTHER; note = Cytosine phosphorothiorate

SEQ ID NO: 5999 - RNA, 76 nt, synthetic construct; identical to SEQ ID NO: 625
  source 1..76: mol_type = other RNA
  modified_base 1: mod_base = OTHER; note = 2'-Omethylguanosine phosphorothiorate
  modified_base 2: mod_base = OTHER; note = 2'-Omethylguanosine
  modified_base 3: mod_base = OTHER; note = 2'-Omethylcytosine
  modified_base 4: mod_base = OTHER; note = 2'-Omethyluridine
  modified_base 5: mod_base = OTHER; note = 2'-Omethylcytosine
  modified_base 6: mod_base = OTHER; note = 2'-Omethylcytosine
  modified_base 10: mod_base = OTHER; note = 2'-Omethylguanosine
  modified_base 11: mod_base = OTHER; note = 2'-Omethylcytosine
  modified_base 12: mod_base = OTHER; note = 2'-Omethylguanosine
  modified_base 13: mod_base = OTHER; note = 2'-Omethylcytosine
  modified_base 14: mod_base = OTHER; note = 2'-Omethyladenosine
  modified_base 15: mod_base = OTHER; note = 2'-Omethyladenosine
  modified_base 16: mod_base = OTHER; note = 2'-Omethyluridine
  modified_base 17: mod_base = OTHER; note = 2'-Omethylguanosine
  modified_base 18: mod_base = OTHER; note = 2'-Omethylguanosine
  modified_base 19: mod_base = OTHER; note = 2'-Omethyladenosine
  modified_base 20: mod_base = OTHER; note = 2'-Omethyluridine
  modified_base 22: mod_base = OTHER; note = 2'-Omethylguanosine
  modified_base 23: mod_base = OTHER; note = 2'-Omethylcytosine
  modified_base 24: mod_base = OTHER; note = 2'-Omethylguanosine
  modified_base 25: mod_base = OTHER; note = 2'-Omethylcytosine
  modified_base 40: mod_base = OTHER; note = 2'-fluorouridine
  modified_base 41: mod_base = OTHER; note = 2'-fluorocytosine
  modified_base 42: mod_base = OTHER; note = 2'-fluoroadenosine
  modified_base 43: mod_base = OTHER; note = 2'-fluoroadenosine
  modified_base 49: mod_base = OTHER; note = 2'-Omethylcytosine
  modified_base 50: mod_base = OTHER; note = 2'-Omethylcytosine
  modified_base 51: mod_base = OTHER; note = 2'-Omethylguanosine
  modified_base 52: mod_base = OTHER; note = 2'-Omethylguanosine
  modified_base 53: mod_base = OTHER; note = 2'-Omethylguanosine
  modified_base 54: mod_base = OTHER; note = Uridine phosphorothiorate
  modified_base 55: mod_base = OTHER; note = Uridine phosphorothiorate
  modified_base 56: mod_base = OTHER; note = Cytosine phosphorothiorate
  modified_base 57: mod_base = OTHER; note = Guanosine phosphorothiorate
  modified_base 61: mod_base = OTHER; note = 2'-Omethylcytosine
  modified_base 62: mod_base = OTHER; note = 2'-Omethylcytosine
  modified_base 63: mod_base = OTHER; note = 2'-fluorocytosine
  modified_base 64: mod_base = OTHER; note = 2'-Omethylguanosine
  modified_base 65: mod_base = OTHER; note = 2'-Omethylguanosine
  modified_base 66: mod_base = OTHER; note = 2'-Omethylcytosine
  modified_base 67: mod_base = OTHER; note = 2'-Omethylguanosine
  modified_base 68: mod_base = OTHER; note = 2'-Omethylguanosine
  modified_base 69: mod_base = OTHER; note = 2'-Omethyladenosine
  modified_base 71: mod_base = OTHER; note = 2'-Omethyluridine
  modified_base 72: mod_base = OTHER; note = 2'-Omethylcytosine

SEQ ID NO: 6000 - RNA, 75 nt, synthetic construct; identical to SEQ ID NO: 3336
  source 1..75: mol_type = other RNA
  modified_base 13: mod_base = OTHER; note = 2'-Omethyladenosine
  modified_base 15: mod_base = OTHER; note = 2'-Omethyluridine
  modified_base 17: mod_base = OTHER; note = 2'-Omethylguanosine
  modified_base 21: mod_base = OTHER; note = 2'-Omethylguanosine phosphorothiorate
  modified_base 22: mod_base = OTHER; note = 2'-fluoroadenosine
  modified_base 23: mod_base = OTHER; note = 2'-fluoroguanosine
  modified_base 26: mod_base = OTHER; note = Uridine phosphorothiorate
  modified_base 28: mod_base = OTHER; note = 2'-fluoroadenosine phosphorothiorate
  modified_base 29: mod_base = OTHER; note = 2'-fluoroguanosine
  modified_base 34: mod_base = OTHER; note = 2'-fluorouridine
  modified_base 40: mod_base = OTHER; note = Uridine phosphorothiorate
  modified_base 47: mod_base = OTHER; note = 2'-fluorocytosine
  modified_base 48: mod_base = OTHER; note = 2'-fluorocytosine
  modified_base 50: mod_base = OTHER; note = 2'-Omethylguanosine phosphorothiorate
  modified_base 56: mod_base = OTHER; note = 2'-fluoroadenosine phosphorothiorate
  modified_base 58: mod_base = OTHER; note = Guanosine phosphorothiorate
  modified_base 68: mod_base = OTHER; note = 2'-fluoroadenosine phosphorothiorate
  modified_base 69: mod_base = OTHER; note = Guanosine phosphorothiorate
  modified_base 74: mod_base = OTHER; note = Cytosine phosphorothiorate
  modified_base 75: mod_base = OTHER; note = 2'-fluoroadenosine

SEQ ID NO: 6001 - RNA, 76 nt, synthetic construct; identical to SEQ ID NO: 625
  source 1..76: mol_type = other RNA
  modified_base 1: mod_base = OTHER; note = 2'-Omethylguanosine
  modified_base 10: mod_base = OTHER; note = 2'-Omethylguanosine
  modified_base 13: mod_base = OTHER; note = 2'-Omethylcytosine
  modified_base 17: mod_base = OTHER; note = Guanosine phosphorothiorate
  modified_base 18: mod_base = OTHER; note = 2'-Omethylguanosine
  modified_base 19: mod_base = OTHER; note = Adenosine phosphorothiorate
  modified_base 20: mod_base = OTHER; note = 2'-Omethyluridine
  modified_base 25: mod_base = OTHER; note = 2'-Omethylcytosine
  modified_base 29: mod_base = OTHER; note = 2'-Omethylguanosine
  modified_base 33: mod_base = OTHER; note = 2'-fluorouridine
  modified_base 35: mod_base = OTHER; note = Cytosine phosphorothiorate
  modified_base 37: mod_base = OTHER; note = Adenosine phosphorothiorate
  modified_base 38: mod_base = OTHER; note = Adenosine phosphorothiorate
  modified_base 41: mod_base = OTHER; note = 2'-fluorocytosine phosphorothiorate
  modified_base 43: mod_base = OTHER; note = 2'-Omethyladenosine
  modified_base 44: mod_base = OTHER; note = 2'-fluoroadenosine
  modified_base 50: mod_base = OTHER; note = 2'-Omethylcytosine
  modified_base 52: mod_base = OTHER; note = 2'-Omethylguanosine
  modified_base 54: mod_base = OTHER; note = Uridine phosphorothiorate
  modified_base 55: mod_base = OTHER; note = Uridine phosphorothiorate
  modified_base 56: mod_base = OTHER; note = 2'-Omethylcytosine
  modified_base 62: mod_base = OTHER; note = 2'-Omethylcytosine
  modified_base 63: mod_base = OTHER; note = 2'-fluorocytosine
  modified_base 65: mod_base = OTHER; note = 2'-Omethylguanosine
  modified_base 71: mod_base = OTHER; note = 2'-Omethyluridine
  modified_base 73: mod_base = OTHER; note = 2'-Omethylguanosine

SEQ ID NO: 6002 - RNA, 76 nt, synthetic construct; identical to SEQ ID NO: 3419
  source 1..76: mol_type = other RNA
  modified_base 1: mod_base = OTHER; note = 2'-Omethylguanosine
  modified_base 14: mod_base = OTHER; note = 2'-Omethyladenosine
  modified_base 15: mod_base = OTHER; note = 2'-fluoroadenosine
  modified_base 16: mod_base = OTHER; note = 2'-Omethyluridine
  modified_base 17: mod_base = OTHER; note = 2'-Omethylguanosine
  modified_base 18: mod_base = OTHER; note = 2'-Omethylguanosine
  modified_base 19: mod_base = OTHER; note = 2'-fluoroadenosine
  modified_base 20: mod_base = OTHER; note = 2'-Omethyluridine
  modified_base 33: mod_base = OTHER; note = 2'-fluorouridine
  modified_base 35: mod_base = OTHER; note = Cytosine phosphorothiorate
  modified_base 37: mod_base = OTHER; note = Adenosine phosphorothiorate
  modified_base 38: mod_base = OTHER; note = Adenosine phosphorothiorate
  modified_base 41: mod_base = OTHER; note = 2'-Omethylguanosine
  modified_base 42: mod_base = OTHER; note = 2'-Omethylguanosine
  modified_base 43: mod_base = OTHER; note = 2'-Omethyluridine
  modified_base 44: mod_base = OTHER; note = 2'-Omethyladenosine
  modified_base 50: mod_base = OTHER; note = 2'-Omethylcytosine
  modified_base 52: mod_base = OTHER; note = 2'-Omethylguanosine
  modified_base 73: mod_base = OTHER; note = 2'-Omethylguanosine

SEQ ID NO: 6003 - RNA, 75 nt, synthetic construct; identical to SEQ ID NO: 1045
  source 1..75: mol_type = other RNA
  modified_base 1: mod_base = OTHER; note = 2'-Omethylguanosine
  modified_base 2: mod_base = OTHER; note = 2'-Omethylguanosine
  modified_base 3: mod_base = OTHER; note = 2'-Omethyluridine
  modified_base 4: mod_base = OTHER; note = 2'-Omethyluridine
  modified_base 5: mod_base = OTHER; note = 2'-Omethylcytosine
  modified_base 6: mod_base = OTHER; note = 2'-Omethylcytosine
  modified_base 14: mod_base = OTHER; note = 2'-Omethyladenosine
  modified_base 15: mod_base = OTHER; note = 2'-Omethyladenosine
  modified_base 16: mod_base = OTHER; note = 2'-Omethyluridine
  modified_base 17: mod_base = OTHER; note = 2'-Omethylguanosine
  modified_base 18: mod_base = OTHER; note = 2'-Omethylguanosine
  modified_base 20: mod_base = OTHER; note = 2'-Omethyladenosine
  modified_base 25: mod_base = OTHER; note = 2'-Omethylcytosine
  modified_base 41: mod_base = OTHER; note = 2'-Omethylcytosine
  modified_base 42: mod_base = OTHER; note = 2'-Omethyladenosine
  modified_base 43: mod_base = OTHER; note = 2'-Omethylguanosine
  modified_base 44: mod_base = OTHER; note = 2'-Omethylcytosine
  modified_base 48: mod_base = OTHER; note = 2'-Omethylcytosine
  modified_base 49: mod_base = OTHER; note = 2'-Omethylcytosine
  modified_base 51: mod_base = OTHER; note = 2'-Omethyladenosine
  modified_base 53: mod_base = OTHER; note = 2'-Omethyluridine
  modified_base 54: mod_base = OTHER; note = Uridine phosphorothiorate
  modified_base 55: mod_base = OTHER; note = 2'-Omethylcytosine
  modified_base 56: mod_base = OTHER; note = 2'-fluoroguanosine
  modified_base 58: mod_base = OTHER; note = 2'-Omethylguanosine
  modified_base 60: mod_base = OTHER; note = 2'-Omethylcytosine
  modified_base 64: mod_base = OTHER; note = 2'-Omethylguanosine
  modified_base 72: mod_base = OTHER; note = 2'-Omethyluridine

SEQ ID NO: 6004 - DNA, 76 bp, synthetic construct; identical to SEQ ID NO: 1924
  source 1..76: mol_type = other DNA
  modified_base 1: mod_base = OTHER; note = 2'-Omethylguanosine
  modified_base 9: mod_base = OTHER; note = Guanosine phosphorothiorate
  modified_base 11: mod_base = OTHER; note = 2'-Omethylcytosine phosphorothiorate
  modified_base 15: mod_base = OTHER; note = 2'-Omethyladenosine phosphorothiorate
  modified_base 16: mod_base = OTHER; note = 2'-Omethyluridine
  modified_base 18: mod_base = OTHER; note = 2'-O-(2-Methoxyethyl) guanosine phosphorothiorate
  modified_base 20: mod_base = OTHER; note = 2'-O-(2-Methoxyethyl) thymine phosphorothiorate
  modified_base 21: mod_base = OTHER; note = Adenosine phosphorothiorate
  modified_base 22: mod_base = OTHER; note = 2'-O-(2-Methoxyethyl) guanosine phosphorothiorate
  modified_base 23: mod_base = OTHER; note = 2'-O-(2-Methoxyethyl) 5-methylcytosine
  modified_base 24: mod_base = OTHER; note = Guanosine phosphorothiorate
  modified_base 29: mod_base = OTHER; note = Guanosine phosphorothiorate
  modified_base 34: mod_base = OTHER; note = Uridine phosphorothiorate
  modified_base 36: mod_base = OTHER; note = Adenosine phosphorothiorate
  modified_base 39: mod_base = OTHER; note = 2'-O-(2-Methoxyethyl) thymine phosphorothiorate
  modified_base 41: mod_base = OTHER; note = 2'-fluorocytosine phosphorothiorate
  modified_base 42: mod_base = OTHER; note = 2'-O-(2-Methoxyethyl) adenosine
  modified_base 43: mod_base = OTHER; note = Adenosine phosphorothiorate
  modified_base 47: mod_base = OTHER; note = 2'-fluorouridine phosphorothiorate
  modified_base 52: mod_base = OTHER; note = 2'-Omethylguanosine phosphorothiorate
  modified_base 53: mod_base = OTHER; note = 2'-Omethylguanosine phosphorothiorate
  modified_base 54: mod_base = OTHER; note = 2'-Omethyluridine
  modified_base 58: mod_base = OTHER; note = Adenosine phosphorothiorate
  modified_base 59: mod_base = OTHER; note = 2'-Omethylguanosine
  modified_base 68: mod_base = OTHER; note = 2'-O-(2-Methoxyethyl) guanosine
  modified_base 75: mod_base = OTHER; note = 2'-Omethylcytosine
  misc_feature 1..11: note = RNA
  misc_feature 12: note = DNA
  misc_feature 13..18: note = RNA
  misc_feature 19: note = DNA
  misc_feature 20..31: note = RNA
  misc_feature 32: note = DNA
  misc_feature 33..36: note = RNA
  misc_feature 37: note = DNA
  misc_feature 38..47: note = RNA
  misc_feature 48: note = DNA
  misc_feature 49..60: note = RNA
  misc_feature 61: note = DNA
  misc_feature 62..76: note = RNA

SEQ ID NO: 6005 - RNA, 76 nt, synthetic construct; identical to SEQ ID NO: 625
  source 1..76: mol_type = other RNA
  modified_base 1: mod_base = OTHER; note = 2'-Omethylguanosine
  modified_base 2: mod_base = OTHER; note = 2'-Omethylguanosine
  modified_base 3: mod_base = OTHER; note = 2'-Omethylcytosine
  modified_base 4: mod_base = OTHER; note = 2'-Omethyluridine
  modified_base 5: mod_base = OTHER; note = 2'-Omethylcytosine
  modified_base 6: mod_base = OTHER; note = 2'-Omethylcytosine
  modified_base 10: mod_base = OTHER; note = 2'-Omethylguanosine
  modified_base 11: mod_base = OTHER; note = 2'-Omethylcytosine
  modified_base 12: mod_base = OTHER; note = 2'-Omethylguanosine
  modified_base 13: mod_base = OTHER; note = 2'-Omethylcytosine
  modified_base 14: mod_base = OTHER; note = 2'-Omethyladenosine
  modified_base 15: mod_base = OTHER; note = 2'-fluoroadenosine
  modified_base 16: mod_base = OTHER; note = 2'-Omethyluridine
  modified_base 17: mod_base = OTHER; note = 2'-Omethylguanosine
  modified_base 18: mod_base = OTHER; note = 2'-Omethylguanosine
  modified_base 19: mod_base = OTHER; note = 2'-fluoroadenosine
  modified_base 20: mod_base = OTHER; note = 2'-Omethyluridine
  modified_base 22: mod_base = OTHER; note = 2'-Omethylguanosine
  modified_base 23: mod_base = OTHER; note = 2'-Omethylcytosine
  modified_base 24: mod_base = OTHER; note = 2'-Omethylguanosine
  modified_base 25: mod_base = OTHER; note = 2'-Omethylcytosine
  modified_base 38: mod_base = OTHER; note = Adenosine phosphorothiorate
  modified_base 39: mod_base = OTHER; note = Uridine phosphorothiorate
  modified_base 40: mod_base = OTHER; note = 2'-fluorouridine
  modified_base 43: mod_base = OTHER; note = 2'-Omethyladenosine
  modified_base 44: mod_base = OTHER; note = 2'-Omethyladenosine
  modified_base 45: mod_base = OTHER; note = 2'-Omethylguanosine
  modified_base 46: mod_base = OTHER; note = 2'-fluoroguanosine
  modified_base 48: mod_base = OTHER; note = 2'-fluorouridine
  modified_base 49: mod_base = OTHER; note = 2'-Omethylcytosine
  modified_base 50: mod_base = OTHER; note = 2'-Omethylcytosine
  modified_base 54: mod_base = OTHER; note = 2'-Omethyluridine phosphorothiorate
  modified_base 55: mod_base = OTHER; note = Uridine phosphorothiorate
  modified_base 56: mod_base = OTHER; note = 2'-Omethylcytosine
  modified_base 57: mod_base = OTHER; note = 2'-fluoroguanosine
  modified_base 61: mod_base = OTHER; note = 2'-Omethylcytosine
  modified_base 62: mod_base = OTHER; note = 2'-Omethylcytosine
  modified_base 63: mod_base = OTHER; note = 2'-fluorocytosine
  modified_base 64: mod_base = OTHER; note = 2'-Omethylguanosine
  modified_base 65: mod_base = OTHER; note = 2'-Omethylguanosine
  modified_base 66: mod_base = OTHER; note = 2'-Omethylcytosine
  modified_base 67: mod_base = OTHER; note = 2'-Omethylguanosine
  modified_base 68: mod_base = OTHER; note = 2'-Omethylguanosine
  modified_base 69: mod_base = OTHER; note = 2'-fluoroadenosine

SEQ ID NO: 6006 - RNA, 75 nt, synthetic construct; identical to SEQ ID NO: 3311
  source 1..75: mol_type = other RNA
  modified_base 4: mod_base = OTHER; note = 2'-fluorouridine phosphorothiorate
  modified_base 12: mod_base = OTHER; note = Guanosine phosphorothiorate
  modified_base 22: mod_base = OTHER; note = 2'-fluoroguanosine
  modified_base 24: mod_base = OTHER; note = 2'-fluoroadenosine phosphorothiorate
  modified_base 25: mod_base = OTHER; note = 2'-fluorocytosine
  modified_base 36: mod_base = OTHER; note = 2'-fluoroadenosine
  modified_base 40: mod_base = OTHER; note = 2'-Omethylcytosine
  modified_base 49: mod_base = OTHER; note = 2'-fluorocytosine phosphorothiorate
  modified_base 53: mod_base = OTHER; note = 2'-fluorouridine phosphorothiorate
  modified_base 63: mod_base = OTHER; note = 2'-fluoroguanosine
  modified_base 64: mod_base = OTHER; note = Guanosine phosphorothiorate
  modified_base 65: mod_base = OTHER; note = 2'-fluorouridine
  modified_base 68: mod_base = OTHER; note = 2'-fluoroadenosine
  modified_base 72: mod_base = OTHER; note = Uridine phosphorothiorate

SEQ ID NO: 6007 - RNA, 76 nt, synthetic construct; identical to SEQ ID NO: 625
  source 1..76: mol_type = other RNA
  modified_base 1: mod_base = OTHER; note = 2'-Omethylguanosine
  modified_base 10: mod_base = OTHER; note = 2'-Omethylguanosine
  modified_base 13: mod_base = OTHER; note = 2'-Omethylcytosine
  modified_base 18: mod_base = OTHER; note = 2'-Omethylguanosine
  modified_base 19: mod_base = OTHER; note = Adenosine phosphorothiorate
  modified_base 20: mod_base = OTHER; note = 2'-Omethyluridine
  modified_base 25: mod_base = OTHER; note = 2'-Omethylcytosine
  modified_base 29: mod_base = OTHER; note = 2'-Omethylguanosine
  modified_base 33: mod_base = OTHER; note = 2'-fluorouridine
  modified_base 35: mod_base = OTHER; note = Cytosine phosphorothiorate
  modified_base 37: mod_base = OTHER; note = Adenosine phosphorothiorate
  modified_base 38: mod_base = OTHER; note = Adenosine phosphorothiorate
  modified_base 41: mod_base = OTHER; note = 2'-fluorocytosine phosphorothiorate
  modified_base 43: mod_base = OTHER; note = 2'-Omethyladenosine
  modified_base 44: mod_base = OTHER; note = 2'-fluoroadenosine
  modified_base 50: mod_base = OTHER; note = 2'-Omethylcytosine
  modified_base 52: mod_base = OTHER; note = 2'-Omethylguanosine
  modified_base 54: mod_base = OTHER; note = Uridine phosphorothiorate
  modified_base 55: mod_base = OTHER; note = Uridine phosphorothiorate
  modified_base 56: mod_base = OTHER; note = 2'-Omethylcytosine
  modified_base 57: mod_base = OTHER; note = Guanosine phosphorothiorate
  modified_base 62: mod_base = OTHER; note = 2'-Omethylcytosine
  modified_base 63: mod_base = OTHER; note = 2'-fluorocytosine
  modified_base 65: mod_base = OTHER; note = 2'-Omethylguanosine
  modified_base 71: mod_base = OTHER; note = 2'-Omethyluridine
  modified_base 73: mod_base = OTHER; note = 2'-Omethylguanosine

SEQ ID NO: 6008 - RNA, 85 nt, synthetic construct; identical to SEQ ID NO: 3286
  source 1..85: mol_type = other RNA
  modified_base 1: mod_base = OTHER; note = 2'-Omethylcytosine phosphorothiorate
  modified_base 26: mod_base = OTHER; note = 2'-fluorouridine
  modified_base 30: mod_base = OTHER; note = 2'-fluoroadenosine
  modified_base 34: mod_base = OTHER; note = 2'-fluorouridine
  modified_base 44: mod_base = OTHER; note = Guanosine phosphorothiorate
  modified_base 45: mod_base = OTHER; note = Guanosine phosphorothiorate
  modified_base 56: mod_base = OTHER; note = Guanosine phosphorothiorate
  modified_base 83: mod_base = OTHER; note = Cytosine phosphorothiorate
  modified_base 84: mod_base = OTHER; note = 2'-Omethylcytosine

SEQ ID NO: 6009 - RNA, 85 nt, synthetic construct; identical to SEQ ID NO: 3286
  source 1..85: mol_type = other RNA
  modified_base 3: mod_base = OTHER; note = 2'-Omethyladenosine
  modified_base 44: mod_base = OTHER; note = 2'-Omethylguanosine
  modified_base 47: mod_base = OTHER; note = 2'-Omethylcytosine
  modified_base 52: mod_base = OTHER; note = Guanosine phosphorothiorate
  modified_base 64: mod_base = OTHER; note = Uridine phosphorothiorate
  modified_base 84: mod_base = OTHER; note = 2'-Omethylcytosine
  modified_base 85: mod_base = OTHER; note = 2'-Omethyladenosine

SEQ ID NO: 6010 - RNA, 75 nt, synthetic construct; identical to SEQ ID NO: 3306
  source 1..75: mol_type = other RNA
  modified_base 1: mod_base = OTHER; note = 2'-Omethylguanosine
  modified_base 65: mod_base = OTHER; note = 2'-Omethylcytosine
  modified_base 66: mod_base = OTHER; note = 2'-Omethylguanosine
  modified_base 67: mod_base = OTHER; note = 2'-Omethylguanosine
  modified_base 68: mod_base = OTHER; note = 2'-Omethylguanosine
  modified_base 70: mod_base = OTHER; note = 2'-Omethyluridine
  modified_base 71: mod_base = OTHER; note = 2'-Omethylcytosine
  modified_base 72: mod_base = OTHER; note = 2'-Omethyladenosine

SEQ ID NO: 6011 - RNA, 76 nt, synthetic construct; identical to SEQ ID NO: 3295
  source 1..76: mol_type = other RNA
  modified_base 1: mod_base = OTHER; note = 2'-Omethylcytosine phosphorothiorate
  modified_base 2: mod_base = OTHER; note = 2'-fluorocytosine phosphorothiorate
  modified_base 3: mod_base = OTHER; note = 2'-fluorouridine
  modified_base 4: mod_base = OTHER; note = Uridine phosphorothiorate
  modified_base 5: mod_base = OTHER; note = 2'-fluorocytosine phosphorothiorate
  modified_base 6: mod_base = OTHER; note = 2'-fluoroguanosine phosphorothiorate
  modified_base 8: mod_base = OTHER; note = 2'-fluorouridine
  modified_base 13: mod_base = OTHER; note = Cytosine phosphorothiorate
  modified_base 18: mod_base = OTHER; note = 2'-fluoroguanosine
  modified_base 29: mod_base = OTHER; note = 2'-Omethylguanosine phosphorothiorate
  modified_base 37: mod_base = OTHER; note = 2'-Omethylguanosine phosphorothiorate
  modified_base 49: mod_base = OTHER; note = Guanosine phosphorothiorate
  modified_base 53: mod_base = OTHER; note = 2'-fluoroguanosine
  modified_base 54: mod_base = OTHER; note = 2'-Omethyluridine
  modified_base 55: mod_base = OTHER; note = 2'-fluorouridine phosphorothiorate
  modified_base 75: mod_base = OTHER; note = 2'-fluorocytosine
  modified_base 76: mod_base = OTHER; note = 2'-Omethyladenosine

SEQ ID NO: 6012 - RNA, 75 nt, synthetic construct; identical to SEQ ID NO: 1045
  source 1..75: mol_type = other RNA
  modified_base 2: mod_base = OTHER; note = 2'-Omethylguanosine
  modified_base 13: mod_base = OTHER; note = 2'-Omethyluridine
  modified_base 16: mod_base = OTHER; note = Uridine phosphorothiorate
  modified_base 19: mod_base = OTHER; note = 2'-fluorouridine
  modified_base 25: mod_base = OTHER; note = Cytosine phosphorothiorate
  modified_base 26: mod_base = OTHER; note = 2'-fluorouridine phosphorothiorate
  modified_base 44: mod_base = OTHER; note = 2'-fluorocytosine
  modified_base 51: mod_base = OTHER; note = 2'-fluoroadenosine phosphorothiorate
  modified_base 52: mod_base = OTHER; note = Guanosine phosphorothiorate
  modified_base 54: mod_base = OTHER; note = 2'-fluorouridine
  modified_base 59: mod_base = OTHER; note = 2'-fluorouridine phosphorothiorate
  modified_base 62: mod_base = OTHER; note = Cytosine phosphorothiorate
  modified_base 74: mod_base = OTHER; note = Cytosine phosphorothiorate

SEQ ID NO: 6013 - RNA, 75 nt, synthetic construct; identical to SEQ ID NO: 1045
  source 1..75: mol_type = other RNA
  modified_base 1: mod_base = OTHER; note = 2'-Omethylguanosine
  modified_base 19: mod_base = OTHER; note = 2'-fluorouridine
  modified_base 20: mod_base = OTHER; note = 2'-Omethyladenosine phosphorothiorate
  modified_base 21: mod_base = OTHER; note = 2'-fluoroadenosine
  modified_base 22: mod_base = OTHER; note = 2'-Omethylguanosine
  modified_base 40: mod_base = OTHER; note = 2'-fluorocytosine
  modified_base 41: mod_base = OTHER; note = 2'-Omethylcytosine
  modified_base 42: mod_base = OTHER; note = 2'-Omethyladenosine
  modified_base 43: mod_base = OTHER; note = 2'-Omethylguanosine
  modified_base 72: mod_base = OTHER; note = 2'-Omethyluridine

SEQ ID NO: 6014 - RNA, 76 nt, synthetic construct; identical to SEQ ID NO: 625
  source 1..76: mol_type = other RNA
  modified_base 1: mod_base = OTHER; note = 2'-Omethylguanosine
  modified_base 10: mod_base = OTHER; note = 2'-Omethylguanosine
  modified_base 13: mod_base = OTHER; note = 2'-Omethylcytosine
  modified_base 17: mod_base = OTHER; note = Guanosine phosphorothiorate
  modified_base 18: mod_base = OTHER; note = 2'-Omethylguanosine
  modified_base 19: mod_base = OTHER; note = Adenosine phosphorothiorate
  modified_base 20: mod_base = OTHER; note = 2'-Omethyluridine
  modified_base 25: mod_base = OTHER; note = 2'-Omethylcytosine
  modified_base 29: mod_base = OTHER; note = 2'-Omethylguanosine
  modified_base 33: mod_base = OTHER; note = 2'-fluorouridine
  modified_base 35: mod_base = OTHER; note = Cytosine phosphorothiorate
  modified_base 37: mod_base = OTHER; note = Adenosine phosphorothiorate
  modified_base 38: mod_base = OTHER; note = Adenosine phosphorothiorate
  modified_base 41: mod_base = OTHER; note = 2'-Omethylcytosine
  modified_base 43: mod_base = OTHER; note = 2'-Omethyladenosine
  modified_base 44: mod_base = OTHER; note = 2'-fluoroadenosine
  modified_base 46: mod_base = OTHER; note = Guanosine phosphorothiorate
  modified_base 50: mod_base = OTHER; note = 2'-Omethylcytosine
  modified_base 52: mod_base = OTHER; note = 2'-Omethylguanosine
  modified_base 54: mod_base = OTHER; note = Uridine phosphorothiorate
  modified_base 55: mod_base = OTHER; note = Uridine phosphorothiorate
  modified_base 56: mod_base = OTHER; note = 2'-Omethylcytosine
  modified_base 57: mod_base = OTHER; note = Guanosine phosphorothiorate
  modified_base 62: mod_base = OTHER; note = 2'-Omethylcytosine
  modified_base 63: mod_base = OTHER; note = 2'-fluorocytosine
  modified_base 65: mod_base = OTHER; note = 2'-Omethylguanosine
  modified_base 73: mod_base = OTHER; note = 2'-Omethylguanosine

SEQ ID NO: 6015 - DNA, 76 bp, synthetic construct; identical to SEQ ID NO: 1924
  source 1..76: mol_type = other DNA
  modified_base 1: mod_base = OTHER; note = 2'-Omethylguanosine phosphorothiorate
  modified_base 2: mod_base = OTHER; note = 2'-fluoroguanosine
  modified_base 14: mod_base = OTHER; note = Adenosine phosphorothiorate
  modified_base 15: mod_base = OTHER; note = 2'-Omethyladenosine
  modified_base 16: mod_base = OTHER; note = 2'-Omethyluridine phosphorothiorate
  modified_base 17: mod_base = OTHER; note = 2'-O-(2-Methoxyethyl) guanosine
  modified_base 20: mod_base = OTHER; note = deoxyuridine phosphorothiorate
  modified_base 22: mod_base = OTHER; note = 2'-O-(2-Methoxyethyl) guanosine phosphorothiorate
  modified_base 23: mod_base = OTHER; note = 2'-fluorocytosine
  modified_base 26: mod_base = OTHER; note = 2'-O-(2-Methoxyethyl) adenosine phosphorothiorate
  modified_base 30: mod_base = OTHER; note = 2'-O-(2-Methoxyethyl) guanosine
  modified_base 32: mod_base = OTHER; note = Cytosine phosphorothiorate
  modified_base 33: mod_base = OTHER; note = 2'-Omethyluridine
  modified_base 35: mod_base = OTHER; note = Cytosine phosphorothiorate
  modified_base 36: mod_base = OTHER; note = 2'-Omethyladenosine
  modified_base 37: mod_base = OTHER; note = Adenosine phosphorothiorate
  modified_base 38: mod_base = OTHER; note = 2'-O-(2-Methoxyethyl) adenosine phosphorothiorate
  modified_base 39: mod_base = OTHER; note = 2'-fluorouridine
  modified_base 41: mod_base = OTHER; note = 2'-O-(2-Methoxyethyl) 5-methylcytosine phosphorothiorate
  modified_base 44: mod_base = OTHER; note = Adenosine phosphorothiorate
  modified_base 45: mod_base = OTHER; note = 2'-O-(2-Methoxyethyl) guanosine
  modified_base 47: mod_base = OTHER; note = deoxyuridine phosphorothiorate
  modified_base 52: mod_base = OTHER; note = Guanosine phosphorothiorate
  modified_base 53: mod_base = OTHER; note = 2'-fluoroguanosine
  modified_base 62: mod_base = OTHER; note = 2'-fluorocytosine
  modified_base 64: mod_base = OTHER; note = Guanosine phosphorothiorate
  modified_base 65: mod_base = OTHER; note = 2'-fluoroguanosine
  modified_base 71: mod_base = OTHER; note = Uridine phosphorothiorate
  modified_base 73: mod_base = OTHER; note = 2'-Omethylguanosine
  modified_base 75: mod_base = OTHER; note = Cytosine phosphorothiorate
  modified_base 76: mod_base = OTHER; note = 2'-O-(2-Methoxyethyl) adenosine
  misc_feature 1..19: note = RNA
  misc_feature 20: note = DNA
  misc_feature 21..41: note = RNA
  misc_feature 42: note = DNA
  misc_feature 43..46: note = RNA
  misc_feature 47: note = DNA
  misc_feature 48..59: note = RNA
  misc_feature 60: note = DNA
  misc_feature 61..76: note = RNA

SEQ ID NO: 6016 - RNA, 76 nt, synthetic construct; identical to SEQ ID NO: 625
  source 1..76: mol_type = other RNA
  modified_base 1: mod_base = OTHER; note = 2'-Omethylguanosine
  modified_base 10: mod_base = OTHER; note = 2'-Omethylguanosine
  modified_base 13: mod_base = OTHER; note = 2'-Omethylcytosine
  modified_base 17: mod_base = OTHER; note = 2'-Omethylguanosine
  modified_base 18: mod_base = OTHER; note = 2'-Omethylguanosine
  modified_base 19: mod_base = OTHER; note = Adenosine phosphorothiorate
  modified_base 20: mod_base = OTHER; note = 2'-Omethyluridine
  modified_base 25: mod_base = OTHER; note = 2'-Omethylcytosine
  modified_base 29: mod_base = OTHER; note = 2'-Omethylguanosine
  modified_base 33: mod_base = OTHER; note = 2'-fluorouridine
  modified_base 35: mod_base = OTHER; note = Cytosine phosphorothiorate
  modified_base 37: mod_base = OTHER; note = Adenosine phosphorothiorate
  modified_base 38: mod_base = OTHER; note = Adenosine phosphorothiorate
  modified_base 41: mod_base = OTHER; note = 2'-fluorocytosine phosphorothiorate
  modified_base 43: mod_base = OTHER; note = 2'-Omethyladenosine
  modified_base 44: mod_base = OTHER; note = 2'-fluoroadenosine
  modified_base 50: mod_base = OTHER; note = 2'-Omethylcytosine
  modified_base 52: mod_base = OTHER; note = 2'-Omethylguanosine
  modified_base 54: mod_base = OTHER; note = Uridine phosphorothiorate
  modified_base 55: mod_base = OTHER; note = Uridine phosphorothiorate
  modified_base 56: mod_base = OTHER; note = 2'-Omethylcytosine
  modified_base 57: mod_base = OTHER; note = Guanosine phosphorothiorate
  modified_base 62: mod_base = OTHER; note = 2'-Omethylcytosine
  modified_base 63: mod_base = OTHER; note = 2'-fluorocytosine
  modified_base 65: mod_base = OTHER; note = 2'-Omethylguanosine
  modified_base 71: mod_base = OTHER; note = 2'-Omethyluridine
  modified_base 73: mod_base = OTHER; note = 2'-Omethylguanosine

SEQ ID NO: 6017 - RNA, 86 nt, synthetic construct; identical to SEQ ID NO: 3290
  source 1..86: mol_type = other RNA
  modified_base 67: mod_base = OTHER; note = Guanosine phosphorothiorate

SEQ ID NO: 6018 - RNA, 75 nt, synthetic construct
  source 1..75: mol_type = other RNA
ccttcgatagctcagttggtagagcggaggactctagatccttaggtcgctgttcgaatccggctcgaaggacca

SEQ ID NO: 6019 - RNA, 76 nt, synthetic construct; identical to SEQ ID NO: 3289
  source 1..76: mol_type = other RNA
  modified_base 50: mod_base = OTHER; note = 2'-Omethyladenosine
  modified_base 52: mod_base = OTHER; note = 2'-Omethylguanosine

SEQ ID NO: 6020 - RNA, 76 nt, synthetic construct; identical to SEQ ID NO: 3295
  source 1..76: mol_type = other RNA
  modified_base 1: mod_base = OTHER; note = 2'-Omethylcytosine
  modified_base 2: mod_base = OTHER; note = 2'-Omethylcytosine phosphorothiorate
  modified_base 4: mod_base = OTHER; note = 2'-fluorouridine phosphorothiorate
  modified_base 9: mod_base = OTHER; note = 2'-fluoroadenosine
  modified_base 25: mod_base = OTHER; note = 2'-fluorocytosine
  modified_base 38: mod_base = OTHER; note = 2'-fluoroadenosine phosphorothiorate
  modified_base 45: mod_base = OTHER; note = 2'-fluoroguanosine
  modified_base 54: mod_base = OTHER; note = 2'-Omethyluridine
  modified_base 74: mod_base = OTHER; note = Cytosine phosphorothiorate

SEQ ID NO: 6021 - RNA, 76 nt, synthetic construct; identical to SEQ ID NO: 625
  source 1..76: mol_type = other RNA
  modified_base 1: mod_base = OTHER; note = 2'-Omethylguanosine phosphorothiorate
  modified_base 2: mod_base = OTHER; note = 2'-Omethylguanosine
  modified_base 3: mod_base = OTHER; note = 2'-Omethylcytosine
  modified_base 4: mod_base = OTHER; note = 2'-Omethyluridine
  modified_base 5: mod_base = OTHER; note = 2'-Omethylcytosine
  modified_base 6: mod_base = OTHER; note = 2'-Omethylcytosine
  modified_base 10: mod_base = OTHER; note = 2'-Omethylguanosine
  modified_base 11: mod_base = OTHER; note = 2'-Omethylcytosine
  modified_base 12: mod_base = OTHER; note = 2'-Omethylguanosine
  modified_base 13: mod_base = OTHER; note = 2'-Omethylcytosine
  modified_base 14: mod_base = OTHER; note = 2'-Omethyladenosine
  modified_base 15: mod_base = OTHER; note = 2'-fluoroadenosine
  modified_base 16: mod_base = OTHER; note = 2'-Omethyluridine
  modified_base 17: mod_base = OTHER; note = 2'-Omethylguanosine
  modified_base 18: mod_base = OTHER; note = 2'-Omethylguanosine
  modified_base 19: mod_base = OTHER; note = 2'-fluoroadenosine
  modified_base 20: mod_base = OTHER; note = 2'-Omethyluridine
  modified_base 21: mod_base = OTHER; note = 2'-fluoroadenosine
  modified_base 22: mod_base = OTHER; note = 2'-Omethylguanosine
  modified_base 23: mod_base = OTHER; note = 2'-Omethylcytosine
  modified_base 24: mod_base = OTHER; note = 2'-Omethylguanosine
  modified_base 25: mod_base = OTHER; note = 2'-Omethylcytosine
  modified_base 38: mod_base = OTHER; note = Adenosine phosphorothiorate
  modified_base 39: mod_base = OTHER; note = Uridine phosphorothiorate
  modified_base 40: mod_base = OTHER; note = 2'-fluorouridine
  modified_base 43: mod_base = OTHER; note = 2'-Omethyladenosine
  modified_base 44: mod_base = OTHER; note = 2'-Omethyladenosine
  modified_base 45: mod_base = OTHER; note = 2'-Omethylguanosine
  modified_base 46: mod_base = OTHER; note = 2'-fluoroguanosine
  modified_base 48: mod_base = OTHER; note = 2'-fluorouridine
  modified_base 49: mod_base = OTHER; note = 2'-Omethylcytosine
  modified_base 50: mod_base = OTHER; note = 2'-Omethylcytosine
  modified_base 54: mod_base = OTHER; note = Uridine phosphorothiorate
  modified_base 55: mod_base = OTHER; note = Uridine phosphorothiorate
  modified_base 56: mod_base = OTHER; note = 2'-Omethylcytosine
  modified_base 57: mod_base = OTHER; note = Guanosine phosphorothiorate
  modified_base 61: mod_base = OTHER; note = 2'-Omethylcytosine
  modified_base 62: mod_base = OTHER; note = 2'-Omethylcytosine
  modified_base 63: mod_base = OTHER; note = 2'-fluorocytosine
  modified_base 64: mod_base = OTHER; note = 2'-Omethylguanosine
  modified_base 65: mod_base = OTHER; note = 2'-Omethylguanosine
  modified_base 66: mod_base = OTHER; note = 2'-Omethylcytosine
  modified_base 67: mod_base = OTHER; note = 2'-Omethylguanosine
  modified_base 68: mod_base = OTHER; note = 2'-Omethylguanosine
  modified_base 69: mod_base = OTHER; note = 2'-Omethyladenosine

SEQ ID NO: 6022 - RNA, 76 nt, synthetic construct; identical to SEQ ID NO: 625
  source 1..76: mol_type = other RNA
  modified_base 1: mod_base = OTHER; note = 2'-fluoroguanosine
  modified_base 4: mod_base = OTHER; note = 2'-fluorouridine
  modified_base 7: mod_base = OTHER; note = Guanosine phosphorothiorate
  modified_base 11: mod_base = OTHER; note = 2'-Omethylcytosine
  modified_base 12: mod_base = OTHER; note = 2'-Omethylguanosine
  modified_base 15: mod_base = OTHER; note = Adenosine phosphorothiorate
  modified_base 22: mod_base = OTHER; note = 2'-fluoroguanosine
  modified_base 25: mod_base = OTHER; note = 2'-Omethylcytosine
  modified_base 26: mod_base = OTHER; note = 2'-Omethyladenosine
  modified_base 29: mod_base = OTHER; note = 2'-fluoroguanosine
  modified_base 31: mod_base = OTHER; note = 2'-Omethyladenosine
  modified_base 33: mod_base = OTHER; note = 2'-fluorouridine
  modified_base 34: mod_base = OTHER; note = 2'-fluorouridine
  modified_base 43: mod_base = OTHER; note = 2'-Omethyladenosine phosphorothiorate
  modified_base 44: mod_base = OTHER; note = 2'-Omethyladenosine
  modified_base 46: mod_base = OTHER; note = 2'-fluoroguanosine
  modified_base 48: mod_base = OTHER; note = 2'-Omethyluridine
  modified_base 50: mod_base = OTHER; note = 2'-Omethylcytosine
  modified_base 53: mod_base = OTHER; note = 2'-Omethylguanosine
  modified_base 55: mod_base = OTHER; note = Uridine phosphorothiorate
  modified_base 56: mod_base = OTHER; note = 2'-fluorocytosine
  modified_base 57: mod_base = OTHER; note = 2'-Omethylguanosine
  modified_base 59: mod_base = OTHER; note = 2'-fluoroguanosine
  modified_base 60: mod_base = OTHER; note = Uridine phosphorothiorate
  modified_base 63: mod_base = OTHER; note = 2'-Omethylcytosine
  modified_base 65: mod_base = OTHER; note = 2'-fluoroguanosine
  modified_base 66: mod_base = OTHER; note = 2'-fluorocytosine
  modified_base 67: mod_base = OTHER; note = 2'-fluoroguanosine
  modified_base 68: mod_base = OTHER; note = 2'-fluoroguanosine
  modified_base 71: mod_base = OTHER; note = 2'-fluorouridine phosphorothiorate
  modified_base 72: mod_base = OTHER; note = 2'-Omethylcytosine
  modified_base 76: mod_base = OTHER; note = 2'-Omethyladenosine

SEQ ID NO: 6023 - RNA, 86 nt, synthetic construct; identical to SEQ ID NO: 3290
  source 1..86: mol_type = other RNA
  modified_base 1: mod_base = OTHER; note = 2'-Omethyladenosine
  modified_base 2: mod_base = OTHER; note = 2'-Omethylcytosine
  modified_base 3: mod_base = OTHER; note = 2'-Omethylcytosine
  modified_base 4: mod_base = OTHER; note = 2'-Omethyladenosine
  modified_base 5: mod_base = OTHER; note = 2'-Omethylguanosine
  modified_base 6: mod_base = OTHER; note = 2'-Omethylguanosine
  modified_base 10: mod_base = OTHER; note = 2'-Omethylguanosine
  modified_base 11: mod_base = OTHER; note = 2'-Omethylcytosine
  modified_base 12: mod_base = OTHER; note = 2'-Omethylcytosine
  modified_base 13: mod_base = OTHER; note = 2'-Omethylguanosine
  modified_base 14: mod_base = OTHER; note = 2'-Omethyladenosine
  modified_base 15: mod_base = OTHER; note = 2'-Omethylguanosine
  modified_base 16: mod_base = OTHER; note = 2'-Omethyluridine
  modified_base 17: mod_base = OTHER; note = 2'-Omethylguanosine
  modified_base 18: mod_base = OTHER; note = 2'-Omethylguanosine
  modified_base 20: mod_base = OTHER; note = 2'-Omethyluridine
  modified_base 22: mod_base = OTHER; note = 2'-Omethyladenosine
  modified_base 23: mod_base = OTHER; note = 2'-Omethylguanosine
  modified_base 24: mod_base = OTHER; note = 2'-Omethylguanosine
  modified_base 25: mod_base = OTHER; note = 2'-Omethylcytosine
  modified_base 41: mod_base = OTHER; note = 2'-Omethylcytosine
  modified_base 42: mod_base = OTHER; note = 2'-Omethyladenosine
  modified_base 43: mod_base = OTHER; note = 2'-Omethyladenosine
  modified_base 44: mod_base = OTHER; note = 2'-Omethyluridine
  modified_base 59: mod_base = OTHER; note = 2'-Omethylguanosine
  modified_base 60: mod_base = OTHER; note = 2'-Omethyluridine
  modified_base 62: mod_base = OTHER; note = 2'-Omethylguanosine
  modified_base 64: mod_base = OTHER; note = 2'-Omethyluridine
  modified_base 65: mod_base = OTHER; note = Uridine phosphorothiorate
  modified_base 66: mod_base = OTHER; note = 2'-Omethylcytosine
  modified_base 67: mod_base = OTHER; note = 2'-fluoroguanosine
  modified_base 69: mod_base = OTHER; note = 2'-Omethyladenosine
  modified_base 71: mod_base = OTHER; note = 2'-Omethylcytosine
  modified_base 75: mod_base = OTHER; note = 2'-Omethylcytosine
  modified_base 83: mod_base = OTHER; note = 2'-Omethyladenosine

SEQ ID NO: 6024 - RNA, 76 nt, synthetic construct; identical to SEQ ID NO: 625
  source 1..76: mol_type = other RNA
  modified_base 1: mod_base = OTHER; note = Guanosine phosphorothiorate
  modified_base 2: mod_base = OTHER; note = 2'-Omethylguanosine
  modified_base 3: mod_base = OTHER; note = 2'-Omethylcytosine
  modified_base 5: mod_base = OTHER; note = 2'-Omethylcytosine phosphorothiorate
  modified_base 6: mod_base = OTHER; note = 2'-Omethylcytosine
  modified_base 10: mod_base = OTHER; note = 2'-Omethylguanosine
  modified_base 15: mod_base = OTHER; note = Adenosine phosphorothiorate
  modified_base 16: mod_base = OTHER; note = 2'-Omethyluridine phosphorothiorate
  modified_base 22: mod_base = OTHER; note = Guanosine phosphorothiorate
  modified_base 23: mod_base = OTHER; note = 2'-Omethylcytosine
  modified_base 25: mod_base = OTHER; note = 2'-Omethylcytosine
  modified_base 26: mod_base = OTHER; note = 2'-Omethyladenosine
  modified_base 30: mod_base = OTHER; note = 2'-fluoroguanosine
  modified_base 31: mod_base = OTHER; note = 2'-fluoroadenosine
  modified_base 33: mod_base = OTHER; note = Uridine phosphorothiorate
  modified_base 34: mod_base = OTHER; note = 2'-fluorouridine
  modified_base 36: mod_base = OTHER; note = Adenosine phosphorothiorate
  modified_base 38: mod_base = OTHER; note = Adenosine phosphorothiorate
  modified_base 39: mod_base = OTHER; note = Uridine phosphorothiorate
  modified_base 41: mod_base = OTHER; note = 2'-fluorocytosine phosphorothiorate
  modified_base 42: mod_base = OTHER; note = 2'-fluoroadenosine
  modified_base 45: mod_base = OTHER; note = 2'-fluoroguanosine
  modified_base 50: mod_base = OTHER; note = 2'-Omethylcytosine
  modified_base 51: mod_base = OTHER; note = Guanosine phosphorothiorate
  modified_base 52: mod_base = OTHER; note = 2'-Omethylguanosine
  modified_base 54: mod_base = OTHER; note = Uridine phosphorothiorate
  modified_base 58: mod_base = OTHER; note = Adenosine phosphorothiorate
  modified_base 60: mod_base = OTHER; note = 2'-Omethyluridine
  modified_base 61: mod_base = OTHER; note = Cytosine phosphorothiorate
  modified_base 62: mod_base = OTHER; note = Cytosine phosphorothiorate
  modified_base 63: mod_base = OTHER; note = 2'-Omethylcytosine
  modified_base 64: mod_base = OTHER; note = 2'-Omethylguanosine
  modified_base 66: mod_base = OTHER; note = 2'-Omethylcytosine phosphorothiorate
  modified_base 67: mod_base = OTHER; note = 2'-Omethylguanosine
  modified_base 68: mod_base = OTHER; note = 2'-Omethylguanosine
  modified_base 73: mod_base = OTHER; note = Guanosine phosphorothiorate
  modified_base 76: mod_base = OTHER; note = 2'-Omethyladenosine

SEQ ID NO: 6025 - RNA, 73 nt, synthetic construct; identical to SEQ ID NO: 935
  source 1..73: mol_type = other RNA
  modified_base 1: mod_base = OTHER; note = 2'-Omethylguanosine
  modified_base 16: mod_base = OTHER; note = 2'-Omethyluridine
  modified_base 17: mod_base = OTHER; note = 2'-Omethylguanosine
  modified_base 18: mod_base = OTHER; note = 2'-Omethylguanosine
  modified_base 54: mod_base = OTHER; note = 2'-Omethyluridine
  modified_base 56: mod_base = OTHER; note = 2'-Omethylcytosine
  modified_base 57: mod_base = OTHER; note = 2'-fluoroguanosine
  modified_base 59: mod_base = OTHER; note = 2'-Omethylguanosine
  modified_base 60: mod_base = OTHER; note = 2'-fluorouridine
  modified_base 73: mod_base = OTHER; note = 2'-Omethylguanosine

SEQ ID NO: 6026 - RNA, 76 nt, synthetic construct; identical to SEQ ID NO: 625
  source 1..76: mol_type = other RNA
  modified_base 3: mod_base = OTHER; note = 2'-Omethylcytosine
  modified_base 4: mod_base = OTHER; note = 2'-fluorouridine
  modified_base 6: mod_base = OTHER; note = 2'-Omethylcytosine
  modified_base 7: mod_base = OTHER; note = Guanosine phosphorothiorate
  modified_base 10: mod_base = OTHER; note = 2'-fluoroguanosine
  modified_base 11: mod_base = OTHER; note = 2'-fluorocytosine
  modified_base 12: mod_base = OTHER; note = 2'-fluoroguanosine
  modified_base 15: mod_base = OTHER; note = 2'-fluoroadenosine
  modified_base 16: mod_base = OTHER; note = 2'-fluorouridine
  modified_base 20: mod_base = OTHER; note = 2'-fluorouridine
  modified_base 26: mod_base = OTHER; note = Adenosine phosphorothiorate
  modified_base 29: mod_base = OTHER; note = Guanosine phosphorothiorate
  modified_base 31: mod_base = OTHER; note = 2'-Omethyladenosine
  modified_base 37: mod_base = OTHER; note = Adenosine phosphorothiorate
  modified_base 38: mod_base = OTHER; note = 2'-Omethyladenosine
  modified_base 41: mod_base = OTHER; note = 2'-fluorocytosine
  modified_base 43: mod_base = OTHER; note = 2'-fluoroadenosine
  modified_base 45: mod_base = OTHER; note = 2'-fluoroguanosine phosphorothiorate
  modified_base 46: mod_base = OTHER; note = 2'-Omethylguanosine
  modified_base 47: mod_base = OTHER; note = 2'-Omethyluridine phosphorothiorate
  modified_base 48: mod_base = OTHER; note = 2'-fluorouridine
  modified_base 49: mod_base = OTHER; note = 2'-Omethylcytosine
  modified_base 50: mod_base = OTHER; note = 2'-Omethylcytosine
  modified_base 51: mod_base = OTHER; note = Guanosine phosphorothiorate
  modified_base 53: mod_base = OTHER; note = 2'-Omethylguanosine
  modified_base 55: mod_base = OTHER; note = Uridine phosphorothiorate
  modified_base 56: mod_base = OTHER; note = Cytosine phosphorothiorate
  modified_base 57: mod_base = OTHER; note = 2'-Omethylguanosine
  modified_base 58: mod_base = OTHER; note = 2'-fluoroadenosine
  modified_base 59: mod_base = OTHER; note = Guanosine phosphorothiorate
  modified_base 63: mod_base = OTHER; note = Cytosine phosphorothiorate
  modified_base 64: mod_base = OTHER; note = 2'-fluoroguanosine
  modified_base 68: mod_base = OTHER; note = 2'-fluoroguanosine
  modified_base 69: mod_base = OTHER; note = Adenosine phosphorothiorate
  modified_base 70: mod_base = OTHER; note = 2'-fluoroguanosine
  modified_base 72: mod_base = OTHER; note = Cytosine phosphorothiorate
  modified_base 75: mod_base = OTHER; note = 2'-fluorocytosine
  modified_base 76: mod_base = OTHER; note = 2'-fluoroadenosine

SEQ ID NO: 6027 - RNA, 85 nt, synthetic construct; identical to SEQ ID NO: 3297
  source 1..85: mol_type = other RNA
  modified_base 1: mod_base = OTHER; note = 2'-Omethylguanosine
  modified_base 2: mod_base = OTHER; note = 2'-Omethylcytosine
  modified_base 3: mod_base = OTHER; note = 2'-Omethyluridine
  modified_base 4: mod_base = OTHER; note = 2'-Omethylguanosine
  modified_base 5: mod_base = OTHER; note = 2'-Omethyluridine
  modified_base 6: mod_base = OTHER; note = 2'-Omethylguanosine
  modified_base 14: mod_base = OTHER; note = 2'-Omethyladenosine
  modified_base 17: mod_base = OTHER; note = 2'-Omethylguanosine
  modified_base 18: mod_base = OTHER; note = 2'-Omethylguanosine
  modified_base 20: mod_base = OTHER; note = 2'-Omethyluridine
  modified_base 22: mod_base = OTHER; note = 2'-Omethyladenosine
  modified_base 25: mod_base = OTHER; note = 2'-Omethylcytosine
  modified_base 27: mod_base = OTHER; note = 2'-Omethyluridine
  modified_base 33: mod_base = OTHER; note = 2'-fluorouridine
  modified_base 41: mod_base = OTHER; note = 2'-Omethylcytosine
  modified_base 44: mod_base = OTHER; note = 2'-Omethyluridine
  modified_base 56: mod_base = OTHER; note = 2'-fluoroguanosine
  modified_base 57: mod_base = OTHER; note = 2'-fluorocytosine
  modified_base 61: mod_base = OTHER; note = 2'-Omethylguanosine
  modified_base 64: mod_base = OTHER; note = Uridine phosphorothiorate
  modified_base 82: mod_base = OTHER; note = 2'-Omethylguanosine

SEQ ID NO: 6028 - RNA, 76 nt, synthetic construct; identical to SEQ ID NO: 3447
  source 1..76: mol_type = other RNA
  modified_base 1: mod_base = OTHER; note = 2'-Omethylguanosine phosphorothiorate
  modified_base 2: mod_base = OTHER; note = 2'-Omethylcytosine phosphorothiorate
  modified_base 3: mod_base = OTHER; note = 2'-Omethylcytosine
  modified_base 4: mod_base = OTHER; note = 2'-Omethylcytosine
  modified_base 5: mod_base = OTHER; note = 2'-Omethylguanosine
  modified_base 6: mod_base = OTHER; note = 2'-Omethyladenosine
  modified_base 10: mod_base = OTHER; note = 2'-Omethylguanosine
  modified_base 11: mod_base = OTHER; note = 2'-Omethylcytosine
  modified_base 12: mod_base = OTHER; note = 2'-Omethylguanosine
  modified_base 13: mod_base = OTHER; note = 2'-Omethylcytosine
  modified_base 22: mod_base = OTHER; note = 2'-Omethylguanosine
  modified_base 23: mod_base = OTHER; note = 2'-Omethylcytosine
  modified_base 24: mod_base = OTHER; note = 2'-Omethylguanosine
  modified_base 25: mod_base = OTHER; note = 2'-Omethylcytosine
  modified_base 49: mod_base = OTHER; note = 2'-Omethylcytosine
  modified_base 50: mod_base = OTHER; note = 2'-Omethylcytosine
  modified_base 51: mod_base = OTHER; note = 2'-Omethylguanosine
  modified_base 52: mod_base = OTHER; note = 2'-Omethylguanosine
  modified_base 53: mod_base = OTHER; note = 2'-Omethylguanosine
  modified_base 54: mod_base = OTHER; note = 2'-Omethyluridine
  modified_base 61: mod_base = OTHER; note = 2'-Omethylcytosine
  modified_base 62: mod_base = OTHER; note = 2'-Omethylcytosine
  modified_base 63: mod_base = OTHER; note = 2'-fluorocytosine
  modified_base 64: mod_base = OTHER; note = 2'-Omethylguanosine
  modified_base 65: mod_base = OTHER; note = 2'-Omethylguanosine
  modified_base 66: mod_base = OTHER; note = 2'-Omethylcytosine
  modified_base 67: mod_base = OTHER; note = 2'-Omethyluridine
  modified_base 68: mod_base = OTHER; note = 2'-Omethylcytosine
  modified_base 73: mod_base = OTHER; note = 2'-Omethylguanosine

SEQ ID NO: 6029 - RNA, 76 nt, synthetic construct
  source 1..76: mol_type = other RNA
gggtccgtggcgcaatggatagcgcactggacttcaaattcagaggttccgggttcgagtcccggcggactcgcca

SEQ ID NO: 6030 - RNA, 73 nt, synthetic construct; identical to SEQ ID NO: 935
  source 1..73: mol_type = other RNA
  modified_base 1: mod_base = OTHER; note = 2'-Omethylguanosine phosphorothiorate
  modified_base 2: mod_base = OTHER; note = 2'-Omethylguanosine
  modified_base 16: mod_base = OTHER; note = 2'-fluorouridine

SEQ ID NO: 6031 - RNA, 85 nt, synthetic construct; identical to SEQ ID NO: 3297
  source 1..85: mol_type = other RNA
  modified_base 1: mod_base = OTHER; note = 2'-Omethylguanosine
  modified_base 19: mod_base = OTHER; note = 2'-Omethyluridine
  modified_base 20: mod_base = OTHER; note = 2'-Omethyluridine phosphorothiorate
  modified_base 21: mod_base = OTHER; note = 2'-fluoroadenosine
  modified_base 22: mod_base = OTHER; note = 2'-Omethyladenosine
  modified_base 40: mod_base = OTHER; note = 2'-fluorocytosine
  modified_base 41: mod_base = OTHER; note = 2'-Omethylcytosine
  modified_base 42: mod_base = OTHER; note = 2'-Omethyladenosine
  modified_base 43: mod_base = OTHER; note = 2'-Omethyladenosine
  modified_base 82: mod_base = OTHER; note = 2'-Omethylguanosine

SEQ ID NO: 6032 - RNA, 76 nt, synthetic construct; identical to SEQ ID NO: 3318
  source 1..76: mol_type = other RNA
  modified_base 1: mod_base = OTHER; note = 2'-Omethylcytosine
  modified_base 14: mod_base = OTHER; note = 2'-Omethyladenosine
  modified_base 15: mod_base = OTHER; note = 2'-fluoroguanosine
  modified_base 16: mod_base = OTHER; note = 2'-Omethyluridine
  modified_base 18: mod_base = OTHER; note = 2'-Omethylguanosine
  modified_base 19: mod_base = OTHER; note = 2'-Omethylguanosine
  modified_base 20: mod_base = OTHER; note = 2'-fluorouridine
  modified_base 54: mod_base = OTHER; note = 2'-Omethyluridine phosphorothiorate
  modified_base 55: mod_base = OTHER; note = Uridine phosphorothiorate
  modified_base 56: mod_base = OTHER; note = 2'-Omethylcytosine
  modified_base 57: mod_base = OTHER; note = 2'-Omethylguanosine
  modified_base 59: mod_base = OTHER; note = 2'-Omethyladenosine
  modified_base 73: mod_base = OTHER; note = 2'-Omethyladenosine

SEQ ID NO: 6033 - RNA, 76 nt, synthetic construct; identical to SEQ ID NO: 625
  source 1..76: mol_type = other RNA
  modified_base 1: mod_base = OTHER; note = 2'-Omethylguanosine phosphorothiorate
  modified_base 2: mod_base = OTHER; note = 2'-Omethylguanosine
  modified_base 3: mod_base = OTHER; note = 2'-Omethylcytosine
  modified_base 4: mod_base = OTHER; note = 2'-Omethyluridine
  modified_base 5: mod_base = OTHER; note = 2'-Omethylcytosine
  modified_base 6: mod_base = OTHER; note = 2'-Omethylcytosine
  modified_base 10: mod_base = OTHER; note = 2'-Omethylguanosine
  modified_base 13: mod_base = OTHER; note = 2'-Omethylcytosine
  modified_base 17: mod_base = OTHER; note = Guanosine phosphorothiorate
  modified_base 18: mod_base = OTHER; note = 2'-Omethylguanosine
  modified_base 19: mod_base = OTHER; note = Adenosine phosphorothiorate
  modified_base 20: mod_base = OTHER; note = 2'-Omethyluridine
  modified_base 25: mod_base = OTHER; note = 2'-Omethylcytosine
  modified_base 29: mod_base = OTHER; note = 2'-Omethylguanosine
  modified_base 33: mod_base = OTHER; note = 2'-fluorouridine
  modified_base 35: mod_base = OTHER; note = Cytosine phosphorothiorate
  modified_base 37: mod_base = OTHER; note = Adenosine phosphorothiorate
  modified_base 38: mod_base = OTHER; note = Adenosine phosphorothiorate
  modified_base 41: mod_base = OTHER; note = 2'-Omethylcytosine
  modified_base 43: mod_base = OTHER; note = 2'-Omethyladenosine
  modified_base 44: mod_base = OTHER; note = 2'-Omethyladenosine
  modified_base 45: mod_base = OTHER; note = 2'-Omethylguanosine
  modified_base 46: mod_base = OTHER; note = 2'-fluoroguanosine
  modified_base 48: mod_base = OTHER; note = 2'-fluorouridine
  modified_base 49: mod_base = OTHER; note = 2'-Omethylcytosine
  modified_base 50: mod_base = OTHER; note = 2'-Omethylcytosine
  modified_base 51: mod_base = OTHER; note = 2'-Omethylguanosine
  modified_base 52: mod_base = OTHER; note = 2'-fluoroguanosine
  modified_base 53: mod_base = OTHER; note = 2'-Omethylguanosine
  modified_base 54: mod_base = OTHER; note = Uridine phosphorothiorate
  modified_base 55: mod_base = OTHER; note = Uridine phosphorothiorate
  modified_base 56: mod_base = OTHER; note = 2'-Omethylcytosine
  modified_base 57: mod_base = OTHER; note = 2'-Omethylguanosine
  modified_base 61: mod_base = OTHER; note = 2'-Omethylcytosine
  modified_base 62: mod_base = OTHER; note = 2'-Omethylcytosine
  modified_base 63: mod_base = OTHER; note = 2'-fluorocytosine
  modified_base 64: mod_base = OTHER; note = 2'-Omethylguanosine
  modified_base 65: mod_base = OTHER; note = 2'-Omethylguanosine
  modified_base 66: mod_base = OTHER; note = 2'-Omethylcytosine
  modified_base 67: mod_base = OTHER; note = 2'-Omethylguanosine
  modified_base 68: mod_base = OTHER; note = 2'-Omethylguanosine
  modified_base 69: mod_base = OTHER; note = 2'-Omethyladenosine
  modified_base 71: mod_base = OTHER; note = 2'-Omethyluridine
  modified_base 73: mod_base = OTHER; note = 2'-Omethylguanosine
  modified_base 75: mod_base = OTHER; note = 2'-fluorocytosine phosphorothiorate

SEQ ID NO: 6034 - RNA, 76 nt, synthetic construct; identical to SEQ ID NO: 625
  source 1..76: mol_type = other RNA
  modified_base 3: mod_base = OTHER; note = 2'-fluorocytosine
  modified_base 6: mod_base = OTHER; note = Cytosine phosphorothiorate
  modified_base 12: mod_base = OTHER; note = 2'-Omethylguanosine
  modified_base 14: mod_base = OTHER; note = 2'-Omethyladenosine
  modified_base 15: mod_base = OTHER; note = 2'-fluoroadenosine
  modified_base 16: mod_base = OTHER; note = 2'-fluorouridine
  modified_base 17: mod_base = OTHER; note = 2'-Omethylguanosine phosphorothiorate
  modified_base 18: mod_base = OTHER; note = 2'-fluoroguanosine
  modified_base 19: mod_base = OTHER; note = Adenosine phosphorothiorate
  modified_base 22: mod_base = OTHER; note = 2'-Omethylguanosine
  modified_base 25: mod_base = OTHER; note = Cytosine phosphorothiorate
  modified_base 26: mod_base = OTHER; note = 2'-fluoroadenosine
  modified_base 27: mod_base = OTHER; note = 2'-fluorouridine phosphorothiorate
  modified_base 28: mod_base = OTHER; note = 2'-Omethyluridine
  modified_base 44: mod_base = OTHER; note = Adenosine phosphorothiorate
  modified_base 47: mod_base = OTHER; note = 2'-fluorouridine phosphorothiorate
  modified_base 48: mod_base = OTHER; note = 2'-Omethyluridine
  modified_base 51: mod_base = OTHER; note = 2'-Omethylguanosine
  modified_base 53: mod_base = OTHER; note = 2'-Omethylguanosine
  modified_base 54: mod_base = OTHER; note = 2'-Omethyluridine phosphorothiorate
  modified_base 58: mod_base = OTHER; note = Adenosine phosphorothiorate
  modified_base 59: mod_base = OTHER; note = 2'-Omethylguanosine
  modified_base 60: mod_base = OTHER; note = Uridine phosphorothiorate
  modified_base 61: mod_base = OTHER; note = 2'-fluorocytosine
  modified_base 63: mod_base = OTHER; note = 2'-Omethylcytosine
  modified_base 64: mod_base = OTHER; note = Guanosine phosphorothiorate
  modified_base 69: mod_base = OTHER; note = 2'-fluoroadenosine
  modified_base 70: mod_base = OTHER; note = 2'-fluoroguanosine phosphorothiorate
  modified_base 71: mod_base = OTHER; note = 2'-Omethyluridine phosphorothiorate
  modified_base 72: mod_base = OTHER; note = 2'-fluorocytosine
  modified_base 73: mod_base = OTHER; note = Guanosine phosphorothiorate
  modified_base 74: mod_base = OTHER; note = 2'-Omethylcytosine

SEQ ID NO: 6035 - RNA, 76 nt, synthetic construct; identical to SEQ ID NO: 3289
  source 1..76: mol_type = other RNA
  modified_base 39: mod_base = OTHER; note = 2'-Omethyluridine
  modified_base 40: mod_base = OTHER; note = 2'-Omethylcytosine
  modified_base 41: mod_base = OTHER; note = 2'-Omethyluridine
  modified_base 42: mod_base = OTHER; note = 2'-Omethylguanosine
  modified_base 43: mod_base = OTHER; note = 2'-Omethyladenosine

SEQ ID NO: 6036 - RNA, 76 nt, synthetic construct
  source 1..76: mol_type = other RNA
ggctccgtggcgcaatggatagcgcattggacttcaaattcaaaggttccggcgttaagtgccggcggagtcgcca

SEQ ID NO: 6037 - RNA, 76 nt, synthetic construct; identical to SEQ ID NO: 625
  source 1..76: mol_type = other RNA
  modified_base 1: mod_base = OTHER; note = 2'-Omethylguanosine phosphorothiorate
  modified_base 2: mod_base = OTHER; note = 2'-Omethylguanosine
  modified_base 33: mod_base = OTHER; note = 2'-fluorouridine
  modified_base 35: mod_base = OTHER; note = Cytosine phosphorothiorate
  modified_base 37: mod_base = OTHER; note = Adenosine phosphorothiorate
  modified_base 38: mod_base = OTHER; note = Adenosine phosphorothiorate
  modified_base 52: mod_base = OTHER; note = 2'-Omethylguanosine
  modified_base 53: mod_base = OTHER; note = 2'-Omethylguanosine
  modified_base 62: mod_base = OTHER; note = 2'-Omethylcytosine
  modified_base 63: mod_base = OTHER; note = 2'-fluorocytosine
  modified_base 65: mod_base = OTHER; note = 2'-Omethylguanosine
  modified_base 73: mod_base = OTHER; note = 2'-Omethylguanosine
  modified_base 75: mod_base = OTHER; note = 2'-fluorocytosine phosphorothiorate

SEQ ID NO: 6038 - RNA, 85 nt, synthetic construct; identical to SEQ ID NO: 3301
  source 1..85: mol_type = other RNA
  modified_base 1: mod_base = OTHER; note = 2'-Omethylguanosine phosphorothiorate
  modified_base 2: mod_base = OTHER; note = 2'-Omethylcytosine
  modified_base 4: mod_base = OTHER; note = Guanosine phosphorothiorate
  modified_base 5: mod_base = OTHER; note = 2'-Omethyluridine
  modified_base 12: mod_base = OTHER; note = 2'-fluorocytosine
  modified_base 13: mod_base = OTHER; note = 2'-fluoroguanosine phosphorothiorate
  modified_base 15: mod_base = OTHER; note = 2'-Omethylguanosine
  modified_base 18: mod_base = OTHER; note = 2'-fluoroguanosine
  modified_base 29: mod_base = OTHER; note = 2'-Omethylguanosine phosphorothiorate
  modified_base 31: mod_base = OTHER; note = 2'-fluoroadenosine
  modified_base 35: mod_base = OTHER; note = 2'-Omethyluridine
  modified_base 42: mod_base = OTHER; note = 2'-fluoroadenosine
  modified_base 46: mod_base = OTHER; note = 2'-Omethylguanosine phosphorothiorate
  modified_base 48: mod_base = OTHER; note = 2'-fluoroguanosine phosphorothiorate
  modified_base 55: mod_base = OTHER; note = 2'-Omethylcytosine phosphorothiorate
  modified_base 57: mod_base = OTHER; note = 2'-Omethylcytosine
  modified_base 59: mod_base = OTHER; note = 2'-Omethylcytosine
  modified_base 71: mod_base = OTHER; note = 2'-fluorocytosine
  modified_base 83: mod_base = OTHER; note = Cytosine phosphorothiorate

SEQ ID NO: 6039 - RNA, 75 nt, synthetic construct; identical to SEQ ID NO: 3306
  source 1..75: mol_type = other RNA
  modified_base 1: mod_base = OTHER; note = 2'-Omethylguanosine
  modified_base 72: mod_base = OTHER; note = 2'-Omethyladenosine

SEQ ID NO: 6040 - RNA, 86 nt, synthetic construct; identical to SEQ ID NO: 3290
  source 1..86: mol_type = other RNA
  modified_base 47: mod_base = OTHER; note = Adenosine phosphorothiorate

SEQ ID NO: 6041 - RNA, 76 nt, synthetic construct; identical to SEQ ID NO: 625
  source 1..76: mol_type = other RNA
  modified_base 1: mod_base = OTHER; note = 2'-Omethylguanosine
  modified_base 2: mod_base = OTHER; note = 2'-Omethylguanosine
  modified_base 3: mod_base = OTHER; note = 2'-Omethylcytosine
  modified_base 10: mod_base = OTHER; note = 2'-Omethylguanosine
  modified_base 11: mod_base = OTHER; note = 2'-Omethylcytosine
  modified_base 12: mod_base = OTHER; note = 2'-Omethylguanosine
  modified_base 13: mod_base = OTHER; note = 2'-Omethylcytosine
  modified_base 14: mod_base = OTHER; note = 2'-Omethyladenosine
  modified_base 15: mod_base = OTHER; note = 2'-fluoroadenosine
  modified_base 16: mod_base = OTHER; note = 2'-Omethyluridine
  modified_base 17: mod_base = OTHER; note = 2'-Omethylguanosine
  modified_base 18: mod_base = OTHER; note = 2'-Omethylguanosine
  modified_base 19: mod_base = OTHER; note = 2'-fluoroadenosine
  modified_base 20: mod_base = OTHER; note = 2'-Omethyluridine
  modified_base 22: mod_base = OTHER; note = 2'-Omethylguanosine
  modified_base 23: mod_base = OTHER; note = 2'-Omethylcytosine
  modified_base 24: mod_base = OTHER; note = 2'-Omethylguanosine
  modified_base 25: mod_base = OTHER; note = 2'-Omethylcytosine
  modified_base 38: mod_base = OTHER; note = Adenosine phosphorothiorate
  modified_base 39: mod_base = OTHER; note = Uridine phosphorothiorate
  modified_base 40: mod_base = OTHER; note = 2'-fluorouridine
  modified_base 43: mod_base = OTHER; note = 2'-Omethyladenosine
  modified_base 44: mod_base = OTHER; note = 2'-Omethyladenosine
  modified_base 45: mod_base = OTHER; note = 2'-Omethylguanosine
  modified_base 46: mod_base = OTHER; note = 2'-fluoroguanosine
  modified_base 48: mod_base = OTHER; note = 2'-fluorouridine
  modified_base 49: mod_base = OTHER; note = 2'-Omethylcytosine
  modified_base 50: mod_base = OTHER; note = 2'-Omethylcytosine
  modified_base 54: mod_base = OTHER; note = Uridine phosphorothiorate
  modified_base 55: mod_base = OTHER; note = Uridine phosphorothiorate
  modified_base 56: mod_base = OTHER; note = 2'-Omethylcytosine
  modified_base 57: mod_base = OTHER; note = Guanosine phosphorothiorate
  modified_base 61: mod_base = OTHER; note = 2'-Omethylcytosine
  modified_base 62: mod_base = OTHER; note = 2'-Omethylcytosine
  modified_base 63: mod_base = OTHER; note = 2'-fluorocytosine
  modified_base 64: mod_base = OTHER; note = 2'-Omethylguanosine
  modified_base 65: mod_base = OTHER; note = 2'-Omethylguanosine
  modified_base 66: mod_base = OTHER; note = 2'-Omethylcytosine
  modified_base 67: mod_base = OTHER; note = 2'-Omethylguanosine
  modified_base 68: mod_base = OTHER; note = 2'-Omethylguanosine

SEQ ID NO: 6042 - RNA, 76 nt, synthetic construct; identical to SEQ ID NO: 3675
  source 1..76: mol_type = other RNA
  modified_base 1: mod_base = OTHER; note = 2'-Omethylguanosine
  modified_base 2: mod_base = OTHER; note = 2'-Omethylcytosine
  modified_base 3: mod_base = OTHER; note = 2'-Omethylcytosine
  modified_base 4: mod_base = OTHER; note = 2'-Omethyluridine
  modified_base 5: mod_base = OTHER; note = 2'-Omethylcytosine
  modified_base 6: mod_base = OTHER; note = 2'-Omethylcytosine
  modified_base 10: mod_base = OTHER; note = 2'-Omethylguanosine
  modified_base 11: mod_base = OTHER; note = 2'-Omethylcytosine
  modified_base 12: mod_base = OTHER; note = 2'-Omethylguanosine
  modified_base 13: mod_base = OTHER; note = 2'-Omethylcytosine
  modified_base 16: mod_base = OTHER; note = 2'-Omethyluridine
  modified_base 17: mod_base = OTHER; note = 2'-Omethylguanosine
  modified_base 18: mod_base = OTHER; note = 2'-Omethylguanosine
  modified_base 20: mod_base = OTHER; note = 2'-Omethyluridine
  modified_base 25: mod_base = OTHER; note = 2'-Omethylcytosine
  modified_base 33: mod_base = OTHER; note = 2'-fluorouridine
  modified_base 35: mod_base = OTHER; note = Cytosine phosphorothiorate
  modified_base 37: mod_base = OTHER; note = Adenosine phosphorothiorate
  modified_base 38: mod_base = OTHER; note = Adenosine phosphorothiorate
  modified_base 41: mod_base = OTHER; note = 2'-fluorocytosine
  modified_base 42: mod_base = OTHER; note = 2'-Omethyladenosine
  modified_base 43: mod_base = OTHER; note = 2'-Omethylcytosine
  modified_base 44: mod_base = OTHER; note = 2'-fluoroadenosine
  modified_base 49: mod_base = OTHER; note = 2'-Omethylcytosine
  modified_base 50: mod_base = OTHER; note = 2'-Omethylcytosine
  modified_base 52: mod_base = OTHER; note = 2'-Omethylguanosine
  modified_base 54: mod_base = OTHER; note = 2'-Omethyluridine
  modified_base 55: mod_base = OTHER; note = Uridine phosphorothiorate
  modified_base 56: mod_base = OTHER; note = 2'-Omethylcytosine
  modified_base 57: mod_base = OTHER; note = 2'-fluoroguanosine
  modified_base 59: mod_base = OTHER; note = 2'-Omethylguanosine
  modified_base 61: mod_base = OTHER; note = 2'-Omethylcytosine
  modified_base 65: mod_base = OTHER; note = 2'-Omethylguanosine
  modified_base 73: mod_base = OTHER; note = 2'-Omethylguanosine

SEQ ID NO: 6043 - RNA, 76 nt, synthetic construct; identical to SEQ ID NO: 625
  source 1..76: mol_type = other RNA
  modified_base 2: mod_base = OTHER; note = 2'-fluoroguanosine
  modified_base 3: mod_base = OTHER; note = Cytosine phosphorothiorate
  modified_base 5: mod_base = OTHER; note = 2'-fluorocytosine
  modified_base 11: mod_base = OTHER; note = Cytosine phosphorothiorate
  modified_base 12: mod_base = OTHER; note = 2'-Omethylguanosine
  modified_base 15: mod_base = OTHER; note = 2'-Omethyladenosine
  modified_base 17: mod_base = OTHER; note = 2'-Omethylguanosine phosphorothiorate
  modified_base 18: mod_base = OTHER; note = 2'-fluoroguanosine
  modified_base 19: mod_base = OTHER; note = Adenosine phosphorothiorate
  modified_base 20: mod_base = OTHER; note = 2'-fluorouridine
  modified_base 23: mod_base = OTHER; note = 2'-Omethylcytosine
  modified_base 24: mod_base = OTHER; note = Guanosine phosphorothiorate
  modified_base 26: mod_base = OTHER; note = 2'-Omethyladenosine
  modified_base 28: mod_base = OTHER; note = 2'-Omethyluridine
  modified_base 36: mod_base = OTHER; note = Adenosine phosphorothiorate
  modified_base 38: mod_base = OTHER; note = 2'-fluoroadenosine
  modified_base 40: mod_base = OTHER; note = 2'-fluorouridine
  modified_base 41: mod_base = OTHER; note = 2'-Omethylcytosine
  modified_base 46: mod_base = OTHER; note = 2'-Omethylguanosine
  modified_base 47: mod_base = OTHER; note = Uridine phosphorothiorate
  modified_base 49: mod_base = OTHER; note = 2'-fluorocytosine
  modified_base 53: mod_base = OTHER; note = 2'-fluoroguanosine phosphorothiorate
  modified_base 54: mod_base = OTHER; note = 2'-fluorouridine
  modified_base 56: mod_base = OTHER; note = Cytosine phosphorothiorate
  modified_base 59: mod_base = OTHER; note = Guanosine phosphorothiorate
  modified_base 60: mod_base = OTHER; note = 2'-Omethyluridine
  modified_base 61: mod_base = OTHER; note = 2'-fluorocytosine
  modified_base 62: mod_base = OTHER; note = 2'-Omethylcytosine
  modified_base 65: mod_base = OTHER; note = 2'-fluoroguanosine
  modified_base 66: mod_base = OTHER; note = 2'-Omethylcytosine
  modified_base 67: mod_base = OTHER; note = Guanosine phosphorothiorate
  modified_base 68: mod_base = OTHER; note = 2'-fluoroguanosine
  modified_base 71: mod_base = OTHER; note = 2'-Omethyluridine
  modified_base 73: mod_base = OTHER; note = Guanosine phosphorothiorate
  modified_base 74: mod_base = OTHER; note = 2'-Omethylcytosine
  modified_base 75: mod_base = OTHER; note = 2'-fluorocytosine
  modified_base 76: mod_base = OTHER; note = 2'-fluoroadenosine

SEQ ID NO: 6044 - RNA, 76 nt, synthetic construct; identical to SEQ ID NO: 625
  source 1..76: mol_type = other RNA
  modified_base 1: mod_base = OTHER; note = 2'-Omethylguanosine
  modified_base 5: mod_base = OTHER; note = 2'-Omethylcytosine phosphorothiorate
  modified_base 6: mod_base = OTHER; note = 2'-Omethylcytosine
  modified_base 10: mod_base = OTHER; note = Guanosine phosphorothiorate
  modified_base 11: mod_base = OTHER; note = Cytosine phosphorothiorate
  modified_base 12: mod_base = OTHER; note = 2'-Omethylguanosine
  modified_base 15: mod_base = OTHER; note = 2'-fluoroadenosine phosphorothiorate
  modified_base 16: mod_base = OTHER; note = 2'-Omethyluridine
  modified_base 18: mod_base = OTHER; note = 2'-fluoroguanosine
  modified_base 20: mod_base = OTHER; note = 2'-Omethyluridine phosphorothiorate
  modified_base 22: mod_base = OTHER; note = 2'-fluoroguanosine phosphorothiorate
  modified_base 23: mod_base = OTHER; note = 2'-fluorocytosine
  modified_base 28: mod_base = OTHER; note = 2'-fluorouridine
  modified_base 36: mod_base = OTHER; note = Adenosine phosphorothiorate
  modified_base 38: mod_base = OTHER; note = Adenosine phosphorothiorate
  modified_base 41: mod_base = OTHER; note = Cytosine phosphorothiorate
  modified_base 42: mod_base = OTHER; note = 2'-Omethyladenosine
  modified_base 46: mod_base = OTHER; note = 2'-fluoroguanosine
  modified_base 47: mod_base = OTHER; note = 2'-Omethyluridine
  modified_base 52: mod_base = OTHER; note = 2'-Omethylguanosine
  modified_base 53: mod_base = OTHER; note = 2'-fluoroguanosine
  modified_base 58: mod_base = OTHER; note = 2'-fluoroadenosine
  modified_base 59: mod_base = OTHER; note = Guanosine phosphorothiorate
  modified_base 60: mod_base = OTHER; note = 2'-Omethyluridine phosphorothiorate
  modified_base 64: mod_base = OTHER; note = Guanosine phosphorothiorate
  modified_base 65: mod_base = OTHER; note = 2'-fluoroguanosine
  modified_base 66: mod_base = OTHER; note = 2'-fluorocytosine
  modified_base 71: mod_base = OTHER; note = 2'-fluorouridine
  modified_base 72: mod_base = OTHER; note = 2'-Omethylcytosine phosphorothiorate
  modified_base 73: mod_base = OTHER; note = 2'-fluoroguanosine phosphorothiorate

SEQ ID NO: 6045 - RNA, 76 nt, synthetic construct; identical to SEQ ID NO: 3318
  source 1..76: mol_type = other RNA
  modified_base 1: mod_base = OTHER; note = 2'-Omethylcytosine phosphorothiorate
  modified_base 2: mod_base = OTHER; note = 2'-Omethylcytosine
  modified_base 42: mod_base = OTHER; note = 2'-fluorouridine
  modified_base 45: mod_base = OTHER; note = Guanosine phosphorothiorate
  modified_base 46: mod_base = OTHER; note = 2'-fluoroguanosine
  modified_base 52: mod_base = OTHER; note = Guanosine phosphorothiorate
  modified_base 74: mod_base = OTHER; note = Cytosine phosphorothiorate
  modified_base 75: mod_base = OTHER; note = 2'-Omethylcytosine

SEQ ID NO: 6046 - RNA, 75 nt, synthetic construct; identical to SEQ ID NO: 3306
  source 1..75: mol_type = other RNA
  modified_base 10: mod_base = OTHER; note = 2'-Omethylguanosine
  modified_base 11: mod_base = OTHER; note = 2'-Omethylcytosine
  modified_base 12: mod_base = OTHER; note = 2'-Omethylguanosine
  modified_base 13: mod_base = OTHER; note = 2'-Omethylcytosine
  modified_base 72: mod_base = OTHER; note = 2'-Omethyladenosine

SEQ ID NO: 6047 - RNA, 76 nt, synthetic construct; identical to SEQ ID NO: 3615
  source 1..76: mol_type = other RNA

SEQ ID NO: 6048 - RNA, 86 nt, synthetic construct
  source 1..86: mol_type = other RNA
accgggatggccgagtggttaaggcgttggacttcagatccaatggacaggtgtctgcgtgggttcgagccccactcccggtacca

SEQ ID NO: 6049 - RNA, 75 nt, synthetic construct; identical to SEQ ID NO: 1045
  source 1..75: mol_type = other RNA
  modified_base 1: mod_base = OTHER; note = 2'-Omethylguanosine
  modified_base 10: mod_base = OTHER; note = 2'-Omethylguanosine
  modified_base 11: mod_base = OTHER; note = 2'-Omethyluridine
  modified_base 12: mod_base = OTHER; note = 2'-Omethylguanosine
  modified_base 13: mod_base = OTHER; note = 2'-Omethyluridine
  modified_base 14: mod_base = OTHER; note = 2'-Omethyladenosine
  modified_base 15: mod_base = OTHER; note = 2'-Omethyladenosine
  modified_base 16: mod_base = OTHER; note = 2'-Omethyluridine
  modified_base 17: mod_base = OTHER; note = 2'-Omethylguanosine
  modified_base 18: mod_base = OTHER; note = 2'-Omethylguanosine
  modified_base 19: mod_base = OTHER; note = Uridine phosphorothiorate
  modified_base 20: mod_base = OTHER; note = 2'-Omethyladenosine
  modified_base 21: mod_base = OTHER; note = Adenosine phosphorothiorate
  modified_base 25: mod_base = OTHER; note = 2'-Omethylcytosine
  modified_base 33: mod_base = OTHER; note = 2'-fluorouridine
  modified_base 34: mod_base = OTHER; note = 2'-Omethyluridine
  modified_base 35: mod_base = OTHER; note = Uridine phosphorothiorate
  modified_base 37: mod_base = OTHER; note = Adenosine phosphorothiorate
  modified_base 38: mod_base = OTHER; note = Adenosine phosphorothiorate
  modified_base 41: mod_base = OTHER; note = 2'-fluorocytosine
  modified_base 42: mod_base = OTHER; note = 2'-Omethyladenosine
  modified_base 43: mod_base = OTHER; note = 2'-Omethylguanosine
  modified_base 44: mod_base = OTHER; note = 2'-fluorocytosine
  modified_base 48: mod_base = OTHER; note = 2'-Omethylcytosine
  modified_base 49: mod_base = OTHER; note = 2'-Omethylcytosine
  modified_base 51: mod_base = OTHER; note = 2'-Omethyladenosine
  modified_base 53: mod_base = OTHER; note = Uridine phosphorothiorate
  modified_base 54: mod_base = OTHER; note = Uridine phosphorothiorate
  modified_base 60: mod_base = OTHER; note = 2'-Omethylcytosine
  modified_base 64: mod_base = OTHER; note = 2'-Omethylguanosine
  modified_base 72: mod_base = OTHER; note = 2'-Omethyluridine

SEQ ID NO: 6050 - RNA, 85 nt, synthetic construct; identical to SEQ ID NO: 3297
  source 1..85: mol_type = other RNA
  modified_base 58: mod_base = OTHER; note = 2'-Omethylguanosine
  modified_base 59: mod_base = OTHER; note = 2'-Omethylcytosine
  modified_base 60: mod_base = OTHER; note = 2'-Omethyladenosine
  modified_base 61: mod_base = OTHER; note = 2'-Omethylguanosine
  modified_base 62: mod_base = OTHER; note = 2'-Omethylguanosine
  modified_base 70: mod_base = OTHER; note = 2'-Omethylcytosine
  modified_base 71: mod_base = OTHER; note = 2'-Omethylcytosine
  modified_base 72: mod_base = OTHER; note = 2'-Omethyluridine
  modified_base 73: mod_base = OTHER; note = 2'-Omethylguanosine
  modified_base 74: mod_base = OTHER; note = 2'-Omethylcytosine

SEQ ID NO: 6051 - RNA, 74 nt, synthetic construct; identical to SEQ ID NO: 766
  source 1..74: mol_type = other RNA
  modified_base 1: mod_base = OTHER; note = 2'-Omethylguanosine phosphorothiorate
  modified_base 2: mod_base = OTHER; note = 2'-Omethylguanosine phosphorothiorate
  modified_base 66: mod_base = OTHER; note = Cytosine phosphorothiorate
  modified_base 67: mod_base = OTHER; note = 2'-fluoroguanosine
  modified_base 73: mod_base = OTHER; note = 2'-Omethylguanosine

SEQ ID NO: 6052 - RNA, 76 nt, synthetic construct; identical to SEQ ID NO: 625
  source 1..76: mol_type = other RNA
  modified_base 2: mod_base = OTHER; note = 2'-fluoroguanosine
  modified_base 4: mod_base = OTHER; note = 2'-fluorouridine
  modified_base 6: mod_base = OTHER; note = 2'-fluorocytosine phosphorothiorate
  modified_base 11: mod_base = OTHER; note = Cytosine phosphorothiorate
  modified_base 12: mod_base = OTHER; note = 2'-Omethylguanosine
  modified_base 13: mod_base = OTHER; note = Cytosine phosphorothiorate
  modified_base 14: mod_base = OTHER; note = 2'-Omethyladenosine
  modified_base 15: mod_base = OTHER; note = 2'-Omethyladenosine
  modified_base 18: mod_base = OTHER; note = 2'-fluoroguanosine phosphorothiorate
  modified_base 20: mod_base = OTHER; note = 2'-fluorouridine
  modified_base 21: mod_base = OTHER; note = Adenosine phosphorothiorate
  modified_base 22: mod_base = OTHER; note = 2'-fluoroguanosine
  modified_base 24: mod_base = OTHER; note = 2'-Omethylguanosine
  modified_base 25: mod_base = OTHER; note = 2'-fluorocytosine
  modified_base 29: mod_base = OTHER; note = 2'-Omethylguanosine phosphorothiorate
  modified_base 30: mod_base = OTHER; note = 2'-Omethylguanosine
  modified_base 33: mod_base = OTHER; note = Uridine phosphorothiorate
  modified_base 34: mod_base = OTHER; note = 2'-Omethyluridine
  modified_base 38: mod_base = OTHER; note = Adenosine phosphorothiorate
  modified_base 39: mod_base = OTHER; note = 2'-Omethyluridine
  modified_base 40: mod_base = OTHER; note = 2'-fluorouridine
  modified_base 41: mod_base = OTHER; note = 2'-Omethylcytosine
  modified_base 43: mod_base = OTHER; note = 2'-fluoroadenosine
  modified_base 46: mod_base = OTHER; note = 2'-Omethylguanosine
  modified_base 47: mod_base = OTHER; note = 2'-fluorouridine
  modified_base 49: mod_base = OTHER; note = 2'-fluorocytosine
  modified_base 52: mod_base = OTHER; note = 2'-fluoroguanosine
  modified_base 56: mod_base = OTHER; note = 2'-Omethylcytosine
  modified_base 60: mod_base = OTHER; note = 2'-fluorouridine
  modified_base 61: mod_base = OTHER; note = Cytosine phosphorothiorate
  modified_base 62: mod_base = OTHER; note = 2'-fluorocytosine
  modified_base 64: mod_base = OTHER; note = 2'-Omethylguanosine
  modified_base 65: mod_base = OTHER; note = Guanosine phosphorothiorate
  modified_base 66: mod_base = OTHER; note = 2'-Omethylcytosine
  modified_base 67: mod_base = OTHER; note = 2'-fluoroguanosine phosphorothiorate
  modified_base 68: mod_base = OTHER; note = 2'-Omethylguanosine
  modified_base 70: mod_base = OTHER; note = Guanosine phosphorothiorate
  modified_base 71: mod_base = OTHER; note = 2'-Omethyluridine
  modified_base 72: mod_base = OTHER; note = 2'-Omethylcytosine
  modified_base 74: mod_base = OTHER; note = 2'-fluorocytosine
  modified_base 75: mod_base = OTHER; note = 2'-fluorocytosine

SEQ ID NO: 6053 - DNA, 76 bp, synthetic construct; identical to SEQ ID NO: 1924
  source 1..76: mol_type = other DNA
  modified_base 1: mod_base = OTHER; note = 2'-Omethylguanosine phosphorothiorate
  modified_base 2: mod_base = OTHER; note = 2'-fluoroguanosine
  modified_base 4: mod_base = OTHER; note = deoxyuridine phosphorothiorate
  modified_base 11: mod_base = OTHER; note = Cytosine phosphorothiorate
  modified_base 12: mod_base = OTHER; note = 2'-Omethylguanosine phosphorothiorate
  modified_base 13: mod_base = OTHER; note = 2'-Omethylcytosine
  modified_base 19: mod_base = OTHER; note = 2'-fluoroadenosine
  modified_base 20: mod_base = OTHER; note = Uridine phosphorothiorate
  modified_base 22: mod_base = OTHER; note = 2'-fluoroguanosine
  modified_base 24: mod_base = OTHER; note = Guanosine phosphorothiorate
  modified_base 25: mod_base = OTHER; note = 2'-fluorocytosine phosphorothiorate
  modified_base 26: mod_base = OTHER; note = Adenosine phosphorothiorate
  modified_base 30: mod_base = OTHER; note = 2'-fluoroguanosine
  modified_base 33: mod_base = OTHER; note = deoxyuridine phosphorothiorate
  modified_base 34: mod_base = OTHER; note = 2'-fluorouridine
  modified_base 37: mod_base = OTHER; note = Adenosine phosphorothiorate
  modified_base 38: mod_base = OTHER; note = 2'-fluoroadenosine phosphorothiorate
  modified_base 39: mod_base = OTHER; note = 2'-O-(2-Methoxyethyl) thymine
  modified_base 40: mod_base = OTHER; note = deoxyuridine phosphorothiorate
  modified_base 41: mod_base = OTHER; note = Cytosine phosphorothiorate
  modified_base 42: mod_base = OTHER; note = deoxyadenosine phosphorothiorate
  modified_base 49: mod_base = OTHER; note = 2'-fluorocytosine phosphorothiorate
  modified_base 51: mod_base = OTHER; note = 2'-fluoroguanosine
  modified_base 53: mod_base = OTHER; note = Guanosine phosphorothiorate
  modified_base 55: mod_base = OTHER; note = Uridine phosphorothiorate
  modified_base 60: mod_base = OTHER; note = Uridine phosphorothiorate
  modified_base 61: mod_base = OTHER; note = 2'-O-(2-Methoxyethyl) 5-methylcytosine phosphorothiorate
  modified_base 62: mod_base = OTHER; note = 2'-O-(2-Methoxyethyl) 5-methylcytosine
  modified_base 64: mod_base = OTHER; note = deoxyguanosine phosphorothiorate
  modified_base 65: mod_base = OTHER; note = 2'-O-(2-Methoxyethyl) guanosine
  modified_base 70: mod_base = OTHER; note = Guanosine phosphorothiorate
  modified_base 71: mod_base = OTHER; note = 2'-Omethyluridine phosphorothiorate
  modified_base 73: mod_base = OTHER; note = Guanosine phosphorothiorate
  modified_base 75: mod_base = OTHER; note = 2'-fluorocytosine
  misc_feature 1..3: note = RNA
  misc_feature 4..5: note = DNA
  misc_feature 6..14: note = RNA
  misc_feature 15: note = DNA
  misc_feature 16..32: note = RNA
  misc_feature 33: note = DNA
  misc_feature 34..39: note = RNA
  misc_feature 40: note = DNA
  misc_feature 41: note = RNA
  misc_feature 42..43: note = DNA
  misc_feature 44..55: note = RNA
  misc_feature 56: note = DNA
  misc_feature 57..63: note = RNA
  misc_feature 64: note = DNA
  misc_feature 65..76: note = RNA

SEQ ID NO: 6054 - RNA, 85 nt, synthetic construct; identical to SEQ ID NO: 3286
  source 1..85: mol_type = other RNA
  modified_base 1: mod_base = OTHER; note = 2'-Omethylcytosine
  modified_base 11: mod_base = OTHER; note = Cytosine phosphorothiorate
  modified_base 27: mod_base = OTHER; note = Uridine phosphorothiorate
  modified_base 43: mod_base = OTHER; note = Uridine phosphorothiorate
  modified_base 49: mod_base = OTHER; note = 2'-Omethyluridine
  modified_base 51: mod_base = OTHER; note = 2'-Omethyluridine
  modified_base 58: mod_base = OTHER; note = 2'-fluoroguanosine
  modified_base 72: mod_base = OTHER; note = 2'-fluorocytosine

SEQ ID NO: 6055 - RNA, 85 nt, synthetic construct; identical to SEQ ID NO: 3286
  source 1..85: mol_type = other RNA
  modified_base 1: mod_base = OTHER; note = 2'-Omethylcytosine phosphorothiorate
  modified_base 2: mod_base = OTHER; note = 2'-fluorocytosine
  modified_base 3: mod_base = OTHER; note = 2'-fluoroadenosine
  modified_base 14: mod_base = OTHER; note = 2'-Omethylguanosine
  modified_base 25: mod_base = OTHER; note = Guanosine phosphorothiorate
  modified_base 26: mod_base = OTHER; note = 2'-fluorouridine
  modified_base 27: mod_base = OTHER; note = 2'-fluorouridine
  modified_base 30: mod_base = OTHER; note = 2'-fluoroadenosine
  modified_base 34: mod_base = OTHER; note = 2'-fluorouridine
  modified_base 39: mod_base = OTHER; note = Cytosine phosphorothiorate
  modified_base 40: mod_base = OTHER; note = Cytosine phosphorothiorate
  modified_base 43: mod_base = OTHER; note = Uridine phosphorothiorate
  modified_base 51: mod_base = OTHER; note = 2'-Omethyluridine
  modified_base 53: mod_base = OTHER; note = 2'-fluorouridine
  modified_base 54: mod_base = OTHER; note = 2'-Omethylcytosine
  modified_base 56: mod_base = OTHER; note = 2'-fluoroguanosine
  modified_base 57: mod_base = OTHER; note = 2'-Omethylcytosine
  modified_base 58: mod_base = OTHER; note = 2'-Omethylguanosine
  modified_base 69: mod_base = OTHER; note = Cytosine phosphorothiorate
  modified_base 74: mod_base = OTHER; note = 2'-fluorocytosine
  modified_base 75: mod_base = OTHER; note = 2'-fluorouridine
  modified_base 79: mod_base = OTHER; note = 2'-Omethylguanosine
  modified_base 84: mod_base = OTHER; note = 2'-fluorocytosine phosphorothiorate

SEQ ID NO: 6056 - RNA, 76 nt, synthetic construct; identical to SEQ ID NO: 3329
  source 1..76: mol_type = other RNA
  modified_base 1: mod_base = OTHER; note = 2'-Omethylguanosine phosphorothiorate
  modified_base 2: mod_base = OTHER; note = 2'-Omethylguanosine
  modified_base 3: mod_base = OTHER; note = 2'-Omethylcytosine
  modified_base 4: mod_base = OTHER; note = 2'-Omethylcytosine
  modified_base 5: mod_base = OTHER; note = 2'-Omethylcytosine
  modified_base 6: mod_base = OTHER; note = 2'-Omethylcytosine
  modified_base 44: mod_base = OTHER; note = 2'-Omethyladenosine
  modified_base 45: mod_base = OTHER; note = 2'-Omethylguanosine
  modified_base 46: mod_base = OTHER; note = 2'-fluoroguanosine
  modified_base 47: mod_base = OTHER; note = 2'-fluorouridine
  modified_base 48: mod_base = OTHER; note = 2'-Omethyluridine
  modified_base 49: mod_base = OTHER; note = 2'-Omethylcytosine
  modified_base 73: mod_base = OTHER; note = 2'-Omethylguanosine

SEQ ID NO: 6057 - RNA, 85 nt, synthetic construct; identical to SEQ ID NO: 3317
  source 1..85: mol_type = other RNA
  modified_base 1: mod_base = OTHER; note = 2'-Omethylguanosine
  modified_base 3: mod_base = OTHER; note = Uridine phosphorothiorate
  modified_base 13: mod_base = OTHER; note = 2'-fluoroguanosine
  modified_base 17: mod_base = OTHER; note = 2'-Omethylguanosine
  modified_base 45: mod_base = OTHER; note = 2'-fluoroguanosine phosphorothiorate
  modified_base 61: mod_base = OTHER; note = 2'-Omethylguanosine

SEQ ID NO: 6058 - RNA, 86 nt, synthetic construct; identical to SEQ ID NO: 3290
  source 1..86: mol_type = other RNA
  modified_base 77: mod_base = OTHER; note = 2'-Omethylcytosine

SEQ ID NO: 6059 - RNA, 74 nt, synthetic construct; identical to SEQ ID NO: 3293
  source 1..74: mol_type = other RNA
  modified_base 1: mod_base = OTHER; note = 2'-Omethyladenosine
  modified_base 2: mod_base = OTHER; note = Cytosine phosphorothiorate
  modified_base 3: mod_base = OTHER; note = Cytosine phosphorothiorate
  modified_base 4: mod_base = OTHER; note = Uridine phosphorothiorate
  modified_base 6: mod_base = OTHER; note = Guanosine phosphorothiorate
  modified_base 8: mod_base = OTHER; note = Guanosine phosphorothiorate
  modified_base 9: mod_base = OTHER; note = 2'-fluoroguanosine
  modified_base 15: mod_base = OTHER; note = 2'-Omethylcytosine
  modified_base 25: mod_base = OTHER; note = 2'-fluorouridine
  modified_base 27: mod_base = OTHER; note = 2'-Omethyluridine
  modified_base 43: mod_base = OTHER; note = 2'-fluoroguanosine
  modified_base 44: mod_base = OTHER; note = Guanosine phosphorothiorate
  modified_base 48: mod_base = OTHER; note = 2'-fluorocytosine
  modified_base 50: mod_base = OTHER; note = 2'-Omethyluridine phosphorothiorate
  modified_base 51: mod_base = OTHER; note = 2'-Omethylguanosine phosphorothiorate
  modified_base 62: mod_base = OTHER; note = Guanosine phosphorothiorate
  modified_base 73: mod_base = OTHER; note = 2'-Omethylcytosine phosphorothiorate
  modified_base 74: mod_base = OTHER; note = 2'-Omethyladenosine

SEQ ID NO: 6060 - RNA, 75 nt, synthetic construct; identical to SEQ ID NO: 1045
  source 1..75: mol_type = other RNA
  modified_base 1: mod_base = OTHER; note = 2'-Omethylguanosine phosphorothiorate
  modified_base 2: mod_base = OTHER; note = 2'-Omethylguanosine
  modified_base 12: mod_base = OTHER; note = 2'-Omethylguanosine
  modified_base 13: mod_base = OTHER; note = Uridine phosphorothiorate
  modified_base 16: mod_base = OTHER; note = 2'-fluorouridine
  modified_base 24: mod_base = OTHER; note = 2'-fluoroadenosine
  modified_base 39: mod_base = OTHER; note = 2'-fluorouridine
  modified_base 42: mod_base = OTHER; note = 2'-fluoroadenosine
  modified_base 55: mod_base = OTHER; note = 2'-fluorocytosine phosphorothiorate
  modified_base 59: mod_base = OTHER; note = 2'-fluorouridine
  modified_base 73: mod_base = OTHER; note = Cytosine phosphorothiorate
  modified_base 74: mod_base = OTHER; note = 2'-Omethylcytosine
  modified_base 75: mod_base = OTHER; note = 2'-fluoroadenosine

SEQ ID NO: 6061 - RNA, 76 nt, synthetic construct; identical to SEQ ID NO: 625
  source 1..76: mol_type = other RNA
  modified_base 10: mod_base = OTHER; note = 2'-fluoroguanosine
  modified_base 14: mod_base = OTHER; note = 2'-fluoroadenosine
  modified_base 15: mod_base = OTHER; note = Adenosine phosphorothiorate
  modified_base 16: mod_base = OTHER; note = 2'-Omethyluridine phosphorothiorate
  modified_base 17: mod_base = OTHER; note = 2'-Omethylguanosine
  modified_base 18: mod_base = OTHER; note = Guanosine phosphorothiorate
  modified_base 22: mod_base = OTHER; note = 2'-fluoroguanosine phosphorothiorate
  modified_base 23: mod_base = OTHER; note = 2'-fluorocytosine phosphorothiorate
  modified_base 24: mod_base = OTHER; note = 2'-fluoroguanosine phosphorothiorate
  modified_base 27: mod_base = OTHER; note = 2'-Omethyluridine
  modified_base 28: mod_base = OTHER; note = 2'-Omethyluridine
  modified_base 29: mod_base = OTHER; note = 2'-Omethylguanosine
  modified_base 34: mod_base = OTHER; note = 2'-Omethyluridine
  modified_base 36: mod_base = OTHER; note = Adenosine phosphorothiorate
  modified_base 38: mod_base = OTHER; note = Adenosine phosphorothiorate
  modified_base 39: mod_base = OTHER; note = 2'-fluorouridine
  modified_base 42: mod_base = OTHER; note = 2'-Omethyladenosine
  modified_base 45: mod_base = OTHER; note = 2'-fluoroguanosine
  modified_base 49: mod_base = OTHER; note = 2'-Omethylcytosine
  modified_base 51: mod_base = OTHER; note = 2'-Omethylguanosine
  modified_base 52: mod_base = OTHER; note = 2'-fluoroguanosine
  modified_base 56: mod_base = OTHER; note = Cytosine phosphorothiorate
  modified_base 57: mod_base = OTHER; note = 2'-fluoroguanosine
  modified_base 58: mod_base = OTHER; note = Adenosine phosphorothiorate
  modified_base 60: mod_base = OTHER; note = 2'-Omethyluridine
  modified_base 61: mod_base = OTHER; note = 2'-fluorocytosine
  modified_base 62: mod_base = OTHER; note = 2'-fluorocytosine
  modified_base 63: mod_base = OTHER; note = 2'-fluorocytosine
  modified_base 67: mod_base = OTHER; note = 2'-fluoroguanosine
  modified_base 68: mod_base = OTHER; note = 2'-fluoroguanosine
  modified_base 69: mod_base = OTHER; note = 2'-fluoroadenosine
  modified_base 72: mod_base = OTHER; note = 2'-fluorocytosine
  modified_base 75: mod_base = OTHER; note = 2'-fluorocytosine phosphorothiorate
  modified_base 76: mod_base = OTHER; note = 2'-Omethyladenosine

SEQ ID NO: 6062 - RNA, 76 nt, synthetic construct; identical to SEQ ID NO: 625
  source 1..76: mol_type = other RNA
  modified_base 2: mod_base = OTHER; note = 2'-Omethylguanosine
  modified_base 5: mod_base = OTHER; note = 2'-Omethylcytosine
  modified_base 6: mod_base = OTHER; note = Cytosine phosphorothiorate
  modified_base 9: mod_base = OTHER; note = Guanosine phosphorothiorate
  modified_base 10: mod_base = OTHER; note = 2'-Omethylguanosine
  modified_base 12: mod_base = OTHER; note = 2'-fluoroguanosine phosphorothiorate
  modified_base 13: mod_base = OTHER; note = 2'-Omethylcytosine
  modified_base 14: mod_base = OTHER; note = Adenosine phosphorothiorate
  modified_base 15: mod_base = OTHER; note = 2'-fluoroadenosine
  modified_base 17: mod_base = OTHER; note = Guanosine phosphorothiorate
  modified_base 18: mod_base = OTHER; note = 2'-fluoroguanosine phosphorothiorate
  modified_base 22: mod_base = OTHER; note = 2'-Omethylguanosine
  modified_base 24: mod_base = OTHER; note = 2'-fluoroguanosine
  modified_base 31: mod_base = OTHER; note = 2'-Omethyladenosine
  modified_base 32: mod_base = OTHER; note = 2'-fluorocytosine
  modified_base 33: mod_base = OTHER; note = 2'-fluorouridine
  modified_base 34: mod_base = OTHER; note = 2'-fluorouridine
  modified_base 38: mod_base = OTHER; note = Adenosine phosphorothiorate
  modified_base 39: mod_base = OTHER; note = 2'-fluorouridine
  modified_base 41: mod_base = OTHER; note = 2'-Omethylcytosine
  modified_base 42: mod_base = OTHER; note = Adenosine phosphorothiorate
  modified_base 43: mod_base = OTHER; note = 2'-fluoroadenosine phosphorothiorate
  modified_base 45: mod_base = OTHER; note = Guanosine phosphorothiorate
  modified_base 47: mod_base = OTHER; note = 2'-Omethyluridine
  modified_base 50: mod_base = OTHER; note = 2'-fluorocytosine
  modified_base 53: mod_base = OTHER; note = 2'-Omethylguanosine phosphorothiorate
  modified_base 54: mod_base = OTHER; note = 2'-fluorouridine
  modified_base 57: mod_base = OTHER; note = 2'-Omethylguanosine
  modified_base 59: mod_base = OTHER; note = 2'-fluoroguanosine
  modified_base 63: mod_base = OTHER; note = 2'-Omethylcytosine
  modified_base 65: mod_base = OTHER; note = 2'-fluoroguanosine
  modified_base 68: mod_base = OTHER; note = Guanosine phosphorothiorate
  modified_base 69: mod_base = OTHER; note = 2'-fluoroadenosine
  modified_base 71: mod_base = OTHER; note = 2'-fluorouridine
  modified_base 72: mod_base = OTHER; note = 2'-Omethylcytosine phosphorothiorate
  modified_base 73: mod_base = OTHER; note = 2'-fluoroguanosine
  modified_base 74: mod_base = OTHER; note = 2'-fluorocytosine

SEQ ID NO: 6063 - RNA, 85 nt, synthetic construct; identical to SEQ ID NO: 3301
  source 1..85: mol_type = other RNA
  modified_base 1: mod_base = OTHER; note = 2'-Omethylguanosine phosphorothiorate
  modified_base 2: mod_base = OTHER; note = Cytosine phosphorothiorate
  modified_base 3: mod_base = OTHER; note = 2'-Omethyluridine phosphorothiorate
  modified_base 9: mod_base = OTHER; note = 2'-fluoroguanosine phosphorothiorate
  modified_base 14: mod_base = OTHER; note = 2'-fluoroadenosine
  modified_base 25: mod_base = OTHER; note = Cytosine phosphorothiorate
  modified_base 26: mod_base = OTHER; note = Guanosine phosphorothiorate
  modified_base 27: mod_base = OTHER; note = 2'-fluorouridine
  modified_base 29: mod_base = OTHER; note = Guanosine phosphorothiorate
  modified_base 33: mod_base = OTHER; note = 2'-fluorouridine
  modified_base 35: mod_base = OTHER; note = 2'-fluorouridine
  modified_base 46: mod_base = OTHER; note = 2'-fluoroguanosine
  modified_base 47: mod_base = OTHER; note = 2'-fluoroguanosine phosphorothiorate
  modified_base 51: mod_base = OTHER; note = 2'-fluorouridine
  modified_base 59: mod_base = OTHER; note = 2'-Omethylcytosine
  modified_base 61: mod_base = OTHER; note = 2'-Omethylguanosine
  modified_base 71: mod_base = OTHER; note = 2'-fluorocytosine
  modified_base 72: mod_base = OTHER; note = 2'-fluorouridine
  modified_base 79: mod_base = OTHER; note = Adenosine phosphorothiorate
  modified_base 83: mod_base = OTHER; note = Cytosine phosphorothiorate

SEQ ID NO: 6064 - RNA, 85 nt, synthetic construct; identical to SEQ ID NO: 3288
  source 1..85: mol_type = other RNA
  modified_base 1: mod_base = OTHER; note = 2'-Omethylcytosine
  modified_base 15: mod_base = OTHER; note = 2'-Omethyluridine
  modified_base 27: mod_base = OTHER; note = 2'-Omethyluridine
  modified_base 30: mod_base = OTHER; note = 2'-fluoroadenosine
  modified_base 32: mod_base = OTHER; note = 2'-fluorouridine
  modified_base 34: mod_base = OTHER; note = 2'-fluorocytosine
  modified_base 38: mod_base = OTHER; note = 2'-Omethyluridine
  modified_base 39: mod_base = OTHER; note = Cytosine phosphorothiorate
  modified_base 45: mod_base = OTHER; note = 2'-Omethylguanosine
  modified_base 46: mod_base = OTHER; note = Adenosine phosphorothiorate
  modified_base 52: mod_base = OTHER; note = Guanosine phosphorothiorate
  modified_base 54: mod_base = OTHER; note = 2'-fluorocytosine phosphorothiorate
  modified_base 56: mod_base = OTHER; note = 2'-fluoroguanosine
  modified_base 57: mod_base = OTHER; note = 2'-Omethylcytosine
  modified_base 73: mod_base = OTHER; note = 2'-fluoroadenosine phosphorothiorate
  modified_base 84: mod_base = OTHER; note = Cytosine phosphorothiorate

SEQ ID NO: 6065 - RNA, 86 nt, synthetic construct; identical to SEQ ID NO: 3290
  source 1..86: mol_type = other RNA
  modified_base 1: mod_base = OTHER; note = 2'-Omethyladenosine phosphorothiorate
  modified_base 2: mod_base = OTHER; note = 2'-Omethylcytosine
  modified_base 3: mod_base = OTHER; note = 2'-Omethylcytosine
  modified_base 4: mod_base = OTHER; note = 2'-Omethyladenosine
  modified_base 5: mod_base = OTHER; note = 2'-Omethylguanosine
  modified_base 6: mod_base = OTHER; note = 2'-Omethylguanosine
  modified_base 64: mod_base = OTHER; note = 2'-Omethyluridine phosphorothiorate
  modified_base 65: mod_base = OTHER; note = Uridine phosphorothiorate
  modified_base 66: mod_base = OTHER; note = 2'-Omethylcytosine
  modified_base 67: mod_base = OTHER; note = 2'-fluoroguanosine
  modified_base 68: mod_base = OTHER; note = Adenosine phosphorothiorate
  modified_base 69: mod_base = OTHER; note = 2'-Omethyladenosine
  modified_base 70: mod_base = OTHER; note = 2'-fluorocytosine
  modified_base 83: mod_base = OTHER; note = 2'-Omethyladenosine

SEQ ID NO: 6066 - RNA, 76 nt, synthetic construct; identical to SEQ ID NO: 625
  source 1..76: mol_type = other RNA
  modified_base 1: mod_base = OTHER; note = 2'-Omethylguanosine
  modified_base 3: mod_base = OTHER; note = 2'-fluorocytosine
  modified_base 9: mod_base = OTHER; note = Guanosine phosphorothiorate
  modified_base 10: mod_base = OTHER; note = Guanosine phosphorothiorate
  modified_base 11: mod_base = OTHER; note = 2'-Omethylcytosine
  modified_base 13: mod_base = OTHER; note = 2'-Omethylcytosine
  modified_base 15: mod_base = OTHER; note = Adenosine phosphorothiorate
  modified_base 16: mod_base = OTHER; note = 2'-fluorouridine
  modified_base 18: mod_base = OTHER; note = 2'-Omethylguanosine
  modified_base 20: mod_base = OTHER; note = 2'-fluorouridine phosphorothiorate
  modified_base 22: mod_base = OTHER; note = 2'-Omethylguanosine
  modified_base 24: mod_base = OTHER; note = Guanosine phosphorothiorate
  modified_base 25: mod_base = OTHER; note = 2'-Omethylcytosine
  modified_base 26: mod_base = OTHER; note = 2'-fluoroadenosine
  modified_base 29: mod_base = OTHER; note = 2'-Omethylguanosine
  modified_base 30: mod_base = OTHER; note = 2'-Omethylguanosine
  modified_base 31: mod_base = OTHER; note = 2'-Omethyladenosine
  modified_base 40: mod_base = OTHER; note = 2'-fluorouridine
  modified_base 41: mod_base = OTHER; note = Cytosine phosphorothiorate
  modified_base 42: mod_base = OTHER; note = 2'-Omethyladenosine
  modified_base 44: mod_base = OTHER; note = 2'-fluoroadenosine phosphorothiorate
  modified_base 45: mod_base = OTHER; note = Guanosine phosphorothiorate
  modified_base 47: mod_base = OTHER; note = 2'-Omethyluridine phosphorothiorate
  modified_base 48: mod_base = OTHER; note = 2'-Omethyluridine
  modified_base 53: mod_base = OTHER; note = 2'-fluoroguanosine
  modified_base 55: mod_base = OTHER; note = Uridine phosphorothiorate
  modified_base 56: mod_base = OTHER; note = 2'-fluorocytosine
  modified_base 58: mod_base = OTHER; note = 2'-fluoroadenosine
  modified_base 61: mod_base = OTHER; note = Cytosine phosphorothiorate
  modified_base 62: mod_base = OTHER; note = 2'-Omethylcytosine
  modified_base 64: mod_base = OTHER; note = 2'-fluoroguanosine
  modified_base 65: mod_base = OTHER; note = 2'-Omethylguanosine
  modified_base 66: mod_base = OTHER; note = 2'-fluorocytosine
  modified_base 67: mod_base = OTHER; note = Guanosine phosphorothiorate
  modified_base 70: mod_base = OTHER; note = Guanosine phosphorothiorate
  modified_base 72: mod_base = OTHER; note = 2'-Omethylcytosine
  modified_base 75: mod_base = OTHER; note = 2'-fluorocytosine phosphorothiorate

SEQ ID NO: 6067 - RNA, 74 nt, synthetic construct; identical to SEQ ID NO: 3293
  source 1..74: mol_type = other RNA
  modified_base 1: mod_base = OTHER; note = 2'-Omethyladenosine
  modified_base 2: mod_base = OTHER; note = Cytosine phosphorothiorate
  modified_base 3: mod_base = OTHER; note = Cytosine phosphorothiorate
  modified_base 4: mod_base = OTHER; note = Uridine phosphorothiorate
  modified_base 5: mod_base = OTHER; note = Cytosine phosphorothiorate
  modified_base 6: mod_base = OTHER; note = Guanosine phosphorothiorate
  modified_base 7: mod_base = OTHER; note = Uridine phosphorothiorate
  modified_base 8: mod_base = OTHER; note = 2'-Omethylguanosine phosphorothiorate
  modified_base 9: mod_base = OTHER; note = 2'-Omethylguanosine phosphorothiorate
  modified_base 11: mod_base = OTHER; note = 2'-fluoroguanosine
  modified_base 24: mod_base = OTHER; note = 2'-fluoroguanosine
  modified_base 27: mod_base = OTHER; note = 2'-Omethyluridine
  modified_base 35: mod_base = OTHER; note = 2'-Omethylguanosine
  modified_base 43: mod_base = OTHER; note = 2'-fluoroguanosine
  modified_base 46: mod_base = OTHER; note = Uridine phosphorothiorate
  modified_base 47: mod_base = OTHER; note = 2'-fluoroguanosine
  modified_base 48: mod_base = OTHER; note = Cytosine phosphorothiorate
  modified_base 50: mod_base = OTHER; note = Uridine phosphorothiorate
  modified_base 51: mod_base = OTHER; note = 2'-fluoroguanosine
  modified_base 62: mod_base = OTHER; note = Guanosine phosphorothiorate
  modified_base 73: mod_base = OTHER; note = Cytosine phosphorothiorate
  modified_base 74: mod_base = OTHER; note = 2'-Omethyladenosine

SEQ ID NO: 6068 - RNA, 76 nt, synthetic construct; identical to SEQ ID NO: 3289
  source 1..76: mol_type = other RNA
  modified_base 1: mod_base = OTHER; note = 2'-Omethylguanosine
  modified_base 9: mod_base = OTHER; note = 2'-fluoroadenosine
  modified_base 10: mod_base = OTHER; note = 2'-Omethylguanosine
  modified_base 13: mod_base = OTHER; note = 2'-Omethylcytosine
  modified_base 18: mod_base = OTHER; note = Guanosine phosphorothiorate
  modified_base 19: mod_base = OTHER; note = 2'-Omethylguanosine
  modified_base 20: mod_base = OTHER; note = Uridine phosphorothiorate
  modified_base 25: mod_base = OTHER; note = 2'-Omethylcytosine
  modified_base 29: mod_base = OTHER; note = 2'-Omethyladenosine
  modified_base 33: mod_base = OTHER; note = 2'-fluorouridine
  modified_base 35: mod_base = OTHER; note = Uridine phosphorothiorate
  modified_base 37: mod_base = OTHER; note = Adenosine phosphorothiorate
  modified_base 38: mod_base = OTHER; note = Adenosine phosphorothiorate
  modified_base 41: mod_base = OTHER; note = 2'-fluorouridine
  modified_base 43: mod_base = OTHER; note = 2'-Omethyladenosine
  modified_base 44: mod_base = OTHER; note = 2'-fluoroguanosine
  modified_base 46: mod_base = OTHER; note = Guanosine phosphorothiorate
  modified_base 50: mod_base = OTHER; note = 2'-Omethyladenosine
  modified_base 52: mod_base = OTHER; note = 2'-Omethylguanosine
  modified_base 54: mod_base = OTHER; note = Uridine phosphorothiorate
  modified_base 55: mod_base = OTHER; note = Uridine phosphorothiorate
  modified_base 56: mod_base = OTHER; note = 2'-Omethylcytosine
  modified_base 57: mod_base = OTHER; note = Adenosine phosphorothiorate
  modified_base 62: mod_base = OTHER; note = 2'-Omethylcytosine
  modified_base 63: mod_base = OTHER; note = 2'-fluorocytosine
  modified_base 65: mod_base = OTHER; note = 2'-Omethylguanosine
  modified_base 71: mod_base = OTHER; note = 2'-Omethylguanosine
  modified_base 73: mod_base = OTHER; note = 2'-Omethylguanosine

SEQ ID NO: 6069 - RNA, 86 nt, synthetic construct; identical to SEQ ID NO: 3290
  source 1..86: mol_type = other RNA
  modified_base 1: mod_base = OTHER; note = 2'-Omethyladenosine phosphorothiorate
  modified_base 2: mod_base = OTHER; note = 2'-Omethylcytosine phosphorothiorate
  modified_base 3: mod_base = OTHER; note = 2'-Omethylcytosine
  modified_base 4: mod_base = OTHER; note = 2'-Omethyladenosine
  modified_base 5: mod_base = OTHER; note = 2'-Omethylguanosine
  modified_base 6: mod_base = OTHER; note = 2'-Omethylguanosine
  modified_base 16: mod_base = OTHER; note = 2'-Omethyluridine
  modified_base 17: mod_base = OTHER; note = 2'-Omethylguanosine
  modified_base 18: mod_base = OTHER; note = 2'-Omethylguanosine
  modified_base 33: mod_base = OTHER; note = 2'-fluorouridine
  modified_base 35: mod_base = OTHER; note = Cytosine phosphorothiorate
  modified_base 37: mod_base = OTHER; note = Guanosine phosphorothiorate
  modified_base 38: mod_base = OTHER; note = Adenosine phosphorothiorate
  modified_base 44: mod_base = OTHER; note = 2'-Omethyluridine
  modified_base 57: mod_base = OTHER; note = 2'-fluoroguanosine
  modified_base 58: mod_base = OTHER; note = 2'-fluorocytosine
  modified_base 59: mod_base = OTHER; note = 2'-Omethylguanosine
  modified_base 60: mod_base = OTHER; note = 2'-Omethyluridine
  modified_base 61: mod_base = OTHER; note = 2'-Omethylguanosine
  modified_base 62: mod_base = OTHER; note = 2'-Omethylguanosine
  modified_base 63: mod_base = OTHER; note = 2'-Omethylguanosine
  modified_base 64: mod_base = OTHER; note = 2'-Omethyluridine
  modified_base 66: mod_base = OTHER; note = 2'-Omethylcytosine
  modified_base 69: mod_base = OTHER; note = 2'-Omethyladenosine
  modified_base 71: mod_base = OTHER; note = 2'-Omethylcytosine
  modified_base 72: mod_base = OTHER; note = 2'-Omethylcytosine
  modified_base 73: mod_base = OTHER; note = 2'-fluorocytosine
  modified_base 74: mod_base = OTHER; note = 2'-Omethyladenosine
  modified_base 75: mod_base = OTHER; note = 2'-Omethylcytosine
  modified_base 76: mod_base = OTHER; note = 2'-Omethyluridine
  modified_base 77: mod_base = OTHER; note = 2'-Omethylcytosine
  modified_base 78: mod_base = OTHER; note = 2'-Omethylcytosine
  modified_base 83: mod_base = OTHER; note = 2'-Omethyladenosine

SEQ ID NO: 6070 - RNA, 76 nt, synthetic construct; identical to SEQ ID NO: 625
  source 1..76: mol_type = other RNA
  modified_base 1: mod_base = OTHER; note = Guanosine phosphorothiorate
  modified_base 2: mod_base = OTHER; note = 2'-fluoroguanosine
  modified_base 3: mod_base = OTHER; note = 2'-fluorocytosine
  modified_base 6: mod_base = OTHER; note = Cytosine phosphorothiorate
  modified_base 11: mod_base = OTHER; note = 2'-fluorocytosine
  modified_base 14: mod_base = OTHER; note = 2'-fluoroadenosine
  modified_base 15: mod_base = OTHER; note = 2'-fluoroadenosine
  modified_base 16: mod_base = OTHER; note = 2'-Omethyluridine
  modified_base 17: mod_base = OTHER; note = 2'-Omethylguanosine
  modified_base 18: mod_base = OTHER; note = 2'-fluoroguanosine
  modified_base 21: mod_base = OTHER; note = Adenosine phosphorothiorate
  modified_base 25: mod_base = OTHER; note = 2'-Omethylcytosine
  modified_base 26: mod_base = OTHER; note = 2'-Omethyladenosine phosphorothiorate
  modified_base 28: mod_base = OTHER; note = Uridine phosphorothiorate
  modified_base 31: mod_base = OTHER; note = 2'-Omethyladenosine
  modified_base 34: mod_base = OTHER; note = Uridine phosphorothiorate
  modified_base 38: mod_base = OTHER; note = 2'-Omethyladenosine
  modified_base 39: mod_base = OTHER; note = 2'-Omethyluridine
  modified_base 42: mod_base = OTHER; note = 2'-Omethyladenosine
  modified_base 43: mod_base = OTHER; note = 2'-fluoroadenosine
  modified_base 44: mod_base = OTHER; note = 2'-fluoroadenosine phosphorothiorate
  modified_base 45: mod_base = OTHER; note = 2'-fluoroguanosine
  modified_base 47: mod_base = OTHER; note = 2'-fluorouridine
  modified_base 50: mod_base = OTHER; note = 2'-fluorocytosine
  modified_base 53: mod_base = OTHER; note = 2'-Omethylguanosine
  modified_base 54: mod_base = OTHER; note = 2'-Omethyluridine
  modified_base 56: mod_base = OTHER; note = Cytosine phosphorothiorate
  modified_base 57: mod_base = OTHER; note = Guanosine phosphorothiorate
  modified_base 58: mod_base = OTHER; note = 2'-fluoroadenosine
  modified_base 59: mod_base = OTHER; note = 2'-Omethylguanosine
  modified_base 60: mod_base = OTHER; note = 2'-fluorouridine
  modified_base 61: mod_base = OTHER; note = 2'-fluorocytosine
  modified_base 64: mod_base = OTHER; note = 2'-Omethylguanosine phosphorothiorate
  modified_base 65: mod_base = OTHER; note = 2'-fluoroguanosine
  modified_base 66: mod_base = OTHER; note = 2'-fluorocytosine
  modified_base 68: mod_base = OTHER; note = 2'-fluoroguanosine
  modified_base 70: mod_base = OTHER; note = 2'-Omethylguanosine
  modified_base 73: mod_base = OTHER; note = 2'-Omethylguanosine
  modified_base 75: mod_base = OTHER; note = 2'-fluorocytosine

SEQ ID NO: 6071 - RNA, 85 nt, synthetic construct; identical to SEQ ID NO: 3288
  source 1..85: mol_type = other RNA
  modified_base 1: mod_base = OTHER; note = 2'-Omethylcytosine phosphorothiorate
  modified_base 4: mod_base = OTHER; note = 2'-fluoroguanosine phosphorothiorate
  modified_base 13: mod_base = OTHER; note = Adenosine phosphorothiorate
  modified_base 17: mod_base = OTHER; note = Guanosine phosphorothiorate
  modified_base 28: mod_base = OTHER; note = 2'-fluoroguanosine
  modified_base 30: mod_base = OTHER; note = 2'-fluoroadenosine
  modified_base 33: mod_base = OTHER; note = 2'-fluorouridine
  modified_base 35: mod_base = OTHER; note = 2'-fluoroadenosine phosphorothiorate
  modified_base 43: mod_base = OTHER; note = 2'-Omethyluridine
  modified_base 46: mod_base = OTHER; note = Adenosine phosphorothiorate
  modified_base 47: mod_base = OTHER; note = Cytosine phosphorothiorate
  modified_base 50: mod_base = OTHER; note = 2'-Omethyladenosine
  modified_base 54: mod_base = OTHER; note = Cytosine phosphorothiorate
  modified_base 69: mod_base = OTHER; note = Cytosine phosphorothiorate
  modified_base 81: mod_base = OTHER; note = 2'-fluorouridine
  modified_base 84: mod_base = OTHER; note = 2'-Omethylcytosine

SEQ ID NO: 6072 - RNA, 85 nt, synthetic construct; identical to SEQ ID NO: 3297
  source 1..85: mol_type = other RNA
  modified_base 1: mod_base = OTHER; note = 2'-Omethylguanosine
  modified_base 44: mod_base = OTHER; note = 2'-Omethyluridine
  modified_base 82: mod_base = OTHER; note = 2'-Omethylguanosine

SEQ ID NO: 6073 - RNA, 76 nt, synthetic construct
  source 1..76: mol_type = other RNA
ggctccgtggcgcaatggatagcgcaatgggcttcaaactcataggttccgggttcgagtcccggcggagtcgcca

SEQ ID NO: 6074 - RNA, 76 nt, synthetic construct; identical to SEQ ID NO: 3318
  source 1..76: mol_type = other RNA
  modified_base 1: mod_base = OTHER; note = 2'-Omethylcytosine
  modified_base 2: mod_base = OTHER; note = 2'-Omethylcytosine
  modified_base 3: mod_base = OTHER; note = 2'-Omethyluridine
  modified_base 4: mod_base = OTHER; note = 2'-Omethyluridine
  modified_base 5: mod_base = OTHER; note = 2'-Omethylcytosine
  modified_base 6: mod_base = OTHER; note = 2'-Omethylguanosine
  modified_base 10: mod_base = OTHER; note = 2'-Omethylguanosine
  modified_base 11: mod_base = OTHER; note = 2'-Omethylcytosine
  modified_base 12: mod_base = OTHER; note = 2'-Omethyluridine
  modified_base 13: mod_base = OTHER; note = 2'-Omethylcytosine
  modified_base 14: mod_base = OTHER; note = 2'-Omethyladenosine
  modified_base 15: mod_base = OTHER; note = 2'-fluoroguanosine
  modified_base 16: mod_base = OTHER; note = 2'-Omethyluridine
  modified_base 18: mod_base = OTHER; note = 2'-Omethylguanosine
  modified_base 19: mod_base = OTHER; note = 2'-Omethylguanosine
  modified_base 20: mod_base = OTHER; note = 2'-fluorouridine
  modified_base 25: mod_base = OTHER; note = 2'-Omethylcytosine
  modified_base 33: mod_base = OTHER; note = 2'-fluorouridine
  modified_base 35: mod_base = OTHER; note = Uridine phosphorothiorate
  modified_base 37: mod_base = OTHER; note = Guanosine phosphorothiorate
  modified_base 38: mod_base = OTHER; note = Adenosine phosphorothiorate
  modified_base 41: mod_base = OTHER; note = 2'-Omethylcytosine
  modified_base 42: mod_base = OTHER; note = 2'-Omethyluridine
  modified_base 43: mod_base = OTHER; note = 2'-Omethyluridine
  modified_base 44: mod_base = OTHER; note = 2'-Omethyladenosine
  modified_base 49: mod_base = OTHER; note = 2'-Omethylguanosine
  modified_base 50: mod_base = OTHER; note = 2'-Omethylcytosine
  modified_base 52: mod_base = OTHER; note = 2'-Omethylguanosine
  modified_base 54: mod_base = OTHER; note = 2'-Omethyluridine
  modified_base 55: mod_base = OTHER; note = Uridine phosphorothiorate
  modified_base 56: mod_base = OTHER; note = 2'-Omethylcytosine
  modified_base 57: mod_base = OTHER; note = 2'-fluoroguanosine
  modified_base 59: mod_base = OTHER; note = 2'-Omethyladenosine
  modified_base 61: mod_base = OTHER; note = 2'-Omethylcytosine
  modified_base 65: mod_base = OTHER; note = 2'-Omethylcytosine
  modified_base 73: mod_base = OTHER; note = 2'-Omethyladenosine

SEQ ID NO: 6075 - RNA, 75 nt, synthetic construct; identical to SEQ ID NO: 3336
  source 1..75: mol_type = other RNA
  modified_base 1: mod_base = OTHER; note = 2'-Omethylcytosine
  modified_base 4: mod_base = OTHER; note = Guanosine phosphorothiorate
  modified_base 9: mod_base = OTHER; note = Guanosine phosphorothiorate
  modified_base 13: mod_base = OTHER; note = Adenosine phosphorothiorate
  modified_base 15: mod_base = OTHER; note = Uridine phosphorothiorate
  modified_base 19: mod_base = OTHER; note = 2'-fluorouridine
  modified_base 21: mod_base = OTHER; note = 2'-fluoroguanosine
  modified_base 23: mod_base = OTHER; note = 2'-fluoroguanosine
  modified_base 25: mod_base = OTHER; note = 2'-fluoroadenosine
  modified_base 28: mod_base = OTHER; note = 2'-fluoroadenosine
  modified_base 38: mod_base = OTHER; note = Uridine phosphorothiorate
  modified_base 41: mod_base = OTHER; note = 2'-fluoroguanosine
  modified_base 46: mod_base = OTHER; note = 2'-fluorouridine
  modified_base 47: mod_base = OTHER; note = 2'-fluorocytosine
  modified_base 49: mod_base = OTHER; note = 2'-Omethyladenosine phosphorothiorate
  modified_base 52: mod_base = OTHER; note = 2'-fluoroguanosine phosphorothiorate
  modified_base 55: mod_base = OTHER; note = 2'-fluorocytosine
  modified_base 61: mod_base = OTHER; note = 2'-fluorocytosine
  modified_base 62: mod_base = OTHER; note = Cytosine phosphorothiorate
  modified_base 73: mod_base = OTHER; note = Cytosine phosphorothiorate
  modified_base 74: mod_base = OTHER; note = 2'-Omethylcytosine

SEQ ID NO: 6076 - RNA, 75 nt, synthetic construct; identical to SEQ ID NO: 3311
  source 1..75: mol_type = other RNA
  modified_base 1: mod_base = OTHER; note = 2'-Omethylguanosine phosphorothiorate
  modified_base 2: mod_base = OTHER; note = 2'-Omethylguanosine
  modified_base 6: mod_base = OTHER; note = 2'-fluorocytosine
  modified_base 12: mod_base = OTHER; note = 2'-fluoroguanosine
  modified_base 14: mod_base = OTHER; note = Adenosine phosphorothiorate
  modified_base 16: mod_base = OTHER; note = 2'-fluorouridine phosphorothiorate
  modified_base 18: mod_base = OTHER; note = 2'-fluoroguanosine
  modified_base 21: mod_base = OTHER; note = 2'-fluoroadenosine
  modified_base 26: mod_base = OTHER; note = 2'-Omethyluridine phosphorothiorate
  modified_base 36: mod_base = OTHER; note = 2'-fluoroadenosine
  modified_base 41: mod_base = OTHER; note = 2'-fluorocytosine
  modified_base 42: mod_base = OTHER; note = 2'-fluoroadenosine
  modified_base 43: mod_base = OTHER; note = Guanosine phosphorothiorate
  modified_base 57: mod_base = OTHER; note = 2'-Omethyladenosine
  modified_base 61: mod_base = OTHER; note = Uridine phosphorothiorate
  modified_base 62: mod_base = OTHER; note = Cytosine phosphorothiorate
  modified_base 67: mod_base = OTHER; note = Guanosine phosphorothiorate
  modified_base 68: mod_base = OTHER; note = Adenosine phosphorothiorate
  modified_base 69: mod_base = OTHER; note = 2'-fluoroadenosine
  modified_base 73: mod_base = OTHER; note = Cytosine phosphorothiorate
  modified_base 74: mod_base = OTHER; note = 2'-fluorocytosine phosphorothiorate

SEQ ID NO: 6077 - RNA, 75 nt, synthetic construct; identical to SEQ ID NO: 3306
  source 1..75: mol_type = other RNA
  modified_base 16: mod_base = OTHER; note = 2'-Omethylcytosine
  modified_base 72: mod_base = OTHER; note = 2'-Omethyladenosine

SEQ ID NO: 6078 - RNA, 75 nt, synthetic construct; identical to SEQ ID NO: 3306
  source 1..75: mol_type = other RNA
  modified_base 1: mod_base = OTHER; note = 2'-Omethylguanosine
  modified_base 9: mod_base = OTHER; note = Guanosine phosphorothiorate
  modified_base 10: mod_base = OTHER; note = 2'-Omethylguanosine
  modified_base 13: mod_base = OTHER; note = 2'-Omethylcytosine
  modified_base 17: mod_base = OTHER; note = Guanosine phosphorothiorate
  modified_base 18: mod_base = OTHER; note = 2'-Omethylguanosine
  modified_base 19: mod_base = OTHER; note = Uridine phosphorothiorate
  modified_base 24: mod_base = OTHER; note = 2'-Omethylcytosine
  modified_base 28: mod_base = OTHER; note = 2'-Omethyluridine
  modified_base 32: mod_base = OTHER; note = 2'-fluorouridine
  modified_base 34: mod_base = OTHER; note = Uridine phosphorothiorate
  modified_base 36: mod_base = OTHER; note = Guanosine phosphorothiorate
  modified_base 37: mod_base = OTHER; note = Adenosine phosphorothiorate
  modified_base 40: mod_base = OTHER; note = 2'-fluoroadenosine
  modified_base 42: mod_base = OTHER; note = 2'-Omethyladenosine
  modified_base 43: mod_base = OTHER; note = 2'-fluoroadenosine
  modified_base 45: mod_base = OTHER; note = Guanosine phosphorothiorate
  modified_base 49: mod_base = OTHER; note = 2'-Omethylcytosine
  modified_base 51: mod_base = OTHER; note = 2'-Omethyluridine
  modified_base 53: mod_base = OTHER; note = Uridine phosphorothiorate
  modified_base 54: mod_base = OTHER; note = Uridine phosphorothiorate
  modified_base 55: mod_base = OTHER; note = 2'-Omethylcytosine
  modified_base 56: mod_base = OTHER; note = Adenosine phosphorothiorate
  modified_base 61: mod_base = OTHER; note = 2'-Omethyladenosine
  modified_base 62: mod_base = OTHER; note = 2'-fluorocytosine
  modified_base 64: mod_base = OTHER; note = 2'-Omethyluridine
  modified_base 70: mod_base = OTHER; note = 2'-Omethyluridine
  modified_base 72: mod_base = OTHER; note = 2'-Omethyladenosine

SEQ ID NO: 6079 - RNA, 76 nt, synthetic construct; identical to SEQ ID NO: 625
  source 1..76: mol_type = other RNA
  modified_base 1: mod_base = OTHER; note = 2'-Omethylguanosine phosphorothiorate
  modified_base 2: mod_base = OTHER; note = 2'-Omethylguanosine phosphorothiorate
  modified_base 24: mod_base = OTHER; note = Guanosine phosphorothiorate
  modified_base 25: mod_base = OTHER; note = 2'-O-(2-Methoxyethyl) 5-methylcytosine
  modified_base 63: mod_base = OTHER; note = Cytosine phosphorothiorate
  modified_base 64: mod_base = OTHER; note = 2'-Omethylguanosine
  modified_base 74: mod_base = OTHER; note = Cytosine phosphorothiorate
  modified_base 75: mod_base = OTHER; note = 2'-Omethylcytosine phosphorothiorate
  modified_base 76: mod_base = OTHER; note = 2'-Omethyladenosine

SEQ ID NO: 6080 - RNA, 76 nt, synthetic construct; identical to SEQ ID NO: 625
  source 1..76: mol_type = other RNA
  modified_base 2: mod_base = OTHER; note = 2'-fluoroguanosine
  modified_base 3: mod_base = OTHER; note = 2'-fluorocytosine
  modified_base 5: mod_base = OTHER; note = 2'-Omethylcytosine
  modified_base 6: mod_base = OTHER; note = 2'-Omethylcytosine
  modified_base 11: mod_base = OTHER; note = 2'-Omethylcytosine
  modified_base 15: mod_base = OTHER; note = 2'-Omethyladenosine
  modified_base 16: mod_base = OTHER; note = 2'-Omethyluridine phosphorothiorate
  modified_base 17: mod_base = OTHER; note = 2'-Omethylguanosine
  modified_base 18: mod_base = OTHER; note = Guanosine phosphorothiorate
  modified_base 19: mod_base = OTHER; note = Adenosine phosphorothiorate
  modified_base 20: mod_base = OTHER; note = 2'-fluorouridine
  modified_base 25: mod_base = OTHER; note = 2'-Omethylcytosine
  modified_base 26: mod_base = OTHER; note = 2'-Omethyladenosine
  modified_base 27: mod_base = OTHER; note = Uridine phosphorothiorate
  modified_base 28: mod_base = OTHER; note = 2'-Omethyluridine
  modified_base 34: mod_base = OTHER; note = Uridine phosphorothiorate
  modified_base 39: mod_base = OTHER; note = 2'-fluorouridine
  modified_base 42: mod_base = OTHER; note = 2'-fluoroadenosine
  modified_base 49: mod_base = OTHER; note = 2'-Omethylcytosine
  modified_base 50: mod_base = OTHER; note = 2'-fluorocytosine
  modified_base 51: mod_base = OTHER; note = 2'-Omethylguanosine phosphorothiorate
  modified_base 53: mod_base = OTHER; note = 2'-Omethylguanosine
  modified_base 55: mod_base = OTHER; note = Uridine phosphorothiorate
  modified_base 56: mod_base = OTHER; note = 2'-fluorocytosine
  modified_base 57: mod_base = OTHER; note = 2'-Omethylguanosine
  modified_base 58: mod_base = OTHER; note = 2'-fluoroadenosine
  modified_base 60: mod_base = OTHER; note = 2'-Omethyluridine
  modified_base 63: mod_base = OTHER; note = 2'-Omethylcytosine
  modified_base 65: mod_base = OTHER; note = 2'-Omethylguanosine
  modified_base 67: mod_base = OTHER; note = 2'-Omethylguanosine phosphorothiorate
  modified_base 68: mod_base = OTHER; note = 2'-Omethylguanosine
  modified_base 70: mod_base = OTHER; note = 2'-fluoroguanosine
  modified_base 71: mod_base = OTHER; note = 2'-fluorouridine
  modified_base 74: mod_base = OTHER; note = 2'-fluorocytosine
  modified_base 76: mod_base = OTHER; note = 2'-Omethyladenosine

SEQ ID NO: 6081 - RNA, 76 nt, synthetic construct; identical to SEQ ID NO: 3295
  source 1..76: mol_type = other RNA
  modified_base 1: mod_base = OTHER; note = 2'-fluorocytosine phosphorothiorate
  modified_base 2: mod_base = OTHER; note = Cytosine phosphorothiorate
  modified_base 4: mod_base = OTHER; note = 2'-Omethyluridine
  modified_base 9: mod_base = OTHER; note = Adenosine phosphorothiorate
  modified_base 11: mod_base = OTHER; note = 2'-Omethylcytosine phosphorothiorate
  modified_base 14: mod_base = OTHER; note = 2'-fluoroadenosine phosphorothiorate
  modified_base 20: mod_base = OTHER; note = 2'-fluorouridine phosphorothiorate
  modified_base 28: mod_base = OTHER; note = 2'-fluoroadenosine phosphorothiorate
  modified_base 30: mod_base = OTHER; note = 2'-fluoroguanosine
  modified_base 39: mod_base = OTHER; note = 2'-Omethyluridine phosphorothiorate
  modified_base 43: mod_base = OTHER; note = 2'-Omethyluridine
  modified_base 49: mod_base = OTHER; note = 2'-Omethylguanosine
  modified_base 52: mod_base = OTHER; note = Guanosine phosphorothiorate
  modified_base 53: mod_base = OTHER; note = 2'-fluoroguanosine
  modified_base 56: mod_base = OTHER; note = Cytosine phosphorothiorate

SEQ ID NO: 6082 - RNA, 86 nt, synthetic construct; identical to SEQ ID NO: 3290
  source 1..86: mol_type = other RNA
  modified_base 56: mod_base = OTHER; note = Cytosine phosphorothiorate

SEQ ID NO: 6083 - RNA, 76 nt, synthetic construct; identical to SEQ ID NO: 625
  source 1..76: mol_type = other RNA
  modified_base 1: mod_base = OTHER; note = 2'-Omethylguanosine phosphorothiorate
  modified_base 2: mod_base = OTHER; note = 2'-Omethylguanosine
  modified_base 3: mod_base = OTHER; note = 2'-Omethylcytosine
  modified_base 4: mod_base = OTHER; note = 2'-Omethyluridine
  modified_base 5: mod_base = OTHER; note = 2'-Omethylcytosine
  modified_base 6: mod_base = OTHER; note = 2'-Omethylcytosine
  modified_base 10: mod_base = OTHER; note = 2'-Omethylguanosine
  modified_base 11: mod_base = OTHER; note = 2'-Omethylcytosine
  modified_base 12: mod_base = OTHER; note = 2'-Omethylguanosine
  modified_base 13: mod_base = OTHER; note = 2'-Omethylcytosine
  modified_base 14: mod_base = OTHER; note = 2'-Omethyladenosine
  modified_base 15: mod_base = OTHER; note = 2'-fluoroadenosine
  modified_base 16: mod_base = OTHER; note = 2'-Omethyluridine
  modified_base 17: mod_base = OTHER; note = 2'-Omethylguanosine
  modified_base 18: mod_base = OTHER; note = 2'-Omethylguanosine
  modified_base 19: mod_base = OTHER; note = 2'-fluoroadenosine
  modified_base 20: mod_base = OTHER; note = 2'-Omethyluridine
  modified_base 40: mod_base = OTHER; note = 2'-fluorouridine
  modified_base 41: mod_base = OTHER; note = 2'-fluorocytosine
  modified_base 42: mod_base = OTHER; note = 2'-fluoroadenosine
  modified_base 43: mod_base = OTHER; note = 2'-fluoroadenosine
  modified_base 49: mod_base = OTHER; note = 2'-Omethylcytosine
  modified_base 50: mod_base = OTHER; note = 2'-Omethylcytosine
  modified_base 51: mod_base = OTHER; note = 2'-Omethylguanosine
  modified_base 52: mod_base = OTHER; note = 2'-Omethylguanosine
  modified_base 53: mod_base = OTHER; note = 2'-Omethylguanosine
  modified_base 54: mod_base = OTHER; note = 2'-Omethyluridine
  modified_base 56: mod_base = OTHER; note = 2'-Omethylcytosine
  modified_base 57: mod_base = OTHER; note = 2'-fluoroguanosine
  modified_base 59: mod_base = OTHER; note = 2'-Omethylguanosine
  modified_base 73: mod_base = OTHER; note = 2'-Omethylguanosine

SEQ ID NO: 6084 - DNA, 76 bp, synthetic construct; identical to SEQ ID NO: 1924
  source 1..76: mol_type = other DNA
  misc_feature 1..60: note = RNA
  misc_feature 61..65: note = DNA
  misc_feature 66..76: note = RNA

SEQ ID NO: 6085 - RNA, 76 nt, synthetic construct; identical to SEQ ID NO: 625
  source 1..76: mol_type = other RNA
  modified_base 1: mod_base = OTHER; note = 2'-fluoroguanosine
  modified_base 5: mod_base = OTHER; note = Cytosine phosphorothiorate
  modified_base 6: mod_base = OTHER; note = 2'-Omethylcytosine
  modified_base 12: mod_base = OTHER; note = Guanosine phosphorothiorate
  modified_base 13: mod_base = OTHER; note = 2'-fluorocytosine phosphorothiorate
  modified_base 15: mod_base = OTHER; note = 2'-Omethyladenosine phosphorothiorate
  modified_base 16: mod_base = OTHER; note = 2'-Omethyluridine
  modified_base 18: mod_base = OTHER; note = 2'-Omethylguanosine
  modified_base 22: mod_base = OTHER; note = 2'-fluoroguanosine
  modified_base 25: mod_base = OTHER; note = Cytosine phosphorothiorate
  modified_base 28: mod_base = OTHER; note = Uridine phosphorothiorate
  modified_base 29: mod_base = OTHER; note = 2'-fluoroguanosine
  modified_base 31: mod_base = OTHER; note = 2'-fluoroadenosine
  modified_base 33: mod_base = OTHER; note = Uridine phosphorothiorate
  modified_base 34: mod_base = OTHER; note = 2'-fluorouridine
  modified_base 39: mod_base = OTHER; note = 2'-fluorouridine
  modified_base 41: mod_base = OTHER; note = 2'-Omethylcytosine
  modified_base 42: mod_base = OTHER; note = Adenosine phosphorothiorate
  modified_base 43: mod_base = OTHER; note = 2'-fluoroadenosine
  modified_base 50: mod_base = OTHER; note = 2'-fluorocytosine
  modified_base 51: mod_base = OTHER; note = Guanosine phosphorothiorate
  modified_base 52: mod_base = OTHER; note = 2'-Omethylguanosine
  modified_base 54: mod_base = OTHER; note = 2'-fluorouridine
  modified_base 56: mod_base = OTHER; note = Cytosine phosphorothiorate
  modified_base 57: mod_base = OTHER; note = 2'-fluoroguanosine
  modified_base 60: mod_base = OTHER; note = 2'-Omethyluridine
  modified_base 61: mod_base = OTHER; note = 2'-fluorocytosine phosphorothiorate
  modified_base 62: mod_base = OTHER; note = 2'-Omethylcytosine
  modified_base 66: mod_base = OTHER; note = Cytosine phosphorothiorate
  modified_base 68: mod_base = OTHER; note = 2'-Omethylguanosine phosphorothiorate
  modified_base 69: mod_base = OTHER; note = 2'-Omethyladenosine
  modified_base 70: mod_base = OTHER; note = 2'-Omethylguanosine phosphorothiorate
  modified_base 71: mod_base = OTHER; note = 2'-Omethyluridine phosphorothiorate
  modified_base 72: mod_base = OTHER; note = 2'-Omethylcytosine
  modified_base 74: mod_base = OTHER; note = 2'-fluorocytosine
  modified_base 75: mod_base = OTHER; note = 2'-fluorocytosine
  modified_base 76: mod_base = OTHER; note = 2'-fluoroadenosine

SEQ ID NO: 6086 - RNA, 76 nt, synthetic construct; identical to SEQ ID NO: 625
  source 1..76: mol_type = other RNA
  modified_base 3: mod_base = OTHER; note = 2'-fluorocytosine
  modified_base 4: mod_base = OTHER; note = Uridine phosphorothiorate
  modified_base 5: mod_base = OTHER; note = 2'-Omethylcytosine
  modified_base 17: mod_base = OTHER; note = 2'-Omethylguanosine
  modified_base 18: mod_base = OTHER; note = 2'-Omethylguanosine
  modified_base 20: mod_base = OTHER; note = 2'-Omethyluridine
  modified_base 22: mod_base = OTHER; note = Guanosine phosphorothiorate
  modified_base 23: mod_base = OTHER; note = Cytosine phosphorothiorate
  modified_base 24: mod_base = OTHER; note = 2'-Omethylguanosine
  modified_base 25: mod_base = OTHER; note = Cytosine phosphorothiorate
  modified_base 26: mod_base = OTHER; note = 2'-fluoroadenosine
  modified_base 27: mod_base = OTHER; note = 2'-fluorouridine
  modified_base 34: mod_base = OTHER; note = Uridine phosphorothiorate
  modified_base 39: mod_base = OTHER; note = 2'-Omethyluridine
  modified_base 40: mod_base = OTHER; note = 2'-Omethyluridine phosphorothiorate
  modified_base 44: mod_base = OTHER; note = 2'-fluoroadenosine
  modified_base 46: mod_base = OTHER; note = 2'-Omethylguanosine
  modified_base 47: mod_base = OTHER; note = 2'-Omethyluridine
  modified_base 48: mod_base = OTHER; note = 2'-Omethyluridine
  modified_base 49: mod_base = OTHER; note = 2'-Omethylcytosine
  modified_base 50: mod_base = OTHER; note = Cytosine phosphorothiorate
  modified_base 51: mod_base = OTHER; note = 2'-Omethylguanosine phosphorothiorate
  modified_base 54: mod_base = OTHER; note = 2'-fluorouridine phosphorothiorate
  modified_base 55: mod_base = OTHER; note = Uridine phosphorothiorate
  modified_base 56: mod_base = OTHER; note = 2'-fluorocytosine
  modified_base 57: mod_base = OTHER; note = 2'-Omethylguanosine
  modified_base 59: mod_base = OTHER; note = 2'-Omethylguanosine
  modified_base 61: mod_base = OTHER; note = Cytosine phosphorothiorate
  modified_base 63: mod_base = OTHER; note = 2'-Omethylcytosine
  modified_base 65: mod_base = OTHER; note = 2'-Omethylguanosine
  modified_base 67: mod_base = OTHER; note = 2'-Omethylguanosine phosphorothiorate
  modified_base 68: mod_base = OTHER; note = 2'-fluoroguanosine
  modified_base 70: mod_base = OTHER; note = 2'-Omethylguanosine
  modified_base 71: mod_base = OTHER; note = Uridine phosphorothiorate
  modified_base 72: mod_base = OTHER; note = 2'-Omethylcytosine
  modified_base 74: mod_base = OTHER; note = 2'-Omethylcytosine
  modified_base 76: mod_base = OTHER; note = 2'-fluoroadenosine

SEQ ID NO: 6087 - RNA, 76 nt, synthetic construct; identical to SEQ ID NO: 3419
  source 1..76: mol_type = other RNA
  modified_base 1: mod_base = OTHER; note = 2'-Omethylguanosine
  modified_base 2: mod_base = OTHER; note = 2'-Omethylguanosine
  modified_base 3: mod_base = OTHER; note = 2'-Omethylcytosine
  modified_base 4: mod_base = OTHER; note = 2'-Omethyluridine
  modified_base 5: mod_base = OTHER; note = 2'-Omethylcytosine
  modified_base 6: mod_base = OTHER; note = 2'-Omethylcytosine
  modified_base 16: mod_base = OTHER; note = 2'-Omethyluridine
  modified_base 17: mod_base = OTHER; note = 2'-Omethylguanosine
  modified_base 18: mod_base = OTHER; note = 2'-Omethylguanosine
  modified_base 20: mod_base = OTHER; note = 2'-Omethyluridine
  modified_base 22: mod_base = OTHER; note = 2'-Omethylguanosine
  modified_base 23: mod_base = OTHER; note = 2'-Omethylcytosine
  modified_base 24: mod_base = OTHER; note = 2'-Omethylguanosine
  modified_base 25: mod_base = OTHER; note = 2'-Omethylcytosine
  modified_base 33: mod_base = OTHER; note = 2'-fluorouridine
  modified_base 35: mod_base = OTHER; note = Cytosine phosphorothiorate
  modified_base 37: mod_base = OTHER; note = Adenosine phosphorothiorate
  modified_base 38: mod_base = OTHER; note = Adenosine phosphorothiorate
  modified_base 41: mod_base = OTHER; note = 2'-Omethylguanosine
  modified_base 42: mod_base = OTHER; note = 2'-Omethylguanosine
  modified_base 43: mod_base = OTHER; note = 2'-Omethyluridine
  modified_base 44: mod_base = OTHER; note = 2'-Omethyladenosine
  modified_base 45: mod_base = OTHER; note = 2'-Omethylguanosine
  modified_base 46: mod_base = OTHER; note = 2'-fluoroguanosine
  modified_base 48: mod_base = OTHER; note = 2'-fluorouridine
  modified_base 49: mod_base = OTHER; note = 2'-Omethylcytosine
  modified_base 50: mod_base = OTHER; note = 2'-Omethylcytosine
  modified_base 52: mod_base = OTHER; note = 2'-Omethylguanosine
  modified_base 54: mod_base = OTHER; note = 2'-Omethyluridine
  modified_base 55: mod_base = OTHER; note = Uridine phosphorothiorate
  modified_base 56: mod_base = OTHER; note = 2'-Omethylcytosine
  modified_base 57: mod_base = OTHER; note = 2'-fluoroguanosine
  modified_base 59: mod_base = OTHER; note = 2'-Omethylguanosine
  modified_base 61: mod_base = OTHER; note = 2'-Omethylcytosine
  modified_base 65: mod_base = OTHER; note = 2'-Omethylguanosine
  modified_base 73: mod_base = OTHER; note = 2'-Omethylguanosine

SEQ ID NO: 6088 - RNA, 76 nt, synthetic construct; identical to SEQ ID NO: 625
  source 1..76: mol_type = other RNA
  modified_base 75: mod_base = OTHER; note = 2'-O-(2-Methoxyethyl) 5-methylcytosine

SEQ ID NO: 6089 - RNA, 85 nt, synthetic construct; identical to SEQ ID NO: 3317
  source 1..85: mol_type = other RNA
  modified_base 1: mod_base = OTHER; note = 2'-Omethylguanosine phosphorothiorate
  modified_base 2: mod_base = OTHER; note = 2'-Omethylcytosine phosphorothiorate
  modified_base 5: mod_base = OTHER; note = Uridine phosphorothiorate
  modified_base 11: mod_base = OTHER; note = 2'-fluorocytosine
  modified_base 12: mod_base = OTHER; note = 2'-fluorocytosine
  modified_base 18: mod_base = OTHER; note = 2'-Omethylguanosine phosphorothiorate
  modified_base 25: mod_base = OTHER; note = Cytosine phosphorothiorate
  modified_base 37: mod_base = OTHER; note = 2'-fluoroadenosine
  modified_base 46: mod_base = OTHER; note = 2'-Omethylguanosine
  modified_base 48: mod_base = OTHER; note = 2'-Omethylguanosine phosphorothiorate
  modified_base 51: mod_base = OTHER; note = 2'-Omethyluridine
  modified_base 55: mod_base = OTHER; note = 2'-fluorocytosine phosphorothiorate
  modified_base 56: mod_base = OTHER; note = 2'-fluoroguanosine
  modified_base 60: mod_base = OTHER; note = 2'-Omethyladenosine
  modified_base 70: mod_base = OTHER; note = 2'-fluorocytosine phosphorothiorate
  modified_base 74: mod_base = OTHER; note = 2'-fluorocytosine
  modified_base 77: mod_base = OTHER; note = 2'-fluoroadenosine
  modified_base 82: mod_base = OTHER; note = 2'-Omethylguanosine
  modified_base 84: mod_base = OTHER; note = 2'-fluorocytosine phosphorothiorate

SEQ ID NO: 6090 - RNA, 76 nt, synthetic construct; identical to SEQ ID NO: 3316
  source 1..76: mol_type = other RNA
  modified_base 1: mod_base = OTHER; note = 2'-Omethyladenosine phosphorothiorate
  modified_base 2: mod_base = OTHER; note = 2'-Omethylcytosine phosphorothiorate
  modified_base 3: mod_base = OTHER; note = 2'-Omethylcytosine
  modified_base 4: mod_base = OTHER; note = 2'-Omethyladenosine
  modified_base 5: mod_base = OTHER; note = 2'-Omethyladenosine
  modified_base 6: mod_base = OTHER; note = 2'-Omethylcytosine
  modified_base 16: mod_base = OTHER; note = 2'-Omethyluridine
  modified_base 17: mod_base = OTHER; note = 2'-Omethylguanosine
  modified_base 18: mod_base = OTHER; note = 2'-Omethylguanosine
  modified_base 20: mod_base = OTHER; note = 2'-Omethyluridine
  modified_base 25: mod_base = OTHER; note = 2'-Omethylcytosine
  modified_base 33: mod_base = OTHER; note = 2'-fluorouridine
  modified_base 35: mod_base = OTHER; note = Cytosine phosphorothiorate
  modified_base 37: mod_base = OTHER; note = Adenosine phosphorothiorate
  modified_base 38: mod_base = OTHER; note = Adenosine phosphorothiorate
  modified_base 41: mod_base = OTHER; note = 2'-Omethylcytosine
  modified_base 44: mod_base = OTHER; note = 2'-Omethyladenosine
  modified_base 45: mod_base = OTHER; note = 2'-Omethylguanosine
  modified_base 46: mod_base = OTHER; note = 2'-fluoroguanosine
  modified_base 47: mod_base = OTHER; note = 2'-fluorouridine
  modified_base 48: mod_base = OTHER; note = 2'-fluorouridine
  modified_base 56: mod_base = OTHER; note = 2'-Omethylcytosine
  modified_base 59: mod_base = OTHER; note = 2'-Omethylguanosine
  modified_base 73: mod_base = OTHER; note = 2'-Omethylguanosine

SEQ ID NO: 6091 - RNA, 86 nt, synthetic construct; identical to SEQ ID NO: 3290
  source 1..86: mol_type = other RNA
  modified_base 3: mod_base = OTHER; note = Cytosine phosphorothiorate

SEQ ID NO: 6092 - RNA, 76 nt, synthetic construct; identical to SEQ ID NO: 625
  source 1..76: mol_type = other RNA
  modified_base 55: mod_base = OTHER; note = Thymine

SEQ ID NO: 6093 - RNA, 86 nt, synthetic construct; identical to SEQ ID NO: 3290
  source 1..86: mol_type = other RNA
  modified_base 1: mod_base = OTHER; note = 2'-Omethyladenosine phosphorothiorate
  modified_base 2: mod_base = OTHER; note = 2'-Omethylcytosine phosphorothiorate
  modified_base 3: mod_base = OTHER; note = 2'-Omethylcytosine
  modified_base 4: mod_base = OTHER; note = 2'-Omethyladenosine
  modified_base 5: mod_base = OTHER; note = 2'-Omethylguanosine
  modified_base 6: mod_base = OTHER; note = 2'-Omethylguanosine
  modified_base 16: mod_base = OTHER; note = 2'-Omethyluridine
  modified_base 17: mod_base = OTHER; note = 2'-Omethylguanosine
  modified_base 18: mod_base = OTHER; note = 2'-Omethylguanosine
  modified_base 20: mod_base = OTHER; note = 2'-Omethyluridine
  modified_base 25: mod_base = OTHER; note = 2'-Omethylcytosine
  modified_base 33: mod_base = OTHER; note = 2'-fluorouridine
  modified_base 35: mod_base = OTHER; note = Cytosine phosphorothiorate
  modified_base 37: mod_base = OTHER; note = Guanosine phosphorothiorate
  modified_base 38: mod_base = OTHER; note = Adenosine phosphorothiorate
  modified_base 41: mod_base = OTHER; note = 2'-Omethylcytosine
  modified_base 44: mod_base = OTHER; note = 2'-Omethyluridine
  modified_base 57: mod_base = OTHER; note = 2'-fluoroguanosine
  modified_base 58: mod_base = OTHER; note = 2'-fluorocytosine
  modified_base 66: mod_base = OTHER; note = 2'-Omethylcytosine
  modified_base 69: mod_base = OTHER; note = 2'-Omethyladenosine
  modified_base 71: mod_base = OTHER; note = 2'-Omethylcytosine
  modified_base 72: mod_base = OTHER; note = 2'-Omethylcytosine
  modified_base 73: mod_base = OTHER; note = 2'-fluorocytosine
  modified_base 74: mod_base = OTHER; note = 2'-Omethyladenosine
  modified_base 75: mod_base = OTHER; note = 2'-Omethylcytosine
  modified_base 76: mod_base = OTHER; note = 2'-Omethyluridine
  modified_base 77: mod_base = OTHER; note = 2'-Omethylcytosine
  modified_base 78: mod_base = OTHER; note = 2'-Omethylcytosine
  modified_base 83: mod_base = OTHER; note = 2'-Omethyladenosine

SEQ ID NO: 6094 - RNA, 75 nt, synthetic construct; identical to SEQ ID NO: 3306
  source 1..75: mol_type = other RNA
  modified_base 1: mod_base = OTHER; note = 2'-Omethylguanosine phosphorothiorate
  modified_base 2: mod_base = OTHER; note = 2'-Omethyladenosine phosphorothiorate
  modified_base 3: mod_base = OTHER; note = 2'-Omethylcytosine
  modified_base 4: mod_base = OTHER; note = 2'-Omethylcytosine
  modified_base 5: mod_base = OTHER; note = 2'-Omethyluridine
  modified_base 6: mod_base = OTHER; note = 2'-Omethylcytosine
  modified_base 10: mod_base = OTHER; note = 2'-Omethylguanosine
  modified_base 11: mod_base = OTHER; note = 2'-Omethylcytosine
  modified_base 12: mod_base = OTHER; note = 2'-Omethylguanosine
  modified_base 13: mod_base = OTHER; note = 2'-Omethylcytosine
  modified_base 14: mod_base = OTHER; note = 2'-Omethyladenosine
  modified_base 15: mod_base = OTHER; note = 2'-fluoroadenosine
  modified_base 16: mod_base = OTHER; note = 2'-Omethylcytosine
  modified_base 17: mod_base = OTHER; note = 2'-Omethylguanosine
  modified_base 18: mod_base = OTHER; note = 2'-Omethylguanosine
  modified_base 19: mod_base = OTHER; note = 2'-fluorouridine
  modified_base 21: mod_base = OTHER; note = 2'-Omethylguanosine
  modified_base 22: mod_base = OTHER; note = 2'-Omethylcytosine
  modified_base 23: mod_base = OTHER; note = 2'-Omethylguanosine
  modified_base 24: mod_base = OTHER; note = 2'-Omethylcytosine
  modified_base 32: mod_base = OTHER; note = 2'-fluorouridine
  modified_base 34: mod_base = OTHER; note = Uridine phosphorothiorate
  modified_base 36: mod_base = OTHER; note = Guanosine phosphorothiorate
  modified_base 37: mod_base = OTHER; note = Adenosine phosphorothiorate
  modified_base 43: mod_base = OTHER; note = 2'-Omethyladenosine
  modified_base 44: mod_base = OTHER; note = 2'-Omethylguanosine
  modified_base 45: mod_base = OTHER; note = 2'-fluoroguanosine
  modified_base 46: mod_base = OTHER; note = 2'-fluorouridine
  modified_base 47: mod_base = OTHER; note = 2'-fluorouridine
  modified_base 55: mod_base = OTHER; note = 2'-Omethylcytosine
  modified_base 58: mod_base = OTHER; note = 2'-Omethyladenosine
  modified_base 60: mod_base = OTHER; note = 2'-Omethylcytosine
  modified_base 61: mod_base = OTHER; note = 2'-Omethyladenosine
  modified_base 62: mod_base = OTHER; note = 2'-fluorocytosine
  modified_base 63: mod_base = OTHER; note = 2'-Omethylguanosine
  modified_base 64: mod_base = OTHER; note = 2'-Omethyluridine
  modified_base 65: mod_base = OTHER; note = 2'-Omethylcytosine
  modified_base 66: mod_base = OTHER; note = 2'-Omethylguanosine
  modified_base 67: mod_base = OTHER; note = 2'-Omethylguanosine
  modified_base 72: mod_base = OTHER; note = 2'-Omethyladenosine

SEQ ID NO: 6095 - RNA, 85 nt, synthetic construct; identical to SEQ ID NO: 3288
  source 1..85: mol_type = other RNA
  modified_base 1: mod_base = OTHER; note = 2'-Omethylcytosine
  modified_base 3: mod_base = OTHER; note = 2'-fluoroadenosine
  modified_base 6: mod_base = OTHER; note = Adenosine phosphorothiorate
  modified_base 13: mod_base = OTHER; note = Adenosine phosphorothiorate
  modified_base 20: mod_base = OTHER; note = 2'-fluoroadenosine phosphorothiorate
  modified_base 26: mod_base = OTHER; note = Uridine phosphorothiorate
  modified_base 34: mod_base = OTHER; note = 2'-fluorocytosine
  modified_base 48: mod_base = OTHER; note = Adenosine phosphorothiorate
  modified_base 52: mod_base = OTHER; note = 2'-fluoroguanosine
  modified_base 57: mod_base = OTHER; note = 2'-fluorocytosine
  modified_base 58: mod_base = OTHER; note = 2'-Omethylguanosine
  modified_base 62: mod_base = OTHER; note = 2'-fluoroguanosine phosphorothiorate
  modified_base 68: mod_base = OTHER; note = Adenosine phosphorothiorate
  modified_base 70: mod_base = OTHER; note = 2'-fluorocytosine phosphorothiorate
  modified_base 84: mod_base = OTHER; note = 2'-fluorocytosine phosphorothiorate

SEQ ID NO: 6096 - RNA, 76 nt, synthetic construct; identical to SEQ ID NO: 625
  source 1..76: mol_type = other RNA
  modified_base 1: mod_base = OTHER; note = 2'-Omethylguanosine phosphorothiorate
  modified_base 2: mod_base = OTHER; note = 2'-Omethylguanosine
  modified_base 3: mod_base = OTHER; note = Cytosine phosphorothiorate
  modified_base 4: mod_base = OTHER; note = 2'-Omethyluridine
  modified_base 6: mod_base = OTHER; note = 2'-Omethylcytosine
  modified_base 7: mod_base = OTHER; note = Guanosine phosphorothiorate
  modified_base 10: mod_base = OTHER; note = 2'-Omethylguanosine
  modified_base 11: mod_base = OTHER; note = 2'-fluorocytosine
  modified_base 12: mod_base = OTHER; note = 2'-Omethylguanosine
  modified_base 13: mod_base = OTHER; note = Cytosine phosphorothiorate
  modified_base 14: mod_base = OTHER; note = 2'-Omethyladenosine
  modified_base 15: mod_base = OTHER; note = 2'-fluoroadenosine
  modified_base 17: mod_base = OTHER; note = 2'-Omethylguanosine
  modified_base 18: mod_base = OTHER; note = 2'-Omethylguanosine
  modified_base 20: mod_base = OTHER; note = 2'-Omethyluridine phosphorothiorate
  modified_base 23: mod_base = OTHER; note = 2'-fluorocytosine
  modified_base 25: mod_base = OTHER; note = 2'-Omethylcytosine
  modified_base 26: mod_base = OTHER; note = Adenosine phosphorothiorate
  modified_base 27: mod_base = OTHER; note = 2'-fluorouridine
  modified_base 38: mod_base = OTHER; note = 2'-fluoroadenosine
  modified_base 40: mod_base = OTHER; note = 2'-Omethyluridine
  modified_base 42: mod_base = OTHER; note = Adenosine phosphorothiorate
  modified_base 45: mod_base = OTHER; note = 2'-Omethylguanosine
  modified_base 46: mod_base = OTHER; note = 2'-Omethylguanosine
  modified_base 53: mod_base = OTHER; note = Guanosine phosphorothiorate
  modified_base 54: mod_base = OTHER; note = 2'-Omethyluridine
  modified_base 55: mod_base = OTHER; note = Uridine phosphorothiorate
  modified_base 58: mod_base = OTHER; note = 2'-fluoroadenosine
  modified_base 61: mod_base = OTHER; note = 2'-fluorocytosine
  modified_base 62: mod_base = OTHER; note = Cytosine phosphorothiorate
  modified_base 69: mod_base = OTHER; note = 2'-Omethyladenosine
  modified_base 72: mod_base = OTHER; note = 2'-fluorocytosine phosphorothiorate
  modified_base 73: mod_base = OTHER; note = Guanosine phosphorothiorate
  modified_base 75: mod_base = OTHER; note = 2'-fluorocytosine

SEQ ID NO: 6097 - RNA, 86 nt, synthetic construct; identical to SEQ ID NO: 3290
  source 1..86: mol_type = other RNA
  modified_base 1: mod_base = OTHER; note = 2'-Omethyladenosine
  modified_base 16: mod_base = OTHER; note = 2'-Omethyluridine
  modified_base 17: mod_base = OTHER; note = 2'-Omethylguanosine
  modified_base 18: mod_base = OTHER; note = 2'-Omethylguanosine
  modified_base 83: mod_base = OTHER; note = 2'-Omethyladenosine

SEQ ID NO: 6098 - RNA, 76 nt, synthetic construct; identical to SEQ ID NO: 625
  source 1..76: mol_type = other RNA
  modified_base 1: mod_base = OTHER; note = Guanosine phosphorothiorate
  modified_base 2: mod_base = OTHER; note = Guanosine phosphorothiorate
  modified_base 3: mod_base = OTHER; note = 2'-fluorocytosine
  modified_base 4: mod_base = OTHER; note = 2'-Omethyluridine
  modified_base 5: mod_base = OTHER; note = 2'-Omethylcytosine
  modified_base 6: mod_base = OTHER; note = 2'-fluorocytosine
  modified_base 9: mod_base = OTHER; note = Guanosine phosphorothiorate
  modified_base 10: mod_base = OTHER; note = 2'-Omethylguanosine
  modified_base 12: mod_base = OTHER; note = Guanosine phosphorothiorate
  modified_base 13: mod_base = OTHER; note = 2'-fluorocytosine
  modified_base 14: mod_base = OTHER; note = Adenosine phosphorothiorate
  modified_base 17: mod_base = OTHER; note = 2'-Omethylguanosine
  modified_base 27: mod_base = OTHER; note = 2'-Omethyluridine
  modified_base 30: mod_base = OTHER; note = Guanosine phosphorothiorate
  modified_base 33: mod_base = OTHER; note = 2'-fluorouridine
  modified_base 34: mod_base = OTHER; note = Uridine phosphorothiorate
  modified_base 44: mod_base = OTHER; note = 2'-Omethyladenosine
  modified_base 46: mod_base = OTHER; note = Guanosine phosphorothiorate
  modified_base 47: mod_base = OTHER; note = 2'-fluorouridine
  modified_base 48: mod_base = OTHER; note = 2'-Omethyluridine phosphorothiorate
  modified_base 52: mod_base = OTHER; note = Guanosine phosphorothiorate
  modified_base 54: mod_base = OTHER; note = 2'-Omethyluridine phosphorothiorate
  modified_base 56: mod_base = OTHER; note = Cytosine phosphorothiorate
  modified_base 57: mod_base = OTHER; note = 2'-fluoroguanosine
  modified_base 58: mod_base = OTHER; note = 2'-fluoroadenosine
  modified_base 59: mod_base = OTHER; note = 2'-Omethylguanosine
  modified_base 63: mod_base = OTHER; note = 2'-fluorocytosine
  modified_base 64: mod_base = OTHER; note = Guanosine phosphorothiorate
  modified_base 66: mod_base = OTHER; note = 2'-fluorocytosine
  modified_base 70: mod_base = OTHER; note = 2'-fluoroguanosine
  modified_base 72: mod_base = OTHER; note = 2'-Omethylcytosine
  modified_base 74: mod_base = OTHER; note = 2'-fluorocytosine
  modified_base 75: mod_base = OTHER; note = 2'-Omethylcytosine

SEQ ID NO: 6099 - RNA, 76 nt, synthetic construct; identical to SEQ ID NO: 625
  source 1..76: mol_type = other RNA
  modified_base 1: mod_base = OTHER; note = 2'-Omethylguanosine phosphorothiorate
  modified_base 2: mod_base = OTHER; note = 2'-Omethylguanosine
  modified_base 17: mod_base = OTHER; note = 2'-Omethylguanosine
  modified_base 33: mod_base = OTHER; note = 2'-fluorouridine
  modified_base 35: mod_base = OTHER; note = Cytosine phosphorothiorate
  modified_base 37: mod_base = OTHER; note = Adenosine phosphorothiorate
  modified_base 38: mod_base = OTHER; note = Adenosine phosphorothiorate
  modified_base 52: mod_base = OTHER; note = 2'-fluoroguanosine
  modified_base 54: mod_base = OTHER; note = 2'-Omethyluridine
  modified_base 68: mod_base = OTHER; note = 2'-Omethylguanosine
  modified_base 73: mod_base = OTHER; note = 2'-Omethylguanosine
  modified_base 75: mod_base = OTHER; note = 2'-fluorocytosine phosphorothiorate

SEQ ID NO: 6100 - DNA, 76 bp, synthetic construct; identical to SEQ ID NO: 1924
  source 1..76: mol_type = other DNA
  modified_base 1: mod_base = OTHER; note = 2'-Omethylguanosine
  modified_base 2: mod_base = OTHER; note = 2'-Omethylguanosine
  modified_base 3: mod_base = OTHER; note = 2'-Omethylcytosine
  modified_base 4: mod_base = OTHER; note = 2'-Omethyluridine
  modified_base 5: mod_base = OTHER; note = 2'-Omethylcytosine
  modified_base 6: mod_base = OTHER; note = 2'-Omethylcytosine
  modified_base 10: mod_base = OTHER; note = 2'-Omethylguanosine
  modified_base 11: mod_base = OTHER; note = 2'-Omethylcytosine
  modified_base 12: mod_base = OTHER; note = Guanosine phosphorothiorate
  modified_base 13: mod_base = OTHER; note = 2'-Omethylcytosine
  modified_base 14: mod_base = OTHER; note = 2'-Omethyladenosine
  modified_base 15: mod_base = OTHER; note = 2'-fluoroadenosine
  modified_base 16: mod_base = OTHER; note = 2'-Omethyluridine
  modified_base 17: mod_base = OTHER; note = Guanosine phosphorothiorate
  modified_base 18: mod_base = OTHER; note = 2'-Omethylguanosine
  modified_base 19: mod_base = OTHER; note = Adenosine phosphorothiorate
  modified_base 20: mod_base = OTHER; note = 2'-Omethyluridine
  modified_base 21: mod_base = OTHER; note = Adenosine phosphorothiorate
  modified_base 23: mod_base = OTHER; note = 2'-Omethylcytosine
  modified_base 24: mod_base = OTHER; note = 2'-Omethylguanosine
  modified_base 25: mod_base = OTHER; note = 2'-Omethylcytosine
  modified_base 29: mod_base = OTHER; note = 2'-Omethylguanosine
  modified_base 33: mod_base = OTHER; note = 2'-fluorouridine
  modified_base 35: mod_base = OTHER; note = Cytosine phosphorothiorate
  modified_base 37: mod_base = OTHER; note = Adenosine phosphorothiorate
  modified_base 38: mod_base = OTHER; note = Adenosine phosphorothiorate
  modified_base 40: mod_base = OTHER; note = 2'-fluorouridine
  modified_base 41: mod_base = OTHER; note = 2'-Omethylcytosine
  modified_base 42: mod_base = OTHER; note = 2'-Omethyladenosine
  modified_base 43: mod_base = OTHER; note = 2'-Omethyladenosine
  modified_base 44: mod_base = OTHER; note = 2'-fluoroadenosine
  modified_base 45: mod_base = OTHER; note = 2'-fluoroguanosine
  modified_base 46: mod_base = OTHER; note = Guanosine phosphorothiorate
  modified_base 50: mod_base = OTHER; note = 2'-Omethylcytosine
  modified_base 51: mod_base = OTHER; note = Guanosine phosphorothiorate
  modified_base 52: mod_base = OTHER; note = 2'-Omethylguanosine
  modified_base 54: mod_base = OTHER; note = Uridine phosphorothiorate
  modified_base 55: mod_base = OTHER; note = Uridine phosphorothiorate
  modified_base 56: mod_base = OTHER; note = 2'-Omethylcytosine
  modified_base 57: mod_base = OTHER; note = Guanosine phosphorothiorate
  modified_base 59: mod_base = OTHER; note = 2'-Omethylguanosine
  modified_base 62: mod_base = OTHER; note = 2'-Omethylcytosine
  modified_base 63: mod_base = OTHER; note = 2'-fluorocytosine
  modified_base 65: mod_base = OTHER; note = 2'-Omethylguanosine phosphorothiorate
  modified_base 68: mod_base = OTHER; note = 2'-Omethylguanosine
  modified_base 71: mod_base = OTHER; note = 2'-Omethyluridine
  modified_base 73: mod_base = OTHER; note = 2'-Omethylguanosine
  modified_base 74: mod_base = OTHER; note = Cytosine phosphorothiorate
  modified_base 75: mod_base = OTHER; note = 2'-fluorocytosine phosphorothiorate
  misc_feature 1..21: note = RNA
  misc_feature 22: note = DNA
  misc_feature 23..76: note = RNA

SEQ ID NO: 6101 - RNA, 76 nt, synthetic construct; identical to SEQ ID NO: 3289
  source 1..76: mol_type = other RNA
  modified_base 1: mod_base = OTHER; note = 2'-Omethylguanosine
  modified_base 14: mod_base = OTHER; note = 2'-Omethyladenosine
  modified_base 15: mod_base = OTHER; note = 2'-Omethylguanosine
  modified_base 16: mod_base = OTHER; note = 2'-Omethyluridine
  modified_base 18: mod_base = OTHER; note = 2'-Omethylguanosine
  modified_base 19: mod_base = OTHER; note = 2'-Omethylguanosine
  modified_base 50: mod_base = OTHER; note = 2'-Omethyladenosine
  modified_base 52: mod_base = OTHER; note = 2'-Omethylguanosine
  modified_base 73: mod_base = OTHER; note = 2'-Omethylguanosine

SEQ ID NO: 6102 - RNA, 76 nt, synthetic construct; identical to SEQ ID NO: 625
  source 1..76: mol_type = other RNA
  modified_base 1: mod_base = OTHER; note = 2'-Omethylguanosine
  modified_base 2: mod_base = OTHER; note = Guanosine phosphorothiorate
  modified_base 5: mod_base = OTHER; note = 2'-fluorocytosine
  modified_base 6: mod_base = OTHER; note = 2'-fluorocytosine
  modified_base 11: mod_base = OTHER; note = 2'-fluorocytosine
  modified_base 13: mod_base = OTHER; note = 2'-fluorocytosine
  modified_base 16: mod_base = OTHER; note = Uridine phosphorothiorate
  modified_base 18: mod_base = OTHER; note = 2'-Omethylguanosine
  modified_base 21: mod_base = OTHER; note = Adenosine phosphorothiorate
  modified_base 27: mod_base = OTHER; note = 2'-fluorouridine
  modified_base 29: mod_base = OTHER; note = 2'-fluoroguanosine
  modified_base 30: mod_base = OTHER; note = 2'-Omethylguanosine
  modified_base 33: mod_base = OTHER; note = Uridine phosphorothiorate
  modified_base 34: mod_base = OTHER; note = Uridine phosphorothiorate
  modified_base 36: mod_base = OTHER; note = Adenosine phosphorothiorate
  modified_base 43: mod_base = OTHER; note = 2'-Omethyladenosine
  modified_base 44: mod_base = OTHER; note = Adenosine phosphorothiorate
  modified_base 45: mod_base = OTHER; note = 2'-fluoroguanosine
  modified_base 46: mod_base = OTHER; note = Guanosine phosphorothiorate
  modified_base 47: mod_base = OTHER; note = 2'-fluorouridine
  modified_base 48: mod_base = OTHER; note = Uridine phosphorothiorate
  modified_base 49: mod_base = OTHER; note = 2'-Omethylcytosine
  modified_base 50: mod_base = OTHER; note = 2'-Omethylcytosine phosphorothiorate
  modified_base 53: mod_base = OTHER; note = 2'-fluoroguanosine
  modified_base 61: mod_base = OTHER; note = 2'-fluorocytosine phosphorothiorate
  modified_base 62: mod_base = OTHER; note = 2'-Omethylcytosine
  modified_base 63: mod_base = OTHER; note = 2'-Omethylcytosine
  modified_base 64: mod_base = OTHER; note = 2'-Omethylguanosine
  modified_base 66: mod_base = OTHER; note = Cytosine phosphorothiorate
  modified_base 67: mod_base = OTHER; note = 2'-Omethylguanosine
  modified_base 69: mod_base = OTHER; note = 2'-Omethyladenosine
  modified_base 70: mod_base = OTHER; note = 2'-Omethylguanosine
  modified_base 71: mod_base = OTHER; note = Uridine phosphorothiorate
  modified_base 74: mod_base = OTHER; note = 2'-Omethylcytosine phosphorothiorate
  modified_base 76: mod_base = OTHER; note = 2'-fluoroadenosine

SEQ ID NO: 6103 - RNA, 86 nt, synthetic construct; identical to SEQ ID NO: 3290
  source 1..86: mol_type = other RNA
  modified_base 1: mod_base = OTHER; note = 2'-Omethyladenosine phosphorothiorate
  modified_base 2: mod_base = OTHER; note = 2'-Omethylcytosine phosphorothiorate
  modified_base 85: mod_base = OTHER; note = 2'-Omethylcytosine phosphorothiorate

SEQ ID NO: 6104 - RNA, 85 nt, synthetic construct; identical to SEQ ID NO: 3317
  source 1..85: mol_type = other RNA
  modified_base 1: mod_base = OTHER; note = 2'-Omethylguanosine phosphorothiorate
  modified_base 2: mod_base = OTHER; note = 2'-Omethylcytosine
  modified_base 5: mod_base = OTHER; note = 2'-Omethyluridine phosphorothiorate
  modified_base 15: mod_base = OTHER; note = Guanosine phosphorothiorate
  modified_base 21: mod_base = OTHER; note = 2'-fluoroadenosine phosphorothiorate
  modified_base 31: mod_base = OTHER; note = 2'-fluoroadenosine
  modified_base 33: mod_base = OTHER; note = 2'-fluorouridine phosphorothiorate
  modified_base 36: mod_base = OTHER; note = 2'-Omethyladenosine
  modified_base 46: mod_base = OTHER; note = 2'-fluoroguanosine phosphorothiorate
  modified_base 48: mod_base = OTHER; note = Guanosine phosphorothiorate
  modified_base 55: mod_base = OTHER; note = Cytosine phosphorothiorate
  modified_base 56: mod_base = OTHER; note = 2'-Omethylguanosine
  modified_base 57: mod_base = OTHER; note = 2'-fluorocytosine
  modified_base 58: mod_base = OTHER; note = 2'-Omethylguanosine
  modified_base 65: mod_base = OTHER; note = 2'-fluorocytosine
  modified_base 74: mod_base = OTHER; note = 2'-fluorocytosine
  modified_base 81: mod_base = OTHER; note = 2'-fluorocytosine
  modified_base 82: mod_base = OTHER; note = 2'-Omethylguanosine
  modified_base 84: mod_base = OTHER; note = 2'-Omethylcytosine phosphorothiorate

SEQ ID NO: 6105 - RNA, 75 nt, synthetic construct; identical to SEQ ID NO: 3336
  source 1..75: mol_type = other RNA
  modified_base 2: mod_base = OTHER; note = 2'-Omethylcytosine phosphorothiorate
  modified_base 16: mod_base = OTHER; note = Cytosine phosphorothiorate
  modified_base 26: mod_base = OTHER; note = 2'-fluorouridine
  modified_base 27: mod_base = OTHER; note = 2'-fluorocytosine
  modified_base 46: mod_base = OTHER; note = 2'-fluorouridine
  modified_base 47: mod_base = OTHER; note = Cytosine phosphorothiorate
  modified_base 53: mod_base = OTHER; note = 2'-fluorouridine
  modified_base 71: mod_base = OTHER; note = Cytosine phosphorothiorate
  modified_base 73: mod_base = OTHER; note = Cytosine phosphorothiorate

SEQ ID NO: 6106 - RNA, 75 nt, synthetic construct; identical to SEQ ID NO: 3336
  source 1..75: mol_type = other RNA
  modified_base 13: mod_base = OTHER; note = 2'-Omethyladenosine
  modified_base 14: mod_base = OTHER; note = Guanosine phosphorothiorate
  modified_base 16: mod_base = OTHER; note = 2'-Omethylcytosine phosphorothiorate
  modified_base 21: mod_base = OTHER; note = 2'-fluoroguanosine
  modified_base 27: mod_base = OTHER; note = Cytosine phosphorothiorate
  modified_base 28: mod_base = OTHER; note = 2'-fluoroadenosine
  modified_base 38: mod_base = OTHER; note = 2'-fluorouridine phosphorothiorate
  modified_base 46: mod_base = OTHER; note = 2'-fluorouridine
  modified_base 47: mod_base = OTHER; note = 2'-fluorocytosine
  modified_base 53: mod_base = OTHER; note = 2'-fluorouridine
  modified_base 73: mod_base = OTHER; note = Cytosine phosphorothiorate
  modified_base 74: mod_base = OTHER; note = 2'-Omethylcytosine

SEQ ID NO: 6107 - RNA, 85 nt, synthetic construct; identical to SEQ ID NO: 3297
  source 1..85: mol_type = other RNA
  modified_base 1: mod_base = OTHER; note = 2'-Omethylguanosine phosphorothiorate
  modified_base 2: mod_base = OTHER; note = 2'-Omethylcytosine phosphorothiorate
  modified_base 3: mod_base = OTHER; note = 2'-Omethyluridine
  modified_base 4: mod_base = OTHER; note = 2'-Omethylguanosine
  modified_base 5: mod_base = OTHER; note = 2'-Omethyluridine
  modified_base 6: mod_base = OTHER; note = 2'-Omethylguanosine
  modified_base 8: mod_base = OTHER; note = Uridine phosphorothiorate
  modified_base 16: mod_base = OTHER; note = 2'-Omethyluridine
  modified_base 17: mod_base = OTHER; note = 2'-Omethylguanosine
  modified_base 18: mod_base = OTHER; note = 2'-Omethylguanosine
  modified_base 33: mod_base = OTHER; note = 2'-fluorouridine
  modified_base 35: mod_base = OTHER; note = Cytosine phosphorothiorate
  modified_base 37: mod_base = OTHER; note = Adenosine phosphorothiorate
  modified_base 38: mod_base = OTHER; note = Adenosine phosphorothiorate
  modified_base 44: mod_base = OTHER; note = 2'-Omethyluridine
  modified_base 56: mod_base = OTHER; note = 2'-fluoroguanosine
  modified_base 57: mod_base = OTHER; note = 2'-fluorocytosine
  modified_base 58: mod_base = OTHER; note = 2'-Omethylguanosine
  modified_base 59: mod_base = OTHER; note = 2'-Omethylcytosine
  modified_base 60: mod_base = OTHER; note = 2'-Omethyladenosine
  modified_base 61: mod_base = OTHER; note = 2'-Omethylguanosine
  modified_base 62: mod_base = OTHER; note = 2'-Omethylguanosine
  modified_base 63: mod_base = OTHER; note = 2'-Omethyluridine
  modified_base 65: mod_base = OTHER; note = 2'-Omethylcytosine
  modified_base 68: mod_base = OTHER; note = 2'-Omethyladenosine
  modified_base 70: mod_base = OTHER; note = 2'-Omethylcytosine
  modified_base 71: mod_base = OTHER; note = 2'-Omethylcytosine
  modified_base 72: mod_base = OTHER; note = 2'-fluorouridine
  modified_base 73: mod_base = OTHER; note = 2'-Omethylguanosine
  modified_base 74: mod_base = OTHER; note = 2'-Omethylcytosine
  modified_base 75: mod_base = OTHER; note = 2'-Omethyluridine
  modified_base 76: mod_base = OTHER; note = 2'-Omethylcytosine
  modified_base 77: mod_base = OTHER; note = 2'-Omethyladenosine
  modified_base 82: mod_base = OTHER; note = 2'-Omethylguanosine

SEQ ID NO: 6108 - RNA, 76 nt, synthetic construct; identical to SEQ ID NO: 625
  source 1..76: mol_type = other RNA
  modified_base 4: mod_base = OTHER; note = 2'-Omethyluridine
  modified_base 5: mod_base = OTHER; note = 2'-fluorocytosine
  modified_base 6: mod_base = OTHER; note = Cytosine phosphorothiorate
  modified_base 10: mod_base = OTHER; note = 2'-Omethylguanosine
  modified_base 11: mod_base = OTHER; note = 2'-Omethylcytosine
  modified_base 14: mod_base = OTHER; note = 2'-fluoroadenosine
  modified_base 17: mod_base = OTHER; note = 2'-Omethylguanosine
  modified_base 18: mod_base = OTHER; note = Guanosine phosphorothiorate
  modified_base 20: mod_base = OTHER; note = 2'-Omethyluridine phosphorothiorate
  modified_base 22: mod_base = OTHER; note = Guanosine phosphorothiorate
  modified_base 23: mod_base = OTHER; note = 2'-Omethylcytosine
  modified_base 25: mod_base = OTHER; note = 2'-Omethylcytosine
  modified_base 26: mod_base = OTHER; note = Adenosine phosphorothiorate
  modified_base 27: mod_base = OTHER; note = 2'-Omethyluridine
  modified_base 30: mod_base = OTHER; note = Guanosine phosphorothiorate
  modified_base 34: mod_base = OTHER; note = Uridine phosphorothiorate
  modified_base 40: mod_base = OTHER; note = 2'-fluorouridine
  modified_base 41: mod_base = OTHER; note = 2'-Omethylcytosine
  modified_base 44: mod_base = OTHER; note = 2'-Omethyladenosine
  modified_base 45: mod_base = OTHER; note = 2'-Omethylguanosine
  modified_base 46: mod_base = OTHER; note = 2'-fluoroguanosine
  modified_base 49: mod_base = OTHER; note = Cytosine phosphorothiorate
  modified_base 50: mod_base = OTHER; note = 2'-fluorocytosine
  modified_base 54: mod_base = OTHER; note = Uridine phosphorothiorate
  modified_base 56: mod_base = OTHER; note = 2'-Omethylcytosine
  modified_base 58: mod_base = OTHER; note = Adenosine phosphorothiorate
  modified_base 59: mod_base = OTHER; note = 2'-fluoroguanosine
  modified_base 60: mod_base = OTHER; note = 2'-Omethyluridine
  modified_base 62: mod_base = OTHER; note = 2'-fluorocytosine
  modified_base 63: mod_base = OTHER; note = 2'-fluorocytosine
  modified_base 64: mod_base = OTHER; note = 2'-fluoroguanosine
  modified_base 68: mod_base = OTHER; note = 2'-fluoroguanosine phosphorothiorate
  modified_base 69: mod_base = OTHER; note = 2'-Omethyladenosine
  modified_base 70: mod_base = OTHER; note = 2'-Omethylguanosine phosphorothiorate
  modified_base 71: mod_base = OTHER; note = 2'-fluorouridine
  modified_base 72: mod_base = OTHER; note = 2'-fluorocytosine
  modified_base 73: mod_base = OTHER; note = 2'-Omethylguanosine

SEQ ID NO: 6109 - RNA, 76 nt, synthetic construct; identical to SEQ ID NO: 3615
  source 1..76: mol_type = other RNA
  modified_base 1: mod_base = OTHER; note = 2'-Omethylguanosine
  modified_base 14: mod_base = OTHER; note = 2'-Omethyladenosine
  modified_base 15: mod_base = OTHER; note = 2'-fluoroadenosine
  modified_base 16: mod_base = OTHER; note = 2'-Omethyluridine
  modified_base 17: mod_base = OTHER; note = 2'-Omethylguanosine
  modified_base 18: mod_base = OTHER; note = 2'-Omethylguanosine
  modified_base 19: mod_base = OTHER; note = 2'-fluoroadenosine
  modified_base 20: mod_base = OTHER; note = 2'-Omethyluridine
  modified_base 33: mod_base = OTHER; note = 2'-fluorouridine
  modified_base 35: mod_base = OTHER; note = Cytosine phosphorothiorate
  modified_base 37: mod_base = OTHER; note = Adenosine phosphorothiorate
  modified_base 38: mod_base = OTHER; note = Adenosine phosphorothiorate
  modified_base 41: mod_base = OTHER; note = 2'-Omethylcytosine
  modified_base 42: mod_base = OTHER; note = 2'-Omethyladenosine
  modified_base 43: mod_base = OTHER; note = 2'-Omethyladenosine
  modified_base 44: mod_base = OTHER; note = 2'-Omethylguanosine
  modified_base 50: mod_base = OTHER; note = 2'-Omethylcytosine
  modified_base 52: mod_base = OTHER; note = 2'-Omethylguanosine
  modified_base 73: mod_base = OTHER; note = 2'-Omethylguanosine

SEQ ID NO: 6110 - RNA, 76 nt, synthetic construct; identical to SEQ ID NO: 625
  source 1..76: mol_type = other RNA
  modified_base 1: mod_base = OTHER; note = 2'-Omethylguanosine
  modified_base 4: mod_base = OTHER; note = Uridine phosphorothiorate
  modified_base 5: mod_base = OTHER; note = 2'-fluorocytosine
  modified_base 10: mod_base = OTHER; note = 2'-Omethylguanosine
  modified_base 13: mod_base = OTHER; note = 2'-Omethylcytosine
  modified_base 16: mod_base = OTHER; note = 2'-Omethyluridine
  modified_base 17: mod_base = OTHER; note = 2'-Omethylguanosine
  modified_base 18: mod_base = OTHER; note = Guanosine phosphorothiorate
  modified_base 19: mod_base = OTHER; note = Adenosine phosphorothiorate
  modified_base 20: mod_base = OTHER; note = 2'-Omethyluridine
  modified_base 22: mod_base = OTHER; note = 2'-fluoroguanosine
  modified_base 23: mod_base = OTHER; note = Cytosine phosphorothiorate
  modified_base 24: mod_base = OTHER; note = Guanosine phosphorothiorate
  modified_base 27: mod_base = OTHER; note = 2'-Omethyluridine
  modified_base 30: mod_base = OTHER; note = 2'-Omethylguanosine
  modified_base 31: mod_base = OTHER; note = 2'-fluoroadenosine
  modified_base 34: mod_base = OTHER; note = 2'-fluorouridine
  modified_base 36: mod_base = OTHER; note = Adenosine phosphorothiorate
  modified_base 41: mod_base = OTHER; note = 2'-fluorocytosine phosphorothiorate
  modified_base 42: mod_base = OTHER; note = 2'-fluoroadenosine
  modified_base 46: mod_base = OTHER; note = 2'-Omethylguanosine
  modified_base 47: mod_base = OTHER; note = 2'-fluorouridine
  modified_base 49: mod_base = OTHER; note = 2'-fluorocytosine
  modified_base 50: mod_base = OTHER; note = Cytosine phosphorothiorate
  modified_base 51: mod_base = OTHER; note = 2'-Omethylguanosine
  modified_base 52: mod_base = OTHER; note = Guanosine phosphorothiorate
  modified_base 53: mod_base = OTHER; note = 2'-Omethylguanosine
  modified_base 57: mod_base = OTHER; note = 2'-Omethylguanosine
  modified_base 58: mod_base = OTHER; note = Adenosine phosphorothiorate
  modified_base 59: mod_base = OTHER; note = 2'-Omethylguanosine
  modified_base 61: mod_base = OTHER; note = 2'-fluorocytosine
  modified_base 62: mod_base = OTHER; note = 2'-fluorocytosine phosphorothiorate
  modified_base 63: mod_base = OTHER; note = 2'-fluorocytosine
  modified_base 65: mod_base = OTHER; note = 2'-Omethylguanosine
  modified_base 69: mod_base = OTHER; note = 2'-fluoroadenosine phosphorothiorate
  modified_base 70: mod_base = OTHER; note = Guanosine phosphorothiorate
  modified_base 71: mod_base = OTHER; note = 2'-fluorouridine
  modified_base 73: mod_base = OTHER; note = 2'-Omethylguanosine

SEQ ID NO: 6111 - RNA, 75 nt, synthetic construct; identical to SEQ ID NO: 3336
  source 1..75: mol_type = other RNA
  modified_base 9: mod_base = OTHER; note = 2'-Omethylguanosine phosphorothiorate
  modified_base 14: mod_base = OTHER; note = 2'-fluoroguanosine phosphorothiorate
  modified_base 22: mod_base = OTHER; note = 2'-fluoroadenosine
  modified_base 27: mod_base = OTHER; note = Cytosine phosphorothiorate
  modified_base 36: mod_base = OTHER; note = Adenosine phosphorothiorate
  modified_base 47: mod_base = OTHER; note = 2'-fluorocytosine phosphorothiorate
  modified_base 49: mod_base = OTHER; note = 2'-fluoroadenosine
  modified_base 73: mod_base = OTHER; note = Cytosine phosphorothiorate
  modified_base 74: mod_base = OTHER; note = Cytosine phosphorothiorate

SEQ ID NO: 6112 - RNA, 76 nt, synthetic construct; identical to SEQ ID NO: 3289
  source 1..76: mol_type = other RNA
  modified_base 1: mod_base = OTHER; note = 2'-Omethylguanosine phosphorothiorate
  modified_base 2: mod_base = OTHER; note = 2'-Omethylcytosine

SEQ ID NO: 6113 - RNA, 75 nt, synthetic construct; identical to SEQ ID NO: 1045
  source 1..75: mol_type = other RNA
  modified_base 1: mod_base = OTHER; note = 2'-Omethylguanosine phosphorothiorate
  modified_base 2: mod_base = OTHER; note = 2'-Omethylguanosine phosphorothiorate
  modified_base 5: mod_base = OTHER; note = 2'-Omethylcytosine phosphorothiorate
  modified_base 6: mod_base = OTHER; note = 2'-Omethylcytosine phosphorothiorate
  modified_base 14: mod_base = OTHER; note = 2'-Omethyladenosine
  modified_base 16: mod_base = OTHER; note = 2'-Omethyluridine phosphorothiorate
  modified_base 17: mod_base = OTHER; note = 2'-fluoroguanosine
  modified_base 18: mod_base = OTHER; note = 2'-Omethylguanosine phosphorothiorate
  modified_base 20: mod_base = OTHER; note = 2'-Omethyladenosine
  modified_base 36: mod_base = OTHER; note = 2'-Omethyladenosine phosphorothiorate
  modified_base 52: mod_base = OTHER; note = 2'-Omethylguanosine
  modified_base 55: mod_base = OTHER; note = Cytosine phosphorothiorate
  modified_base 58: mod_base = OTHER; note = 2'-Omethylguanosine
  modified_base 64: mod_base = OTHER; note = 2'-Omethylguanosine
  modified_base 72: mod_base = OTHER; note = 2'-Omethyluridine
  modified_base 74: mod_base = OTHER; note = 2'-Omethylcytosine phosphorothiorate
  modified_base 75: mod_base = OTHER; note = 2'-Omethyladenosine

SEQ ID NO: 6114 - RNA, 76 nt, synthetic construct; identical to SEQ ID NO: 625
  source 1..76: mol_type = other RNA
  modified_base 1: mod_base = OTHER; note = 2'-Omethylguanosine phosphorothiorate
  modified_base 2: mod_base = OTHER; note = 2'-Omethylguanosine
  modified_base 12: mod_base = OTHER; note = Guanosine phosphorothiorate
  modified_base 33: mod_base = OTHER; note = 2'-fluorouridine
  modified_base 35: mod_base = OTHER; note = Cytosine phosphorothiorate
  modified_base 37: mod_base = OTHER; note = Adenosine phosphorothiorate
  modified_base 38: mod_base = OTHER; note = Adenosine phosphorothiorate
  modified_base 52: mod_base = OTHER; note = 2'-Omethylguanosine
  modified_base 56: mod_base = OTHER; note = 2'-Omethylcytosine
  modified_base 62: mod_base = OTHER; note = 2'-Omethylcytosine
  modified_base 65: mod_base = OTHER; note = 2'-Omethylguanosine
  modified_base 73: mod_base = OTHER; note = 2'-Omethylguanosine
  modified_base 75: mod_base = OTHER; note = 2'-fluorocytosine phosphorothiorate

SEQ ID NO: 6115 - RNA, 76 nt, synthetic construct; identical to SEQ ID NO: 625
  source 1..76: mol_type = other RNA
  modified_base 1: mod_base = OTHER; note = 2'-Omethylguanosine
  modified_base 2: mod_base = OTHER; note = 2'-Omethylguanosine
  modified_base 3: mod_base = OTHER; note = 2'-Omethylcytosine
  modified_base 4: mod_base = OTHER; note = 2'-Omethyluridine
  modified_base 5: mod_base = OTHER; note = 2'-Omethylcytosine
  modified_base 6: mod_base = OTHER; note = 2'-Omethylcytosine
  modified_base 7: mod_base = OTHER; note = Guanosine phosphorothiorate
  modified_base 9: mod_base = OTHER; note = Guanosine phosphorothiorate
  modified_base 10: mod_base = OTHER; note = 2'-Omethylguanosine
  modified_base 11: mod_base = OTHER; note = 2'-Omethylcytosine
  modified_base 12: mod_base = OTHER; note = 2'-Omethylguanosine
  modified_base 13: mod_base = OTHER; note = 2'-Omethylcytosine
  modified_base 14: mod_base = OTHER; note = 2'-Omethyladenosine
  modified_base 15: mod_base = OTHER; note = 2'-Omethyladenosine
  modified_base 16: mod_base = OTHER; note = 2'-Omethyluridine
  modified_base 17: mod_base = OTHER; note = 2'-Omethylguanosine
  modified_base 18: mod_base = OTHER; note = 2'-fluoroguanosine phosphorothiorate
  modified_base 19: mod_base = OTHER; note = 2'-fluoroadenosine phosphorothiorate
  modified_base 20: mod_base = OTHER; note = 2'-Omethyluridine
  modified_base 21: mod_base = OTHER; note = 2'-fluoroadenosine phosphorothiorate
  modified_base 22: mod_base = OTHER; note = 2'-Omethylguanosine
  modified_base 23: mod_base = OTHER; note = 2'-Omethylcytosine
  modified_base 24: mod_base = OTHER; note = 2'-Omethylguanosine
  modified_base 26: mod_base = OTHER; note = Adenosine phosphorothiorate
  modified_base 28: mod_base = OTHER; note = 2'-Omethyluridine phosphorothiorate
  modified_base 29: mod_base = OTHER; note = 2'-fluoroguanosine phosphorothiorate
  modified_base 30: mod_base = OTHER; note = 2'-Omethylguanosine
  modified_base 31: mod_base = OTHER; note = 2'-Omethyladenosine phosphorothiorate
  modified_base 32: mod_base = OTHER; note = 2'-Omethylcytosine phosphorothiorate
  modified_base 33: mod_base = OTHER; note = 2'-fluorouridine
  modified_base 34: mod_base = OTHER; note = Uridine phosphorothiorate
  modified_base 35: mod_base = OTHER; note = 2'-Omethylcytosine phosphorothiorate
  modified_base 36: mod_base = OTHER; note = 2'-Omethyladenosine phosphorothiorate
  modified_base 38: mod_base = OTHER; note = Adenosine phosphorothiorate
  modified_base 39: mod_base = OTHER; note = 2'-Omethyluridine phosphorothiorate
  modified_base 40: mod_base = OTHER; note = 2'-Omethyluridine
  modified_base 41: mod_base = OTHER; note = 2'-fluorocytosine
  modified_base 42: mod_base = OTHER; note = Adenosine phosphorothiorate
  modified_base 43: mod_base = OTHER; note = Adenosine phosphorothiorate
  modified_base 45: mod_base = OTHER; note = 2'-fluoroguanosine
  modified_base 49: mod_base = OTHER; note = 2'-Omethylcytosine phosphorothiorate
  modified_base 50: mod_base = OTHER; note = 2'-Omethylcytosine
  modified_base 51: mod_base = OTHER; note = 2'-Omethylguanosine
  modified_base 52: mod_base = OTHER; note = 2'-Omethylguanosine
  modified_base 53: mod_base = OTHER; note = 2'-fluoroguanosine phosphorothiorate
  modified_base 54: mod_base = OTHER; note = 2'-Omethyluridine
  modified_base 55: mod_base = OTHER; note = Uridine phosphorothiorate
  modified_base 57: mod_base = OTHER; note = 2'-Omethylguanosine
  modified_base 59: mod_base = OTHER; note = 2'-Omethylguanosine
  modified_base 60: mod_base = OTHER; note = 2'-Omethyluridine phosphorothiorate
  modified_base 61: mod_base = OTHER; note = 2'-Omethylcytosine phosphorothiorate
  modified_base 62: mod_base = OTHER; note = 2'-Omethylcytosine
  modified_base 63: mod_base = OTHER; note = 2'-Omethylcytosine phosphorothiorate
  modified_base 64: mod_base = OTHER; note = 2'-Omethylguanosine
  modified_base 65: mod_base = OTHER; note = 2'-Omethylguanosine
  modified_base 66: mod_base = OTHER; note = 2'-fluorocytosine
  modified_base 67: mod_base = OTHER; note = 2'-fluoroguanosine
  modified_base 68: mod_base = OTHER; note = 2'-fluoroguanosine
  modified_base 69: mod_base = OTHER; note = 2'-Omethyladenosine phosphorothiorate
  modified_base 70: mod_base = OTHER; note = 2'-fluoroguanosine
  modified_base 71: mod_base = OTHER; note = 2'-Omethyluridine phosphorothiorate
  modified_base 72: mod_base = OTHER; note = 2'-fluorocytosine phosphorothiorate
  modified_base 73: mod_base = OTHER; note = 2'-Omethylguanosine
  modified_base 74: mod_base = OTHER; note = 2'-fluorocytosine phosphorothiorate
  modified_base 75: mod_base = OTHER; note = 2'-fluorocytosine phosphorothiorate
  modified_base 76: mod_base = OTHER; note = 2'-fluoroadenosine

SEQ ID NO: 6116 - RNA, 76 nt, synthetic construct; identical to SEQ ID NO: 625
  source 1..76: mol_type = other RNA
  modified_base 1: mod_base = OTHER; note = 2'-fluoroguanosine
  modified_base 2: mod_base = OTHER; note = Guanosine phosphorothiorate
  modified_base 4: mod_base = OTHER; note = 2'-Omethyluridine
  modified_base 11: mod_base = OTHER; note = 2'-fluorocytosine
  modified_base 14: mod_base = OTHER; note = 2'-Omethyladenosine
  modified_base 15: mod_base = OTHER; note = 2'-fluoroadenosine
  modified_base 16: mod_base = OTHER; note = 2'-Omethyluridine phosphorothiorate
  modified_base 17: mod_base = OTHER; note = 2'-Omethylguanosine
  modified_base 18: mod_base = OTHER; note = Guanosine phosphorothiorate
  modified_base 22: mod_base = OTHER; note = 2'-Omethylguanosine
  modified_base 23: mod_base = OTHER; note = 2'-fluorocytosine
  modified_base 27: mod_base = OTHER; note = 2'-fluorouridine
  modified_base 30: mod_base = OTHER; note = Guanosine phosphorothiorate
  modified_base 34: mod_base = OTHER; note = Uridine phosphorothiorate
  modified_base 36: mod_base = OTHER; note = Adenosine phosphorothiorate
  modified_base 39: mod_base = OTHER; note = 2'-fluorouridine
  modified_base 40: mod_base = OTHER; note = 2'-Omethyluridine
  modified_base 44: mod_base = OTHER; note = Adenosine phosphorothiorate
  modified_base 45: mod_base = OTHER; note = Guanosine phosphorothiorate
  modified_base 46: mod_base = OTHER; note = 2'-Omethylguanosine
  modified_base 47: mod_base = OTHER; note = 2'-fluorouridine
  modified_base 50: mod_base = OTHER; note = 2'-fluorocytosine
  modified_base 51: mod_base = OTHER; note = Guanosine phosphorothiorate
  modified_base 54: mod_base = OTHER; note = 2'-Omethyluridine
  modified_base 61: mod_base = OTHER; note = 2'-Omethylcytosine
  modified_base 64: mod_base = OTHER; note = 2'-fluoroguanosine
  modified_base 65: mod_base = OTHER; note = 2'-fluoroguanosine
  modified_base 67: mod_base = OTHER; note = 2'-fluoroguanosine
  modified_base 70: mod_base = OTHER; note = 2'-fluoroguanosine phosphorothiorate
  modified_base 71: mod_base = OTHER; note = 2'-Omethyluridine phosphorothiorate
  modified_base 72: mod_base = OTHER; note = Cytosine phosphorothiorate
  modified_base 73: mod_base = OTHER; note = 2'-Omethylguanosine
  modified_base 76: mod_base = OTHER; note = 2'-fluoroadenosine

SEQ ID NO: 6117 - RNA, 75 nt, synthetic construct; identical to SEQ ID NO: 1045
  source 1..75: mol_type = other RNA
  modified_base 1: mod_base = OTHER; note = 2'-Omethylguanosine
  modified_base 2: mod_base = OTHER; note = 2'-Omethylguanosine
  modified_base 3: mod_base = OTHER; note = 2'-Omethyluridine
  modified_base 4: mod_base = OTHER; note = 2'-Omethyluridine
  modified_base 5: mod_base = OTHER; note = 2'-Omethylcytosine
  modified_base 6: mod_base = OTHER; note = 2'-Omethylcytosine
  modified_base 14: mod_base = OTHER; note = 2'-Omethyladenosine
  modified_base 15: mod_base = OTHER; note = 2'-Omethyladenosine
  modified_base 16: mod_base = OTHER; note = 2'-Omethyluridine
  modified_base 17: mod_base = OTHER; note = 2'-Omethylguanosine
  modified_base 18: mod_base = OTHER; note = 2'-Omethylguanosine
  modified_base 20: mod_base = OTHER; note = 2'-Omethyladenosine
  modified_base 25: mod_base = OTHER; note = 2'-Omethylcytosine
  modified_base 41: mod_base = OTHER; note = 2'-fluorocytosine
  modified_base 42: mod_base = OTHER; note = 2'-Omethyladenosine
  modified_base 43: mod_base = OTHER; note = 2'-Omethylguanosine
  modified_base 44: mod_base = OTHER; note = 2'-fluorocytosine
  modified_base 48: mod_base = OTHER; note = 2'-Omethylcytosine
  modified_base 49: mod_base = OTHER; note = 2'-Omethylcytosine
  modified_base 51: mod_base = OTHER; note = 2'-Omethyladenosine
  modified_base 53: mod_base = OTHER; note = 2'-Omethyluridine
  modified_base 54: mod_base = OTHER; note = Uridine phosphorothiorate
  modified_base 55: mod_base = OTHER; note = 2'-Omethylcytosine
  modified_base 56: mod_base = OTHER; note = 2'-fluoroguanosine
  modified_base 58: mod_base = OTHER; note = 2'-Omethylguanosine
  modified_base 60: mod_base = OTHER; note = 2'-Omethylcytosine
  modified_base 64: mod_base = OTHER; note = 2'-Omethylguanosine
  modified_base 72: mod_base = OTHER; note = 2'-Omethyluridine

SEQ ID NO: 6118 - RNA, 76 nt, synthetic construct; identical to SEQ ID NO: 625
  source 1..76: mol_type = other RNA
  modified_base 1: mod_base = OTHER; note = 2'-Omethylguanosine phosphorothiorate
  modified_base 2: mod_base = OTHER; note = 2'-Omethylguanosine phosphorothiorate
  modified_base 3: mod_base = OTHER; note = 2'-Omethylcytosine
  modified_base 4: mod_base = OTHER; note = 2'-Omethyluridine
  modified_base 5: mod_base = OTHER; note = 2'-Omethylcytosine
  modified_base 6: mod_base = OTHER; note = 2'-Omethylcytosine

SEQ ID NO: 6119 - RNA, 73 nt, synthetic construct; identical to SEQ ID NO: 935
  source 1..73: mol_type = other RNA
  modified_base 1: mod_base = OTHER; note = 2'-Omethylguanosine phosphorothiorate
  modified_base 2: mod_base = OTHER; note = 2'-Omethylguanosine phosphorothiorate
  modified_base 66: mod_base = OTHER; note = Cytosine phosphorothiorate
  modified_base 67: mod_base = OTHER; note = 2'-fluoroguanosine

SEQ ID NO: 6120 - RNA, 86 nt, synthetic construct; identical to SEQ ID NO: 3290
  source 1..86: mol_type = other RNA
  modified_base 1: mod_base = OTHER; note = 2'-Omethyladenosine
  modified_base 2: mod_base = OTHER; note = 2'-Omethylcytosine
  modified_base 3: mod_base = OTHER; note = 2'-Omethylcytosine
  modified_base 4: mod_base = OTHER; note = 2'-Omethyladenosine
  modified_base 5: mod_base = OTHER; note = 2'-Omethylguanosine

SEQ ID NO: 6121 - RNA, 73 nt, synthetic construct; identical to SEQ ID NO: 935
  source 1..73: mol_type = other RNA
  modified_base 1: mod_base = OTHER; note = 2'-Omethylguanosine phosphorothiorate
  modified_base 2: mod_base = OTHER; note = 2'-Omethylguanosine phosphorothiorate
  modified_base 33: mod_base = OTHER; note = 2'-fluorouridine
  modified_base 53: mod_base = OTHER; note = 2'-Omethylguanosine
  modified_base 73: mod_base = OTHER; note = 2'-Omethylguanosine

SEQ ID NO: 6122 - RNA, 85 nt, synthetic construct; identical to SEQ ID NO: 3297
  source 1..85: mol_type = other RNA
  modified_base 1: mod_base = OTHER; note = 2'-Omethylguanosine phosphorothiorate
  modified_base 2: mod_base = OTHER; note = 2'-Omethylcytosine phosphorothiorate
  modified_base 3: mod_base = OTHER; note = 2'-Omethyluridine
  modified_base 4: mod_base = OTHER; note = 2'-Omethylguanosine
  modified_base 5: mod_base = OTHER; note = 2'-Omethyluridine
  modified_base 6: mod_base = OTHER; note = 2'-Omethylguanosine
  modified_base 16: mod_base = OTHER; note = 2'-Omethyluridine
  modified_base 17: mod_base = OTHER; note = 2'-Omethylguanosine
  modified_base 18: mod_base = OTHER; note = 2'-Omethylguanosine
  modified_base 33: mod_base = OTHER; note = 2'-fluorouridine
  modified_base 35: mod_base = OTHER; note = Cytosine phosphorothiorate
  modified_base 37: mod_base = OTHER; note = Adenosine phosphorothiorate
  modified_base 38: mod_base = OTHER; note = Adenosine phosphorothiorate
  modified_base 44: mod_base = OTHER; note = 2'-Omethyluridine
  modified_base 56: mod_base = OTHER; note = 2'-fluoroguanosine
  modified_base 58: mod_base = OTHER; note = 2'-Omethylguanosine
  modified_base 59: mod_base = OTHER; note = 2'-Omethylcytosine
  modified_base 60: mod_base = OTHER; note = 2'-Omethyladenosine
  modified_base 61: mod_base = OTHER; note = 2'-Omethylguanosine
  modified_base 62: mod_base = OTHER; note = 2'-Omethylguanosine
  modified_base 63: mod_base = OTHER; note = 2'-Omethyluridine
  modified_base 65: mod_base = OTHER; note = 2'-Omethylcytosine
  modified_base 68: mod_base = OTHER; note = 2'-Omethyladenosine
  modified_base 70: mod_base = OTHER; note = 2'-Omethylcytosine
  modified_base 71: mod_base = OTHER; note = 2'-Omethylcytosine
  modified_base 72: mod_base = OTHER; note = 2'-fluorouridine
  modified_base 73: mod_base = OTHER; note = 2'-Omethylguanosine
  modified_base 74: mod_base = OTHER; note = 2'-Omethylcytosine
  modified_base 75: mod_base = OTHER; note = 2'-Omethyluridine
  modified_base 76: mod_base = OTHER; note = 2'-Omethylcytosine
  modified_base 77: mod_base = OTHER; note = 2'-Omethyladenosine
  modified_base 82: mod_base = OTHER; note = 2'-Omethylguanosine

SEQ ID NO: 6123 - RNA, 85 nt, synthetic construct; identical to SEQ ID NO: 3297
  source 1..85: mol_type = other RNA
  modified_base 1: mod_base = OTHER; note = 2'-Omethylguanosine phosphorothiorate
  modified_base 2: mod_base = OTHER; note = 2'-Omethylcytosine phosphorothiorate
  modified_base 3: mod_base = OTHER; note = 2'-Omethyluridine
  modified_base 4: mod_base = OTHER; note = 2'-Omethylguanosine
  modified_base 5: mod_base = OTHER; note = 2'-Omethyluridine
  modified_base 6: mod_base = OTHER; note = 2'-Omethylguanosine
  modified_base 14: mod_base = OTHER; note = 2'-Omethyladenosine
  modified_base 17: mod_base = OTHER; note = 2'-Omethylguanosine
  modified_base 18: mod_base = OTHER; note = 2'-Omethylguanosine
  modified_base 20: mod_base = OTHER; note = 2'-Omethyluridine
  modified_base 22: mod_base = OTHER; note = 2'-Omethyladenosine
  modified_base 25: mod_base = OTHER; note = 2'-Omethylcytosine
  modified_base 27: mod_base = OTHER; note = 2'-Omethyluridine
  modified_base 33: mod_base = OTHER; note = 2'-fluorouridine
  modified_base 41: mod_base = OTHER; note = 2'-Omethylcytosine
  modified_base 44: mod_base = OTHER; note = 2'-Omethyluridine
  modified_base 56: mod_base = OTHER; note = 2'-fluoroguanosine
  modified_base 57: mod_base = OTHER; note = 2'-fluorocytosine
  modified_base 61: mod_base = OTHER; note = 2'-Omethylguanosine
  modified_base 64: mod_base = OTHER; note = Uridine phosphorothiorate
  modified_base 80: mod_base = OTHER; note = 2'-Omethylguanosine
  modified_base 82: mod_base = OTHER; note = 2'-Omethylguanosine

SEQ ID NO: 6124 - RNA, 76 nt, synthetic construct; identical to SEQ ID NO: 625
  source 1..76: mol_type = other RNA
  modified_base 43: mod_base = OTHER; note = 2'-Omethyladenosine
  modified_base 44: mod_base = OTHER; note = 2'-Omethyladenosine
  modified_base 45: mod_base = OTHER; note = 2'-Omethylguanosine
  modified_base 46: mod_base = OTHER; note = 2'-fluoroguanosine

SEQ ID NO: 6125 - RNA, 76 nt, synthetic construct; identical to SEQ ID NO: 625
  source 1..76: mol_type = other RNA
  modified_base 1: mod_base = OTHER; note = 2'-Omethylguanosine phosphorothiorate
  modified_base 2: mod_base = OTHER; note = 2'-Omethylguanosine
  modified_base 10: mod_base = OTHER; note = 2'-Omethylguanosine
  modified_base 11: mod_base = OTHER; note = 2'-Omethylcytosine
  modified_base 12: mod_base = OTHER; note = 2'-Omethylguanosine
  modified_base 13: mod_base = OTHER; note = 2'-Omethylcytosine
  modified_base 17: mod_base = OTHER; note = 2'-Omethylguanosine
  modified_base 22: mod_base = OTHER; note = 2'-Omethylguanosine
  modified_base 23: mod_base = OTHER; note = 2'-Omethylcytosine
  modified_base 24: mod_base = OTHER; note = 2'-Omethylguanosine
  modified_base 25: mod_base = OTHER; note = 2'-Omethylcytosine
  modified_base 33: mod_base = OTHER; note = 2'-fluorouridine
  modified_base 35: mod_base = OTHER; note = Cytosine phosphorothiorate
  modified_base 37: mod_base = OTHER; note = Adenosine phosphorothiorate
  modified_base 38: mod_base = OTHER; note = Adenosine phosphorothiorate
  modified_base 52: mod_base = OTHER; note = 2'-Omethylguanosine
  modified_base 54: mod_base = OTHER; note = Uridine phosphorothiorate
  modified_base 55: mod_base = OTHER; note = Uridine phosphorothiorate
  modified_base 56: mod_base = OTHER; note = Cytosine phosphorothiorate
  modified_base 57: mod_base = OTHER; note = Guanosine phosphorothiorate
  modified_base 62: mod_base = OTHER; note = 2'-Omethylcytosine
  modified_base 63: mod_base = OTHER; note = 2'-fluorocytosine
  modified_base 65: mod_base = OTHER; note = 2'-Omethylguanosine
  modified_base 68: mod_base = OTHER; note = 2'-Omethylguanosine
  modified_base 73: mod_base = OTHER; note = 2'-Omethylguanosine
  modified_base 75: mod_base = OTHER; note = 2'-fluorocytosine phosphorothiorate

SEQ ID NO: 6126 - RNA, 86 nt, synthetic construct; identical to SEQ ID NO: 3290
  source 1..86: mol_type = other RNA
  modified_base 1: mod_base = OTHER; note = 2'-Omethyladenosine
  modified_base 19: mod_base = OTHER; note = 2'-fluorouridine
  modified_base 20: mod_base = OTHER; note = 2'-Omethyluridine
  modified_base 21: mod_base = OTHER; note = 2'-Omethyladenosine
  modified_base 22: mod_base = OTHER; note = 2'-Omethyladenosine
  modified_base 83: mod_base = OTHER; note = 2'-Omethyladenosine

SEQ ID NO: 6127 - RNA, 76 nt, synthetic construct; identical to SEQ ID NO: 625
  source 1..76: mol_type = other RNA
  modified_base 1: mod_base = OTHER; note = 2'-Omethylguanosine
  modified_base 5: mod_base = OTHER; note = 2'-fluorocytosine
  modified_base 15: mod_base = OTHER; note = 2'-fluoroadenosine
  modified_base 22: mod_base = OTHER; note = 2'-fluoroguanosine
  modified_base 24: mod_base = OTHER; note = 2'-fluoroguanosine
  modified_base 27: mod_base = OTHER; note = 2'-fluorouridine phosphorothiorate
  modified_base 33: mod_base = OTHER; note = 2'-fluorouridine
  modified_base 34: mod_base = OTHER; note = 2'-Omethyluridine
  modified_base 38: mod_base = OTHER; note = Adenosine phosphorothiorate
  modified_base 39: mod_base = OTHER; note = 2'-fluorouridine
  modified_base 40: mod_base = OTHER; note = Uridine phosphorothiorate
  modified_base 42: mod_base = OTHER; note = 2'-fluoroadenosine
  modified_base 43: mod_base = OTHER; note = Adenosine phosphorothiorate
  modified_base 44: mod_base = OTHER; note = 2'-fluoroadenosine phosphorothiorate
  modified_base 45: mod_base = OTHER; note = 2'-Omethylguanosine
  modified_base 46: mod_base = OTHER; note = Guanosine phosphorothiorate
  modified_base 47: mod_base = OTHER; note = 2'-Omethyluridine
  modified_base 48: mod_base = OTHER; note = 2'-fluorouridine
  modified_base 50: mod_base = OTHER; note = 2'-Omethylcytosine phosphorothiorate
  modified_base 51: mod_base = OTHER; note = 2'-Omethylguanosine
  modified_base 52: mod_base = OTHER; note = 2'-Omethylguanosine
  modified_base 53: mod_base = OTHER; note = 2'-fluoroguanosine
  modified_base 56: mod_base = OTHER; note = 2'-Omethylcytosine
  modified_base 57: mod_base = OTHER; note = 2'-fluoroguanosine
  modified_base 58: mod_base = OTHER; note = 2'-fluoroadenosine
  modified_base 63: mod_base = OTHER; note = 2'-fluorocytosine phosphorothiorate
  modified_base 64: mod_base = OTHER; note = 2'-fluoroguanosine
  modified_base 67: mod_base = OTHER; note = 2'-fluoroguanosine
  modified_base 69: mod_base = OTHER; note = Adenosine phosphorothiorate
  modified_base 70: mod_base = OTHER; note = 2'-fluoroguanosine
  modified_base 71: mod_base = OTHER; note = 2'-Omethyluridine
  modified_base 72: mod_base = OTHER; note = 2'-fluorocytosine phosphorothiorate
  modified_base 74: mod_base = OTHER; note = 2'-fluorocytosine
  modified_base 75: mod_base = OTHER; note = 2'-Omethylcytosine
  modified_base 76: mod_base = OTHER; note = 2'-fluoroadenosine

SEQ ID NO: 6128 - RNA, 76 nt, synthetic construct; identical to SEQ ID NO: 625
  source 1..76: mol_type = other RNA
  modified_base 2: mod_base = OTHER; note = 2'-Omethylguanosine phosphorothiorate
  modified_base 3: mod_base = OTHER; note = 2'-fluorocytosine
  modified_base 4: mod_base = OTHER; note = Uridine phosphorothiorate
  modified_base 5: mod_base = OTHER; note = 2'-Omethylcytosine
  modified_base 6: mod_base = OTHER; note = 2'-fluorocytosine
  modified_base 10: mod_base = OTHER; note = 2'-fluoroguanosine
  modified_base 12: mod_base = OTHER; note = 2'-fluoroguanosine
  modified_base 13: mod_base = OTHER; note = 2'-fluorocytosine
  modified_base 14: mod_base = OTHER; note = 2'-Omethyladenosine
  modified_base 17: mod_base = OTHER; note = 2'-Omethylguanosine phosphorothiorate
  modified_base 18: mod_base = OTHER; note = 2'-fluoroguanosine
  modified_base 19: mod_base = OTHER; note = Adenosine phosphorothiorate
  modified_base 20: mod_base = OTHER; note = 2'-Omethyluridine
  modified_base 22: mod_base = OTHER; note = 2'-fluoroguanosine
  modified_base 23: mod_base = OTHER; note = 2'-Omethylcytosine
  modified_base 24: mod_base = OTHER; note = 2'-fluoroguanosine
  modified_base 25: mod_base = OTHER; note = 2'-Omethylcytosine
  modified_base 26: mod_base = OTHER; note = 2'-Omethyladenosine
  modified_base 27: mod_base = OTHER; note = Uridine phosphorothiorate
  modified_base 28: mod_base = OTHER; note = 2'-fluorouridine
  modified_base 31: mod_base = OTHER; note = 2'-Omethyladenosine
  modified_base 33: mod_base = OTHER; note = 2'-fluorouridine
  modified_base 38: mod_base = OTHER; note = 2'-fluoroadenosine
  modified_base 39: mod_base = OTHER; note = 2'-Omethyluridine
  modified_base 42: mod_base = OTHER; note = 2'-fluoroadenosine
  modified_base 43: mod_base = OTHER; note = 2'-fluoroadenosine
  modified_base 44: mod_base = OTHER; note = Adenosine phosphorothiorate
  modified_base 45: mod_base = OTHER; note = 2'-Omethylguanosine phosphorothiorate
  modified_base 49: mod_base = OTHER; note = 2'-Omethylcytosine
  modified_base 51: mod_base = OTHER; note = 2'-Omethylguanosine phosphorothiorate
  modified_base 54: mod_base = OTHER; note = 2'-fluorouridine
  modified_base 58: mod_base = OTHER; note = 2'-fluoroadenosine
  modified_base 61: mod_base = OTHER; note = 2'-Omethylcytosine
  modified_base 63: mod_base = OTHER; note = Cytosine phosphorothiorate
  modified_base 64: mod_base = OTHER; note = 2'-Omethylguanosine
  modified_base 70: mod_base = OTHER; note = 2'-fluoroguanosine
  modified_base 73: mod_base = OTHER; note = 2'-fluoroguanosine phosphorothiorate
  modified_base 74: mod_base = OTHER; note = 2'-Omethylcytosine
  modified_base 75: mod_base = OTHER; note = 2'-fluorocytosine

SEQ ID NO: 6129 - RNA, 76 nt, synthetic construct; identical to SEQ ID NO: 625
  source 1..76: mol_type = other RNA
  modified_base 1: mod_base = OTHER; note = 2'-Omethylguanosine phosphorothiorate
  modified_base 2: mod_base = OTHER; note = 2'-Omethylguanosine phosphorothiorate
  modified_base 3: mod_base = OTHER; note = 2'-Omethylcytosine phosphorothiorate
  modified_base 4: mod_base = OTHER; note = 2'-Omethyluridine phosphorothiorate
  modified_base 5: mod_base = OTHER; note = 2'-Omethylcytosine phosphorothiorate
  modified_base 6: mod_base = OTHER; note = 2'-Omethylcytosine phosphorothiorate
  modified_base 22: mod_base = OTHER; note = 2'-Omethylguanosine
  modified_base 23: mod_base = OTHER; note = 2'-Omethylcytosine
  modified_base 24: mod_base = OTHER; note = 2'-Omethylguanosine
  modified_base 25: mod_base = OTHER; note = 2'-Omethylcytosine
  modified_base 40: mod_base = OTHER; note = 2'-fluorouridine
  modified_base 41: mod_base = OTHER; note = 2'-fluorocytosine
  modified_base 42: mod_base = OTHER; note = 2'-fluoroadenosine
  modified_base 43: mod_base = OTHER; note = 2'-fluoroadenosine
  modified_base 49: mod_base = OTHER; note = 2'-Omethylcytosine
  modified_base 50: mod_base = OTHER; note = 2'-Omethylcytosine
  modified_base 51: mod_base = OTHER; note = 2'-Omethylguanosine
  modified_base 52: mod_base = OTHER; note = 2'-Omethylguanosine
  modified_base 53: mod_base = OTHER; note = 2'-Omethylguanosine
  modified_base 61: mod_base = OTHER; note = 2'-Omethylcytosine
  modified_base 62: mod_base = OTHER; note = 2'-Omethylcytosine
  modified_base 63: mod_base = OTHER; note = 2'-Omethylcytosine
  modified_base 64: mod_base = OTHER; note = 2'-Omethylguanosine
  modified_base 65: mod_base = OTHER; note = 2'-Omethylguanosine
  modified_base 66: mod_base = OTHER; note = 2'-Omethylcytosine
  modified_base 67: mod_base = OTHER; note = 2'-Omethylguanosine
  modified_base 68: mod_base = OTHER; note = 2'-Omethylguanosine
  modified_base 69: mod_base = OTHER; note = 2'-Omethyladenosine

SEQ ID NO: 6130 - RNA, 75 nt, synthetic construct; identical to SEQ ID NO: 3311
  source 1..75: mol_type = other RNA
  modified_base 1: mod_base = OTHER; note = Guanosine phosphorothiorate
  modified_base 2: mod_base = OTHER; note = 2'-Omethylguanosine phosphorothiorate
  modified_base 12: mod_base = OTHER; note = Guanosine phosphorothiorate
  modified_base 13: mod_base = OTHER; note = 2'-fluorouridine phosphorothiorate
  modified_base 21: mod_base = OTHER; note = 2'-fluoroadenosine
  modified_base 22: mod_base = OTHER; note = Guanosine phosphorothiorate
  modified_base 39: mod_base = OTHER; note = 2'-fluorouridine
  modified_base 40: mod_base = OTHER; note = 2'-Omethylcytosine
  modified_base 48: mod_base = OTHER; note = 2'-fluorocytosine
  modified_base 57: mod_base = OTHER; note = Adenosine phosphorothiorate
  modified_base 58: mod_base = OTHER; note = 2'-fluoroguanosine
  modified_base 63: mod_base = OTHER; note = Guanosine phosphorothiorate
  modified_base 68: mod_base = OTHER; note = Adenosine phosphorothiorate
  modified_base 69: mod_base = OTHER; note = 2'-fluoroadenosine
  modified_base 73: mod_base = OTHER; note = Cytosine phosphorothiorate
  modified_base 74: mod_base = OTHER; note = 2'-Omethylcytosine

SEQ ID NO: 6131 - RNA, 86 nt, synthetic construct; identical to SEQ ID NO: 3290
  source 1..86: mol_type = other RNA
  modified_base 24: mod_base = OTHER; note = 2'-fluoroguanosine

SEQ ID NO: 6132 - RNA, 76 nt, synthetic construct
  source 1..76: mol_type = other RNA
ggctccgtggcgcaatggatagcgcattggctgtcaaagtcaaaggttccgggttcgagtcccggcggagtcgcca

SEQ ID NO: 6133 - RNA, 76 nt, synthetic construct; identical to SEQ ID NO: 625
  source 1..76: mol_type = other RNA
  modified_base 2: mod_base = OTHER; note = Guanosine phosphorothiorate
  modified_base 4: mod_base = OTHER; note = Uridine phosphorothiorate
  modified_base 5: mod_base = OTHER; note = 2'-fluorocytosine
  modified_base 10: mod_base = OTHER; note = Guanosine phosphorothiorate
  modified_base 11: mod_base = OTHER; note = 2'-fluorocytosine
  modified_base 12: mod_base = OTHER; note = 2'-Omethylguanosine
  modified_base 13: mod_base = OTHER; note = 2'-Omethylcytosine
  modified_base 15: mod_base = OTHER; note = Adenosine phosphorothiorate
  modified_base 19: mod_base = OTHER; note = Adenosine phosphorothiorate
  modified_base 20: mod_base = OTHER; note = Uridine phosphorothiorate
  modified_base 22: mod_base = OTHER; note = 2'-Omethylguanosine
  modified_base 24: mod_base = OTHER; note = Guanosine phosphorothiorate
  modified_base 25: mod_base = OTHER; note = Cytosine phosphorothiorate
  modified_base 31: mod_base = OTHER; note = 2'-fluoroadenosine
  modified_base 34: mod_base = OTHER; note = Uridine phosphorothiorate
  modified_base 38: mod_base = OTHER; note = 2'-Omethyladenosine
  modified_base 39: mod_base = OTHER; note = 2'-Omethyluridine
  modified_base 41: mod_base = OTHER; note = 2'-Omethylcytosine
  modified_base 42: mod_base = OTHER; note = Adenosine phosphorothiorate
  modified_base 43: mod_base = OTHER; note = 2'-fluoroadenosine
  modified_base 44: mod_base = OTHER; note = 2'-Omethyladenosine phosphorothiorate
  modified_base 45: mod_base = OTHER; note = 2'-Omethylguanosine
  modified_base 47: mod_base = OTHER; note = 2'-fluorouridine
  modified_base 49: mod_base = OTHER; note = 2'-Omethylcytosine
  modified_base 50: mod_base = OTHER; note = 2'-Omethylcytosine
  modified_base 53: mod_base = OTHER; note = 2'-Omethylguanosine
  modified_base 54: mod_base = OTHER; note = 2'-fluorouridine
  modified_base 56: mod_base = OTHER; note = 2'-fluorocytosine
  modified_base 59: mod_base = OTHER; note = 2'-Omethylguanosine
  modified_base 62: mod_base = OTHER; note = 2'-fluorocytosine
  modified_base 65: mod_base = OTHER; note = Guanosine phosphorothiorate
  modified_base 66: mod_base = OTHER; note = 2'-Omethylcytosine
  modified_base 68: mod_base = OTHER; note = Guanosine phosphorothiorate
  modified_base 69: mod_base = OTHER; note = 2'-Omethyladenosine
  modified_base 71: mod_base = OTHER; note = 2'-Omethyluridine phosphorothiorate
  modified_base 72: mod_base = OTHER; note = 2'-fluorocytosine phosphorothiorate
  modified_base 75: mod_base = OTHER; note = 2'-Omethylcytosine
  modified_base 76: mod_base = OTHER; note = 2'-fluoroadenosine

SEQ ID NO: 6134 - RNA, 85 nt, synthetic construct; identical to SEQ ID NO: 3288
  source 1..85: mol_type = other RNA
  modified_base 1: mod_base = OTHER; note = 2'-Omethylcytosine
  modified_base 8: mod_base = OTHER; note = Guanosine phosphorothiorate
  modified_base 22: mod_base = OTHER; note = 2'-fluoroguanosine phosphorothiorate
  modified_base 25: mod_base = OTHER; note = 2'-Omethylguanosine phosphorothiorate
  modified_base 26: mod_base = OTHER; note = 2'-fluorouridine
  modified_base 28: mod_base = OTHER; note = 2'-fluoroguanosine
  modified_base 29: mod_base = OTHER; note = 2'-fluoroguanosine
  modified_base 33: mod_base = OTHER; note = 2'-fluorouridine phosphorothiorate
  modified_base 34: mod_base = OTHER; note = Cytosine phosphorothiorate
  modified_base 42: mod_base = OTHER; note = Adenosine phosphorothiorate
  modified_base 54: mod_base = OTHER; note = 2'-Omethylcytosine
  modified_base 56: mod_base = OTHER; note = 2'-Omethylguanosine
  modified_base 58: mod_base = OTHER; note = 2'-Omethylguanosine
  modified_base 73: mod_base = OTHER; note = 2'-fluoroadenosine
  modified_base 76: mod_base = OTHER; note = 2'-fluorocytosine
  modified_base 84: mod_base = OTHER; note = 2'-Omethylcytosine

SEQ ID NO: 6135 - RNA, 74 nt, synthetic construct; identical to SEQ ID NO: 3293
  source 1..74: mol_type = other RNA
  modified_base 1: mod_base = OTHER; note = 2'-fluoroadenosine
  modified_base 2: mod_base = OTHER; note = Cytosine phosphorothiorate
  modified_base 3: mod_base = OTHER; note = Cytosine phosphorothiorate
  modified_base 4: mod_base = OTHER; note = Uridine phosphorothiorate
  modified_base 6: mod_base = OTHER; note = Guanosine phosphorothiorate
  modified_base 8: mod_base = OTHER; note = Guanosine phosphorothiorate
  modified_base 10: mod_base = OTHER; note = Cytosine phosphorothiorate
  modified_base 11: mod_base = OTHER; note = 2'-fluoroguanosine
  modified_base 24: mod_base = OTHER; note = 2'-fluoroguanosine
  modified_base 35: mod_base = OTHER; note = Guanosine phosphorothiorate
  modified_base 36: mod_base = OTHER; note = 2'-fluoroadenosine phosphorothiorate
  modified_base 42: mod_base = OTHER; note = Adenosine phosphorothiorate
  modified_base 43: mod_base = OTHER; note = 2'-fluoroguanosine
  modified_base 46: mod_base = OTHER; note = 2'-fluorouridine
  modified_base 48: mod_base = OTHER; note = Cytosine phosphorothiorate
  modified_base 51: mod_base = OTHER; note = 2'-fluoroguanosine
  modified_base 62: mod_base = OTHER; note = 2'-fluoroguanosine
  modified_base 73: mod_base = OTHER; note = Cytosine phosphorothiorate
  modified_base 74: mod_base = OTHER; note = 2'-Omethyladenosine

SEQ ID NO: 6136 - RNA, 76 nt, synthetic construct; identical to SEQ ID NO: 625
  source 1..76: mol_type = other RNA
  modified_base 1: mod_base = OTHER; note = 2'-Omethylguanosine phosphorothiorate
  modified_base 2: mod_base = OTHER; note = 2'-Omethylguanosine
  modified_base 3: mod_base = OTHER; note = 2'-Omethylcytosine
  modified_base 10: mod_base = OTHER; note = 2'-Omethylguanosine
  modified_base 11: mod_base = OTHER; note = 2'-Omethylcytosine
  modified_base 12: mod_base = OTHER; note = 2'-Omethylguanosine
  modified_base 13: mod_base = OTHER; note = 2'-Omethylcytosine
  modified_base 14: mod_base = OTHER; note = 2'-Omethyladenosine
  modified_base 15: mod_base = OTHER; note = 2'-fluoroadenosine
  modified_base 16: mod_base = OTHER; note = 2'-Omethyluridine
  modified_base 17: mod_base = OTHER; note = 2'-Omethylguanosine
  modified_base 18: mod_base = OTHER; note = 2'-Omethylguanosine
  modified_base 19: mod_base = OTHER; note = 2'-fluoroadenosine
  modified_base 20: mod_base = OTHER; note = 2'-Omethyluridine
  modified_base 22: mod_base = OTHER; note = 2'-Omethylguanosine
  modified_base 23: mod_base = OTHER; note = 2'-Omethylcytosine
  modified_base 24: mod_base = OTHER; note = 2'-Omethylguanosine
  modified_base 25: mod_base = OTHER; note = 2'-Omethylcytosine
  modified_base 38: mod_base = OTHER; note = Adenosine phosphorothiorate
  modified_base 39: mod_base = OTHER; note = Uridine phosphorothiorate
  modified_base 40: mod_base = OTHER; note = 2'-fluorouridine
  modified_base 43: mod_base = OTHER; note = 2'-Omethyladenosine
  modified_base 44: mod_base = OTHER; note = 2'-Omethyladenosine
  modified_base 45: mod_base = OTHER; note = 2'-Omethylguanosine
  modified_base 46: mod_base = OTHER; note = 2'-fluoroguanosine
  modified_base 48: mod_base = OTHER; note = 2'-fluorouridine
  modified_base 49: mod_base = OTHER; note = 2'-Omethylcytosine
  modified_base 50: mod_base = OTHER; note = 2'-Omethylcytosine
  modified_base 51: mod_base = OTHER; note = 2'-Omethylguanosine
  modified_base 52: mod_base = OTHER; note = 2'-Omethylguanosine
  modified_base 53: mod_base = OTHER; note = 2'-Omethylguanosine
  modified_base 54: mod_base = OTHER; note = 2'-Omethyluridine
  modified_base 61: mod_base = OTHER; note = 2'-Omethylcytosine
  modified_base 62: mod_base = OTHER; note = 2'-Omethylcytosine
  modified_base 63: mod_base = OTHER; note = 2'-fluorocytosine
  modified_base 64: mod_base = OTHER; note = 2'-Omethylguanosine
  modified_base 65: mod_base = OTHER; note = 2'-Omethylguanosine
  modified_base 66: mod_base = OTHER; note = 2'-Omethylcytosine
  modified_base 67: mod_base = OTHER; note = 2'-Omethylguanosine
  modified_base 68: mod_base = OTHER; note = 2'-Omethylguanosine
  modified_base 69: mod_base = OTHER; note = 2'-Omethyladenosine

SEQ ID NO: 6137 - RNA, 85 nt, synthetic construct; identical to SEQ ID NO: 3310
  source 1..85: mol_type = other RNA
  modified_base 1: mod_base = OTHER; note = 2'-Omethylcytosine phosphorothiorate
  modified_base 11: mod_base = OTHER; note = Cytosine phosphorothiorate
  modified_base 26: mod_base = OTHER; note = 2'-fluorouridine
  modified_base 30: mod_base = OTHER; note = 2'-fluoroadenosine
  modified_base 36: mod_base = OTHER; note = Guanosine phosphorothiorate
  modified_base 44: mod_base = OTHER; note = 2'-Omethylguanosine
  modified_base 50: mod_base = OTHER; note = 2'-Omethyladenosine
  modified_base 55: mod_base = OTHER; note = 2'-Omethylcytosine
  modified_base 58: mod_base = OTHER; note = Guanosine phosphorothiorate
  modified_base 64: mod_base = OTHER; note = Uridine phosphorothiorate
  modified_base 84: mod_base = OTHER; note = 2'-fluorocytosine phosphorothiorate

SEQ ID NO: 6138 - RNA, 76 nt, synthetic construct; identical to SEQ ID NO: 625
  source 1..76: mol_type = other RNA
  modified_base 44: mod_base = OTHER; note = 2'-Omethyladenosine
  modified_base 45: mod_base = OTHER; note = 2'-Omethylguanosine
  modified_base 46: mod_base = OTHER; note = 2'-fluoroguanosine

SEQ ID NO: 6139 - RNA, 76 nt, synthetic construct; identical to SEQ ID NO: 3342
  source 1..76: mol_type = other RNA
  modified_base 1: mod_base = OTHER; note = 2'-Omethylguanosine phosphorothiorate
  modified_base 2: mod_base = OTHER; note = 2'-Omethylguanosine
  modified_base 3: mod_base = OTHER; note = 2'-Omethylcytosine
  modified_base 4: mod_base = OTHER; note = 2'-Omethyluridine
  modified_base 5: mod_base = OTHER; note = 2'-Omethylcytosine
  modified_base 6: mod_base = OTHER; note = 2'-Omethylcytosine
  modified_base 49: mod_base = OTHER; note = 2'-Omethylcytosine
  modified_base 50: mod_base = OTHER; note = 2'-Omethylcytosine
  modified_base 51: mod_base = OTHER; note = 2'-Omethylguanosine
  modified_base 52: mod_base = OTHER; note = 2'-Omethylguanosine
  modified_base 53: mod_base = OTHER; note = 2'-Omethylguanosine
  modified_base 61: mod_base = OTHER; note = 2'-Omethylcytosine
  modified_base 62: mod_base = OTHER; note = 2'-Omethylcytosine
  modified_base 63: mod_base = OTHER; note = 2'-fluorocytosine
  modified_base 64: mod_base = OTHER; note = 2'-Omethylguanosine
  modified_base 65: mod_base = OTHER; note = 2'-Omethylguanosine
  modified_base 66: mod_base = OTHER; note = 2'-Omethylcytosine
  modified_base 67: mod_base = OTHER; note = 2'-Omethylguanosine
  modified_base 68: mod_base = OTHER; note = 2'-Omethylguanosine
  modified_base 69: mod_base = OTHER; note = 2'-Omethyladenosine
  modified_base 71: mod_base = OTHER; note = 2'-Omethyluridine
  modified_base 72: mod_base = OTHER; note = 2'-Omethylcytosine

SEQ ID NO: 6140 - RNA, 76 nt, synthetic construct; identical to SEQ ID NO: 625
  source 1..76: mol_type = other RNA
  modified_base 1: mod_base = OTHER; note = Guanosine phosphorothiorate
  modified_base 2: mod_base = OTHER; note = 2'-Omethylguanosine
  modified_base 6: mod_base = OTHER; note = 2'-fluorocytosine
  modified_base 7: mod_base = OTHER; note = Guanosine phosphorothiorate
  modified_base 8: mod_base = OTHER; note = Uridine phosphorothiorate
  modified_base 10: mod_base = OTHER; note = Guanosine phosphorothiorate
  modified_base 11: mod_base = OTHER; note = 2'-Omethylcytosine
  modified_base 13: mod_base = OTHER; note = Cytosine phosphorothiorate
  modified_base 14: mod_base = OTHER; note = 2'-fluoroadenosine
  modified_base 15: mod_base = OTHER; note = 2'-fluoroadenosine
  modified_base 16: mod_base = OTHER; note = Uridine phosphorothiorate
  modified_base 17: mod_base = OTHER; note = 2'-Omethylguanosine
  modified_base 18: mod_base = OTHER; note = 2'-fluoroguanosine phosphorothiorate
  modified_base 25: mod_base = OTHER; note = 2'-Omethylcytosine
  modified_base 27: mod_base = OTHER; note = 2'-Omethyluridine phosphorothiorate
  modified_base 30: mod_base = OTHER; note = 2'-fluoroguanosine
  modified_base 32: mod_base = OTHER; note = 2'-fluorocytosine
  modified_base 34: mod_base = OTHER; note = 2'-Omethyluridine phosphorothiorate
  modified_base 38: mod_base = OTHER; note = 2'-Omethyladenosine
  modified_base 43: mod_base = OTHER; note = 2'-fluoroadenosine
  modified_base 44: mod_base = OTHER; note = 2'-Omethyladenosine
  modified_base 47: mod_base = OTHER; note = 2'-Omethyluridine
  modified_base 48: mod_base = OTHER; note = 2'-fluorouridine
  modified_base 50: mod_base = OTHER; note = 2'-fluorocytosine
  modified_base 52: mod_base = OTHER; note = Guanosine phosphorothiorate
  modified_base 53: mod_base = OTHER; note = 2'-fluoroguanosine phosphorothiorate
  modified_base 54: mod_base = OTHER; note = Uridine phosphorothiorate
  modified_base 58: mod_base = OTHER; note = 2'-fluoroadenosine
  modified_base 59: mod_base = OTHER; note = 2'-fluoroguanosine
  modified_base 62: mod_base = OTHER; note = Cytosine phosphorothiorate
  modified_base 63: mod_base = OTHER; note = 2'-fluorocytosine
  modified_base 65: mod_base = OTHER; note = 2'-Omethylguanosine
  modified_base 67: mod_base = OTHER; note = Guanosine phosphorothiorate
  modified_base 68: mod_base = OTHER; note = 2'-Omethylguanosine
  modified_base 70: mod_base = OTHER; note = 2'-Omethylguanosine
  modified_base 72: mod_base = OTHER; note = 2'-Omethylcytosine
  modified_base 73: mod_base = OTHER; note = 2'-Omethylguanosine phosphorothiorate
  modified_base 74: mod_base = OTHER; note = 2'-fluorocytosine

SEQ ID NO: 6141 - RNA, 76 nt, synthetic construct; identical to SEQ ID NO: 625
  source 1..76: mol_type = other RNA
  modified_base 1: mod_base = OTHER; note = 2'-Omethylguanosine phosphorothiorate
  modified_base 2: mod_base = OTHER; note = 2'-Omethylguanosine
  modified_base 17: mod_base = OTHER; note = Guanosine phosphorothiorate
  modified_base 33: mod_base = OTHER; note = 2'-fluorouridine
  modified_base 35: mod_base = OTHER; note = Cytosine phosphorothiorate
  modified_base 37: mod_base = OTHER; note = Adenosine phosphorothiorate
  modified_base 38: mod_base = OTHER; note = Adenosine phosphorothiorate
  modified_base 52: mod_base = OTHER; note = 2'-Omethylguanosine
  modified_base 54: mod_base = OTHER; note = 2'-Omethyluridine
  modified_base 65: mod_base = OTHER; note = 2'-Omethylguanosine
  modified_base 73: mod_base = OTHER; note = 2'-Omethylguanosine
  modified_base 75: mod_base = OTHER; note = 2'-fluorocytosine phosphorothiorate

SEQ ID NO: 6142 - RNA, 76 nt, synthetic construct; identical to SEQ ID NO: 3318
  source 1..76: mol_type = other RNA
  modified_base 1: mod_base = OTHER; note = 2'-Omethylcytosine phosphorothiorate
  modified_base 2: mod_base = OTHER; note = 2'-Omethylcytosine phosphorothiorate
  modified_base 8: mod_base = OTHER; note = Uridine phosphorothiorate
  modified_base 14: mod_base = OTHER; note = Adenosine phosphorothiorate
  modified_base 19: mod_base = OTHER; note = Guanosine phosphorothiorate
  modified_base 22: mod_base = OTHER; note = Guanosine phosphorothiorate
  modified_base 25: mod_base = OTHER; note = Cytosine phosphorothiorate
  modified_base 27: mod_base = OTHER; note = Guanosine phosphorothiorate
  modified_base 41: mod_base = OTHER; note = 2'-Omethylcytosine phosphorothiorate
  modified_base 45: mod_base = OTHER; note = Guanosine phosphorothiorate
  modified_base 46: mod_base = OTHER; note = Guanosine phosphorothiorate
  modified_base 47: mod_base = OTHER; note = Uridine phosphorothiorate
  modified_base 48: mod_base = OTHER; note = 2'-fluorocytosine
  modified_base 49: mod_base = OTHER; note = Guanosine phosphorothiorate
  modified_base 71: mod_base = OTHER; note = Guanosine phosphorothiorate
  modified_base 73: mod_base = OTHER; note = 2'-Omethyladenosine phosphorothiorate

SEQ ID NO: 6143 - RNA, 73 nt, synthetic construct; identical to SEQ ID NO: 935
  source 1..73: mol_type = other RNA
  modified_base 1: mod_base = OTHER; note = 2'-Omethylguanosine phosphorothiorate
  modified_base 2: mod_base = OTHER; note = 2'-Omethylguanosine phosphorothiorate
  modified_base 43: mod_base = OTHER; note = Adenosine phosphorothiorate
  modified_base 55: mod_base = OTHER; note = Uridine phosphorothiorate
  modified_base 72: mod_base = OTHER; note = 2'-Omethylcytosine

SEQ ID NO: 6144 - RNA, 76 nt, synthetic construct; identical to SEQ ID NO: 625
  source 1..76: mol_type = other RNA
  modified_base 1: mod_base = OTHER; note = 2'-Omethylguanosine
  modified_base 10: mod_base = OTHER; note = 2'-Omethylguanosine
  modified_base 13: mod_base = OTHER; note = 2'-Omethylcytosine
  modified_base 17: mod_base = OTHER; note = Guanosine phosphorothiorate
  modified_base 18: mod_base = OTHER; note = 2'-Omethylguanosine
  modified_base 19: mod_base = OTHER; note = 2'-Omethyladenosine phosphorothiorate
  modified_base 20: mod_base = OTHER; note = 2'-Omethyluridine
  modified_base 25: mod_base = OTHER; note = 2'-Omethylcytosine
  modified_base 29: mod_base = OTHER; note = 2'-Omethylguanosine
  modified_base 33: mod_base = OTHER; note = 2'-fluorouridine
  modified_base 35: mod_base = OTHER; note = Cytosine phosphorothiorate
  modified_base 37: mod_base = OTHER; note = Adenosine phosphorothiorate
  modified_base 38: mod_base = OTHER; note = Adenosine phosphorothiorate
  modified_base 43: mod_base = OTHER; note = 2'-Omethyladenosine
  modified_base 44: mod_base = OTHER; note = 2'-fluoroadenosine
  modified_base 46: mod_base = OTHER; note = Guanosine phosphorothiorate
  modified_base 50: mod_base = OTHER; note = 2'-Omethylcytosine
  modified_base 52: mod_base = OTHER; note = 2'-Omethylguanosine
  modified_base 54: mod_base = OTHER; note = Uridine phosphorothiorate
  modified_base 55: mod_base = OTHER; note = Uridine phosphorothiorate
  modified_base 56: mod_base = OTHER; note = 2'-Omethylcytosine
  modified_base 57: mod_base = OTHER; note = Guanosine phosphorothiorate
  modified_base 62: mod_base = OTHER; note = 2'-Omethylcytosine
  modified_base 63: mod_base = OTHER; note = 2'-fluorocytosine
  modified_base 65: mod_base = OTHER; note = 2'-Omethylguanosine
  modified_base 71: mod_base = OTHER; note = 2'-Omethyluridine
  modified_base 73: mod_base = OTHER; note = 2'-Omethylguanosine

SEQ ID NO: 6145 - DNA, 73 bp, synthetic construct; identical to SEQ ID NO: 3380
  source 1..73: mol_type = other DNA
  modified_base 1: mod_base = OTHER; note = 2'-Omethylguanosine phosphorothiorate
  modified_base 2: mod_base = OTHER; note = 2'-Omethylguanosine
  modified_base 12: mod_base = OTHER; note = Guanosine phosphorothiorate
  modified_base 13: mod_base = OTHER; note = 2'-fluorocytosine
  modified_base 25: mod_base = OTHER; note = Cytosine phosphorothiorate
  modified_base 44: mod_base = OTHER; note = Adenosine phosphorothiorate
  modified_base 45: mod_base = OTHER; note = 2'-O-(2-Methoxyethyl) guanosine
  modified_base 51: mod_base = OTHER; note = Guanosine phosphorothiorate
  modified_base 72: mod_base = OTHER; note = 2'-Omethylcytosine
  misc_feature 1..51: note = RNA
  misc_feature 52: note = DNA
  misc_feature 53..73: note = RNA

SEQ ID NO: 6146 - RNA, 76 nt, synthetic construct; identical to SEQ ID NO: 625
  source 1..76: mol_type = other RNA
  modified_base 1: mod_base = OTHER; note = 2'-Omethylguanosine phosphorothiorate
  modified_base 2: mod_base = OTHER; note = 2'-Omethylguanosine
  modified_base 3: mod_base = OTHER; note = 2'-Omethylcytosine
  modified_base 4: mod_base = OTHER; note = 2'-Omethyluridine
  modified_base 5: mod_base = OTHER; note = 2'-Omethylcytosine
  modified_base 6: mod_base = OTHER; note = 2'-Omethylcytosine
  modified_base 10: mod_base = OTHER; note = 2'-Omethylguanosine
  modified_base 11: mod_base = OTHER; note = 2'-Omethylcytosine
  modified_base 12: mod_base = OTHER; note = 2'-Omethylguanosine
  modified_base 13: mod_base = OTHER; note = 2'-Omethylcytosine
  modified_base 14: mod_base = OTHER; note = 2'-Omethyladenosine
  modified_base 16: mod_base = OTHER; note = 2'-Omethyluridine
  modified_base 17: mod_base = OTHER; note = 2'-Omethylguanosine
  modified_base 18: mod_base = OTHER; note = 2'-Omethylguanosine
  modified_base 19: mod_base = OTHER; note = 2'-Omethyladenosine
  modified_base 22: mod_base = OTHER; note = 2'-Omethylguanosine phosphorothiorate
  modified_base 23: mod_base = OTHER; note = 2'-Omethylcytosine
  modified_base 24: mod_base = OTHER; note = 2'-Omethylguanosine
  modified_base 25: mod_base = OTHER; note = 2'-Omethylcytosine
  modified_base 28: mod_base = OTHER; note = 2'-Omethyluridine
  modified_base 30: mod_base = OTHER; note = 2'-Omethylguanosine
  modified_base 33: mod_base = OTHER; note = 2'-fluorouridine
  modified_base 35: mod_base = OTHER; note = Cytosine phosphorothiorate
  modified_base 37: mod_base = OTHER; note = Adenosine phosphorothiorate
  modified_base 38: mod_base = OTHER; note = Adenosine phosphorothiorate
  modified_base 41: mod_base = OTHER; note = 2'-Omethylcytosine
  modified_base 43: mod_base = OTHER; note = 2'-Omethyladenosine
  modified_base 44: mod_base = OTHER; note = 2'-fluoroadenosine
  modified_base 49: mod_base = OTHER; note = 2'-Omethylcytosine
  modified_base 50: mod_base = OTHER; note = 2'-Omethylcytosine
  modified_base 52: mod_base = OTHER; note = 2'-Omethylguanosine
  modified_base 53: mod_base = OTHER; note = 2'-fluoroguanosine
  modified_base 54: mod_base = OTHER; note = 2'-Omethyluridine
  modified_base 55: mod_base = OTHER; note = Uridine phosphorothiorate
  modified_base 56: mod_base = OTHER; note = 2'-Omethylcytosine
  modified_base 57: mod_base = OTHER; note = 2'-Omethylguanosine
  modified_base 59: mod_base = OTHER; note = 2'-Omethylguanosine
  modified_base 61: mod_base = OTHER; note = 2'-Omethylcytosine
  modified_base 62: mod_base = OTHER; note = 2'-Omethylcytosine
  modified_base 63: mod_base = OTHER; note = 2'-fluorocytosine
  modified_base 64: mod_base = OTHER; note = 2'-Omethylguanosine
  modified_base 65: mod_base = OTHER; note = 2'-Omethylguanosine
  modified_base 66: mod_base = OTHER; note = 2'-Omethylcytosine
  modified_base 67: mod_base = OTHER; note = 2'-Omethylguanosine
  modified_base 68: mod_base = OTHER; note = 2'-Omethylguanosine
  modified_base 72: mod_base = OTHER; note = 2'-Omethylcytosine
  modified_base 73: mod_base = OTHER; note = 2'-Omethylguanosine
  modified_base 74: mod_base = OTHER; note = 2'-fluorocytosine phosphorothiorate
  modified_base 75: mod_base = OTHER; note = 2'-fluorocytosine phosphorothiorate

SEQ ID NO: 6147 - RNA, 76 nt, synthetic construct; identical to SEQ ID NO: 625
  source 1..76: mol_type = other RNA
  modified_base 1: mod_base = OTHER; note = 2'-fluoroguanosine
  modified_base 2: mod_base = OTHER; note = 2'-Omethylguanosine
  modified_base 3: mod_base = OTHER; note = 2'-fluorocytosine
  modified_base 5: mod_base = OTHER; note = Cytosine phosphorothiorate
  modified_base 6: mod_base = OTHER; note = Cytosine phosphorothiorate
  modified_base 7: mod_base = OTHER; note = Guanosine phosphorothiorate
  modified_base 10: mod_base = OTHER; note = 2'-fluoroguanosine
  modified_base 11: mod_base = OTHER; note = 2'-Omethylcytosine
  modified_base 13: mod_base = OTHER; note = 2'-Omethylcytosine phosphorothiorate
  modified_base 14: mod_base = OTHER; note = 2'-Omethyladenosine phosphorothiorate
  modified_base 17: mod_base = OTHER; note = 2'-Omethylguanosine phosphorothiorate
  modified_base 18: mod_base = OTHER; note = 2'-Omethylguanosine
  modified_base 19: mod_base = OTHER; note = Adenosine phosphorothiorate
  modified_base 20: mod_base = OTHER; note = 2'-Omethyluridine
  modified_base 27: mod_base = OTHER; note = 2'-Omethyluridine
  modified_base 28: mod_base = OTHER; note = Uridine phosphorothiorate
  modified_base 29: mod_base = OTHER; note = 2'-fluoroguanosine
  modified_base 36: mod_base = OTHER; note = Adenosine phosphorothiorate
  modified_base 38: mod_base = OTHER; note = 2'-fluoroadenosine
  modified_base 40: mod_base = OTHER; note = 2'-fluorouridine
  modified_base 42: mod_base = OTHER; note = Adenosine phosphorothiorate
  modified_base 43: mod_base = OTHER; note = 2'-Omethyladenosine
  modified_base 44: mod_base = OTHER; note = 2'-fluoroadenosine
  modified_base 47: mod_base = OTHER; note = 2'-fluorouridine
  modified_base 49: mod_base = OTHER; note = 2'-fluorocytosine
  modified_base 52: mod_base = OTHER; note = 2'-fluoroguanosine
  modified_base 54: mod_base = OTHER; note = Uridine phosphorothiorate
  modified_base 57: mod_base = OTHER; note = 2'-Omethylguanosine
  modified_base 59: mod_base = OTHER; note = 2'-Omethylguanosine
  modified_base 60: mod_base = OTHER; note = 2'-Omethyluridine
  modified_base 66: mod_base = OTHER; note = Cytosine phosphorothiorate
  modified_base 67: mod_base = OTHER; note = Guanosine phosphorothiorate
  modified_base 69: mod_base = OTHER; note = Adenosine phosphorothiorate
  modified_base 70: mod_base = OTHER; note = 2'-Omethylguanosine
  modified_base 75: mod_base = OTHER; note = 2'-fluorocytosine
  modified_base 76: mod_base = OTHER; note = 2'-Omethyladenosine

SEQ ID NO: 6148 - RNA, 76 nt, synthetic construct; identical to SEQ ID NO: 3318
  source 1..76: mol_type = other RNA
  modified_base 1: mod_base = OTHER; note = 2'-Omethylcytosine phosphorothiorate
  modified_base 2: mod_base = OTHER; note = 2'-Omethylcytosine phosphorothiorate
  modified_base 3: mod_base = OTHER; note = 2'-Omethyluridine
  modified_base 4: mod_base = OTHER; note = 2'-Omethyluridine
  modified_base 5: mod_base = OTHER; note = 2'-Omethylcytosine
  modified_base 6: mod_base = OTHER; note = 2'-Omethylguanosine
  modified_base 16: mod_base = OTHER; note = 2'-Omethyluridine
  modified_base 18: mod_base = OTHER; note = 2'-Omethylguanosine
  modified_base 19: mod_base = OTHER; note = 2'-Omethylguanosine
  modified_base 33: mod_base = OTHER; note = 2'-fluorouridine
  modified_base 35: mod_base = OTHER; note = Uridine phosphorothiorate
  modified_base 37: mod_base = OTHER; note = Guanosine phosphorothiorate
  modified_base 38: mod_base = OTHER; note = Adenosine phosphorothiorate
  modified_base 44: mod_base = OTHER; note = 2'-Omethyladenosine
  modified_base 45: mod_base = OTHER; note = 2'-Omethylguanosine
  modified_base 46: mod_base = OTHER; note = 2'-fluoroguanosine
  modified_base 47: mod_base = OTHER; note = 2'-fluorouridine
  modified_base 48: mod_base = OTHER; note = 2'-fluorocytosine
  modified_base 49: mod_base = OTHER; note = 2'-Omethylguanosine
  modified_base 50: mod_base = OTHER; note = 2'-Omethylcytosine
  modified_base 51: mod_base = OTHER; note = 2'-Omethyluridine
  modified_base 52: mod_base = OTHER; note = 2'-Omethylguanosine
  modified_base 53: mod_base = OTHER; note = 2'-Omethylguanosine
  modified_base 54: mod_base = OTHER; note = 2'-Omethyluridine
  modified_base 56: mod_base = OTHER; note = 2'-Omethylcytosine
  modified_base 59: mod_base = OTHER; note = 2'-Omethyladenosine
  modified_base 61: mod_base = OTHER; note = 2'-Omethylcytosine
  modified_base 62: mod_base = OTHER; note = 2'-Omethylcytosine
  modified_base 63: mod_base = OTHER; note = 2'-fluoroguanosine
  modified_base 64: mod_base = OTHER; note = 2'-Omethylguanosine
  modified_base 65: mod_base = OTHER; note = 2'-Omethylcytosine
  modified_base 66: mod_base = OTHER; note = 2'-Omethyluridine
  modified_base 67: mod_base = OTHER; note = 2'-Omethylcytosine
  modified_base 68: mod_base = OTHER; note = 2'-Omethylguanosine
  modified_base 73: mod_base = OTHER; note = 2'-Omethyladenosine

SEQ ID NO: 6149 - RNA, 76 nt, synthetic construct; identical to SEQ ID NO: 3295
  source 1..76: mol_type = other RNA
  modified_base 1: mod_base = OTHER; note = 2'-fluorocytosine
  modified_base 2: mod_base = OTHER; note = 2'-Omethylcytosine
  modified_base 3: mod_base = OTHER; note = 2'-fluorouridine phosphorothiorate
  modified_base 13: mod_base = OTHER; note = 2'-Omethylcytosine
  modified_base 17: mod_base = OTHER; note = 2'-Omethyluridine phosphorothiorate
  modified_base 59: mod_base = OTHER; note = Adenosine phosphorothiorate
  modified_base 68: mod_base = OTHER; note = 2'-fluoroguanosine
  modified_base 75: mod_base = OTHER; note = Cytosine phosphorothiorate

SEQ ID NO: 6150 - RNA, 74 nt, synthetic construct; identical to SEQ ID NO: 766
  source 1..74: mol_type = other RNA
  modified_base 1: mod_base = OTHER; note = 2'-Omethylguanosine phosphorothiorate
  modified_base 2: mod_base = OTHER; note = 2'-Omethylguanosine phosphorothiorate
  modified_base 3: mod_base = OTHER; note = 2'-Omethylcytosine
  modified_base 4: mod_base = OTHER; note = 2'-Omethyluridine
  modified_base 5: mod_base = OTHER; note = 2'-Omethylcytosine
  modified_base 6: mod_base = OTHER; note = 2'-Omethylcytosine
  modified_base 14: mod_base = OTHER; note = 2'-Omethyladenosine
  modified_base 15: mod_base = OTHER; note = 2'-Omethyladenosine
  modified_base 16: mod_base = OTHER; note = 2'-Omethyluridine
  modified_base 17: mod_base = OTHER; note = 2'-Omethylguanosine
  modified_base 18: mod_base = OTHER; note = 2'-Omethylguanosine
  modified_base 20: mod_base = OTHER; note = 2'-Omethyluridine
  modified_base 22: mod_base = OTHER; note = 2'-Omethylguanosine
  modified_base 23: mod_base = OTHER; note = 2'-Omethylcytosine
  modified_base 24: mod_base = OTHER; note = 2'-Omethylguanosine
  modified_base 25: mod_base = OTHER; note = 2'-Omethylcytosine
  modified_base 33: mod_base = OTHER; note = 2'-fluorouridine
  modified_base 35: mod_base = OTHER; note = Cytosine phosphorothiorate
  modified_base 37: mod_base = OTHER; note = Adenosine phosphorothiorate
  modified_base 38: mod_base = OTHER; note = Adenosine phosphorothiorate
  modified_base 41: mod_base = OTHER; note = 2'-Omethylcytosine
  modified_base 42: mod_base = OTHER; note = 2'-Omethyladenosine
  modified_base 43: mod_base = OTHER; note = 2'-Omethyladenosine
  modified_base 44: mod_base = OTHER; note = 2'-Omethyladenosine
  modified_base 49: mod_base = OTHER; note = 2'-Omethylcytosine
  modified_base 50: mod_base = OTHER; note = 2'-Omethylcytosine
  modified_base 52: mod_base = OTHER; note = 2'-Omethylguanosine
  modified_base 54: mod_base = OTHER; note = 2'-Omethyluridine
  modified_base 55: mod_base = OTHER; note = Uridine phosphorothiorate
  modified_base 56: mod_base = OTHER; note = 2'-Omethylcytosine
  modified_base 57: mod_base = OTHER; note = 2'-fluoroguanosine
  modified_base 59: mod_base = OTHER; note = 2'-Omethylguanosine
  modified_base 61: mod_base = OTHER; note = 2'-Omethylcytosine
  modified_base 62: mod_base = OTHER; note = 2'-Omethylcytosine
  modified_base 63: mod_base = OTHER; note = 2'-fluorocytosine
  modified_base 64: mod_base = OTHER; note = 2'-Omethylguanosine
  modified_base 65: mod_base = OTHER; note = 2'-Omethylguanosine
  modified_base 73: mod_base = OTHER; note = 2'-Omethylguanosine

SEQ ID NO: 6151 - RNA, 76 nt, synthetic construct; identical to SEQ ID NO: 3295
  source 1..76: mol_type = other RNA
  modified_base 1: mod_base = OTHER; note = 2'-Omethylcytosine
  modified_base 2: mod_base = OTHER; note = 2'-Omethylcytosine phosphorothiorate
  modified_base 7: mod_base = OTHER; note = 2'-fluoroadenosine phosphorothiorate
  modified_base 17: mod_base = OTHER; note = 2'-Omethyluridine
  modified_base 23: mod_base = OTHER; note = Adenosine phosphorothiorate
  modified_base 24: mod_base = OTHER; note = 2'-fluoroguanosine
  modified_base 27: mod_base = OTHER; note = 2'-Omethylguanosine
  modified_base 38: mod_base = OTHER; note = 2'-fluoroadenosine
  modified_base 47: mod_base = OTHER; note = Uridine phosphorothiorate
  modified_base 48: mod_base = OTHER; note = 2'-fluorocytosine phosphorothiorate
  modified_base 49: mod_base = OTHER; note = 2'-fluoroguanosine phosphorothiorate
  modified_base 53: mod_base = OTHER; note = Guanosine phosphorothiorate
  modified_base 60: mod_base = OTHER; note = 2'-fluorouridine phosphorothiorate
  modified_base 72: mod_base = OTHER; note = Guanosine phosphorothiorate
  modified_base 74: mod_base = OTHER; note = 2'-Omethylcytosine phosphorothiorate
  modified_base 76: mod_base = OTHER; note = 2'-fluoroadenosine

SEQ ID NO: 6152 - RNA, 76 nt, synthetic construct; identical to SEQ ID NO: 625
  source 1..76: mol_type = other RNA
  modified_base 1: mod_base = OTHER; note = Guanosine phosphorothiorate
  modified_base 2: mod_base = OTHER; note = 2'-Omethylguanosine
  modified_base 4: mod_base = OTHER; note = 2'-Omethyluridine
  modified_base 7: mod_base = OTHER; note = Guanosine phosphorothiorate
  modified_base 8: mod_base = OTHER; note = Uridine phosphorothiorate
  modified_base 12: mod_base = OTHER; note = 2'-fluoroguanosine
  modified_base 13: mod_base = OTHER; note = 2'-fluorocytosine phosphorothiorate
  modified_base 14: mod_base = OTHER; note = 2'-fluoroadenosine
  modified_base 21: mod_base = OTHER; note = Adenosine phosphorothiorate
  modified_base 22: mod_base = OTHER; note = 2'-Omethylguanosine phosphorothiorate
  modified_base 23: mod_base = OTHER; note = 2'-fluorocytosine
  modified_base 24: mod_base = OTHER; note = 2'-Omethylguanosine
  modified_base 26: mod_base = OTHER; note = 2'-fluoroadenosine
  modified_base 28: mod_base = OTHER; note = 2'-fluorouridine phosphorothiorate
  modified_base 29: mod_base = OTHER; note = 2'-fluoroguanosine
  modified_base 30: mod_base = OTHER; note = 2'-Omethylguanosine phosphorothiorate
  modified_base 31: mod_base = OTHER; note = 2'-Omethyladenosine
  modified_base 32: mod_base = OTHER; note = 2'-fluorocytosine
  modified_base 40: mod_base = OTHER; note = 2'-fluorouridine
  modified_base 49: mod_base = OTHER; note = 2'-Omethylcytosine
  modified_base 50: mod_base = OTHER; note = Cytosine phosphorothiorate
  modified_base 51: mod_base = OTHER; note = 2'-Omethylguanosine
  modified_base 52: mod_base = OTHER; note = 2'-Omethylguanosine phosphorothiorate
  modified_base 53: mod_base = OTHER; note = 2'-fluoroguanosine
  modified_base 59: mod_base = OTHER; note = 2'-fluoroguanosine
  modified_base 62: mod_base = OTHER; note = 2'-fluorocytosine
  modified_base 64: mod_base = OTHER; note = 2'-fluoroguanosine phosphorothiorate
  modified_base 65: mod_base = OTHER; note = 2'-fluoroguanosine
  modified_base 66: mod_base = OTHER; note = 2'-Omethylcytosine
  modified_base 67: mod_base = OTHER; note = Guanosine phosphorothiorate
  modified_base 68: mod_base = OTHER; note = 2'-Omethylguanosine
  modified_base 69: mod_base = OTHER; note = 2'-Omethyladenosine
  modified_base 71: mod_base = OTHER; note = Uridine phosphorothiorate
  modified_base 73: mod_base = OTHER; note = 2'-fluoroguanosine
  modified_base 74: mod_base = OTHER; note = 2'-fluorocytosine phosphorothiorate

SEQ ID NO: 6153 - RNA, 85 nt, synthetic construct; identical to SEQ ID NO: 3301
  source 1..85: mol_type = other RNA
  modified_base 1: mod_base = OTHER; note = 2'-Omethylguanosine phosphorothiorate
  modified_base 2: mod_base = OTHER; note = 2'-Omethylcytosine phosphorothiorate
  modified_base 4: mod_base = OTHER; note = 2'-fluoroguanosine phosphorothiorate
  modified_base 18: mod_base = OTHER; note = 2'-Omethylguanosine phosphorothiorate
  modified_base 21: mod_base = OTHER; note = Adenosine phosphorothiorate
  modified_base 24: mod_base = OTHER; note = 2'-Omethylguanosine phosphorothiorate
  modified_base 27: mod_base = OTHER; note = 2'-Omethyluridine phosphorothiorate
  modified_base 38: mod_base = OTHER; note = 2'-Omethyladenosine
  modified_base 46: mod_base = OTHER; note = 2'-Omethylguanosine
  modified_base 47: mod_base = OTHER; note = Guanosine phosphorothiorate
  modified_base 48: mod_base = OTHER; note = Guanosine phosphorothiorate
  modified_base 50: mod_base = OTHER; note = 2'-fluorocytosine
  modified_base 57: mod_base = OTHER; note = 2'-fluorocytosine
  modified_base 59: mod_base = OTHER; note = Cytosine phosphorothiorate
  modified_base 60: mod_base = OTHER; note = 2'-Omethyladenosine
  modified_base 61: mod_base = OTHER; note = 2'-fluoroguanosine
  modified_base 71: mod_base = OTHER; note = Cytosine phosphorothiorate
  modified_base 83: mod_base = OTHER; note = Cytosine phosphorothiorate

SEQ ID NO: 6154 - RNA, 86 nt, synthetic construct; identical to SEQ ID NO: 3290
  source 1..86: mol_type = other RNA
  modified_base 64: mod_base = OTHER; note = 2'-Omethyluridine

SEQ ID NO: 6155 - RNA, 76 nt, synthetic construct; identical to SEQ ID NO: 625
  source 1..76: mol_type = other RNA
  modified_base 1: mod_base = OTHER; note = 2'-Omethylguanosine phosphorothiorate
  modified_base 2: mod_base = OTHER; note = 2'-Omethylguanosine
  modified_base 33: mod_base = OTHER; note = 2'-fluorouridine
  modified_base 35: mod_base = OTHER; note = Cytosine phosphorothiorate
  modified_base 37: mod_base = OTHER; note = Adenosine phosphorothiorate
  modified_base 38: mod_base = OTHER; note = Adenosine phosphorothiorate
  modified_base 52: mod_base = OTHER; note = 2'-fluoroguanosine
  modified_base 54: mod_base = OTHER; note = 2'-Omethyluridine
  modified_base 73: mod_base = OTHER; note = 2'-Omethylguanosine
  modified_base 75: mod_base = OTHER; note = 2'-fluorocytosine phosphorothiorate

SEQ ID NO: 6156 - RNA, 76 nt, synthetic construct; identical to SEQ ID NO: 3289
  source 1..76: mol_type = other RNA
  modified_base 1: mod_base = OTHER; note = 2'-Omethylguanosine phosphorothiorate
  modified_base 2: mod_base = OTHER; note = 2'-Omethylcytosine
  modified_base 3: mod_base = OTHER; note = 2'-Omethylcytosine
  modified_base 4: mod_base = OTHER; note = 2'-Omethyluridine
  modified_base 5: mod_base = OTHER; note = 2'-Omethylguanosine
  modified_base 6: mod_base = OTHER; note = 2'-Omethylguanosine
  modified_base 44: mod_base = OTHER; note = 2'-Omethylguanosine
  modified_base 45: mod_base = OTHER; note = 2'-Omethylguanosine
  modified_base 46: mod_base = OTHER; note = 2'-fluoroguanosine
  modified_base 47: mod_base = OTHER; note = 2'-fluorouridine
  modified_base 48: mod_base = OTHER; note = 2'-fluorocytosine
  modified_base 49: mod_base = OTHER; note = 2'-Omethylcytosine
  modified_base 73: mod_base = OTHER; note = 2'-Omethylguanosine

SEQ ID NO: 6157 - RNA, 86 nt, synthetic construct; identical to SEQ ID NO: 3290
  source 1..86: mol_type = other RNA
  modified_base 37: mod_base = OTHER; note = 2'-Omethylguanosine

SEQ ID NO: 6158 - RNA, 76 nt, synthetic construct; identical to SEQ ID NO: 625
  source 1..76: mol_type = other RNA
  modified_base 1: mod_base = OTHER; note = 2'-Omethylguanosine phosphorothiorate
  modified_base 2: mod_base = OTHER; note = 2'-Omethylguanosine
  modified_base 3: mod_base = OTHER; note = 2'-Omethylcytosine
  modified_base 4: mod_base = OTHER; note = 2'-Omethyluridine
  modified_base 5: mod_base = OTHER; note = 2'-Omethylcytosine
  modified_base 6: mod_base = OTHER; note = 2'-Omethylcytosine
  modified_base 13: mod_base = OTHER; note = 2'-Omethylcytosine
  modified_base 14: mod_base = OTHER; note = 2'-Omethyladenosine
  modified_base 15: mod_base = OTHER; note = 2'-fluoroadenosine
  modified_base 16: mod_base = OTHER; note = 2'-Omethyluridine
  modified_base 17: mod_base = OTHER; note = 2'-Omethylguanosine
  modified_base 18: mod_base = OTHER; note = 2'-Omethylguanosine
  modified_base 19: mod_base = OTHER; note = 2'-fluoroadenosine
  modified_base 20: mod_base = OTHER; note = 2'-Omethyluridine
  modified_base 21: mod_base = OTHER; note = 2'-fluoroadenosine
  modified_base 23: mod_base = OTHER; note = 2'-Omethylcytosine
  modified_base 25: mod_base = OTHER; note = 2'-Omethylcytosine
  modified_base 29: mod_base = OTHER; note = 2'-Omethylguanosine
  modified_base 33: mod_base = OTHER; note = 2'-fluorouridine
  modified_base 35: mod_base = OTHER; note = Cytosine phosphorothiorate
  modified_base 37: mod_base = OTHER; note = Adenosine phosphorothiorate
  modified_base 38: mod_base = OTHER; note = Adenosine phosphorothiorate
  modified_base 41: mod_base = OTHER; note = 2'-fluorocytosine phosphorothiorate
  modified_base 43: mod_base = OTHER; note = 2'-Omethyladenosine
  modified_base 44: mod_base = OTHER; note = 2'-Omethyladenosine
  modified_base 45: mod_base = OTHER; note = 2'-Omethylguanosine
  modified_base 46: mod_base = OTHER; note = 2'-fluoroguanosine
  modified_base 48: mod_base = OTHER; note = 2'-fluorouridine
  modified_base 49: mod_base = OTHER; note = 2'-Omethylcytosine
  modified_base 50: mod_base = OTHER; note = 2'-Omethylcytosine
  modified_base 51: mod_base = OTHER; note = 2'-Omethylguanosine
  modified_base 52: mod_base = OTHER; note = 2'-fluoroguanosine
  modified_base 53: mod_base = OTHER; note = 2'-Omethylguanosine
  modified_base 54: mod_base = OTHER; note = Uridine phosphorothiorate
  modified_base 55: mod_base = OTHER; note = Uridine phosphorothiorate
  modified_base 56: mod_base = OTHER; note = 2'-Omethylcytosine
  modified_base 57: mod_base = OTHER; note = 2'-Omethylguanosine
  modified_base 59: mod_base = OTHER; note = 2'-Omethylguanosine
  modified_base 61: mod_base = OTHER; note = 2'-Omethylcytosine
  modified_base 62: mod_base = OTHER; note = 2'-Omethylcytosine
  modified_base 63: mod_base = OTHER; note = 2'-fluorocytosine
  modified_base 64: mod_base = OTHER; note = 2'-Omethylguanosine
  modified_base 65: mod_base = OTHER; note = 2'-Omethylguanosine
  modified_base 66: mod_base = OTHER; note = 2'-Omethylcytosine
  modified_base 67: mod_base = OTHER; note = 2'-Omethylguanosine
  modified_base 68: mod_base = OTHER; note = 2'-Omethylguanosine
  modified_base 69: mod_base = OTHER; note = 2'-Omethyladenosine
  modified_base 71: mod_base = OTHER; note = 2'-Omethyluridine
  modified_base 73: mod_base = OTHER; note = 2'-Omethylguanosine
  modified_base 75: mod_base = OTHER; note = 2'-fluorocytosine phosphorothiorate

SEQ ID NO: 6159 - RNA, 75 nt, synthetic construct; identical to SEQ ID NO: 3306
  source 1..75: mol_type = other RNA
  modified_base 1: mod_base = OTHER; note = 2'-Omethylguanosine
  modified_base 2: mod_base = OTHER; note = 2'-Omethyladenosine
  modified_base 3: mod_base = OTHER; note = 2'-Omethylcytosine
  modified_base 4: mod_base = OTHER; note = 2'-Omethylcytosine
  modified_base 5: mod_base = OTHER; note = 2'-Omethyluridine
  modified_base 6: mod_base = OTHER; note = 2'-Omethylcytosine
  modified_base 14: mod_base = OTHER; note = 2'-Omethyladenosine
  modified_base 17: mod_base = OTHER; note = 2'-Omethylguanosine
  modified_base 18: mod_base = OTHER; note = 2'-Omethylguanosine
  modified_base 21: mod_base = OTHER; note = 2'-Omethylguanosine
  modified_base 24: mod_base = OTHER; note = 2'-Omethylcytosine
  modified_base 26: mod_base = OTHER; note = 2'-Omethyluridine
  modified_base 32: mod_base = OTHER; note = 2'-fluorouridine
  modified_base 40: mod_base = OTHER; note = 2'-Omethyladenosine
  modified_base 43: mod_base = OTHER; note = 2'-Omethyladenosine
  modified_base 44: mod_base = OTHER; note = 2'-Omethylguanosine
  modified_base 45: mod_base = OTHER; note = 2'-fluoroguanosine
  modified_base 46: mod_base = OTHER; note = 2'-fluorouridine
  modified_base 47: mod_base = OTHER; note = 2'-fluorouridine
  modified_base 51: mod_base = OTHER; note = 2'-Omethyluridine
  modified_base 54: mod_base = OTHER; note = Uridine phosphorothiorate
  modified_base 72: mod_base = OTHER; note = 2'-Omethyladenosine

SEQ ID NO: 6160 - RNA, 76 nt, synthetic construct; identical to SEQ ID NO: 3318
  source 1..76: mol_type = other RNA
  modified_base 1: mod_base = OTHER; note = 2'-Omethylcytosine
  modified_base 20: mod_base = OTHER; note = 2'-fluorouridine
  modified_base 21: mod_base = OTHER; note = 2'-fluoroadenosine
  modified_base 22: mod_base = OTHER; note = 2'-Omethylguanosine
  modified_base 40: mod_base = OTHER; note = 2'-fluorocytosine
  modified_base 41: mod_base = OTHER; note = 2'-Omethylcytosine
  modified_base 42: mod_base = OTHER; note = 2'-Omethyluridine
  modified_base 43: mod_base = OTHER; note = 2'-Omethyluridine
  modified_base 73: mod_base = OTHER; note = 2'-Omethyladenosine

SEQ ID NO: 6161 - RNA, 75 nt, synthetic construct; identical to SEQ ID NO: 3306
  source 1..75: mol_type = other RNA
  modified_base 1: mod_base = OTHER; note = 2'-Omethylguanosine
  modified_base 2: mod_base = OTHER; note = 2'-Omethyladenosine
  modified_base 3: mod_base = OTHER; note = 2'-Omethylcytosine
  modified_base 4: mod_base = OTHER; note = 2'-Omethylcytosine
  modified_base 5: mod_base = OTHER; note = 2'-Omethyluridine
  modified_base 6: mod_base = OTHER; note = 2'-Omethylcytosine
  modified_base 13: mod_base = OTHER; note = 2'-Omethylcytosine
  modified_base 14: mod_base = OTHER; note = 2'-Omethyladenosine
  modified_base 15: mod_base = OTHER; note = 2'-Omethyladenosine
  modified_base 16: mod_base = OTHER; note = 2'-Omethylcytosine
  modified_base 17: mod_base = OTHER; note = 2'-Omethylguanosine
  modified_base 18: mod_base = OTHER; note = 2'-Omethylguanosine
  modified_base 19: mod_base = OTHER; note = Uridine phosphorothiorate
  modified_base 20: mod_base = OTHER; note = Adenosine phosphorothiorate
  modified_base 24: mod_base = OTHER; note = 2'-Omethylcytosine
  modified_base 32: mod_base = OTHER; note = 2'-fluorouridine
  modified_base 33: mod_base = OTHER; note = 2'-Omethylcytosine
  modified_base 34: mod_base = OTHER; note = Uridine phosphorothiorate
  modified_base 36: mod_base = OTHER; note = Guanosine phosphorothiorate
  modified_base 37: mod_base = OTHER; note = Adenosine phosphorothiorate
  modified_base 40: mod_base = OTHER; note = 2'-fluoroadenosine
  modified_base 41: mod_base = OTHER; note = 2'-Omethylguanosine
  modified_base 42: mod_base = OTHER; note = 2'-Omethyladenosine
  modified_base 43: mod_base = OTHER; note = 2'-fluoroadenosine
  modified_base 48: mod_base = OTHER; note = 2'-Omethylguanosine
  modified_base 49: mod_base = OTHER; note = 2'-Omethylcytosine
  modified_base 50: mod_base = OTHER; note = 2'-Omethylguanosine
  modified_base 51: mod_base = OTHER; note = 2'-Omethyluridine
  modified_base 52: mod_base = OTHER; note = 2'-Omethylguanosine
  modified_base 53: mod_base = OTHER; note = Uridine phosphorothiorate
  modified_base 54: mod_base = OTHER; note = Uridine phosphorothiorate
  modified_base 60: mod_base = OTHER; note = 2'-Omethylcytosine
  modified_base 64: mod_base = OTHER; note = 2'-Omethyluridine
  modified_base 72: mod_base = OTHER; note = 2'-Omethyladenosine

SEQ ID NO: 6162 - RNA, 76 nt, synthetic construct; identical to SEQ ID NO: 625
  source 1..76: mol_type = other RNA
  modified_base 2: mod_base = OTHER; note = Guanosine phosphorothiorate
  modified_base 4: mod_base = OTHER; note = 2'-fluorouridine
  modified_base 6: mod_base = OTHER; note = Cytosine phosphorothiorate
  modified_base 8: mod_base = OTHER; note = Uridine phosphorothiorate
  modified_base 10: mod_base = OTHER; note = 2'-fluoroguanosine
  modified_base 12: mod_base = OTHER; note = 2'-Omethylguanosine
  modified_base 14: mod_base = OTHER; note = Adenosine phosphorothiorate
  modified_base 15: mod_base = OTHER; note = 2'-Omethyladenosine phosphorothiorate
  modified_base 16: mod_base = OTHER; note = 2'-Omethyluridine phosphorothiorate
  modified_base 17: mod_base = OTHER; note = 2'-Omethylguanosine
  modified_base 27: mod_base = OTHER; note = 2'-fluorouridine
  modified_base 28: mod_base = OTHER; note = 2'-Omethyluridine phosphorothiorate
  modified_base 31: mod_base = OTHER; note = 2'-fluoroadenosine
  modified_base 32: mod_base = OTHER; note = 2'-fluorocytosine
  modified_base 34: mod_base = OTHER; note = Uridine phosphorothiorate
  modified_base 38: mod_base = OTHER; note = 2'-Omethyladenosine
  modified_base 39: mod_base = OTHER; note = Uridine phosphorothiorate
  modified_base 40: mod_base = OTHER; note = 2'-Omethyluridine
  modified_base 43: mod_base = OTHER; note = 2'-fluoroadenosine phosphorothiorate
  modified_base 44: mod_base = OTHER; note = 2'-fluoroadenosine
  modified_base 45: mod_base = OTHER; note = Guanosine phosphorothiorate
  modified_base 46: mod_base = OTHER; note = 2'-Omethylguanosine
  modified_base 50: mod_base = OTHER; note = 2'-Omethylcytosine
  modified_base 52: mod_base = OTHER; note = 2'-fluoroguanosine phosphorothiorate
  modified_base 53: mod_base = OTHER; note = 2'-fluoroguanosine phosphorothiorate
  modified_base 54: mod_base = OTHER; note = 2'-Omethyluridine
  modified_base 55: mod_base = OTHER; note = Uridine phosphorothiorate
  modified_base 56: mod_base = OTHER; note = 2'-fluorocytosine
  modified_base 57: mod_base = OTHER; note = 2'-fluoroguanosine
  modified_base 58: mod_base = OTHER; note = Adenosine phosphorothiorate
  modified_base 59: mod_base = OTHER; note = 2'-fluoroguanosine
  modified_base 60: mod_base = OTHER; note = 2'-fluorouridine
  modified_base 63: mod_base = OTHER; note = 2'-fluorocytosine
  modified_base 65: mod_base = OTHER; note = 2'-Omethylguanosine
  modified_base 68: mod_base = OTHER; note = Guanosine phosphorothiorate
  modified_base 69: mod_base = OTHER; note = 2'-Omethyladenosine phosphorothiorate
  modified_base 72: mod_base = OTHER; note = 2'-fluorocytosine
  modified_base 76: mod_base = OTHER; note = 2'-Omethyladenosine

SEQ ID NO: 6163 - RNA, 74 nt, synthetic construct; identical to SEQ ID NO: 3293
  source 1..74: mol_type = other RNA
  modified_base 1: mod_base = OTHER; note = 2'-fluoroadenosine
  modified_base 3: mod_base = OTHER; note = 2'-fluorocytosine phosphorothiorate
  modified_base 4: mod_base = OTHER; note = Uridine phosphorothiorate
  modified_base 24: mod_base = OTHER; note = Guanosine phosphorothiorate
  modified_base 28: mod_base = OTHER; note = 2'-Omethylguanosine
  modified_base 34: mod_base = OTHER; note = 2'-fluoroadenosine
  modified_base 41: mod_base = OTHER; note = 2'-Omethyladenosine
  modified_base 58: mod_base = OTHER; note = 2'-Omethyluridine
  modified_base 73: mod_base = OTHER; note = 2'-Omethylcytosine phosphorothiorate

SEQ ID NO: 6164 - RNA, 74 nt, synthetic construct; identical to SEQ ID NO: 3293
  source 1..74: mol_type = other RNA
  modified_base 1: mod_base = OTHER; note = Adenosine phosphorothiorate
  modified_base 2: mod_base = OTHER; note = Cytosine phosphorothiorate
  modified_base 3: mod_base = OTHER; note = Cytosine phosphorothiorate
  modified_base 4: mod_base = OTHER; note = Uridine phosphorothiorate
  modified_base 7: mod_base = OTHER; note = 2'-Omethyluridine
  modified_base 8: mod_base = OTHER; note = Guanosine phosphorothiorate
  modified_base 9: mod_base = OTHER; note = 2'-Omethylguanosine phosphorothiorate
  modified_base 11: mod_base = OTHER; note = 2'-fluoroguanosine
  modified_base 24: mod_base = OTHER; note = 2'-fluoroguanosine
  modified_base 26: mod_base = OTHER; note = 2'-fluorocytosine
  modified_base 35: mod_base = OTHER; note = 2'-Omethylguanosine
  modified_base 42: mod_base = OTHER; note = Adenosine phosphorothiorate
  modified_base 43: mod_base = OTHER; note = 2'-fluoroguanosine
  modified_base 46: mod_base = OTHER; note = 2'-fluorouridine phosphorothiorate
  modified_base 48: mod_base = OTHER; note = 2'-fluorocytosine
  modified_base 51: mod_base = OTHER; note = 2'-fluoroguanosine
  modified_base 60: mod_base = OTHER; note = 2'-fluoroadenosine
  modified_base 65: mod_base = OTHER; note = Guanosine phosphorothiorate
  modified_base 73: mod_base = OTHER; note = Cytosine phosphorothiorate
  modified_base 74: mod_base = OTHER; note = 2'-Omethyladenosine

SEQ ID NO: 6165 - RNA, 76 nt, synthetic construct; identical to SEQ ID NO: 625
  source 1..76: mol_type = other RNA
  modified_base 44: mod_base = OTHER; note = 2'-O-(2-Methoxyethyl) adenosine
  modified_base 45: mod_base = OTHER; note = 2'-O-(2-Methoxyethyl) guanosine
  modified_base 46: mod_base = OTHER; note = 2'-O-(2-Methoxyethyl) guanosine
  modified_base 47: mod_base = OTHER; note = 2'-O-(2-Methoxyethyl) thymine
  modified_base 48: mod_base = OTHER; note = 2'-O-(2-Methoxyethyl) thymine

SEQ ID NO: 6166 - RNA, 76 nt, synthetic construct; identical to SEQ ID NO: 625
  source 1..76: mol_type = other RNA
  modified_base 1: mod_base = OTHER; note = 2'-Omethylguanosine
  modified_base 2: mod_base = OTHER; note = 2'-Omethylguanosine
  modified_base 33: mod_base = OTHER; note = 2'-fluorouridine
  modified_base 37: mod_base = OTHER; note = Adenosine phosphorothiorate
  modified_base 52: mod_base = OTHER; note = 2'-Omethylguanosine
  modified_base 57: mod_base = OTHER; note = 2'-Omethylguanosine
  modified_base 62: mod_base = OTHER; note = 2'-Omethylcytosine
  modified_base 73: mod_base = OTHER; note = 2'-Omethylguanosine
  modified_base 75: mod_base = OTHER; note = 2'-fluorocytosine phosphorothiorate

SEQ ID NO: 6167 - RNA, 76 nt, synthetic construct; identical to SEQ ID NO: 3295
  source 1..76: mol_type = other RNA
  modified_base 1: mod_base = OTHER; note = 2'-Omethylcytosine
  modified_base 2: mod_base = OTHER; note = 2'-Omethylcytosine phosphorothiorate
  modified_base 4: mod_base = OTHER; note = 2'-fluorouridine
  modified_base 14: mod_base = OTHER; note = 2'-fluoroadenosine phosphorothiorate
  modified_base 16: mod_base = OTHER; note = 2'-fluorouridine phosphorothiorate
  modified_base 28: mod_base = OTHER; note = Adenosine phosphorothiorate
  modified_base 35: mod_base = OTHER; note = 2'-Omethyluridine phosphorothiorate
  modified_base 52: mod_base = OTHER; note = 2'-fluoroguanosine phosphorothiorate
  modified_base 54: mod_base = OTHER; note = 2'-Omethyluridine
  modified_base 74: mod_base = OTHER; note = Cytosine phosphorothiorate
  modified_base 75: mod_base = OTHER; note = 2'-Omethylcytosine phosphorothiorate
  modified_base 76: mod_base = OTHER; note = 2'-fluoroadenosine

SEQ ID NO: 6168 - RNA, 76 nt, synthetic construct; identical to SEQ ID NO: 625
  source 1..76: mol_type = other RNA
  modified_base 2: mod_base = OTHER; note = Guanosine phosphorothiorate
  modified_base 4: mod_base = OTHER; note = Uridine phosphorothiorate
  modified_base 6: mod_base = OTHER; note = 2'-fluorocytosine
  modified_base 10: mod_base = OTHER; note = 2'-Omethylguanosine
  modified_base 12: mod_base = OTHER; note = 2'-Omethylguanosine phosphorothiorate
  modified_base 16: mod_base = OTHER; note = 2'-Omethyluridine
  modified_base 18: mod_base = OTHER; note = 2'-Omethylguanosine
  modified_base 20: mod_base = OTHER; note = Uridine phosphorothiorate
  modified_base 21: mod_base = OTHER; note = Adenosine phosphorothiorate
  modified_base 22: mod_base = OTHER; note = 2'-fluoroguanosine
  modified_base 23: mod_base = OTHER; note = 2'-Omethylcytosine
  modified_base 26: mod_base = OTHER; note = 2'-Omethyladenosine
  modified_base 28: mod_base = OTHER; note = 2'-Omethyluridine
  modified_base 29: mod_base = OTHER; note = Guanosine phosphorothiorate
  modified_base 34: mod_base = OTHER; note = Uridine phosphorothiorate
  modified_base 40: mod_base = OTHER; note = Uridine phosphorothiorate
  modified_base 41: mod_base = OTHER; note = 2'-Omethylcytosine
  modified_base 43: mod_base = OTHER; note = 2'-fluoroadenosine
  modified_base 46: mod_base = OTHER; note = Guanosine phosphorothiorate
  modified_base 47: mod_base = OTHER; note = 2'-fluorouridine phosphorothiorate
  modified_base 48: mod_base = OTHER; note = 2'-Omethyluridine
  modified_base 51: mod_base = OTHER; note = Guanosine phosphorothiorate
  modified_base 52: mod_base = OTHER; note = 2'-fluoroguanosine
  modified_base 56: mod_base = OTHER; note = Cytosine phosphorothiorate
  modified_base 58: mod_base = OTHER; note = 2'-fluoroadenosine
  modified_base 60: mod_base = OTHER; note = Uridine phosphorothiorate
  modified_base 61: mod_base = OTHER; note = 2'-fluorocytosine
  modified_base 64: mod_base = OTHER; note = 2'-fluoroguanosine
  modified_base 66: mod_base = OTHER; note = Cytosine phosphorothiorate
  modified_base 67: mod_base = OTHER; note = 2'-fluoroguanosine
  modified_base 69: mod_base = OTHER; note = 2'-Omethyladenosine
  modified_base 75: mod_base = OTHER; note = 2'-Omethylcytosine

SEQ ID NO: 6169 - RNA, 75 nt, synthetic construct; identical to SEQ ID NO: 3311
  source 1..75: mol_type = other RNA
  modified_base 1: mod_base = OTHER; note = 2'-Omethylguanosine phosphorothiorate
  modified_base 2: mod_base = OTHER; note = 2'-Omethylguanosine
  modified_base 5: mod_base = OTHER; note = 2'-fluorocytosine phosphorothiorate
  modified_base 11: mod_base = OTHER; note = Uridine phosphorothiorate
  modified_base 20: mod_base = OTHER; note = 2'-fluoroadenosine
  modified_base 23: mod_base = OTHER; note = 2'-fluorocytosine
  modified_base 34: mod_base = OTHER; note = 2'-fluorocytosine phosphorothiorate
  modified_base 41: mod_base = OTHER; note = 2'-Omethylcytosine phosphorothiorate
  modified_base 44: mod_base = OTHER; note = 2'-fluorocytosine
  modified_base 55: mod_base = OTHER; note = 2'-Omethylcytosine
  modified_base 59: mod_base = OTHER; note = Uridine phosphorothiorate
  modified_base 60: mod_base = OTHER; note = Cytosine phosphorothiorate
  modified_base 62: mod_base = OTHER; note = Cytosine phosphorothiorate
  modified_base 66: mod_base = OTHER; note = 2'-fluoroguanosine
  modified_base 69: mod_base = OTHER; note = 2'-fluoroadenosine phosphorothiorate

SEQ ID NO: 6170 - DNA, 76 bp, synthetic construct; identical to SEQ ID NO: 1924
  source 1..76: mol_type = other DNA
  modified_base 1: mod_base = OTHER; note = 2'-Omethylguanosine
  modified_base 2: mod_base = OTHER; note = Guanosine phosphorothiorate
  modified_base 3: mod_base = OTHER; note = 2'-fluorocytosine phosphorothiorate
  modified_base 5: mod_base = OTHER; note = 2'-Omethylcytosine
  modified_base 9: mod_base = OTHER; note = 2'-fluoroguanosine phosphorothiorate
  modified_base 10: mod_base = OTHER; note = deoxyguanosine phosphorothiorate
  modified_base 11: mod_base = OTHER; note = 2'-fluorocytosine
  modified_base 12: mod_base = OTHER; note = 2'-fluoroguanosine phosphorothiorate
  modified_base 14: mod_base = OTHER; note = Adenosine phosphorothiorate
  modified_base 19: mod_base = OTHER; note = 2'-O-(2-Methoxyethyl) adenosine
  modified_base 20: mod_base = OTHER; note = Uridine phosphorothiorate
  modified_base 21: mod_base = OTHER; note = 2'-Omethyladenosine phosphorothiorate
  modified_base 22: mod_base = OTHER; note = Guanosine phosphorothiorate
  modified_base 24: mod_base = OTHER; note = Guanosine phosphorothiorate
  modified_base 25: mod_base = OTHER; note = 2'-O-(2-Methoxyethyl) 5-methylcytosine phosphorothiorate
  modified_base 27: mod_base = OTHER; note = 2'-O-(2-Methoxyethyl) thymine
  modified_base 30: mod_base = OTHER; note = 2'-O-(2-Methoxyethyl) guanosine
  modified_base 32: mod_base = OTHER; note = Cytosine phosphorothiorate
  modified_base 33: mod_base = OTHER; note = 2'-fluorouridine
  modified_base 38: mod_base = OTHER; note = Adenosine phosphorothiorate
  modified_base 39: mod_base = OTHER; note = 2'-fluorouridine
  modified_base 40: mod_base = OTHER; note = 2'-Omethyluridine phosphorothiorate
  modified_base 42: mod_base = OTHER; note = Adenosine phosphorothiorate
  modified_base 43: mod_base = OTHER; note = 2'-fluoroadenosine phosphorothiorate
  modified_base 44: mod_base = OTHER; note = Adenosine phosphorothiorate
  modified_base 45: mod_base = OTHER; note = 2'-O-(2-Methoxyethyl) guanosine phosphorothiorate
  modified_base 46: mod_base = OTHER; note = Guanosine phosphorothiorate
  modified_base 48: mod_base = OTHER; note = Uridine phosphorothiorate
  modified_base 49: mod_base = OTHER; note = 2'-O-(2-Methoxyethyl) 5-methylcytosine
  modified_base 51: mod_base = OTHER; note = Guanosine phosphorothiorate
  modified_base 52: mod_base = OTHER; note = 2'-Omethylguanosine
  modified_base 54: mod_base = OTHER; note = Uridine phosphorothiorate
  modified_base 58: mod_base = OTHER; note = Adenosine phosphorothiorate
  modified_base 60: mod_base = OTHER; note = Uridine phosphorothiorate
  modified_base 61: mod_base = OTHER; note = 2'-Omethylcytosine
  modified_base 62: mod_base = OTHER; note = 2'-fluorocytosine phosphorothiorate
  modified_base 65: mod_base = OTHER; note = 2'-fluoroguanosine phosphorothiorate
  modified_base 66: mod_base = OTHER; note = 2'-O-(2-Methoxyethyl) 5-methylcytosine phosphorothiorate
  modified_base 75: mod_base = OTHER; note = Cytosine phosphorothiorate
  modified_base 76: mod_base = OTHER; note = 2'-fluoroadenosine
  misc_feature 1..9: note = RNA
  misc_feature 10: note = DNA
  misc_feature 11..12: note = RNA
  misc_feature 13: note = DNA
  misc_feature 14..40: note = RNA
  misc_feature 41: note = DNA
  misc_feature 42..71: note = RNA
  misc_feature 72: note = DNA
  misc_feature 73..76: note = RNA

SEQ ID NO: 6171 - RNA, 75 nt, synthetic construct; identical to SEQ ID NO: 1045
  source 1..75: mol_type = other RNA
  modified_base 2: mod_base = OTHER; note = 2'-Omethylguanosine phosphorothiorate
  modified_base 12: mod_base = OTHER; note = Guanosine phosphorothiorate
  modified_base 14: mod_base = OTHER; note = Adenosine phosphorothiorate
  modified_base 16: mod_base = OTHER; note = 2'-fluorouridine
  modified_base 23: mod_base = OTHER; note = 2'-fluorocytosine
  modified_base 25: mod_base = OTHER; note = 2'-fluorocytosine
  modified_base 31: mod_base = OTHER; note = 2'-fluoroadenosine phosphorothiorate
  modified_base 36: mod_base = OTHER; note = 2'-fluoroadenosine
  modified_base 44: mod_base = OTHER; note = 2'-fluorocytosine
  modified_base 55: mod_base = OTHER; note = 2'-fluorocytosine phosphorothiorate
  modified_base 64: mod_base = OTHER; note = Guanosine phosphorothiorate
  modified_base 65: mod_base = OTHER; note = Uridine phosphorothiorate
  modified_base 73: mod_base = OTHER; note = Cytosine phosphorothiorate
  modified_base 74: mod_base = OTHER; note = 2'-Omethylcytosine

SEQ ID NO: 6172 - RNA, 76 nt, synthetic construct; identical to SEQ ID NO: 3329
  source 1..76: mol_type = other RNA
  modified_base 1: mod_base = OTHER; note = 2'-Omethylguanosine phosphorothiorate
  modified_base 2: mod_base = OTHER; note = 2'-Omethylguanosine phosphorothiorate
  modified_base 74: mod_base = OTHER; note = Cytosine phosphorothiorate
  modified_base 75: mod_base = OTHER; note = 2'-Omethylcytosine

SEQ ID NO: 6173 - RNA, 76 nt, synthetic construct; identical to SEQ ID NO: 625
  source 1..76: mol_type = other RNA
  modified_base 1: mod_base = OTHER; note = 2'-Omethylguanosine phosphorothiorate
  modified_base 2: mod_base = OTHER; note = 2'-Omethylguanosine
  modified_base 3: mod_base = OTHER; note = 2'-Omethylcytosine
  modified_base 4: mod_base = OTHER; note = 2'-Omethyluridine
  modified_base 5: mod_base = OTHER; note = 2'-Omethylcytosine
  modified_base 6: mod_base = OTHER; note = 2'-Omethylcytosine
  modified_base 10: mod_base = OTHER; note = 2'-Omethylguanosine
  modified_base 11: mod_base = OTHER; note = 2'-Omethylcytosine
  modified_base 12: mod_base = OTHER; note = 2'-Omethylguanosine
  modified_base 13: mod_base = OTHER; note = 2'-Omethylcytosine
  modified_base 14: mod_base = OTHER; note = 2'-Omethyladenosine
  modified_base 15: mod_base = OTHER; note = 2'-Omethyladenosine
  modified_base 16: mod_base = OTHER; note = 2'-Omethyluridine
  modified_base 17: mod_base = OTHER; note = 2'-Omethylguanosine
  modified_base 18: mod_base = OTHER; note = 2'-Omethylguanosine
  modified_base 19: mod_base = OTHER; note = 2'-Omethyladenosine
  modified_base 20: mod_base = OTHER; note = 2'-Omethyluridine
  modified_base 22: mod_base = OTHER; note = 2'-Omethylguanosine
  modified_base 23: mod_base = OTHER; note = 2'-Omethylcytosine
  modified_base 24: mod_base = OTHER; note = 2'-Omethylguanosine
  modified_base 25: mod_base = OTHER; note = 2'-Omethylcytosine
  modified_base 44: mod_base = OTHER; note = 2'-Omethyladenosine
  modified_base 45: mod_base = OTHER; note = 2'-Omethylguanosine
  modified_base 46: mod_base = OTHER; note = 2'-Omethylguanosine
  modified_base 49: mod_base = OTHER; note = 2'-Omethylcytosine
  modified_base 50: mod_base = OTHER; note = 2'-Omethylcytosine
  modified_base 51: mod_base = OTHER; note = 2'-Omethylguanosine
  modified_base 52: mod_base = OTHER; note = 2'-Omethylguanosine
  modified_base 53: mod_base = OTHER; note = 2'-Omethylguanosine
  modified_base 61: mod_base = OTHER; note = 2'-Omethylcytosine
  modified_base 62: mod_base = OTHER; note = 2'-Omethylcytosine
  modified_base 63: mod_base = OTHER; note = 2'-fluorocytosine
  modified_base 64: mod_base = OTHER; note = 2'-Omethylguanosine
  modified_base 65: mod_base = OTHER; note = 2'-Omethylguanosine
  modified_base 66: mod_base = OTHER; note = 2'-Omethylcytosine
  modified_base 67: mod_base = OTHER; note = 2'-Omethylguanosine
  modified_base 68: mod_base = OTHER; note = 2'-Omethylguanosine
  modified_base 69: mod_base = OTHER; note = 2'-Omethyladenosine
  modified_base 71: mod_base = OTHER; note = 2'-Omethyluridine
  modified_base 72: mod_base = OTHER; note = 2'-Omethylcytosine

SEQ ID NO: 6174 - RNA, 76 nt, synthetic construct; identical to SEQ ID NO: 625
  source 1..76: mol_type = other RNA
  modified_base 2: mod_base = OTHER; note = Guanosine phosphorothiorate
  modified_base 5: mod_base = OTHER; note = 2'-Omethylcytosine
  modified_base 6: mod_base = OTHER; note = 2'-Omethylcytosine phosphorothiorate
  modified_base 15: mod_base = OTHER; note = 2'-fluoroadenosine
  modified_base 16: mod_base = OTHER; note = 2'-Omethyluridine
  modified_base 18: mod_base = OTHER; note = 2'-Omethylguanosine
  modified_base 25: mod_base = OTHER; note = 2'-Omethylcytosine
  modified_base 26: mod_base = OTHER; note = 2'-fluoroadenosine phosphorothiorate
  modified_base 27: mod_base = OTHER; note = 2'-fluorouridine
  modified_base 31: mod_base = OTHER; note = 2'-fluoroadenosine
  modified_base 33: mod_base = OTHER; note = 2'-fluorouridine
  modified_base 34: mod_base = OTHER; note = 2'-fluorouridine
  modified_base 36: mod_base = OTHER; note = Adenosine phosphorothiorate
  modified_base 37: mod_base = OTHER; note = Adenosine phosphorothiorate
  modified_base 38: mod_base = OTHER; note = 2'-Omethyladenosine
  modified_base 39: mod_base = OTHER; note = Uridine phosphorothiorate
  modified_base 40: mod_base = OTHER; note = 2'-Omethyluridine
  modified_base 43: mod_base = OTHER; note = 2'-Omethyladenosine
  modified_base 44: mod_base = OTHER; note = 2'-Omethyladenosine
  modified_base 46: mod_base = OTHER; note = 2'-fluoroguanosine
  modified_base 47: mod_base = OTHER; note = 2'-fluorouridine phosphorothiorate
  modified_base 48: mod_base = OTHER; note = 2'-fluorouridine
  modified_base 55: mod_base = OTHER; note = Uridine phosphorothiorate
  modified_base 57: mod_base = OTHER; note = 2'-fluoroguanosine
  modified_base 59: mod_base = OTHER; note = 2'-Omethylguanosine
  modified_base 61: mod_base = OTHER; note = 2'-fluorocytosine phosphorothiorate
  modified_base 62: mod_base = OTHER; note = 2'-Omethylcytosine phosphorothiorate
  modified_base 65: mod_base = OTHER; note = Guanosine phosphorothiorate
  modified_base 66: mod_base = OTHER; note = 2'-Omethylcytosine phosphorothiorate
  modified_base 68: mod_base = OTHER; note = 2'-Omethylguanosine
  modified_base 70: mod_base = OTHER; note = 2'-Omethylguanosine
  modified_base 74: mod_base = OTHER; note = 2'-fluorocytosine

SEQ ID NO: 6175 - RNA, 74 nt, synthetic construct; identical to SEQ ID NO: 3293
  source 1..74: mol_type = other RNA

SEQ ID NO: 6176 - RNA, 86 nt, synthetic construct; identical to SEQ ID NO: 3290
  source 1..86: mol_type = other RNA
  modified_base 30: mod_base = OTHER; note = Guanosine phosphorothiorate

SEQ ID NO: 6177 - RNA, 77 nt, synthetic construct
  source 1..77: mol_type = other RNA
gtcctcgtggcgcaatggactagcgcaccggacttcaaattcggaggttgtgggttcgagtcccaccgaggacgcca

SEQ ID NO: 6178 - RNA, 75 nt, synthetic construct; identical to SEQ ID NO: 3306
  source 1..75: mol_type = other RNA
  modified_base 1: mod_base = OTHER; note = 2'-Omethylguanosine
  modified_base 10: mod_base = OTHER; note = 2'-Omethylguanosine
  modified_base 13: mod_base = OTHER; note = 2'-Omethylcytosine
  modified_base 16: mod_base = OTHER; note = Cytosine phosphorothiorate
  modified_base 17: mod_base = OTHER; note = Guanosine phosphorothiorate
  modified_base 18: mod_base = OTHER; note = 2'-Omethylguanosine phosphorothiorate
  modified_base 19: mod_base = OTHER; note = Uridine phosphorothiorate
  modified_base 24: mod_base = OTHER; note = 2'-Omethylcytosine
  modified_base 28: mod_base = OTHER; note = 2'-Omethyluridine
  modified_base 32: mod_base = OTHER; note = 2'-fluorouridine
  modified_base 34: mod_base = OTHER; note = Uridine phosphorothiorate
  modified_base 36: mod_base = OTHER; note = Guanosine phosphorothiorate
  modified_base 37: mod_base = OTHER; note = Adenosine phosphorothiorate
  modified_base 40: mod_base = OTHER; note = 2'-fluoroadenosine
  modified_base 41: mod_base = OTHER; note = Guanosine phosphorothiorate
  modified_base 42: mod_base = OTHER; note = 2'-Omethyladenosine
  modified_base 43: mod_base = OTHER; note = 2'-fluoroadenosine
  modified_base 45: mod_base = OTHER; note = Guanosine phosphorothiorate
  modified_base 49: mod_base = OTHER; note = 2'-Omethylcytosine
  modified_base 51: mod_base = OTHER; note = 2'-Omethyluridine
  modified_base 53: mod_base = OTHER; note = Uridine phosphorothiorate
  modified_base 54: mod_base = OTHER; note = Uridine phosphorothiorate
  modified_base 55: mod_base = OTHER; note = 2'-Omethylcytosine
  modified_base 56: mod_base = OTHER; note = Adenosine phosphorothiorate
  modified_base 57: mod_base = OTHER; note = Adenosine phosphorothiorate
  modified_base 61: mod_base = OTHER; note = 2'-Omethyladenosine
  modified_base 62: mod_base = OTHER; note = 2'-fluorocytosine
  modified_base 64: mod_base = OTHER; note = 2'-Omethyluridine
  modified_base 70: mod_base = OTHER; note = 2'-Omethyluridine
  modified_base 72: mod_base = OTHER; note = 2'-Omethyladenosine

SEQ ID NO: 6179 - RNA, 85 nt, synthetic construct; identical to SEQ ID NO: 3317
  source 1..85: mol_type = other RNA
  modified_base 1: mod_base = OTHER; note = 2'-Omethylguanosine phosphorothiorate
  modified_base 2: mod_base = OTHER; note = 2'-Omethylcytosine
  modified_base 3: mod_base = OTHER; note = 2'-Omethyluridine phosphorothiorate
  modified_base 10: mod_base = OTHER; note = 2'-fluoroguanosine
  modified_base 11: mod_base = OTHER; note = 2'-fluorocytosine
  modified_base 12: mod_base = OTHER; note = 2'-fluorocytosine phosphorothiorate
  modified_base 17: mod_base = OTHER; note = Guanosine phosphorothiorate
  modified_base 20: mod_base = OTHER; note = 2'-Omethyluridine phosphorothiorate
  modified_base 24: mod_base = OTHER; note = 2'-Omethylguanosine phosphorothiorate
  modified_base 28: mod_base = OTHER; note = Uridine phosphorothiorate
  modified_base 33: mod_base = OTHER; note = 2'-fluorouridine
  modified_base 34: mod_base = OTHER; note = 2'-fluorocytosine
  modified_base 38: mod_base = OTHER; note = 2'-Omethyladenosine
  modified_base 44: mod_base = OTHER; note = 2'-Omethyluridine
  modified_base 46: mod_base = OTHER; note = 2'-Omethylguanosine
  modified_base 54: mod_base = OTHER; note = 2'-Omethylcytosine
  modified_base 56: mod_base = OTHER; note = 2'-Omethylguanosine
  modified_base 57: mod_base = OTHER; note = 2'-fluorocytosine
  modified_base 59: mod_base = OTHER; note = 2'-Omethylcytosine
  modified_base 61: mod_base = OTHER; note = 2'-Omethylguanosine
  modified_base 72: mod_base = OTHER; note = 2'-fluorouridine
  modified_base 80: mod_base = OTHER; note = 2'-fluoroguanosine
  modified_base 82: mod_base = OTHER; note = 2'-fluoroguanosine
  modified_base 83: mod_base = OTHER; note = Cytosine phosphorothiorate

SEQ ID NO: 6180 - RNA, 76 nt, synthetic construct; identical to SEQ ID NO: 3316
  source 1..76: mol_type = other RNA
  modified_base 1: mod_base = OTHER; note = 2'-Omethyladenosine
  modified_base 2: mod_base = OTHER; note = 2'-Omethylcytosine
  modified_base 3: mod_base = OTHER; note = 2'-Omethylcytosine
  modified_base 4: mod_base = OTHER; note = 2'-Omethyladenosine
  modified_base 5: mod_base = OTHER; note = 2'-Omethyladenosine
  modified_base 6: mod_base = OTHER; note = 2'-Omethylcytosine
  modified_base 14: mod_base = OTHER; note = 2'-Omethyladenosine
  modified_base 15: mod_base = OTHER; note = 2'-Omethyladenosine
  modified_base 16: mod_base = OTHER; note = 2'-Omethyluridine
  modified_base 17: mod_base = OTHER; note = 2'-Omethylguanosine
  modified_base 18: mod_base = OTHER; note = 2'-Omethylguanosine
  modified_base 20: mod_base = OTHER; note = 2'-Omethyluridine
  modified_base 25: mod_base = OTHER; note = 2'-Omethylcytosine
  modified_base 41: mod_base = OTHER; note = 2'-Omethylcytosine
  modified_base 42: mod_base = OTHER; note = 2'-Omethyladenosine
  modified_base 43: mod_base = OTHER; note = 2'-Omethyladenosine
  modified_base 44: mod_base = OTHER; note = 2'-Omethyladenosine
  modified_base 49: mod_base = OTHER; note = 2'-Omethylcytosine
  modified_base 50: mod_base = OTHER; note = 2'-Omethylcytosine
  modified_base 52: mod_base = OTHER; note = 2'-Omethylguanosine
  modified_base 54: mod_base = OTHER; note = 2'-Omethyluridine
  modified_base 55: mod_base = OTHER; note = Uridine phosphorothiorate
  modified_base 56: mod_base = OTHER; note = 2'-Omethylcytosine
  modified_base 57: mod_base = OTHER; note = 2'-fluoroguanosine
  modified_base 59: mod_base = OTHER; note = 2'-Omethylguanosine
  modified_base 61: mod_base = OTHER; note = 2'-Omethylcytosine
  modified_base 62: mod_base = OTHER; note = 2'-Omethylcytosine
  modified_base 63: mod_base = OTHER; note = 2'-fluorocytosine
  modified_base 64: mod_base = OTHER; note = 2'-Omethylguanosine
  modified_base 65: mod_base = OTHER; note = 2'-Omethylguanosine
  modified_base 73: mod_base = OTHER; note = 2'-Omethylguanosine

SEQ ID NO: 6181 - RNA, 76 nt, synthetic construct; identical to SEQ ID NO: 3490
  source 1..76: mol_type = other RNA
  modified_base 1: mod_base = OTHER; note = 2'-Omethylguanosine
  modified_base 2: mod_base = OTHER; note = 2'-Omethylguanosine
  modified_base 3: mod_base = OTHER; note = 2'-Omethylcytosine
  modified_base 4: mod_base = OTHER; note = 2'-Omethyluridine
  modified_base 5: mod_base = OTHER; note = 2'-Omethylcytosine
  modified_base 6: mod_base = OTHER; note = 2'-Omethylcytosine
  modified_base 14: mod_base = OTHER; note = 2'-Omethyladenosine
  modified_base 17: mod_base = OTHER; note = 2'-Omethylguanosine
  modified_base 18: mod_base = OTHER; note = 2'-Omethylguanosine
  modified_base 20: mod_base = OTHER; note = 2'-Omethyluridine
  modified_base 22: mod_base = OTHER; note = 2'-Omethylguanosine
  modified_base 25: mod_base = OTHER; note = 2'-Omethylcytosine
  modified_base 27: mod_base = OTHER; note = 2'-Omethyluridine
  modified_base 33: mod_base = OTHER; note = 2'-fluorouridine
  modified_base 71: mod_base = OTHER; note = 2'-Omethyluridine
  modified_base 73: mod_base = OTHER; note = 2'-Omethylguanosine

SEQ ID NO: 6182 - RNA, 75 nt, synthetic construct; identical to SEQ ID NO: 3306
  source 1..75: mol_type = other RNA
  modified_base 1: mod_base = OTHER; note = 2'-Omethylguanosine phosphorothiorate
  modified_base 2: mod_base = OTHER; note = 2'-Omethyladenosine phosphorothiorate
  modified_base 12: mod_base = OTHER; note = Guanosine phosphorothiorate
  modified_base 21: mod_base = OTHER; note = 2'-fluoroguanosine
  modified_base 25: mod_base = OTHER; note = Guanosine phosphorothiorate
  modified_base 26: mod_base = OTHER; note = Uridine phosphorothiorate
  modified_base 44: mod_base = OTHER; note = Guanosine phosphorothiorate
  modified_base 62: mod_base = OTHER; note = 2'-fluorocytosine
  modified_base 73: mod_base = OTHER; note = Cytosine phosphorothiorate
  modified_base 74: mod_base = OTHER; note = 2'-Omethylcytosine phosphorothiorate
  modified_base 75: mod_base = OTHER; note = 2'-Omethyladenosine

SEQ ID NO: 6183 - RNA, 76 nt, synthetic construct; identical to SEQ ID NO: 625
  source 1..76: mol_type = other RNA
  modified_base 1: mod_base = OTHER; note = 2'-Omethylguanosine phosphorothiorate
  modified_base 2: mod_base = OTHER; note = 2'-Omethylguanosine
  modified_base 17: mod_base = OTHER; note = 2'-Omethylguanosine
  modified_base 33: mod_base = OTHER; note = 2'-fluorouridine
  modified_base 35: mod_base = OTHER; note = Cytosine phosphorothiorate
  modified_base 37: mod_base = OTHER; note = Adenosine phosphorothiorate
  modified_base 38: mod_base = OTHER; note = Adenosine phosphorothiorate
  modified_base 52: mod_base = OTHER; note = 2'-Omethylguanosine
  modified_base 53: mod_base = OTHER; note = 2'-fluoroguanosine
  modified_base 62: mod_base = OTHER; note = 2'-Omethylcytosine
  modified_base 63: mod_base = OTHER; note = 2'-fluorocytosine
  modified_base 65: mod_base = OTHER; note = 2'-Omethylguanosine
  modified_base 73: mod_base = OTHER; note = 2'-Omethylguanosine
  modified_base 75: mod_base = OTHER; note = 2'-fluorocytosine phosphorothiorate

SEQ ID NO: 6184 - RNA, 85 nt, synthetic construct; identical to SEQ ID NO: 3297
  source 1..85: mol_type = other RNA
  modified_base 59: mod_base = OTHER; note = 2'-Omethylcytosine
  modified_base 61: mod_base = OTHER; note = 2'-Omethylguanosine

SEQ ID NO: 6185 - RNA, 75 nt, synthetic construct; identical to SEQ ID NO: 3336
  source 1..75: mol_type = other RNA
  modified_base 1: mod_base = OTHER; note = 2'-Omethylcytosine phosphorothiorate
  modified_base 5: mod_base = OTHER; note = 2'-fluoroguanosine
  modified_base 11: mod_base = OTHER; note = 2'-Omethyluridine
  modified_base 13: mod_base = OTHER; note = 2'-fluoroadenosine
  modified_base 18: mod_base = OTHER; note = 2'-fluoroguanosine
  modified_base 21: mod_base = OTHER; note = 2'-fluoroguanosine phosphorothiorate
  modified_base 26: mod_base = OTHER; note = Uridine phosphorothiorate
  modified_base 28: mod_base = OTHER; note = 2'-Omethyladenosine
  modified_base 35: mod_base = OTHER; note = 2'-Omethyladenosine phosphorothiorate
  modified_base 36: mod_base = OTHER; note = 2'-fluoroadenosine phosphorothiorate
  modified_base 40: mod_base = OTHER; note = 2'-fluorouridine
  modified_base 42: mod_base = OTHER; note = 2'-fluoroadenosine
  modified_base 46: mod_base = OTHER; note = Uridine phosphorothiorate
  modified_base 48: mod_base = OTHER; note = 2'-fluorocytosine
  modified_base 55: mod_base = OTHER; note = 2'-fluorocytosine
  modified_base 73: mod_base = OTHER; note = Cytosine phosphorothiorate
  modified_base 74: mod_base = OTHER; note = 2'-Omethylcytosine

SEQ ID NO: 6186 - RNA, 75 nt, synthetic construct
  source 1..75: mol_type = other RNA
  modified_base 1: mod_base = OTHER; note = 2'-Omethylguanosine
  modified_base 18: mod_base = OTHER; note = 2'-Omethylguanosine
  modified_base 19: mod_base = OTHER; note = 2'-Omethylguanosine
  modified_base 50: mod_base = OTHER; note = 2'-Omethyladenosine
  modified_base 52: mod_base = OTHER; note = 2'-Omethylguanosine
  modified_base 73: mod_base = OTHER; note = 2'-Omethylguanosine
gcctgggtagctcagtcggtagagcatcagactttaaatctgagggtccagggttcaagtccctgtccaggcgcc

SEQ ID NO: 6187 - RNA, 76 nt, synthetic construct; identical to SEQ ID NO: 625
  source 1..76: mol_type = other RNA
  modified_base 12: mod_base = OTHER; note = 2'-Omethylguanosine
  modified_base 13: mod_base = OTHER; note = 2'-Omethylcytosine
  modified_base 14: mod_base = OTHER; note = Adenosine phosphorothiorate
  modified_base 15: mod_base = OTHER; note = 2'-Omethyladenosine
  modified_base 16: mod_base = OTHER; note = 2'-Omethyluridine
  modified_base 17: mod_base = OTHER; note = Guanosine phosphorothiorate
  modified_base 18: mod_base = OTHER; note = 2'-Omethylguanosine
  modified_base 19: mod_base = OTHER; note = Adenosine phosphorothiorate
  modified_base 20: mod_base = OTHER; note = 2'-fluorouridine
  modified_base 25: mod_base = OTHER; note = Cytosine phosphorothiorate
  modified_base 26: mod_base = OTHER; note = 2'-fluoroadenosine
  modified_base 28: mod_base = OTHER; note = 2'-fluorouridine
  modified_base 29: mod_base = OTHER; note = 2'-Omethylguanosine
  modified_base 31: mod_base = OTHER; note = 2'-fluoroadenosine
  modified_base 32: mod_base = OTHER; note = 2'-fluorocytosine
  modified_base 39: mod_base = OTHER; note = 2'-fluorouridine
  modified_base 41: mod_base = OTHER; note = 2'-fluorocytosine phosphorothiorate
  modified_base 47: mod_base = OTHER; note = 2'-Omethyluridine
  modified_base 48: mod_base = OTHER; note = 2'-fluorouridine
  modified_base 49: mod_base = OTHER; note = 2'-Omethylcytosine
  modified_base 50: mod_base = OTHER; note = 2'-Omethylcytosine
  modified_base 51: mod_base = OTHER; note = 2'-Omethylguanosine phosphorothiorate
  modified_base 53: mod_base = OTHER; note = 2'-fluoroguanosine
  modified_base 54: mod_base = OTHER; note = 2'-Omethyluridine
  modified_base 55: mod_base = OTHER; note = Uridine phosphorothiorate
  modified_base 56: mod_base = OTHER; note = 2'-Omethylcytosine
  modified_base 58: mod_base = OTHER; note = Adenosine phosphorothiorate
  modified_base 59: mod_base = OTHER; note = 2'-fluoroguanosine
  modified_base 63: mod_base = OTHER; note = 2'-Omethylcytosine
  modified_base 64: mod_base = OTHER; note = 2'-fluoroguanosine phosphorothiorate
  modified_base 65: mod_base = OTHER; note = 2'-Omethylguanosine
  modified_base 70: mod_base = OTHER; note = 2'-Omethylguanosine phosphorothiorate
  modified_base 71: mod_base = OTHER; note = 2'-fluorouridine
  modified_base 72: mod_base = OTHER; note = 2'-Omethylcytosine
  modified_base 73: mod_base = OTHER; note = 2'-fluoroguanosine
  modified_base 75: mod_base = OTHER; note = Cytosine phosphorothiorate
  modified_base 76: mod_base = OTHER; note = 2'-Omethyladenosine

SEQ ID NO: 6188 - RNA, 76 nt, synthetic construct; identical to SEQ ID NO: 625
  source 1..76: mol_type = other RNA
  modified_base 1: mod_base = OTHER; note = Guanosine phosphorothiorate
  modified_base 4: mod_base = OTHER; note = Uridine phosphorothiorate
  modified_base 5: mod_base = OTHER; note = 2'-Omethylcytosine
  modified_base 6: mod_base = OTHER; note = 2'-fluorocytosine phosphorothiorate
  modified_base 7: mod_base = OTHER; note = Guanosine phosphorothiorate
  modified_base 9: mod_base = OTHER; note = Guanosine phosphorothiorate
  modified_base 10: mod_base = OTHER; note = 2'-fluoroguanosine
  modified_base 11: mod_base = OTHER; note = 2'-Omethylcytosine
  modified_base 13: mod_base = OTHER; note = Cytosine phosphorothiorate
  modified_base 14: mod_base = OTHER; note = Adenosine phosphorothiorate
  modified_base 15: mod_base = OTHER; note = 2'-Omethyladenosine
  modified_base 18: mod_base = OTHER; note = Guanosine phosphorothiorate
  modified_base 20: mod_base = OTHER; note = 2'-Omethyluridine
  modified_base 23: mod_base = OTHER; note = 2'-fluorocytosine
  modified_base 24: mod_base = OTHER; note = Guanosine phosphorothiorate
  modified_base 25: mod_base = OTHER; note = 2'-fluorocytosine
  modified_base 27: mod_base = OTHER; note = 2'-fluorouridine
  modified_base 28: mod_base = OTHER; note = Uridine phosphorothiorate
  modified_base 32: mod_base = OTHER; note = 2'-fluorocytosine
  modified_base 34: mod_base = OTHER; note = 2'-Omethyluridine
  modified_base 36: mod_base = OTHER; note = Adenosine phosphorothiorate
  modified_base 38: mod_base = OTHER; note = 2'-fluoroadenosine
  modified_base 40: mod_base = OTHER; note = 2'-Omethyluridine
  modified_base 45: mod_base = OTHER; note = 2'-fluoroguanosine phosphorothiorate
  modified_base 46: mod_base = OTHER; note = 2'-fluoroguanosine
  modified_base 47: mod_base = OTHER; note = 2'-Omethyluridine
  modified_base 48: mod_base = OTHER; note = 2'-fluorouridine phosphorothiorate
  modified_base 49: mod_base = OTHER; note = 2'-fluorocytosine
  modified_base 51: mod_base = OTHER; note = 2'-Omethylguanosine
  modified_base 53: mod_base = OTHER; note = 2'-Omethylguanosine
  modified_base 57: mod_base = OTHER; note = 2'-fluoroguanosine
  modified_base 67: mod_base = OTHER; note = 2'-fluoroguanosine
  modified_base 70: mod_base = OTHER; note = Guanosine phosphorothiorate
  modified_base 71: mod_base = OTHER; note = Uridine phosphorothiorate
  modified_base 72: mod_base = OTHER; note = 2'-fluorocytosine
  modified_base 73: mod_base = OTHER; note = 2'-fluoroguanosine
  modified_base 74: mod_base = OTHER; note = 2'-Omethylcytosine

SEQ ID NO: 6189 - RNA, 76 nt, synthetic construct; identical to SEQ ID NO: 625
  source 1..76: mol_type = other RNA
  modified_base 1: mod_base = OTHER; note = 2'-Omethylguanosine phosphorothiorate
  modified_base 2: mod_base = OTHER; note = 2'-Omethylguanosine
  modified_base 73: mod_base = OTHER; note = Guanosine phosphorothiorate
  modified_base 74: mod_base = OTHER; note = Cytosine phosphorothiorate
  modified_base 75: mod_base = OTHER; note = 2'-Omethylcytosine

SEQ ID NO: 6190 - RNA, 85 nt, synthetic construct; identical to SEQ ID NO: 3297
  source 1..85: mol_type = other RNA
  modified_base 1: mod_base = OTHER; note = 2'-Omethylguanosine
  modified_base 2: mod_base = OTHER; note = 2'-Omethylcytosine
  modified_base 3: mod_base = OTHER; note = 2'-Omethyluridine
  modified_base 4: mod_base = OTHER; note = 2'-Omethylguanosine
  modified_base 5: mod_base = OTHER; note = 2'-Omethyluridine
  modified_base 6: mod_base = OTHER; note = 2'-Omethylguanosine
  modified_base 10: mod_base = OTHER; note = 2'-Omethylguanosine
  modified_base 11: mod_base = OTHER; note = 2'-Omethylcytosine
  modified_base 12: mod_base = OTHER; note = 2'-Omethylcytosine
  modified_base 13: mod_base = OTHER; note = 2'-Omethylguanosine
  modified_base 22: mod_base = OTHER; note = 2'-Omethyladenosine
  modified_base 23: mod_base = OTHER; note = 2'-Omethylguanosine
  modified_base 24: mod_base = OTHER; note = 2'-Omethylguanosine
  modified_base 25: mod_base = OTHER; note = 2'-Omethylcytosine
  modified_base 58: mod_base = OTHER; note = 2'-Omethylguanosine
  modified_base 59: mod_base = OTHER; note = 2'-Omethylcytosine
  modified_base 60: mod_base = OTHER; note = 2'-Omethyladenosine
  modified_base 61: mod_base = OTHER; note = 2'-Omethylguanosine
  modified_base 62: mod_base = OTHER; note = 2'-Omethylguanosine

SEQ ID NO: 6191 - RNA, 76 nt, synthetic construct; identical to SEQ ID NO: 3289
  source 1..76: mol_type = other RNA
  modified_base 1: mod_base = OTHER; note = 2'-Omethylguanosine
  modified_base 2: mod_base = OTHER; note = 2'-Omethylcytosine
  modified_base 3: mod_base = OTHER; note = 2'-Omethylcytosine
  modified_base 4: mod_base = OTHER; note = 2'-Omethyluridine
  modified_base 5: mod_base = OTHER; note = 2'-Omethylguanosine
  modified_base 6: mod_base = OTHER; note = 2'-Omethylguanosine
  modified_base 49: mod_base = OTHER; note = 2'-Omethylcytosine
  modified_base 50: mod_base = OTHER; note = 2'-Omethyladenosine
  modified_base 51: mod_base = OTHER; note = 2'-Omethylguanosine
  modified_base 52: mod_base = OTHER; note = 2'-Omethylguanosine
  modified_base 53: mod_base = OTHER; note = 2'-Omethylguanosine

SEQ ID NO: 6192 - RNA, 74 nt, synthetic construct; identical to SEQ ID NO: 766
  source 1..74: mol_type = other RNA
  modified_base 1: mod_base = OTHER; note = 2'-Omethylguanosine phosphorothiorate
  modified_base 2: mod_base = OTHER; note = 2'-Omethylguanosine phosphorothiorate
  modified_base 3: mod_base = OTHER; note = 2'-Omethylcytosine
  modified_base 4: mod_base = OTHER; note = 2'-Omethyluridine
  modified_base 5: mod_base = OTHER; note = 2'-Omethylcytosine
  modified_base 6: mod_base = OTHER; note = 2'-Omethylcytosine
  modified_base 16: mod_base = OTHER; note = 2'-Omethyluridine
  modified_base 17: mod_base = OTHER; note = 2'-Omethylguanosine
  modified_base 18: mod_base = OTHER; note = 2'-Omethylguanosine
  modified_base 20: mod_base = OTHER; note = 2'-Omethyluridine
  modified_base 25: mod_base = OTHER; note = 2'-Omethylcytosine
  modified_base 33: mod_base = OTHER; note = 2'-fluorouridine
  modified_base 35: mod_base = OTHER; note = Cytosine phosphorothiorate
  modified_base 37: mod_base = OTHER; note = Adenosine phosphorothiorate
  modified_base 38: mod_base = OTHER; note = Adenosine phosphorothiorate
  modified_base 41: mod_base = OTHER; note = 2'-fluorocytosine
  modified_base 42: mod_base = OTHER; note = 2'-Omethyladenosine
  modified_base 43: mod_base = OTHER; note = 2'-Omethyladenosine
  modified_base 44: mod_base = OTHER; note = 2'-fluoroadenosine
  modified_base 49: mod_base = OTHER; note = 2'-Omethylcytosine
  modified_base 50: mod_base = OTHER; note = 2'-Omethylcytosine
  modified_base 52: mod_base = OTHER; note = 2'-Omethylguanosine
  modified_base 54: mod_base = OTHER; note = 2'-Omethyluridine
  modified_base 55: mod_base = OTHER; note = Uridine phosphorothiorate
  modified_base 56: mod_base = OTHER; note = 2'-Omethylcytosine
  modified_base 57: mod_base = OTHER; note = 2'-fluoroguanosine
  modified_base 59: mod_base = OTHER; note = 2'-Omethylguanosine
  modified_base 61: mod_base = OTHER; note = 2'-Omethylcytosine
  modified_base 62: mod_base = OTHER; note = 2'-Omethylcytosine
  modified_base 63: mod_base = OTHER; note = 2'-fluorocytosine
  modified_base 64: mod_base = OTHER; note = 2'-Omethylguanosine
  modified_base 65: mod_base = OTHER; note = 2'-Omethylguanosine
  modified_base 72: mod_base = OTHER; note = Cytosine phosphorothiorate
  modified_base 73: mod_base = OTHER; note = 2'-Omethylguanosine

SEQ ID NO: 6193 - RNA, 76 nt, synthetic construct; identical to SEQ ID NO: 625
  source 1..76: mol_type = other RNA
  modified_base 1: mod_base = OTHER; note = 2'-Omethylguanosine phosphorothiorate
  modified_base 2: mod_base = OTHER; note = 2'-Omethylguanosine
  modified_base 25: mod_base = OTHER; note = 2'-Omethylcytosine
  modified_base 33: mod_base = OTHER; note = 2'-fluorouridine
  modified_base 35: mod_base = OTHER; note = Cytosine phosphorothiorate
  modified_base 37: mod_base = OTHER; note = Adenosine phosphorothiorate
  modified_base 38: mod_base = OTHER; note = Adenosine phosphorothiorate
  modified_base 52: mod_base = OTHER; note = 2'-fluoroguanosine
  modified_base 56: mod_base = OTHER; note = 2'-Omethylcytosine
  modified_base 62: mod_base = OTHER; note = 2'-Omethylcytosine
  modified_base 73: mod_base = OTHER; note = 2'-Omethylguanosine
  modified_base 75: mod_base = OTHER; note = 2'-fluorocytosine phosphorothiorate

SEQ ID NO: 6194 - RNA, 76 nt, synthetic construct; identical to SEQ ID NO: 3318
  source 1..76: mol_type = other RNA
  modified_base 1: mod_base = OTHER; note = 2'-Omethylcytosine phosphorothiorate
  modified_base 2: mod_base = OTHER; note = 2'-Omethylcytosine phosphorothiorate
  modified_base 74: mod_base = OTHER; note = Cytosine phosphorothiorate
  modified_base 75: mod_base = OTHER; note = 2'-Omethylcytosine phosphorothiorate
  modified_base 76: mod_base = OTHER; note = 2'-Omethyladenosine

SEQ ID NO: 6195 - RNA, 75 nt, synthetic construct; identical to SEQ ID NO: 1045
  source 1..75: mol_type = other RNA
  modified_base 1: mod_base = OTHER; note = 2'-Omethylguanosine phosphorothiorate
  modified_base 2: mod_base = OTHER; note = 2'-Omethylguanosine phosphorothiorate
  modified_base 5: mod_base = OTHER; note = 2'-fluorocytosine phosphorothiorate
  modified_base 6: mod_base = OTHER; note = 2'-Omethylcytosine
  modified_base 15: mod_base = OTHER; note = 2'-Omethyladenosine
  modified_base 16: mod_base = OTHER; note = 2'-Omethyluridine
  modified_base 18: mod_base = OTHER; note = Guanosine phosphorothiorate
  modified_base 38: mod_base = OTHER; note = 2'-Omethyladenosine
  modified_base 41: mod_base = OTHER; note = 2'-Omethylcytosine
  modified_base 42: mod_base = OTHER; note = Adenosine phosphorothiorate
  modified_base 58: mod_base = OTHER; note = 2'-Omethylguanosine
  modified_base 60: mod_base = OTHER; note = 2'-Omethylcytosine
  modified_base 62: mod_base = OTHER; note = 2'-fluorocytosine
  modified_base 63: mod_base = OTHER; note = 2'-fluoroguanosine phosphorothiorate
  modified_base 65: mod_base = OTHER; note = 2'-Omethyluridine
  modified_base 66: mod_base = OTHER; note = 2'-Omethylguanosine
  modified_base 72: mod_base = OTHER; note = 2'-Omethyluridine
  modified_base 73: mod_base = OTHER; note = Cytosine phosphorothiorate
  modified_base 74: mod_base = OTHER; note = 2'-Omethylcytosine phosphorothiorate

SEQ ID NO: 6196 - RNA, 76 nt, synthetic construct; identical to SEQ ID NO: 625
  source 1..76: mol_type = other RNA
  modified_base 1: mod_base = OTHER; note = 2'-fluoroguanosine
  modified_base 2: mod_base = OTHER; note = 2'-Omethylguanosine phosphorothiorate
  modified_base 6: mod_base = OTHER; note = 2'-Omethylcytosine
  modified_base 7: mod_base = OTHER; note = Guanosine phosphorothiorate
  modified_base 12: mod_base = OTHER; note = 2'-fluoroguanosine
  modified_base 14: mod_base = OTHER; note = 2'-fluoroadenosine
  modified_base 16: mod_base = OTHER; note = 2'-Omethyluridine
  modified_base 20: mod_base = OTHER; note = 2'-fluorouridine phosphorothiorate
  modified_base 23: mod_base = OTHER; note = 2'-Omethylcytosine
  modified_base 24: mod_base = OTHER; note = 2'-Omethylguanosine phosphorothiorate
  modified_base 25: mod_base = OTHER; note = 2'-fluorocytosine
  modified_base 26: mod_base = OTHER; note = 2'-fluoroadenosine
  modified_base 28: mod_base = OTHER; note = 2'-fluorouridine
  modified_base 30: mod_base = OTHER; note = Guanosine phosphorothiorate
  modified_base 31: mod_base = OTHER; note = 2'-fluoroadenosine
  modified_base 33: mod_base = OTHER; note = Uridine phosphorothiorate
  modified_base 34: mod_base = OTHER; note = 2'-fluorouridine
  modified_base 37: mod_base = OTHER; note = Adenosine phosphorothiorate
  modified_base 38: mod_base = OTHER; note = 2'-Omethyladenosine
  modified_base 43: mod_base = OTHER; note = 2'-fluoroadenosine
  modified_base 44: mod_base = OTHER; note = 2'-fluoroadenosine
  modified_base 47: mod_base = OTHER; note = 2'-fluorouridine
  modified_base 48: mod_base = OTHER; note = 2'-Omethyluridine phosphorothiorate
  modified_base 49: mod_base = OTHER; note = 2'-Omethylcytosine
  modified_base 57: mod_base = OTHER; note = Guanosine phosphorothiorate
  modified_base 62: mod_base = OTHER; note = 2'-Omethylcytosine
  modified_base 63: mod_base = OTHER; note = 2'-fluorocytosine
  modified_base 68: mod_base = OTHER; note = 2'-fluoroguanosine
  modified_base 69: mod_base = OTHER; note = 2'-fluoroadenosine
  modified_base 70: mod_base = OTHER; note = Guanosine phosphorothiorate
  modified_base 71: mod_base = OTHER; note = 2'-fluorouridine
  modified_base 72: mod_base = OTHER; note = Cytosine phosphorothiorate
  modified_base 73: mod_base = OTHER; note = 2'-fluoroguanosine
  modified_base 74: mod_base = OTHER; note = 2'-fluorocytosine
  modified_base 75: mod_base = OTHER; note = 2'-fluorocytosine

SEQ ID NO: 6197 - RNA, 76 nt, synthetic construct; identical to SEQ ID NO: 625
  source 1..76: mol_type = other RNA
  modified_base 3: mod_base = OTHER; note = 2'-fluorocytosine
  modified_base 4: mod_base = OTHER; note = 2'-fluorouridine
  modified_base 6: mod_base = OTHER; note = 2'-fluorocytosine phosphorothiorate
  modified_base 10: mod_base = OTHER; note = 2'-Omethylguanosine
  modified_base 14: mod_base = OTHER; note = Adenosine phosphorothiorate
  modified_base 15: mod_base = OTHER; note = 2'-Omethyladenosine
  modified_base 17: mod_base = OTHER; note = 2'-Omethylguanosine
  modified_base 19: mod_base = OTHER; note = Adenosine phosphorothiorate
  modified_base 20: mod_base = OTHER; note = 2'-fluorouridine
  modified_base 23: mod_base = OTHER; note = 2'-fluorocytosine phosphorothiorate
  modified_base 24: mod_base = OTHER; note = 2'-fluoroguanosine
  modified_base 26: mod_base = OTHER; note = 2'-Omethyladenosine
  modified_base 27: mod_base = OTHER; note = 2'-Omethyluridine
  modified_base 29: mod_base = OTHER; note = 2'-fluoroguanosine
  modified_base 32: mod_base = OTHER; note = 2'-fluorocytosine
  modified_base 38: mod_base = OTHER; note = 2'-fluoroadenosine
  modified_base 39: mod_base = OTHER; note = 2'-Omethyluridine
  modified_base 43: mod_base = OTHER; note = 2'-fluoroadenosine
  modified_base 45: mod_base = OTHER; note = 2'-Omethylguanosine
  modified_base 49: mod_base = OTHER; note = Cytosine phosphorothiorate
  modified_base 53: mod_base = OTHER; note = 2'-Omethylguanosine
  modified_base 54: mod_base = OTHER; note = 2'-fluorouridine
  modified_base 56: mod_base = OTHER; note = 2'-Omethylcytosine
  modified_base 57: mod_base = OTHER; note = Guanosine phosphorothiorate
  modified_base 61: mod_base = OTHER; note = Cytosine phosphorothiorate
  modified_base 63: mod_base = OTHER; note = 2'-Omethylcytosine phosphorothiorate
  modified_base 64: mod_base = OTHER; note = 2'-Omethylguanosine
  modified_base 66: mod_base = OTHER; note = 2'-Omethylcytosine
  modified_base 68: mod_base = OTHER; note = 2'-fluoroguanosine
  modified_base 70: mod_base = OTHER; note = 2'-fluoroguanosine
  modified_base 71: mod_base = OTHER; note = 2'-Omethyluridine phosphorothiorate
  modified_base 72: mod_base = OTHER; note = Cytosine phosphorothiorate
  modified_base 73: mod_base = OTHER; note = Guanosine phosphorothiorate
  modified_base 74: mod_base = OTHER; note = 2'-Omethylcytosine
  modified_base 75: mod_base = OTHER; note = Cytosine phosphorothiorate
  modified_base 76: mod_base = OTHER; note = 2'-fluoroadenosine

SEQ ID NO: 6198 - RNA, 76 nt, synthetic construct; identical to SEQ ID NO: 625
  source 1..76: mol_type = other RNA
  modified_base 1: mod_base = OTHER; note = 2'-fluoroguanosine
  modified_base 4: mod_base = OTHER; note = 2'-fluorouridine phosphorothiorate
  modified_base 6: mod_base = OTHER; note = 2'-Omethylcytosine phosphorothiorate
  modified_base 10: mod_base = OTHER; note = Guanosine phosphorothiorate
  modified_base 11: mod_base = OTHER; note = 2'-fluorocytosine
  modified_base 12: mod_base = OTHER; note = 2'-fluoroguanosine
  modified_base 20: mod_base = OTHER; note = Uridine phosphorothiorate
  modified_base 25: mod_base = OTHER; note = 2'-fluorocytosine phosphorothiorate
  modified_base 26: mod_base = OTHER; note = 2'-Omethyladenosine phosphorothiorate
  modified_base 27: mod_base = OTHER; note = 2'-Omethyluridine
  modified_base 29: mod_base = OTHER; note = 2'-fluoroguanosine
  modified_base 36: mod_base = OTHER; note = Adenosine phosphorothiorate
  modified_base 40: mod_base = OTHER; note = 2'-fluorouridine
  modified_base 41: mod_base = OTHER; note = Cytosine phosphorothiorate
  modified_base 43: mod_base = OTHER; note = 2'-fluoroadenosine
  modified_base 44: mod_base = OTHER; note = Adenosine phosphorothiorate
  modified_base 45: mod_base = OTHER; note = 2'-fluoroguanosine
  modified_base 47: mod_base = OTHER; note = Uridine phosphorothiorate
  modified_base 48: mod_base = OTHER; note = Uridine phosphorothiorate
  modified_base 49: mod_base = OTHER; note = 2'-Omethylcytosine
  modified_base 50: mod_base = OTHER; note = 2'-fluorocytosine
  modified_base 52: mod_base = OTHER; note = 2'-fluoroguanosine
  modified_base 59: mod_base = OTHER; note = Guanosine phosphorothiorate
  modified_base 60: mod_base = OTHER; note = 2'-Omethyluridine
  modified_base 64: mod_base = OTHER; note = 2'-Omethylguanosine
  modified_base 66: mod_base = OTHER; note = 2'-Omethylcytosine
  modified_base 67: mod_base = OTHER; note = 2'-fluoroguanosine
  modified_base 68: mod_base = OTHER; note = 2'-fluoroguanosine
  modified_base 71: mod_base = OTHER; note = Uridine phosphorothiorate
  modified_base 72: mod_base = OTHER; note = 2'-Omethylcytosine
  modified_base 73: mod_base = OTHER; note = 2'-Omethylguanosine
  modified_base 74: mod_base = OTHER; note = 2'-fluorocytosine
  modified_base 75: mod_base = OTHER; note = 2'-Omethylcytosine phosphorothiorate
  modified_base 76: mod_base = OTHER; note = 2'-fluoroadenosine

SEQ ID NO: 6199 - RNA, 76 nt, synthetic construct; identical to SEQ ID NO: 625
  source 1..76: mol_type = other RNA
  modified_base 1: mod_base = OTHER; note = 2'-Omethylguanosine
  modified_base 3: mod_base = OTHER; note = 2'-fluorocytosine phosphorothiorate
  modified_base 4: mod_base = OTHER; note = 2'-fluorouridine
  modified_base 8: mod_base = OTHER; note = Uridine phosphorothiorate
  modified_base 9: mod_base = OTHER; note = Guanosine phosphorothiorate
  modified_base 13: mod_base = OTHER; note = Cytosine phosphorothiorate
  modified_base 15: mod_base = OTHER; note = Adenosine phosphorothiorate
  modified_base 16: mod_base = OTHER; note = 2'-fluorouridine
  modified_base 22: mod_base = OTHER; note = 2'-Omethylguanosine
  modified_base 23: mod_base = OTHER; note = 2'-fluorocytosine phosphorothiorate
  modified_base 24: mod_base = OTHER; note = Guanosine phosphorothiorate
  modified_base 27: mod_base = OTHER; note = Uridine phosphorothiorate
  modified_base 28: mod_base = OTHER; note = 2'-Omethyluridine
  modified_base 30: mod_base = OTHER; note = Guanosine phosphorothiorate
  modified_base 33: mod_base = OTHER; note = 2'-fluorouridine
  modified_base 37: mod_base = OTHER; note = Adenosine phosphorothiorate
  modified_base 38: mod_base = OTHER; note = Adenosine phosphorothiorate
  modified_base 39: mod_base = OTHER; note = 2'-fluorouridine
  modified_base 41: mod_base = OTHER; note = Cytosine phosphorothiorate
  modified_base 42: mod_base = OTHER; note = 2'-Omethyladenosine
  modified_base 45: mod_base = OTHER; note = Guanosine phosphorothiorate
  modified_base 46: mod_base = OTHER; note = 2'-Omethylguanosine phosphorothiorate
  modified_base 47: mod_base = OTHER; note = 2'-fluorouridine
  modified_base 48: mod_base = OTHER; note = 2'-Omethyluridine
  modified_base 49: mod_base = OTHER; note = 2'-fluorocytosine
  modified_base 56: mod_base = OTHER; note = 2'-Omethylcytosine
  modified_base 60: mod_base = OTHER; note = 2'-Omethyluridine phosphorothiorate
  modified_base 64: mod_base = OTHER; note = 2'-fluoroguanosine
  modified_base 70: mod_base = OTHER; note = 2'-fluoroguanosine
  modified_base 71: mod_base = OTHER; note = 2'-fluorouridine
  modified_base 72: mod_base = OTHER; note = 2'-fluorocytosine
  modified_base 74: mod_base = OTHER; note = 2'-fluorocytosine
  modified_base 75: mod_base = OTHER; note = 2'-fluorocytosine phosphorothiorate

SEQ ID NO: 6200 - RNA, 75 nt, synthetic construct; identical to SEQ ID NO: 3299
  source 1..75: mol_type = other RNA
  modified_base 1: mod_base = OTHER; note = 2'-fluorocytosine phosphorothiorate
  modified_base 2: mod_base = OTHER; note = Cytosine phosphorothiorate
  modified_base 3: mod_base = OTHER; note = Uridine phosphorothiorate
  modified_base 14: mod_base = OTHER; note = 2'-fluoroguanosine
  modified_base 15: mod_base = OTHER; note = 2'-fluorouridine
  modified_base 21: mod_base = OTHER; note = 2'-fluoroguanosine
  modified_base 23: mod_base = OTHER; note = 2'-fluoroguanosine
  modified_base 25: mod_base = OTHER; note = 2'-Omethyladenosine phosphorothiorate
  modified_base 26: mod_base = OTHER; note = Uridine phosphorothiorate
  modified_base 30: mod_base = OTHER; note = 2'-Omethyladenosine phosphorothiorate
  modified_base 36: mod_base = OTHER; note = 2'-fluoroadenosine
  modified_base 39: mod_base = OTHER; note = 2'-fluorocytosine
  modified_base 41: mod_base = OTHER; note = 2'-fluoroguanosine
  modified_base 48: mod_base = OTHER; note = 2'-fluorocytosine
  modified_base 49: mod_base = OTHER; note = 2'-fluoroadenosine
  modified_base 63: mod_base = OTHER; note = 2'-fluorouridine
  modified_base 69: mod_base = OTHER; note = Guanosine phosphorothiorate
  modified_base 73: mod_base = OTHER; note = 2'-fluorocytosine
  modified_base 74: mod_base = OTHER; note = 2'-Omethylcytosine
